United States Patent Application Publication US 2025/0084491 A1 - sequence listing, part 14

SEQ ID NO: 254456 - DNA, 75 bp, synthetic construct
  source 1..75: mol_type = other DNA
gccggaccggggctgctggcccgcgtgctgacctcgaagtatgcagagcacaccccgctgtattgccagtcagaa

SEQ ID NO: 254457 - DNA, 75 bp, synthetic construct
  source 1..75: mol_type = other DNA
ggcgctgttaaagcatcttaatgtccttggcctaccgacaattctcttttttgacggacaaggccaggagcatcc

SEQ ID NO: 254458 - DNA, 75 bp, synthetic construct
  source 1..75: mol_type = other DNA
aagctacctacgcaatgtacttgacgtcatagcggactggccgctgaaccgggtcagcgaactgctcccatggcg

SEQ ID NO: 254459 - DNA, 75 bp, synthetic construct
  source 1..75: mol_type = other DNA
aagctacctacgcaatgtacttgacgtcatagccgactggccgatgaaccgggtcagcgaactgctcccctggcg

SEQ ID NO: 254460 - DNA, 75 bp, synthetic construct
  source 1..75: mol_type = other DNA
ttaacactcagactaagatgatagaactggtctcacgcgaaatctttgaacagaattttaacaccgcgaaagtca

SEQ ID NO: 254461 - DNA, 75 bp, synthetic construct
  source 1..75: mol_type = other DNA
aagcaagagcagattacttttctatccagagcagtaaacaaaactgtggatgactattgcatgagtaataattca

SEQ ID NO: 254462 - DNA, 75 bp, synthetic construct
  source 1..75: mol_type = other DNA
gatacagcagcctcttgatataaatggtgcacaatcatcgattgatcacttcttgcagtccaacaaatactttaa

SEQ ID NO: 254463 - DNA, 75 bp, synthetic construct
  source 1..75: mol_type = other DNA
aaggttcacactgacgacacaccggtaaaagtgctgacaccgggcagaaaaaaggcaaaaacaggacgcatctgg

SEQ ID NO: 254464 - DNA, 75 bp, synthetic construct
  source 1..75: mol_type = other DNA
ctgggtctggtggttgccgccgcagggttacagttccaggcggcgctacagcacccatacgtgctcattggcctc

SEQ ID NO: 254465 - DNA, 75 bp, synthetic construct
  source 1..75: mol_type = other DNA
cttcggctctggccatggtggtgagcggggagcgctactgtacagcctgatcgggacgtgcaaactgaatgacgt

SEQ ID NO: 254466 - DNA, 75 bp, synthetic construct
  source 1..75: mol_type = other DNA
ggatccagaaagctaccttcgccatgtgcctggcgtcatagcagactggccggtcaaccgggtcagcgaactgct

SEQ ID NO: 254467 - DNA, 75 bp, synthetic construct
  source 1..75: mol_type = other DNA
atgctgacgaaatatgcccttgtggcagtcatagtgctgtgttttacggtactgggatttacgcttctggtcggg

SEQ ID NO: 254468 - DNA, 75 bp, synthetic construct
  source 1..75: mol_type = other DNA
atgctgacgaaatatgcccttgtggcagtcatagtgctgtgttttacggttctgggatttacgcttctggtcggt

SEQ ID NO: 254469 - DNA, 75 bp, synthetic construct
  source 1..75: mol_type = other DNA
atgctgacgaaatatgcccttgtggcagtcatagtgctgtgttttacggtgctgggatttacgcttctggtcgga

SEQ ID NO: 254470 - DNA, 75 bp, synthetic construct
  source 1..75: mol_type = other DNA
acctctcgttcaggtttcaaattgctgcaggtacaaaactacgcggggatgctttctacacctcacggtttgcag

SEQ ID NO: 254471 - DNA, 75 bp, synthetic construct
  source 1..75: mol_type = other DNA
gcaacgcatgcctttgcttgagatttttatcagccaatttttgcaaagcgtcagccaattgcttaaacaaggttt

SEQ ID NO: 254472 - DNA, 75 bp, synthetic construct
  source 1..75: mol_type = other DNA
atgacacgcctgtcccggtgctgttgccaggtaataagaaaacgaagaccgggcggttgtggacgtacgttcgtg

SEQ ID NO: 254473 - DNA, 75 bp, synthetic construct
  source 1..75: mol_type = other DNA
ctcggatcatggtggtgagcgcggtgcgtcactgtacagtcttatcgggacgtgcaaattaaacggcgtggatcc

SEQ ID NO: 254474 - DNA, 75 bp, synthetic construct
  source 1..75: mol_type = other DNA
ctgggcccatgcccgccgaaaaatccacgatgttcacgtccgcaccccgtcagccctgacggaggaggcgctgaa

SEQ ID NO: 254475 - DNA, 75 bp, synthetic construct
  source 1..75: mol_type = other DNA
aattaccgtctttggcaaccgtctgctgccgaaaagcggtccgtggatggaacaggtcaaaaccgcgtttggttt

SEQ ID NO: 254476 - DNA, 75 bp, synthetic construct
  source 1..75: mol_type = other DNA
cagtcatagtgctgtgtttgacggtactgggatttacgcttctggtcggagactctctgtgtgagttcaccgtaa

SEQ ID NO: 254477 - DNA, 75 bp, synthetic construct
  source 1..75: mol_type = other DNA
acctggcagatcaaagacggttattacctttaccgtaaacagatccgcatcacgcctgaacacgcgaaaattgcc

SEQ ID NO: 254478 - DNA, 75 bp, synthetic construct
  source 1..75: mol_type = other DNA
aacgcggcaccatggaggctctgctctctacggagattacccgcacggagctgctgctgtgtaagctgatcccct

SEQ ID NO: 254479 - DNA, 75 bp, synthetic construct
  source 1..75: mol_type = other DNA
aattactgcaatggggatgcggcgatccggcgcagatgagctggctggatcaaccgccaacggtgaatctactgg

SEQ ID NO: 254480 - DNA, 75 bp, synthetic construct
  source 1..75: mol_type = other DNA
ggcggtaatgacggattgctttctgagttattgattttgggatttaataatggtcctcgagcccttagtgagaga

SEQ ID NO: 254481 - DNA, 75 bp, synthetic construct
  source 1..75: mol_type = other DNA
ccggtgtttcatacgatagtgtccattaaaaatgatggacattatttttgtagagccggaggaaacagaccagac

SEQ ID NO: 254482 - DNA, 75 bp, synthetic construct
  source 1..75: mol_type = other DNA
gaaaccagtttaaccatcgaaggtattcgtctggtggtggattgtgcccaggagcgtgtggcgcgctttgatccg

SEQ ID NO: 254483 - DNA, 75 bp, synthetic construct
  source 1..75: mol_type = other DNA
cgcgcaatcaacctgcctggcagcaacgtagtcagcaactgttaaaacgcttaaacgtacgcggcggtgaggcag

SEQ ID NO: 254484 - DNA, 75 bp, synthetic construct
  source 1..75: mol_type = other DNA
tggcggcgcgtaacgttgcgcaacgactggcggagctgcttaacgaaaagccaggcgataccgttggctaccgga

SEQ ID NO: 254485 - DNA, 75 bp, synthetic construct
  source 1..75: mol_type = other DNA
gagagaatgctaagtatgctttcagactcaggtgaagcacaatcgcaagagagtattcaggacaaaatatctcaa

SEQ ID NO: 254486 - DNA, 75 bp, synthetic construct
  source 1..75: mol_type = other DNA
attcaggggattcagttgtatgtagtttatttgaagttactgcattttctcggttagttagtgaaaaatcacctc

SEQ ID NO: 254487 - DNA, 75 bp, synthetic construct
  source 1..75: mol_type = other DNA
actggaaacaccagaagaaggggtatttgtcaaaaattcagatagttcagcagtatgcactttatttgatgttga

SEQ ID NO: 254488 - DNA, 75 bp, synthetic construct
  source 1..75: mol_type = other DNA
gctcttggtcgactcaaaacaggccagatgaacaaaacagaatctgcgtattgccagcaccttgagcagcgtaaa

SEQ ID NO: 254489 - DNA, 75 bp, synthetic construct
  source 1..75: mol_type = other DNA
gagagaatgttaagtattctttcaggatcagatgcaggtgaaacacaatcgcaagtgactcctcaggataaaata

SEQ ID NO: 254490 - DNA, 75 bp, synthetic construct
  source 1..75: mol_type = other DNA
catcttcgttcagtcgtggaatgaatgttcttcgtgagcaagttgcaaccaatgggcaaggagaaatttcattgg

SEQ ID NO: 254491 - DNA, 75 bp, synthetic construct
  source 1..75: mol_type = other DNA
tggcggcgcgtaacgttgcgcaacgactggcggaactgcttaacgaaaaaacaggtgatacggtaggctaccgga

SEQ ID NO: 254492 - DNA, 75 bp, synthetic construct
  source 1..75: mol_type = other DNA
cggcggcaaatgcaggcccgacgggtgttacagcagatgagtgatgaacggttgagggagagtgggttatgctgg

SEQ ID NO: 254493 - DNA, 75 bp, synthetic construct
  source 1..75: mol_type = other DNA
cggcggcaaatgcaggcccgacgggtgttacagcagatgagtgatgaacggttgagggagattgggttaggctgg

SEQ ID NO: 254494 - DNA, 75 bp, synthetic construct
  source 1..75: mol_type = other DNA
cggcggcaaatgcaggcccgacgggtgttacagcagatgagtgatgaacggttgagggacactgggttatgctgg

SEQ ID NO: 254495 - DNA, 75 bp, synthetic construct
  source 1..75: mol_type = other DNA
ggcgtgttggcaaatgctgcctgtctgcattcaaaattgctacaaaatccaaccataaaagtcgtttacaacata

SEQ ID NO: 254496 - DNA, 75 bp, synthetic construct
  source 1..75: mol_type = other DNA
acccgacgggtgttacagcagatgagtgatgaacggttgagggatattgggttacgcagggaggatgtggagtga

SEQ ID NO: 254497 - DNA, 75 bp, synthetic construct
  source 1..75: mol_type = other DNA
cggcggcaaatgcagacccgacgagtgttacagcagatgagtgatgagcggttgagggatattgggttacgcagg

SEQ ID NO: 254498 - DNA, 75 bp, synthetic construct
  source 1..75: mol_type = other DNA
gtatcggggcactgtacgctatcgagtctgagatccgcggcagtccggcagaagagcaactggcggtcagaaaag

SEQ ID NO: 254499 - DNA, 75 bp, synthetic construct
  source 1..75: mol_type = other DNA
tttgctgtatacaatacaattctcttggtgtgggatattttccgttttccaagcgggccccgatatacaggtaac

SEQ ID NO: 254500 - DNA, 75 bp, synthetic construct
  source 1..75: mol_type = other DNA
atggaatttcacgaaaacaaagctaaagcaccgtttattggacttgtgcaactctggcaggcagtgaggcgttgg

SEQ ID NO: 254501 - DNA, 75 bp, synthetic construct
  source 1..75: mol_type = other DNA
cggcggcaaatgcaggcccgacgggtgttacagcagatgagtgatgaacggttgagggacattgggttacgctgg

SEQ ID NO: 254502 - DNA, 75 bp, synthetic construct
  source 1..75: mol_type = other DNA
cggcggcaaatgcaggcccgacgggtgttacagcagatgagtgatgaacggttgagggaaattgggttaagctgg

SEQ ID NO: 254503 - DNA, 75 bp, synthetic construct
  source 1..75: mol_type = other DNA
cggcggcaaatgcaggcccgacgggtgttacagcagatgagtgatgaacggttgagggaaaatgggttatgctgg

SEQ ID NO: 254504 - DNA, 75 bp, synthetic construct
  source 1..75: mol_type = other DNA
atgcggatggattgggatgctggtggcacaggcggctcatgcctttcttctctggcacggtgttctgcctgacat

SEQ ID NO: 254505 - DNA, 75 bp, synthetic construct
  source 1..75: mol_type = other DNA
gaagttgccctgcaaactggtgctgaaaccgctgggtaccacgccggatgaaatcaccgctatttgccgcgacgc

SEQ ID NO: 254506 - DNA, 75 bp, synthetic construct
  source 1..75: mol_type = other DNA
tgtggtttgtaattggcagccagcatctttacggcccggagactctgcgccaggtgacgcaacatgcggaacacg

SEQ ID NO: 254507 - DNA, 75 bp, synthetic construct
  source 1..75: mol_type = other DNA
aacaagcccatgagcgtatcggctcctggatgcgtcaggcggtctctaaacaggatacccgtcatctgaaagtct

SEQ ID NO: 254508 - DNA, 75 bp, synthetic construct
  source 1..75: mol_type = other DNA
cggtgcgaagcgaggcgaggaactggcggaagcaagcggtgatttatggcgtgacgcccgctgggccatcagccg

SEQ ID NO: 254509 - DNA, 75 bp, synthetic construct
  source 1..75: mol_type = other DNA
gcacgcgccatgctcaacgaacgttaccaggactatgacgccacggcgtccggtgtgaagcggggcgaggaactg

SEQ ID NO: 254510 - DNA, 75 bp, synthetic construct
  source 1..75: mol_type = other DNA
ctcgttcggcgcggaacatggtgttcagtggtctggcgatacgaagttaaacgaggaatttataaaacgctgggg

SEQ ID NO: 254511 - DNA, 75 bp, synthetic construct
  source 1..75: mol_type = other DNA
tggcggccgaagtgatcaaagatctcgtcaataccgtgcgctcttatgacacggaaaatgagcatgatgtgtgtg

SEQ ID NO: 254512 - DNA, 75 bp, synthetic construct
  source 1..75: mol_type = other DNA
ttccgaagacccgtatacaacaacggcacctgcgtcatcatatgatttattggattttactaacggtgatgctaa

SEQ ID NO: 254513 - DNA, 75 bp, synthetic construct
  source 1..75: mol_type = other DNA
gtatcgacacggtgaaaacaccgcactccctgccgaaactgccggtggcgaatgcgctgtggaaagcgcaaccgg

SEQ ID NO: 254514 - DNA, 75 bp, synthetic construct
  source 1..75: mol_type = other DNA
tgtggtttgtcattggcagccagcatctgtatggcccggaaaccctgcgtcaggtcacccaacatgccgagcacg

SEQ ID NO: 254515 - DNA, 75 bp, synthetic construct
  source 1..75: mol_type = other DNA
gcgcgtgcgcaggtcaatgagcgttatcaggactatgacgccacggcgtctggcgtgaagcggggagaggaactg

SEQ ID NO: 254516 - DNA, 75 bp, synthetic construct
  source 1..75: mol_type = other DNA
ctgttatggcaggggttttatacctttgatgatttcactatgtcggtaacgccggaactgacgctggcgaatata

SEQ ID NO: 254517 - DNA, 75 bp, synthetic construct
  source 1..75: mol_type = other DNA
tgccgctggcgatcccgggtattgccgctggctctatctttaccttctcactcacactgggcgattttatcgtcc

SEQ ID NO: 254518 - DNA, 75 bp, synthetic construct
  source 1..75: mol_type = other DNA
cgcaactggtcggtcccccgggatattttatcggcaatatggtgtattcccagcagggggcgattggtaatatgc

SEQ ID NO: 254519 - DNA, 75 bp, synthetic construct
  source 1..75: mol_type = other DNA
tgctctttttcttcggcggcatgaaaacaacgtcgcttatttttgcttttatttgttgcgcgggattatttgccc

SEQ ID NO: 254520 - DNA, 75 bp, synthetic construct
  source 1..75: mol_type = other DNA
atttttgggtgccagatattcgcgacgaggcgaaaggaaagctgcgcgaacaatttcactttttgcgcagcccgg

SEQ ID NO: 254521 - DNA, 75 bp, synthetic construct
  source 1..75: mol_type = other DNA
ccgatgagaacgcgtctattagcatgcgtatcaaagttcggcgcggtcgtggttatgttccggcttctacccgaa

SEQ ID NO: 254522 - DNA, 75 bp, synthetic construct
  source 1..75: mol_type = other DNA
accaggactatgacgccacggcgtctggtgtgaagcgaggcgaggaactggcggaagccagcggtgatttatggc

SEQ ID NO: 254523 - DNA, 75 bp, synthetic construct
  source 1..75: mol_type = other DNA
atgatgtttgttgcgccagaacaggcaccggaacaggcggaaatcatcagaaatacgccgttctggcctgatgtg

SEQ ID NO: 254524 - DNA, 75 bp, synthetic construct
  source 1..75: mol_type = other DNA
gcagatgctggggtatgcgtcgctggctgagattccggcggaacatctggacgggaaaagtgagcgcattcagca

SEQ ID NO: 254525 - DNA, 75 bp, synthetic construct
  source 1..75: mol_type = other DNA
cttcacgcccgggcatgggtaaggtatcaggatttttctggcgtaaaccggggctggggctgtttttactgctgc

SEQ ID NO: 254526 - DNA, 75 bp, synthetic construct
  source 1..75: mol_type = other DNA
tgcgcactgacggcacggtgacgcagccacgtttaaagcaggttgcgctatcggcaatttcggaggtcaacgcag

SEQ ID NO: 254527 - DNA, 75 bp, synthetic construct
  source 1..75: mol_type = other DNA
gcagatgctgggatatgcctcgctggcagaggttccggcagaacagctggacgggaaaagtgagcgcattcagca

SEQ ID NO: 254528 - DNA, 75 bp, synthetic construct
  source 1..75: mol_type = other DNA
ggttattacatctgattattccggcagaagcgattttagatcacgcagaaagcgtgcaaaaactgcggctggcgg

SEQ ID NO: 254529 - DNA, 75 bp, synthetic construct
  source 1..75: mol_type = other DNA
aagcggtgaatgacagcgccgggcatgcggcgggcgacgctttgctgcgcgaactggcgtcgttgatgctgagta

SEQ ID NO: 254530 - DNA, 75 bp, synthetic construct
  source 1..75: mol_type = other DNA
gcgactcggtggtgatgaatttggtctgctgctaccagactgtaatatcgaaagtgcgcgttttatcgctacacg

SEQ ID NO: 254531 - DNA, 75 bp, synthetic construct
  source 1..75: mol_type = other DNA
tgcgcaagagaaagggttagcgcgcgcgcgaaataatattgatgcctggtggccggcgattgaagcaggcgccga

SEQ ID NO: 254532 - DNA, 75 bp, synthetic construct
  source 1..75: mol_type = other DNA
atgagattgtatttcagaatagtaattttactggcaattatcgcatgcatttacggactactcgtcccgttcctt

SEQ ID NO: 254533 - DNA, 75 bp, synthetic construct
  source 1..75: mol_type = other DNA
tggagttgcgaaggcgagattattgatgaacaaacatttcgtcgtagcttcagcgatccggcacttagccatgct

SEQ ID NO: 254534 - DNA, 75 bp, synthetic construct
  source 1..75: mol_type = other DNA
gcagataacgagtggcatgacgcgattaactggctgggagactggtgcagtgaagagcagcatccggtgatctgg

SEQ ID NO: 254535 - DNA, 75 bp, synthetic construct
  source 1..75: mol_type = other DNA
gttcggatgccccgtctctgctctgcagagcgcctctctgaaagtatggttgatgaaatatttcagaagggggcg

SEQ ID NO: 254536 - DNA, 75 bp, synthetic construct
  source 1..75: mol_type = other DNA
atgttgcacaggagcatatccgcacggccggagagcgcacgttcttccggcggttaaaagaggggctgaacggcg

SEQ ID NO: 254537 - DNA, 75 bp, synthetic construct
  source 1..75: mol_type = other DNA
agatgacaacgtcacttgccaccacaaactacgcaattacccgggtaaacgacagggtcagttcactggtcagtg

SEQ ID NO: 254538 - DNA, 75 bp, synthetic construct
  source 1..75: mol_type = other DNA
ggagagtggcggtagcgcaacagtacgtctgaacacactggactggcttggtggtcagcgccgggaacaggctga

SEQ ID NO: 254539 - DNA, 75 bp, synthetic construct
  source 1..75: mol_type = other DNA
gatgttgcacaggagcatatccgcacggccggagagcgcacgttcttccggcggttaaaagaggggctgagcggc

SEQ ID NO: 254540 - DNA, 75 bp, synthetic construct
  source 1..75: mol_type = other DNA
tgcgcccagcctacgctttcgcccaacaccaacgcggcaaccgcgcgggtgctggatcgtctggggatcagcgtc

SEQ ID NO: 254541 - DNA, 75 bp, synthetic construct
  source 1..75: mol_type = other DNA
tcagcttacgtaaatccgaaggcgtctaatggtgtggcagtaggtagctgggcaaaggctgatgctttaaattcg

SEQ ID NO: 254542 - DNA, 75 bp, synthetic construct
  source 1..75: mol_type = other DNA
gtggcactgggtacgggtgcacaggcaatgcacaggtattcagtggctcttggtcagcagtccggtacaacccgt

SEQ ID NO: 254543 - DNA, 75 bp, synthetic construct
  source 1..75: mol_type = other DNA
atggcctttaacctggtgggtgacgcactgcgcgatcatctggaccctcatctggtgacggagcacgcacactaa

SEQ ID NO: 254544 - DNA, 75 bp, synthetic construct
  source 1..75: mol_type = other DNA
catgtgcgggtgtttgtcgatcatctggcaggcgcggtgatcccctcgctgctggtgctggcaacgctggatatc

SEQ ID NO: 254545 - DNA, 75 bp, synthetic construct
  source 1..75: mol_type = other DNA
ccccggcggtcgtcttgatatcgcctggaaaggtccgggtcacccgttatatatgactggcccggcggtacatgt

SEQ ID NO: 254546 - DNA, 75 bp, synthetic construct
  source 1..75: mol_type = other DNA
gagatgcaaatcatagccattgactttataaaaatggctgtttatgtgctttgttttttaatatatgtggttgct

SEQ ID NO: 254547 - DNA, 75 bp, synthetic construct
  source 1..75: mol_type = other DNA
tccaaatatctctaagagtgataaggagaatactttttcatttgttgatatatcaagttattatagtagtcttga

SEQ ID NO: 254548 - DNA, 75 bp, synthetic construct
  source 1..75: mol_type = other DNA
atgagcctgcttcaggctgcgcccgacggtgtaatccgtctgcgccatctggtacgccagataaccggctatgac

SEQ ID NO: 254549 - DNA, 75 bp, synthetic construct
  source 1..75: mol_type = other DNA
accgtaacacccggggactgctttcccagggggatgttctggagacgcatgaagagcgcctgaacagtcagcaac

SEQ ID NO: 254550 - DNA, 75 bp, synthetic construct
  source 1..75: mol_type = other DNA
tcgctttaacgaacaggctgcggcaaaggcaggtactgcgttcagtgacggtgatgtttcctggaatgtgggtgt

SEQ ID NO: 254551 - DNA, 75 bp, synthetic construct
  source 1..75: mol_type = other DNA
acgaagacagtgaacacctttctgtatatggggcttggtaaaaacggcctgaggtacagaagtgtgaagcatctt

SEQ ID NO: 254552 - DNA, 75 bp, synthetic construct
  source 1..75: mol_type = other DNA
ggactaataaccctgaacctggttttcagttgattaaccagcgaatcacccacagcacgattaacgataatattt

SEQ ID NO: 254553 - DNA, 75 bp, synthetic construct
  source 1..75: mol_type = other DNA
cgttcagcgcagcctcgatatccaacagcgtagcgttcaacaattagcgaacactattgtaaatagtcttattca

SEQ ID NO: 254554 - DNA, 75 bp, synthetic construct
  source 1..75: mol_type = other DNA
ataatgtattgcctgcatggaaagtaaatatgaatctgttgcagatggatgtgtcaggttcacaagttaaaacgg

SEQ ID NO: 254555 - DNA, 75 bp, synthetic construct
  source 1..75: mol_type = other DNA
tgccagtttcttcctcatgaaaatgttctcgaaagattccgagaagagaatggtatcgctttgtggcgtgatctg

SEQ ID NO: 254556 - DNA, 75 bp, synthetic construct
  source 1..75: mol_type = other DNA
agacggagcttgaaggactagtttctgaggaacatacgctggcttctgggtaccgcgagggcctttcttttcagc

SEQ ID NO: 254557 - DNA, 75 bp, synthetic construct
  source 1..75: mol_type = other DNA
gcactgcaccgcttttgctttgttgaaaaaaaccgcatcgacaacttttcaagaattgcggcactggccccggca

SEQ ID NO: 254558 - DNA, 75 bp, synthetic construct
  source 1..75: mol_type = other DNA
ctacgccgcctttcatagtttcatggattgcattgagcacgaagtaaaactcaaggtgttgcaggaagaacgcga

SEQ ID NO: 254559 - DNA, 75 bp, synthetic construct
  source 1..75: mol_type = other DNA
cagctggaagaaagcagaaaaaagcagctggaagaaattcaacaacacgcagcatcatcccgactgcccgcgctg

SEQ ID NO: 254560 - DNA, 75 bp, synthetic construct
  source 1..75: mol_type = other DNA
tacatcaacgatgatgtttgtatacatcgtaagtttgcaacaagaagccaaatcacaaatatatctgacagtcga

SEQ ID NO: 254561 - DNA, 75 bp, synthetic construct
  source 1..75: mol_type = other DNA
ataatgtattgcctgcattgaaagtaaatatgaatccgttgcaaatggatgtgtcaggctcacaatttaaaacgg

SEQ ID NO: 254562 - DNA, 75 bp, synthetic construct
  source 1..75: mol_type = other DNA
gcaaatagcagtccgcaatcggatgaaaatattctaccggccatcaaatttgtctgaagacccgaatatgtcata

SEQ ID NO: 254563 - DNA, 75 bp, synthetic construct
  source 1..75: mol_type = other DNA
cgctggcaaacaaccgggcaagatccatgaagtcaaaagtaagctcggtggctaccgcaccctgctattgaagac

SEQ ID NO: 254564 - DNA, 75 bp, synthetic construct
  source 1..75: mol_type = other DNA
ggtgttgcagttggaagaagaagataaaaaaacagaagcagctgctaaattgcgggaatcccggcagcgtgatct

SEQ ID NO: 254565 - DNA, 75 bp, synthetic construct
  source 1..75: mol_type = other DNA
ttccaggtcagactggagcgatggttacccgtgattaccaggctgaactttcacaaaaaccgggggagactctcg

SEQ ID NO: 254566 - DNA, 75 bp, synthetic construct
  source 1..75: mol_type = other DNA
atggtgggatttattatgaccctgtgtgcaatggtagtacacttcaaaaaagtgtgacatttaatgctcactttc

SEQ ID NO: 254567 - DNA, 75 bp, synthetic construct
  source 1..75: mol_type = other DNA
cgattctttgcctgttttttaacgtttcagcttttgctgttgattgctatcagaatagtaaaacttcaaacccca

SEQ ID NO: 254568 - DNA, 75 bp, synthetic construct
  source 1..75: mol_type = other DNA
ccagaacaggattaatcgcctttgcattggtcgcattaattacaacaactgttacgcttttaatgcagtaccttg

SEQ ID NO: 254569 - DNA, 75 bp, synthetic construct
  source 1..75: mol_type = other DNA
ctgacattcggcgtaacctataatggtgtggattatgaagatagcaatgtagcaattgatactttcgcctgtctg

SEQ ID NO: 254570 - DNA, 75 bp, synthetic construct
  source 1..75: mol_type = other DNA
ggtgatgtaaacgtgttgcaatttgatggtggacaaggtgcaaatactaatcccaaagcaaaaaacctccatgtg

SEQ ID NO: 254571 - DNA, 75 bp, synthetic construct
  source 1..75: mol_type = other DNA
caaccggcgatccatgacttactacgcgcgctgatactgccaattcaggccgattacttgctggggtcgtctcag

SEQ ID NO: 254572 - DNA, 75 bp, synthetic construct
  source 1..75: mol_type = other DNA
tcaggagcctatgcccggttcgtattgcagttgaacgcctataaagatggtttgcctcagcagttggttgcgaat

SEQ ID NO: 254573 - DNA, 75 bp, synthetic construct
  source 1..75: mol_type = other DNA
gaagtacgacagaaagggccatcgcagcggctcagttgttgattggtaactttgatacggaaaacaggcagctta

SEQ ID NO: 254574 - DNA, 75 bp, synthetic construct
  source 1..75: mol_type = other DNA
gtgtggattatgaagggataaatgaaaaaattgatacccatgcgtgcctggataaatatgagcaatactattacg

SEQ ID NO: 254575 - DNA, 75 bp, synthetic construct
  source 1..75: mol_type = other DNA
caagaaatcaaagaaagcgacgctggaaaatttctcgctgaaaactatggtaaaaccgtgagtcgaaatgacttt

SEQ ID NO: 254576 - DNA, 75 bp, synthetic construct
  source 1..75: mol_type = other DNA
cagcacgatcgcaatcgtaacgaacgcgatgaatgtcgtctgcaaaccgaaacgaccaacaaagctgatttcttg

SEQ ID NO: 254577 - DNA, 75 bp, synthetic construct
  source 1..75: mol_type = other DNA
tgaaaacgcgttacgatcggtggcggttggaagaaaaaattatctcttcttcggctcagacaaggggggagaaag

SEQ ID NO: 254578 - DNA, 75 bp, synthetic construct
  source 1..75: mol_type = other DNA
gaaatgggggaaacaatctcagagcaactggatatcattaataccgcctttaaagttatcgaaaccatacgcccc

SEQ ID NO: 254579 - DNA, 75 bp, synthetic construct
  source 1..75: mol_type = other DNA
ccgacaggcagaaaaacgactgtcggaactggaaaaccggctgaacacagccagaaatcttctggaagatgcatc

SEQ ID NO: 254580 - DNA, 75 bp, synthetic construct
  source 1..75: mol_type = other DNA
tgtccgcgatccgcaaaaagcgtcacttccctggacggggccgttgcgttgcctgattaaaaccgctctgctggt

SEQ ID NO: 254581 - DNA, 75 bp, synthetic construct
  source 1..75: mol_type = other DNA
caacacgctgggggatgattgctaccggattacttcagggtctggtttgctacctgctgatcgcctggctttccg

SEQ ID NO: 254582 - DNA, 75 bp, synthetic construct
  source 1..75: mol_type = other DNA
tgcagtcgttgtacgactggatacagttgcagaggaaaacgctgtcgaaacatgcggagatggcgaaggctgagg

SEQ ID NO: 254583 - DNA, 75 bp, synthetic construct
  source 1..75: mol_type = other DNA
ccatggtgcacatcgtggcgcttatgagccccggtcccgatttcttttttgtttctcaaactgccgttagccgtt

SEQ ID NO: 254584 - DNA, 75 bp, synthetic construct
  source 1..75: mol_type = other DNA
tgccagcctgtttgctttgccgaagatgcgccgtggttatcagcgcctgtcgaagtggatcgatggttttgccgg

SEQ ID NO: 254585 - DNA, 75 bp, synthetic construct
  source 1..75: mol_type = other DNA
atcgctgtttttaatattgcggtgatggcatcggtctatttttgggtgccagatattcgcgacgaggcgaaagga

SEQ ID NO: 254586 - DNA, 75 bp, synthetic construct
  source 1..75: mol_type = other DNA
ggcgatctggaagaggcgctgaacgcggcgcaggccatcggcgatgaccgtttacaacagcaaagtcaggggcga

SEQ ID NO: 254587 - DNA, 75 bp, synthetic construct
  source 1..75: mol_type = other DNA
ccgaaagcgattatctactttggctcggtgttctcgctgtttgtcggcgataacgtcggcaccaccgaacgctgg

SEQ ID NO: 254588 - DNA, 75 bp, synthetic construct
  source 1..75: mol_type = other DNA
ccgaaagcgattatctactttggctcggtgttctcattgtttgtcggtgataacgttggcactaccggcgctggg

SEQ ID NO: 254589 - DNA, 75 bp, synthetic construct
  source 1..75: mol_type = other DNA
cacatctccgccgccgggttgctgttgacgctggcctttttgcaattgatcttaatggctattgtccgcgatccg

SEQ ID NO: 254590 - DNA, 75 bp, synthetic construct
  source 1..75: mol_type = other DNA
accgtgggatgagcgccggagcttttccgacgatgtgggcggtatttatctgcgtgctgccggatttgagcacta

SEQ ID NO: 254591 - DNA, 75 bp, synthetic construct
  source 1..75: mol_type = other DNA
cgtggcgatggttatcaacggtgatcaaggtacaatcagccgcattgatgtctcagatagcgatattcctgctga

SEQ ID NO: 254592 - DNA, 75 bp, synthetic construct
  source 1..75: mol_type = other DNA
gcacgggtaatttcccgatactcaatattgatattatttacggtattcccggtcaaacagccgcaagtttattgg

SEQ ID NO: 254593 - DNA, 75 bp, synthetic construct
  source 1..75: mol_type = other DNA
gacgctagtatactatcagttctatcccaaaccttagttgattttgagttaattattatcaatgatgcttcaaca

SEQ ID NO: 254594 - DNA, 75 bp, synthetic construct
  source 1..75: mol_type = other DNA
aggcgggtgtggatattcgggtggtaaaaccgaaacagggctggaaacggccggatggtgtacccctgcctgata

SEQ ID NO: 254595 - DNA, 75 bp, synthetic construct
  source 1..75: mol_type = other DNA
gcgcgcgctggttgtttctcacgctgacggtgcgcaactgttccattgacgcgcttggtgagacgctgaccgcga

SEQ ID NO: 254596 - DNA, 75 bp, synthetic construct
  source 1..75: mol_type = other DNA
gccaagtgtgtcacaacatgctttggcatcctccacgcataaaggacgcggatttcttctatgttcaggttgtag

SEQ ID NO: 254597 - DNA, 75 bp, synthetic construct
  source 1..75: mol_type = other DNA
cacagcctgtctggaaatatcgtgatggaaacggtcgaacggcagctaaagaaatgaaagcagttttaaatcata

SEQ ID NO: 254598 - DNA, 75 bp, synthetic construct
  source 1..75: mol_type = other DNA
tcagcaacaggtatcggaaaaagtattagccgaaaatgtgttaattgcaccaggttctggcaaaccggatgcggc

SEQ ID NO: 254599 - DNA, 75 bp, synthetic construct
  source 1..75: mol_type = other DNA
ctttcacaagcagaaatgaagcggcgttttattatcaagaatctctttttctataaggggctttcgttacgggat

SEQ ID NO: 254600 - DNA, 75 bp, synthetic construct
  source 1..75: mol_type = other DNA
aggcaggagtcataccggcatgggattaccctgaggctgggaactgtattgatattttaatgagcatacgtgatg

SEQ ID NO: 254601 - DNA, 75 bp, synthetic construct
  source 1..75: mol_type = other DNA
cgatgtcatcaggaataataatgtcaataaagcgattgacgttctttatttcttcatcacctccaggaaacaaaa

SEQ ID NO: 254602 - DNA, 75 bp, synthetic construct
  source 1..75: mol_type = other DNA
cgggcactacgtcttatgggctatgataccaaaaccgatgtctgcggacatggattccggacaatggcctgtagc

SEQ ID NO: 254603 - DNA, 75 bp, synthetic construct
  source 1..75: mol_type = other DNA
acaaaaaatggtcggctgattatgccgcccgtattctcgccagtatggaaaaccatatcttcccggcggttggtc

SEQ ID NO: 254604 - DNA, 75 bp, synthetic construct
  source 1..75: mol_type = other DNA
gaagatactgacagagagattttgcgaattgttgaatctcatatacgaccacaatcgccgggtgatcagaccgat

SEQ ID NO: 254605 - DNA, 75 bp, synthetic construct
  source 1..75: mol_type = other DNA
acatcaggcaatcgcttaaagacgctgtttgcatggcattagctggcgatgaggaaaatgacaaagagattttgc

SEQ ID NO: 254606 - DNA, 75 bp, synthetic construct
  source 1..75: mol_type = other DNA
aatatcaggcgtacccgattgagggcagcggctttgagatgaacggaaagggcagcagtgcccgcccgtcgctga

SEQ ID NO: 254607 - DNA, 75 bp, synthetic construct
  source 1..75: mol_type = other DNA
tggcaggggcgacagtatcaggcataccccattcaggggacgggatttgaactgaacggcaagggcagtgctgcc

SEQ ID NO: 254608 - DNA, 75 bp, synthetic construct
  source 1..75: mol_type = other DNA
atctgcccgttgccacgcttaaaacgcaggatttcactgctttgttgcgggttatcgaggataaaggctttctgg

SEQ ID NO: 254609 - DNA, 75 bp, synthetic construct
  source 1..75: mol_type = other DNA
ggagcaggagctgacggaccggtgggtggtggagcagatgtcagcgctgacggccatgacggcctcgtttgtgct

SEQ ID NO: 254610 - DNA, 75 bp, synthetic construct
  source 1..75: mol_type = other DNA
acacgggcggggcagtggcggatgagttcgataaacccaccacggatatccgtaaggacagatgcagcaagtgca

SEQ ID NO: 254611 - DNA, 75 bp, synthetic construct
  source 1..75: mol_type = other DNA
gccaatgagcgaaaacacaaccaaccgggcgctgcgcctgatggggtatgacacgaaaactgaaatctgcgggca

SEQ ID NO: 254612 - DNA, 75 bp, synthetic construct
  source 1..75: mol_type = other DNA
tgatagacctcggagaatgggctgctgaagaaaaacgcatccccagcagcggcgatctgtccgaaagcgatgact

SEQ ID NO: 254613 - DNA, 75 bp, synthetic construct
  source 1..75: mol_type = other DNA
gagaaaggcaccactcccggcctaaatgtggtcgctacgatagcaaaattagagaatgtatcactggaatggttg

SEQ ID NO: 254614 - DNA, 75 bp, synthetic construct
  source 1..75: mol_type = other DNA
tgattacagcaacatgaaccacgcgcagatcgtgcagcgcgttaaggaggtgtttaaccaggacaaccacagcca

SEQ ID NO: 254615 - DNA, 75 bp, synthetic construct
  source 1..75: mol_type = other DNA
ggcagctgcgtcctggcctccgcatccggcagcgcaagggattgtccagatgattggcatttttatcgacaccct

SEQ ID NO: 254616 - DNA, 75 bp, synthetic construct
  source 1..75: mol_type = other DNA
tttgttaccctcgtggttattctgtttgccttcagctccatcgttgccaactacatttatgccgaaaacaatctc

SEQ ID NO: 254617 - DNA, 75 bp, synthetic construct
  source 1..75: mol_type = other DNA
tggaaactcaaaggttaaaggctgttttgtctaatgagggcgtaaatatacctcccttacttcaggtgataaaac

SEQ ID NO: 254618 - DNA, 75 bp, synthetic construct
  source 1..75: mol_type = other DNA
aataacaatccaggggtgtggaaaagcaataccctgtatctggaacgtggatttgcccaacttctcggcacgttc

SEQ ID NO: 254619 - DNA, 75 bp, synthetic construct
  source 1..75: mol_type = other DNA
ctggtgctggaaatcatggatgaaatgcgtgaaccaattcagagcggaaccatcgacgcatcgagtcaggcgatg

SEQ ID NO: 254620 - DNA, 75 bp, synthetic construct
  source 1..75: mol_type = other DNA
tgatggttgccgaggcgtgcggagaggagcatttcacgtcaatcctgatgaccagcaaaaactgcccgagtgccg

SEQ ID NO: 254621 - DNA, 75 bp, synthetic construct
  source 1..75: mol_type = other DNA
tatcccattcaggggacgggatttgaactgaacggcaagggcagtgctgcccgtccgacactgacggtttctaac

SEQ ID NO: 254622 - DNA, 75 bp, synthetic construct
  source 1..75: mol_type = other DNA
tggaagaactggaaagtggctatgtaccacctgaaaactgggagcggggtattaatgcgttttatacctcttatt

SEQ ID NO: 254623 - DNA, 75 bp, synthetic construct
  source 1..75: mol_type = other DNA
gggggtgtggaaaagcaataccctgtatctggaacgtggatttgcccaacttctcggcacgcttcgcgtgggtga

SEQ ID NO: 254624 - DNA, 75 bp, synthetic construct
  source 1..75: mol_type = other DNA
cttacagcccggacagaaaaggcatccatccgcagactcatcttgcttgcttcagcggtgtgctgcaagcggatg

SEQ ID NO: 254625 - DNA, 75 bp, synthetic construct
  source 1..75: mol_type = other DNA
ctcatgcccgccgaaagatccacgatgtgcacgtccgcatcccgtcagcactgacggaagaagccctggagcaga

SEQ ID NO: 254626 - DNA, 75 bp, synthetic construct
  source 1..75: mol_type = other DNA
tgtgcctggcgtcatagccgactggccgataaaccgggtcagcgaactgcttccgtggcgcatagcactgccagc

SEQ ID NO: 254627 - DNA, 75 bp, synthetic construct
  source 1..75: mol_type = other DNA
agaccgggcggttgtgggcgtatgttcgtgatgaccgcaatgcagggtcagcgttggcacctgcagtgtggttcg

SEQ ID NO: 254628 - DNA, 75 bp, synthetic construct
  source 1..75: mol_type = other DNA
acacgcctgtcccggtgctgttgccaggcaataagaaaacgaagaccgggcggttatggacctacgttcgtgacg

SEQ ID NO: 254629 - DNA, 75 bp, synthetic construct
  source 1..75: mol_type = other DNA
gtccaggtactgctgccgggtaataagaagaccgggcggttgtgggcgtatgttcgtgatgaccgcaatgcaggg

SEQ ID NO: 254630 - DNA, 75 bp, synthetic construct
  source 1..75: mol_type = other DNA
gtttcagaggtgtcctgcaagcggatgcgtacgccgggttcaacgagctgtatcgcaatggtgggataacggaag

SEQ ID NO: 254631 - DNA, 75 bp, synthetic construct
  source 1..75: mol_type = other DNA
gattcagcggtgtcctgcatgcggatgcgtacgccgggttcaacgagctgtatcgcaatggtgggataacggaag

SEQ ID NO: 254632 - DNA, 75 bp, synthetic construct
  source 1..75: mol_type = other DNA
gattcagtggtgtcctgcacgcggatgcgtacgccgggttcaacgagctgtatcgcaatggtgggataacggaag

SEQ ID NO: 254633 - DNA, 75 bp, synthetic construct
  source 1..75: mol_type = other DNA
gtcattgagcatatccaggactggccggcaaaccgggtacgcgatctgttgccctggaaagttgatctgacctct

SEQ ID NO: 254634 - DNA, 75 bp, synthetic construct
  source 1..75: mol_type = other DNA
cggggttcagtggtgtactgcaggcggatgcatacgccgggttcaacgagctgtaccgggatggccggataacgg

SEQ ID NO: 254635 - DNA, 75 bp, synthetic construct
  source 1..75: mol_type = other DNA
gggcggttgtgggcgtatgttcgtgatgaccgcaatgccgggtcagcgttggcacctgcagtgtggttcgcttac

SEQ ID NO: 254636 - DNA, 75 bp, synthetic construct
  source 1..75: mol_type = other DNA
aaaactacctgttcttcggttcggatcatggaggagagcggggagcgctgctgtacagcctgatcgggacgtgca

SEQ ID NO: 254637 - DNA, 75 bp, synthetic construct
  source 1..75: mol_type = other DNA
tttaggcgaagtgcaaatctcccttaaggtggatgacaaccaggcgcaaatccagatggtttcgccgcatcagca

SEQ ID NO: 254638 - DNA, 75 bp, synthetic construct
  source 1..75: mol_type = other DNA
ccatgaacacctggctgtcgaagatgacgatgcactgccggttcccgcctctttacaagggcgtgcaacaggcaa

SEQ ID NO: 254639 - DNA, 75 bp, synthetic construct
  source 1..75: mol_type = other DNA
agttgcgtctgcacccacaggatttaggtgaagtgcaaatctccctcaaagtggatgataaccaggcgcaaatcc

SEQ ID NO: 254640 - DNA, 75 bp, synthetic construct
  source 1..75: mol_type = other DNA
tgagaaagtccgtttctccggtcgtggcgcaaaaatgcgtactccacatattgtgccgctttcccgacaggccat

SEQ ID NO: 254641 - DNA, 75 bp, synthetic construct
  source 1..75: mol_type = other DNA
gttaatcaaccagaaaacaacggcgataaacaagctgaagtagtaaaaaatgttattgggtcagtatttaaaaac

SEQ ID NO: 254642 - DNA, 75 bp, synthetic construct
  source 1..75: mol_type = other DNA
caaaaggcgagccgctggttagcgatattctttccgatgtgcaacaagcggatttactgatccctgaggatggaa

SEQ ID NO: 254643 - DNA, 75 bp, synthetic construct
  source 1..75: mol_type = other DNA
tcgctgtgtgagtttacggtgaaggaacgtaatattgagttcagggctgttctcgcttacgaaccgaagaagtag

SEQ ID NO: 254644 - DNA, 75 bp, synthetic construct
  source 1..75: mol_type = other DNA
cttcgttatatcgcggattaaagaacctgaaacagtcagactgtatcttggattttacaaactcttattcgggga

SEQ ID NO: 254645 - DNA, 75 bp, synthetic construct
  source 1..75: mol_type = other DNA
gatggtcagtctgggccgcaaaaactcttatgacctttgtcaaatattaagcccaaaaagaccttacgcagctcc

SEQ ID NO: 254646 - DNA, 75 bp, synthetic construct
  source 1..75: mol_type = other DNA
acgaaatcaacaccagtgatgaagtcattcttagcctgatggaaggtcgtgaagtggtcaatgtacgttatatgc

SEQ ID NO: 254647 - DNA, 75 bp, synthetic construct
  source 1..75: mol_type = other DNA
ttatggcctggcagcctcgcagttgcggcgtctgcgcgataaaaacattcctttaaccgttacggtagataaagt

SEQ ID NO: 254648 - DNA, 75 bp, synthetic construct
  source 1..75: mol_type = other DNA
gctcaatggaataacttttgaagcatcaaggttttcaaaattacctgattcgctcacaaagttgccacaaaataa

SEQ ID NO: 254649 - DNA, 75 bp, synthetic construct
  source 1..75: mol_type = other DNA
gtgcagaaattggtgaggcgatggctcgggcggtcgtaaaacctgcatcccgtgctcgtcggcgtctttcgtttg

SEQ ID NO: 254650 - DNA, 75 bp, synthetic construct
  source 1..75: mol_type = other DNA
gtgcagaaattggtgaggcgatggctcaggcggtcgtaaagcctgcatcccgtgctcgtcggcgtctttcgtttg

SEQ ID NO: 254651 - DNA, 75 bp, synthetic construct
  source 1..75: mol_type = other DNA
gacggacggagcgctgtttcccggtcgcatcatgctggcgaacacctgtatgtgggattaccggggagatgaatg

SEQ ID NO: 254652 - DNA, 75 bp, synthetic construct
  source 1..75: mol_type = other DNA
actggctgcgggcagagatgcagggggagattgtggcactggtccacagtcatcccggtgggctgccctggctga

SEQ ID NO: 254653 - DNA, 75 bp, synthetic construct
  source 1..75: mol_type = other DNA
gccacggtggtccgccgccgggtgtatgcccgttttctggatgcggtgaatttcgttgcgggcaatccggaggcc

SEQ ID NO: 254654 - DNA, 75 bp, synthetic construct
  source 1..75: mol_type = other DNA
tggcaggggcgtaagtatgaggcgtacccgattgagggcagcggctttgagatgaacggaaagggcagcagtcgc

SEQ ID NO: 254655 - DNA, 75 bp, synthetic construct
  source 1..75: mol_type = other DNA
gatgcgatcctgccatcgttcaaacatctgaagctgatgaagagccgcatttctgcccgtgctgagtttgaggat

SEQ ID NO: 254656 - DNA, 75 bp, synthetic construct
  source 1..75: mol_type = other DNA
tgggctggtgattctcgatgaattccatgaacgcagcttgcaggcggatttggcgctggcgttgttactggacgt

SEQ ID NO: 254657 - DNA, 75 bp, synthetic construct
  source 1..75: mol_type = other DNA
ttcgacaaccccaccacggatatccgtaaggacagatgcagcaagtgcatgcgcgggtgtgagatgcgcagcatg

SEQ ID NO: 254658 - DNA, 75 bp, synthetic construct
  source 1..75: mol_type = other DNA
atcccattcaggggacgggatttgaactgaacggcaagggcagtgctgcccgtccgacactgacggtctctaacc

SEQ ID NO: 254659 - DNA, 75 bp, synthetic construct
  source 1..75: mol_type = other DNA
atcccattcaggggagtggttttgaactgaatggcaagggcagtggtgcgcgtccgacgctgacggtttctaacc

SEQ ID NO: 254660 - DNA, 75 bp, synthetic construct
  source 1..75: mol_type = other DNA
ttcccggccaaccctgacggtttctaacctggacggtatggtcaccgggatggcggaagagctgcagagtctggt

SEQ ID NO: 254661 - DNA, 75 bp, synthetic construct
  source 1..75: mol_type = other DNA
atcccattcaggggagcggttttgaactgaatggcaagggggccagcgccagaccagtgctgagcgtgtccaatc

SEQ ID NO: 254662 - DNA, 75 bp, synthetic construct
  source 1..75: mol_type = other DNA
tgaatgaatgtacccgtacggagcagtctgccagtctggtactctgggaaattgatctgacagagattggcgggg

SEQ ID NO: 254663 - DNA, 75 bp, synthetic construct
  source 1..75: mol_type = other DNA
gtactgtccacgccgactgaaacggatggtgccgtttttccggggcgcatcatgctggctaatacctgcacctgg

SEQ ID NO: 254664 - DNA, 75 bp, synthetic construct
  source 1..75: mol_type = other DNA
ttcccgaccaaccctgacggtttctaacctgaacggtatggtcaccgggatggcggaagagctgcagagtctggt

SEQ ID NO: 254665 - DNA, 75 bp, synthetic construct
  source 1..75: mol_type = other DNA
ttcccgtccaaccctgacggtttctaacctgtacggtatggtcaccgggatggcggaagagctgcagagtctggt

SEQ ID NO: 254666 - DNA, 75 bp, synthetic construct
  source 1..75: mol_type = other DNA
ttcccgaccgaccctgacggtttctaacctggacggtatggtcaccgggatggcggaagagctgcagagtctggt

SEQ ID NO: 254667 - DNA, 75 bp, synthetic construct
  source 1..75: mol_type = other DNA
ttcccgacccaccctgacggtttctaacctgcacggtatggtcaccgggatggcggaagagctgcagagtctggt

SEQ ID NO: 254668 - DNA, 75 bp, synthetic construct
  source 1..75: mol_type = other DNA
atgcaggatattcacgaagaaagcctgaacgagtcggttaagtcagagcagtcaccgcgggtggtgctctgggaa

SEQ ID NO: 254669 - DNA, 75 bp, synthetic construct
  source 1..75: mol_type = other DNA
tttgttgccattactaatggaatgatgctgtatcttgctatccccaaaaaattcagagatgagtcgaaagtcata

SEQ ID NO: 254670 - DNA, 75 bp, synthetic construct
  source 1..75: mol_type = other DNA
ggtcaccgggatggcggaagacctgcagagtctggtgggggccacggtggtccgccgccgggtgtatgcccgttt

SEQ ID NO: 254671 - DNA, 75 bp, synthetic construct
  source 1..75: mol_type = other DNA
tgaacgagtcggtgaaatcagaacagtcaccgcgggtggtgctctgggaaattgacctgacggtgcagggcggtg

SEQ ID NO: 254672 - DNA, 75 bp, synthetic construct
  source 1..75: mol_type = other DNA
ttgctttgtttataatctttttctttatttatgctatagacataaatcgttataatctctcagctatagtctcag

SEQ ID NO: 254673 - DNA, 75 bp, synthetic construct
  source 1..75: mol_type = other DNA
atcatgagacgacacgcctcactcagtcagcccaggtggtgctctgggaaatcgatctgacagaggtcggtggag

SEQ ID NO: 254674 - DNA, 75 bp, synthetic construct
  source 1..75: mol_type = other DNA
tatgttttccaatgaggtgggaatgggatcgacgccaaacgcggcagcggcagcggcagcggcagcggcagcggc

SEQ ID NO: 254675 - DNA, 75 bp, synthetic construct
  source 1..75: mol_type = other DNA
cgcatatcgtccccctctcagaacagtccatcgccattctgaaacagattaaggatatcaccggtaataatgaac

SEQ ID NO: 254676 - DNA, 75 bp, synthetic construct
  source 1..75: mol_type = other DNA
gtcaggaagagggatcgctgttgctgtttctacccggcgtcggggaaatacagcgcgttcaggagcaactggcct

SEQ ID NO: 254677 - DNA, 75 bp, synthetic construct
  source 1..75: mol_type = other DNA
gaaggcgtgctgacgcgcatgatccagcgcgacccggaactgaacggtgtcggtctggtgatcctcgatgaattt

SEQ ID NO: 254678 - DNA, 75 bp, synthetic construct
  source 1..75: mol_type = other DNA
cttgtcaccgggatggcggaggatttgcagagcctggtgggggccacggtggtccgtcgccgggtgtatgcgcgt

SEQ ID NO: 254679 - DNA, 75 bp, synthetic construct
  source 1..75: mol_type = other DNA
gttacaaatgctgggggcgctggagggtgaacggcttagcgcacaagggcaaaaaatggcagtgctgggtagcga

SEQ ID NO: 254680 - DNA, 75 bp, synthetic construct
  source 1..75: mol_type = other DNA
tcttacctgaattacttgccgccctcgattgtgcaccgcaggtgttattaagcgcgccgaccggagccgggaaat

SEQ ID NO: 254681 - DNA, 75 bp, synthetic construct
  source 1..75: mol_type = other DNA
gcccgtcgccgtggacaagatggtcgctatcaactggcaaatggcatgggggcgatgctggacgccgacgatgcc

SEQ ID NO: 254682 - DNA, 75 bp, synthetic construct
  source 1..75: mol_type = other DNA
gctgacagccatgacggcctcgtttgtgctggccacaccgaccgagacggaaggggcgctgtttcccggtcggat

SEQ ID NO: 254683 - DNA, 75 bp, synthetic construct
  source 1..75: mol_type = other DNA
gctgacagccatgacggcctcgtttgtgctggcaacaccgaccgagacggacggggcgctgtttcccggtcgcat

SEQ ID NO: 254684 - DNA, 75 bp, synthetic construct
  source 1..75: mol_type = other DNA
ccgatgcgcgaaatcttcatctcaccgcgcaggggctgttaaacaagccccgccgtcgcgcgttgccggaagata

SEQ ID NO: 254685 - DNA, 75 bp, synthetic construct
  source 1..75: mol_type = other DNA
tgaacgaggcagtaaaatcagcgcagtccgcccgcgtggtgctgtgggaaatcgacctgaaggcgcagggaggcg

SEQ ID NO: 254686 - DNA, 75 bp, synthetic construct
  source 1..75: mol_type = other DNA
acccgattgacggcagcggctttgagatgaacgggaagggcagcagtgcccgcccgtcgctgacggtgtccaatc

SEQ ID NO: 254687 - DNA, 75 bp, synthetic construct
  source 1..75: mol_type = other DNA
gctgacagccatgacggcctcgtttgtgctggccacaccgaccgagacggagggggcgctgtttcccggtcgaat

SEQ ID NO: 254688 - DNA, 75 bp, synthetic construct
  source 1..75: mol_type = other DNA
gctcggatcatggtggtgagcgcggtgcgtcactgtacagtcttatcgggacgtgcaaattaaacggcgtggatc

SEQ ID NO: 254689 - DNA, 75 bp, synthetic construct
  source 1..75: mol_type = other DNA
atgtcgccgaaatccctgctgcgtcatccgctggcggtttccagcctcgaagaactggcgaacggcaccttcctg

SEQ ID NO: 254690 - DNA, 75 bp, synthetic construct
  source 1..75: mol_type = other DNA
aaaatcaaaaaacatccaacgccgcgcaaaatctacgctgacaagctggagcaggaaaaagtcgcgacgctggaa

SEQ ID NO: 254691 - DNA, 75 bp, synthetic construct
  source 1..75: mol_type = other DNA
gacgaaaagcgactgttgcctgcggcgccgtgctgcccgaactgcggcggttcactgagctatctgggcgaggat

SEQ ID NO: 254692 - DNA, 75 bp, synthetic construct
  source 1..75: mol_type = other DNA
cagcctcgaagaactggcgaacggcaccttcctgccagccatcggtgaaatcgacgagcttgatccgaagggcgt

SEQ ID NO: 254693 - DNA, 75 bp, synthetic construct
  source 1..75: mol_type = other DNA
tgtgcgtatcgagcaactctacccgttcccgcataaagcgatgcaggaagtgttgcagcagtttgctcacgtcaa

SEQ ID NO: 254694 - DNA, 75 bp, synthetic construct
  source 1..75: mol_type = other DNA
cgcaccgtggtcgtctgaacgtgctggttaacgtgctgggtaaaaaaccgcaagacttgttcgacgaatttgccg

SEQ ID NO: 254695 - DNA, 75 bp, synthetic construct
  source 1..75: mol_type = other DNA
gttgcgtgaaaagatgaagaccctgtcgcgacacttagagttggcgaaggcgttcgcgtacgcacttaaccagtg

SEQ ID NO: 254696 - DNA, 75 bp, synthetic construct
  source 1..75: mol_type = other DNA
ttcggcagtcgttccgaaaaagccccccgccgtatcgcacaaatggaagccgatctgaaccggcttcagaaagag

SEQ ID NO: 254697 - DNA, 75 bp, synthetic construct
  source 1..75: mol_type = other DNA
tgctgggctcatgcccgccgaaagatccacgatgtgcacgtccgcatcccgtcagcactgacggaagaagccctg

SEQ ID NO: 254698 - DNA, 75 bp, synthetic construct
  source 1..75: mol_type = other DNA
cgcatcccgtcagcactgacggaagaagccctagagcagatcggtcagttgtacgccatagaggcggatataagg

SEQ ID NO: 254699 - DNA, 75 bp, synthetic construct
  source 1..75: mol_type = other DNA
caccaaagcgatatcacttttgttccctatggaagcggtatttgaatcctttgtggcacagaccctaccctacga

SEQ ID NO: 254700 - DNA, 75 bp, synthetic construct
  source 1..75: mol_type = other DNA
atgaccacgcatcggtacgtaacagataaccggtatctgggcgaggataccgccgaacagctggagttgatgcgt

SEQ ID NO: 254701 - DNA, 75 bp, synthetic construct
  source 1..75: mol_type = other DNA
gaccgaagcagacttccaggagaccttcaacgtcggttcatttgccagcggcaaagaaaccatgaaactcggcga

SEQ ID NO: 254702 - DNA, 75 bp, synthetic construct
  source 1..75: mol_type = other DNA
gccgggtcaacgctggcgccggcggtgtggttcgcttacagtccggacagaaaaggcatccatccgcagacccat

SEQ ID NO: 254703 - DNA, 75 bp, synthetic construct
  source 1..75: mol_type = other DNA
gcggaagcgttgcaatggcatctgctggattcgggtgcaatttatcgcgtactggcattggcggcattacatcac

SEQ ID NO: 254704 - DNA, 75 bp, synthetic construct
  source 1..75: mol_type = other DNA
attggttccggcagccgatgctctggtgttggattccaccaccttaagcattgagcaagtgattgaaaaagcgct

SEQ ID NO: 254705 - DNA, 75 bp, synthetic construct
  source 1..75: mol_type = other DNA
agagccagaaaaatggctgcgttacgttattgagcatatccaggactggccggcaaaccgggtacgcgatctgtt

SEQ ID NO: 254706 - DNA, 75 bp, synthetic construct
  source 1..75: mol_type = other DNA
tgggacatggacaccggaacgccttatcgagcagggaaaccgtacaggtccgtccacaggccgggtggttgaatc

SEQ ID NO: 254707 - DNA, 75 bp, synthetic construct
  source 1..75: mol_type = other DNA
ggaatacaaagccgtgaaggttggccctgactaccacgttgaatatgcccgtcactggtactccgttccacacga

SEQ ID NO: 254708 - DNA, 75 bp, synthetic construct
  source 1..75: mol_type = other DNA
ttccgtgaagtgattccgtttggggcttctctgcgttatgcaggccgcccagcctccgcctctccggcggtaggg

SEQ ID NO: 254709 - DNA, 75 bp, synthetic construct
  source 1..75: mol_type = other DNA
atccgctggcggtctccagcctcgaagaactggcgaacggcaccttcctgccagccatcggtgaaatcgacgagc

SEQ ID NO: 254710 - DNA, 75 bp, synthetic construct
  source 1..75: mol_type = other DNA
tactgcggcccgattggtgccgagtatatgcacattaccagcaccgaagaaaaacgctggatccaacagcgtatc

SEQ ID NO: 254711 - DNA, 75 bp, synthetic construct
  source 1..75: mol_type = other DNA
cacaggccgggtggttgaatccatgctgaaggcaaaaccccatccggaactggcttatcgtgcagttctggggct

SEQ ID NO: 254712 - DNA, 75 bp, synthetic construct
  source 1..75: mol_type = other DNA
aaacctgctgataaccggtccgacaggatgtggcaagagctggatagccaatgcactgggcgaacaggcatgtcg

SEQ ID NO: 254713 - DNA, 75 bp, synthetic construct
  source 1..75: mol_type = other DNA
atgccgcgtggcaatcttcgtggccgtaatggggcgtccaactatacctacgttgaagcgtgcgaaggtcaggac

SEQ ID NO: 254714 - DNA, 75 bp, synthetic construct
  source 1..75: mol_type = other DNA
ccttgacatcatagcagactggccggtgacccgggtgagtgagctgctgccgtggcgggtcatactgccttccaa

SEQ ID NO: 254715 - DNA, 75 bp, synthetic construct
  source 1..75: mol_type = other DNA
tgaaaatgcgctgcggacggtcagtctgggtcgtaaaaacttcctgttcttcgattctgaccacggtggtgagcg

SEQ ID NO: 254716 - DNA, 75 bp, synthetic construct
  source 1..75: mol_type = other DNA
gctgcgtcaaacccgcacccgcaaaccgttcccgaatcactcccccgcgatgaaaacggctgctgccggcagcat

SEQ ID NO: 254717 - DNA, 75 bp, synthetic construct
  source 1..75: mol_type = other DNA
taacccgaccgagccgcgccatgctcgaagcgatgatggccgccccggttggggacgacgtttacggagacgacc

SEQ ID NO: 254718 - DNA, 75 bp, synthetic construct
  source 1..75: mol_type = other DNA
aagaaaatgctgccgcgttaggcgaatacatgaaagcgagaaacgtgctgattaacgcctcgccgattgtccgcc

SEQ ID NO: 254719 - DNA, 75 bp, synthetic construct
  source 1..75: mol_type = other DNA
gccgccatttttctgcctaccggcacccaggccaacctggtcgctctgctcagtcactgcgaacgcggcgaagag

SEQ ID NO: 254720 - DNA, 75 bp, synthetic construct
  source 1..75: mol_type = other DNA
ttgcggggtataaacccgtggcgaaggggagcaaagagacacctgatgggctacgtaataaagatgccctggtgt

SEQ ID NO: 254721 - DNA, 75 bp, synthetic construct
  source 1..75: mol_type = other DNA
gttgcgtcagacccgcccccgtaagccgttccctgaatcactaccccgtgacgaaaagcgactgttgcctgcagc

SEQ ID NO: 254722 - DNA, 75 bp, synthetic construct
  source 1..75: mol_type = other DNA
agaaagctacctccgttatgtccttgacgtcattgctgactggccgataaaccgggtcagcgaactactcccctg

SEQ ID NO: 254723 - DNA, 75 bp, synthetic construct
  source 1..75: mol_type = other DNA
aaaccgttccccgaatcactcccccgcgatgaaaaacggctgctgccggcagcatcatgctgcccggaatgtgga

SEQ ID NO: 254724 - DNA, 75 bp, synthetic construct
  source 1..75: mol_type = other DNA
agccctggagcagatcggtcagttgtacgccatagaggcggatataaggggaatgccggcagagcagcggcttgc

SEQ ID NO: 254725 - DNA, 75 bp, synthetic construct
  source 1..75: mol_type = other DNA
agaaaacgaagaccgggcggttgtgggcgtatgttcgtgacgactgtaacgccgggtcaacgctggcgccggcgg

SEQ ID NO: 254726 - DNA, 75 bp, synthetic construct
  source 1..75: mol_type = other DNA
gcttatggctgcgaactgaaagagatcacgcaatattgtgattcgttcaccatttgtctgtcgaaaggtcttggt

SEQ ID NO: 254727 - DNA, 75 bp, synthetic construct
  source 1..75: mol_type = other DNA
gagctttccggtggtaccgcggtagtggcggatatggacgacccgaaagcggaagagctgctgttctccgccaac

SEQ ID NO: 254728 - DNA, 75 bp, synthetic construct
  source 1..75: mol_type = other DNA
attgtcgacctgggaccggaaggcggcagtggtggcggcgaaatcctcgtctccggtacgccagaaaccgtcgcg

SEQ ID NO: 254729 - DNA, 75 bp, synthetic construct
  source 1..75: mol_type = other DNA
gtctccggtacgccagaaaccgtcgcggagtgcgaagcttcgcatacggcgcgcttcctcaagccgatgctgtaa

SEQ ID NO: 254730 - DNA, 75 bp, synthetic construct
  source 1..75: mol_type = other DNA
cggtggtgaagtggtcgcggaaggtccgctggaagcgattatggcagttccggagtcgttaaccggccagtacat

SEQ ID NO: 254731 - DNA, 75 bp, synthetic construct
  source 1..75: mol_type = other DNA
ggttacatccgtgctcgtattgatggcgaagtctgcgatctttccgatccgccgaaactggaactgcaaaagaaa

SEQ ID NO: 254732 - DNA, 75 bp, synthetic construct
  source 1..75: mol_type = other DNA
cggcggtgaagtggtcgcggaaggtccactggaagcgattatggcggtgccggagtcgttgaccgggcagtacat

SEQ ID NO: 254733 - DNA, 75 bp, synthetic construct
  source 1..75: mol_type = other DNA
gagctttccggcggcacggcggtcgtcgccgatatggacgacccgaaagcggaagagctgctgttttccgcgaat

SEQ ID NO: 254734 - DNA, 75 bp, synthetic construct
  source 1..75: mol_type = other DNA
acgtccgtggcgggcgctgcgaagcctgtcagggcgacggtgtgatcaaagtggagatgcacttcctgccggata

SEQ ID NO: 254735 - DNA, 75 bp, synthetic construct
  source 1..75: mol_type = other DNA
tggtgacccatcttgacgtctcgcgtgcacaactggcggaagtcgccgcccactggcgcgcattcctggcgcgtt

SEQ ID NO: 254736 - DNA, 75 bp, synthetic construct
  source 1..75: mol_type = other DNA
attcgcgccgctgaccacgttatcgacatcggtccgggcgcaggtgttcacggtggcgaagtggtcgcggaaggg

SEQ ID NO: 254737 - DNA, 75 bp, synthetic construct
  source 1..75: mol_type = other DNA
aattacctgacactttcccgctcggcagagacactttctggcggtgaagcccagcgtatccgtctggcgagccag

SEQ ID NO: 254738 - DNA, 75 bp, synthetic construct
  source 1..75: mol_type = other DNA
ccactggaagcgattatggcggtgccggagtcgttaaccggacagtacatgagcggtaaacgcaagattgaagtg

SEQ ID NO: 254739 - DNA, 75 bp, synthetic construct
  source 1..75: mol_type = other DNA
tcactgagttatctgggcgaggataccgccgaacagctgaagttgatgcgtagcgcctgccgggttatccggacg

SEQ ID NO: 254740 - DNA, 75 bp, synthetic construct
  source 1..75: mol_type = other DNA
aaatcactttatgggctagcgcaatccgacttctatcaaatgtttgcctacggccaaaaataccttggcggaaca

SEQ ID NO: 254741 - DNA, 75 bp, synthetic construct
  source 1..75: mol_type = other DNA
agcgcgaaatagaccatctgcaggcgcaactggataaactccgccggatgaacttcggcagtcgttccgaaaaag

SEQ ID NO: 254742 - DNA, 75 bp, synthetic construct
  source 1..75: mol_type = other DNA
cggaagaagccctggagcagatcggtcagttgtacgccatagaggcggatataaggggaatgccggcagagcagc

SEQ ID NO: 254743 - DNA, 75 bp, synthetic construct
  source 1..75: mol_type = other DNA
ctgcaggaaaagctgaacgagcgtgaacgcgaaatagaccatctgcaggcacagctggataagctgcgccggatg

SEQ ID NO: 254744 - DNA, 75 bp, synthetic construct
  source 1..75: mol_type = other DNA
cggatgcgttcagcggttacgatcggctgttcagtgccgaacgtgaaggtggtgcactgacagaagttgcgtgct

SEQ ID NO: 254745 - DNA, 75 bp, synthetic construct
  source 1..75: mol_type = other DNA
aacgcgaaatagaccatctgcaggcacagctggataagctgcgccggatgaacttcggcagcggctcggaaaaag

SEQ ID NO: 254746 - DNA, 75 bp, synthetic construct
  source 1..75: mol_type = other DNA
aacgcgaaatagaccatctgcaggcacagctggataagctgcgccggatgaacttcggcagccgctccgaaaaag

SEQ ID NO: 254747 - DNA, 75 bp, synthetic construct
  source 1..75: mol_type = other DNA
aacgcgaaatagaccatctgcaggcacagctggataagctgcgccggatgaacttcggcagctgctctgaaaaag

SEQ ID NO: 254748 - DNA, 75 bp, synthetic construct
  source 1..75: mol_type = other DNA
atgtgcacgtccgcatcccgtcagcaccgacggaagaagccctggagcagatcggtcagttgtacgccatagagg

SEQ ID NO: 254749 - DNA, 75 bp, synthetic construct
  source 1..75: mol_type = other DNA
tcgccagtcagaaatatacggccggcaaggtgtggagctgagccgttcactgctgtcgggctgggtggatgcatg

SEQ ID NO: 254750 - DNA, 75 bp, synthetic construct
  source 1..75: mol_type = other DNA
cctgcggcgccgtgctgcccgaactgcggcggttcactgagctatctgggcgaggataccaccgaacagctggag

SEQ ID NO: 254751 - DNA, 75 bp, synthetic construct
  source 1..75: mol_type = other DNA
ctgttgaaatccctggaaagctggttgcggaaaagatgaagacccagtcgcgacactcagagttggcgaaggcgt

SEQ ID NO: 254752 - DNA, 75 bp, synthetic construct
  source 1..75: mol_type = other DNA
atggaatcactggcctcgctctataaaaatcatatagctacattgcaggaacgaactcgcgatgcgctgacgcgc

SEQ ID NO: 254753 - DNA, 75 bp, synthetic construct
  source 1..75: mol_type = other DNA
cggcggcattcgtatcgaagacaacgtggtgatccacgaaaacaacgtggaaaacatgacccgggatctgaaact

SEQ ID NO: 254754 - DNA, 75 bp, synthetic construct
  source 1..75: mol_type = other DNA
gccgggtcagcgctggcaccggcggtgtggttcgcctacagcccgacagaaaaggcatccatccgcagacccatc

SEQ ID NO: 254755 - DNA, 75 bp, synthetic construct
  source 1..75: mol_type = other DNA
tgcgctgaaccagtggccggcgctgacccgctatgcagaagatggctgggtggaggtggataataacattgccga

SEQ ID NO: 254756 - DNA, 75 bp, synthetic construct
  source 1..75: mol_type = other DNA
ggttatatcggtccggtgccggaacgtgcgctgcaactgggtattgaggccagcaacatcaacccgaaaggggtg

SEQ ID NO: 254757 - DNA, 75 bp, synthetic construct
  source 1..75: mol_type = other DNA
tgatcgccaccattgaaagcaggcgtcagctatgtggattaccacatccagttccatcagcgcatcgccaaactg

SEQ ID NO: 254758 - DNA, 75 bp, synthetic construct
  source 1..75: mol_type = other DNA
atggcgaagttcgccgagcatctgccgctgtaccgtcagtcggaaatctatgcccgccagggcgtggagctgcac

SEQ ID NO: 254759 - DNA, 75 bp, synthetic construct
  source 1..75: mol_type = other DNA
accccgtgacgaaaagcgactgttgcctgcggcgccgtgctgcccgaactgcggcggttcactgagctatctggg

SEQ ID NO: 254760 - DNA, 75 bp, synthetic construct
  source 1..75: mol_type = other DNA
gtcccggtgctgttgccaggcaataagaaaacgaagaccggcggttatggacctacgttcgtgacgaccgtaacg

SEQ ID NO: 254761 - DNA, 75 bp, synthetic construct
  source 1..75: mol_type = other DNA
caaactccatgctgacgatacgcctgtcccggtgctgttgccgggcaataagaagacgaagaccgggcgcttatg

SEQ ID NO: 254762 - DNA, 75 bp, synthetic construct
  source 1..75: mol_type = other DNA
cccgcgtgctgacctcaaagtatgcagagcacacaccgctgtatcgtcagtctgaaatatacggtcgccagggcg

SEQ ID NO: 254763 - DNA, 75 bp, synthetic construct
  source 1..75: mol_type = other DNA
ccgttccccgaatcactcccccgcgatgaaaaacgcctgcggccagcgggttcctgctgcccggagtgtggtggt

SEQ ID NO: 254764 - DNA, 75 bp, synthetic construct
  source 1..75: mol_type = other DNA
tgggctgaggcggacaataacatcgctgaaaatgcgttgcggatggtcagtctgggccgcaaaaactacctgttc

SEQ ID NO: 254765 - DNA, 75 bp, synthetic construct
  source 1..75: mol_type = other DNA
tatctgggtgaggatgccgccgaacagctggagctgatgcgcagcgccttccgggttatccggactgtacgtgaa

SEQ ID NO: 254766 - DNA, 75 bp, synthetic construct
  source 1..75: mol_type = other DNA
cggccgtgcagcgcccgctgcgtcaaacccgcacccgcaaaccgttccccgaatcactcccccgcgatgaaaaac

SEQ ID NO: 254767 - DNA, 75 bp, synthetic construct
  source 1..75: mol_type = other DNA
tggtgctgaatctcgataagtgcatcggctgtcacacctgttcagttacctgtaaaaacgtctggaccagccgtg

SEQ ID NO: 254768 - DNA, 75 bp, synthetic construct
  source 1..75: mol_type = other DNA
ggctcatgcccgccgaaagatccacgatgtgcacgtccgcatcccgtcagcactgacggaagaagccctagagca

SEQ ID NO: 254769 - DNA, 75 bp, synthetic construct
  source 1..75: mol_type = other DNA
catcgtgcaggcacctgcaccttcgcggcccatcgagcggggtatcgccggaccggggctgctggcccgcgtgct

SEQ ID NO: 254770 - DNA, 75 bp, synthetic construct
  source 1..75: mol_type = other DNA
gccgcatctcttattagggatggtcgcggcgagtttaggtctgcctgtactcagcaacgcagccgagtcaaatgc

SEQ ID NO: 254771 - DNA, 75 bp, synthetic construct
  source 1..75: mol_type = other DNA
gctttaatgataagatttgtgcgctaaatacgtttgaatacgatcgggatggcaataacgtgagtggaatactga

SEQ ID NO: 254772 - DNA, 75 bp, synthetic construct
  source 1..75: mol_type = other DNA
tattccgttgattactggcatcaacatgccattcgcacggtaatccgtcatctttccttcgcaatggcaccgcaa

SEQ ID NO: 254773 - DNA, 75 bp, synthetic construct
  source 1..75: mol_type = other DNA
tgagtcgttcactgctgtcgggctgggtggatgcatgctgccggctactgtcaccgctggaagaagcgcttcagg

SEQ ID NO: 254774 - DNA, 75 bp, synthetic construct
  source 1..75: mol_type = other DNA
aacttcggcagtcgttccgaaaaggtatcccgccgtatcgcacagatggaagacgacctgaaccggctgcagaaa

SEQ ID NO: 254775 - DNA, 75 bp, synthetic construct
  source 1..75: mol_type = other DNA
atcaacgctggctttacgaactgcgctttgcgtttgacggtattccacttagccgggatattgaacgtgatataa

SEQ ID NO: 254776 - DNA, 75 bp, synthetic construct
  source 1..75: mol_type = other DNA
tgtggcgacctgtccgagcggggctatctacaaacgtgaagaagatggcatcgtactgatcgatcaggataaatg

SEQ ID NO: 254777 - DNA, 75 bp, synthetic construct
  source 1..75: mol_type = other DNA
tcagtctgggccgcaaaaactacctgttcttcggttcggatcatggaggagagcggggagcgctgctgtacagcc

SEQ ID NO: 254778 - DNA, 75 bp, synthetic construct
  source 1..75: mol_type = other DNA
cctccgaacagctggagttgatgcgtagcgcttttcgggttatccggacggtacgggaaaaacatgcctgtactc

SEQ ID NO: 254779 - DNA, 75 bp, synthetic construct
  source 1..75: mol_type = other DNA
atgcgttcacaggttacgacaggttgttcagtgcagaacgtgaaggtggtgcactgacagaagttgcgtgctggg

SEQ ID NO: 254780 - DNA, 75 bp, synthetic construct
  source 1..75: mol_type = other DNA
aacgcgaaatagaccatctgcaggcacagctggataagctgcgccggatgaacttcggcagcagctcagaaaaag

SEQ ID NO: 254781 - DNA, 75 bp, synthetic construct
  source 1..75: mol_type = other DNA
ttttggttacggcattaacctcgactccagcaagctgcgggtcgggattttactggagcagcgtagcgaagcggc

SEQ ID NO: 254782 - DNA, 75 bp, synthetic construct
  source 1..75: mol_type = other DNA
gtcgcgtacgggcgctgtgcgttaaagagacgcggcagatcgttcgcgatccgagtagctggctgattgcggtag

SEQ ID NO: 254783 - DNA, 75 bp, synthetic construct
  source 1..75: mol_type = other DNA
gtggccggcactgacgtactatgcgaacgatggctgggtggaaatcgacaataacatcgctgaaaatgccctgcg

SEQ ID NO: 254784 - DNA, 75 bp, synthetic construct
  source 1..75: mol_type = other DNA
ggatgcccgtacaaaaaaatctacttcaactggaagagtggtaagtcagagaaatgtatcttctgctacccgcgt

SEQ ID NO: 254785 - DNA, 75 bp, synthetic construct
  source 1..75: mol_type = other DNA
tgccggggatcgacgattattacgagccgttcgattttgactatcagaacctgcataccgcgccggaaggcagca

SEQ ID NO: 254786 - DNA, 75 bp, synthetic construct
  source 1..75: mol_type = other DNA
gacgtcatagccgactggccgataaaccgggtcggcgaactgctcccctggcgcgtagcactgccgactgaataa

SEQ ID NO: 254787 - DNA, 75 bp, synthetic construct
  source 1..75: mol_type = other DNA
cagcctgatcggtagctgcaaacttaacggaatcgagccggaaacgtggctacgccacgtgatcagtgtcatcaa

SEQ ID NO: 254788 - DNA, 75 bp, synthetic construct
  source 1..75: mol_type = other DNA
ttttgtgtcgattatgatgactacatgcctgattgtgcagccaatcggctcttacactccgcgctagataagctt

SEQ ID NO: 254789 - DNA, 75 bp, synthetic construct
  source 1..75: mol_type = other DNA
taccggttcgcatgccccgtctctgctctgcagagcgcctctctgaaagtatggtcgatgaaatatttcagaagg

SEQ ID NO: 254790 - DNA, 75 bp, synthetic construct
  source 1..75: mol_type = other DNA
ttaatgggggttattatggaggagtaaaatttgagaatgcattgggtatgaataaagattttttgtttggatcaa

SEQ ID NO: 254791 - DNA, 75 bp, synthetic construct
  source 1..75: mol_type = other DNA
gtttacaaggctgaaaaatcagactcccagccgccacaaaacggcaccatgcaacagcaatacgcagaaaactct

SEQ ID NO: 254792 - DNA, 75 bp, synthetic construct
  source 1..75: mol_type = other DNA
aaccctgtgtatgttcgttttgatacgaccgttgtcggggagaatacggtctcactggtcagacggtgtatcaaa

SEQ ID NO: 254793 - DNA, 75 bp, synthetic construct
  source 1..75: mol_type = other DNA
aaggttttggccgccagaaaggccataccgagctgtaccgcggcgcggagtatatggtggattttctgccgaaag

SEQ ID NO: 254794 - DNA, 75 bp, synthetic construct
  source 1..75: mol_type = other DNA
gtcacctctccgattaccggccgtattggtaaatcgaacgtgacggaaggcgcattggtgcaaaacggccaggcg

SEQ ID NO: 254795 - DNA, 75 bp, synthetic construct
  source 1..75: mol_type = other DNA
tctggcaggccgattttaaaccggatatgaaactgtttaagaagtttcgggggtatttattggtgaagacgcagg

SEQ ID NO: 254796 - DNA, 75 bp, synthetic construct
  source 1..75: mol_type = other DNA
gcttacgacgataacgatcacagctccaaatatcaataaagcgtacagggatatggaaatcatctgcagaacgca

SEQ ID NO: 254797 - DNA, 75 bp, synthetic construct
  source 1..75: mol_type = other DNA
aggaaaaggctgccggtattcaggacgtcacctatcagaccgatcaacaaaccttgatcctcaacaccgcgaccg

SEQ ID NO: 254798 - DNA, 75 bp, synthetic construct
  source 1..75: mol_type = other DNA
aactttaaaaccgacaaaccacagccggttaacgcgctgctgaaagaagccgaaaaacgcaacctgtcgctgtta

SEQ ID NO: 254799 - DNA, 75 bp, synthetic construct
  source 1..75: mol_type = other DNA
taatgcctttttatgaacaatatggattcttgaaagctgattgtggtgatacatcacgtacagaaatgtggctac

SEQ ID NO: 254800 - DNA, 75 bp, synthetic construct
  source 1..75: mol_type = other DNA
ttgccgatagttgccggaaagcccgccacggtacggcatattattgatgttgtggcacgtcatggacgcgatgaa

SEQ ID NO: 254801 - DNA, 75 bp, synthetic construct
  source 1..75: mol_type = other DNA
cgtggtcgagtggtcttattgagtttggttacgtcctgccagaaggtgcattgccgatagttgccggaaagcctg

SEQ ID NO: 254802 - DNA, 75 bp, synthetic construct
  source 1..75: mol_type = other DNA
acgattattcgcacggcgcaaaccggcaaaatcggtgacggtaaaattttcgtctttgacgtggcgcgggttatt

SEQ ID NO: 254803 - DNA, 75 bp, synthetic construct
  source 1..75: mol_type = other DNA
acaaggatgtaactatattcggtaatgactccaacttattgatagtgttttatgttcagataatgcccgatgact

SEQ ID NO: 254804 - DNA, 75 bp, synthetic construct
  source 1..75: mol_type = other DNA
atggcgcgctttccgccggtaatgactccaacttattgatagtgttttatgttcagataatgcccgatgactttg

SEQ ID NO: 254805 - DNA, 75 bp, synthetic construct
  source 1..75: mol_type = other DNA
gctgtccatttacagccgggtttacttcactcgtttcgatggtaatgactccaacttattgatagtgttttatgt

SEQ ID NO: 254806 - DNA, 75 bp, synthetic construct
  source 1..75: mol_type = other DNA
gcttgagcttttaaagcagctagaccccgaggttcgtaacgatcttctgcgaggcgctgcggaaaaacagcgagt

SEQ ID NO: 254807 - DNA, 75 bp, synthetic construct
  source 1..75: mol_type = other DNA
caggatggcgtggcgtcatccgtggtctgtcatgcagaacgtgtggggcacgcgcggctggcgctttcggtgcgc

SEQ ID NO: 254808 - DNA, 75 bp, synthetic construct
  source 1..75: mol_type = other DNA
ggatgaggcgctgggctggctcagtcaggatggcgtggcgtcatccgtggtctgtcatgcagaacgtgtgggaca

SEQ ID NO: 254809 - DNA, 75 bp, synthetic construct
  source 1..75: mol_type = other DNA
ctgatgttgcataccgatgacggctggcaattaattggggtgcaaagttcggctcctgccgcgaaagatcgctgg

SEQ ID NO: 254810 - DNA, 75 bp, synthetic construct
  source 1..75: mol_type = other DNA
taaaccagacaaagcaattgcgctgcgttttgtttcgaataaagggctatggcgctatgagatccacgatattga

SEQ ID NO: 254811 - DNA, 75 bp, synthetic construct
  source 1..75: mol_type = other DNA
atgacacgacccaatcaccgtgggatgcggttgggcaactggaaacggccagcggcaatttatgtacggcgacgc

SEQ ID NO: 254812 - DNA, 75 bp, synthetic construct
  source 1..75: mol_type = other DNA
ctctattcctgtcatttctgactgtgtatcaatggctattgaaagtcgcttcaaatatatgatgctgctttttta

SEQ ID NO: 254813 - DNA, 75 bp, synthetic construct
  source 1..75: mol_type = other DNA
tttcgccaacaaacgggaattgcactatttattgtgattttacccgacattggtaatgactccaacttattgata

SEQ ID NO: 254814 - DNA, 75 bp, synthetic construct
  source 1..75: mol_type = other DNA
aaatcaccgaagcaaacgctattaaatcaattttcaggtaatgactccaacttactgatagtgttttatgttcag

SEQ ID NO: 254815 - DNA, 75 bp, synthetic construct
  source 1..75: mol_type = other DNA
ggtcatgaaaaaacctatttcaggagaaccggtcaacgggaaaatgtatttttccggtaagcgtcaacggagcac

SEQ ID NO: 254816 - DNA, 75 bp, synthetic construct
  source 1..75: mol_type = other DNA
cccaccatcaatatcaacgctgagacgatgggcaaggaatggaaacatttatcctgcacctgaactacacgggag

SEQ ID NO: 254817 - DNA, 75 bp, synthetic construct
  source 1..75: mol_type = other DNA
atgtatgaagcgttaaaaggcgtttatctctccaccgcttacacctacgccaaacatcgccctgaccacgctgac

SEQ ID NO: 254818 - DNA, 75 bp, synthetic construct
  source 1..75: mol_type = other DNA
tcgggttcagcgagatccattctgggtaaaaaacatcatgagcccgtcaaagctccgcgaaaaatgggacgaact

SEQ ID NO: 254819 - DNA, 75 bp, synthetic construct
  source 1..75: mol_type = other DNA
agctccgcgaaaaatgggacgaactggtcatccgcctgggacgtttgatcttacccagcaatagtggacacgcgg

SEQ ID NO: 254820 - DNA, 75 bp, synthetic construct
  source 1..75: mol_type = other DNA
acgtatgtggatccgagcaaaaagaatctgcgccccaagacaaaacacatgaagctgccagctggcggcacctta

SEQ ID NO: 254821 - DNA, 75 bp, synthetic construct
  source 1..75: mol_type = other DNA
tatccgcctggggcgttcgcctgagcagcgttgcgtgaatcacatttctgaaccggacactgaaataccgccggg

SEQ ID NO: 254822 - DNA, 75 bp, synthetic construct
  source 1..75: mol_type = other DNA
gtaaaaaacgtcatgagcccgtcaaagcttcgcgaaaaatgggatgagctggttattcgtctgggacgttcgcct

SEQ ID NO: 254823 - DNA, 75 bp, synthetic construct
  source 1..75: mol_type = other DNA
acgacctcaacgcctcgattgcgtcgcttggcgagacgcagaacaccatgtcgatgctgagcgatgcgcagaccg

SEQ ID NO: 254824 - DNA, 75 bp, synthetic construct
  source 1..75: mol_type = other DNA
tcggaatgcagcgggatacgcgcaacgagcaggtcacgctgaaccagatagtcgaccgcagaacggcttcgatgc

SEQ ID NO: 254825 - DNA, 75 bp, synthetic construct
  source 1..75: mol_type = other DNA
cgtgattatcgtcaccgtgtctgacgtcatgagcgtgttgcatgacagctacgacaacggcaaatccggggaaaa

SEQ ID NO: 254826 - DNA, 75 bp, synthetic construct
  source 1..75: mol_type = other DNA
cgaaaacgcagcgaggagattaaccgccagaatcgccagttgcgggtggaaaaaatcctgaatcgttcgggcatc

SEQ ID NO: 254827 - DNA, 75 bp, synthetic construct
  source 1..75: mol_type = other DNA
aaacgggtctcgacgcccagcaaaccaatatggacgttattgccaacaacctggcaaacgtcagcaccaacggtt

SEQ ID NO: 254828 - DNA, 75 bp, synthetic construct
  source 1..75: mol_type = other DNA
tttaaaatgcgccgctccatcaggtcaaaatgacacgatggaagaggtcaaaatgaaacgctccattggttcaaa

SEQ ID NO: 254829 - DNA, 75 bp, synthetic construct
  source 1..75: mol_type = other DNA
aacgagcttttagatggtggcaaagtgagcgaatccatcggttcaaaatgcgccgctccatcaggtcaaaatgac

SEQ ID NO: 254830 - DNA, 75 bp, synthetic construct
  source 1..75: mol_type = other DNA
agcaatgcttgctattattgttataatatttagatttatttatattattttagaaaattcaatttcttttgtttg

SEQ ID NO: 254831 - DNA, 75 bp, synthetic construct
  source 1..75: mol_type = other DNA
actcggtcggtacgcgtaccattgttgatgtgttggacgccaccactacgctgtacaacgccaaacaagaactgg

SEQ ID NO: 254832 - DNA, 75 bp, synthetic construct
  source 1..75: mol_type = other DNA
tcgtagcgtcgtgcaaaccgtacgttcctccttcaacaacattaatgcatctatcagtagcattaacgcctacaa

SEQ ID NO: 254833 - DNA, 75 bp, synthetic construct
  source 1..75: mol_type = other DNA
atggcgagatcatgcgaccaaaagagcctaactggactgcctgggccaatgacgtgcgcacaatgcggatgctgg

SEQ ID NO: 254834 - DNA, 75 bp, synthetic construct
  source 1..75: mol_type = other DNA
caacagagaatacaacagagaataaaaaactctcttgtccggacgcttcgcaaccggacgagttgacggctgaac

SEQ ID NO: 254835 - DNA, 75 bp, synthetic construct
  source 1..75: mol_type = other DNA
aactacgggagcgagcttttagatggtggcaaattgagcgaatccatcggtttaaaatgcgccgctccatcaggt

SEQ ID NO: 254836 - DNA, 75 bp, synthetic construct
  source 1..75: mol_type = other DNA
gtggcggaagaactggtcaacatgattcaggtacaacgtgcctacgaaatcaacagtaaagcggtatctaccacc

SEQ ID NO: 254837 - DNA, 75 bp, synthetic construct
  source 1..75: mol_type = other DNA
acaacctgtgcaaatgctatcaggaaggcagtgtgcaaaccgatgtgctgcacaatgtcagtttcagcgtcggcg

SEQ ID NO: 254838 - DNA, 75 bp, synthetic construct
  source 1..75: mol_type = other DNA
acaacctgtgcaaacgctatcaggaaggcagtgtgcaaaccgatgtgctgctcaatgtcagtttcagcgtgggcg

SEQ ID NO: 254839 - DNA, 75 bp, synthetic construct
  source 1..75: mol_type = other DNA
ggcgtgggccaatgacgtgcgcacaatgcggatgctggatggaagaagtcacagacaaatttgcgaaatgttcag

SEQ ID NO: 254840 - DNA, 75 bp, synthetic construct
  source 1..75: mol_type = other DNA
gcaacacctgtccagactaatcttcctggttacaccccgggtgcagatatcattagtgtttcaccgaccagaaac

SEQ ID NO: 254841 - DNA, 75 bp, synthetic construct
  source 1..75: mol_type = other DNA
caagtggttctggtaacttcatgacccgcatgacggcgctgctggcaacgttattcttcatcatcagtctggtgc

SEQ ID NO: 254842 - DNA, 75 bp, synthetic construct
  source 1..75: mol_type = other DNA
gggaaaacctgagtgctccggcgaaaaccgaacagactcagccagctgctccggctaaaccgaccagcgacatcc

SEQ ID NO: 254843 - DNA, 75 bp, synthetic construct
  source 1..75: mol_type = other DNA
tcaagatcgtcaaggtatttgtcaccaattggctaacgatgatcgtttgaattgggttcctaataatgaaacata

SEQ ID NO: 254844 - DNA, 75 bp, synthetic construct
  source 1..75: mol_type = other DNA
atatacaccctaaatgggccggtggggttccatcaactatgcatatacaggatgggctacccattcctaagtcag

SEQ ID NO: 254845 - DNA, 75 bp, synthetic construct
  source 1..75: mol_type = other DNA
ccttaaagctggattaatagtgttagatgcatcacaaaatggcagtggtggtgactacggatatatggcatttgc

SEQ ID NO: 254846 - DNA, 75 bp, synthetic construct
  source 1..75: mol_type = other DNA
ccttgaaccttatggttttacatctgccgcacagaacggtgctgagggcgttgctttatttccggcgggcgatcg

SEQ ID NO: 254847 - DNA, 75 bp, synthetic construct
  source 1..75: mol_type = other DNA
gagatcagaaacaacacgttgagcaccttgaaccttatggttttacatctgccgcacagaacggtgctgagggcg

SEQ ID NO: 254848 - DNA, 75 bp, synthetic construct
  source 1..75: mol_type = other DNA
gaagaaatgataagtgctggtgcaattcagggcttaaatataaaaaatgccatctcgatcgagaccgtgaaacac

SEQ ID NO: 254849 - DNA, 75 bp, synthetic construct
  source 1..75: mol_type = other DNA
gggaaaatctgagtgctccggcgaaaaccgaacaaactcagccagctgctccggctaagccgaccagcgatatcc

SEQ ID NO: 254850 - DNA, 75 bp, synthetic construct
  source 1..75: mol_type = other DNA
gccgcacagaacggtgctgagggcgttgctttattcccggcgggcgatcgttcgcatggtgtggttgtggtcgtg

SEQ ID NO: 254851 - DNA, 75 bp, synthetic construct
  source 1..75: mol_type = other DNA
tgtccctgattgccggtgaacccaaagccggggttgaacatcttgaaccctacggttttaccgcaagggcaaaca

SEQ ID NO: 254852 - DNA, 75 bp, synthetic construct
  source 1..75: mol_type = other DNA
aaaattaatccggcagaggcttaccgactggctgcatgggctgacgatgaagcgttatccctgacacaaaccagg

SEQ ID NO: 254853 - DNA, 75 bp, synthetic construct
  source 1..75: mol_type = other DNA
atgtggagagccatatgtgcgacttgaagcaacatttgaatgtgatctatataaattcaaaagtaagcgtacagc

SEQ ID NO: 254854 - DNA, 75 bp, synthetic construct
  source 1..75: mol_type = other DNA
gaagacagcgacaataaaaatgtttttgaacaaattggcaaaaactcttttattgtaagaaaatcaattgcatgt

SEQ ID NO: 254855 - DNA, 75 bp, synthetic construct
  source 1..75: mol_type = other DNA
ggctcataaagacgaaattccaccgttagcaatcacaaatgaagatgtgattttgagacacttacgtgctgccgc

SEQ ID NO: 254856 - DNA, 75 bp, synthetic construct
  source 1..75: mol_type = other DNA
atccacgagccaaatcaacatccgggtgtaaatcagaaagagctggagtacatcgccgcgggtggcgcgctgatc

SEQ ID NO: 254857 - DNA, 75 bp, synthetic construct
  source 1..75: mol_type = other DNA
atgaaatcatccccttgggtcgcttaatctatatggttaatcagaagaaagaccgtctgcttaacgattatctgt

SEQ ID NO: 254858 - DNA, 75 bp, synthetic construct
  source 1..75: mol_type = other DNA
acggcgtggatatgcgcgatatatgccgctacccccgttactttattcgtaccccttataatggggtgttagcca

SEQ ID NO: 254859 - DNA, 75 bp, synthetic construct
  source 1..75: mol_type = other DNA
actccactgatccagagagcttcaaagtgcaagtgagaaatgttgactccgatctaagaatatcgtgcatagtac

SEQ ID NO: 254860 - DNA, 75 bp, synthetic construct
  source 1..75: mol_type = other DNA
atgtccgtagaaaatattgtcaacattaacgaatctaacctgcaacaggttctagaacagtcgatgaccactccg

SEQ ID NO: 254861 - DNA, 75 bp, synthetic construct
  source 1..75: mol_type = other DNA
atccttgctgcgctgggtacgggtgatgcactggcgtcgaagtatcgccgccagctgtatgcgttgttgtattga

SEQ ID NO: 254862 - DNA, 75 bp, synthetic construct
  source 1..75: mol_type = other DNA
ctgagaagtggcgggattgcatagtggctcataaagacgaaattccaccgttagcaatcacaaatgaagatgtga

SEQ ID NO: 254863 - DNA, 75 bp, synthetic construct
  source 1..75: mol_type = other DNA
attcaagaaaagtacatgggatctcaccatagaagattatgaatatacagaattcccacatgctatgcagaggtg

SEQ ID NO: 254864 - DNA, 75 bp, synthetic construct
  source 1..75: mol_type = other DNA
aagaaggcacccgggtcagcattaataatgccagcgcggaagagttagcccgcgcgatgaatggcgttggcctga

SEQ ID NO: 254865 - DNA, 75 bp, synthetic construct
  source 1..75: mol_type = other DNA
tcagaaaaattctgagtcaattaacaaactccagttggcattgagtagaaatcaagagttgattgcttttattcg

SEQ ID NO: 254866 - DNA, 75 bp, synthetic construct
  source 1..75: mol_type = other DNA
aaagggttcaacaatcagatgattttattgatttatcatacgttaaaccgtattttagtcagataaatttatcag

SEQ ID NO: 254867 - DNA, 75 bp, synthetic construct
  source 1..75: mol_type = other DNA
agtcgggtattaactttaatgaggcaattatcaattatgaaacattgtgcgaaggcctaaaaaatgactttgtta

SEQ ID NO: 254868 - DNA, 75 bp, synthetic construct
  source 1..75: mol_type = other DNA
cgcatcagccaggggcggcgctgcatattccacacggtctggcgaacgccatgttgctgccaacggtgatggaat

SEQ ID NO: 254869 - DNA, 75 bp, synthetic construct
  source 1..75: mol_type = other DNA
cctcgctgatgccggatgtggcgattctcgacgccgcgttgaccgaaggtgtgccgtcgcatgtcacggcgatga

SEQ ID NO: 254870 - DNA, 75 bp, synthetic construct
  source 1..75: mol_type = other DNA
ctttgcttatgtaagagagcgcagtgattttgcagtgaaatatagtaaatatatagaagagcaagttacagaaat

SEQ ID NO: 254871 - DNA, 75 bp, synthetic construct
  source 1..75: mol_type = other DNA
tgtaagcgtctggaatgcagtgcccgcactgatgcagatgctgtgcgaataccacagcggcgatcggatgagtta

SEQ ID NO: 254872 - DNA, 75 bp, synthetic construct
  source 1..75: mol_type = other DNA
tcaggtaatggagcgtaacggggaattgcactttaattgggacgtggtggaacaattgtttgaaccggcgctaat

SEQ ID NO: 254873 - DNA, 75 bp, synthetic construct
  source 1..75: mol_type = other DNA
atgaacctgacgactctgacccaccgcgatgcgttgtgtctgaatgcgcgctttaccagccgtgaagaggccatc

SEQ ID NO: 254874 - DNA, 75 bp, synthetic construct
  source 1..75: mol_type = other DNA
cgtgagctgcgtgacaccctctcacatcagatgattgattgtagtcgctggcctctgtttcagatggaggtcgtg

SEQ ID NO: 254875 - DNA, 75 bp, synthetic construct
  source 1..75: mol_type = other DNA
cgccgcgctacggattggggctgtgccaacttgggatggcagacttttccgctgtggcatcgcattttcaattgt

SEQ ID NO: 254876 - DNA, 75 bp, synthetic construct
  source 1..75: mol_type = other DNA
gaacgatgcagagaaaacggcggcgagctttgtctggcgcgaagcgagtggtgagcgaatttaccgcactgggga

SEQ ID NO: 254877 - DNA, 75 bp, synthetic construct
  source 1..75: mol_type = other DNA
gggcgtaagcaggtgctggcacatgccttgctgatgccggatgtggccattctcgacgccgccctgaccgaaggc

SEQ ID NO: 254878 - DNA, 75 bp, synthetic construct
  source 1..75: mol_type = other DNA
cagcaacctttacgggatgctggcaggtggggctgcggtctacggttttaataaagcctttatccgcccggccgc

SEQ ID NO: 254879 - DNA, 75 bp, synthetic construct
  source 1..75: mol_type = other DNA
gcctctgcccgtgtggagctggttgccccggaagggtggcaggctcgcagtattgatattgatgacacgtccggt

SEQ ID NO: 254880 - DNA, 75 bp, synthetic construct
  source 1..75: mol_type = other DNA
tggggattgccattggttctacggtgggcagctatctcggtaactatctggggggatggctgactgaagcctggc

SEQ ID NO: 254881 - DNA, 75 bp, synthetic construct
  source 1..75: mol_type = other DNA
aagcctgatgagaaacaacggaaaatggcttcccgagaagatcggtatcaatcaggcatccacttttacaggatt

SEQ ID NO: 254882 - DNA, 75 bp, synthetic construct
  source 1..75: mol_type = other DNA
aacggcaatggccacaaccggaaatgcagagcaacagaacacacagcaaataaggattgaacagatacaggaaga

SEQ ID NO: 254883 - DNA, 75 bp, synthetic construct
  source 1..75: mol_type = other DNA
ctgctggatggcagcgccagtgccacagacaagggagaagcggtcggctctcttgcaggcagtattgccggtggt

SEQ ID NO: 254884 - DNA, 75 bp, synthetic construct
  source 1..75: mol_type = other DNA
acgcggccagcgttttatgaactttcttaccggggtaaatcctgctgccgttcagcccgtactggtcaccaactg

SEQ ID NO: 254885 - DNA, 75 bp, synthetic construct
  source 1..75: mol_type = other DNA
acgtcgcccttccgcaaaccgcagaccactgtgccgggaacgcagcccggacgcgctggccgcttcctgaatttc

SEQ ID NO: 254886 - DNA, 75 bp, synthetic construct
  source 1..75: mol_type = other DNA
ccgtttgacagcctgaaaaagagcctgaaaggctttctggattatgctgatgcggcacagaaaagcggcttacag

SEQ ID NO: 254887 - DNA, 75 bp, synthetic construct
  source 1..75: mol_type = other DNA
ggctggcgcgatggcagccccggttctgctggatggcagcgccagtgccacagacaagggagaagcggtcggctc

SEQ ID NO: 254888 - DNA, 75 bp, synthetic construct
  source 1..75: mol_type = other DNA
gtccgggtgctgcattgctgggatacggattatcagcggcggccttcctgacctcacctttccggcgctctcctc

SEQ ID NO: 254889 - DNA, 75 bp, synthetic construct
  source 1..75: mol_type = other DNA
aaacgcttcaggcactgcgcgacgccggttatggcgatgcgctggatcgtattggtcagggtgcgcagaccgccg

SEQ ID NO: 254890 - DNA, 75 bp, synthetic construct
  source 1..75: mol_type = other DNA
caagagtcgatccttgatggcgtcaacaacagcctgttggcagtgcgcgacgacctgctggaagtggcgaatggc

SEQ ID NO: 254891 - DNA, 75 bp, synthetic construct
  source 1..75: mol_type = other DNA
gcgtgtaataccggtgcgggcgcggcattgtcgattgctatcgcggtgattggctataacaaaagttgcaccatt

SEQ ID NO: 254892 - DNA, 75 bp, synthetic construct
  source 1..75: mol_type = other DNA
aaactcgccactccaagaaatattaatggtgtcccatttgacggaacgcaggatataaatattacatcggggatg

SEQ ID NO: 254893 - DNA, 75 bp, synthetic construct
  source 1..75: mol_type = other DNA
ataaggcggcgaatgctctgccatcggacggcaccgccgttgccgcgaacaggctggcaaatgcccatacaatta

SEQ ID NO: 254894 - DNA, 75 bp, synthetic construct
  source 1..75: mol_type = other DNA
cgcgaacaggctggcaaatgcccacacaattaatggtgttccctttgacggaacgcaggatatcaacattacctc

SEQ ID NO: 254895 - DNA, 75 bp, synthetic construct
  source 1..75: mol_type = other DNA
tgacgaacaggggtaaagcgctggaggccgcctccgctgctggtggagaccccgttgtactggcggaatttgttg

SEQ ID NO: 254896 - DNA, 75 bp, synthetic construct
  source 1..75: mol_type = other DNA
gcgtggcgaatatgcctgcgctggcaccagcgcagagtaataccaccacctggtttaccgaaggtgacggacaga

SEQ ID NO: 254897 - DNA, 75 bp, synthetic construct
  source 1..75: mol_type = other DNA
cttgactgtgatgtcatatgtaatggtcctttagatgaactggttgattataatttaaatgctgatattgcatgt

SEQ ID NO: 254898 - DNA, 75 bp, synthetic construct
  source 1..75: mol_type = other DNA
ccgcgacctcattgctcgtaatggtgagattgaagggcttcgaaaactggttgctgagcttgaggagacaaaatc

SEQ ID NO: 254899 - DNA, 75 bp, synthetic construct
  source 1..75: mol_type = other DNA
cgactgcttaggtatcattggtgttgcgcgcgacgttgccgtgctgaaccagttgccgctggttgaaccggaaat

SEQ ID NO: 254900 - DNA, 75 bp, synthetic construct
  source 1..75: mol_type = other DNA
gcagggaccagaatggcgcggatatcccggacaaaggaacctttatcgataacctcggtttacgggatacggtaa

SEQ ID NO: 254901 - DNA, 75 bp, synthetic construct
  source 1..75: mol_type = other DNA
gtattcagccggataaggcgcagttaaaccagcttacgctgtccattaaagccattatcgctgcgaatgcttttt

SEQ ID NO: 254902 - DNA, 75 bp, synthetic construct
  source 1..75: mol_type = other DNA
agcgaaggtgataaccgttacctgcgcagggagcagaacggcgcagacattccggataaaggggcttttatcgat

SEQ ID NO: 254903 - DNA, 75 bp, synthetic construct
  source 1..75: mol_type = other DNA
cgtctggcccgtggttatcttggtctggggacgcttgccacaaaaaacagtcttggtcccgctgacgttaatgcc

SEQ ID NO: 254904 - DNA, 75 bp, synthetic construct
  source 1..75: mol_type = other DNA
atattgagtcctcatcttattctaaagatactgatggcaatgaaaaaatgaagttttacatgaataatcctgaag

SEQ ID NO: 254905 - DNA, 75 bp, synthetic construct
  source 1..75: mol_type = other DNA
acttaaattactcgcaggtgagttgtaaaaactcagttgattctacgattacggatttattagaaaaaccattga

SEQ ID NO: 254906 - DNA, 75 bp, synthetic construct
  source 1..75: mol_type = other DNA
aataaagaacagttagaaaaattaaatcctccggaagatttacgaacagtaatagaaaaattggggtggaagaat

SEQ ID NO: 254907 - DNA, 75 bp, synthetic construct
  source 1..75: mol_type = other DNA
ttgcggatatcatgattagggctgactgctatctgacagtcactgaaattaccattctcgccaaagaaaaatacc

SEQ ID NO: 254908 - DNA, 75 bp, synthetic construct
  source 1..75: mol_type = other DNA
tcgattctggagatttttttaaaattcccatatattaatgatgtaagaatactggattggtgttttaataaaaga

SEQ ID NO: 254909 - DNA, 75 bp, synthetic construct
  source 1..75: mol_type = other DNA
cgttttacggggctgaagcggggctaccgtctgacagagctggtcctgatgcatgagccactggcgcaacagcgg

SEQ ID NO: 254910 - DNA, 75 bp, synthetic construct
  source 1..75: mol_type = other DNA
atcagaggttactgaaggttgacccgctgaagtgcgtgctgtgcgggagtcagatgcgttttacggggctgaagc

SEQ ID NO: 254911 - DNA, 75 bp, synthetic construct
  source 1..75: mol_type = other DNA
tcgcctggatcaccggcaacgatttccgtgacctcgctcagcgcaataatattcaggcaccatacgcgttgaacg

SEQ ID NO: 254912 - DNA, 75 bp, synthetic construct
  source 1..75: mol_type = other DNA
tatgagggcgaacagctgtatcttaatgagttaggatatgtttatggtaatgaaaaaaaacaaatgaaattgtaa

SEQ ID NO: 254913 - DNA, 75 bp, synthetic construct
  source 1..75: mol_type = other DNA
ttggtgattctgaaaagataaagtatgcatgctccgtgataaatcatattgattttagccgcgatcaatctaaag

SEQ ID NO: 254914 - DNA, 75 bp, synthetic construct
  source 1..75: mol_type = other DNA
cggtgacaaaaatcaggtggagagggatgtatcagcagttactgaaagttgccccgctgaagtgcatcctgtgcg

SEQ ID NO: 254915 - DNA, 75 bp, synthetic construct
  source 1..75: mol_type = other DNA
ttgtcagcggcctgcaaaaagcgcgtccgggagagcaggttaaagccactaccgatacccccgcagatactgcat

SEQ ID NO: 254916 - DNA, 75 bp, synthetic construct
  source 1..75: mol_type = other DNA
tatggttctggaaagtcaggacgaatatgactcacaatgggcggcaatttgttccattgctccaaagagtggctg

SEQ ID NO: 254917 - DNA, 75 bp, synthetic construct
  source 1..75: mol_type = other DNA
ttgttaaatcttaaaagcttcgtggctaagaaacaagatttatttcgacacgaaatatcgaatgttaaacatttg

SEQ ID NO: 254918 - DNA, 75 bp, synthetic construct
  source 1..75: mol_type = other DNA
gtgtgtcagaacagacgatcccacagtgtgaccagcaagtggataatgcggtcccgggccttacgcagaagctgt

SEQ ID NO: 254919 - DNA, 75 bp, synthetic construct
  source 1..75: mol_type = other DNA
agaatactcattaatccagcgacacatcctgtcggcgtgagtgtgtcagaacagacgatcccacagtgtttctag

SEQ ID NO: 254920 - DNA, 75 bp, synthetic construct
  source 1..75: mol_type = other DNA
gtatgtcagaacagacgctcccacagtgtgatcagcaggtggataatgcggtcccgggctttacgcagaagctgt

SEQ ID NO: 254921 - DNA, 75 bp, synthetic construct
  source 1..75: mol_type = other DNA
gtttgtttaccgctatcagatggtgatgtttgtcatggattacgccggagagctggacgacctcacgctgccgct

SEQ ID NO: 254922 - DNA, 75 bp, synthetic construct
  source 1..75: mol_type = other DNA
ttcaacatatggccgataccgcagagcgtctgaacgaattcccggagcagtttgagccgttattcggcttgcgag

SEQ ID NO: 254923 - DNA, 75 bp, synthetic construct
  source 1..75: mol_type = other DNA
gtgaactgacgattgttgaggagtggtgctttggttatatgcgtggcgtggcactctctgattggtctgcattgc

SEQ ID NO: 254924 - DNA, 75 bp, synthetic construct
  source 1..75: mol_type = other DNA
atggttctggaaagtcagggcgaatatgactcacaatgggcggcaatttgttccattgctccaaagactggctgt

SEQ ID NO: 254925 - DNA, 75 bp, synthetic construct
  source 1..75: mol_type = other DNA
acacgaacaggcgaaatatctgtcgatggtgaattatttaactaatacatcattgtggttaggcggtgaggcgtt

SEQ ID NO: 254926 - DNA, 75 bp, synthetic construct
  source 1..75: mol_type = other DNA
atggctagacctgttaagtttactcgtgaaatgattgttgatattgctaaacgcttttatggcgatactgaacga

SEQ ID NO: 254927 - DNA, 75 bp, synthetic construct
  source 1..75: mol_type = other DNA
tgacgtgctggatgcgaccactacgctgtacaacgccaagcaggaactggcgaatgcccgttataactatctgat

SEQ ID NO: 254928 - DNA, 75 bp, synthetic construct
  source 1..75: mol_type = other DNA
gaatgtcggcggcgatcgcctgctggatatcgtctgcggtgcgccaaactgccgtcagggcctgcgtgtggcggt

SEQ ID NO: 254929 - DNA, 75 bp, synthetic construct
  source 1..75: mol_type = other DNA
ttatcgagctgcctgcggatgcgccgattggcaccgacatccgtgaatacctgaaacttgatgacaacaccatcg

SEQ ID NO: 254930 - DNA, 75 bp, synthetic construct
  source 1..75: mol_type = other DNA
gtgtagaaccggttgccggtagcttccacggcgtggtcgttggtgaagtggttgagtgtgcgcagcatccgaacg

SEQ ID NO: 254931 - DNA, 75 bp, synthetic construct
  source 1..75: mol_type = other DNA
cgtgcgacccgtctgctgattgacatctgcggcggtgaagctggcccgattatcgatatcactaacgaagcaacg

SEQ ID NO: 254932 - DNA, 75 bp, synthetic construct
  source 1..75: mol_type = other DNA
gcctgatcctgcaagataccagccgtacacttgaagaagaggagattgccgctaccgtcgccaaatgtgtagagg

SEQ ID NO: 254933 - DNA, 75 bp, synthetic construct
  source 1..75: mol_type = other DNA
tgagtggcaggcagttgcgccgagctggcgtttcgatatggagattgaagaagatctggtcgaagaagtcgcgcg

SEQ ID NO: 254934 - DNA, 75 bp, synthetic construct
  source 1..75: mol_type = other DNA
agagagtgagcttgaggggctactaaaagatggttttctcattaatggtgaagtcaatcagcattactttgaacc

SEQ ID NO: 254935 - DNA, 75 bp, synthetic construct
  source 1..75: mol_type = other DNA
atggatgaatacatcacagaccctattgaagtgctcacggaaatcatgaacgacaagcagcagccaaccgaaata

SEQ ID NO: 254936 - DNA, 75 bp, synthetic construct
  source 1..75: mol_type = other DNA
cggttacaggctgccgctgttctgatgccatattttcacgaaaccctaaccccatgttaccaggaggaagaagat

SEQ ID NO: 254937 - DNA, 75 bp, synthetic construct
  source 1..75: mol_type = other DNA
attgtggtgcggatggcgaaagagggtgaaacgctggtgctgcttgatggcactgaagcgaagctgaatgctgac

SEQ ID NO: 254938 - DNA, 75 bp, synthetic construct
  source 1..75: mol_type = other DNA
agagagtgaacttgaagacctacttaaagatggtttcctcataaatggtgaagttaatccgcattactttgaacc

SEQ ID NO: 254939 - DNA, 75 bp, synthetic construct
  source 1..75: mol_type = other DNA
ccgactactaaaagacggtttcctcataaatggagaggttaataagcattactttgaaccaactaatattgagag

SEQ ID NO: 254940 - DNA, 75 bp, synthetic construct
  source 1..75: mol_type = other DNA
attacttggtggtatattatatgattggtggcctttgaatattttattcacgctcctgactatatgctggatttg

SEQ ID NO: 254941 - DNA, 75 bp, synthetic construct
  source 1..75: mol_type = other DNA
gaagaattccttcaggaaatgaaggattaccaacacagaaatattgctttggaaacgcttaaaaaactgctttct

SEQ ID NO: 254942 - DNA, 75 bp, synthetic construct
  source 1..75: mol_type = other DNA
cgtactgccctacaacgcctgaatcctcacctcagtgaacaaaagtgtgaggaagccttgaaacagatgatgcag

SEQ ID NO: 254943 - DNA, 75 bp, synthetic construct
  source 1..75: mol_type = other DNA
ttgcaggcatcgatgacgctgtctgactgggagcgcgtgtacggtgttgtcccccgtgaaggtgccacgcaacag

SEQ ID NO: 254944 - DNA, 75 bp, synthetic construct
  source 1..75: mol_type = other DNA
cgctgacggcctttggtgaatccattttagaaaacacgtttaaagaccttaaaccggcttttacagactgttatt

SEQ ID NO: 254945 - DNA, 75 bp, synthetic construct
  source 1..75: mol_type = other DNA
ttgtgattactgaccgtaacgacttagatgatcagctattcggtacgttctcttccgcgacccagctacttcgtc

SEQ ID NO: 254946 - DNA, 75 bp, synthetic construct
  source 1..75: mol_type = other DNA
tacaggggttgcttaatcctgtaacgctgctggatataatccgccactttatcgtgtttgaggccagcaaacatg

SEQ ID NO: 254947 - DNA, 75 bp, synthetic construct
  source 1..75: mol_type = other DNA
aaacggatacggaggcgcgagcgaaaaatccccccgcgtcagcgccagtgcttcattaatgcgcgcaccggtgtt

SEQ ID NO: 254948 - DNA, 75 bp, synthetic construct
  source 1..75: mol_type = other DNA
ttgaagtaatggcgattgagcacctgcaagggatgggctatgaatatgtttacggcccggacattgaaccaagtg

SEQ ID NO: 254949 - DNA, 75 bp, synthetic construct
  source 1..75: mol_type = other DNA
tatctgggcattgcctctgatttaaaagaagccctctccttttactctgatgcaggtggacgtggagatcctgct

SEQ ID NO: 254950 - DNA, 75 bp, synthetic construct
  source 1..75: mol_type = other DNA
tgcaacagttcgtatcttttatgaaagccgtcttgccaaaattgccatcagtgatgaaggtcgtcagcttattga

SEQ ID NO: 254951 - DNA, 75 bp, synthetic construct
  source 1..75: mol_type = other DNA
tacggtattggtagcactacaaatacaccgggattcttcctctctacaagtataaaagataaaggaaaaattgtc

SEQ ID NO: 254952 - DNA, 75 bp, synthetic construct
  source 1..75: mol_type = other DNA
tcggttagtgaatgatctggaccaacgttactatcttgttattttacaagtttataatgatagccaaattcgtaa

SEQ ID NO: 254953 - DNA, 75 bp, synthetic construct
  source 1..75: mol_type = other DNA
gaatatttattgatgaagacgcaaattaatgctgtttattatggtgtaaaatcaaaaagcaatagaaggtccgca

SEQ ID NO: 254954 - DNA, 75 bp, synthetic construct
  source 1..75: mol_type = other DNA
agacagcggtggcggttttgcacctgaagttgtcgatcgcatatttgaaccattttttaccactaaacgtagagg

SEQ ID NO: 254955 - DNA, 75 bp, synthetic construct
  source 1..75: mol_type = other DNA
gttaccgtccttattataaacaggcaatggctggtttaaatggccgtttttacggtattggcagcaccacaaaca

SEQ ID NO: 254956 - DNA, 75 bp, synthetic construct
  source 1..75: mol_type = other DNA
tataaaagataaaggaaaaattgtcggtgttgtagtagtaaaaataagtcttaatgaaattgaaaaagcatgggc

SEQ ID NO: 254957 - DNA, 75 bp, synthetic construct
  source 1..75: mol_type = other DNA
ggatacccgatgaattgccgtggataattaaccggaccggccggcgcgcttaccgtgcgacggtggtgaaagtga

SEQ ID NO: 254958 - DNA, 75 bp, synthetic construct
  source 1..75: mol_type = other DNA
gtggttggtgaaagtgcgaaagagttagtcaatgtgaattttgctcagcaacccgcacagctggacgctttttat

SEQ ID NO: 254959 - DNA, 75 bp, synthetic construct
  source 1..75: mol_type = other DNA
gatcgacgtggaccaaagcagccctcttcacccgggagggggacgcgttaacgttggttaaccacgttctgaccc

SEQ ID NO: 254960 - DNA, 75 bp, synthetic construct
  source 1..75: mol_type = other DNA
gtggtgaaggttatttttggcggacaaatcgttaaaaacttcattgaaaacagcccggaatacagtaataaatcc

SEQ ID NO: 254961 - DNA, 75 bp, synthetic construct
  source 1..75: mol_type = other DNA
gagtgaaccgtatcattgagatggtcagcaaagatgacaatgtcaccatcagttatcttgcagattacttttcgg

SEQ ID NO: 254962 - DNA, 75 bp, synthetic construct
  source 1..75: mol_type = other DNA
gcaaccgtggtcggcgtcctggtcgaagtgccggtgatgctgctggtcgtgcgcgtggtgaatcgctcgaagagc

SEQ ID NO: 254963 - DNA, 75 bp, synthetic construct
  source 1..75: mol_type = other DNA
aatccaaatacagctttatgcgcctgattaatttgatgtacgacctggtgacctgccttaccacaacgccgctac

SEQ ID NO: 254964 - DNA, 75 bp, synthetic construct
  source 1..75: mol_type = other DNA
agatcccccgcctggtggcaaaagccgatgaaggctacgacgtggtaggaactgtgcgtcagaaccgccaggaca

SEQ ID NO: 254965 - DNA, 75 bp, synthetic construct
  source 1..75: mol_type = other DNA
atgagcgtaatgtttgatccagacacggcgatttatcctttccccccgaagccgaagccgacgccgttaagcatt

SEQ ID NO: 254966 - DNA, 75 bp, synthetic construct
  source 1..75: mol_type = other DNA
cggcgatttatcctttccccccgaagccgacgccgttaagcattgatgaaaaagcgtattaccgcgagaagataa

SEQ ID NO: 254967 - DNA, 75 bp, synthetic construct
  source 1..75: mol_type = other DNA
caattcttcgatggttatcaagcaaaatcaatggaaagtttcaaattcaaaccacgcataaaagatccagatatt

SEQ ID NO: 254968 - DNA, 75 bp, synthetic construct
  source 1..75: mol_type = other DNA
gccgaagagtgcaagaccatcaaggcggagtatcaacagaaacttaaaaaactgcgaaatagcagaagtgaggct

SEQ ID NO: 254969 - DNA, 75 bp, synthetic construct
  source 1..75: mol_type = other DNA
ttaatcaggcgcaccaccacagcctgtgaatcactggggaaagagtatgagatcctgctgattgatgacggcagt

SEQ ID NO: 254970 - DNA, 75 bp, synthetic construct
  source 1..75: mol_type = other DNA
tggactgtcgaagagtgcagggccatcaaggcggagtatcagcagaaactcaaagacctgcgaaacagcagaagt

SEQ ID NO: 254971 - DNA, 75 bp, synthetic construct
  source 1..75: mol_type = other DNA
tggactgtcgaagagtgcaaggcgatcaaggaagagtaccaacagaaacttaaaaaactgcgaaacagcagaagt

SEQ ID NO: 254972 - DNA, 75 bp, synthetic construct
  source 1..75: mol_type = other DNA
ccgctggcgagggtgcaacctgccgtagctgtgcgcattgcccgtggatggccatgaatggcctccaggccatcg

SEQ ID NO: 254973 - DNA, 75 bp, synthetic construct
  source 1..75: mol_type = other DNA
tctggcgatggaaagcgaagtcgacagtcgactggtcagtcaccaggatggcaaatggcaggtcagccacggtcc

SEQ ID NO: 254974 - DNA, 75 bp, synthetic construct
  source 1..75: mol_type = other DNA
aaccgccgcgctgatgcgtccgttccgtgaattaccagactggcgcattgacgacctgatgatctcattttccgt

SEQ ID NO: 254975 - DNA, 75 bp, synthetic construct
  source 1..75: mol_type = other DNA
agtcgactggtcagtcatcaggatggaaaatggcaggtcagccacggtccattcgaaagctacgatcatctcggt

SEQ ID NO: 254976 - DNA, 75 bp, synthetic construct
  source 1..75: mol_type = other DNA
tgcatatgaaagatacttgaatctttttacggcggaaaaaatgacacaagagtatcaatctgtttatttggacat

SEQ ID NO: 254977 - DNA, 75 bp, synthetic construct
  source 1..75: mol_type = other DNA
aaacatattatcctgatacatttggtggggtagagcaggtaatttaccagctaagtgagtcgggagctgcgtacg

SEQ ID NO: 254978 - DNA, 75 bp, synthetic construct
  source 1..75: mol_type = other DNA
gatatgggagctaaagataaagcgacaggaaaatcatggagtgatgtgcaacaacgccttcagcagtttcacagc

SEQ ID NO: 254979 - DNA, 75 bp, synthetic construct
  source 1..75: mol_type = other DNA
accagccggaacactttaagcaatggtttggcgagtttatatcccagtcacgtcatgaactggatatcgcgccgc

SEQ ID NO: 254980 - DNA, 75 bp, synthetic construct
  source 1..75: mol_type = other DNA
ttttatgcaaattggctatattcgtgtgtcaacaaacgaccagaacacggatttacaacgcaatgcactgaactg

SEQ ID NO: 254981 - DNA, 75 bp, synthetic construct
  source 1..75: mol_type = other DNA
tctcccaaaccaacgttttcgtttttatccctacctataccaactctgtatttttcacgaaacaaagaggatgtt

SEQ ID NO: 254982 - DNA, 75 bp, synthetic construct
  source 1..75: mol_type = other DNA
cttctcgcgcccacccggcagacgttttgccgcaggagatggataaactgcgtgaaatgatgcttgagttaatca

SEQ ID NO: 254983 - DNA, 75 bp, synthetic construct
  source 1..75: mol_type = other DNA
tgcgcgtattgcgcattggcgacgacgtgtatgccaatggtgagaagatcgattccccgcaccgtccggcactgg

SEQ ID NO: 254984 - DNA, 75 bp, synthetic construct
  source 1..75: mol_type = other DNA
ttcagggcaccggtcgccgtcgctggcgggtgggtgaaaaacggcaaatgaagcagcactgcccacacccggatc

SEQ ID NO: 254985 - DNA, 75 bp, synthetic construct
  source 1..75: mol_type = other DNA
ccgtttatgatggatgacaatggtcagaaagtcgggaccaatgaaccgtcagaagacccggatattccggctatc

SEQ ID NO: 254986 - DNA, 75 bp, synthetic construct
  source 1..75: mol_type = other DNA
acagcgaaagagtcgttccggtgattgatggtacagagcagacggcgtttgaccttgtgatgtggacaaatgatg

SEQ ID NO: 254987 - DNA, 75 bp, synthetic construct
  source 1..75: mol_type = other DNA
cggatgacagtggcaggaaggcgctgcgactggaaaaacagccgggtaaactgacctcctggaagatgttccgta

SEQ ID NO: 254988 - DNA, 75 bp, synthetic construct
  source 1..75: mol_type = other DNA
agttagcggtgttggtatggcttttgactgtagcattgacgaaattaaagtgcttggccgcgtattgttgagaat

SEQ ID NO: 254989 - DNA, 75 bp, synthetic construct
  source 1..75: mol_type = other DNA
taaaaatttcaccatgctcagggagtttaatcatcatgaccgtgttaactcctcaattatgatgattcccgtttc

SEQ ID NO: 254990 - DNA, 75 bp, synthetic construct
  source 1..75: mol_type = other DNA
gcggtaaagaatttacccccaaacacgcacaatggctgcatagccaatttaaaggcataccttcaatttgcttaa

SEQ ID NO: 254991 - DNA, 75 bp, synthetic construct
  source 1..75: mol_type = other DNA
gaactgaaggtgacgctatcggtaacgaatttgagcgcagaaactctgccatttggtactggctggcatccttat

SEQ ID NO: 254992 - DNA, 75 bp, synthetic construct
  source 1..75: mol_type = other DNA
gggggtgatcttcttgcgcttgcaccaggtgaatcaacaacttcagagatgtcgttgcgggttgcgttgctgtaa

SEQ ID NO: 254993 - DNA, 75 bp, synthetic construct
  source 1..75: mol_type = other DNA
gctggagcgggaacagtggctggcaggtgagttttgcgagcagttaccctgggagctggatttcaatcatctcgc

SEQ ID NO: 254994 - DNA, 75 bp, synthetic construct
  source 1..75: mol_type = other DNA
aggaactggattttaaccagctcacgccgttgccgcgccagtgggtaaacaatggttttgccggatggaatggtc

SEQ ID NO: 254995 - DNA, 75 bp, synthetic construct
  source 1..75: mol_type = other DNA
aggaactggattttaaccagctcgcgccgttgccgcgccagtgggtgaacaatggttttgccggatggaatggtc

SEQ ID NO: 254996 - DNA, 75 bp, synthetic construct
  source 1..75: mol_type = other DNA
atgaccatctataccctatctcagggggcgctaaagcttgaggtttccgatcagggcggtgtaattgaaggcttc

SEQ ID NO: 254997 - DNA, 75 bp, synthetic construct
  source 1..75: mol_type = other DNA
atctgccgatgaacagagaggaagccagcctgttcttccggctactgaaccgtcgatatgaaaaagcgagcatca

SEQ ID NO: 254998 - DNA, 75 bp, synthetic construct
  source 1..75: mol_type = other DNA
tattgccgctcgccgctgccgcgaatgtgacaccgtactggttgatccggatgatatgttaaaagcggcgctacg

SEQ ID NO: 254999 - DNA, 75 bp, synthetic construct
  source 1..75: mol_type = other DNA
cggccattatccctacatttttattggaagaaataatcgtagtaaaccgatctctaaagaaagtgtatcacaggt

SEQ ID NO: 255000 - DNA, 75 bp, synthetic construct
  source 1..75: mol_type = other DNA
tcatgctctatatcttgagaagcgtagagaaatgatacaatggtattctgattatctaactaaattgaaaggatg

SEQ ID NO: 255001 - DNA, 75 bp, synthetic construct
  source 1..75: mol_type = other DNA
cacgacaaggtggttacagatttgtgcatcattaacgcgcctgtcttccctgcatcgcctgactatgtggagcag

SEQ ID NO: 255002 - DNA, 75 bp, synthetic construct
  source 1..75: mol_type = other DNA
ggccgttatcagttaagcgaactggacaacttacagattgttgatgaaggacgatacagagcaaaggtcatacgc

SEQ ID NO: 255003 - DNA, 75 bp, synthetic construct
  source 1..75: mol_type = other DNA
cagtactggcaagtgcgtgaaaaagtgtttgattacgaaggtcgttttcgtcgggcgcacgaattacgcggttaa

SEQ ID NO: 255004 - DNA, 75 bp, synthetic construct
  source 1..75: mol_type = other DNA
actgagtttgatttagaaaatgctctctgggagatcccaaaagagcgcatgaaaaaacgtcgcccgcacctagta

SEQ ID NO: 255005 - DNA, 75 bp, synthetic construct
  source 1..75: mol_type = other DNA
gaaataactagtaaaaatatagggaaacccctgatttcatattttgatggaaaagtaatatcccaacctgcaatc

SEQ ID NO: 255006 - DNA, 75 bp, synthetic construct
  source 1..75: mol_type = other DNA
ccccggaaatgatagtcctcaaagatgaatgcaattttagtccggcagaacaatgcttctgcgtactctccggac

SEQ ID NO: 255007 - DNA, 75 bp, synthetic construct
  source 1..75: mol_type = other DNA
atgtcatttggcagctacgatttagtaagcctcgcaaaagcacgtgagaaacgcgatacggctcgtaagcaggta

SEQ ID NO: 255008 - DNA, 75 bp, synthetic construct
  source 1..75: mol_type = other DNA
gcagcaaaggctggcgtttccgctatcgctttgcaggtaagccaaagatgatttccttcggcgtctatggcgatg

SEQ ID NO: 255009 - DNA, 75 bp, synthetic construct
  source 1..75: mol_type = other DNA
gccaaagggataaacccaagtgaagccagaaaagcagataagattgctttgcagttcgcgcatgagaacagcttt

SEQ ID NO: 255010 - DNA, 75 bp, synthetic construct
  source 1..75: mol_type = other DNA
gcgatgaaactgccgccggaagtgaacctgattgcggtagcgcactacctgcaagcgctggagtgccagcgtgac

SEQ ID NO: 255011 - DNA, 75 bp, synthetic construct
  source 1..75: mol_type = other DNA
catcaagtctttcatcgacaaactgagcgactttgttgagcaggtttataaggttgataccgcggttatcgccgc

SEQ ID NO: 255012 - DNA, 75 bp, synthetic construct
  source 1..75: mol_type = other DNA
ttccggttaacgcgcaatacatccgtaacatcattctggctgcgcacaccacgcatgaccatattgttcatttct

SEQ ID NO: 255013 - DNA, 75 bp, synthetic construct
  source 1..75: mol_type = other DNA
ggcgccgtgggaaggtaccaccattccggcttatgatggttggtctgacgacgggaaatattcctgggtgaaatc

SEQ ID NO: 255014 - DNA, 75 bp, synthetic construct
  source 1..75: mol_type = other DNA
cgctggagtgccagcgtgacgctaaccgcgtcgtggcgctgctgggcggtaaaacgccgcacattcagaacctgg

SEQ ID NO: 255015 - DNA, 75 bp, synthetic construct
  source 1..75: mol_type = other DNA
tgtcctcgtatcgtccgatcacttctcattccgatgaatacctgatcaaaggaattcaggaaagcgcaaagcatt

SEQ ID NO: 255016 - DNA, 75 bp, synthetic construct
  source 1..75: mol_type = other DNA
gcagtccgttagcttcgctgagtgatattcaactggtcgcggccaaaccggaaggccccttgagcgccggcgcgc

SEQ ID NO: 255017 - DNA, 75 bp, synthetic construct
  source 1..75: mol_type = other DNA
tttcacctgcgctgggtgatatctggcgttcaacccagccgagcggcaagatcaacacgctggcgctggatatcc

SEQ ID NO: 255018 - DNA, 75 bp, synthetic construct
  source 1..75: mol_type = other DNA
cgttgaatggcatcattcatactcaactgggtaaaggcgaaattaccgaaatcaataccggacatgccgggcaat

SEQ ID NO: 255019 - DNA, 75 bp, synthetic construct
  source 1..75: mol_type = other DNA
gctaaccgcgtcgtggcgctgctgggcggtaaaacgccgcacattcagaacctggcggtaggtggggtcgcgaac

SEQ ID NO: 255020 - DNA, 75 bp, synthetic construct
  source 1..75: mol_type = other DNA
ctcgagctccgacaaggacagtctgtggatcatagtggtgatgagattgacaatgtggtcaatgaatccgtacaa

SEQ ID NO: 255021 - DNA, 75 bp, synthetic construct
  source 1..75: mol_type = other DNA
aacgctgagtaaaaatacgctcgtggtggcgatttccagttcaggctccacgcgcgatctgctgcatgtcgtgaa

SEQ ID NO: 255022 - DNA, 75 bp, synthetic construct
  source 1..75: mol_type = other DNA
gcgtgccggaattcccgaccgacagcaaaaatggtagcttcctgttcccgggcggctacatccagaatgccgatc

SEQ ID NO: 255023 - DNA, 75 bp, synthetic construct
  source 1..75: mol_type = other DNA
tgcgtattcctgcttccgtttcacccacggtcggggatgcgctgcattatgccctgcgtgattcggggtatcgtt

SEQ ID NO: 255024 - DNA, 75 bp, synthetic construct
  source 1..75: mol_type = other DNA
ctgaatattcactggttcctgtcgctggaagatgcgcaggaaaaactcgacaactggcgcagggaatacaatcat

SEQ ID NO: 255025 - DNA, 75 bp, synthetic construct
  source 1..75: mol_type = other DNA
gacggccaggcacagacgtattcgcccggcagtgaccgctgtggatcagtgctggagcatggatttcgttgctga

SEQ ID NO: 255026 - DNA, 75 bp, synthetic construct
  source 1..75: mol_type = other DNA
tctttgtttccgaccccgcgtttgataaaggatatgcgtttgatttcttctgtctggaaccgatgagccatgcgc

SEQ ID NO: 255027 - DNA, 75 bp, synthetic construct
  source 1..75: mol_type = other DNA
ggccggtgcgactgcgtacggccctgcaggtgatggcgggaccggcctggcaactggaggtggatgacgttcagc

SEQ ID NO: 255028 - DNA, 75 bp, synthetic construct
  source 1..75: mol_type = other DNA
tatccgtcagccccggaagtggtgcgttatgaccgttaccggctggttgatatttcgccttcacaggcacagcgt

SEQ ID NO: 255029 - DNA, 75 bp, synthetic construct
  source 1..75: mol_type = other DNA
acggccggtggttccttatcctgccgccggggatgcaagccgaagccatcccctacgacgggacgacctggatcc

SEQ ID NO: 255030 - DNA, 75 bp, synthetic construct
  source 1..75: mol_type = other DNA
attatttggttcccggttattttctggatgctaagcctggcaacgacgttggtatcatttacacgagtcatgttg

SEQ ID NO: 255031 - DNA, 75 bp, synthetic construct
  source 1..75: mol_type = other DNA
gtctgacgacaatatgggcctttacctgcctggtcggtttcattatttacgcagtccaacttgccggtgtaccgt

SEQ ID NO: 255032 - DNA, 75 bp, synthetic construct
  source 1..75: mol_type = other DNA
tgagcatgatattgctaaaaaggtttattccgctgcggatggggctactgacaatatatcaatggctgttgcgtc

SEQ ID NO: 255033 - DNA, 75 bp, synthetic construct
  source 1..75: mol_type = other DNA
cgggagcattctgtggtggcaggggcagcagatcaccggaaattaccagactatccgggcgcaggagcggacgca

SEQ ID NO: 255034 - DNA, 75 bp, synthetic construct
  source 1..75: mol_type = other DNA
tgtctacattgctgacagcatcgggcgcaagcattctatggtggcaggggcagcagatactcgacaattacacga

SEQ ID NO: 255035 - DNA, 75 bp, synthetic construct
  source 1..75: mol_type = other DNA
ccatacagccgcaggtgtcacgccagcgatccgcagtcgctgcatgcgctctgtagccaggaactggcaaacctg

SEQ ID NO: 255036 - DNA, 75 bp, synthetic construct
  source 1..75: mol_type = other DNA
actgaaccaggcgcgggcgctctctgcctggccgggtctggatcctgattccccgccgctggcctggcgttatgg

SEQ ID NO: 255037 - DNA, 75 bp, synthetic construct
  source 1..75: mol_type = other DNA
gcagcgttttttttaacggtgacggcgggaaaaagttttcctgggcgatgcaggttcgcgtcgtggatatggatc

SEQ ID NO: 255038 - DNA, 75 bp, synthetic construct
  source 1..75: mol_type = other DNA
gggctactgcgtaaacaccgtcccggcgcgccgctgaacggcgtaattttgacgctgaatgtggcagatttgacc

SEQ ID NO: 255039 - DNA, 75 bp, synthetic construct
  source 1..75: mol_type = other DNA
gatgctcaatgagtattacacccagctcaccattgccgacagcgcgctggcggcgagcaccctgccgggccgcat

SEQ ID NO: 255040 - DNA, 75 bp, synthetic construct
  source 1..75: mol_type = other DNA
gcgaaatcagtgcgacccagcgcaacgccggggagtggcaggggtttctgggactgctgcgtaaacaccgccccg

SEQ ID NO: 255041 - DNA, 75 bp, synthetic construct
  source 1..75: mol_type = other DNA
gagctggagtgtattaaggagacgatttctaagtattgtgcaaaattcacccgaaaagaagccatcttaaccccc

SEQ ID NO: 255042 - DNA, 75 bp, synthetic construct
  source 1..75: mol_type = other DNA
tagaagaaggtctggtattactgaacgggatcctcaacgagaaagaagaatacgcggtcattgaaaaagtcaccg

SEQ ID NO: 255043 - DNA, 75 bp, synthetic construct
  source 1..75: mol_type = other DNA
gaacagtttctctaaactaaaattgctgcgtcttagtaccggagacgtaaatcgtgaaactcacgcgctgttgac

SEQ ID NO: 255044 - DNA, 75 bp, synthetic construct
  source 1..75: mol_type = other DNA
gcgtgaatttgccgcgctgggcgcgccattgctggaagccattgaacagatcttcctcgatttaaaattcgatgc

SEQ ID NO: 255045 - DNA, 75 bp, synthetic construct
  source 1..75: mol_type = other DNA
gtggttcatcagcctgagttacgtcagccggggaatcattatctggtctataacgacaaattcattaagattagc

SEQ ID NO: 255046 - DNA, 75 bp, synthetic construct
  source 1..75: mol_type = other DNA
cgaccggtggatggtgaactgcttttcgccccccgccagctggcgttgcaggctggtgagagcgagtattttaaa

SEQ ID NO: 255047 - DNA, 75 bp, synthetic construct
  source 1..75: mol_type = other DNA
atcgttctgttactgatgttcctcgcactgtggctggttaactggtcgatgagcatcattggcgtgacggttctg

SEQ ID NO: 255048 - DNA, 75 bp, synthetic construct
  source 1..75: mol_type = other DNA
actctggcagaacaggttcatcagaaactgaatcatcttgaggaaaaactccaccgtgttgaccaggttcagcgg

SEQ ID NO: 255049 - DNA, 75 bp, synthetic construct
  source 1..75: mol_type = other DNA
taatatcggtttgttactggcaatgcttgggcagtttgatatttcgttacggtgcaccattgaaaatgccacaga

SEQ ID NO: 255050 - DNA, 75 bp, synthetic construct
  source 1..75: mol_type = other DNA
aaataaccgccagcccgcgcatccgccaggacacctcgacgctgctgactaatggaccgtgggcgctgtttcacc

SEQ ID NO: 255051 - DNA, 75 bp, synthetic construct
  source 1..75: mol_type = other DNA
gtgacttcaccatttattcaacaaattgctgataaccgggtatgtcaggtactcacctgttttcctgaaaaattt

SEQ ID NO: 255052 - DNA, 75 bp, synthetic construct
  source 1..75: mol_type = other DNA
gtgattctggcaaccacggaagacacctggggacaacagttcgagaagatgggtaagacctatcagcaaccgaag

SEQ ID NO: 255053 - DNA, 75 bp, synthetic construct
  source 1..75: mol_type = other DNA
aaattacgcaattacccgggtaaacgacagggtcagctcactggtcagtgatactgccaggctggtgcattattc

SEQ ID NO: 255054 - DNA, 75 bp, synthetic construct
  source 1..75: mol_type = other DNA
actcccggttacccgtgaggttcgtcgtctgtacttggctgaatatgctcgccgatggcaggattttctggcaag

SEQ ID NO: 255055 - DNA, 75 bp, synthetic construct
  source 1..75: mol_type = other DNA
ttgtcgccgccgcatcagcggatgacgcctgggtgatggggcgcgaaagtgcgcaaaaaaaaacgactgagattg

SEQ ID NO: 255056 - DNA, 75 bp, synthetic construct
  source 1..75: mol_type = other DNA
accgtgccgggcggcggcacgctgcactgcgactggtggtttaccaacgaagcagtgcttattgataccgccggg

SEQ ID NO: 255057 - DNA, 75 bp, synthetic construct
  source 1..75: mol_type = other DNA
tgctggatgcgggtaacgcgcaggagacggcggtgcggggaatacagcaggtggaatacaattttgacggacggc

SEQ ID NO: 255058 - DNA, 75 bp, synthetic construct
  source 1..75: mol_type = other DNA
cccttttacgccactgtggctgcgtctggcgcttatcggtctgatcctgctgacttatgcactatacggcctgta

SEQ ID NO: 255059 - DNA, 75 bp, synthetic construct
  source 1..75: mol_type = other DNA
cggcgtggtgatgctggcgctgctggtctggtttatcggaccgctggtggcgtttgacaccatgcatccgctggc

SEQ ID NO: 255060 - DNA, 75 bp, synthetic construct
  source 1..75: mol_type = other DNA
cgtgggcgtgtcacgtttccacgggccgccagtggggaggccgcagggtggcgcatggtgcggttctctatgtgg

SEQ ID NO: 255061 - DNA, 75 bp, synthetic construct
  source 1..75: mol_type = other DNA
atttatccgtggttgtgacgagcttaaacggcgcacaggggctacggtgctggtggttcaccattccggcaagga

SEQ ID NO: 255062 - DNA, 75 bp, synthetic construct
  source 1..75: mol_type = other DNA
acgaaatgaaaaacttcagccgctggctacgcaagctggaaaaagacggggttatttatatcgacggtgatgatg

SEQ ID NO: 255063 - DNA, 75 bp, synthetic construct
  source 1..75: mol_type = other DNA
ctggattacgtggttaaggggattattccggcggtatcgctatgcagcatatacggggctagcgggtcctataaa

SEQ ID NO: 255064 - DNA, 75 bp, synthetic construct
  source 1..75: mol_type = other DNA
agtcattatttttgcgggtagtgatgcctgggcacatgcgaaacagtggcaggaacaggacgggcgactggctgg

SEQ ID NO: 255065 - DNA, 75 bp, synthetic construct
  source 1..75: mol_type = other DNA
acgtgaaaaatatgcggcgatggttagccaaactggaaaaagacgccgtgatttacattgatggtgatgatgtag

SEQ ID NO: 255066 - DNA, 75 bp, synthetic construct
  source 1..75: mol_type = other DNA
aaacgggtaaaccggttcgaatgattattctggatacgctggcgcgctgctttggcggcaatgatgaaaatgatt

SEQ ID NO: 255067 - DNA, 75 bp, synthetic construct
  source 1..75: mol_type = other DNA
ttaatgccatcgggcaaaagctggcggcggcaggtgtacgggatgcgaattattaccctgagggaatgcacagcc

SEQ ID NO: 255068 - DNA, 75 bp, synthetic construct
  source 1..75: mol_type = other DNA
acatgaaaaaactggggtatgaaatgaaaaacttccggcgctggctgtacaagctggaaaaagatggggttattc

SEQ ID NO: 255069 - DNA, 75 bp, synthetic construct
  source 1..75: mol_type = other DNA
acctgattaatccgcattttaactgtgagcatgatattgctaaaaaggtttattccgctgctgatggggctactg

SEQ ID NO: 255070 - DNA, 75 bp, synthetic construct
  source 1..75: mol_type = other DNA
tgcactatcgcccttctccgcgacgatatgaaaaagctggggtatgagatgaagcacttccggcgctggttgtcc

SEQ ID NO: 255071 - DNA, 75 bp, synthetic construct
  source 1..75: mol_type = other DNA
agccaaaagaaagcgcatacgaccttaaaagcgtggaggtgtttaccgatacagatggcgaagagattgtgtcca

SEQ ID NO: 255072 - DNA, 75 bp, synthetic construct
  source 1..75: mol_type = other DNA
atgacatgaagaagatgggatacgaaatgaagcacttccggcgctggctgggcaagctggaaaaagacggcgtta

SEQ ID NO: 255073 - DNA, 75 bp, synthetic construct
  source 1..75: mol_type = other DNA
gttgatgcctatcttgccgctttaagagaacagctgattgctgctgtcaaagctggcgaccgagtaagaattaag

SEQ ID NO: 255074 - DNA, 75 bp, synthetic construct
  source 1..75: mol_type = other DNA
caaggccgacaagcgtttgagtttttcaaagacaaaatcaacgacgccatgctgttggcggacatccaaaaagcg

SEQ ID NO: 255075 - DNA, 75 bp, synthetic construct
  source 1..75: mol_type = other DNA
gtatgccgataaagcgcgtcaggtcagtgaactggcggtcgatttagtcgaacttctgcgcaaggaaccgctgga

SEQ ID NO: 255076 - DNA, 75 bp, synthetic construct
  source 1..75: mol_type = other DNA
aagggaaagtccatggtgtttcattatttggaacattctattatggcgatggcagccaagggacttttaaaggaa

SEQ ID NO: 255077 - DNA, 75 bp, synthetic construct
  source 1..75: mol_type = other DNA
ggcttgggtatgacgtgaaaaacatgcggcgatggttagcaaaactggagaaagacgacgttatctatatcgacg

SEQ ID NO: 255078 - DNA, 75 bp, synthetic construct
  source 1..75: mol_type = other DNA
caaggccgccaagcatttgagttttttaaagacaaaatcaacgatgccatgctgttggccgatatccaaaacgct

SEQ ID NO: 255079 - DNA, 75 bp, synthetic construct
  source 1..75: mol_type = other DNA
cttatttggccgagcgtgaaacacttgttgcccgctatgccaaagagcgcgagcagaaccgtatcccggttgaga

SEQ ID NO: 255080 - DNA, 75 bp, synthetic construct
  source 1..75: mol_type = other DNA
aggctgcgcaacaaatcattatttccctcgggctaccgaaggcacagcataacgagcgttcggccctttgccttt

SEQ ID NO: 255081 - DNA, 75 bp, synthetic construct
  source 1..75: mol_type = other DNA
gatagccgcaggtgcacagttttatgattttacgagtgaaaatatgtggaatggtgaaagttttgaacatgaatt

SEQ ID NO: 255082 - DNA, 75 bp, synthetic construct
  source 1..75: mol_type = other DNA
ccccacgttttgctccgggtagcgtgctggtctatgctggcgacactggcgaaaagtggggctacttcgacgctc

SEQ ID NO: 255083 - DNA, 75 bp, synthetic construct
  source 1..75: mol_type = other DNA
atgaacaaccaaaataattatattgaggccgcgcagcaaattatagcatccttaggcctacccagagcgcagcag

SEQ ID NO: 255084 - DNA, 75 bp, synthetic construct
  source 1..75: mol_type = other DNA
aatctgggtggcgtgcgtgccagcaatctcaccgcagtgatccctgactactcgaaagaaaagttgctgattgat

SEQ ID NO: 255085 - DNA, 75 bp, synthetic construct
  source 1..75: mol_type = other DNA
atgagcaatcttacttatcttcagggttatcccgagcagctactttcccaggtgcgaacgctgattaacgaacag

SEQ ID NO: 255086 - DNA, 75 bp, synthetic construct
  source 1..75: mol_type = other DNA
gctgttgtcggtaaatgtaagaccgaagaagagattgttgaacgcggcatgaaactgattgccgattacgaactc

SEQ ID NO: 255087 - DNA, 75 bp, synthetic construct
  source 1..75: mol_type = other DNA
atctggcaaacgcccgcaagctgggtgaccgcctgattgtcgccgtcaacagcgatgcctccaccaaacggctga

SEQ ID NO: 255088 - DNA, 75 bp, synthetic construct
  source 1..75: mol_type = other DNA
tgaacagacggatgaattatcagaggatgacgatctggatgacgacgaaattgagatagaggaagaggaagagga

SEQ ID NO: 255089 - DNA, 75 bp, synthetic construct
  source 1..75: mol_type = other DNA
tgaagtcgtcgagtttggcagaacaaactatcaatttgatcccgtaaaaaaacagcaaaacttcttaagagtgaa

SEQ ID NO: 255090 - DNA, 75 bp, synthetic construct
  source 1..75: mol_type = other DNA
atgagcaatcttacttatcttcagggttatcccgaacagttgctttcccaggtgcgcacgctgattaatgaacag

SEQ ID NO: 255091 - DNA, 75 bp, synthetic construct
  source 1..75: mol_type = other DNA
aaggggattctcgtccggttaatccgctcgaacagcgcatgattgtactgggcgcactggaagcggtcgactggg

SEQ ID NO: 255092 - DNA, 75 bp, synthetic construct
  source 1..75: mol_type = other DNA
cgatcgcttgattgtcgccgtgaacagcgatgcctccactaaacggctgaaaggggattctcgtccggttaatcc

SEQ ID NO: 255093 - DNA, 75 bp, synthetic construct
  source 1..75: mol_type = other DNA
gcttctttgcgaatgcggcagcaggcgttgttgtcggtaaattggggacgtccacggtttcaccgatcgagctgg

SEQ ID NO: 255094 - DNA, 75 bp, synthetic construct
  source 1..75: mol_type = other DNA
gggtaaaacgccgctgcatatgccaacccaggcgcaggaagtgtatgacgttaccggtgcgggcgacacggtgat

SEQ ID NO: 255095 - DNA, 75 bp, synthetic construct
  source 1..75: mol_type = other DNA
ggcgaagtgctggtgctcaactttgaagacggttgctcgacgaccaacatcatcaagaagatccaacaggataaa

SEQ ID NO: 255096 - DNA, 75 bp, synthetic construct
  source 1..75: mol_type = other DNA
actataaaccagaagagattgccgggagtaaagaagtctgggccaacggcggcgaagtgctggtgctcaactttg

SEQ ID NO: 255097 - DNA, 75 bp, synthetic construct
  source 1..75: mol_type = other DNA
gtatacattgtttttagaatcattagaaccaaaaataaaatagaacgcgatgttataaaatccttgaacgacagt

SEQ ID NO: 255098 - DNA, 75 bp, synthetic construct
  source 1..75: mol_type = other DNA
cgcgtgctggtattagcacacgttaaagaactggtggcgcaaaaccatgcaaagtatcaggcgctggggctgaaa

SEQ ID NO: 255099 - DNA, 75 bp, synthetic construct
  source 1..75: mol_type = other DNA
cgccttcgagcagctttttatccgcccgcatacgcgcacaccgggcatccctctgcgctggataaccgccgccga

SEQ ID NO: 255100 - DNA, 75 bp, synthetic construct
  source 1..75: mol_type = other DNA
tggggctgacgctgggcgctgatgtgcctgtctttgtgcgtggtcatgctgcttttgccgaaggcgttggcgaaa

SEQ ID NO: 255101 - DNA, 75 bp, synthetic construct
  source 1..75: mol_type = other DNA
tgcgacacggtattggtggacccggatgatatgttaaaagcagcgctacgtctgaaagacgctctggtgctgcgt

SEQ ID NO: 255102 - DNA, 75 bp, synthetic construct
  source 1..75: mol_type = other DNA
tgacgacggtcatcgcgaacagtgtgacttccgtttccgttttaaaaattgcccgcaatgtaacgcggaaaacga

SEQ ID NO: 255103 - DNA, 75 bp, synthetic construct
  source 1..75: mol_type = other DNA
gcgtctggcgcccggcaagactgattgcttaattcttgattatgcgggtaatcctcacgatctctacgcgccaga

SEQ ID NO: 255104 - DNA, 75 bp, synthetic construct
  source 1..75: mol_type = other DNA
gaatattgaaccggaactgaaagcggcgctgctgccacaacaggggctgggactggtctgcggtgccaccggctc

SEQ ID NO: 255105 - DNA, 75 bp, synthetic construct
  source 1..75: mol_type = other DNA
cgtcaacgacaggcattactggcagaaggtgtgatggtatcgggaagcgggcaaatcgacttacagcgctatcgc

SEQ ID NO: 255106 - DNA, 75 bp, synthetic construct
  source 1..75: mol_type = other DNA
atcacgcacagaaccgggaacgcattgataccgattatcagcgcctcaaaaagctcatctggccggagggtgaca

SEQ ID NO: 255107 - DNA, 75 bp, synthetic construct
  source 1..75: mol_type = other DNA
catgaatattgaaccggacctgctggatgccatgctccggaaaaccggtctgggtttcatctgcggagagaccgg

SEQ ID NO: 255108 - DNA, 75 bp, synthetic construct
  source 1..75: mol_type = other DNA
aatcattcgcaaggaaaaacggcggatacgggatcaggttctgaccatgtatcagacgggcagcattgaggcatc

SEQ ID NO: 255109 - DNA, 75 bp, synthetic construct
  source 1..75: mol_type = other DNA
tgatgtggaaagttttgcggcaggacttcgctctgccgttcgccgtaacccggacatcatcggtatcggtgaaat

SEQ ID NO: 255110 - DNA, 75 bp, synthetic construct
  source 1..75: mol_type = other DNA
accgcgaagcacggttaaaaggtgacgttcgtaacgaagacggcacactaatgtcgccagtaaaaccacgcacgg

SEQ ID NO: 255111 - DNA, 75 bp, synthetic construct
  source 1..75: mol_type = other DNA
tgaaccttgaacagcgtaacctatcctcagtttttggcacactgaaaaagctgggacattggtctgcacccaacc

SEQ ID NO: 255112 - DNA, 75 bp, synthetic construct
  source 1..75: mol_type = other DNA
aaatgacgttaatttcatgttaatttcatcacttattataactataatattatggttttccattaccgttgttaa

SEQ ID NO: 255113 - DNA, 75 bp, synthetic construct
  source 1..75: mol_type = other DNA
tcctggctaactttgtctcagctcccggagctgtttcgagcctgtgagcaatacggcaaagaagacctcaccatg

SEQ ID NO: 255114 - DNA, 75 bp, synthetic construct
  source 1..75: mol_type = other DNA
tcaagccctgctatcaggagtttaaaaagatgctcaaactcacgaatatcgagctaactgaagggcaaaagacgc

SEQ ID NO: 255115 - DNA, 75 bp, synthetic construct
  source 1..75: mol_type = other DNA
gatagataatggctatcataaagacccggcaaaatggattgctaaaccgataactgtcaatcgtgagcaacaata

SEQ ID NO: 255116 - DNA, 75 bp, synthetic construct
  source 1..75: mol_type = other DNA
cactgcgtcgcttcatccgtgaagagccggagtacaaccgtatcgccacctaccagtccatgaacgactgctacg

SEQ ID NO: 255117 - DNA, 75 bp, synthetic construct
  source 1..75: mol_type = other DNA
ccaacccgaacacggagctggtcgccggacagctgattacagcctcccgcaccattggcgcgctgccaaccttct

SEQ ID NO: 255118 - DNA, 75 bp, synthetic construct
  source 1..75: mol_type = other DNA
acacagattccggaccacataatggtggctctggttttcctgttatcgttatgatacctgacctgcttacgaatg

SEQ ID NO: 255119 - DNA, 75 bp, synthetic construct
  source 1..75: mol_type = other DNA
gcgatccgcgccctgctggataaagtgctgccgcgcgaagaagagctgaaagcgcagcaggcgatgcaactgatg

SEQ ID NO: 255120 - DNA, 75 bp, synthetic construct
  source 1..75: mol_type = other DNA
atgacaaggaagcaagttgctgaattaactggaattaactacaacacctatgctggatatgagcagggaaaagta

SEQ ID NO: 255121 - DNA, 75 bp, synthetic construct
  source 1..75: mol_type = other DNA
gaaaggcgaaaaaatcctcctggacaccaccgggccaattgcgcgcacgaatagcagttatgacggcatcaaacg

SEQ ID NO: 255122 - DNA, 75 bp, synthetic construct
  source 1..75: mol_type = other DNA
gagatacgcgcactttgctcctgaccatttagagcaagccgtctctctcaatcctctttctctctatgttggcga

SEQ ID NO: 255123 - DNA, 75 bp, synthetic construct
  source 1..75: mol_type = other DNA
acgcctggtcgggttgacgggcattgacgatgcggcgcgcgcgctgagtaaatctctggccgacgtcaacgtcaa

SEQ ID NO: 255124 - DNA, 75 bp, synthetic construct
  source 1..75: mol_type = other DNA
gcgggtaattcgctggaagaagcctgcttctttgccaatgcggcggctggcgtggtggtcggcaaactgggaacc

SEQ ID NO: 255125 - DNA, 75 bp, synthetic construct
  source 1..75: mol_type = other DNA
atggaagccaaaattcacaacggcgcgaagctgattgtgatcgatcctcgctttacacgtacagcggcggtggct

SEQ ID NO: 255126 - DNA, 75 bp, synthetic construct
  source 1..75: mol_type = other DNA
aaggggattcccgcccggttaacccgctcgaacagcgtatgattgtattgggggcgctggaatcggtcgactggg

SEQ ID NO: 255127 - DNA, 75 bp, synthetic construct
  source 1..75: mol_type = other DNA
caccggctttggcgtgatgactgaagaggaactgaaactggccgtagcggcggcacgtaaacgcggtgaaaaagt

SEQ ID NO: 255128 - DNA, 75 bp, synthetic construct
  source 1..75: mol_type = other DNA
agtgaataccatcgaagaacgtccgggcggcgcggctaacgtggcgatgaatatcgcttctctcggtgctaatgc

SEQ ID NO: 255129 - DNA, 75 bp, synthetic construct
  source 1..75: mol_type = other DNA
tgcctaagcacaggcgcacgctggcgagaagcaataaatcttacccgctcacaggtgaccaaataccgaattacc

SEQ ID NO: 255130 - DNA, 75 bp, synthetic construct
  source 1..75: mol_type = other DNA
ttcctaaatggctgtatgacgagttgtccgaacgtcagggaagaatgttcaagccctgctatcaggactttaaga

SEQ ID NO: 255131 - DNA, 75 bp, synthetic construct
  source 1..75: mol_type = other DNA
caccttgaacaagctgtaacccttaatccgttatcgctgtatgttggcgacaatatggcggcagaggttgcataa

SEQ ID NO: 255132 - DNA, 75 bp, synthetic construct
  source 1..75: mol_type = other DNA
ggaaagcaccggttcttggtgttctttcagtcctggtaatcccgaagaaagtgaaatgtcgcagatggcagatct

SEQ ID NO: 255133 - DNA, 75 bp, synthetic construct
  source 1..75: mol_type = other DNA
aaggaagacaggcgcacgttaaaagagttggttgattcatggtatagcgctcatggcattacactgaaagacggc

SEQ ID NO: 255134 - DNA, 75 bp, synthetic construct
  source 1..75: mol_type = other DNA
tgctggatgcctgtgctgattctcaaagccccagtctgctaatgattgcaaaaatatgcctagcaaccggtgctc

SEQ ID NO: 255135 - DNA, 75 bp, synthetic construct
  source 1..75: mol_type = other DNA
tgtcgttactgaacgacgcgcagtggtcgccggaaagcctggcctttaaccatccggccagcgccccgtatattc

SEQ ID NO: 255136 - DNA, 75 bp, synthetic construct
  source 1..75: mol_type = other DNA
ggcctgcgaacccgccacgctatgtgaagtccgtaatacccgacgccgcatgattgtcccggcaacacgctggca

SEQ ID NO: 255137 - DNA, 75 bp, synthetic construct
  source 1..75: mol_type = other DNA
tcatgatttacgccataacgacgctgaaagccgccaggcctatctggacgcactgcgccagcgcctgagccaccg

SEQ ID NO: 255138 - DNA, 75 bp, synthetic construct
  source 1..75: mol_type = other DNA
aacaggtgctcgaacagacgcccccctgggtgatacccgcacacaccctccatacgcctgaagaggcgttgcggg

SEQ ID NO: 255139 - DNA, 75 bp, synthetic construct
  source 1..75: mol_type = other DNA
taatctacacctccggctctaccggcacgccgaaaggggtagtcatttctcaccagggagcgctcaacacctgtt

SEQ ID NO: 255140 - DNA, 75 bp, synthetic construct
  source 1..75: mol_type = other DNA
ttccccccgcgcccgtcttgccgctggccggcgaacccgccacgctatgtgaagtccgtaatacccgacgccgca

SEQ ID NO: 255141 - DNA, 75 bp, synthetic construct
  source 1..75: mol_type = other DNA
tacgattggtcgaaaaatgcgcgtaaagatgaagtgaagtttcagttgagtctggcgtttccgttgtggcgtggg

SEQ ID NO: 255142 - DNA, 75 bp, synthetic construct
  source 1..75: mol_type = other DNA
cccagatttacagcggttatggcgaatcgctcatagactataactttaaccagacccgtgtgggtgtgggggtta

SEQ ID NO: 255143 - DNA, 75 bp, synthetic construct
  source 1..75: mol_type = other DNA
ttgccgagccgattcgccatgcagaagcgttgatccaacaagcgcttaccctcaagcgtagcgatgagacgcgta

SEQ ID NO: 255144 - DNA, 75 bp, synthetic construct
  source 1..75: mol_type = other DNA
tacccctgaagcggaaaacccggccgaagcggatttaccccagggcgacattgaaaatatcaccaaactgctcgt

SEQ ID NO: 255145 - DNA, 75 bp, synthetic construct
  source 1..75: mol_type = other DNA
tcaggagtttgaaggccattgtctgacggcgtcgcagctggagcaggccatcacgaccttgctgcaacgccaccc

SEQ ID NO: 255146 - DNA, 75 bp, synthetic construct
  source 1..75: mol_type = other DNA
ggtataaccacgattctaacgggcgatctgacccaacttcacgtagctggaaccgattgtatactcgcctgatgg

SEQ ID NO: 255147 - DNA, 75 bp, synthetic construct
  source 1..75: mol_type = other DNA
gcctcaggaggttgaaaccccgcgcttcgcccgcctgaacggcgcactggacagcacgcgctggcatcggctgaa

SEQ ID NO: 255148 - DNA, 75 bp, synthetic construct
  source 1..75: mol_type = other DNA
gaaaaatgctggccagtggacgcagagaagaggtgctcacgccgccaaatctggcgcaggcctatgggatgaatt

SEQ ID NO: 255149 - DNA, 75 bp, synthetic construct
  source 1..75: mol_type = other DNA
ttacctgaccatgcatcagcatgataaaacgcgtactgacctgctaaatgatgttgccggggcgctggcccttga

SEQ ID NO: 255150 - DNA, 75 bp, synthetic construct
  source 1..75: mol_type = other DNA
atgtatcaacgctgttttgataatgtcagcgaaacgctgtttgtcgctggaaaaacgccacggctttcacgtttt

SEQ ID NO: 255151 - DNA, 75 bp, synthetic construct
  source 1..75: mol_type = other DNA
ccgcgtcggcaccgtgcggaaggccaggtaagtctctccagtcttaccggacagcacggcgtgatgcaggtgcgg

SEQ ID NO: 255152 - DNA, 75 bp, synthetic construct
  source 1..75: mol_type = other DNA
gacggaaaaggttggcagcgcggcgagtttccctcagcacattacgttgcgtacaccggcgttgtcattggggaa

SEQ ID NO: 255153 - DNA, 75 bp, synthetic construct
  source 1..75: mol_type = other DNA
ggcattgagctgccttatcatgctggcgcgacctataacgtagagctgaacggcgatctgaagaatgtgagtagt

SEQ ID NO: 255154 - DNA, 75 bp, synthetic construct
  source 1..75: mol_type = other DNA
agatgacaaacatgatctcatatcagggacttgttcgcaccttcccgagctgatttacgtcaagaaaggggtagc

SEQ ID NO: 255155 - DNA, 75 bp, synthetic construct
  source 1..75: mol_type = other DNA
gtcattaaaaccttatttaatgagctaagtgtgattttgccgcaaagtaaaaatagccaaacatcttcgttatgg

SEQ ID NO: 255156 - DNA, 75 bp, synthetic construct
  source 1..75: mol_type = other DNA
ggccgggcactgaaagcgccttccaggtacatcgtttagcggatgacgcgctgaatggcgtaaccggtctggttg

SEQ ID NO: 255157 - DNA, 75 bp, synthetic construct
  source 1..75: mol_type = other DNA
atattcttttctatctgaataataattatcgcgaaaaaatcactttagaacagttatcgaaaaaaatttcgtgcc

SEQ ID NO: 255158 - DNA, 75 bp, synthetic construct
  source 1..75: mol_type = other DNA
atatccttttttatctgaataataattaccgcgaaaaaatcactttagaacagttatcgaaaaagtttcgcgcca

SEQ ID NO: 255159 - DNA, 75 bp, synthetic construct
  source 1..75: mol_type = other DNA
agtgattaccgcaggcaatttaaaaactgttttgcggaacaagaaaccttttctgaatttcctcaacccgtaagt

SEQ ID NO: 255160 - DNA, 75 bp, synthetic construct
  source 1..75: mol_type = other DNA
actggatgattgccaacattccggtaagtctgcgtgtgggcatcaccagcggtatcggtctgttcattggtatga

SEQ ID NO: 255161 - DNA, 75 bp, synthetic construct
  source 1..75: mol_type = other DNA
tctcctactgcgtgatgaaaatcggtaccggacgtctgcgtgatctaagcccgtgcgtaatcatcgttgcgctgc

SEQ ID NO: 255162 - DNA, 75 bp, synthetic construct
  source 1..75: mol_type = other DNA
atatggcggcagcgtatacgatattgataatttacgaattgttacccccagactacacgatgagattcactacag

SEQ ID NO: 255163 - DNA, 75 bp, synthetic construct
  source 1..75: mol_type = other DNA
agaaaggtaaattcccgcgcatgaagcaggcgctgtatgtcgacagtatctcttctgttaccggttcgtttatcg

SEQ ID NO: 255164 - DNA, 75 bp, synthetic construct
  source 1..75: mol_type = other DNA
cgagcgtgatgacagttgtgggtcatgtagatttagccggatcattcaacctgggcctggcaggagtgattttct

SEQ ID NO: 255165 - DNA, 75 bp, synthetic construct
  source 1..75: mol_type = other DNA
gctgatgacttccagtctggcacgcgtgaactggcaggatcttactgaatctgttccggcgtttattaccgccgt

SEQ ID NO: 255166 - DNA, 75 bp, synthetic construct
  source 1..75: mol_type = other DNA
gcacgcccgttgttcggtttcacccgggacgatgaactgcttgttgagaagctaataatcggagctattagaaat

SEQ ID NO: 255167 - DNA, 75 bp, synthetic construct
  source 1..75: mol_type = other DNA
ggtcgagtttaccggcaaggtgcaacgcattgctcagattcatcagctcggacttaaagaccggccaaacccaca

SEQ ID NO: 255168 - DNA, 75 bp, synthetic construct
  source 1..75: mol_type = other DNA
atgatatgttaaaagcggcgctacgactgaaagatgcgctggtattacgctgtagcggcatgtctttgcagcatg

SEQ ID NO: 255169 - DNA, 75 bp, synthetic construct
  source 1..75: mol_type = other DNA
caatacggaatttgactggttggcctttcctgctggctataatagcttatttattccgcctaaaagcccacctgc

SEQ ID NO: 255170 - DNA, 75 bp, synthetic construct
  source 1..75: mol_type = other DNA
gatgagttctggtatgaggaagaactgcggcagaaagcactagcaggcagtaccgccaccacccgggtacgtttt

SEQ ID NO: 255171 - DNA, 75 bp, synthetic construct
  source 1..75: mol_type = other DNA
gtggcaactgtccaatagcgaagagtcttcaccgtttcgtgaaaccaactacgaaccgcaattgttcctcggttt

SEQ ID NO: 255172 - DNA, 75 bp, synthetic construct
  source 1..75: mol_type = other DNA
caccgggcgtctgcgtgaccttagtccgtgcgtcgtcgtagttgcgctgctgtttgtgctgaagattgtgtttat

SEQ ID NO: 255173 - DNA, 75 bp, synthetic construct
  source 1..75: mol_type = other DNA
gatgcacaggagcgaatcagcgcacttcaggaagaaatggcggaaacgctgggtgagcaatatgacccggcacta

SEQ ID NO: 255174 - DNA, 75 bp, synthetic construct
  source 1..75: mol_type = other DNA
gaagcacaggagagaatcagcacacttcaggaagaaatggcggaaacgctgggtgagcaatatgacccggtactg

SEQ ID NO: 255175 - DNA, 75 bp, synthetic construct
  source 1..75: mol_type = other DNA
gcctgcgcaggattgctgatctctttcatcctgccgcaaaaatggaccagcgcggcggttgtcacgcctccagaa

SEQ ID NO: 255176 - DNA, 75 bp, synthetic construct
  source 1..75: mol_type = other DNA
cttcgggctacaagatctgtttaatgaagaaaactcctggctgtggatgtaccgcaagctgggcggcgggatgct

SEQ ID NO: 255177 - DNA, 75 bp, synthetic construct
  source 1..75: mol_type = other DNA
ttgcagcggcgagaaagaaagggcgtatcggcggcaggaaaccgaagctatcaccacaggatataaaagaaatta

SEQ ID NO: 255178 - DNA, 75 bp, synthetic construct
  source 1..75: mol_type = other DNA
aaaccgttaccggcctcacttccccgtgaaacccgggttatccggccggaagaggaatgctgtcctgcctgtggt

SEQ ID NO: 255179 - DNA, 75 bp, synthetic construct
  source 1..75: mol_type = other DNA
tcttccgtgacaggttcgtttatcggtacttcttctgttacagcgtatattgagtcctcttccggcgtttctgtt

SEQ ID NO: 255180 - DNA, 75 bp, synthetic construct
  source 1..75: mol_type = other DNA
gcgtgctgctgggaatgctgggcttcttcattattgccattctggcgtcacgcaacattcacgcggcggttctgg

SEQ ID NO: 255181 - DNA, 75 bp, synthetic construct
  source 1..75: mol_type = other DNA
ctcgggctggcaggggtgattttctctttcatgctggtcaacctgtttgactcctccggtacgttgattggcgtg

SEQ ID NO: 255182 - DNA, 75 bp, synthetic construct
  source 1..75: mol_type = other DNA
aaaatgaaagcggttgatgacaatgccagtaagaaaaaagatgaaccgtcactgtatacctcctggacgctaagg

SEQ ID NO: 255183 - DNA, 75 bp, synthetic construct
  source 1..75: mol_type = other DNA
cgaaaatcgacgaactggatttgcatcgcgcaattgtcgcattgagcgaaaaaatgaaagcggttgatgacaatg

SEQ ID NO: 255184 - DNA, 75 bp, synthetic construct
  source 1..75: mol_type = other DNA
caccggacgtctgcgcgatcttagcccgtgtgtggttgtggtggcgctgctgtttatcctgaagattgtgtttat

SEQ ID NO: 255185 - DNA, 75 bp, synthetic construct
  source 1..75: mol_type = other DNA
ttctttcttctgctgttgccggattgatgctggtgagtgttaactcttttgcacaggtggtggctattggtgatt

SEQ ID NO: 255186 - DNA, 75 bp, synthetic construct
  source 1..75: mol_type = other DNA
catggatatccgtggggtggcggatatccattatccacagaaatcctccagtccgggcagtatttactgctctgc

SEQ ID NO: 255187 - DNA, 75 bp, synthetic construct
  source 1..75: mol_type = other DNA
attttacaaatcagtcggtcgcgtgttgctgcacacattatggatctgatgcgcaaaggtgcgattaaagggaaa

SEQ ID NO: 255188 - DNA, 75 bp, synthetic construct
  source 1..75: mol_type = other DNA
gcgtaaaacatcgtgctggcaagagaaagctaccggctggctgaaacgctatggtgcagtcacgctattattaag

SEQ ID NO: 255189 - DNA, 75 bp, synthetic construct
  source 1..75: mol_type = other DNA
tgagcatccgtgagactgcagaagcaacaggttacagtacttcgcaggtttgccgcattcaattgatttataaag

SEQ ID NO: 255190 - DNA, 75 bp, synthetic construct
  source 1..75: mol_type = other DNA
taccgtttcggaatttaaggcgaccagagtaaaaagctggctcccacatatccataccctgaagcccacgcaaaa

SEQ ID NO: 255191 - DNA, 75 bp, synthetic construct
  source 1..75: mol_type = other DNA
ttaatgtcaccaattgtattcgactgaacggacaaaatacttcaacttatgtctccatcgccgacctacaggcag

SEQ ID NO: 255192 - DNA, 75 bp, synthetic construct
  source 1..75: mol_type = other DNA
ttgtccgcgcttatctgcgagcttcaacagcagaacaggattctttacgagccctggaaaccatcgaagcttttg

SEQ ID NO: 255193 - DNA, 75 bp, synthetic construct
  source 1..75: mol_type = other DNA
gatgtggacagactttcccgactgtcaggggaagactggaatacgctgaagaaaatgatccgtcagaaagatatt

SEQ ID NO: 255194 - DNA, 75 bp, synthetic construct
  source 1..75: mol_type = other DNA
aggcgttacgcaagatacctggcggctaccgggaaaacgggaacggaatttgttcagcgagcgacgacgtttttt

SEQ ID NO: 255195 - DNA, 75 bp, synthetic construct
  source 1..75: mol_type = other DNA
gaagtcgtgctggtggcaatgttgctttccggagtgagtcatccctgggttttagttttaacagcaacaatgggt

SEQ ID NO: 255196 - DNA, 75 bp, synthetic construct
  source 1..75: mol_type = other DNA
tactggagaataatgaataccgtctgttctttacgtatgaagatgaagaggatctaaaggaacagattgatgatt

SEQ ID NO: 255197 - DNA, 75 bp, synthetic construct
  source 1..75: mol_type = other DNA
gctcctggagccaggttcaaaaagtgttgggatgcagtcgtggaacaatcagtagtgcggtaaaacgtaaatcag

SEQ ID NO: 255198 - DNA, 75 bp, synthetic construct
  source 1..75: mol_type = other DNA
tgctggctgctgtggcacgtcgtgactatgaacaacgccgggaacgtcaaagacaggggattagtaaagctcaaa

SEQ ID NO: 255199 - DNA, 75 bp, synthetic construct
  source 1..75: mol_type = other DNA
ttcgtgaccagtccgaaattcgtcaacatcaacggtgtgccgtatctggaagcggaagccacagaaaacttgatc

SEQ ID NO: 255200 - DNA, 75 bp, synthetic construct
  source 1..75: mol_type = other DNA
gacgacaacgggcgcggtagcttcatctgtaatcagtgcggcgctggtgatgggctggatttaattaaacgcgta

SEQ ID NO: 255201 - DNA, 75 bp, synthetic construct
  source 1..75: mol_type = other DNA
acagtagacagttttggtgctgacgatggttttatggcgggcctggtatatagctttctggagggaaacaatttc

SEQ ID NO: 255202 - DNA, 75 bp, synthetic construct
  source 1..75: mol_type = other DNA
atatttgccagtaacagcacacaggtattacaggcagggataagagagcgtcgctatctcgtgcttgagccatct

SEQ ID NO: 255203 - DNA, 75 bp, synthetic construct
  source 1..75: mol_type = other DNA
ctgacgaagtgacgatccacaagccgtctgaagctgacagacttaaagcgattattagtgaaccgacgtttaacc

SEQ ID NO: 255204 - DNA, 75 bp, synthetic construct
  source 1..75: mol_type = other DNA
tcaaaccggcggtgtatcgcacgttttcgaggatttatcacaatttcagcattattttcatcataaaccgagagt

SEQ ID NO: 255205 - DNA, 75 bp, synthetic construct
  source 1..75: mol_type = other DNA
ttgcgtagagaagaaaacgtacttatcggtattacacaggctccttatattatggggctggctgatggtttaatg

SEQ ID NO: 255206 - DNA, 75 bp, synthetic construct
  source 1..75: mol_type = other DNA
aagacggcaaatataaaggtcgtaaacctaatcaagccagatatgacgcaattaacaggttgattgagagcggaa

SEQ ID NO: 255207 - DNA, 75 bp, synthetic construct
  source 1..75: mol_type = other DNA
ttgtccgggcttatctgagagcttcaacagcagaacaggatgcttcgcgtgccctggaaactatcgaggcttttg

SEQ ID NO: 255208 - DNA, 75 bp, synthetic construct
  source 1..75: mol_type = other DNA
caacgatcgcatcagagctgtaaattcgctgcatcaacaaggtgttaaacgcatttttgtttatctgaaagatga

SEQ ID NO: 255209 - DNA, 75 bp, synthetic construct
  source 1..75: mol_type = other DNA
tgattcgccatgctggtgtggtgctggctgattgtaatctcacacctgaagccctggagtgggtctttaccattg

SEQ ID NO: 255210 - DNA, 75 bp, synthetic construct
  source 1..75: mol_type = other DNA
acctgacgggtgagggggatggcgatgatgaaatcattcacgtcaacctcttaaaattgccggcaaatgttgaat

SEQ ID NO: 255211 - DNA, 75 bp, synthetic construct
  source 1..75: mol_type = other DNA
ggagcgtacatcactggcgtggtttcgtaccatgctgggctacggcgcgttgatggcgttggctatcaaacacaa

SEQ ID NO: 255212 - DNA, 75 bp, synthetic construct
  source 1..75: mol_type = other DNA
tgcgtaatgggcgagtctggcaactggcgattatctacctgaccattcaggtggcggtttacggattaattttct

SEQ ID NO: 255213 - DNA, 75 bp, synthetic construct
  source 1..75: mol_type = other DNA
taaaacgtattgaaaaaaacagtaacttcaattcaaaaagacaacgtcaccaacacaccaacaaaattccagggg

SEQ ID NO: 255214 - DNA, 75 bp, synthetic construct
  source 1..75: mol_type = other DNA
ccataccggagaatcccgcctgccagcagtgggggctgaaacgtgctatgacaccttgttttggagcacgtctgg

SEQ ID NO: 255215 - DNA, 75 bp, synthetic construct
  source 1..75: mol_type = other DNA
cgatttatgtaatcaacaggattataaagaaagatggtggaacgctatcaaaagtaataaccttgctgatgacta

SEQ ID NO: 255216 - DNA, 75 bp, synthetic construct
  source 1..75: mol_type = other DNA
taatgatgcagtcgaatattttctacagaacgataaacagattgcaagaagaatggcctgaccaaaaagaccata

SEQ ID NO: 255217 - DNA, 75 bp, synthetic construct
  source 1..75: mol_type = other DNA
tctcaaaacgccgtcaggtcggtgcaagtgagtatgcatatattagttttttaacagtcagccagcgacgtactt

SEQ ID NO: 255218 - DNA, 75 bp, synthetic construct
  source 1..75: mol_type = other DNA
taacggtttgctttcatgcgcagttaaaacagcgtcacgcaacgatgcgttttgaagaaatgaacgacgtcgaac

SEQ ID NO: 255219 - DNA, 75 bp, synthetic construct
  source 1..75: mol_type = other DNA
gcattactggaacgccgcagccagagcactcatgcaacggcgctggatcgcggcgcggctcttggcgcactgatg

SEQ ID NO: 255220 - DNA, 75 bp, synthetic construct
  source 1..75: mol_type = other DNA
ataaacctgactgccccacgtcagatacgtcactaactcatgcggcagccgtgcttgcccgtcctgcggaaagaa

SEQ ID NO: 255221 - DNA, 75 bp, synthetic construct
  source 1..75: mol_type = other DNA
atgaaaaacaaagcattacattcactcaaaaaacgaggtggggagcaagtggggaatttaaaaagtggggagcaa

SEQ ID NO: 255222 - DNA, 75 bp, synthetic construct
  source 1..75: mol_type = other DNA
atgaaaaacaaagcattagattcaccaaaaaaacaaggtggggagcaagtggggaattttaaaagtggggagcaa

SEQ ID NO: 255223 - DNA, 75 bp, synthetic construct
  source 1..75: mol_type = other DNA
ggcatgacatgccaaatgaccctaagtggcgaacaattgccagggtgtcagggcagccaattgcaacagtgatgt

SEQ ID NO: 255224 - DNA, 75 bp, synthetic construct
  source 1..75: mol_type = other DNA
gttcatggcgaaaaaaacaccacgaaccaggcaggggatgttcagaccgtcaatcctggtcagccagcaggcacg

SEQ ID NO: 255225 - DNA, 75 bp, synthetic construct
  source 1..75: mol_type = other DNA
aggagagtgttttgataaagagaggctttcatctgtcaggttaacttcaaaacgacaggaggcaaccagtgagta

SEQ ID NO: 255226 - DNA, 75 bp, synthetic construct
  source 1..75: mol_type = other DNA
gtcagacgtgaatcatgtcggaaaattgaagccccttcagagcccctttcaagccaagaacaggaacaggaacag

SEQ ID NO: 255227 - DNA, 75 bp, synthetic construct
  source 1..75: mol_type = other DNA
gccattcagcgggaagccgatcgggtagtcccggaaaacaccgggctgtctgtgggacgagtggattatccggat

SEQ ID NO: 255228 - DNA, 75 bp, synthetic construct
  source 1..75: mol_type = other DNA
gaaaacataatcctgtttaatcctgacacagttgaagcatacgcaaaacgtgcagagataacacctaaacctcta

SEQ ID NO: 255229 - DNA, 75 bp, synthetic construct
  source 1..75: mol_type = other DNA
ggaattttgaaaacccctggttgctcccggtaagcggcacgaacaaccagcgttgtgtgaatcacatttctgaac

SEQ ID NO: 255230 - DNA, 75 bp, synthetic construct
  source 1..75: mol_type = other DNA
cagcaggcacgacaccggaagccgattcagcgtatgcgctgaaagccgattcgggcgctgtgcagcaggcgatga

SEQ ID NO: 255231 - DNA, 75 bp, synthetic construct
  source 1..75: mol_type = other DNA
agatacctggaggctaccgggaaagcgggaactgaatttgttcagcaggcatcgacgttttttggcccgaacagg

SEQ ID NO: 255232 - DNA, 75 bp, synthetic construct
  source 1..75: mol_type = other DNA
gcgaaaactaaggaagtctggtccggaaagtatggtagtggcgttgtatatgatgacctcgcctcattccaatat

SEQ ID NO: 255233 - DNA, 75 bp, synthetic construct
  source 1..75: mol_type = other DNA
cgcgctttaaatttatctaccggccttccgggctgggcaaccgcgatacggctccggaaaaactggttctctccg

SEQ ID NO: 255234 - DNA, 75 bp, synthetic construct
  source 1..75: mol_type = other DNA
agcactatactgcacaaagagggttttgactctgcgtggattgaaaactcaacttgcccatgtggacaagaatgc

SEQ ID NO: 255235 - DNA, 75 bp, synthetic construct
  source 1..75: mol_type = other DNA
gccattcagcgggaagccgatcgggtagtcccgaaaaacaccgggcagcctgtgggacgagtggattatccggat

SEQ ID NO: 255236 - DNA, 75 bp, synthetic construct
  source 1..75: mol_type = other DNA
aagccacgcgtgcggtggtgagcgtgccgattatcgggattgtgaagcgcgatctggaggattctccggtacgca

SEQ ID NO: 255237 - DNA, 75 bp, synthetic construct
  source 1..75: mol_type = other DNA
ttcaatgttagggattgaaaataaatacaaacaattcagagacttaaataaaatactaataaaaccctgtgttga

SEQ ID NO: 255238 - DNA, 75 bp, synthetic construct
  source 1..75: mol_type = other DNA
ctgagggggtcacattttcagttaaaatgaaagcccgagacgaacgggcagcccgctacgatggttactggcgag

SEQ ID NO: 255239 - DNA, 75 bp, synthetic construct
  source 1..75: mol_type = other DNA
atgactgataaaaccattgcgttttcgctactcgatctggcccccatccccgaaggttcttcagcgcgggaagcg

SEQ ID NO: 255240 - DNA, 75 bp, synthetic construct
  source 1..75: mol_type = other DNA
cgagcagtttggcacgctcaatacgctctatccggggcgaatcgatttagggctgggtcgtgcaccgggtagcga

SEQ ID NO: 255241 - DNA, 75 bp, synthetic construct
  source 1..75: mol_type = other DNA
tctgataaaaaagaagatacgcttgttgttactgcctccggcttcactcagcaactcagaaatgcaccggccagt

SEQ ID NO: 255242 - DNA, 75 bp, synthetic construct
  source 1..75: mol_type = other DNA
tgagtggtgggttcgtaagcaaataatgttgagctcagaaccatcacgagattatgaattcagtctggcaatcca

SEQ ID NO: 255243 - DNA, 75 bp, synthetic construct
  source 1..75: mol_type = other DNA
atcacaattacaaaagcagaggttacgtgaacgaagagcagaattagcacacgctcacgctcaggaaagagcccg

SEQ ID NO: 255244 - DNA, 75 bp, synthetic construct
  source 1..75: mol_type = other DNA
gtggataacttttatcgaattatcccgaaaatatccaagaatacatctaaccagagacaaccaaatgaacgcgac

SEQ ID NO: 255245 - DNA, 75 bp, synthetic construct
  source 1..75: mol_type = other DNA
ctatgagtggttgctggataaccagctcacgccgcacctggtggtggatgtgacgctccctggcgtgcaggttcc

SEQ ID NO: 255246 - DNA, 75 bp, synthetic construct
  source 1..75: mol_type = other DNA
atggatttgtcacagctaacaccacgtcgtccctatctgctgcgtgcattctatgagtggttgctggataaccag

SEQ ID NO: 255247 - DNA, 75 bp, synthetic construct
  source 1..75: mol_type = other DNA
cagggagaaagagatggttacctcattattgcaacaccccgaaatgcggtattttggcttttattccgtggcact

SEQ ID NO: 255248 - DNA, 75 bp, synthetic construct
  source 1..75: mol_type = other DNA
aggccgaatataaatcagcgctggcttcatcactttacgaaaccatcctggaaaaagcctctgctgaatgttcag

SEQ ID NO: 255249 - DNA, 75 bp, synthetic construct
  source 1..75: mol_type = other DNA
aaagagcaatggaatgacacgcgcaatctgcgtcagaaagtgaataaacgcactgaaaaagagtgggataaagcc

SEQ ID NO: 255250 - DNA, 75 bp, synthetic construct
  source 1..75: mol_type = other DNA
gaaatgccaagcccgccgacaagcctgtaaagctcactgacggcaacggcatgcatcttcttattcatcctaatg

SEQ ID NO: 255251 - DNA, 75 bp, synthetic construct
  source 1..75: mol_type = other DNA
gcttttttaaatgaacttaaacgaataagttcaaacgtttcagaaaaagaaaatttacgtgaatttgttattcaa

SEQ ID NO: 255252 - DNA, 75 bp, synthetic construct
  source 1..75: mol_type = other DNA
ttctgaactttccggtgggatggcgcggcgtgcagcgctggcgcgtgcgattgcgctggagccggatctcatcat

SEQ ID NO: 255253 - DNA, 75 bp, synthetic construct
  source 1..75: mol_type = other DNA
gccaatgaagccggaccagaagagattaaataaaaaatatttatcctactacctgcgttcaaagccatttgtcga

SEQ ID NO: 255254 - DNA, 75 bp, synthetic construct
  source 1..75: mol_type = other DNA
aaacatccccccagaaaacgtactgacttcttttatgaagataaaattaaaagtcgatagcattaagaaaaaaat

SEQ ID NO: 255255 - DNA, 75 bp, synthetic construct
  source 1..75: mol_type = other DNA
ctggctcttggggtctaccctgcagtctctcttgctgatgcccgtaaccgtagagatgatgccagaagattaatt

SEQ ID NO: 255256 - DNA, 75 bp, synthetic construct
  source 1..75: mol_type = other DNA
ggcatcactggaagcaaaaccaataggtgctttccacattgcagaacagcaggtcgatggcacaagtgactacat

SEQ ID NO: 255257 - DNA, 75 bp, synthetic construct
  source 1..75: mol_type = other DNA
tacagaacacgattaccatcattgagtcagcacgggatgaaataccgttcggactcgatgaagatcaaaacaaca

SEQ ID NO: 255258 - DNA, 75 bp, synthetic construct
  source 1..75: mol_type = other DNA
ttccattaagcaagcaggctttagccaccttgagagaaattcagaagctcagtggagatcaggaaatcatcttca

SEQ ID NO: 255259 - DNA, 75 bp, synthetic construct
  source 1..75: mol_type = other DNA
gcgttttgcccgttggtctgaaattgatttcaaaaatgcgctctggacgatacctgcagaacgtgaagaactaca

SEQ ID NO: 255260 - DNA, 75 bp, synthetic construct
  source 1..75: mol_type = other DNA
aagcggcgctcttgcttttgagtccgttgccagagactggcatgcaagcaacatcaaatggtcagaaacacatgc

SEQ ID NO: 255261 - DNA, 75 bp, synthetic construct
  source 1..75: mol_type = other DNA
ggacgcgatgaagccaaacgtcagggtaataagccgctttcgcaggcgctgaagatcattatgaatgccttttat

SEQ ID NO: 255262 - DNA, 75 bp, synthetic construct
  source 1..75: mol_type = other DNA
aaacagcggatggtgtttaaagggctggaaaccgtgcgcaccgactggacgccgctggcccagcagtttcagcag

SEQ ID NO: 255263 - DNA, 75 bp, synthetic construct
  source 1..75: mol_type = other DNA
aactgtatgatgatcttctgcgtaacgctggaaccgggcaggataatctcactcaccaaatgcatttacaggaaa

SEQ ID NO: 255264 - DNA, 75 bp, synthetic construct
  source 1..75: mol_type = other DNA
tcgcaggcgctgaagatcattatgaatgccttttatggcgtgctcggcaccaccgcctgccgcttcttcgatccg

SEQ ID NO: 255265 - DNA, 75 bp, synthetic construct
  source 1..75: mol_type = other DNA
aagcaacggatggtgtttaaaggactggaaaccgtgcgtaccgactggacaccgctggctcagcagtttcagcag

SEQ ID NO: 255266 - DNA, 75 bp, synthetic construct
  source 1..75: mol_type = other DNA
ggagtatgaaactcatttctgccgttttcttatgccaaccattgcggagctgataccggcagtaaaaagcgctac

SEQ ID NO: 255267 - DNA, 75 bp, synthetic construct
  source 1..75: mol_type = other DNA
agaaatgaaggtggagacgttcggcaataaattgcaggtcagcaacctgctggatattgatccgaaagggggcgg

SEQ ID NO: 255268 - DNA, 75 bp, synthetic construct
  source 1..75: mol_type = other DNA
gcgtaaaacatcgcgctggcaagagaaagctactggctggctgaaacgctatggtgcagtcacgctattattaag

SEQ ID NO: 255269 - DNA, 75 bp, synthetic construct
  source 1..75: mol_type = other DNA
atggtgcagtcacgctattattaagctggatgcccgtggttggcgatttactgtgtctgttagcgggatggatgc

SEQ ID NO: 255270 - DNA, 75 bp, synthetic construct
  source 1..75: mol_type = other DNA
ggcctggcgggcggcaatatggcaggcgcgctggcaggtgcttcagcgccggagctggcgaacatcatcggtcat

SEQ ID NO: 255271 - DNA, 75 bp, synthetic construct
  source 1..75: mol_type = other DNA
acaaggagaaggagcagaggcgtctgcagacagtggggcttatcagtgacataggcagtcaggtggcggatatcg

SEQ ID NO: 255272 - DNA, 75 bp, synthetic construct
  source 1..75: mol_type = other DNA
gctaatcaacggttcgtctttcaacgccacaaacgtggaagaagtacgcgtgctgacagcaacacgcaacacggg

SEQ ID NO: 255273 - DNA, 75 bp, synthetic construct
  source 1..75: mol_type = other DNA
caaagcattgattgaagcgcagggctacgacgttatctacggagataccgactcgacttttgtctggctaaaagg

SEQ ID NO: 255274 - DNA, 75 bp, synthetic construct
  source 1..75: mol_type = other DNA
gtgctgctgaataacgatccacagaagtggatcgataccctggcgctgctggtgaattctgggcaaaaacgtcag

SEQ ID NO: 255275 - DNA, 75 bp, synthetic construct
  source 1..75: mol_type = other DNA
gctgatcatatccctgtgaaccgccccgggtttcctggagagtgttttatctgtgaactcaggctgccagatcat

SEQ ID NO: 255276 - DNA, 75 bp, synthetic construct
  source 1..75: mol_type = other DNA
ttattgcacggttaaaacagcagatggtgactacctgactgaagaaatgagtctggcagaaattaaagctgtgga

SEQ ID NO: 255277 - DNA, 75 bp, synthetic construct
  source 1..75: mol_type = other DNA
atgtctgaatcccgcagcaattttccagcacgacatggtactccatggaatactgaagagttacagcgtcttctc

SEQ ID NO: 255278 - DNA, 75 bp, synthetic construct
  source 1..75: mol_type = other DNA
acaaactgacgggtggtctgcaactgcccaatgatgaaaccggagactgccagctgtttacccagaatctggcgc

SEQ ID NO: 255279 - DNA, 75 bp, synthetic construct
  source 1..75: mol_type = other DNA
cccacgcacaaatacaacccattcgtagacaggggcgcacgcattggcggttattgtgtcgtaaaaacatccgaa

SEQ ID NO: 255280 - DNA, 75 bp, synthetic construct
  source 1..75: mol_type = other DNA
gtcgatcaccatgcgcggacatcagatcatgcggcaaaccaaagcgttaattgaagcgcaaggctatgacgtgat

SEQ ID NO: 255281 - DNA, 75 bp, synthetic construct
  source 1..75: mol_type = other DNA
gactggacgccgctggcccagcagtttcagcaggagctatacctgcgcatcttccgcaacgagccatatcagtaa

SEQ ID NO: 255282 - DNA, 75 bp, synthetic construct
  source 1..75: mol_type = other DNA
ggcgggtacgtgatggattctcgaccagggctgtatgattcggtgctggtgctggactacaaaagcctgtaccca

SEQ ID NO: 255283 - DNA, 75 bp, synthetic construct
  source 1..75: mol_type = other DNA
gctttaaaaacggcgtcttttttgcccaggccaaagggcgactgattatcgacggtatcgaggcgctgaaatccg

SEQ ID NO: 255284 - DNA, 75 bp, synthetic construct
  source 1..75: mol_type = other DNA
gtcgatcaccatgcgtggtcatcagatcatgcggcaaaccaaagcgttgattgaagcgcagggctacgacgttat

SEQ ID NO: 255285 - DNA, 75 bp, synthetic construct
  source 1..75: mol_type = other DNA
gcgcccatcgccagttgatgaattacgaaaagcgcctgcgtgaaggtggcgttaccgtttacgaggccgatgtgc

SEQ ID NO: 255286 - DNA, 75 bp, synthetic construct
  source 1..75: mol_type = other DNA
agaggatgacaaccaggccttactgttacgcgctgtcagtatggataacagcgacacactatgggatcacttgtt

SEQ ID NO: 255287 - DNA, 75 bp, synthetic construct
  source 1..75: mol_type = other DNA
acggccggacacagtgtgtggtggacatcccggcacatccggacccggcacaacagttgctgctgccctgccgtc

SEQ ID NO: 255288 - DNA, 75 bp, synthetic construct
  source 1..75: mol_type = other DNA
atcggtactgttcggtgtagccgcattctcgacctttttatgtgattgtggtgtggatgcccaaatatgcgatgg

SEQ ID NO: 255289 - DNA, 75 bp, synthetic construct
  source 1..75: mol_type = other DNA
ccgggtcggcggtaatactggttaaagcaatggtgtcattcgggcaaatgttctatccaatgctggtgagttata

SEQ ID NO: 255290 - DNA, 75 bp, synthetic construct
  source 1..75: mol_type = other DNA
ccaggggatttcaccgtcggcatttccggtgacgtttctggagccgccggtttccggtcaggacggaaagaagcc

SEQ ID NO: 255291 - DNA, 75 bp, synthetic construct
  source 1..75: mol_type = other DNA
ttgactacaacatcaacgggacagtgaataagccgcatcaggggaaacagtcccggtcgctgaactataacggaa

SEQ ID NO: 255292 - DNA, 75 bp, synthetic construct
  source 1..75: mol_type = other DNA
gggatgctgtacatcaatatgccgcaggcctggctggaatattccgacgcctcctggctgccgccgtcccgctgg

SEQ ID NO: 255293 - DNA, 75 bp, synthetic construct
  source 1..75: mol_type = other DNA
ctacctgtacccttctccactggtgtgtaatgccggcgcctttgttatcggtttctcagcagctggcggcatttt

SEQ ID NO: 255294 - DNA, 75 bp, synthetic construct
  source 1..75: mol_type = other DNA
gcctatttaatttccggtatcggtttggggcgattgatcagtattttattcttcggtgtgatctccgataagttt

SEQ ID NO: 255295 - DNA, 75 bp, synthetic construct
  source 1..75: mol_type = other DNA
gttggtggacgccagcgtagctaatgaattaccgcaaatgaacagcaaaccgttagtctgctggaaggtgtttca

SEQ ID NO: 255296 - DNA, 75 bp, synthetic construct
  source 1..75: mol_type = other DNA
ctggttcggcggtcatactggttaaagcgatggtgtcattcgggcaaatgttctacccaatgctggtgagctata

SEQ ID NO: 255297 - DNA, 75 bp, synthetic construct
  source 1..75: mol_type = other DNA
tatttttgccgcactactgaaaaaaatggtccggcccatctgggctaatgtatttaactctgcactggcaacaat

SEQ ID NO: 255298 - DNA, 75 bp, synthetic construct
  source 1..75: mol_type = other DNA
ctatgggctgattattccaggcatcctatttgtactgatcacgctgatgctgttgaaaagcaaattccccagcca

SEQ ID NO: 255299 - DNA, 75 bp, synthetic construct
  source 1..75: mol_type = other DNA
ctgagattttcagctcctggcgctataccggtgccagcctggaaagtgatgaccgcatgctgccgccaaaactgc

SEQ ID NO: 255300 - DNA, 75 bp, synthetic construct
  source 1..75: mol_type = other DNA
cgtcatctcccaacgttggctgaatatttctcgtctgctgggctttgtgagcggcatattgatcattgcccaggc

SEQ ID NO: 255301 - DNA, 75 bp, synthetic construct
  source 1..75: mol_type = other DNA
atgaataaatcccgtcaaaaagagttaacccgctggttaaaacagcaaagcgtcatctcccaacgttggctgaat

SEQ ID NO: 255302 - DNA, 75 bp, synthetic construct
  source 1..75: mol_type = other DNA
aaagaatgcatccccatcttagcgaggagcacattcgttgctgcgttgaagtgtttgctaccatgatggaaggta

SEQ ID NO: 255303 - DNA, 75 bp, synthetic construct
  source 1..75: mol_type = other DNA
gccagccgggagttgggcgacgctggtacttgagcaaattgacgatatgcatgattactatgctcgctacctgcc

SEQ ID NO: 255304 - DNA, 75 bp, synthetic construct
  source 1..75: mol_type = other DNA
ccctgatccttgcgccggagtttttccagccattacgcgatctcggtacgttttatcatgctaaagcccaggctg

SEQ ID NO: 255305 - DNA, 75 bp, synthetic construct
  source 1..75: mol_type = other DNA
acaaatggcgctggcagtatcagtgccgctactgattgtcatagcgatcttcccctctaactgggccgcggcgct

SEQ ID NO: 255306 - DNA, 75 bp, synthetic construct
  source 1..75: mol_type = other DNA
gttaccgcaggcctgtctgacgccggagatggtcagccggatggggctgaccgtggcttctcaggagaaggtcac

SEQ ID NO: 255307 - DNA, 75 bp, synthetic construct
  source 1..75: mol_type = other DNA
gcgggatatatcatgcccgggcagtaccagatggaaattatggtgaatgaccaggggatttcaccgtcggcattt

SEQ ID NO: 255308 - DNA, 75 bp, synthetic construct
  source 1..75: mol_type = other DNA
gaaaaaaacgttccaggtggacacggcatatgtgccgtatctgacccgtccgggccagattcgttacaagctggt

SEQ ID NO: 255309 - DNA, 75 bp, synthetic construct
  source 1..75: mol_type = other DNA
gttcgcggacgtcttgatgttgaggttattgaacagaacggacggaagaaaacctttcaggtcgatacggcctcg

SEQ ID NO: 255310 - DNA, 75 bp, synthetic construct
  source 1..75: mol_type = other DNA
acgccctggctgtggggctgggccgggacctgaatgagttcggtactgtttccgctgatgtaacccagtccgtgg

SEQ ID NO: 255311 - DNA, 75 bp, synthetic construct
  source 1..75: mol_type = other DNA
cggccggacacagtgtgtggtggacatcccggcacatccggacccggcacaacagttgctgctgccctgccgtca

SEQ ID NO: 255312 - DNA, 75 bp, synthetic construct
  source 1..75: mol_type = other DNA
ccagttcgtttatcggcgggccaggggctgcttataaatacgggctgggctgggtgttgctggcgatgatccagt

SEQ ID NO: 255313 - DNA, 75 bp, synthetic construct
  source 1..75: mol_type = other DNA
gttaggtcgggcggtgcttccggatctcaccgtgccggatctggtgatccctacattaatggtaaaagtgctacc

SEQ ID NO: 255314 - DNA, 75 bp, synthetic construct
  source 1..75: mol_type = other DNA
tgcctgcggtctggctttcgctcggtattctcggcaaaaagttcgcgattctcgcacgccgctacaatgcagtaa

SEQ ID NO: 255315 - DNA, 75 bp, synthetic construct
  source 1..75: mol_type = other DNA
tcacttccttcatcatccaaaagtcgacaataagttaacacgtgaatatgaatatgcacgcatggatacggaaaa

SEQ ID NO: 255316 - DNA, 75 bp, synthetic construct
  source 1..75: mol_type = other DNA
cgacaattaacgcccaattgctacaaagttccgctacgatcattaaagatctctatctgaatatccgtccggatc

SEQ ID NO: 255317 - DNA, 75 bp, synthetic construct
  source 1..75: mol_type = other DNA
ctgggtactggtgtgctttggcgttataggcctgccgcatactgcggtgcgctgtatctcttataaagacagcaa

SEQ ID NO: 255318 - DNA, 75 bp, synthetic construct
  source 1..75: mol_type = other DNA
cagcattgcgctctacaccgcctttggcggctttcgcgccagcgtgctgaacgacaccatgcaagggctggtgat

SEQ ID NO: 255319 - DNA, 75 bp, synthetic construct
  source 1..75: mol_type = other DNA
gacttcgacgaatttcaggtgtctgacatagtggcgggaaatgtaaaaaaaacagcggaattttcctttactgac

SEQ ID NO: 255320 - DNA, 75 bp, synthetic construct
  source 1..75: mol_type = other DNA
agattattattattccgctctctgggtggctgtcacaggtattttccactcgttggctttttacgctatctgcgg

SEQ ID NO: 255321 - DNA, 75 bp, synthetic construct
  source 1..75: mol_type = other DNA
ccgcctggaagccgccagaaatgatcatctggctgaatttgctggccttcggtgggctggaagccgttttcctgt

SEQ ID NO: 255322 - DNA, 75 bp, synthetic construct
  source 1..75: mol_type = other DNA
atgcagcttgaagtgattctaccgctagtcgcctatctggtggtggtgttcgggatctctgtttatgcaatgcgt

SEQ ID NO: 255323 - DNA, 75 bp, synthetic construct
  source 1..75: mol_type = other DNA
acgacaccatgcaagggcttgtgatgctgattggcaccgttgtgctgcttattggcgtggtacatgccgctggcg

SEQ ID NO: 255324 - DNA, 75 bp, synthetic construct
  source 1..75: mol_type = other DNA
tcacttccttcatcacccaatagtcgacagtgagtttacacgtaaattaaaatatgcacgcatggattcggaaaa

SEQ ID NO: 255325 - DNA, 75 bp, synthetic construct
  source 1..75: mol_type = other DNA
atgatactttatcaaactaccagaggttttgtatagataataatctaatgttgtctgatcattcgctatattgca

SEQ ID NO: 255326 - DNA, 75 bp, synthetic construct
  source 1..75: mol_type = other DNA
tcttataccgatgtttgatctcatgttctgggagaaaaagaacaacaccaaaattggtatagcgctgctgacgag

SEQ ID NO: 255327 - DNA, 75 bp, synthetic construct
  source 1..75: mol_type = other DNA
cacaaggaaaagacgaggaagagtcattaccgcagccatgcctgacccctgaaatggttaacagaatggggttaa

SEQ ID NO: 255328 - DNA, 75 bp, synthetic construct
  source 1..75: mol_type = other DNA
tttcacaagaagatggatgggtgccccctgatttaatagttaatctagctaatgtattaaaaaaacaatatcgta

SEQ ID NO: 255329 - DNA, 75 bp, synthetic construct
  source 1..75: mol_type = other DNA
atgttttttttctttttctggaggggttaggatattctctactgtatatttaatacctgtgtttttgggcaggtt

SEQ ID NO: 255330 - DNA, 75 bp, synthetic construct
  source 1..75: mol_type = other DNA
ggctgggtggatttgtgttttcaatgtatctttttacccctataacccacgaatggggatggcaggagttactgt

SEQ ID NO: 255331 - DNA, 75 bp, synthetic construct
  source 1..75: mol_type = other DNA
aaacgtatgactctgcaaccgtcatctcttccagaactgtttgaattaaaaaatggtgaatggaattatattggt

SEQ ID NO: 255332 - DNA, 75 bp, synthetic construct
  source 1..75: mol_type = other DNA
cagataaaggtgacctgtgccgcctggtcatcacgggttcgcatgctgcgggttgaattcagcgcggagtttaag

SEQ ID NO: 255333 - DNA, 75 bp, synthetic construct
  source 1..75: mol_type = other DNA
ggggatggcaggagttactgtttccacaggcaattagagggatttcgcagcagtttgcgatggcccccatcgtaa

SEQ ID NO: 255334 - DNA, 75 bp, synthetic construct
  source 1..75: mol_type = other DNA
atggcattttcggatacctttctgctaatcagtggtctgttatttatcgcatttttgttggttcctgctatgaat

SEQ ID NO: 255335 - DNA, 75 bp, synthetic construct
  source 1..75: mol_type = other DNA
aggcgcaggcggagaccggttcactgttcacgacactgaacgatgcgctgaacacccgttcaccggaggtggtgg

SEQ ID NO: 255336 - DNA, 75 bp, synthetic construct
  source 1..75: mol_type = other DNA
ggaaggcacagacgagttccggcttgaagtcgcccagctcgccggtatgcacggcctcaaggtcacgttcaccga

SEQ ID NO: 255337 - DNA, 75 bp, synthetic construct
  source 1..75: mol_type = other DNA
cgcgacctttccatgaaggccctgaccgaccgtcttggcccgttccagccttccgaacggcaggccgaggcgaag

SEQ ID NO: 255338 - DNA, 75 bp, synthetic construct
  source 1..75: mol_type = other DNA
gcactgagccgggctgtaataagcgcgtgaagtccggcaagtgtgaagagcacagacgggctgtatggcgtgcag

SEQ ID NO: 255339 - DNA, 75 bp, synthetic construct
  source 1..75: mol_type = other DNA
ctgcgcggttatctgtatgcccatccggagcaactgaaatcactgacgtcccggcaaagatacaatctcgataac

SEQ ID NO: 255340 - DNA, 75 bp, synthetic construct
  source 1..75: mol_type = other DNA
tcactgacagagtgaaggcgaaagtgctgggcagtgatgccgtcaccgcctctgttgactgggcggttgacgtca

SEQ ID NO: 255341 - DNA, 75 bp, synthetic construct
  source 1..75: mol_type = other DNA
gccgccgacgcagaggctcacagcggcatcgagacgctaaccgggtacgcggcccgcgagctggccccggcgatg

SEQ ID NO: 255342 - DNA, 75 bp, synthetic construct
  source 1..75: mol_type = other DNA
cccggggattatattcaagtggtgcagtcagctacatagaagtgctggatgcagaacgctcgctgttcactacgc

SEQ ID NO: 255343 - DNA, 75 bp, synthetic construct
  source 1..75: mol_type = other DNA
cgaacaaaaaatccagtcggccttcaaggatgtttccgacacgcttgccctgcgcgatagtcttagccagcaact

SEQ ID NO: 255344 - DNA, 75 bp, synthetic construct
  source 1..75: mol_type = other DNA
accatcgacggcggcatggtgatcgaccggaagacgcacgtgcaggcgcagaaagccacgaccggcgcggcactg

SEQ ID NO: 255345 - DNA, 75 bp, synthetic construct
  source 1..75: mol_type = other DNA
ggcactggtagcgctcgaactggcatccaagcggttcgagggccaagccctcatcgtggaaggcacagacgagtt

SEQ ID NO: 255346 - DNA, 75 bp, synthetic construct
  source 1..75: mol_type = other DNA
caaacgcctgatgtacggcactatcaaacagcaggccgacgcctcgcgccaaaagaaccggcaaagcgcagacgc

SEQ ID NO: 255347 - DNA, 75 bp, synthetic construct
  source 1..75: mol_type = other DNA
ataacgcctgggctaaatccatatatgaagctggcatagttttatcagccatagcattatcttttcatttatggc

SEQ ID NO: 255348 - DNA, 75 bp, synthetic construct
  source 1..75: mol_type = other DNA
ccatttgccgaattttcgccggagtggcaggcgctacaagccgcacgtcgtattcaggcacaaacttacttcatc

SEQ ID NO: 255349 - DNA, 75 bp, synthetic construct
  source 1..75: mol_type = other DNA
gcaagaggaaagccaggccttgctgctgcgtgccacccgcatggataacagcgacaccctgtgggatcacttgtt

SEQ ID NO: 255350 - DNA, 75 bp, synthetic construct
  source 1..75: mol_type = other DNA
agcaggcaggtgaacaactgctgaaaacggttcttacccgtttgcgccagcacaaattgcccgcttctaccgctg

SEQ ID NO: 255351 - DNA, 75 bp, synthetic construct
  source 1..75: mol_type = other DNA
agtacactgacgctggcgggcaacggtgaagaacgctggacattaacccagccacttagccaacatgcggcattg

SEQ ID NO: 255352 - DNA, 75 bp, synthetic construct
  source 1..75: mol_type = other DNA
tgtgaatccaacggcaaaccggatgaaaaggagtttcacgctcacctgcatagctggcaggcgctttgccatatc

SEQ ID NO: 255353 - DNA, 75 bp, synthetic construct
  source 1..75: mol_type = other DNA
ttgcccaactgcggggcgactcccccggagatgctctcaatcgtcagcgtgaagcctttatggcccgctggattt

SEQ ID NO: 255354 - DNA, 75 bp, synthetic construct
  source 1..75: mol_type = other DNA
acgtgaattattcagcctttttgagtatgcaccgacaattctgacgtcggtaaaaccagagcaatatctgcatta

SEQ ID NO: 255355 - DNA, 75 bp, synthetic construct
  source 1..75: mol_type = other DNA
cggtcatgtcgagcaggcgactttctggacgggtctgcgcccgatgacgccagacggtacgccggttgtcgggcg

SEQ ID NO: 255356 - DNA, 75 bp, synthetic construct
  source 1..75: mol_type = other DNA
attacccgtttcgataaccgcattcgtgttggcggaatggcggaaattgttggctttaacaccgagctgttgcaa

SEQ ID NO: 255357 - DNA, 75 bp, synthetic construct
  source 1..75: mol_type = other DNA
aaagatgtcacctgcgaactggaacgtaccgcaatctctcttccggcggagcttaccttaaatcgctttaccccc

SEQ ID NO: 255358 - DNA, 75 bp, synthetic construct
  source 1..75: mol_type = other DNA
ccggataattggtaagcatctggccgtccctcgctggcaggatacatgtgattattataatcagatgatggaacg

SEQ ID NO: 255359 - DNA, 75 bp, synthetic construct
  source 1..75: mol_type = other DNA
ccatactggcgaattaatgaagaatcatgttactggcgtgatgctttattccgtgcattacgtgaattattcagt

SEQ ID NO: 255360 - DNA, 75 bp, synthetic construct
  source 1..75: mol_type = other DNA
tgacctgtgccgcctggtcatcacgggttcgcatgctgtgggttgaattcagagcggagtttaagcaggtggtga

SEQ ID NO: 255361 - DNA, 75 bp, synthetic construct
  source 1..75: mol_type = other DNA
tgacctgtgccgcctggtcatcacgggttcgcatgctgagggttgaattcagagctgagtttaagcaggtggtga

SEQ ID NO: 255362 - DNA, 75 bp, synthetic construct
  source 1..75: mol_type = other DNA
aacccggcatggatgtggcttcggctccttccgtaagaaaggtgcgctttggtgatggttactcccagcgagcgc

SEQ ID NO: 255363 - DNA, 75 bp, synthetic construct
  source 1..75: mol_type = other DNA
tgacctgtgccgcctggtcatcacgggttcgcatgctgggggttgaattcagggctgagtttaagcaggtggtga

SEQ ID NO: 255364 - DNA, 75 bp, synthetic construct
  source 1..75: mol_type = other DNA
tgacctgtgccgcctggtcatcacgggttcgcatgctgcgggttgaattcagcgctgagtttaagcaggtggtga

SEQ ID NO: 255365 - DNA, 75 bp, synthetic construct
  source 1..75: mol_type = other DNA
tgacctgtgccgcctggtcatcacgggttcgcatgctgtgggttgaattcagggcagagtttaagcaggtggtga

SEQ ID NO: 255366 - DNA, 75 bp, synthetic construct
  source 1..75: mol_type = other DNA
ataccggcagataaaggtgacctgtgccgggtggtctgcgcgggtcgggatgttgcgcgttgagttcagcgcgga

SEQ ID NO: 255367 - DNA, 75 bp, synthetic construct
  source 1..75: mol_type = other DNA
cgcggatacgggcatgagaccgaagggcctgtatttgcgaccggagaggcgtcctgggggctcagtaaccagtgg

SEQ ID NO: 255368 - DNA, 75 bp, synthetic construct
  source 1..75: mol_type = other DNA
tcccttctaactgggctgcggcgctcattctgctgggcaccgctccattaatcccgttatttatggctttggttg

SEQ ID NO: 255369 - DNA, 75 bp, synthetic construct
  source 1..75: mol_type = other DNA
acccgggaggaggcccgacatctggaggcattcctggcagagcacggtggctggaaggcgtttctgtggacacca

SEQ ID NO: 255370 - DNA, 75 bp, synthetic construct
  source 1..75: mol_type = other DNA
ggtgacgggtactcacagcgtatggcggcagggctgaatgctgacctgaaaacataccgggtgatgctttccgtg

SEQ ID NO: 255371 - DNA, 75 bp, synthetic construct
  source 1..75: mol_type = other DNA
aacgtacagcgtgacgctttctgttccccgtttggaggcctcggttctggagtcgtttctggttgagcacggggg

SEQ ID NO: 255372 - DNA, 75 bp, synthetic construct
  source 1..75: mol_type = other DNA
tatggtttaatagggatgctgacaatatttattgcaatttcacaaactcttgtagatagtggattttcatcagcg

SEQ ID NO: 255373 - DNA, 75 bp, synthetic construct
  source 1..75: mol_type = other DNA
aagtataaggatttcaaaacattaaatagatctttgataaaaccatcgatagcggaattgaatcaaaaaagcgat

SEQ ID NO: 255374 - DNA, 75 bp, synthetic construct
  source 1..75: mol_type = other DNA
agcgacatcgctaaacgtcagggggaactggcgcaggcgaataatgcattgcaactgttattgggaagctacggc

SEQ ID NO: 255375 - DNA, 75 bp, synthetic construct
  source 1..75: mol_type = other DNA
gcgcgagcggcttttttcccgtccattaccctgaccagtggtctctcctctagcagtacggagctgtccagcctc

SEQ ID NO: 255376 - DNA, 75 bp, synthetic construct
  source 1..75: mol_type = other DNA
aactactttgccagcgaagaagcccgtcgggccgtacacatcctgctggtctccaacgtttcacaaagctatttc

SEQ ID NO: 255377 - DNA, 75 bp, synthetic construct
  source 1..75: mol_type = other DNA
ggctcgcgggcagatagaaagtacccgtgcagagatcgctaagcgagaaggcgacctggctcaggccaataatgc

SEQ ID NO: 255378 - DNA, 75 bp, synthetic construct
  source 1..75: mol_type = other DNA
atgaaggcggtgtatgacatggcccgcaagggggcgcaggatgagctccggctgcagttgcgtgatggcggtatg

SEQ ID NO: 255379 - DNA, 75 bp, synthetic construct
  source 1..75: mol_type = other DNA
agccggatatggaggtgaactcgcagtcatcggtgcgtgaagtgcgttttggtgacgggtattcgcagcgcatgg

SEQ ID NO: 255380 - DNA, 75 bp, synthetic construct
  source 1..75: mol_type = other DNA
tcacgcgaggaggccacggcgctggagtcgtttctggctgaacacgggggctggaaggcctttctgtggacgccg

SEQ ID NO: 255381 - DNA, 75 bp, synthetic construct
  source 1..75: mol_type = other DNA
gtttcccactactgattgggctgatatctatgatgatgctgaaaatatgggatcactgcgcagccgctacggtct

SEQ ID NO: 255382 - DNA, 75 bp, synthetic construct
  source 1..75: mol_type = other DNA
ttctacttaactctccttttcccgcaaatcgtttttatccccagtggtaatattctcccgatatgggaattccca

SEQ ID NO: 255383 - DNA, 75 bp, synthetic construct
  source 1..75: mol_type = other DNA
agacagcctcaagcacccgcagcaattctacttaactctcgctttaccgcaaaccgtttttacccgatatgggaa

SEQ ID NO: 255384 - DNA, 75 bp, synthetic construct
  source 1..75: mol_type = other DNA
atgaatatcagaaagctgttttatccggacaatacatccaggattttattatttttattcttcctgggcatgtgt

SEQ ID NO: 255385 - DNA, 75 bp, synthetic construct
  source 1..75: mol_type = other DNA
actatgcctccccgaaaaaaatacaaacggatctagatgatatacacttactaagtactaaagtaagctcttttg

SEQ ID NO: 255386 - DNA, 75 bp, synthetic construct
  source 1..75: mol_type = other DNA
gttcatgatttaaatgaagatgcggaatttgatgagaatggagttgaggtttttgacgaaaaggccttagtatag

SEQ ID NO: 255387 - DNA, 75 bp, synthetic construct
  source 1..75: mol_type = other DNA
aatgtgcgcagggattatatgtcagtgtatggctatctcgtaccaaccacaccgtggctgaatacggcacccggt

SEQ ID NO: 255388 - DNA, 75 bp, synthetic construct
  source 1..75: mol_type = other DNA
ctgcaataaccacaattgcatgcggatacactgagaagaatgccacaggaaatgtgctgcttctgtttctccttc

SEQ ID NO: 255389 - DNA, 75 bp, synthetic construct
  source 1..75: mol_type = other DNA
tcagcgacagtgctaatcctgttcatcatgatggccatatacaaggaggctacagcgttcccctgattattaccg

SEQ ID NO: 255390 - DNA, 75 bp, synthetic construct
  source 1..75: mol_type = other DNA
tcagatagtttaaagcatgctgagtcgcttgtgcagaaagttttaaatgatgctaaatttttatcaggcatataa

SEQ ID NO: 255391 - DNA, 75 bp, synthetic construct
  source 1..75: mol_type = other DNA
ttaacaagcatgttactttaaatattattactgacctaccacatccaaatgaatctgcgattctgacttatataa

SEQ ID NO: 255392 - DNA, 75 bp, synthetic construct
  source 1..75: mol_type = other DNA
tacgtggtgatattttaggtttactctgtgcaaaggctttaaacatagaggcgctagccattccagttagttgta

SEQ ID NO: 255393 - DNA, 75 bp, synthetic construct
  source 1..75: mol_type = other DNA
accagattgttaaccatctgatttaccccattcccgacccggcaatgccgtttttgggcgtgcatctcacccgca

SEQ ID NO: 255394 - DNA, 75 bp, synthetic construct
  source 1..75: mol_type = other DNA
catgcaactgattgatgtctatccggatgcccgcattgcgttgctggaaaaagagtccggaccggcctgtcatca

SEQ ID NO: 255395 - DNA, 75 bp, synthetic construct
  source 1..75: mol_type = other DNA
agagtaaaggatataccgaatgaacacagtttaaatattttgaatctcttatctaaagatccctcgaattttttc

SEQ ID NO: 255396 - DNA, 75 bp, synthetic construct
  source 1..75: mol_type = other DNA
gtttttaacggagaaaggaatgtaccggcagacagtctgaaaccgcagcctctgattcttccggacagaagataa

SEQ ID NO: 255397 - DNA, 75 bp, synthetic construct
  source 1..75: mol_type = other DNA
atgaatatcagaaaactgttttgtccgggaaacaccccccggattttattgtttttattcttttttgttgtttct

SEQ ID NO: 255398 - DNA, 75 bp, synthetic construct
  source 1..75: mol_type = other DNA
cgggtaaccccccccggattttattgtttttattcttttttgtcgtttctgcaataaccacaattgcatgcggat

SEQ ID NO: 255399 - DNA, 75 bp, synthetic construct
  source 1..75: mol_type = other DNA
atgagcaaagaattttacgcaagactggcagctattcaggagaatctgaacgcgccaaagaatcaatacaactca

SEQ ID NO: 255400 - DNA, 75 bp, synthetic construct
  source 1..75: mol_type = other DNA
ctgttattgcttctgatgcggagcataccgttttcctcaagaaaggcagctttgcttcccgtaaaacggatgaca

SEQ ID NO: 255401 - DNA, 75 bp, synthetic construct
  source 1..75: mol_type = other DNA
atgaatatcagaaagctgttttatccgtacaatacatcccggattttattgtttttattcttcccgggcatgtgt

SEQ ID NO: 255402 - DNA, 75 bp, synthetic construct
  source 1..75: mol_type = other DNA
agaaaggcagcttcgcttcccgtaaaacggatgacatgttgttgttacaggaaacagaacgtgcgctggcggata

SEQ ID NO: 255403 - DNA, 75 bp, synthetic construct
  source 1..75: mol_type = other DNA
gagattcctgggggcgccatatagtcgaaacaggttctagcgaacatagcgcgctttctcattggaaagcaaaag

SEQ ID NO: 255404 - DNA, 75 bp, synthetic construct
  source 1..75: mol_type = other DNA
acttcggaggggtatcaaaaaccgcgagtgttttgggaatttcccatcctgcagtgtgcagatggggtgatgtga

SEQ ID NO: 255405 - DNA, 75 bp, synthetic construct
  source 1..75: mol_type = other DNA
ccagaagtttgcggaagtttgcaaccgtctaaggaaatgtgcggagaagaccgtgatgcagcgctgacttttctg

SEQ ID NO: 255406 - DNA, 75 bp, synthetic construct
  source 1..75: mol_type = other DNA
cgtgaagaaaataccaatgaattaagcgcgattaaatcgcttaaagctaatgtgcgtttttggtttcttgaatgc

SEQ ID NO: 255407 - DNA, 75 bp, synthetic construct
  source 1..75: mol_type = other DNA
gcgcctgggcgctggacgcagaaactgcgcctgtggcaccgctaccttctgccagcgttctgcctgtgccgtcta

SEQ ID NO: 255408 - DNA, 75 bp, synthetic construct
  source 1..75: mol_type = other DNA
tataacgggcagaaggcgtttgttgactcgatttgtgacttcaaaaacaaaacaaactcccacgtcattctcgtt

SEQ ID NO: 255409 - DNA, 75 bp, synthetic construct
  source 1..75: mol_type = other DNA
gccgaatcattacctggagcagtatccccgaaaggttgcctgttacctcgccagcatcagtaaactggataactt

SEQ ID NO: 255410 - DNA, 75 bp, synthetic construct
  source 1..75: mol_type = other DNA
tgttatggtttttaacggagagaaaatagttcctgcggacggccttaagtcacagcctgtgattcttccgggcaa

SEQ ID NO: 255411 - DNA, 75 bp, synthetic construct
  source 1..75: mol_type = other DNA
ggcgcttattggggactcttcacaggttctgtatatcgctacctcgcaaatccttgatgatgagatggctgcacg

SEQ ID NO: 255412 - DNA, 75 bp, synthetic construct
  source 1..75: mol_type = other DNA
gctcgatgggggaatacgatgcaaaacgaccgagagcgtgtcgggctaaactacgcgatcttatacgtcatgttg

SEQ ID NO: 255413 - DNA, 75 bp, synthetic construct
  source 1..75: mol_type = other DNA
actaccttccgcttcaacgacgccgttatccgtagcatggtaatgcgtactaagcacgccgttaccgaagcatct

SEQ ID NO: 255414 - DNA, 75 bp, synthetic construct
  source 1..75: mol_type = other DNA
aaagtgatggaagccatcgaatccgttgctgatgccgaccatgtgctggttatgatggacatggggagcgcgtta

SEQ ID NO: 255415 - DNA, 75 bp, synthetic construct
  source 1..75: mol_type = other DNA
gcagagaacatttacccctccaccgtgctgcaactggatccgacggtcgttaaaggcatctgccttagtgccgga

SEQ ID NO: 255416 - DNA, 75 bp, synthetic construct
  source 1..75: mol_type = other DNA
gcgctatatcgatgtggatgatcttctgcatcgcaccctgctccatctgacacagacaaaagaagaactaccgca

SEQ ID NO: 255417 - DNA, 75 bp, synthetic construct
  source 1..75: mol_type = other DNA
cccggcgatatgagtgatttctggctcctgactgcacgggagttaagcgtgcttaagattctgatgcagggcatg

SEQ ID NO: 255418 - DNA, 75 bp, synthetic construct
  source 1..75: mol_type = other DNA
gcctgttacctcgccagcatcagtaaactggataactttctcgggcagcttgatggtatccttcgctggcattcc

SEQ ID NO: 255419 - DNA, 75 bp, synthetic construct
  source 1..75: mol_type = other DNA
gagcgcgaaccgaatatcaccgggctcggcggcatttttgtgccgtccagcggcattgtcagctatcgcgaagtg

SEQ ID NO: 255420 - DNA, 75 bp, synthetic construct
  source 1..75: mol_type = other DNA
catgccggagtctattacacgcccgacagcctgaaggcgcagttttgcctggcggggaaccgtgccactaaagtc

SEQ ID NO: 255421 - DNA, 75 bp, synthetic construct
  source 1..75: mol_type = other DNA
aagtttcatggagtcgcattagcaattgataatcggcctagtagttactctatagctcaagcatgtgcatctgtg

SEQ ID NO: 255422 - DNA, 75 bp, synthetic construct
  source 1..75: mol_type = other DNA
taatagccaatagtaatgtgaattttggtactagtggtgctcgtggattagtcgttgattttactcacaatgttt

SEQ ID NO: 255423 - DNA, 75 bp, synthetic construct
  source 1..75: mol_type = other DNA
tagtaaatagtgaatatgttttttctcctgtagatgtattacctcatcttgaaacaagtactcaaggtgcggatt

SEQ ID NO: 255424 - DNA, 75 bp, synthetic construct
  source 1..75: mol_type = other DNA
taagaggggatattcttggccttataagcgccatagagctaggcatcgaggcgttgtctgtgcctataagttgta

SEQ ID NO: 255425 - DNA, 75 bp, synthetic construct
  source 1..75: mol_type = other DNA
tttctacttccatcaattttgatttatcactatttaaacttcctcatctaacctgttctcctgcagctaaaaatt

SEQ ID NO: 255426 - DNA, 75 bp, synthetic construct
  source 1..75: mol_type = other DNA
ggcattagcttataaggcactggaggataaaataccgtgtataatggtaacgggtagtcacataccacatgatcg

SEQ ID NO: 255427 - DNA, 75 bp, synthetic construct
  source 1..75: mol_type = other DNA
gcacttcgatgagatgaataccgcaggtttaaagcgcgacgaacttctcgattgtgcaatgcgcagtgagcagag

SEQ ID NO: 255428 - DNA, 75 bp, synthetic construct
  source 1..75: mol_type = other DNA
gcggcatcatcggcatgtcgaccgccatgcaactgattgatgtttatccggatgcccgcatagcgttgctggaaa

SEQ ID NO: 255429 - DNA, 75 bp, synthetic construct
  source 1..75: mol_type = other DNA
catgcaactgattgatgtttatcctgacgcccgcatagcgttgctggaaaaagagcccggcccggcctgtcacca

SEQ ID NO: 255430 - DNA, 75 bp, synthetic construct
  source 1..75: mol_type = other DNA
gcctgtaggtgtattacctcatcttgaaacaagcactcaaggtgcagactactaccttgagcgttatgtttctct

SEQ ID NO: 255431 - DNA, 75 bp, synthetic construct
  source 1..75: mol_type = other DNA
atgttaaatgttaaaaaaatcattaacgatagtaatattgcgttcggtactagtggtgctcgcggtttagtgatc

SEQ ID NO: 255432 - DNA, 75 bp, synthetic construct
  source 1..75: mol_type = other DNA
gggaggcgttgaatgccttgtttatgcgccagaatatcgcggtagagcaactgatatggtcgctggaatcgcaaa

SEQ ID NO: 255433 - DNA, 75 bp, synthetic construct
  source 1..75: mol_type = other DNA
gttatgtgcgttcctatgcacctgcacagcaaagtgttgcggcagggagcgaatggaccgggatgcaggtgaaat

SEQ ID NO: 255434 - DNA, 75 bp, synthetic construct
  source 1..75: mol_type = other DNA
aatcccggtgatccgattcgcgttaatgctgcattcatttgccgcagtggcgctaattgtggttatcatggtgca

SEQ ID NO: 255435 - DNA, 75 bp, synthetic construct
  source 1..75: mol_type = other DNA
gaatgggactatatggcgctggagctggcgattaatgacgagattcagtcgttgattgccgcctgtctatgttgc

SEQ ID NO: 255436 - DNA, 75 bp, synthetic construct
  source 1..75: mol_type = other DNA
tatcgccgcaaaatgtgcaggtccgctggcgtgaaccggcaaaaacggctcaacaaagtaacattccggtgaccg

SEQ ID NO: 255437 - DNA, 75 bp, synthetic construct
  source 1..75: mol_type = other DNA
actggctggcgaaatatatggcgacaatgcctccagttgttttgcctgcgcctgcgggcgcatgggctaaacata

SEQ ID NO: 255438 - DNA, 75 bp, synthetic construct
  source 1..75: mol_type = other DNA
ctggcgtgaaccggcaaaaaacgtgcagcaaagtcatgttccggtaacggttgagcgacagttgtatcggctgat

SEQ ID NO: 255439 - DNA, 75 bp, synthetic construct
  source 1..75: mol_type = other DNA
tcgaagggtgacgttattgctactcatcttgcaggtgcgggcgatatggtcacgatgatcatcgcccgtgaactg

SEQ ID NO: 255440 - DNA, 75 bp, synthetic construct
  source 1..75: mol_type = other DNA
acacttctacagtgtcgcccaacatgcggtgctttgcagccagctagtgccacaggaatttgcttttgaagcttt

SEQ ID NO: 255441 - DNA, 75 bp, synthetic construct
  source 1..75: mol_type = other DNA
ctgagcaacacccaaccgtgaaatatgccgacctggtgatgctcgccagcgaacgccgcgattttgagattgacg

SEQ ID NO: 255442 - DNA, 75 bp, synthetic construct
  source 1..75: mol_type = other DNA
atatggcggcgataaagaccctgacgaatgggactatatggcgctggagctggcgattaatgacgagattcagtc

SEQ ID NO: 255443 - DNA, 75 bp, synthetic construct
  source 1..75: mol_type = other DNA
tctggcgtaacaaggctcgcgagagagcgttacagagagttcaaagcggtgaacagatgtcagagaaggacgaac

SEQ ID NO: 255444 - DNA, 75 bp, synthetic construct
  source 1..75: mol_type = other DNA
cgggatcgccaccttcttcgggctaagcccggaagagacccaggccatcgtccccatcgcccgcgccctgattgg

SEQ ID NO: 255445 - DNA, 75 bp, synthetic construct
  source 1..75: mol_type = other DNA
actctgcagccggtgaccagcaatgagattgacagcgatgcgctgtatctcgatgaaattacgcttaccagcgag

SEQ ID NO: 255446 - DNA, 75 bp, synthetic construct
  source 1..75: mol_type = other DNA
aagtcctctacatcgatcgtattccgctcggcatgttagcagctattgaagtcgctgttcccgggaaagttatcg

SEQ ID NO: 255447 - DNA, 75 bp, synthetic construct
  source 1..75: mol_type = other DNA
cggcaaccattaatctgggagacggtgatgctgttgtcgggaaggcggattctccgttattcagttccttgatga

SEQ ID NO: 255448 - DNA, 75 bp, synthetic construct
  source 1..75: mol_type = other DNA
taatggcgaggtcgttctgcagaattccgttaatcagggggccgggtatctgcagtttgccggcgattacagggt

SEQ ID NO: 255449 - DNA, 75 bp, synthetic construct
  source 1..75: mol_type = other DNA
gtatggtaataactgggttgtcacaactcaagattttcttaatcagcaaccaaagcatgattttgacaaaacaat

SEQ ID NO: 255450 - DNA, 75 bp, synthetic construct
  source 1..75: mol_type = other DNA
gtcgccgttcccggaaaggttatcgaaaccctgtctaacccatatgggattgctactgttttcaccctcaatgct

SEQ ID NO: 255451 - DNA, 75 bp, synthetic construct
  source 1..75: mol_type = other DNA
tggcgtactggtcaataaccgcctggaaattcctctacctattgttgatgaagtcctctacatcgatcgtattcc

SEQ ID NO: 255452 - DNA, 75 bp, synthetic construct
  source 1..75: mol_type = other DNA
ggcgattattttcctggtgctgctgctggtgagcggcgtgattatctggcgtccttatttcgcgcctgctttctc

SEQ ID NO: 255453 - DNA, 75 bp, synthetic construct
  source 1..75: mol_type = other DNA
tcggtcagaaatgcgttttctgggcggcgattattttcctgattctgctgctggtgagcggcgtgattatctggc

SEQ ID NO: 255454 - DNA, 75 bp, synthetic construct
  source 1..75: mol_type = other DNA
agcaggataacgaaccggtggcgctggtgactaaatttgcaggcgctgagatgcgccagacgctgacgctgcaca

SEQ ID NO: 255455 - DNA, 75 bp, synthetic construct
  source 1..75: mol_type = other DNA
tatgaagtttttggggggcatggtagtcccggtgacttatattatgttcctgcatcacatacttattttatcctg

SEQ ID NO: 255456 - DNA, 75 bp, synthetic construct
  source 1..75: mol_type = other DNA
gcccggcgcggaactaaaactgaagatttctctgaggaagacaccagcgatatcaatgacagcatgatcctcgat

SEQ ID NO: 255457 - DNA, 75 bp, synthetic construct
  source 1..75: mol_type = other DNA
aagcattgggcgaaccgatgctttccacttcgctaatgctgccaggcagcgaatttaccgaatccgatccggaag

SEQ ID NO: 255458 - DNA, 75 bp, synthetic construct
  source 1..75: mol_type = other DNA
gggtaaccggcgttttcctgaaggatctgcgtattatccggcgtttctgtattacggtgtgcgtcatgccgcata

SEQ ID NO: 255459 - DNA, 75 bp, synthetic construct
  source 1..75: mol_type = other DNA
cgccagtcttgtcggttctatcggcgtcattagctcagggtttggattcaccggcttgatggacaggctcggcat

SEQ ID NO: 255460 - DNA, 75 bp, synthetic construct
  source 1..75: mol_type = other DNA
actgaaagacgacccagaggtgttttctggattgctctggaacggggagcaggccaaagacattgggctgattga

SEQ ID NO: 255461 - DNA, 75 bp, synthetic construct
  source 1..75: mol_type = other DNA
cccgtgcgggctcaggccggacaattcagctggtcagcgagctggcgggtacccccggtccggcaaaagcctggg

SEQ ID NO: 255462 - DNA, 75 bp, synthetic construct
  source 1..75: mol_type = other DNA
gatgtgtcgcgatctttctgaactctcgacctattcattcgtggataacgttgcgtttcgtttgatgaaaaacaa

SEQ ID NO: 255463 - DNA, 75 bp, synthetic construct
  source 1..75: mol_type = other DNA
tcgactttaaacaaccaaaggagctggagtttaatcgcgcccgtttgcgtcgggcgtttgtgcaaatcgggcgcg

SEQ ID NO: 255464 - DNA, 75 bp, synthetic construct
  source 1..75: mol_type = other DNA
atgaatatcagaaagctgttttatacggacaatatatcccggattttattgtttttattcttcccgggcatgtgt

SEQ ID NO: 255465 - DNA, 75 bp, synthetic construct
  source 1..75: mol_type = other DNA
cggatacactgagaagaatgcaacaggaaatgtgctgcttctgtttctccttctgctccttgcacacagaaatac

SEQ ID NO: 255466 - DNA, 75 bp, synthetic construct
  source 1..75: mol_type = other DNA
atgagtatcataaaactattttttccggacaatacatcccgaattttattgtttttattcttttttgttgtttct

SEQ ID NO: 255467 - DNA, 75 bp, synthetic construct
  source 1..75: mol_type = other DNA
gaaattctgggagggcgttctatcgaaaacccaccagcagttcatcgaacgagtgaaggctgggcggggtgatcg

SEQ ID NO: 255468 - DNA, 75 bp, synthetic construct
  source 1..75: mol_type = other DNA
ttgtctcgtggtagtgatgagcctgtcgataccgacaaacgagagaaaaccgaacgtgtgggggcggaacatcag

SEQ ID NO: 255469 - DNA, 75 bp, synthetic construct
  source 1..75: mol_type = other DNA
gcggcatttttgaaattctcggtggcgaacatcgctggcgtgccgcgatggagcagggcatttcaacggttcccg

SEQ ID NO: 255470 - DNA, 75 bp, synthetic construct
  source 1..75: mol_type = other DNA
cgtcatgttcagtaccccggcgggcctgctgactgccggtggtcgcatgcagatctgggtcacgacgtcagatga

SEQ ID NO: 255471 - DNA, 75 bp, synthetic construct
  source 1..75: mol_type = other DNA
atcccttcgaattgctgaatatgccgatcagtgaaattcccttgctggtcagtcaggcaaacaggatagagcagg

SEQ ID NO: 255472 - DNA, 75 bp, synthetic construct
  source 1..75: mol_type = other DNA
atgaaaaaagtaactcattggatcaacggcaaaaatgttgcaggtaacgactatttccagaccactaatccagca

SEQ ID NO: 255473 - DNA, 75 bp, synthetic construct
  source 1..75: mol_type = other DNA
tttatgaccgccacctggaaggtcgcgccgtgtctggcgctgggcaataccgcggtactgaaaatgtcggaactc

SEQ ID NO: 255474 - DNA, 75 bp, synthetic construct
  source 1..75: mol_type = other DNA
tggaaagcgcacctcatggcgcggatgttgtttttgctccccaggtcagcgctggcgatcttgtgtgtgcagacg

SEQ ID NO: 255475 - DNA, 75 bp, synthetic construct
  source 1..75: mol_type = other DNA
gatattgacaacttaacagatgcattaaaagcggcagcctcaaccgataaatcagtgctgcgtgacatggccaat

SEQ ID NO: 255476 - DNA, 75 bp, synthetic construct
  source 1..75: mol_type = other DNA
tggctaatgtgccgctgagtacggtagatcagatgaaacccggcgacctgaatagcgcaggctggctggttgctg

SEQ ID NO: 255477 - DNA, 75 bp, synthetic construct
  source 1..75: mol_type = other DNA
atgtggatgagatgtttgctgactggcagaaagggctgggtgaactcaccacggggaacgatttacagactgcaa

SEQ ID NO: 255478 - DNA, 75 bp, synthetic construct
  source 1..75: mol_type = other DNA
ttaatggcttttggcagcgattaaactgttcctgctcatttaatgatgatgtaaatattattataggccgaaatg

SEQ ID NO: 255479 - DNA, 75 bp, synthetic construct
  source 1..75: mol_type = other DNA
attacttattttattcatagaaaccctattacaaagagaaaaacaatatattttcctaacagatgagcctgaact

SEQ ID NO: 255480 - DNA, 75 bp, synthetic construct
  source 1..75: mol_type = other DNA
gctggtatcgccgtggaacgtaccgtttatgaccgccacatggaaggtcgcgccgtgtctggcgctgggcaatac

SEQ ID NO: 255481 - DNA, 75 bp, synthetic construct
  source 1..75: mol_type = other DNA
cagattgaacagcaaatgaaaaaactggagaaacaggtaaaggatcttcactacacgccagttcaggtaacacgg

SEQ ID NO: 255482 - DNA, 75 bp, synthetic construct
  source 1..75: mol_type = other DNA
gagaaacaggtaaaggatcttcactacacgcccgttcaggtaacacgggtggggattaatgatggtgaagaaggg

SEQ ID NO: 255483 - DNA, 75 bp, synthetic construct
  source 1..75: mol_type = other DNA
tggctgaagataactttggtgaaacggaggaagtcgctccacctactctgcgtcccgttccgcctgtttcgggta

SEQ ID NO: 255484 - DNA, 75 bp, synthetic construct
  source 1..75: mol_type = other DNA
atgcaagctgttttttcttccccgtctcccgcccctgtgacgccactgatgccactgccggacatcacgcaggag

SEQ ID NO: 255485 - DNA, 75 bp, synthetic construct
  source 1..75: mol_type = other DNA
tcggcggaaaaaacgtggcgtgggcgcactctgaaatcacggcatggatgactgaccgcattgccgaacgtaacc

SEQ ID NO: 255486 - DNA, 75 bp, synthetic construct
  source 1..75: mol_type = other DNA
atgactcggtcgccacgctgaatgaatcgcgcgatatcatggcgttcctcaatactaccgtcgtcgccagcgccg

SEQ ID NO: 255487 - DNA, 75 bp, synthetic construct
  source 1..75: mol_type = other DNA
gccggcttctgatgccgttcaggagcgctttatccgcctgcctgaagtgatgcatctgtgcggcctgtcccggtc

SEQ ID NO: 255488 - DNA, 75 bp, synthetic construct
  source 1..75: mol_type = other DNA
tgggcggtaaaaacgtggcgtgggcgcagtctgaaatcaccgcatggatggcagatcgcattgccgaacgcaacc

SEQ ID NO: 255489 - DNA, 75 bp, synthetic construct
  source 1..75: mol_type = other DNA
tgcacctgtgcggcctgtcacgctcgaccatctatgaacttatccgtaagggggaatttccgccgcaggtgagtc

SEQ ID NO: 255490 - DNA, 75 bp, synthetic construct
  source 1..75: mol_type = other DNA
gtgctctggttgtaggtacatcctcatatcttacggggtgctccatcggtagttccgaatccgaatgtccaggca

SEQ ID NO: 255491 - DNA, 75 bp, synthetic construct
  source 1..75: mol_type = other DNA
gccaattcagcattgattaaactcaaccagattggttccctgagtgaaacctttgatgcggtacaactttgccat

SEQ ID NO: 255492 - DNA, 75 bp, synthetic construct
  source 1..75: mol_type = other DNA
aggcaatgctggtaagcgtctgatcaacggttccattgaacgtgcgatcaaattccgtaaagagatcaaacgtct

SEQ ID NO: 255493 - DNA, 75 bp, synthetic construct
  source 1..75: mol_type = other DNA
cgcctcatgactgagcatgaccttgcgatgctctatgagtggctaaatcgatctcatatcgtcgagtggtggggc

SEQ ID NO: 255494 - DNA, 75 bp, synthetic construct
  source 1..75: mol_type = other DNA
tttttaaaaatcccaaatcatttattgcggactctcgttattttaattttataaatagtaaaaaaaaagttgata

SEQ ID NO: 255495 - DNA, 75 bp, synthetic construct
  source 1..75: mol_type = other DNA
gcaagcagatacttgaaaagataaatgatcatgatcgtttaaattctaaattgcttttaaaaatgataattttaa

SEQ ID NO: 255496 - DNA, 75 bp, synthetic construct
  source 1..75: mol_type = other DNA
atgaacacaaataacatcctggatctcacgccacattttgcgttagacggtgaccagccatttaaagacagacgc

SEQ ID NO: 255497 - DNA, 75 bp, synthetic construct
  source 1..75: mol_type = other DNA
tgcgttattgtcctgaaggaactataagcagtaatgcgggtatgatgatttttgatacaaaaagcacaggaaaaa

SEQ ID NO: 255498 - DNA, 75 bp, synthetic construct
  source 1..75: mol_type = other DNA
agtaatgaagattataaaaagaatgccttgcttcaacgtagcggctgctttaaagacgttgcacaacatgaactt

SEQ ID NO: 255499 - DNA, 75 bp, synthetic construct
  source 1..75: mol_type = other DNA
cccggtcagccgatccttgtgggcatcacagcgaacgccgcgcccgtcgtgatgcgcagcgtattgaaaatggta

SEQ ID NO: 255500 - DNA, 75 bp, synthetic construct
  source 1..75: mol_type = other DNA
cagtataagaatatacgagttcctccagcaattccgcagtacgggagagagaattattgctcttaatgactttcg

SEQ ID NO: 255501 - DNA, 75 bp, synthetic construct
  source 1..75: mol_type = other DNA
aaatgccattaaaccgaagaaatctgaatcagcgctggagacgatccgccgttatttatcgacgcagttctataa

SEQ ID NO: 255502 - DNA, 75 bp, synthetic construct
  source 1..75: mol_type = other DNA
tctggggtgaagaacatctgcaggaaaacctcgattttatcgccgaaagtctctgcttgtacgcaatcaagccga

SEQ ID NO: 255503 - DNA, 75 bp, synthetic construct
  source 1..75: mol_type = other DNA
cagctccggctgcgccattatttcctgttccgaaccagcatgagcgattcttacgcctgcctgaggtgatgcact

SEQ ID NO: 255504 - DNA, 75 bp, synthetic construct
  source 1..75: mol_type = other DNA
tgcatctgtgcggcctgtcccggtcgaccatttacgacctcatcagccgcgaggctttcccgaaacaaatcagcc

SEQ ID NO: 255505 - DNA, 75 bp, synthetic construct
  source 1..75: mol_type = other DNA
cactgatgccgctgccggacatcacgcaggagcgttttttacgtctgccggaagtgatgcacctgtgcggcctgt

SEQ ID NO: 255506 - DNA, 75 bp, synthetic construct
  source 1..75: mol_type = other DNA
tatttatcgactcagttctacaaagaccatctgaagacttacaaaaaacggcctatttattggctatttagctca

SEQ ID NO: 255507 - DNA, 75 bp, synthetic construct
  source 1..75: mol_type = other DNA
tggcgcggccatcaccctcattatcttttccgtttttacacgccctgctatgtacggataccacaactatttcaa

SEQ ID NO: 255508 - DNA, 75 bp, synthetic construct
  source 1..75: mol_type = other DNA
atgaaacctaccgatttaacccccagccagcgcgtactgattacgccctcatttggccaatcaactccataccac

SEQ ID NO: 255509 - DNA, 75 bp, synthetic construct
  source 1..75: mol_type = other DNA
aataaccattgaggacaaaaatagaaaaacgaagcaagataatgatatacttaatgcatatttgccagtttgctt

SEQ ID NO: 255510 - DNA, 75 bp, synthetic construct
  source 1..75: mol_type = other DNA
tcaactctggcgagacgctttttactggttagcctggcaaaatagaattctggaattacgtgacgtgcagctcat

SEQ ID NO: 255511 - DNA, 75 bp, synthetic construct
  source 1..75: mol_type = other DNA
gtcgtggcagaagttctcgcggctttacgcaagggcggctatatcgaaatgaataaaggcaaactggttgctatc

SEQ ID NO: 255512 - DNA, 75 bp, synthetic construct
  source 1..75: mol_type = other DNA
tcgaggcgatatacgacgcgccagcgtcttttttatcgttcatgctcgcgcacgccagaattatggtgggctggg

SEQ ID NO: 255513 - DNA, 75 bp, synthetic construct
  source 1..75: mol_type = other DNA
tcagcctgctcgcttttctgctgccttgcgcactggcatttagcgcaactacccatgcagaaaccaacaaactgg

SEQ ID NO: 255514 - DNA, 75 bp, synthetic construct
  source 1..75: mol_type = other DNA
aagcatatgaatgtttcaagccaaaatattgattctgtaatttcgggacgttacactgttccagcaccttataaa

SEQ ID NO: 255515 - DNA, 75 bp, synthetic construct
  source 1..75: mol_type = other DNA
atgattagaataaaaatacgtaaaaaacctatagaaaacagaacaatcctgaataatagggatattgagataaaa

SEQ ID NO: 255516 - DNA, 75 bp, synthetic construct
  source 1..75: mol_type = other DNA
aaaaaacccagtatacttttagcagatgaacctactgctagtttagatataaagaataaaaaattagtgatgaac

SEQ ID NO: 255517 - DNA, 75 bp, synthetic construct
  source 1..75: mol_type = other DNA
atgaacctaccgcaagcctggatagaaataacaaaataataattatgagtattttatccgaatataataagtccg

SEQ ID NO: 255518 - DNA, 75 bp, synthetic construct
  source 1..75: mol_type = other DNA
aaaatggagggacagtcattatgataacccatgatagaagtttgattagagaacatataaaagttatatctctat

SEQ ID NO: 255519 - DNA, 75 bp, synthetic construct
  source 1..75: mol_type = other DNA
gataatgcctttgttggagagtatgagtttttcggtaaaaaagtggaaataaaagataatagcatcaccacatat

SEQ ID NO: 255520 - DNA, 75 bp, synthetic construct
  source 1..75: mol_type = other DNA
aaaaaacccagtatacttttagcagatgaacctactgctagtctagatataaagaataaaaaattagtgatgaat

SEQ ID NO: 255521 - DNA, 75 bp, synthetic construct
  source 1..75: mol_type = other DNA
atggctacgatccccgcacatccatacctcaaaatcgaggtcgtcaacggcagagccgttatattctccctgtat

SEQ ID NO: 255522 - DNA, 75 bp, synthetic construct
  source 1..75: mol_type = other DNA
atgaacgttattgcaatattgaatcacatgggggtttattttaaagaagaacccatccgtgaacttcatcgcgcg

SEQ ID NO: 255523 - DNA, 75 bp, synthetic construct
  source 1..75: mol_type = other DNA
gattgggtattataaatctaaagaatttgaagataaacttaagcagttattacctgaacattctgcaactctttc

SEQ ID NO: 255524 - DNA, 75 bp, synthetic construct
  source 1..75: mol_type = other DNA
tccttcagcatgaacattgcacggcagaatatgcctggcagcaagttcttaaagaacttagccagcaataccaac

SEQ ID NO: 255525 - DNA, 75 bp, synthetic construct
  source 1..75: mol_type = other DNA
gagaacggaatctgatggctggttctttgatgtatggcagccggatcatatcgatacgactgaatgctggccgct

SEQ ID NO: 255526 - DNA, 75 bp, synthetic construct
  source 1..75: mol_type = other DNA
acgcagaccgcagctacatggtgactaacggtacttccactgccaacaaaattgtcggtatgtactcggctccgg

SEQ ID NO: 255527 - DNA, 75 bp, synthetic construct
  source 1..75: mol_type = other DNA
ccgcactacggtatcgtggcgtccactgaaaccgctgcggcgatgatgaaaggcaatgcaggtaagcgtctgatc

SEQ ID NO: 255528 - DNA, 75 bp, synthetic construct
  source 1..75: mol_type = other DNA
agtacgtttatgcgctgcaccgttggtcgaaggcacactggcggcagcggttagtgcagcgtcgggggcgagtat

SEQ ID NO: 255529 - DNA, 75 bp, synthetic construct
  source 1..75: mol_type = other DNA
agaacatcgtcgacaaaatcgagtatctgaactgctcgcgtgaattcttctcccgtaatttcataccgggtactt

SEQ ID NO: 255530 - DNA, 75 bp, synthetic construct
  source 1..75: mol_type = other DNA
ctcacccgcaactttattcccggcacttatcgcgcctatggcgattcagtgcgtggttattacatcacccgtgat

SEQ ID NO: 255531 - DNA, 75 bp, synthetic construct
  source 1..75: mol_type = other DNA
aagccttttattatcaaccggttttatgtacggtacaggcaaaatcaaccctgaccgtggaagaagaacaagatc

SEQ ID NO: 255532 - DNA, 75 bp, synthetic construct
  source 1..75: mol_type = other DNA
agtccgctatcccacagtgccctaatcgcccgtgaactgggaattggctggatttgccagcagggtgagaaactg

SEQ ID NO: 255533 - DNA, 75 bp, synthetic construct
  source 1..75: mol_type = other DNA
tcaccatacactgttagatgatccggaactgcaggcggcggcaagcgaactccttcagcatgaacattgcacggc

SEQ ID NO: 255534 - DNA, 75 bp, synthetic construct
  source 1..75: mol_type = other DNA
attgtgcagtatctggtgcagaactccgttggccgccagtggttgcagacctacccggactcgccgctgaaagac

SEQ ID NO: 255535 - DNA, 75 bp, synthetic construct
  source 1..75: mol_type = other DNA
tgctggggcagtgccacgccctgcaccacgcgatgccgttcctgtttgaagcggtagatgacgaagcggaactgc

SEQ ID NO: 255536 - DNA, 75 bp, synthetic construct
  source 1..75: mol_type = other DNA
accagtatttttccgattaattgaaggtagcgaagagcagaaaaaaaatgaattagctagtcgcgataaacgttt

SEQ ID NO: 255537 - DNA, 75 bp, synthetic construct
  source 1..75: mol_type = other DNA
gcaacaacaagcctctcatatggaccggggacatgttaagggctattgattatgaggtaggtgaaattgaatctt

SEQ ID NO: 255538 - DNA, 75 bp, synthetic construct
  source 1..75: mol_type = other DNA
gtgcctgtcagttcaccagagtggctctgctgtcttttatcccaaaggatagatatatcgtgcgagaatacagta

SEQ ID NO: 255539 - DNA, 75 bp, synthetic construct
  source 1..75: mol_type = other DNA
ttgaagcaataaataataaagattgttcttggcgctatcaaaccaatcaagaaagcttcaaaaaaatacctagca

SEQ ID NO: 255540 - DNA, 75 bp, synthetic construct
  source 1..75: mol_type = other DNA
cgcagaatatttacccgtgatgtgcgtctgaatattgtctctttgcaggaaagcctgcatctggatatcgccaaa

SEQ ID NO: 255541 - DNA, 75 bp, synthetic construct
  source 1..75: mol_type = other DNA
aagcctgcatctggatatcgccaaactctggcagcagctcaatttccaccagcaggtacaaaccggcagtatggg

SEQ ID NO: 255542 - DNA, 75 bp, synthetic construct
  source 1..75: mol_type = other DNA
gtggttatcgcgggcgtgatattccacaactgattctggaaaataatatttttggtcttgatatcgacgaccgcg

SEQ ID NO: 255543 - DNA, 75 bp, synthetic construct
  source 1..75: mol_type = other DNA
gtatgttgtctcacccggagacgccggccgcgtttgaggtgctggatcatgtgccggaagtggcagaagccctgc

SEQ ID NO: 255544 - DNA, 75 bp, synthetic construct
  source 1..75: mol_type = other DNA
ctactcgcctgaaacgcgaacgcgatagcctgatcaaaaattcagcgaactgcgcagctatgacgaccgcctgcg

SEQ ID NO: 255545 - DNA, 75 bp, synthetic construct
  source 1..75: mol_type = other DNA
aagctgatttgtttgcaatgtttatgcagcatgcattttctttacttaaagaaaatgggtttaatgcacaaataa

SEQ ID NO: 255546 - DNA, 75 bp, synthetic construct
  source 1..75: mol_type = other DNA
tagtacatgagacgctatttgacctggctggtcagtggaaaaaaaaaaaaaaaaaaaaaatgggggcaattcccc

SEQ ID NO: 255547 - DNA, 75 bp, synthetic construct
  source 1..75: mol_type = other DNA
tctcatcagtccgtcagcagaaaaatcagtgcccgtcatttcgcaggtatttttcagtggctgaccggcattcgt

SEQ ID NO: 255548 - DNA, 75 bp, synthetic construct
  source 1..75: mol_type = other DNA
cttccctgagccggacactgatttatgactatgagcagaaccctgattccggcaacaacgtggtggcgctggcag

SEQ ID NO: 255549 - DNA, 75 bp, synthetic construct
  source 1..75: mol_type = other DNA
ggaaacagaacgtgcgctggcggatacatcctctccgaaggtgattttcctgcacatgattggctctcatccgaa

SEQ ID NO: 255550 - DNA, 75 bp, synthetic construct
  source 1..75: mol_type = other DNA
cgacaaagttatttatgatgctatgtctgcgctggaagccaaacgcgaacaactgggtttaccgtcatccgccag

SEQ ID NO: 255551 - DNA, 75 bp, synthetic construct
  source 1..75: mol_type = other DNA
atgtggtggcgctggcagcaaaagcaggatacagcacatggtggatatccaatcaaggaaaactgggggagcatg

SEQ ID NO: 255552 - DNA, 75 bp, synthetic construct
  source 1..75: mol_type = other DNA
cgttatggtttttaacggagagaggaatgtactggcagacagtctgaaaccacagcctctgattcttccggtcag

SEQ ID NO: 255553 - DNA, 75 bp, synthetic construct
  source 1..75: mol_type = other DNA
gagcgcgaaccgaatatcaccgggctcggcggcatttttgtgccgtccagcggtattgtcagctaccgcgaagtg

SEQ ID NO: 255554 - DNA, 75 bp, synthetic construct
  source 1..75: mol_type = other DNA
tatttccgccttgcgccggagcataaccagattgttaaccatctgatttaccccatccccgacccggcgatgcca

SEQ ID NO: 255555 - DNA, 75 bp, synthetic construct
  source 1..75: mol_type = other DNA
atgacaactgcggcaagatgctggtcgccacatccgaactcgaaatggagcggatgcgcgcgttatgggaacgca

SEQ ID NO: 255556 - DNA, 75 bp, synthetic construct
  source 1..75: mol_type = other DNA
gcagaccacggctgatgaggctgcagagtttaccgggatgattcctgtttatcattttctggttagtgtcacggt

SEQ ID NO: 255557 - DNA, 75 bp, synthetic construct
  source 1..75: mol_type = other DNA
atataacgccattcaatccgctgacagacgaagataatgaacccgttatggtttttaacggagagaaaaatgtgc

SEQ ID NO: 255558 - DNA, 75 bp, synthetic construct
  source 1..75: mol_type = other DNA
gtttttaacggggagaggaatgtaccggcagacagtctgaaaccgcagcctctgattcttccggtcaggggaaaa

SEQ ID NO: 255559 - DNA, 75 bp, synthetic construct
  source 1..75: mol_type = other DNA
aagtcattctatcggctgccaaatgggacgctattccctcgatcgcgaaggccttgtctacgcccatgaaggtaa

SEQ ID NO: 255560 - DNA, 75 bp, synthetic construct
  source 1..75: mol_type = other DNA
ttaaaaaacaaagaaaatgttcaagaaattataaatatatcgaaaatcgattgggactccaaagagtattcagca

SEQ ID NO: 255561 - DNA, 75 bp, synthetic construct
  source 1..75: mol_type = other DNA
ggcttccaaatttaagtattttcaataatatgaaagcatccgatttatgtaaatcaggagggagatgtaaaaccc

SEQ ID NO: 255562 - DNA, 75 bp, synthetic construct
  source 1..75: mol_type = other DNA
gctgattctggaaaacaatattttcggcctagatattgatgaccgtgcggcgcagctttccggttttgcgatgct

SEQ ID NO: 255563 - DNA, 75 bp, synthetic construct
  source 1..75: mol_type = other DNA
cactacgcagatatgcgtatttcactggatcttgatgatggtgtgaaagtgaattacggcaagtttggtgatctg

SEQ ID NO: 255564 - DNA, 75 bp, synthetic construct
  source 1..75: mol_type = other DNA
ctacaaatcgttttcgcgagtttgtccaagttgtttggggtgaagaacatctacaagaaaaccttgattttgttg

SEQ ID NO: 255565 - DNA, 75 bp, synthetic construct
  source 1..75: mol_type = other DNA
ttcaaaataagcacatcaatcattatcaacctaccttttataggctgatagatggcaatgaagaagaaaagcaaa

SEQ ID NO: 255566 - DNA, 75 bp, synthetic construct
  source 1..75: mol_type = other DNA
tcggtcgtcaatggctgcaaacctacccagactctgccattaaaagccagatggaatactacattgagcctgcgc

SEQ ID NO: 255567 - DNA, 75 bp, synthetic construct
  source 1..75: mol_type = other DNA
accattacagctgcggaatattttgattcattccctgatatggggcggaaaaatgccgaggttcagctacaggaa

SEQ ID NO: 255568 - DNA, 75 bp, synthetic construct
  source 1..75: mol_type = other DNA
agtctgatttgtttgctatgtttattgagcgtggtttcctttggttgaaaaatgctggtttcaactcaatggtaa

SEQ ID NO: 255569 - DNA, 75 bp, synthetic construct
  source 1..75: mol_type = other DNA
tcatattttgattgaagcctataatgtgctgaaaaatatctacgaagagcgtggttatcgcgggcgtgatattcc

SEQ ID NO: 255570 - DNA, 75 bp, synthetic construct
  source 1..75: mol_type = other DNA
cgttaaggttaactacggcaagtttggcgatctgctggcagatgtcaaagccatcaccggcaatgccccagaggt

SEQ ID NO: 255571 - DNA, 75 bp, synthetic construct
  source 1..75: mol_type = other DNA
aagatggtatcctgccattaatggattctgactggttcgatgacgatgttacctcccgcgttaaagagttcgttc

SEQ ID NO: 255572 - DNA, 75 bp, synthetic construct
  source 1..75: mol_type = other DNA
atttttcaagagatattaacactattaagggtagttttacactaaggcaaggggaaaataaaaaagcgattaaca

SEQ ID NO: 255573 - DNA, 75 bp, synthetic construct
  source 1..75: mol_type = other DNA
gaaggcgtttgagtgtctggtgtatctgcaccgttataatgaaggtacgctgtcgcgtatgcgtaccgaatacgt

SEQ ID NO: 255574 - DNA, 75 bp, synthetic construct
  source 1..75: mol_type = other DNA
ttctcaagtgtaggtatgtgtgttttttctgaaacacatagcatatacaatctactaggtgtacttaacagttca

SEQ ID NO: 255575 - DNA, 75 bp, synthetic construct
  source 1..75: mol_type = other DNA
gtgccggaagtggcagaagccctgctgccggaaagtaaagcgcagctggttgagatgaagctttccggtaatcag

SEQ ID NO: 255576 - DNA, 75 bp, synthetic construct
  source 1..75: mol_type = other DNA
gattatgctcgtatagcatttgttaccatgcatacatggatgtatttgtctaacttcaccaaccttagacgtgaa

SEQ ID NO: 255577 - DNA, 75 bp, synthetic construct
  source 1..75: mol_type = other DNA
gttatgacgaccgcctgcgtcactatgctgatatgagaatcagtattgatctcgacgatggcgttaaggttaact

SEQ ID NO: 255578 - DNA, 75 bp, synthetic construct
  source 1..75: mol_type = other DNA
gtctgaatgttgtctctttgctagaaagcctgcatctggatatcgccaaactctggcagcaactcaatttccacc

SEQ ID NO: 255579 - DNA, 75 bp, synthetic construct
  source 1..75: mol_type = other DNA
aaagatgctgtgattggcaaagtggtgaagagcgaagatattcctgccgccacccagctgtttacgccgaactgg

SEQ ID NO: 255580 - DNA, 75 bp, synthetic construct
  source 1..75: mol_type = other DNA
gaaagcctctgcttgtacgcaatcaagccgaaaaaaggcgagtcttcgctggataccatccgtcgctatctttcc

SEQ ID NO: 255581 - DNA, 75 bp, synthetic construct
  source 1..75: mol_type = other DNA
gaatattttgatactcgtcttgggatgtctacagctaacaatgatgagtcttgcgtttctggcatgaggtttcta

SEQ ID NO: 255582 - DNA, 75 bp, synthetic construct
  source 1..75: mol_type = other DNA
agcgtcgaatattaaatggttcccatacaacaatggtgggcgttatagaaaatggtatggtaacaatgaagatgt

SEQ ID NO: 255583 - DNA, 75 bp, synthetic construct
  source 1..75: mol_type = other DNA
cggtaataaatgagcgtttaaaaacggccactacaaatgattttaagaaaatccctggttctcctatagcttact

SEQ ID NO: 255584 - DNA, 75 bp, synthetic construct
  source 1..75: mol_type = other DNA
atgaggcgttgtttaaatgcattatggcttttgctttttgtttctgtcggagctatcggtggcgatgaagcatct

SEQ ID NO: 255585 - DNA, 75 bp, synthetic construct
  source 1..75: mol_type = other DNA
ctcgcgacgctggatgtgccaaatgtgaaactgtacgacggcgcatggagtgaatggggcgcgcgggcagattta

SEQ ID NO: 255586 - DNA, 75 bp, synthetic construct
  source 1..75: mol_type = other DNA
ccgactggctcgccgaacatattgatgatcctgaaattcagattattgatgcccgcatggcaccgcccggacagg

SEQ ID NO: 255587 - DNA, 75 bp, synthetic construct
  source 1..75: mol_type = other DNA
aacgttccgtggacggaactggtacgtgaaggcgaactaaaaacgaccgatgaactggatgcgatattttttggt

SEQ ID NO: 255588 - DNA, 75 bp, synthetic construct
  source 1..75: mol_type = other DNA
gcggggtattgccccggaatggcaaatgaaacgggagatgctttctcctgcttatacgacacgatggtcagatat

SEQ ID NO: 255589 - DNA, 75 bp, synthetic construct
  source 1..75: mol_type = other DNA
agtactgccggcatatcagcatcttcatcaaaacctccccttttgcggttaatgaaccgtactacggtaacgtgg

SEQ ID NO: 255590 - DNA, 75 bp, synthetic construct
  source 1..75: mol_type = other DNA
tcctgaattaaaacgtaaagcctggctggcggtttttcttggttctgcacttttctgggtggttgtcgcactgct

SEQ ID NO: 255591 - DNA, 75 bp, synthetic construct
  source 1..75: mol_type = other DNA
tggcttacgcattaccagagaggcaatacctgcaacgtgtaaagttgcaggaaggtgcgacagttgaagaggcga

SEQ ID NO: 255592 - DNA, 75 bp, synthetic construct
  source 1..75: mol_type = other DNA
cgagggcgatcgtgtagagatttatcgaccactgattgccgatccgaaagagcttcgtagacagcgcgcagaaaa

SEQ ID NO: 255593 - DNA, 75 bp, synthetic construct
  source 1..75: mol_type = other DNA
aagcacaggacggtacgccggactggaacattatcgagcgtttactgaaagagtggcagccggacgaaatcatcg

SEQ ID NO: 255594 - DNA, 75 bp, synthetic construct
  source 1..75: mol_type = other DNA
cgtggcgttaggtgacgacaaaccagacctgtcaaccctgcgggcgtttattaccaatggcgaacagggagtgaa

SEQ ID NO: 255595 - DNA, 75 bp, synthetic construct
  source 1..75: mol_type = other DNA
tgaaaggtgaagtgtttgtggtggtcgtggcgttaggcgacgacaaaccagacctgtcaacgctgcgggcgttta

SEQ ID NO: 255596 - DNA, 75 bp, synthetic construct
  source 1..75: mol_type = other DNA
atgaaacttcaggtattaccgttaagtcaggaagcctttagtgcttatggcgacgtaatcgaaacgcagaaacgg

SEQ ID NO: 255597 - DNA, 75 bp, synthetic construct
  source 1..75: mol_type = other DNA
tggagcactgcatggacctggaggacttcggccgacagctgcgccagcacgtgtatgactgtacccgtctgacca

SEQ ID NO: 255598 - DNA, 75 bp, synthetic construct
  source 1..75: mol_type = other DNA
ggtggctttaggtgaagacgaacctgatctttccacattgcgggcgtttattaccaatggcgatcaaggtgttaa

SEQ ID NO: 255599 - DNA, 75 bp, synthetic construct
  source 1..75: mol_type = other DNA
cattcacgaactcgaacgtcatccgctgggcactcaggcctttatcccgatgaaaggtgaagtgtttgtggtggt

SEQ ID NO: 255600 - DNA, 75 bp, synthetic construct
  source 1..75: mol_type = other DNA
agccgatcaccgccgtgctgaactggtctctggcggtcgattgtttgaccttggccaggttccaaagtccgtctg

SEQ ID NO: 255601 - DNA, 75 bp, synthetic construct
  source 1..75: mol_type = other DNA
aatgagccgtattacggtaacgtggccacggaaaaactgaacacccctacccgtgacacccgggacattatcgcg

SEQ ID NO: 255602 - DNA, 75 bp, synthetic construct
  source 1..75: mol_type = other DNA
attaacacagcactgcagctggcgcaggctaacacggcattcatccggaaaaacttcagcgtcattcttgagcgt

SEQ ID NO: 255603 - DNA, 75 bp, synthetic construct
  source 1..75: mol_type = other DNA
gacgccgttttgcttcaggcggaacaacaactcgcccgcagcttacagataacgaaaccacgtttgctggagcgc

SEQ ID NO: 255604 - DNA, 75 bp, synthetic construct
  source 1..75: mol_type = other DNA
tctgggtgaatggccatcggtatgcaaaagcaggttgcatgctcaatgatttcactcctgacggggtttcgcagc

SEQ ID NO: 255605 - DNA, 75 bp, synthetic construct
  source 1..75: mol_type = other DNA
gaaaagctgcggaaagagcaccagtattgccggcatatctccgtattcatcaaaacgtccccgttcgccgttaaa

SEQ ID NO: 255606 - DNA, 75 bp, synthetic construct
  source 1..75: mol_type = other DNA
acgcaagctcaatgttctgggcatcaaaaccgcgctcgatctggccctgacgaacccggcctttatccggaaaaa

SEQ ID NO: 255607 - DNA, 75 bp, synthetic construct
  source 1..75: mol_type = other DNA
gcctggggaaagagtggtttgcaggccgaggcattgcgccagaatggcagataaagcgtgagatgttgtcaccgg

SEQ ID NO: 255608 - DNA, 75 bp, synthetic construct
  source 1..75: mol_type = other DNA
accgcgcgttgagcagtactcgattgacgagatgtttctcgacgtgcgaggtattgacagctgcatcgatttcga

SEQ ID NO: 255609 - DNA, 75 bp, synthetic construct
  source 1..75: mol_type = other DNA
taaatgggtgccgcaagtgtttgtcgcctctggcgattgtgccgagcgtcagtgggattttttaggtctggaaat

SEQ ID NO: 255610 - DNA, 75 bp, synthetic construct
  source 1..75: mol_type = other DNA
cgttagtctcaaagcgattcctaaattagaacaggtagttattgctgaagttgatagtaataaacttaacttgtt

SEQ ID NO: 255611 - DNA, 75 bp, synthetic construct
  source 1..75: mol_type = other DNA
agtggcatttggcgcgatgggcattccaatcctggttgccggacaggtaacaggcatcgacagctttgagattgg

SEQ ID NO: 255612 - DNA, 75 bp, synthetic construct
  source 1..75: mol_type = other DNA
aaacacagcctgattttcacctgtatggtgggcgtgatcaccacccttcaggcctatgtcttaacgtggatgatt

SEQ ID NO: 255613 - DNA, 75 bp, synthetic construct
  source 1..75: mol_type = other DNA
aagaacctatgctgacccgctcgaaaattcgtgaattaacccacgccgactggtcggcaagggtgatgctgccaa

SEQ ID NO: 255614 - DNA, 75 bp, synthetic construct
  source 1..75: mol_type = other DNA
ggatggtcggcattcctctaccgttgctcacctgccttgcggatatcagcacaacattaagtcgtctgtctggta

SEQ ID NO: 255615 - DNA, 75 bp, synthetic construct
  source 1..75: mol_type = other DNA
aggccagtggttaagcgccgaaactgtaccaacgcaaacgtatgagttatgcgatggcgtccccggcggctatga

SEQ ID NO: 255616 - DNA, 75 bp, synthetic construct
  source 1..75: mol_type = other DNA
cactggcgcacaccggtcatgcttttaccttcttctcaccgttccttggttggctgggggtattcctgaccgggt

SEQ ID NO: 255617 - DNA, 75 bp, synthetic construct
  source 1..75: mol_type = other DNA
gggctgtcatcaacactggcgctggcactggcgcacaccggtcatgcattcaccttcttctcgccgttcctcggc

SEQ ID NO: 255618 - DNA, 75 bp, synthetic construct
  source 1..75: mol_type = other DNA
tgacgctatcagcaccttcggcagcacgctgaaagaactggctctacccatctactccatcggcatggtgctggc

SEQ ID NO: 255619 - DNA, 75 bp, synthetic construct
  source 1..75: mol_type = other DNA
cttgccgtggctttgctgttctataaaatgccggtcgctaacgcgctggcctcggtggtttatggcttcttctac

SEQ ID NO: 255620 - DNA, 75 bp, synthetic construct
  source 1..75: mol_type = other DNA
attctgtttgcggcactgctctcaatagtttggctgaagatgaaaccgtctgacgccatcagcaccttcggcagc

SEQ ID NO: 255621 - DNA, 75 bp, synthetic construct
  source 1..75: mol_type = other DNA
cggcgcgctgtatgagtgggtgatcaacattccggtgccgtacctcgataaactggttgcccgtatgccgccagt

SEQ ID NO: 255622 - DNA, 75 bp, synthetic construct
  source 1..75: mol_type = other DNA
gataacctgctcgcccgcggctttcacgttcgcgcattgacgcgtactgcccgcgctcacgtcaatgataatctc

SEQ ID NO: 255623 - DNA, 75 bp, synthetic construct
  source 1..75: mol_type = other DNA
ttaccggcgggtattgataacgtcaaagtgctggaacgtattcacccggacaaagacgtggacggtttccatcct

SEQ ID NO: 255624 - DNA, 75 bp, synthetic construct
  source 1..75: mol_type = other DNA
cctatatttagatggtttcattatcgagaagggttttcaaaacaattaatagagtatatattggaaaatattaat

SEQ ID NO: 255625 - DNA, 75 bp, synthetic construct
  source 1..75: mol_type = other DNA
ggtaacgcaacagcacaatggctggttgatggtcgatgatgcccacggcacgggcgttatcggggagcaggggcg

SEQ ID NO: 255626 - DNA, 75 bp, synthetic construct
  source 1..75: mol_type = other DNA
ctcattcagcaactgggcaatgccagtgaatgggtcttagcccagttggaaaacgcagacttctcaccacaaatc

SEQ ID NO: 255627 - DNA, 75 bp, synthetic construct
  source 1..75: mol_type = other DNA
atggacagcagtacaaccaggcaacataacgaccccgtaaatagcgaagcggcacttaacctctgcctgcagctt

SEQ ID NO: 255628 - DNA, 75 bp, synthetic construct
  source 1..75: mol_type = other DNA
aacaaagtcggcatttacagccgtccggcaaaactcagcgatattgtgcatgatggcgatcgggtggagatttat

SEQ ID NO: 255629 - DNA, 75 bp, synthetic construct
  source 1..75: mol_type = other DNA
tggcagcagtggctgaactggcaggctccggttaatcaacgcgcgtgggcgtttcatgatgcgctggcgcagggt

SEQ ID NO: 255630 - DNA, 75 bp, synthetic construct
  source 1..75: mol_type = other DNA
cagcacctgggcggcttgcctgcggtggcgcttgctggtggcgatcttgccgcaaagcagccgtggcgaaacctg

SEQ ID NO: 255631 - DNA, 75 bp, synthetic construct
  source 1..75: mol_type = other DNA
caggcatggggcagacaagaaagcatataactggacaccttctaaagaagtaacttttaaaattacaggttccgg

SEQ ID NO: 255632 - DNA, 75 bp, synthetic construct
  source 1..75: mol_type = other DNA
ttgatggtcgacgatgcacacggtacgggcgttatcggtgaacaggggcgcggtagctgctggcaacagcaggtg

SEQ ID NO: 255633 - DNA, 75 bp, synthetic construct
  source 1..75: mol_type = other DNA
cgcgatgatggcgaaagaggaccgtattgttgccgaccggcttagccatgcctcattgctggaagctgccagttt

SEQ ID NO: 255634 - DNA, 75 bp, synthetic construct
  source 1..75: mol_type = other DNA
tttgccgcgttgatgcgtgagcaggccacgatgcgcggtatcactacgctggtatttagcggtggggttattcat

SEQ ID NO: 255635 - DNA, 75 bp, synthetic construct
  source 1..75: mol_type = other DNA
gccgcattcttgctgggcggctatgtagcgacatttaccgccgtgccggacaacattaccgatccgctacagaca

SEQ ID NO: 255636 - DNA, 75 bp, synthetic construct
  source 1..75: mol_type = other DNA
ctgacatcgccgtggtttattgtgctggtttacttgttccagagcctgggtgaattgtttattagcgccctgggt

SEQ ID NO: 255637 - DNA, 75 bp, synthetic construct
  source 1..75: mol_type = other DNA
cactggcggagcaacatgcagtattccagctggctcaacaacctgtaccgtctctttgccccaggatattataaa

SEQ ID NO: 255638 - DNA, 75 bp, synthetic construct
  source 1..75: mol_type = other DNA
gttgattggcagcgtagtgatgatcttcgtctgtgcatggctgatgcacaacgtagaagtcgccaatctggtgct

SEQ ID NO: 255639 - DNA, 75 bp, synthetic construct
  source 1..75: mol_type = other DNA
ctgggcgttgcagtagtgatgctgttgatggtgccgtggctgaaacgcatgattgcgacgccggaaagccattaa

SEQ ID NO: 255640 - DNA, 75 bp, synthetic construct
  source 1..75: mol_type = other DNA
cgcaccattgttcttggagcacttgtgctggcgattggctacttcatgaccggcatgtcgctacttaagcctgac

SEQ ID NO: 255641 - DNA, 75 bp, synthetic construct
  source 1..75: mol_type = other DNA
gggaatgtttgccgactgggctgtgcgggccgtgctgttttactggcgaatggttactggacgttggctgtggaa

SEQ ID NO: 255642 - DNA, 75 bp, synthetic construct
  source 1..75: mol_type = other DNA
acgccatgtgggtttctatgttgagcatgtggggttgccgggttgtagtcggttatgtgctgggaatcatgcttg

SEQ ID NO: 255643 - DNA, 75 bp, synthetic construct
  source 1..75: mol_type = other DNA
ggcacgcaccgctcaaaacgggcttcacccgtatcggtattgttgtcaaaaaggccaatgtaatcaatgtcggac

SEQ ID NO: 255644 - DNA, 75 bp, synthetic construct
  source 1..75: mol_type = other DNA
ggtgcgaatggcgaaggcgaggatgattttgcagaaatatcatctgtcaattcatgaagtggcacagcgttgcgg

SEQ ID NO: 255645 - DNA, 75 bp, synthetic construct
  source 1..75: mol_type = other DNA
gcagaaatatcatctgtcaattcatgaagtggcacagcgttgcggttttccggatagcgactatttttgtcgcgt

SEQ ID NO: 255646 - DNA, 75 bp, synthetic construct
  source 1..75: mol_type = other DNA
tttatcgagtatgtgcgttgggtgcgaatggcgaaggcgaggatgattttgcagaaatatcatctgtcaattcat

SEQ ID NO: 255647 - DNA, 75 bp, synthetic construct
  source 1..75: mol_type = other DNA
gtgcagggcgtactggcggttttcttcgttaaacagcttggattctcgcaagagcaggcttttgtcacttttggt

SEQ ID NO: 255648 - DNA, 75 bp, synthetic construct
  source 1..75: mol_type = other DNA
ccactcaatgagcaaaccgtttgaggaatatcaggggactgtccatttctctaatcaaaaaggtattcgtgctga

SEQ ID NO: 255649 - DNA, 75 bp, synthetic construct
  source 1..75: mol_type = other DNA
aagccactgaattttagcattatctgggaagtcatggggattggtattcctgcaagtgtcgaatcagtattattt

SEQ ID NO: 255650 - DNA, 75 bp, synthetic construct
  source 1..75: mol_type = other DNA
gcgccaccaatgaaatgtgtgagaccgaaaccaaagcgtttggcgagaaatatgatgtgaaaacctcgtttatcc

SEQ ID NO: 255651 - DNA, 75 bp, synthetic construct
  source 1..75: mol_type = other DNA
cgtgaatcctggtaccgatctcaccgtcgttgatgccagtggcaaacagccgatcgttctgttgcagggttatca

SEQ ID NO: 255652 - DNA, 75 bp, synthetic construct
  source 1..75: mol_type = other DNA
atgcgagggaaaaaacgcattgggttattgtttttgctgatagcggttgtggttggtggtggcgggttcttgatg

SEQ ID NO: 255653 - DNA, 75 bp, synthetic construct
  source 1..75: mol_type = other DNA
ccaaagggatgggggcgcgaaccagcatgagcgaaaacgaactggatattttgacgcggtacttccagtacaacg

SEQ ID NO: 255654 - DNA, 75 bp, synthetic construct
  source 1..75: mol_type = other DNA
tttctggcagcctgcaacaggccgaacggtttgtgcaactgggctacaaaatcggcgtaggcggcactatcacct

SEQ ID NO: 255655 - DNA, 75 bp, synthetic construct
  source 1..75: mol_type = other DNA
ttgagaggcagcagtggttactcgacgaacagctgaaactggcgaaacgctacgatctgccggtgatcctgcatt

SEQ ID NO: 255656 - DNA, 75 bp, synthetic construct
  source 1..75: mol_type = other DNA
gcgagctacgcccggaaccggcggatgagattgcggaagtgttgcttaataacacgtatacggtgtttaacgttc

SEQ ID NO: 255657 - DNA, 75 bp, synthetic construct
  source 1..75: mol_type = other DNA
ggcaaaagctgatggataacgccaaccatctgtatgacggtctgcaaaaactgggttatgagttaagttcacata

SEQ ID NO: 255658 - DNA, 75 bp, synthetic construct
  source 1..75: mol_type = other DNA
acgtggatattatcgtcggcaccttcagtaaaagtttggcttccattggtggttttgccgtgggttcagaagcga

SEQ ID NO: 255659 - DNA, 75 bp, synthetic construct
  source 1..75: mol_type = other DNA
gttgaagccgttggcgttgaagacgacgtggatattatcgtcggcaccttcagtaaaagtctggcctcgattggc

SEQ ID NO: 255660 - DNA, 75 bp, synthetic construct
  source 1..75: mol_type = other DNA
cctgttttacgttgggttgatcctggttttgatcaaagtaaatatgacagcattgtctggaatccaattacctat

SEQ ID NO: 255661 - DNA, 75 bp, synthetic construct
  source 1..75: mol_type = other DNA
aggtagggcagaaagtattggatacaattttgagctataccaataccgaaatgaaagaggctatcgcgcagcgta

SEQ ID NO: 255662 - DNA, 75 bp, synthetic construct
  source 1..75: mol_type = other DNA
gccggcaaaacagcagattgtctgtagtggaagtggaggatatcgacaacctctcgcgcaaccaagacatcgcgg

SEQ ID NO: 255663 - DNA, 75 bp, synthetic construct
  source 1..75: mol_type = other DNA
gaaaggcgaccttgcgcgtcgtaaattgctgccttctctgtatcaactggaaaaagccggtcagctcaacccgga

SEQ ID NO: 255664 - DNA, 75 bp, synthetic construct
  source 1..75: mol_type = other DNA
ccatggatacccgcctgtattttgaaggtgaactgattgatgcggcaaccaataaaccggttgtcaaagttgtac

SEQ ID NO: 255665 - DNA, 75 bp, synthetic construct
  source 1..75: mol_type = other DNA
tctatgaagtggttcctgttgcattagtggttgcggggaccaaatggctacaggccaccgtaccatggatactcg

SEQ ID NO: 255666 - DNA, 75 bp, synthetic construct
  source 1..75: mol_type = other DNA
tatgaaatggtgatttatcccatcgccttttttgtctgcttgtttggtcaaatgcgtttgtttcgctcggcatga

SEQ ID NO: 255667 - DNA, 75 bp, synthetic construct
  source 1..75: mol_type = other DNA
ccagttagttgcgttaatcactatcggtctcttgtttatcggtgttttaaatgcacctatcaatgcttatgaaat

SEQ ID NO: 255668 - DNA, 75 bp, synthetic construct
  source 1..75: mol_type = other DNA
gcaccagtggtgttctgcccggatgtggagggcgaagcactgaaggaatgtctgcgccccaatcgcagggttgaa

SEQ ID NO: 255669 - DNA, 75 bp, synthetic construct
  source 1..75: mol_type = other DNA
acggtacgcgaactcaacggcgagtcctgcatatccctggaagaagcaccaccggcaaaacagcagattgtctgt

SEQ ID NO: 255670 - DNA, 75 bp, synthetic construct
  source 1..75: mol_type = other DNA
actgaaccagtcgggaaaagggaaagtgtggtttgcggggcgaggaaccgcccctgaatggcaaatgaaacggga

SEQ ID NO: 255671 - DNA, 75 bp, synthetic construct
  source 1..75: mol_type = other DNA
aactattatttgtggtcggggcgctagtttatctgattggattatggatctcatgtccattgttaagtggcaaag

SEQ ID NO: 255672 - DNA, 75 bp, synthetic construct
  source 1..75: mol_type = other DNA
ctaatccttgagtcgtgggggccgggtgacagaaacaaagattacaatatcgctcttgattatatcattgaacgg

SEQ ID NO: 255673 - DNA, 75 bp, synthetic construct
  source 1..75: mol_type = other DNA
ttaatttagacgttcagcgcggcgcgtttgtcagcgaagtgctgccaggttctggctcggcaaaagcaggcgtga

SEQ ID NO: 255674 - DNA, 75 bp, synthetic construct
  source 1..75: mol_type = other DNA
ttaacgcaaatcgctattgccgactccgataaattgcgcgtcggtgattttgccgtggcggtcggtaacccattt

SEQ ID NO: 255675 - DNA, 75 bp, synthetic construct
  source 1..75: mol_type = other DNA
acgtccggcaccctttttccttttttcacgtagccaggtttccggcagtcagagagggagggtacgccatggctg

SEQ ID NO: 255676 - DNA, 75 bp, synthetic construct
  source 1..75: mol_type = other DNA
gtgcattaacgttaagtgtcgggttaactctctcggcgtcatttcaggccgtcgcgtcgattccaggccaggttg

SEQ ID NO: 255677 - DNA, 75 bp, synthetic construct
  source 1..75: mol_type = other DNA
gctacaaatccagaatccaggcaaattaacgcaaatcgctattgctgactctgacaaactgcgcgttggcgattt

SEQ ID NO: 255678 - DNA, 75 bp, synthetic construct
  source 1..75: mol_type = other DNA
tggttttgccattccgagtaatatggcccgcaccctggcacagcaacttatcgacttcggtgaaatcaaacgcgg

SEQ ID NO: 255679 - DNA, 75 bp, synthetic construct
  source 1..75: mol_type = other DNA
atctgttggagctgcatttttcccatgaggataatgggcataggggcagctccagaaggcgctgctccttcacgt

SEQ ID NO: 255680 - DNA, 75 bp, synthetic construct
  source 1..75: mol_type = other DNA
actttcaatgctttacccaacgccggaggcgaatggtccggattgctgtcatcgcctaggcgattctgtccatga

SEQ ID NO: 255681 - DNA, 75 bp, synthetic construct
  source 1..75: mol_type = other DNA
tttagtagataagcccgttgaagtgaaacttcagggtggttggatacgtatgaaagtacctccacattatgatac

SEQ ID NO: 255682 - DNA, 75 bp, synthetic construct
  source 1..75: mol_type = other DNA
acgtccggcacccttttttctttttttacatagtccggtttctggccctgtggggcggtatacctgtttccgtta

SEQ ID NO: 255683 - DNA, 75 bp, synthetic construct
  source 1..75: mol_type = other DNA
tcacaattattttaatagtggtgttaattgccttgggctgtgctgcttattttggagatggtgaaggatatttta

SEQ ID NO: 255684 - DNA, 75 bp, synthetic construct
  source 1..75: mol_type = other DNA
aggtgttcacgccgcatccggcattcggtgctcaatgcctgatgcgacgcttaccgcgtcttatcaggcctacag

SEQ ID NO: 255685 - DNA, 75 bp, synthetic construct
  source 1..75: mol_type = other DNA
cgcggcctgcgctggctacatgcgccggaagtgctgctctggcggctgactggcgaacagcgcacggatatcacc

SEQ ID NO: 255686 - DNA, 75 bp, synthetic construct
  source 1..75: mol_type = other DNA
ttccttagagggtgttggcgtggaggtaaaagagatgacttcccagaagacgtcagtgaacttaaatgctattcc

SEQ ID NO: 255687 - DNA, 75 bp, synthetic construct
  source 1..75: mol_type = other DNA
gaatgttcagacgcgaaacgatgtgaatggcaacccggtgctgcttgaaaccaacatgcgtccgtcagggggggt

SEQ ID NO: 255688 - DNA, 75 bp, synthetic construct
  source 1..75: mol_type = other DNA
cctggcgggtgaatacgctggcagaattaaagacacacctcgcggccccgccgttcactgacagcccggtatgcg

SEQ ID NO: 255689 - DNA, 75 bp, synthetic construct
  source 1..75: mol_type = other DNA
aaggtttatcactgattgaagcttcaatggtgttggcattatcagctattgttgtctccggtgttatgtattatt

SEQ ID NO: 255690 - DNA, 75 bp, synthetic construct
  source 1..75: mol_type = other DNA
tcagtcagcatcagactcaaataaaacacaatcagctatttctgaagtaatgagtgcaacatcagcaattaatgg

SEQ ID NO: 255691 - DNA, 75 bp, synthetic construct
  source 1..75: mol_type = other DNA
aaaattcctctgcgatacctgaaaattacaagaatggtgataagattatgaatccatttggtggtgaattaaagg

SEQ ID NO: 255692 - DNA, 75 bp, synthetic construct
  source 1..75: mol_type = other DNA
tcaagggactgaaagagaaattaaatctgcgccgaaacgtctcccccactgataacaaggatgagcaggtagaag

SEQ ID NO: 255693 - DNA, 75 bp, synthetic construct
  source 1..75: mol_type = other DNA
aagccctgttactggcgcaactccagctctaccgggccgaaaggcacggctcagcagaaccggtgccacctgcgc

SEQ ID NO: 255694 - DNA, 75 bp, synthetic construct
  source 1..75: mol_type = other DNA
ttcgtagccttaaagaaaagctgaatttcccacgcagaaaagtacctgcagaaaatcatgatacatcttctgaac

SEQ ID NO: 255695 - DNA, 75 bp, synthetic construct
  source 1..75: mol_type = other DNA
atgaacaaaaaaatttggtttatggaaggtttgtcctctcagagagatattattcagggggttaaattatttgca

SEQ ID NO: 255696 - DNA, 75 bp, synthetic construct
  source 1..75: mol_type = other DNA
agcgtcagccgcaggagagcgcgcagcagtatgttgtgcgtctggcgcgcgagaaagcacaggcgggtgtcacgc

SEQ ID NO: 255697 - DNA, 75 bp, synthetic construct
  source 1..75: mol_type = other DNA
gataacaaggatgagcaggtagaagaaaatgtccgtgagccaactacaaaagggccagaatcccgtactacccga

SEQ ID NO: 255698 - DNA, 75 bp, synthetic construct
  source 1..75: mol_type = other DNA
cggtcaactttatgctggagcatttaatccgacccaagcatctaccgcttgtagcagcgactataatgacattgg

SEQ ID NO: 255699 - DNA, 75 bp, synthetic construct
  source 1..75: mol_type = other DNA
gaagcagcagggactttctctggcgaaacttcaggaaggagccagcagtgtagcggcggaagcgatcaagaacgg

SEQ ID NO: 255700 - DNA, 75 bp, synthetic construct
  source 1..75: mol_type = other DNA
aaacacgtcgccgaacaacgactgatcgcaatggctgacgaaattacgctgggcatttttcgcccgacagccgtg

SEQ ID NO: 255701 - DNA, 75 bp, synthetic construct
  source 1..75: mol_type = other DNA
ggcaggcggagcggggactggggcaggaaacatgcaaaatggcatctgaatcgatcgcagtttggcattcgaatc

SEQ ID NO: 255702 - DNA, 75 bp, synthetic construct
  source 1..75: mol_type = other DNA
ccagttgggcgggtgatgatccggataagcaggcatttgccagagaagtggcctcccgtcagccagaaatgctgg

SEQ ID NO: 255703 - DNA, 75 bp, synthetic construct
  source 1..75: mol_type = other DNA
ccccggaaagtcttgatgcgctttctggtgtgtttgccccggaactgcaacggcgtattggcatgcccgattcaa

SEQ ID NO: 255704 - DNA, 75 bp, synthetic construct
  source 1..75: mol_type = other DNA
gtggagctgaagcgcgttccgcgcgtggagaatctgctctattttatgcagaacacgcgtaaacggcttgaaccc

SEQ ID NO: 255705 - DNA, 75 bp, synthetic construct
  source 1..75: mol_type = other DNA
tcccagggcagcagcgcactgatgtggattattggcgcactattactaagccttattgtggcaatggtaatgaaa

SEQ ID NO: 255706 - DNA, 75 bp, synthetic construct
  source 1..75: mol_type = other DNA
taatttaggttcgctggccagcgtcgccagcgccacctttttgatctgctacctcgcagtatttgtggtggcgat

SEQ ID NO: 255707 - DNA, 75 bp, synthetic construct
  source 1..75: mol_type = other DNA
agtgaatgatccggcggttattatgccgcgggcatttctggtggcgattggcattacctctctgctctatatcgc

SEQ ID NO: 255708 - DNA, 75 bp, synthetic construct
  source 1..75: mol_type = other DNA
gacgcacggtaggttggcgatgcatcaacgattgttctttgattacgcgcttggagtcggcgctatcacaagtca

SEQ ID NO: 255709 - DNA, 75 bp, synthetic construct
  source 1..75: mol_type = other DNA
atgcgtggttttaatgagctgaaagaaacgctgcataataatcgcgttaactggatactggatgtcgcccgtcag

SEQ ID NO: 255710 - DNA, 75 bp, synthetic construct
  source 1..75: mol_type = other DNA
ctgatgtggattattggcgcactattactaagccttattgtggcaatggtaatgaaacggaataaaaccatataa

SEQ ID NO: 255711 - DNA, 75 bp, synthetic construct
  source 1..75: mol_type = other DNA
atgacctgcggtctgctgactaacccgaaagggaagttgatcgtcaaaggtgaagcaacggcggatgcggcgcaa

SEQ ID NO: 255712 - DNA, 75 bp, synthetic construct
  source 1..75: mol_type = other DNA
ttacctctttctcagggagtttagtctccaggatttccggggcggttcatagcgagattacaaagttacctgtca

SEQ ID NO: 255713 - DNA, 75 bp, synthetic construct
  source 1..75: mol_type = other DNA
ttggtggtgcaattactgcatataaagcgtatgtcatggcggaaaccacgcagctggtgaccgacaccaaagcct

SEQ ID NO: 255714 - DNA, 75 bp, synthetic construct
  source 1..75: mol_type = other DNA
atgacgtgcggtctgctgactaatccgaaagggaagttgatcgttaaaggtgaggcaacggcggatgcggcgcaa

SEQ ID NO: 255715 - DNA, 75 bp, synthetic construct
  source 1..75: mol_type = other DNA
cactgtacctgagcgtggctgcgcttttctccaccgcttttatggctaacgctgctgatgttccgcaggtcaaag

SEQ ID NO: 255716 - DNA, 75 bp, synthetic construct
  source 1..75: mol_type = other DNA
gtcctgattggggagaacgcgtggggtaaatccagcttgctggatgccttaaccctgctgctatcgccagaatca

SEQ ID NO: 255717 - DNA, 75 bp, synthetic construct
  source 1..75: mol_type = other DNA
gctcctgatatagaagtcaccgcacgccagcttgattttcttgcccgtgaattatcttcacatccgcaaaatctc

SEQ ID NO: 255718 - DNA, 75 bp, synthetic construct
  source 1..75: mol_type = other DNA
aagacgcgcgtccgttattgctaattgaagatccagaaacccgcctgcatccgattatgctttccgttgcctggc

SEQ ID NO: 255719 - DNA, 75 bp, synthetic construct
  source 1..75: mol_type = other DNA
ctgtcatgcgcaaaacatatggctttaataaaaaactggattgggtgagcaacgagcaactttccgaattgaccg

SEQ ID NO: 255720 - DNA, 75 bp, synthetic construct
  source 1..75: mol_type = other DNA
gttctcttctgcttttatggctaacgccgctgatgtgccgcaggtcaaagtgaccgtgacggataagcagtgcga

SEQ ID NO: 255721 - DNA, 75 bp, synthetic construct
  source 1..75: mol_type = other DNA
aagcaacaggcaggcatgacagccggcaaaccaaaactcgacctgacgaacactgactggatttacggggtggat

SEQ ID NO: 255722 - DNA, 75 bp, synthetic construct
  source 1..75: mol_type = other DNA
agcaacaggctggcgtggcagccagaaaaccaaaactcgacctgacaaacactgactggatttacggggtggatt

SEQ ID NO: 255723 - DNA, 75 bp, synthetic construct
  source 1..75: mol_type = other DNA
aagctatgataaaagctatggcaacaaggttgaaatcccatgaagatatcaatcctgtcactggcgctgagcttg

SEQ ID NO: 255724 - DNA, 75 bp, synthetic construct
  source 1..75: mol_type = other DNA
tttttaatgaccagggaagcagcacacatgctttcatttgaaaaagcattacattcaattcgcaacacctttcca

SEQ ID NO: 255725 - DNA, 75 bp, synthetic construct
  source 1..75: mol_type = other DNA
cgcgacaagtggacccagctcgaaatcaaccgaaacaagcaacaggctggcgtgacagccggcaaaccaaaactc

SEQ ID NO: 255726 - DNA, 75 bp, synthetic construct
  source 1..75: mol_type = other DNA
cgcaccatcaacgaaattaaacttggtgactatgttcacaagttggaagtaacagacccatacagtaagcgcttt

SEQ ID NO: 255727 - DNA, 75 bp, synthetic construct
  source 1..75: mol_type = other DNA
tggaatacagccggaagcgggaagtggtgtactggcatcaccggaccaaaacatccctgttccatcgcggctttg

SEQ ID NO: 255728 - DNA, 75 bp, synthetic construct
  source 1..75: mol_type = other DNA
tgtggttgagttgcaaaaacgtattagcgaactggcttttcccccctcaaaagtggtcggcggtgctgccgggct

SEQ ID NO: 255729 - DNA, 75 bp, synthetic construct
  source 1..75: mol_type = other DNA
tatcactgaagagtgcaatcgacttgatttaagcccagagcaattattgaagctgaatgtattcctgacctatca

SEQ ID NO: 255730 - DNA, 75 bp, synthetic construct
  source 1..75: mol_type = other DNA
tggttgaccaagaaactatgaattggttgattgacctgaacaggtcaggatttaacgtgcatttcctgcattgct

SEQ ID NO: 255731 - DNA, 75 bp, synthetic construct
  source 1..75: mol_type = other DNA
taacagacccagactacaagagatttatcacaagcgaatgcaaccgacttgatttaagcccggagcaattattga

SEQ ID NO: 255732 - DNA, 75 bp, synthetic construct
  source 1..75: mol_type = other DNA
ctggccgacatcgtgctcaacagtacgcaggcgtctttctgtaccgaataccgcgtcgtgaccggaggctcggat

SEQ ID NO: 255733 - DNA, 75 bp, synthetic construct
  source 1..75: mol_type = other DNA
cgcgggcaatatgaacacaaaacgcctggttatcactccggcaacggataccaccgacgcggtgatggagagcga

SEQ ID NO: 255734 - DNA, 75 bp, synthetic construct
  source 1..75: mol_type = other DNA
cgtctccggccaatgtgacggtttccatcctgtccactgaaggcgacggcacagcaacggaggcgttgcttaata

SEQ ID NO: 255735 - DNA, 75 bp, synthetic construct
  source 1..75: mol_type = other DNA
gtacttttaccccggcccggaatccgaacctattctggctgcggcggaatcgtcgttcaggaagtggctggctga

SEQ ID NO: 255736 - DNA, 75 bp, synthetic construct
  source 1..75: mol_type = other DNA
tgcatgttcacggtgtccagcgcgttgaggtcataaaacccacgcagaacatcaccatcagtgacactcaggcag

SEQ ID NO: 255737 - DNA, 75 bp, synthetic construct
  source 1..75: mol_type = other DNA
accgccggtgaggcgttactgaacacggtgcgcaccgccctgaatgccgagaacgtgcgcccggttgccgaccgc

SEQ ID NO: 255738 - DNA, 75 bp, synthetic construct
  source 1..75: mol_type = other DNA
actctggcaaacgtcttccagcctggttccggtgttgatatgtcgcagttggcgaccgttgatatttcgaaatat

SEQ ID NO: 255739 - DNA, 75 bp, synthetic construct
  source 1..75: mol_type = other DNA
gacagtagctaactttggtttttcttctctgtggccgctggcgaaactggtgctgctggtgcattttgccattct

SEQ ID NO: 255740 - DNA, 75 bp, synthetic construct
  source 1..75: mol_type = other DNA
tcttccagcccggtgccggggtggatatgtcgcagctggcgaccgtcgatatctcgaaatatcagagcactacgg

SEQ ID NO: 255741 - DNA, 75 bp, synthetic construct
  source 1..75: mol_type = other DNA
tctggcagcctgagttcacagataaaacactctccaggaaacccggggcggttcatgaaccccagctgaagagta

SEQ ID NO: 255742 - DNA, 75 bp, synthetic construct
  source 1..75: mol_type = other DNA
tgccgaaaccggcaatcatcaacacaccggattttgaagttattctcaatgagataaaaacgatgatgatcggct

SEQ ID NO: 255743 - DNA, 75 bp, synthetic construct
  source 1..75: mol_type = other DNA
tactgcgctgaacgttgtgggtaatgcgctggcggtgctggtgattgccaagtgggaacacaaatttgaccgcaa

SEQ ID NO: 255744 - DNA, 75 bp, synthetic construct
  source 1..75: mol_type = other DNA
ggagctgattgagccaaagcaaaacattaccgtcagtgatgtgcagtcagcctattgcacgtcattcaatgtaag

SEQ ID NO: 255745 - DNA, 75 bp, synthetic construct
  source 1..75: mol_type = other DNA
gtgtacatcataacggagaccgtgagaaaaacggcgatgcaaatcacctggagagggatgtatcagaggttactg

SEQ ID NO: 255746 - DNA, 75 bp, synthetic construct
  source 1..75: mol_type = other DNA
caagttgaagcggtaatggatgcagcgttacgtccgaaacgcagcctgtggcgcaaaatggtgatgggcgggctg

SEQ ID NO: 255747 - DNA, 75 bp, synthetic construct
  source 1..75: mol_type = other DNA
ttgatttcgacggtccgctggaggtcgatcagaatccaaaattcagggcgcagcagacctttgacgaaaatcagg

SEQ ID NO: 255748 - DNA, 75 bp, synthetic construct
  source 1..75: mol_type = other DNA
aaatggaaaagctggtatcagttgaaattacaacaagaaggcgtgatgccattacatcatcgagaggaacactat

SEQ ID NO: 255749 - DNA, 75 bp, synthetic construct
  source 1..75: mol_type = other DNA
ggctgcgcaacacgttccggctaaccgatgaggagatcgccgcatcacttactcgcggacatgcggattacctgg

SEQ ID NO: 255750 - DNA, 75 bp, synthetic construct
  source 1..75: mol_type = other DNA
ggagcattatccactgcgtaatcgccgcggcctgcgttggctacatgcgccggaagtactgctctggcggctgac

SEQ ID NO: 255751 - DNA, 75 bp, synthetic construct
  source 1..75: mol_type = other DNA
aggtcatgattgattgtatgggaaatgattatgagcgtcattttaaagaccgactttatattgaagaagtgattg

SEQ ID NO: 255752 - DNA, 75 bp, synthetic construct
  source 1..75: mol_type = other DNA
ggccgaaaccttcagcgaagaagatttcgcttttgcccagcagcatctgcgtatgctttccggtttgtatggcgt

SEQ ID NO: 255753 - DNA, 75 bp, synthetic construct
  source 1..75: mol_type = other DNA
cgcatcagcgacaaactggcgggtatcaacgccgctcgctttcatgactggcagccagatttcacgccggagaat

SEQ ID NO: 255754 - DNA, 75 bp, synthetic construct
  source 1..75: mol_type = other DNA
agggcagtttaaacttttaccaaaaaaggttcctgagcaaacaatacaaagtggcaatatagcaaccagtctaac

SEQ ID NO: 255755 - DNA, 75 bp, synthetic construct
  source 1..75: mol_type = other DNA
ggtggagtacgtattgatgagattgacgcggcgagtatttctccgcagactgtatcgcttgcaatgcaatgtagt

SEQ ID NO: 255756 - DNA, 75 bp, synthetic construct
  source 1..75: mol_type = other DNA
aagaaatattttctttttttattgctatttttacatggatgctgaataacagatttaaaagcaaggcaaagttat

SEQ ID NO: 255757 - DNA, 75 bp, synthetic construct
  source 1..75: mol_type = other DNA
tggtggcagatgatcgccagtatctgaatttttccagcaatgattacctcggcttaagccatcatccgcagatta

SEQ ID NO: 255758 - DNA, 75 bp, synthetic construct
  source 1..75: mol_type = other DNA
tggctgcaaaaggtaaaaccagaattgctggtggtgacgtttggcaaaggatttggcgtcagcggggcagcggtg

SEQ ID NO: 255759 - DNA, 75 bp, synthetic construct
  source 1..75: mol_type = other DNA
ggctccaccgcacataaacccgttacggaatacggcagcgcacatcctgatgatcaaactgtgctggcggtgcct

SEQ ID NO: 255760 - DNA, 75 bp, synthetic construct
  source 1..75: mol_type = other DNA
ctgctgggtcacggcgattcgcccgccaaccgtacctgctggtactgcgcgactgcgcttaacgctaaccgcagc

SEQ ID NO: 255761 - DNA, 75 bp, synthetic construct
  source 1..75: mol_type = other DNA
ggttgcgtctgaccttaactgcggctcatgaaacgcaggatattgaccgcttgctggaggcgttacatggcaacc

SEQ ID NO: 255762 - DNA, 75 bp, synthetic construct
  source 1..75: mol_type = other DNA
cacgcctgcttgctacctcctgtccggggcgacaactggtggtgacagagggcgtattcagtatggacggcgata

SEQ ID NO: 255763 - DNA, 75 bp, synthetic construct
  source 1..75: mol_type = other DNA
agaacaagcgagccgaagctgagcgtatcgctaaagagctggcgtctcagaaagagcgtacccgcgaaatgttta

SEQ ID NO: 255764 - DNA, 75 bp, synthetic construct
  source 1..75: mol_type = other DNA
tcaacaacaacgactggaagctgtcagtcaccgacatcaacctttatgaaaacactgtgagtctggacggtaagt

SEQ ID NO: 255765 - DNA, 75 bp, synthetic construct
  source 1..75: mol_type = other DNA
cgcgaatcaatggaactgttagagaagctggctgaagctggcgtgacaatcggtaacttcttcagtaatgacctg

SEQ ID NO: 255766 - DNA, 75 bp, synthetic construct
  source 1..75: mol_type = other DNA
gtacatatgatcttaatgtcaggaatgctgaccgtgaatatgcgctgaaagagagggaacacaaagcagcgcaga

SEQ ID NO: 255767 - DNA, 75 bp, synthetic construct
  source 1..75: mol_type = other DNA
ggtcagtcctatccgctgtccctcgctatcaagaccctcattccgggctacctgtcaggcctgccgtctaccagc

SEQ ID NO: 255768 - DNA, 75 bp, synthetic construct
  source 1..75: mol_type = other DNA
agtcaccgacatcaatctctacgagaatactgtgagtctggacggtcagttctatccgctgtccctcgctatcaa

SEQ ID NO: 255769 - DNA, 75 bp, synthetic construct
  source 1..75: mol_type = other DNA
ccggcaccttacagacgttaaacacagcgccgggttcagatggcgttatcgcgaccattgaactggatgagcaca

SEQ ID NO: 255770 - DNA, 75 bp, synthetic construct
  source 1..75: mol_type = other DNA
acgtaaaaatataaaaaaattaacttatagtgttcgatttaatgaaaaattagtccatcacccttattatgattc

SEQ ID NO: 255771 - DNA, 75 bp, synthetic construct
  source 1..75: mol_type = other DNA
ttcgaactaccatcaacatggcaacccaaaggtgtgtataagcttattgttactacaactatgctcggtgggaaa

SEQ ID NO: 255772 - DNA, 75 bp, synthetic construct
  source 1..75: mol_type = other DNA
tgcctggcaaacccaggactgggtggcgctgggtggatgtgccgctggggcattgattatcggcgctggcgtagg

SEQ ID NO: 255773 - DNA, 75 bp, synthetic construct
  source 1..75: mol_type = other DNA
tgcatacagataatgtatgcgcgatgatgcaaaagatagagaagcagcaaaaagaaatatacattcaaattaata

SEQ ID NO: 255774 - DNA, 75 bp, synthetic construct
  source 1..75: mol_type = other DNA
aaactgcattgtgggcgtttggcctgacggatgaagtttttgccgcagcaacggcaaagctggtacgcaataatc

SEQ ID NO: 255775 - DNA, 75 bp, synthetic construct
  source 1..75: mol_type = other DNA
tatagtgttcgatttaatgaaaaattagtccatcacccttattatgattcttgggcttttggtccatatattcgt

SEQ ID NO: 255776 - DNA, 75 bp, synthetic construct
  source 1..75: mol_type = other DNA
gaaagtccaaggtttaagagaatagtaaaaagattgcagcaagccaaaaaactttatgcaaaacaaatttcttta

SEQ ID NO: 255777 - DNA, 75 bp, synthetic construct
  source 1..75: mol_type = other DNA
cggttttcacaaatcgggaattgccagcgccatatcagtggccgtagagatggagggtaaatacctcgattcgtc

SEQ ID NO: 255778 - DNA, 75 bp, synthetic construct
  source 1..75: mol_type = other DNA
tgatgcgcaaagtgctattacgcatgaccagctgggtgcattacctttatctcgatcatggtgatgctgccaact

SEQ ID NO: 255779 - DNA, 75 bp, synthetic construct
  source 1..75: mol_type = other DNA
caagtcgaagcggtaatggacgcagcgttacgtccgaaacgcagcctgtggcgcaaaatggtgatgggcgggctg

SEQ ID NO: 255780 - DNA, 75 bp, synthetic construct
  source 1..75: mol_type = other DNA
aggggtaatggcaaatgcaaagaaaaacggaatgttttttctttgataagtaacttgtcatcaagtttcacagcg

SEQ ID NO: 255781 - DNA, 75 bp, synthetic construct
  source 1..75: mol_type = other DNA
tcccacaagagttgctggattactatgactattacgctcacgggaaaatctcgaaacgtgagttcctcaaccttg

SEQ ID NO: 255782 - DNA, 75 bp, synthetic construct
  source 1..75: mol_type = other DNA
acttgccgaaagcggtcactgggataaagtcgcggatatggtggccaattttgctcatgaaatagacacttacgg

SEQ ID NO: 255783 - DNA, 75 bp, synthetic construct
  source 1..75: mol_type = other DNA
cgacggcgacgaaaacacatctgctgcaaccaggcggcctgaacaccacgtcggtgaaaagtgggcaacaatggg

SEQ ID NO: 255784 - DNA, 75 bp, synthetic construct
  source 1..75: mol_type = other DNA
cccgcgtgaatgcgggctgaaaagcgtcgccgaagccgctaatacgccagtggcgctggtttttggtcgcgagcg

SEQ ID NO: 255785 - DNA, 75 bp, synthetic construct
  source 1..75: mol_type = other DNA
aaagctggtggaaaaatatgatgtcagcaccaccggaacgggggcggcggtggcgaatatccattacaggatggc

SEQ ID NO: 255786 - DNA, 75 bp, synthetic construct
  source 1..75: mol_type = other DNA
gaagagtaataaagttcgcaatcaattaaccgccgccgctctgttcccgctttatgtcaatgtcgcggcaaaaga

SEQ ID NO: 255787 - DNA, 75 bp, synthetic construct
  source 1..75: mol_type = other DNA
acaaatgggattctcttctaccgttgccacacccctatgtcgtgccgggaggacgttttcgggaagtgtattact

SEQ ID NO: 255788 - DNA, 75 bp, synthetic construct
  source 1..75: mol_type = other DNA
gtgaacggataaagaaaaagatctacggaacgcgggaagaagcccgcagtgatatttttgattacatcgaaatgt

SEQ ID NO: 255789 - DNA, 75 bp, synthetic construct
  source 1..75: mol_type = other DNA
atggggttaacggacataacctacatcaggacccacgaaggctggctgtatcttgccgttgttgttgatctgttc

SEQ ID NO: 255790 - DNA, 75 bp, synthetic construct
  source 1..75: mol_type = other DNA
tggatgttcatcccagtggtttttacgcctggcttcagcagccgcattcacaacgccatcaggcagacctgagac

SEQ ID NO: 255791 - DNA, 75 bp, synthetic construct
  source 1..75: mol_type = other DNA
cgaagcgttagccggttgtagcctggtggtgggcaccagcgcacgttcccgcacgctgccgtggccgatgctcga

SEQ ID NO: 255792 - DNA, 75 bp, synthetic construct
  source 1..75: mol_type = other DNA
gtcggataccgaagcccgcggacacgtaaaggcgaggccagtatcgtgtcacccaacaggctccagcgacagttc

SEQ ID NO: 255793 - DNA, 75 bp, synthetic construct
  source 1..75: mol_type = other DNA
caactcctgttgctggcctgttcgcctgctctgtcgggtgctggatgttcatcccagtggtttttacgcctggct

SEQ ID NO: 255794 - DNA, 75 bp, synthetic construct
  source 1..75: mol_type = other DNA
attagctggcacttcctgaccaatgttcagcacacttatgaccgggagaagaagctggtcgagaaatatgatgtc

SEQ ID NO: 255795 - DNA, 75 bp, synthetic construct
  source 1..75: mol_type = other DNA
ccccgtggttgcccgttcgttataaagacggaacgacaggcaaactggcgccagtcgatctggcggatgaaaatg

SEQ ID NO: 255796 - DNA, 75 bp, synthetic construct
  source 1..75: mol_type = other DNA
cccgatacattaccggcttcattactgagcggggagtctgtgctgccagtaagtcagcgctggcggatatgtttg

SEQ ID NO: 255797 - DNA, 75 bp, synthetic construct
  source 1..75: mol_type = other DNA
tcaacagcaactttgacggttctatggtggtggagctggccgggcggcgtaataacggtgtgcctgtttcccttt

SEQ ID NO: 255798 - DNA, 75 bp, synthetic construct
  source 1..75: mol_type = other DNA
gctcttttggagttgatgacacttaaaaacaatggaatgcaatacgtcatgtggcgacatcctttaacaccctat

SEQ ID NO: 255799 - DNA, 75 bp, synthetic construct
  source 1..75: mol_type = other DNA
atgaactcgttttcacttctgacaaccccgtggttgcccgttcgttataaagacggaacgacaggcaagctggca

SEQ ID NO: 255800 - DNA, 75 bp, synthetic construct
  source 1..75: mol_type = other DNA
tgcctgcaacaccagaagttcaggcagcaccacaggagcaggatgccgccgttgttgatgcccgcgacgaagaaa

SEQ ID NO: 255801 - DNA, 75 bp, synthetic construct
  source 1..75: mol_type = other DNA
accttacgcaccaccagcatcgtaccggtcgatctgaacagcctgatgttcaaaatggaaaaaatcctcgcccgc

SEQ ID NO: 255802 - DNA, 75 bp, synthetic construct
  source 1..75: mol_type = other DNA
cggtcgatctcaatagcctgatgtataaaatggaaaaaatccttgccagcgccagtaaagccgccggggataacg

SEQ ID NO: 255803 - DNA, 75 bp, synthetic construct
  source 1..75: mol_type = other DNA
cggtcgatcttaatagtctgatgtataaaatggaaaaaattctcgccagcgccagtaaagccgccggggataacg

SEQ ID NO: 255804 - DNA, 75 bp, synthetic construct
  source 1..75: mol_type = other DNA
ggtggtggggctgaccgggcggcgtaataacggtgtgcctgtttcccttttcgtatcaacaggagcagagaatgg

SEQ ID NO: 255805 - DNA, 75 bp, synthetic construct
  source 1..75: mol_type = other DNA
ctgaccgggcggcgtaataacggtgtgcctgtttccctttccgtatcaacaggagcagggaatggcagtgattga

SEQ ID NO: 255806 - DNA, 75 bp, synthetic construct
  source 1..75: mol_type = other DNA
agcaaagctgccggagataacgcgatggcaaaccagtacgaaacgctggcaaatgcccgtcaaaaagggatcgaa

SEQ ID NO: 255807 - DNA, 75 bp, synthetic construct
  source 1..75: mol_type = other DNA
atgcagcttgaagtgattctaccgctggtcgcctatctggtggtggtgttcgggatttcagtttatgcaatgcgt

SEQ ID NO: 255808 - DNA, 75 bp, synthetic construct
  source 1..75: mol_type = other DNA
ataggcctgccgcatactgcggtgcgctgtatctcttataaagacagcaaagccgtacatcgggggatcattatc

SEQ ID NO: 255809 - DNA, 75 bp, synthetic construct
  source 1..75: mol_type = other DNA
atgaccttgttggtgctggaagtcttccatcaattaaccttccttccgcctgatgaacaaaaattaccatttaca

SEQ ID NO: 255810 - DNA, 75 bp, synthetic construct
  source 1..75: mol_type = other DNA
aaccgcgcgacatggaaagctattgtgaatggaagctgatagcaaaatacacggtcgattataaaggggttttct

SEQ ID NO: 255811 - DNA, 75 bp, synthetic construct
  source 1..75: mol_type = other DNA
ttcaatagtggctctgggcttagagttagtcatttatcatactattactatgaaaaaatggctaatctaattaat

SEQ ID NO: 255812 - DNA, 75 bp, synthetic construct
  source 1..75: mol_type = other DNA
gtgcgcaggcagcagcacgcaaccggcgtcagggatgcagacgttactcccggaacatcacccgcaggtgacatt

SEQ ID NO: 255813 - DNA, 75 bp, synthetic construct
  source 1..75: mol_type = other DNA
cactacatgttccacaccaaaccggaagatttaaccgacagcgagcgccaggaaattaccgctgcactgtggaaa

SEQ ID NO: 255814 - DNA, 75 bp, synthetic construct
  source 1..75: mol_type = other DNA
ttaataatctgaccaaaagtctgagtttttgtatttacgatatctgctatgccaaaactgccgaagagcgcgacg

SEQ ID NO: 255815 - DNA, 75 bp, synthetic construct
  source 1..75: mol_type = other DNA
atggacaagaatacaaagcaacctgataccaaaggcctggaaatattaagcacagaaattatcaatgcgctacgt

SEQ ID NO: 255816 - DNA, 75 bp, synthetic construct
  source 1..75: mol_type = other DNA
ccgtattgctgctcaggtggtgacgggcgtcgggtttatcggtgcaggtaacattctcgttcgtaaccaaaatat

SEQ ID NO: 255817 - DNA, 75 bp, synthetic construct
  source 1..75: mol_type = other DNA
aaaaataaaaacggatttagtttcgttgcaggaaaatgaagatcatgaagtggtcgccattgatatccagcttca

SEQ ID NO: 255818 - DNA, 75 bp, synthetic construct
  source 1..75: mol_type = other DNA
aagatttaaccgacagcgagcgcaaagaaattaccgctgcactgtggaaagagatgcgcgagatttattacgggc

SEQ ID NO: 255819 - DNA, 75 bp, synthetic construct
  source 1..75: mol_type = other DNA
gtcgggatgaaaggctggcagcctcgcgacatgcttaattactgcgactggaatctgatagcaaaatacacggtc

SEQ ID NO: 255820 - DNA, 75 bp, synthetic construct
  source 1..75: mol_type = other DNA
agagtggtatttggtatatgatttaatcgagttcatcatcgaaagaactaattcatatattgatctatcgaagca

SEQ ID NO: 255821 - DNA, 75 bp, synthetic construct
  source 1..75: mol_type = other DNA
actggagcaaatcaaactcaatcaatgaaatggaagaacgcctattgattgcagatttatttagtgctcttaatc

SEQ ID NO: 255822 - DNA, 75 bp, synthetic construct
  source 1..75: mol_type = other DNA
actgctcacccgatcattgcctaaatggaccggagtaccgtttatggctcaaagatcatctcgcgatctacggcg

SEQ ID NO: 255823 - DNA, 75 bp, synthetic construct
  source 1..75: mol_type = other DNA
cgtctatggttatcgcaaaatccatctggatctgcgtgacagcgggcaacagtgcggagtaaacagagtctggag

SEQ ID NO: 255824 - DNA, 75 bp, synthetic construct
  source 1..75: mol_type = other DNA
aacaggtgctggttcattcggatcagggcagtcagtacacaagccatgagtggcagtcgttcctgaaatcacacg

SEQ ID NO: 255825 - DNA, 75 bp, synthetic construct
  source 1..75: mol_type = other DNA
atgcaaaaatgggatataacgttatccccggtgatgaagatgcgccactcaaacgcatgactctgcaaccgtcat

SEQ ID NO: 255826 - DNA, 75 bp, synthetic construct
  source 1..75: mol_type = other DNA
tgcgccagcgacttcagctaatgccgcaggtgctgcagctattgttggagctctcgccggaatacctggtggtcc

SEQ ID NO: 255827 - DNA, 75 bp, synthetic construct
  source 1..75: mol_type = other DNA
ttattaaggatattgtagatctgtacaaggctatgccctttttaggctatgaagttgtttttggattggatggga

SEQ ID NO: 255828 - DNA, 75 bp, synthetic construct
  source 1..75: mol_type = other DNA
tcaacatcaagtgtcttactgaatgccgcatacacatctttttatcagtggctgcatgaatacagtgacgaggta

SEQ ID NO: 255829 - DNA, 75 bp, synthetic construct
  source 1..75: mol_type = other DNA
ttgacgacttgagtcaggtccagcgcgaacggctggcctacatcgattttcggctttacttcttcggtgagatcg

SEQ ID NO: 255830 - DNA, 75 bp, synthetic construct
  source 1..75: mol_type = other DNA
acgctaagcgacccgtcgccatccgctaccactcgatgagcagcggcgagtccaagcgggtaattgtgccctttg

SEQ ID NO: 255831 - DNA, 75 bp, synthetic construct
  source 1..75: mol_type = other DNA
cgccaccgaaattaaagggcaacgcggtgatgaagccccggcgtatggctgggtggaagaactgcgcgtgacgga

SEQ ID NO: 255832 - DNA, 75 bp, synthetic construct
  source 1..75: mol_type = other DNA
taattgcattcgctgtcggattttcagtgagtattgcgcaatatatgccgacgctatggctcggtgcgggacgtt

SEQ ID NO: 255833 - DNA, 75 bp, synthetic construct
  source 1..75: mol_type = other DNA
gcctacgttttgctgggctatctgctatggcgtagctggcggcgtactattccccgcgtagatggcgttcgtaag

SEQ ID NO: 255834 - DNA, 75 bp, synthetic construct
  source 1..75: mol_type = other DNA
tgtggcgcgcctggcggcgcactattccccgggaagatggcattcgccagcgtactactcccttacttcccggca

SEQ ID NO: 255835 - DNA, 75 bp, synthetic construct
  source 1..75: mol_type = other DNA
gttagcagctgactttaaaaacaactacccaccaaacatccccaacactcaggtcggcgtatatggcgactggtt

SEQ ID NO: 255836 - DNA, 75 bp, synthetic construct
  source 1..75: mol_type = other DNA
ggcgttaagcagtggcggcagcaacggtatcctcgccgctcaggctttatggcaactgctattaccacttattat

SEQ ID NO: 255837 - DNA, 75 bp, synthetic construct
  source 1..75: mol_type = other DNA
tgctgtgggtgatgccgtggatgttgtttatcctgcaaccggcctggcggcgtattgactcacggttaattctga

SEQ ID NO: 255838 - DNA, 75 bp, synthetic construct
  source 1..75: mol_type = other DNA
ttgaattgttcattaaatacccgcttgaaaacgggcttacccgtggcgaacaaatggaactggcacgaattgcac

SEQ ID NO: 255839 - DNA, 75 bp, synthetic construct
  source 1..75: mol_type = other DNA
gtgggctgatatgcagtttctgttgtgggatgcacagcgccgtgctggcatcagcgatgctgaaattaccgctgc

SEQ ID NO: 255840 - DNA, 75 bp, synthetic construct
  source 1..75: mol_type = other DNA
ggggaatacgtggagttgagcgacggcactttatcgtggttagggaacgtcttgttctggatgccgttgccagaa

SEQ ID NO: 255841 - DNA, 75 bp, synthetic construct
  source 1..75: mol_type = other DNA
gacggtggtggcaaagacctgtatctcaaggaggtaacccactggatgccgctaccagaaccgccacaggaggcg

SEQ ID NO: 255842 - DNA, 75 bp, synthetic construct
  source 1..75: mol_type = other DNA
ctggcgggattctgcgaaggggcggaattgctggcggcgatggtcactcacgagtgggataacttctggccgcag

SEQ ID NO: 255843 - DNA, 75 bp, synthetic construct
  source 1..75: mol_type = other DNA
gctgaggcttatcaggttgtaggagttatggcagatgcgcttggtgtattcggtgatgcagcagtacagaaagtt

SEQ ID NO: 255844 - DNA, 75 bp, synthetic construct
  source 1..75: mol_type = other DNA
agataaattgaagatcaacatggagcgccagtggcctgaaccaaaagatggtgagcctcgcttgcacattaaaga

SEQ ID NO: 255845 - DNA, 75 bp, synthetic construct
  source 1..75: mol_type = other DNA
gaagtgccgcaaggtgtgaaatgtacaatcgatgaaatggtaagagcgctacaaccaaggtatgccgcatctgaa

SEQ ID NO: 255846 - DNA, 75 bp, synthetic construct
  source 1..75: mol_type = other DNA
cgttgacacatgaaaggatctctaaagccagtgaatacaatgcggaaagatcattagatacacctaacgcttgca

SEQ ID NO: 255847 - DNA, 75 bp, synthetic construct
  source 1..75: mol_type = other DNA
aatagcaagagaaagcagcggcagtgataaacagaaagctgaagttgtggaatttttatgccatccagaagcagc

SEQ ID NO: 255848 - DNA, 75 bp, synthetic construct
  source 1..75: mol_type = other DNA
agatacaagaatagcagaggcatacgacagaataaacgaatacttcggtaatacattcaagcccagcgaagacat

SEQ ID NO: 255849 - DNA, 75 bp, synthetic construct
  source 1..75: mol_type = other DNA
atctatgccgttccagacgagcaaatcatacatattcacggcaattgtagttacgatgacgatctcatacttggt

SEQ ID NO: 255850 - DNA, 75 bp, synthetic construct
  source 1..75: mol_type = other DNA
cttaaaggttgatgatcttgatattcatgcttaccgttatgtgatgaaaccgacgttacctattcgtcgcgatag

SEQ ID NO: 255851 - DNA, 75 bp, synthetic construct
  source 1..75: mol_type = other DNA
tctgactccacatttggctgcgttggccccattggtccactgaaacacctctcaaaagaggcactggaagccgca

SEQ ID NO: 255852 - DNA, 75 bp, synthetic construct
  source 1..75: mol_type = other DNA
gagcatatcgccgcatatatgcagcgaatggctgaacgtccggcggtcaaagccgcactgacggcggaaggattg

SEQ ID NO: 255853 - DNA, 75 bp, synthetic construct
  source 1..75: mol_type = other DNA
gagcacattgcggcatttatgcaacgtatggctgaacgtccggcggtgaaagctgcgttgacggcggaaggattg

SEQ ID NO: 255854 - DNA, 75 bp, synthetic construct
  source 1..75: mol_type = other DNA
agtcgtagtgaaagacaatcatttcaagagttgttaaccgttttagagcctgtatatccacttcccaatgaatta

SEQ ID NO: 255855 - DNA, 75 bp, synthetic construct
  source 1..75: mol_type = other DNA
tgccatacattctggttcataactccttatctgagatggacctgacaactcttgcaggtatgcacaaccaactta

SEQ ID NO: 255856 - DNA, 75 bp, synthetic construct
  source 1..75: mol_type = other DNA
gagaggcacaagaaacacttcgcaatgcgctagggcttagaagtacaaactcatcacccgctcaatatgttgttg

SEQ ID NO: 255857 - DNA, 75 bp, synthetic construct
  source 1..75: mol_type = other DNA
ggaaaaccacgagtttaaaccgtggatccaaccggttttctgcgcgcagactggggtactgacgggctgtgaggt

SEQ ID NO: 255858 - DNA, 75 bp, synthetic construct
  source 1..75: mol_type = other DNA
gcgttcactttttgcagggctatttgttctccccgccagtaccgggtgataaatttatctctgaatgggtaatga

SEQ ID NO: 255859 - DNA, 75 bp, synthetic construct
  source 1..75: mol_type = other DNA
cagggctatttgtactctccgccagtaccgggtaataaatttatctctgaatgggtaatgaaagcaggtggttga

SEQ ID NO: 255860 - DNA, 75 bp, synthetic construct
  source 1..75: mol_type = other DNA
tgcaattgtgcagcgtcgcctgcaacttcagcaacaacaaagcgataaaacagcctttacggtgattcgtcaggg

SEQ ID NO: 255861 - DNA, 75 bp, synthetic construct
  source 1..75: mol_type = other DNA
cttccacgctgaccctgttgctgcaaaaaccattaaaattgcatgatatggaagttgttcatatcgcttttgagc

SEQ ID NO: 255862 - DNA, 75 bp, synthetic construct
  source 1..75: mol_type = other DNA
gtttctcctgctttggaattttcagtaattcatcagcatttcgcgccatatacattgactttatgcgttatagca

SEQ ID NO: 255863 - DNA, 75 bp, synthetic construct
  source 1..75: mol_type = other DNA
gcaaatggaataaggaaatttggttattcgcacgtcaggattttgacgagcgtgtattcaccaatccttatgagc

SEQ ID NO: 255864 - DNA, 75 bp, synthetic construct
  source 1..75: mol_type = other DNA
atgaactcgttttcacttttggcaaccccgtggttgcatgttcgtttcaaagacggaacgacaggcaagctggcg

SEQ ID NO: 255865 - DNA, 75 bp, synthetic construct
  source 1..75: mol_type = other DNA
aaaattacggcgctaactatgccatgtggcagcatcccttaacgccttaccgtgtaccacttaaagagggcggcg

SEQ ID NO: 255866 - DNA, 75 bp, synthetic construct
  source 1..75: mol_type = other DNA
aaagacaatttcacatcaaaagaaacagctctttgagaaactggggattcagagcgatattactttctggcgcga

SEQ ID NO: 255867 - DNA, 75 bp, synthetic construct
  source 1..75: mol_type = other DNA
gccagaagccagagcgatatttgacagccttcatcagcacaacattacctttgcgctggatgactttggtacggg

SEQ ID NO: 255868 - DNA, 75 bp, synthetic construct
  source 1..75: mol_type = other DNA
tggcgggatatcttttttcaatatcatccgcaagtcatcagtggtacgggaaataaaaataatttttatatccct

SEQ ID NO: 255869 - DNA, 75 bp, synthetic construct
  source 1..75: mol_type = other DNA
caggataaagatgggctaaaaatatataaggctggtgttaatgttttttactcttctgctcatagaacaagaaat

SEQ ID NO: 255870 - DNA, 75 bp, synthetic construct
  source 1..75: mol_type = other DNA
ggcgcaaccgacaaattcgctccggcaggttttgcgccgatcgctattggtctggccttaaccctgattcactta

SEQ ID NO: 255871 - DNA, 75 bp, synthetic construct
  source 1..75: mol_type = other DNA
gttttggtactttctggcttgtttttggcggctgtggtagtgccgtactggccgcaggcttcccggaattaggca

SEQ ID NO: 255872 - DNA, 75 bp, synthetic construct
  source 1..75: mol_type = other DNA
cgccagtggcctgaaccaaaagatggtgagcctcgtttgcacattaaagaacccggcaactctccggtaactccg

SEQ ID NO: 255873 - DNA, 75 bp, synthetic construct
  source 1..75: mol_type = other DNA
gttgtaggagttatggcagatgcgcttggtgtattcggtgatgcagcagtacagaaagttctggataacctgtca

SEQ ID NO: 255874 - DNA, 75 bp, synthetic construct
  source 1..75: mol_type = other DNA
gcgcagggcgctgcgacagtctggcttgtgtcgcctgagctggaaaactatgagcgcaggctacagcaactcctt

SEQ ID NO: 255875 - DNA, 75 bp, synthetic construct
  source 1..75: mol_type = other DNA
ccaggcggttattccatgctttccgcgctggtagttgaactggtattgagtgcgggcttcctgttagtgatccac

SEQ ID NO: 255876 - DNA, 75 bp, synthetic construct
  source 1..75: mol_type = other DNA
caggagatgttgggtgcactgccgttatctggtggtcaactgaatggtgcactgggtatcggaacatccagtgct

SEQ ID NO: 255877 - DNA, 75 bp, synthetic construct
  source 1..75: mol_type = other DNA
attggtggtgcatctgcattaattcttcactttaatataaatgctggtagctgtcctgccgtacaattccgtgtg

SEQ ID NO: 255878 - DNA, 75 bp, synthetic construct
  source 1..75: mol_type = other DNA
tttggatcgttttggatgcccagtgcacaccggtaatagttcttattacagcggtttttatcatactgatgtatt

SEQ ID NO: 255879 - DNA, 75 bp, synthetic construct
  source 1..75: mol_type = other DNA
gaaccagacgatcttagcgagtgggctgatatgcagtttctgttgtgggatgcacagcgccgtgctggtatcagt

SEQ ID NO: 255880 - DNA, 75 bp, synthetic construct
  source 1..75: mol_type = other DNA
aaattaccgttgctatggaagataaattgaagattaacatggagcgccagtggcctgagccaaaagatggtgagc

SEQ ID NO: 255881 - DNA, 75 bp, synthetic construct
  source 1..75: mol_type = other DNA
atgagcgctataaccaaagaacgtatcaaattattcattaaaaatccgcttgataacgggcttacccgtggcgaa

SEQ ID NO: 255882 - DNA, 75 bp, synthetic construct
  source 1..75: mol_type = other DNA
tgtcatgtgaagtttggcgaagccaatgccatcctcgcaggcgatgccctacaaacgctggcgttttcgattctg

SEQ ID NO: 255883 - DNA, 75 bp, synthetic construct
  source 1..75: mol_type = other DNA
aaactgaaattgaggatactttaaagccacttagacagccaagacagccacgaattagcggaaacagagcaatca

SEQ ID NO: 255884 - DNA, 75 bp, synthetic construct
  source 1..75: mol_type = other DNA
gggattggtgctgtaggtggtatctggaacttaattagggctatttccacgcttggtaatgcagcaaatacagca

SEQ ID NO: 255885 - DNA, 75 bp, synthetic construct
  source 1..75: mol_type = other DNA
accaaagtaatgattgtcggtatggcaactgatgtgattaactccattgttaaaccactctatgagcgtcagatg

SEQ ID NO: 255886 - DNA, 75 bp, synthetic construct
  source 1..75: mol_type = other DNA
caacttgacagcaatctgacaagttctttagggcaacttgaaaggaagtttaataagacctttgacaagattgaa

SEQ ID NO: 255887 - DNA, 75 bp, synthetic construct
  source 1..75: mol_type = other DNA
agacagccacgaattagcggcaacagagcaatcacagcagcttattcagctaatatgtctaagctaaaaggcttt

SEQ ID NO: 255888 - DNA, 75 bp, synthetic construct
  source 1..75: mol_type = other DNA
gaccagattgaaacattaagcagttttgctaagttttccgctggtgctggtgatatgaatacagaccagaaagaa

SEQ ID NO: 255889 - DNA, 75 bp, synthetic construct
  source 1..75: mol_type = other DNA
cgaggagtgccaggtttaccgtatcgaccactatcttggtaaagaaacggtgctgaacctgttggcgctgcgttt

SEQ ID NO: 255890 - DNA, 75 bp, synthetic construct
  source 1..75: mol_type = other DNA
ccgccgtctgatttgagtgcagacagcatccgcgatgaaaaagtgaaagtactgaagtctctgcgccgcattgac

SEQ ID NO: 255891 - DNA, 75 bp, synthetic construct
  source 1..75: mol_type = other DNA
gcgaatgacacgatggcaatgggtgttgctcaggcagtcgcaaacgccggaaaaacgggaaaagtgctggtcgtc

SEQ ID NO: 255892 - DNA, 75 bp, synthetic construct
  source 1..75: mol_type = other DNA
atgtcacattataaaacaggtcataaacaaccacgatttcgttattcagttctgacccgctgcgtggcgtgggca

SEQ ID NO: 255893 - DNA, 75 bp, synthetic construct
  source 1..75: mol_type = other DNA
tggttttctggtttatgaagaagcagtgccaaagagttgagacaggtaaaatcggtgatgaaggatactcatggg

SEQ ID NO: 255894 - DNA, 75 bp, synthetic construct
  source 1..75: mol_type = other DNA
atcaccaaactggatctgagctattcagaaacctttaatcagacgcatctggctgatgcttatgagcgtctgttg

SEQ ID NO: 255895 - DNA, 75 bp, synthetic construct
  source 1..75: mol_type = other DNA
agggcaagattcaggctgaagaacttcgtggtcagttaggtgaccgtatggcaggtgcatttaaactattcgctg

SEQ ID NO: 255896 - DNA, 75 bp, synthetic construct
  source 1..75: mol_type = other DNA
cagccttgatgacactaaacgaaaactacttgatgaagtcggtgatggttttatcaattttgtcaaaggtcttgc

SEQ ID NO: 255897 - DNA, 75 bp, synthetic construct
  source 1..75: mol_type = other DNA
ctttgaagtcaatggaaggaaaaattaataagacctttgaccgtctggaagctagagcaaaaaatactaaagctt

SEQ ID NO: 255898 - DNA, 75 bp, synthetic construct
  source 1..75: mol_type = other DNA
ctaaacagatgggcttgatgattgataaagcgggtggctgggctgaagtcgctaagagcacccagacagctttag

SEQ ID NO: 255899 - DNA, 75 bp, synthetic construct
  source 1..75: mol_type = other DNA
cacccaggatccacaggttaaacatgtcgttgtgattctgatttggctaaatgctttatttatgcctatttggtc

SEQ ID NO: 255900 - DNA, 75 bp, synthetic construct
  source 1..75: mol_type = other DNA
tgcctgtgtcctgttgatgggtgtcctgagcacttttctggtcagctggctgggaaaagatgcgatggccggcgt

SEQ ID NO: 255901 - DNA, 75 bp, synthetic construct
  source 1..75: mol_type = other DNA
ggttcacaggatgagttaaacggcttcttatccagcttaagtaacctgcttagtgaaatggggatgagttcttct

SEQ ID NO: 255902 - DNA, 75 bp, synthetic construct
  source 1..75: mol_type = other DNA
gttgaaaaggcagctttgcagtcagcacaaagaattgaaaagaacctaaataaaggtttcaggattaatacaaag

SEQ ID NO: 255903 - DNA, 75 bp, synthetic construct
  source 1..75: mol_type = other DNA
aagtaagcgtatcaatgagcctgtcagggtttctttgggtggtgaagttgctattaaaccagatgaaaccagctt

SEQ ID NO: 255904 - DNA, 75 bp, synthetic construct
  source 1..75: mol_type = other DNA
tttggtaatgcaacggctatgagtcgcttaatggggctttctaacgatgagctaaacggcattttgaaagcattt

SEQ ID NO: 255905 - DNA, 75 bp, synthetic construct
  source 1..75: mol_type = other DNA
atgacctttagcggtaatatttacgaccaatacgcagaagctacgctattaagttcatcatttccagaagatgat

SEQ ID NO: 255906 - DNA, 75 bp, synthetic construct
  source 1..75: mol_type = other DNA
agggcaagattcaggctgaagaattacgtgggcagttaggtgaccgtatggctggtgcatttaagctattcgctg

SEQ ID NO: 255907 - DNA, 75 bp, synthetic construct
  source 1..75: mol_type = other DNA
ggttatgaacttgacaagagcaatcacaacgttaggtacaagagctaatcaggttgctggtcaggtagctactgg

SEQ ID NO: 255908 - DNA, 75 bp, synthetic construct
  source 1..75: mol_type = other DNA
cgatatgagaaatggcttcaacggcctggctgcgaaagtacagacggcggcgaaagtcgaggtggtacgaaaatc

SEQ ID NO: 255909 - DNA, 75 bp, synthetic construct
  source 1..75: mol_type = other DNA
aaatctggctggttgccggtatcaccgatatgcgcaacggcttcaatgggcctcgccgcaaaggtgcagaccgcg

SEQ ID NO: 255910 - DNA, 75 bp, synthetic construct
  source 1..75: mol_type = other DNA
tcggtatcgatatcggcaccaccaccacccaggtaattttctcccacctggagctggttaaccgtgcggcggtgt

SEQ ID NO: 255911 - DNA, 75 bp, synthetic construct
  source 1..75: mol_type = other DNA
tgactggctggcagataaagatattgcttttatcgggcaggggatcgatgaaaaaacagtgattcttaatgaagg

SEQ ID NO: 255912 - DNA, 75 bp, synthetic construct
  source 1..75: mol_type = other DNA
atacagttggcacacgtattgttagaattgtcactgacagaccaacacaaaatgtaatcactcaactattcaatg

SEQ ID NO: 255913 - DNA, 75 bp, synthetic construct
  source 1..75: mol_type = other DNA
ctacacagaaggtgtggaattttcaggtggatacatcactagtggagatgagttttttgtcattcctgactttga

SEQ ID NO: 255914 - DNA, 75 bp, synthetic construct
  source 1..75: mol_type = other DNA
caacgcgcggcacaagcgggcgtaggcaagatcattgttccggcaaccgaggcggcaaattttgcccgtgtgttg

SEQ ID NO: 255915 - DNA, 75 bp, synthetic construct
  source 1..75: mol_type = other DNA
tttccggcagcctgcaacaggccgaacggtttgtacagctgggctacaaaatcggcgtaggcggtactatcacct

SEQ ID NO: 255916 - DNA, 75 bp, synthetic construct
  source 1..75: mol_type = other DNA
gtacacacgacaaactggcgatgcatcttaaacgtcacgatttaccgtgcactggcgtggttcacggtttttccg

SEQ ID NO: 255917 - DNA, 75 bp, synthetic construct
  source 1..75: mol_type = other DNA
gaatacgtcacgttctgccatacctgccgtcgttttgatttatacgaaacagaagcggagatgaaggcggatgac

SEQ ID NO: 255918 - DNA, 75 bp, synthetic construct
  source 1..75: mol_type = other DNA
atggtgaaagaggttctgaaagccgtcgccagagccaataatcacccttatcagtccgtatttgcagactttatc

SEQ ID NO: 255919 - DNA, 75 bp, synthetic construct
  source 1..75: mol_type = other DNA
cgcccggaaccagaagatgagattgccgaagtgttgcttaataatacgtatgcggtgtttagcgttcgtgggtag

SEQ ID NO: 255920 - DNA, 75 bp, synthetic construct
  source 1..75: mol_type = other DNA
gcccagacatagtgctgtatgttaacggtattgctctgggcgtgattgagctgaaacgctcttcggtgtctgtct

SEQ ID NO: 255921 - DNA, 75 bp, synthetic construct
  source 1..75: mol_type = other DNA
ttagcatcatcggatcgtcgggatcggggaaaagtacctttctgcgctgcattaacttcctcgaaaaaccgagcg

SEQ ID NO: 255922 - DNA, 75 bp, synthetic construct
  source 1..75: mol_type = other DNA
gttacaccggaacgggcatcaatcagcaccatagaacggatggacaacggcttgcccgaccctatcaaagctatg

SEQ ID NO: 255923 - DNA, 75 bp, synthetic construct
  source 1..75: mol_type = other DNA
aactgatcggcgggacgatgattatcgaaaacatctttgcctggccgggcgtcgggcgctatgcggtgtcggcga

SEQ ID NO: 255924 - DNA, 75 bp, synthetic construct
  source 1..75: mol_type = other DNA
gcccgcgcatggaaaaaaggcatttatctggtcaatctcgatgaaaaaatcgacatggataatctgaaaaaagct

SEQ ID NO: 255925 - DNA, 75 bp, synthetic construct
  source 1..75: mol_type = other DNA
gtaccaaaaagttgaaattggtaagttcgatgatgaaggatggtcatgggataaggggaagactaaatacaaacc

SEQ ID NO: 255926 - DNA, 75 bp, synthetic construct
  source 1..75: mol_type = other DNA
aatatgacatggttaaaaattttgctggccccaaagctttaccttatcgaatatgcagcatcattggttaagtaa

SEQ ID NO: 255927 - DNA, 75 bp, synthetic construct
  source 1..75: mol_type = other DNA
gacaccaacgcaggaaacttgtaaatgcagcagccggtaaaggctttggatatggtttatttaatgaaaatagcc

SEQ ID NO: 255928 - DNA, 75 bp, synthetic construct
  source 1..75: mol_type = other DNA
cttgctaggacatgataaaggtagaactttttcaataataaaaaacacacttgaagaattgaattacactgtgta

SEQ ID NO: 255929 - DNA, 75 bp, synthetic construct
  source 1..75: mol_type = other DNA
taaaaaacaatttattgatgagccagggcaaatgcgcttattgatcgtggtcgataagttgctgactggcttcga

SEQ ID NO: 255930 - DNA, 75 bp, synthetic construct
  source 1..75: mol_type = other DNA
tgacaacctcgggcaggatgaagtcttggtgacaaagatagatgctgcagtccgtcataccaaaaaggccgactg

SEQ ID NO: 255931 - DNA, 75 bp, synthetic construct
  source 1..75: mol_type = other DNA
gcgatctcctatcaggagtatctggagcacgtacgtgaactggcgaagcaggttaaacatccgcagtcaggtagt

SEQ ID NO: 255932 - DNA, 75 bp, synthetic construct
  source 1..75: mol_type = other DNA
gcgtttgatgattacgatcgggacgatgtggccgggttgctgaaagacaggctggagcaggcgcaactggatctc

SEQ ID NO: 255933 - DNA, 75 bp, synthetic construct
  source 1..75: mol_type = other DNA
attgcagaaaatgttttcgcttacgcaacgggacaacgcgatgctgaacgggcgagtcatgcagttgagtcagca

SEQ ID NO: 255934 - DNA, 75 bp, synthetic construct
  source 1..75: mol_type = other DNA
gttatgcgctgggaattatgcttgactggggcgtggttggcgtctggatggggatgtttgccgactgggccgtgc

SEQ ID NO: 255935 - DNA, 75 bp, synthetic construct
  source 1..75: mol_type = other DNA
ttgaggcacatcttaacggcgaaaaatcttttgtcaaacccgatttttaaatttcccaaccgtttgccgtttcta

SEQ ID NO: 255936 - DNA, 75 bp, synthetic construct
  source 1..75: mol_type = other DNA
cccgttatgttctgatgatcgtcatcatggccattggcatgatgatgtcgtcgatggtgacgtttgcgtcgcacg

SEQ ID NO: 255937 - DNA, 75 bp, synthetic construct
  source 1..75: mol_type = other DNA
aagaagtatctacattaatgggattggtttgggatttcgttgattgtgggaagtcatttttttatcctactatta

SEQ ID NO: 255938 - DNA, 75 bp, synthetic construct
  source 1..75: mol_type = other DNA
ttagtatcgatgtcggtttcttagtgaattatgagcatattcggaagtctataattcaaacaaatgatatattaa

SEQ ID NO: 255939 - DNA, 75 bp, synthetic construct
  source 1..75: mol_type = other DNA
aaaacgctcagtctttcatttggcttcatccagtcacttagcatgctgatcacctttaccgttattctttggtaa

SEQ ID NO: 255940 - DNA, 75 bp, synthetic construct
  source 1..75: mol_type = other DNA
ccgcagccgatggtggaatcgatgtatgttccccaatggcgggcgacgggtgcgactgaagatttgctgattgtc

SEQ ID NO: 255941 - DNA, 75 bp, synthetic construct
  source 1..75: mol_type = other DNA
gcagaatttaacattgctggcgcgccaggctatagcaaacagtttttcatgtttggcccgcgcgatctttatcgc

SEQ ID NO: 255942 - DNA, 75 bp, synthetic construct
  source 1..75: mol_type = other DNA
atgttctctccagaactcagaacctttaccaaaggcgatgcggagagattggtaagcacaaccaaaaaagccagt

SEQ ID NO: 255943 - DNA, 75 bp, synthetic construct
  source 1..75: mol_type = other DNA
cccgttatattctgatgattgtcatcatggccgttggcatgatgatgtcgtcgatgggcacgtttgcgtcacacg

SEQ ID NO: 255944 - DNA, 75 bp, synthetic construct
  source 1..75: mol_type = other DNA
agttaaaaatgggcaacattgtcgccatcaaagggattggcggatttcatctcgcctgcgatgcacgtaacagta

SEQ ID NO: 255945 - DNA, 75 bp, synthetic construct
  source 1..75: mol_type = other DNA
caaacaccgcccggcgaaaccgctggcagtcatgttgccagtagcagaaagtttaccagacgctgcgcgccagtt

SEQ ID NO: 255946 - DNA, 75 bp, synthetic construct
  source 1..75: mol_type = other DNA
actctttccgcagagtttaccggcgggggatggcggcttgtctctggggcaggggggtattgctgcggcgcgcat

SEQ ID NO: 255947 - DNA, 75 bp, synthetic construct
  source 1..75: mol_type = other DNA
tcggtgtgagtctgagtactctggacgcccccgccgccgccgtagagtgtatccacgcttactcattaattcatg

SEQ ID NO: 255948 - DNA, 75 bp, synthetic construct
  source 1..75: mol_type = other DNA
aaaccatgcagtatggcgcattattaggtggtaagcgcctgcgacctttcctggtttatgccaccggtcatatgt

SEQ ID NO: 255949 - DNA, 75 bp, synthetic construct
  source 1..75: mol_type = other DNA
agcgatgccgatatgccggaagtatcagatcgcgacagaattgcgatgatttctgaactggcaaatgccagcggt

SEQ ID NO: 255950 - DNA, 75 bp, synthetic construct
  source 1..75: mol_type = other DNA
tggccttaacgaagtcggggtaatgttgcctgcgaacccgctccagcatttgctgttacaggaactgcaatgccc

SEQ ID NO: 255951 - DNA, 75 bp, synthetic construct
  source 1..75: mol_type = other DNA
caatcaactggatctcgccactttctggcagcagtggctgaactggcaggctccggttaatcaacgcgcgtgggc

SEQ ID NO: 255952 - DNA, 75 bp, synthetic construct
  source 1..75: mol_type = other DNA
cggcgaaatgctgcgccgttcacgcgggtatgtgccggatgcgctggttttgcctccgggctttaaaaatgttcc

SEQ ID NO: 255953 - DNA, 75 bp, synthetic construct
  source 1..75: mol_type = other DNA
ttcaattgcatcagcactgtccgccactggcgcgtattgatagcgtcgagcgtgagccgtttatctggtcacaac

SEQ ID NO: 255954 - DNA, 75 bp, synthetic construct
  source 1..75: mol_type = other DNA
gagcacctgggcggcttgcctgcagtggcgcttccgggtggcgatttggcggcgaagcagccgtggcgtaacctg

SEQ ID NO: 255955 - DNA, 75 bp, synthetic construct
  source 1..75: mol_type = other DNA
tggcgatttggcggcgaagcagccgtggcgaaacctgctggcgcagtgcctgcgctttgtgccggagtggcagaa

SEQ ID NO: 255956 - DNA, 75 bp, synthetic construct
  source 1..75: mol_type = other DNA
agaaaacagttatccttaatgaaggtgattttgttgtgttttatccggggaagtgcataaaccgctgtgcgcagt

SEQ ID NO: 255957 - DNA, 75 bp, synthetic construct
  source 1..75: mol_type = other DNA
gcacacgttacggcagaaacgccaaagggcaagcacgatatcgaaggcaatcgtctgttttatcttatctcggaa

SEQ ID NO: 255958 - DNA, 75 bp, synthetic construct
  source 1..75: mol_type = other DNA
ggaaaataaaaaagtaacccaaaatattgtgttttcaccgcctgtatcagcaaaggtaaaacctgaagatctgct

SEQ ID NO: 255959 - DNA, 75 bp, synthetic construct
  source 1..75: mol_type = other DNA
gctgatgttagaactttattcttcgatagattaatccgtacacttgatggttatgagttactggatgttactgat

SEQ ID NO: 255960 - DNA, 75 bp, synthetic construct
  source 1..75: mol_type = other DNA
tgaatttcgtgactcgggaaattcatttgaggaaaaacgttttcgggctgagtttaaggcccttagagaggctaa

SEQ ID NO: 255961 - DNA, 75 bp, synthetic construct
  source 1..75: mol_type = other DNA
aaacagttatccttaatgaaggtgattttgttgtgttttatccgggggaagtgcataaaccgctgtgcgcagtgg

SEQ ID NO: 255962 - DNA, 75 bp, synthetic construct
  source 1..75: mol_type = other DNA
tggttactggacgttggctgtggaaataccctcgacccgagccgcaaaagtgtgaaaaaaagccagttgtgtcgg

SEQ ID NO: 255963 - DNA, 75 bp, synthetic construct
  source 1..75: mol_type = other DNA
ggtgatgccacgacagaagttaaagcactggcgttgacttatctggagctgaccgtactcagttatccagcagct

SEQ ID NO: 255964 - DNA, 75 bp, synthetic construct
  source 1..75: mol_type = other DNA
acgccatgtgggtttctatgttgagcatgtggggttgccgggttgtcgtcggttatgtgctgggcatcatgcttg

SEQ ID NO: 255965 - DNA, 75 bp, synthetic construct
  source 1..75: mol_type = other DNA
gtgcgattacccggcagggagttcgaaacagtattgactatatgagccgggagtcagagctgccagtgatgagtg

SEQ ID NO: 255966 - DNA, 75 bp, synthetic construct
  source 1..75: mol_type = other DNA
tttcgtatccgagataatgacggtaaacgcgctgacatcaggaaaaaagatttacgggaaattcgtacaggtttt

SEQ ID NO: 255967 - DNA, 75 bp, synthetic construct
  source 1..75: mol_type = other DNA
agcagcagatgaagaagttcaatctagtgaaacaaaatatgttgcagagccaacagaaaatcaaagtcgggatta

SEQ ID NO: 255968 - DNA, 75 bp, synthetic construct
  source 1..75: mol_type = other DNA
aagccgcaaaaactctctggtagagaagctgagcgattcaataaactaattgaaaatagagcttattctattata

SEQ ID NO: 255969 - DNA, 75 bp, synthetic construct
  source 1..75: mol_type = other DNA
tgcgctatttacaagatccgggcatgatgtcgatcccgtacgccgataatctcaaagccagtaaattcgccgtac

SEQ ID NO: 255970 - DNA, 75 bp, synthetic construct
  source 1..75: mol_type = other DNA
tgttgaacacactttcgcagcaggcgttcggtgaacgctggctatcgacgcaggaaagtaacgcgttgttcctgg

SEQ ID NO: 255971 - DNA, 75 bp, synthetic construct
  source 1..75: mol_type = other DNA
taaatggcaggcgcaaacctctttctcagctgagccgctgacaggcgagaaagcgcaaaacagcaatctgaatag

SEQ ID NO: 255972 - DNA, 75 bp, synthetic construct
  source 1..75: mol_type = other DNA
atcagaatctggcgaacggtagcgccagcctggagcaaagtggtggcgaagtgcagaacttactgaaccagatgc

SEQ ID NO: 255973 - DNA, 75 bp, synthetic construct
  source 1..75: mol_type = other DNA
tggtggcaagagattgatgttccagcgcaagggctggatttgactattccggtcgataaaaactggaatcggcac

SEQ ID NO: 255974 - DNA, 75 bp, synthetic construct
  source 1..75: mol_type = other DNA
gggttacagcgtgccgacagacgtcattaaccggggaaatgagcgtctgctgcgctatttacaagatccgggcat

SEQ ID NO: 255975 - DNA, 75 bp, synthetic construct
  source 1..75: mol_type = other DNA
agaaaacgcgagttcagcaaaactctccgtgccggagagacaaaaactggcccaacagagtgccggtaaggtgct

SEQ ID NO: 255976 - DNA, 75 bp, synthetic construct
  source 1..75: mol_type = other DNA
aataaatgggcttgaaggttatgaactcgatgatgtaacagatgcttatgtttatcacccaaaaccagaagagat

SEQ ID NO: 255977 - DNA, 75 bp, synthetic construct
  source 1..75: mol_type = other DNA
tcaaacaagtcgttaaaaagcaagctgtcatagaggtagagccaacagaagctggttatgtgattcgccgtccag

SEQ ID NO: 255978 - DNA, 75 bp, synthetic construct
  source 1..75: mol_type = other DNA
gaaggcagtaacgccgcttttgacatcgtttatagcgatgcgcaaggcgtgaaaaaagccgtgtcgggcttgcag

SEQ ID NO: 255979 - DNA, 75 bp, synthetic construct
  source 1..75: mol_type = other DNA
acgcgcggttggtgtgttgcatctgccgcttggcgatgaaaaccgtcgcctcgatctggcgctggaaacaccagc

SEQ ID NO: 255980 - DNA, 75 bp, synthetic construct
  source 1..75: mol_type = other DNA
ttcattagccaatgggaataccgcaattcgctggcgaactggcagtcagacaaactgctgcagatggcggatctg

SEQ ID NO: 255981 - DNA, 75 bp, synthetic construct
  source 1..75: mol_type = other DNA
atggtacaaatgtgacgttaattactgcaccaaaaggcagtgatgaaaatacattcaaagccggaacccagcaga

SEQ ID NO: 255982 - DNA, 75 bp, synthetic construct
  source 1..75: mol_type = other DNA
accgcctgcggtaacgccaacagcagcgtcaacagcacgacaaaaaccatcgtcatgtacgttggcgcactccag

SEQ ID NO: 255983 - DNA, 75 bp, synthetic construct
  source 1..75: mol_type = other DNA
agcgactggctcttctttcactatcacatacgataatgtgccagcagcggaatgtgtgaagattgcgacagcggc

SEQ ID NO: 255984 - DNA, 75 bp, synthetic construct
  source 1..75: mol_type = other DNA
cgccttcaagcatctgacggaagaaatgcgccgtaaattgctggatatttcccgtacatcagaaaagtcttcccg

SEQ ID NO: 255985 - DNA, 75 bp, synthetic construct
  source 1..75: mol_type = other DNA
tggcggctcacgactgcccgcagaccacgacaactggcaactcacgccgtcgcaagccccatcgggggatcgaga

SEQ ID NO: 255986 - DNA, 75 bp, synthetic construct
  source 1..75: mol_type = other DNA
gaacggcaccatcaccgtgaccgggaaaacctcctatttcaccatcacggacaccggtattccgagctctgagtg

SEQ ID NO: 255987 - DNA, 75 bp, synthetic construct
  source 1..75: mol_type = other DNA
tgccattatcatcgtcgtctgcgtgctcgggatgctgttcgggctgtacgtcttcggccgctccggcagcgaagc

SEQ ID NO: 255988 - DNA, 75 bp, synthetic construct
  source 1..75: mol_type = other DNA
cagcagaatgtactaagatcatgacagcaacagcaggtaacttctacattgctcaagtaggctctacaactgtta

SEQ ID NO: 255989 - DNA, 75 bp, synthetic construct
  source 1..75: mol_type = other DNA
aagcgggtgttaaggcgctttatacatcagcgtcaagttttacaggattaactaatactgttgctgttcaggcta

SEQ ID NO: 255990 - DNA, 75 bp, synthetic construct
  source 1..75: mol_type = other DNA
caaaaaatgcagttttactcaacgccgggtaccgatttgacggtattgatggtgatgttgaagccatgttcgctg

SEQ ID NO: 255991 - DNA, 75 bp, synthetic construct
  source 1..75: mol_type = other DNA
gccgcgtttattgtttaccctaaagtacaggcttcacaacgcgcacaggctgaaagtaataacatagcgactata

SEQ ID NO: 255992 - DNA, 75 bp, synthetic construct
  source 1..75: mol_type = other DNA
tccctgacaatatgttaagtggaacaggcaatgcggctaaaccgattaatgcttttaaaggtaatgtgacgctgg

SEQ ID NO: 255993 - DNA, 75 bp, synthetic construct
  source 1..75: mol_type = other DNA
acatacgataatgtgccagcagcggaatgcgtgaaaataaccactgcggcggcaggcaacttttataccgctaaa

SEQ ID NO: 255994 - DNA, 75 bp, synthetic construct
  source 1..75: mol_type = other DNA
gaggtgctgagctggcgctggaatatccaccaggagtccaccatgcacgcgggtagcggtctgggatccggcaaa

SEQ ID NO: 255995 - DNA, 75 bp, synthetic construct
  source 1..75: mol_type = other DNA
attgttgcagcaacttagttcgctgggattcaacgatggcacgtattgcgctgaaggaatgattggcacctgcgc

SEQ ID NO: 255996 - DNA, 75 bp, synthetic construct
  source 1..75: mol_type = other DNA
aattcataatgaaagcgagcgtgcagcggggccttatatcgccgtcaattgtgagttatatggtgatgcggcgct

SEQ ID NO: 255997 - DNA, 75 bp, synthetic construct
  source 1..75: mol_type = other DNA
aaaacgatgctgtcgctcgggcaggcggcgctggaggacgcatgggaatatatgatgccgcggtcgtgcgcattg

SEQ ID NO: 255998 - DNA, 75 bp, synthetic construct
  source 1..75: mol_type = other DNA
atgagagctgtcgccggtgtgcttgttcttcttgcaactgcatcactgcatgcggctcccgatgatgtactgacc

SEQ ID NO: 255999 - DNA, 75 bp, synthetic construct
  source 1..75: mol_type = other DNA
tggaagcccgcctgactgaagaaaagaaggtccagaatgcggttatcagccaggtggcgcagcgttatggcctgt

SEQ ID NO: 256000 - DNA, 75 bp, synthetic construct
  source 1..75: mol_type = other DNA
ttcttcttgccactgcatcactgcatgcggctcccgacgatgtactggtccccaactatgcccgggaagaaggct

SEQ ID NO: 256001 - DNA, 75 bp, synthetic construct
  source 1..75: mol_type = other DNA
ctccagcgtgccagcggcacacttgctaagtgcttcgaaatatcgtcgaaagcgctcggtatggatcgcgtggag

SEQ ID NO: 256002 - DNA, 75 bp, synthetic construct
  source 1..75: mol_type = other DNA
caggattttgtgcgtgcttcttacgacatccagtcagccattgccgggttaactgacgatgagctgtcgcgcttc

SEQ ID NO: 256003 - DNA, 75 bp, synthetic construct
  source 1..75: mol_type = other DNA
ttgtcatgcgtaaagcaggcggcaatccgctggaatacctcaagtacacctttactgacctgattgtggctgtgg

SEQ ID NO: 256004 - DNA, 75 bp, synthetic construct
  source 1..75: mol_type = other DNA
gtgcatggccaggcaacgattttgaactttacagcgtcatcgagaatcttgctctgagtagtgataatgggcgca

SEQ ID NO: 256005 - DNA, 75 bp, synthetic construct
  source 1..75: mol_type = other DNA
gggtcttgcgccttgacgcgacggcaagtcagggacgggcaatcactgaactcttaacgttacccgccgtattgc

SEQ ID NO: 256006 - DNA, 75 bp, synthetic construct
  source 1..75: mol_type = other DNA
tttgacatccatgcgacttctgatattgataatctcagttgtggagttctgtctgcgcttccggaggacgcatat

SEQ ID NO: 256007 - DNA, 75 bp, synthetic construct
  source 1..75: mol_type = other DNA
aagatgcgctatccggtaacgctggtgacctgggcggtaatggtgcttaagcgcctgctgccggggcgcgtgatg

SEQ ID NO: 256008 - DNA, 75 bp, synthetic construct
  source 1..75: mol_type = other DNA
ggttttcatatgctggcaggttgccgaaaaccggatgatgttgagcgtatgaacaacatgggatttaccggcgtg

SEQ ID NO: 256009 - DNA, 75 bp, synthetic construct
  source 1..75: mol_type = other DNA
atcggccttcaggcgttgcagggacttggtagtgtcgctcaaacatctcaagccgcaaagcaacaggaagcggat

SEQ ID NO: 256010 - DNA, 75 bp, synthetic construct
  source 1..75: mol_type = other DNA
gctgcattccaaaaagaatatgcggcagccatccagtccggtgatcgacagcaggttcgagatctgatgaccaaa

SEQ ID NO: 256011 - DNA, 75 bp, synthetic construct
  source 1..75: mol_type = other DNA
ctaactttgaagcaaggctcgacacctttaaagctcaaacattccttcctatggtgcagtccctgaagggtatgg

SEQ ID NO: 256012 - DNA, 75 bp, synthetic construct
  source 1..75: mol_type = other DNA
ctgacagacaggccgccgctcagggcgctgttgatacgttcagcactgcgcttgattctctcaacgagatagagc

SEQ ID NO: 256013 - DNA, 75 bp, synthetic construct
  source 1..75: mol_type = other DNA
aggcaaagtgctggatctcatcaacacgccagagatgcttaatggcgttaaacagcgtcacgactggtttgttga

SEQ ID NO: 256014 - DNA, 75 bp, synthetic construct
  source 1..75: mol_type = other DNA
agagtgcgccagcgtgatgaccgttggcactcatggcaccacctatggcggtaatccgctggcctcggcggtggc

SEQ ID NO: 256015 - DNA, 75 bp, synthetic construct
  source 1..75: mol_type = other DNA
actgaatgccgattacgccgggcaagcgaaacagatctctcaggaagcggcgaaagcaggcgtgatggtactgat

SEQ ID NO: 256016 - DNA, 75 bp, synthetic construct
  source 1..75: mol_type = other DNA
ttgatgtacattgtggaaagcgaatcactccgtgctaaaacctccagtctgcttaccgatggtgagggttatggt

SEQ ID NO: 256017 - DNA, 75 bp, synthetic construct
  source 1..75: mol_type = other DNA
aattatttcttcgttatattatttaaatgctattttttctggtgttgatacattaaaatataatgaagatttaac

SEQ ID NO: 256018 - DNA, 75 bp, synthetic construct
  source 1..75: mol_type = other DNA
gccagcaacgcatttttacaaggtctgcgtgaacggtgtgaccgccacaatgctttgctgatttttgatgaggta

SEQ ID NO: 256019 - DNA, 75 bp, synthetic construct
  source 1..75: mol_type = other DNA
ttctttcctcaagttatggcgatagccaacctcaacagcaattgtccgatgacgaattaattagcaaatatctcg

SEQ ID NO: 256020 - DNA, 75 bp, synthetic construct
  source 1..75: mol_type = other DNA
aaacttcatggtgctggtgctaacgcgttctacgaaggtatagacaatgaggggaacatggttcgcgttcctgct

SEQ ID NO: 256021 - DNA, 75 bp, synthetic construct
  source 1..75: mol_type = other DNA
ccagaatgtctcaggctaagagatggcttgatggcaacaataattacaacaatgcgttgattactggtgagcgag

SEQ ID NO: 256022 - DNA, 75 bp, synthetic construct
  source 1..75: mol_type = other DNA
agcacctaagctgtcagtaaacatggaaaaaggcatcgagacggctgtaaacaatgccacagcatcatcaaactc

SEQ ID NO: 256023 - DNA, 75 bp, synthetic construct
  source 1..75: mol_type = other DNA
ttcacaaagagcacaggcagaatccaataacattgccaccatacaggcaggtgttaaagcgttatacacatcggc

SEQ ID NO: 256024 - DNA, 75 bp, synthetic construct
  source 1..75: mol_type = other DNA
ctttaggtaaacctgttttggttatgcgggaaaccacagaacgtcccgaagctattaaggcgggcacagttaaac

SEQ ID NO: 256025 - DNA, 75 bp, synthetic construct
  source 1..75: mol_type = other DNA
atacctgacagcggttcaggccatgcgaggcatgggcgcactttctgatgccgagggcaaaaagctcgaccaggc

SEQ ID NO: 256026 - DNA, 75 bp, synthetic construct
  source 1..75: mol_type = other DNA
aatattgcgcaacaaaatgtcaatcttcgtcggatggaattagaggacaagaaatacgacagactcatcgcaaat

SEQ ID NO: 256027 - DNA, 75 bp, synthetic construct
  source 1..75: mol_type = other DNA
caaattcattactgacaacaaggacaggttaaatcgcgttggtgctaatgctgactggatgattcagacaggtat

SEQ ID NO: 256028 - DNA, 75 bp, synthetic construct
  source 1..75: mol_type = other DNA
attcgtagccgtgcatctggtggtgatcagaggaaactatacaacgctgcacagcgaatccaaggaaagatgcag

SEQ ID NO: 256029 - DNA, 75 bp, synthetic construct
  source 1..75: mol_type = other DNA
gccaaacgcaacagggaacgttaaagattgcgccaatggtggcaatgagcgatgcccgtcgcgcggcgattatcc

SEQ ID NO: 256030 - DNA, 75 bp, synthetic construct
  source 1..75: mol_type = other DNA
aagtgctggttacagcgcaacatctcgacgatcaatgtgaaacctttctgctggcgctaaaacgcggtagcggcc

SEQ ID NO: 256031 - DNA, 75 bp, synthetic construct
  source 1..75: mol_type = other DNA
cgttggccacattttgccgaagcgacggcccgtagtgccgcactttgcgccgaacaagagagcctgctggatgaa

SEQ ID NO: 256032 - DNA, 75 bp, synthetic construct
  source 1..75: mol_type = other DNA
atgctacagaagacgacgtaatcgccggagttcgcgtcactggtctggcggacgaaccgaaagcggagatcttct

SEQ ID NO: 256033 - DNA, 75 bp, synthetic construct
  source 1..75: mol_type = other DNA
caggtgcaggtgaccgatccgcaaggccgccgtaatcttggtggcaacgtcaatatccgtaacttcaaccttgcg

SEQ ID NO: 256034 - DNA, 75 bp, synthetic construct
  source 1..75: mol_type = other DNA
tctgcatctggaactgggatctaacagtgccgaagtgaaaggtgaactgggagtaaaagatctcaatcttgatgc

SEQ ID NO: 256035 - DNA, 75 bp, synthetic construct
  source 1..75: mol_type = other DNA
gctgcatctggaactggggccaaacagtgccgaagtgaaaggcgagctgggggtaaaagatctcaatcttgatgc

SEQ ID NO: 256036 - DNA, 75 bp, synthetic construct
  source 1..75: mol_type = other DNA
acagtgtcggtaatggatttcacctcaggcttgagctggcaggagaaaaatctgaccctgaaaccgacgttgtta

SEQ ID NO: 256037 - DNA, 75 bp, synthetic construct
  source 1..75: mol_type = other DNA
gcgcgcgcgggtgacggcaaaaggcagtaaggtgcggatcaccgtaccgccgatggtgcgtatggatgtgtcgcc

SEQ ID NO: 256038 - DNA, 75 bp, synthetic construct
  source 1..75: mol_type = other DNA
gatctctccacgccgtatcccatcaccctgacacgggtggcgctggacaacgtcaacatcaagattgatgacacc

SEQ ID NO: 256039 - DNA, 75 bp, synthetic construct
  source 1..75: mol_type = other DNA
tgtatgccgaaagtggagcatggcgaaagacggcccggtatgcactctgaatgcaacgtttgaacaagttatcaa

SEQ ID NO: 256040 - DNA, 75 bp, synthetic construct
  source 1..75: mol_type = other DNA
ccagagcgcgaacagcaccgtccggcaacgccgtatgaacgtatcccagtaactctggtggaggacaacgcatga

SEQ ID NO: 256041 - DNA, 75 bp, synthetic construct
  source 1..75: mol_type = other DNA
cagcgaaagggttggtgaaggttcgaggtacggtggacgcaccgcagttgctggcggatatcaccgcgcgcagcc

SEQ ID NO: 256042 - DNA, 75 bp, synthetic construct
  source 1..75: mol_type = other DNA
tctcgacaaactcaccgtcgcggcgctggaagggaaaactgaactcaaggcgttgctcgactggcagcaggccat

SEQ ID NO: 256043 - DNA, 75 bp, synthetic construct
  source 1..75: mol_type = other DNA
aaatgcccccttcagagcaggttgaagaagaggaagacagcggcccgctggatctctccacgccgtatcccatca

SEQ ID NO: 256044 - DNA, 75 bp, synthetic construct
  source 1..75: mol_type = other DNA
tgcgctggcaggaactttccgtggcgcaggttcgcgtggaaggcgatatcaaatccaccgatcagattgcgggta

SEQ ID NO: 256045 - DNA, 75 bp, synthetic construct
  source 1..75: mol_type = other DNA
tctaatcaggggagcgttaatgccagtggcacggcgcaactgtccaataactggccggtagatatcaccctcaat

SEQ ID NO: 256046 - DNA, 75 bp, synthetic construct
  source 1..75: mol_type = other DNA
tattcgtaacccggatgctacagaagacgacgtaatcgccggagttcgcgtcactggtctggcggacgaaccgaa

SEQ ID NO: 256047 - DNA, 75 bp, synthetic construct
  source 1..75: mol_type = other DNA
ctgtacggcggcacctggcagatggacgtgccggagttgaagctgaccggtaacgttaaacagaacaaagtgaac

SEQ ID NO: 256048 - DNA, 75 bp, synthetic construct
  source 1..75: mol_type = other DNA
cctattgtattaaagtccaaaagggggctgacgtcacttattctttccgaaaaatcagcagggggaaagtcacaa

SEQ ID NO: 256049 - DNA, 75 bp, synthetic construct
  source 1..75: mol_type = other DNA
ttttgccattactggcggtctggctatggcaggtacttacattttaaaaaaaatgagttccggtagtgcagactg

SEQ ID NO: 256050 - DNA, 75 bp, synthetic construct
  source 1..75: mol_type = other DNA
gacatcactcggggtttaactttcatgcgtggttgacgacggaaaatggtgtgattgtggatgtttcctttatga

SEQ ID NO: 256051 - DNA, 75 bp, synthetic construct
  source 1..75: mol_type = other DNA
gcgaaaagcagcacgaattacaactgcggattcagggcgaaccggtttccgggcagctaaatctggcgggaagct

SEQ ID NO: 256052 - DNA, 75 bp, synthetic construct
  source 1..75: mol_type = other DNA
agtacgctcaacgtggagccgttgaaaggtgaaaaagtgaagctgaaagtgggcggggcgctgcgcgaacagctt

SEQ ID NO: 256053 - DNA, 75 bp, synthetic construct
  source 1..75: mol_type = other DNA
cgtggcgtttcagacactgaatctgacggcggaattgcgtaacaaccgtgccgaattgggctggaccatccgcct

SEQ ID NO: 256054 - DNA, 75 bp, synthetic construct
  source 1..75: mol_type = other DNA
tggatgtcccgtgggcgcgcattgtggtgcatgagctgccggaaagcgcggtgggcgtctccagcgatgtggtga

SEQ ID NO: 256055 - DNA, 75 bp, synthetic construct
  source 1..75: mol_type = other DNA
gggcggcgcgctgcgcgaacagctggagattggcgttaacctttccggtccggtggatatggatttacgcgccca

SEQ ID NO: 256056 - DNA, 75 bp, synthetic construct
  source 1..75: mol_type = other DNA
ggacgtagtgtttgaggccacgccaaatctgttcactctggatggccgcgtggatgtgccgtgggcgcgcatcgt

SEQ ID NO: 256057 - DNA, 75 bp, synthetic construct
  source 1..75: mol_type = other DNA
atgtcacgacagggtacggacccgagattttcgccatgccagcgccagttcacgggcgctatcaggtgtatatca

SEQ ID NO: 256058 - DNA, 75 bp, synthetic construct
  source 1..75: mol_type = other DNA
attttcactgaaggcagcaacagcgtgcaggtcatcagcccggatgggcaaagccgacaaaaaatgcagttttac

SEQ ID NO: 256059 - DNA, 75 bp, synthetic construct
  source 1..75: mol_type = other DNA
tgcgtttcgcaaacatttcggcaacagtccgaagagagtttctaaggagtaccgttgtcaaaggcacacgggtat

SEQ ID NO: 256060 - DNA, 75 bp, synthetic construct
  source 1..75: mol_type = other DNA
accggccccttgttacagttgtgtacaaggggcctgatttttatggcggcgaaaaaataaatatcctccggcata

SEQ ID NO: 256061 - DNA, 75 bp, synthetic construct
  source 1..75: mol_type = other DNA
gccatcataggcatgatgttgatttgtgccggtgtgttagtcattaacttgttgtcacgaagcgcaccgcattaa

SEQ ID NO: 256062 - DNA, 75 bp, synthetic construct
  source 1..75: mol_type = other DNA
gaacaggaacgccgtccgggcaaacctgaccgcattacagaaaacgctgacccccggtcagatgctgccggtgtc

SEQ ID NO: 256063 - DNA, 75 bp, synthetic construct
  source 1..75: mol_type = other DNA
cgcgatcccagctccaccatgctgatcgccagcctgttccagcaggccgggctgcccgctggcgtgcttaacgtg

SEQ ID NO: 256064 - DNA, 75 bp, synthetic construct
  source 1..75: mol_type = other DNA
tcggcccggtgctatgcatcgtaagggttggcagcctggagcaggccattgaattaatcaatgcgcacgaatacg

SEQ ID NO: 256065 - DNA, 75 bp, synthetic construct
  source 1..75: mol_type = other DNA
tttcattaatgcaaccacttggtgttgtagctggcatcacaccctttaacttccctgcaatggtgccaatgtgga

SEQ ID NO: 256066 - DNA, 75 bp, synthetic construct
  source 1..75: mol_type = other DNA
cgcaatcatcataatttttcagaacttttgcttttttcttgcctgtctatttttgccgcatgcaaaggtttcatt

SEQ ID NO: 256067 - DNA, 75 bp, synthetic construct
  source 1..75: mol_type = other DNA
gctcaacccggaacagcctcaccagtttacgccgcctgaattgtggctactgactgacctgacagaagactcaac

SEQ ID NO: 256068 - DNA, 75 bp, synthetic construct
  source 1..75: mol_type = other DNA
ccgccacaacgttcttatgtgggtgcggctatcattttggaaatgacgttgatgcttacgatttaatgtccaggc

SEQ ID NO: 256069 - DNA, 75 bp, synthetic construct
  source 1..75: mol_type = other DNA
tataacggctgggcacaaaccttaaatggcccttccggtcatgaacctgccgccttaaacctctctgctagctgg

SEQ ID NO: 256070 - DNA, 75 bp, synthetic construct
  source 1..75: mol_type = other DNA
tgaagatcccggcacaaccgcaactgatgcttgatatggaacaggcgcgtggactgctgcatcgccaggatgcat

SEQ ID NO: 256071 - DNA, 75 bp, synthetic construct
  source 1..75: mol_type = other DNA
atgccgcgactcagccccgtcaatcaggcccgttgggcgcgttttcgtcataaccgtcgcggctactggtcgtta

SEQ ID NO: 256072 - DNA, 75 bp, synthetic construct
  source 1..75: mol_type = other DNA
tggattttcctcgtcttgtttggtttgagtttgtgttctgaacttatcgctaacgataaaccgttgctggtgcgt

SEQ ID NO: 256073 - DNA, 75 bp, synthetic construct
  source 1..75: mol_type = other DNA
atgctaactgaaaacacaccagaaaacattaagcgtctgcggcaaaaaattggcctgacacagaaagaatgtgcc

SEQ ID NO: 256074 - DNA, 75 bp, synthetic construct
  source 1..75: mol_type = other DNA
accagcaatccggtacagaaattgggttgctatatgccctgtttttcactgtcctggcgttgtttgagctgggca

SEQ ID NO: 256075 - DNA, 75 bp, synthetic construct
  source 1..75: mol_type = other DNA
gttacttccaccacgaagcatccatcgaaggtggtcagcacctgaacgttaacgtgatgaaccgtgaaatgctgc

SEQ ID NO: 256076 - DNA, 75 bp, synthetic construct
  source 1..75: mol_type = other DNA
gctggaagcagagcctgtaagccaaacttacaacttgccagaattaatcgaaggcatggaagtttccattgatgt

SEQ ID NO: 256077 - DNA, 75 bp, synthetic construct
  source 1..75: mol_type = other DNA
ccaaacttcgatgtaaatggcaactctccggtaactccggatggttggataagctgtagtgagcgaatgccccct

SEQ ID NO: 256078 - DNA, 75 bp, synthetic construct
  source 1..75: mol_type = other DNA
catcgggcattatctgaacataaaacactatcaataagttggagtcattaccttctctccagtatgaacaggaaa

SEQ ID NO: 256079 - DNA, 75 bp, synthetic construct
  source 1..75: mol_type = other DNA
atttgatggattgttgcggtatcacttacagccaggctgtacaggctctacgcagcaacgactgggatctctggc

SEQ ID NO: 256080 - DNA, 75 bp, synthetic construct
  source 1..75: mol_type = other DNA
atttgatggattgttgcggtatcacttacagccaggctgtgcaggctttacgtagcaacgactgggatctctggc

SEQ ID NO: 256081 - DNA, 75 bp, synthetic construct
  source 1..75: mol_type = other DNA
gtttgacaggaaaggtgactggcgaatgaaatgggcgacttacatcccggggcatcctgacgctaatgatgggtg

SEQ ID NO: 256082 - DNA, 75 bp, synthetic construct
  source 1..75: mol_type = other DNA
aaacatgtaatattaacgttgaaaagtatacttacccagtcagttaaacccaatcaagtaatactttatctttca

SEQ ID NO: 256083 - DNA, 75 bp, synthetic construct
  source 1..75: mol_type = other DNA
agcgggaaaccgtgggcgtccggcggtggggctggtggtagaaacagaagcctggcactatctttctttgcgcat

SEQ ID NO: 256084 - DNA, 75 bp, synthetic construct
  source 1..75: mol_type = other DNA
ggtggttatcgatcacaatgtgggggctggtgtgattacagacggtcatctgctacacgcgggaagcagtagcct

SEQ ID NO: 256085 - DNA, 75 bp, synthetic construct
  source 1..75: mol_type = other DNA
gggaaacgctgctattgcggtaaccacggctgcctggaaaccatcgctagtgttgatagtattcttgagcttgca

SEQ ID NO: 256086 - DNA, 75 bp, synthetic construct
  source 1..75: mol_type = other DNA
agggagaagaggcggttgatactgaacattattatggtctgtggaatgccgcgcgtgagcaaatcgcccgccatt

SEQ ID NO: 256087 - DNA, 75 bp, synthetic construct
  source 1..75: mol_type = other DNA
tcatggatctttttgcccgcagagttatcggctggagcctgtcagcgaatgccgatactgcactgataagcagtg

SEQ ID NO: 256088 - DNA, 75 bp, synthetic construct
  source 1..75: mol_type = other DNA
gtccgcgaaatgcttgaagcgcacctggtgcaagagctggaaattaaagaggctggaaaccgtggccgtccggcg

SEQ ID NO: 256089 - DNA, 75 bp, synthetic construct
  source 1..75: mol_type = other DNA
aacaggaagtacaggtgttaaagatattgagcctccagatgttgttttgttaaactcattggcggaaaactcatc

SEQ ID NO: 256090 - DNA, 75 bp, synthetic construct
  source 1..75: mol_type = other DNA
atggcccttgatcttatggcggccttttcggaaacgccgccgcctcttgattatgttttacctaacatggtttcc

SEQ ID NO: 256091 - DNA, 75 bp, synthetic construct
  source 1..75: mol_type = other DNA
aaagaggccagcgattactttaccagtcgcaaggtcagtgagtccggcagccatactgacaataatgctgattcc

SEQ ID NO: 256092 - DNA, 75 bp, synthetic construct
  source 1..75: mol_type = other DNA
atggcagaggccttgtttggtgcctcacgcggggcgcgcgatgtgattcaggtggttatcgatcacaacgtgggg

SEQ ID NO: 256093 - DNA, 75 bp, synthetic construct
  source 1..75: mol_type = other DNA
gatcagcttggtccagtctcgcgtatcgatctttcccgtctggcgcagctggctcctgccagtatcactaaaatt

SEQ ID NO: 256094 - DNA, 75 bp, synthetic construct
  source 1..75: mol_type = other DNA
atcatcggtacgccaaaaggcttctccgagttccacaagctgtggactatcggtcagaacaaagatttgcaacgc

SEQ ID NO: 256095 - DNA, 75 bp, synthetic construct
  source 1..75: mol_type = other DNA
gcagatgttatcgatcaggcgacgcttgaacgcgtcagtgaattgcaaattccggtgaatgcgggttctgttgat

SEQ ID NO: 256096 - DNA, 75 bp, synthetic construct
  source 1..75: mol_type = other DNA
cgcgacaacagcgcggacagccgttactggggctttgtgcctgaagcgaatctggtcggtcgggcaacggctatc

SEQ ID NO: 256097 - DNA, 75 bp, synthetic construct
  source 1..75: mol_type = other DNA
gttggctggaaaccggtgcttctgtatttccggtgctggcacttgtgttaattgtgcgttcatttatttatgagc

SEQ ID NO: 256098 - DNA, 75 bp, synthetic construct
  source 1..75: mol_type = other DNA
tattaccagcagccagggcaacaactggcaacctggattgttcctccgggacaatacttcatgatgggtgacaac

SEQ ID NO: 256099 - DNA, 75 bp, synthetic construct
  source 1..75: mol_type = other DNA
aagtgacagccacacggttgtcagcctgtgttctgctctggaaatacaccgcagcagttaccggtactggcgaaa

SEQ ID NO: 256100 - DNA, 75 bp, synthetic construct
  source 1..75: mol_type = other DNA
tttgctgtccccgagccagaccaggtatggtgtggagatattacctatatctgggccggaaattgctggtgctat

SEQ ID NO: 256101 - DNA, 75 bp, synthetic construct
  source 1..75: mol_type = other DNA
cgttccagatcccgtcaggttcgatgatgccgactctgttaatcggtgactttattctggtagagaagtttgctt

SEQ ID NO: 256102 - DNA, 75 bp, synthetic construct
  source 1..75: mol_type = other DNA
ttgaaccgcaggaaattgacagcaaccgccccattgctgtgccagtcgttggcgatattgcatccagtatgcaag

SEQ ID NO: 256103 - DNA, 75 bp, synthetic construct
  source 1..75: mol_type = other DNA
atgccgataccgcactgataagcagtgccctgcggatggcctatgagacgcgtggccaaccccgggatgtcgtgt

SEQ ID NO: 256104 - DNA, 75 bp, synthetic construct
  source 1..75: mol_type = other DNA
gtcagcaagccgttaagccacgaagttgtgcagccacagctggcatcaaactacacgctccccgaggcaaaataa

SEQ ID NO: 256105 - DNA, 75 bp, synthetic construct
  source 1..75: mol_type = other DNA
tggtgattgccacactggtgacgggcattttatggtgcgtggataaattctttttcgcacctaagcgacgggaac

SEQ ID NO: 256106 - DNA, 75 bp, synthetic construct
  source 1..75: mol_type = other DNA
tggtgattgccacactggtgacgggcattttatggtgcgtggataaattctttttcgcacctaaacggcgggaac

SEQ ID NO: 256107 - DNA, 75 bp, synthetic construct
  source 1..75: mol_type = other DNA
atatcctgaattattacaatagcgtcaggcctcaccattacaacggtgggttgacgccggaagtaagcgtaaact

SEQ ID NO: 256108 - DNA, 75 bp, synthetic construct
  source 1..75: mol_type = other DNA
ttattgctgaccatcagggacatcaggccattattgagcaaagaacgcaggacagtaatatccgtaatgatgtaa

SEQ ID NO: 256109 - DNA, 75 bp, synthetic construct
  source 1..75: mol_type = other DNA
acggtaatatggtgatggatgcaagcggagcgatgtcccggttaccggttggtatcaatgcaacgcgtcagattg

SEQ ID NO: 256110 - DNA, 75 bp, synthetic construct
  source 1..75: mol_type = other DNA
taatgtgccggtcgggctggcgatgccactttctctgacgacccgtatcgggcatgcgatggtggccggctatga

SEQ ID NO: 256111 - DNA, 75 bp, synthetic construct
  source 1..75: mol_type = other DNA
cattggtgaaaaagtcggtactggtcgcggtgatgcggtggatattgctgtggatccgattgaaggtacgcgaat

SEQ ID NO: 256112 - DNA, 75 bp, synthetic construct
  source 1..75: mol_type = other DNA
tatgtatatggagaagctgattgtcgggccgggagccaaaggcaccattgatctgaacctgccgctggcggataa

SEQ ID NO: 256113 - DNA, 75 bp, synthetic construct
  source 1..75: mol_type = other DNA
gtcaccatcaatgcgctgaaggaggggatcaccagttatgccgcacgtaatggtgattcggccagcctggtgaat

SEQ ID NO: 256114 - DNA, 75 bp, synthetic construct
  source 1..75: mol_type = other DNA
aggaaaatgaaacaattattgatggtggtaaagtttacgatgagcttaggcgcgattatcttaacagaagtttcc

SEQ ID NO: 256115 - DNA, 75 bp, synthetic construct
  source 1..75: mol_type = other DNA
gacgaagcatataataaaatgaagtccttgcatgatgaaaaagataatcttaattttaaaaacaaaatgaaagag

SEQ ID NO: 256116 - DNA, 75 bp, synthetic construct
  source 1..75: mol_type = other DNA
cgactaacttcgatgatttagtcaatgaagcttgctttaccttttctaataatctgagaccaatagtgtgtgccc

SEQ ID NO: 256117 - DNA, 75 bp, synthetic construct
  source 1..75: mol_type = other DNA
gcagtagaactcagaaggcaatacgcaatgaaaatatataaaacatataataaattaaagaataatgagcaaatt

SEQ ID NO: 256118 - DNA, 75 bp, synthetic construct
  source 1..75: mol_type = other DNA
cagttacgacaacgtggactacagccagatcccggcaggattcagggggtgatcatgagtcttttgaatgaagtt

SEQ ID NO: 256119 - DNA, 75 bp, synthetic construct
  source 1..75: mol_type = other DNA
atggataaaaacaccactgcttactggagtctttcacttgataccgaatgtcccaaatgcggccacaatttcgat

SEQ ID NO: 256120 - DNA, 75 bp, synthetic construct
  source 1..75: mol_type = other DNA
agggctgcttcctcaatgcgccggatatgtatatggagaagttgatcgtcggacctggtgccaaaggcgtcatcg

SEQ ID NO: 256121 - DNA, 75 bp, synthetic construct
  source 1..75: mol_type = other DNA
ctggccacgacttcatcgatggagaagcagcgtctggcacatgtctccatcggtcatgtggcgatgcgaaccctg

SEQ ID NO: 256122 - DNA, 75 bp, synthetic construct
  source 1..75: mol_type = other DNA
gaaagacaggctgaatctggatacaaagaggggaggcaagacctggcattattatgtccagcagctatttggtgg

SEQ ID NO: 256123 - DNA, 75 bp, synthetic construct
  source 1..75: mol_type = other DNA
gagagcttctgccgggatgtatggagatgctcatgctgaatggggggttaaacctaaaattcttggtgttggtgg

SEQ ID NO: 256124 - DNA, 75 bp, synthetic construct
  source 1..75: mol_type = other DNA
ctctgctatcagcccgactgccagtgcggcaggcagtgtggttgacggtaattactcctacggcaacatgcagac

SEQ ID NO: 256125 - DNA, 75 bp, synthetic construct
  source 1..75: mol_type = other DNA
taaatataatgaagaaaagctggttcaggaaagaatacctggtgctgatagtccgaaagatcttttagagaaagc

SEQ ID NO: 256126 - DNA, 75 bp, synthetic construct
  source 1..75: mol_type = other DNA
tagcgcgctggcggctgatggccgctctcttgaacatgcgccaacggtggaaactgttgtcgcagggccattatg

SEQ ID NO: 256127 - DNA, 75 bp, synthetic construct
  source 1..75: mol_type = other DNA
caacaataataatttcataacctgtaaggatgcgtcggtcacgctgaaagacaggctgaatctcgatacaaagac

SEQ ID NO: 256128 - DNA, 75 bp, synthetic construct
  source 1..75: mol_type = other DNA
gtgaatgaagtttatgtgattgccggtggtgagtggttgcggaataacctgaatgccatcgccgcctttatgggg

SEQ ID NO: 256129 - DNA, 75 bp, synthetic construct
  source 1..75: mol_type = other DNA
ccgccactttgtgctggttgacgccggatttaacgatctgatgcgcccggcaatgtacggcagttaccatcacat

SEQ ID NO: 256130 - DNA, 75 bp, synthetic construct
  source 1..75: mol_type = other DNA
tatggcgtggtcttttgttcaggaacaggtgcagcctggtgttgataatgcctggcgtgaatcccgtagggacat

SEQ ID NO: 256131 - DNA, 75 bp, synthetic construct
  source 1..75: mol_type = other DNA
tttaaagaggccagcgattactttaccagtcgcaaggtcagtgagtccggcagccatactgacaataatgctgat

SEQ ID NO: 256132 - DNA, 75 bp, synthetic construct
  source 1..75: mol_type = other DNA
aaaattcttggtgttggtggaggattaggcgttagaggcggtggtcgggctggcattgactggagtgatgatgat

SEQ ID NO: 256133 - DNA, 75 bp, synthetic construct
  source 1..75: mol_type = other DNA
tgcattgccattatggctgaataatgaaaaatggattgtaaaagatggttggctggcaaactcaggtcccatgac

SEQ ID NO: 256134 - DNA, 75 bp, synthetic construct
  source 1..75: mol_type = other DNA
actttgtactaccgttccgttttggcgacggtgcgtggcacctggggacgcggcgacctgtatcattacgtattg

SEQ ID NO: 256135 - DNA, 75 bp, synthetic construct
  source 1..75: mol_type = other DNA
ccagacaaccaggtcaacggcgtcgactttgtactaccgttccgttttggcgacggtgcgtggcacctggggacg

SEQ ID NO: 256136 - DNA, 75 bp, synthetic construct
  source 1..75: mol_type = other DNA
tcaataaagcacttgagcgtttttattttcgcctaaacacatcaggggcccaggcagaacacgcagcccatgatt

SEQ ID NO: 256137 - DNA, 75 bp, synthetic construct
  source 1..75: mol_type = other DNA
aaagacaatatgactgcgggttcagcaattaactggttgcgctatatggaaattagccgttcatcgacaaaaatt

SEQ ID NO: 256138 - DNA, 75 bp, synthetic construct
  source 1..75: mol_type = other DNA
ggctggcaaactcaggtcccatgaccttacgtctggataaagacactgcggatgcagtagcaaaagacaatatga

SEQ ID NO: 256139 - DNA, 75 bp, synthetic construct
  source 1..75: mol_type = other DNA
gcgagaaccaggatatttatttagttaatgaaggtgcaaataccctggataatgcacgaaatattattgatatgt

SEQ ID NO: 256140 - DNA, 75 bp, synthetic construct
  source 1..75: mol_type = other DNA
tcaacaaagcacttgagcgtttttattttcgcttaaacacatcaggggcccaggcagaacacgcagcccatgatt

SEQ ID NO: 256141 - DNA, 75 bp, synthetic construct
  source 1..75: mol_type = other DNA
aagccttttgtttatacgaagaagataaacaaaggcttatttagtgccttagcaagtttatttagaaagctgctt

SEQ ID NO: 256142 - DNA, 75 bp, synthetic construct
  source 1..75: mol_type = other DNA
aggggaatttaccatgccgctggtgccggatgggcttcctgtcagtggccatgctaccgcgaccttgaacttgcc

SEQ ID NO: 256143 - DNA, 75 bp, synthetic construct
  source 1..75: mol_type = other DNA
tcaaccttaaaatttagcgtcgatggacgcgatccgacgtatttcctcttcaaaggggatttacatgctggtgag

SEQ ID NO: 256144 - DNA, 75 bp, synthetic construct
  source 1..75: mol_type = other DNA
gttagcgcggttaatccgaaacagtttgctatgtctggggcatttagtggggcgttgccactatggctgaacaat

SEQ ID NO: 256145 - DNA, 75 bp, synthetic construct
  source 1..75: mol_type = other DNA
gatctggatgcacttaacgaactttccgagctgatctgtgccgcagaatgcggggaacacattgaatcatataag

SEQ ID NO: 256146 - DNA, 75 bp, synthetic construct
  source 1..75: mol_type = other DNA
aagcgctggagtcgatgattaagcacgaagcgacccgtccgttggtgttctcatcaaactactatcagactcgtc

SEQ ID NO: 256147 - DNA, 75 bp, synthetic construct
  source 1..75: mol_type = other DNA
ctgtaccgaaagtctccgacattcaggcttcacttatcggacgttacagcactgcattttcagcattagcggaaa

SEQ ID NO: 256148 - DNA, 75 bp, synthetic construct
  source 1..75: mol_type = other DNA
agctgcgcagaagcagctggcgcaatacattcagcaagtagacgagcaaatggcgaaggaacttgcgctcgatct

SEQ ID NO: 256149 - DNA, 75 bp, synthetic construct
  source 1..75: mol_type = other DNA
gtcgatgttaattggtcgcttcagcacgacattttctgcattagcagaaacgctggataatcaggaagaacctga

SEQ ID NO: 256150 - DNA, 75 bp, synthetic construct
  source 1..75: mol_type = other DNA
gttgccaaagaaaagtggacttccacagctatcgttactcaacctgatgtggggcaaatcgctggttataacaac

SEQ ID NO: 256151 - DNA, 75 bp, synthetic construct
  source 1..75: mol_type = other DNA
aaaacctgctggatatcgacaatcttgacgttgataaacttgatattcatgcttaccgctatgtaatgaaaccga

SEQ ID NO: 256152 - DNA, 75 bp, synthetic construct
  source 1..75: mol_type = other DNA
cttccgcaacctgaagacaatgaaaactatcaggtttcttcgcaacgctttccttttaccattaacgttaatggt

SEQ ID NO: 256153 - DNA, 75 bp, synthetic construct
  source 1..75: mol_type = other DNA
attaacgttaatggtccgggggctacggcgctggcatggcactatcttccaacacaattaccgctggcggtgctg

SEQ ID NO: 256154 - DNA, 75 bp, synthetic construct
  source 1..75: mol_type = other DNA
tcagtagcgccagcctgacggtggacaaacggcatttgctctatggtaatgggctggtagattcccttccgcaac

SEQ ID NO: 256155 - DNA, 75 bp, synthetic construct
  source 1..75: mol_type = other DNA
cggcgaaaattaccactccgcagatccagcaaactcaggacgtgactcaggaaaccatgttcctgctgggaagcg

SEQ ID NO: 256156 - DNA, 75 bp, synthetic construct
  source 1..75: mol_type = other DNA
tcctcattttctgctttagctcaggcgcttgaaaatcaggaaatgccagaaaaactgaccatcgattctaccgtt

SEQ ID NO: 256157 - DNA, 75 bp, synthetic construct
  source 1..75: mol_type = other DNA
tcctcattttctgctttagcctgggcgcttgaaaaccaggaaatgccagaaaaactgaccattgataccaccgtt

SEQ ID NO: 256158 - DNA, 75 bp, synthetic construct
  source 1..75: mol_type = other DNA
tccggcagccatactgacaataatgctgattcccgtgtggatcagttgtctgcagccctgaattcagcgaaacag

SEQ ID NO: 256159 - DNA, 75 bp, synthetic construct
  source 1..75: mol_type = other DNA
gatgctcatgctgaatgggggattaaacctaaaattcttggtgttggtggtggcgtaggtgttagaggtggtggt

SEQ ID NO: 256160 - DNA, 75 bp, synthetic construct
  source 1..75: mol_type = other DNA
ctcagcgaaacagagttacgaccagtacacgacgaatatgacccgcagccatgaatatgctgaaatggcatcccg

SEQ ID NO: 256161 - DNA, 75 bp, synthetic construct
  source 1..75: mol_type = other DNA
acaatcgctggtgctatctggcggttgttatggatctttttgcccgcagggttatcggctggagtctgtcagcgc

SEQ ID NO: 256162 - DNA, 75 bp, synthetic construct
  source 1..75: mol_type = other DNA
gtcagcccggaaaacatcagtataaaaatgcccgtcaggagcataccagcctgccgaatctgcttgagcgtcagt

SEQ ID NO: 256163 - DNA, 75 bp, synthetic construct
  source 1..75: mol_type = other DNA
tcagcccagcccgctacggggcgtttatgacagcaataataatttcataacctgtaaggatgcgtcggtcacgct

SEQ ID NO: 256164 - DNA, 75 bp, synthetic construct
  source 1..75: mol_type = other DNA
tgaaatattctgacctggcctccactgccgggtatctttccgccatgatccccccgttgtcctggatgatggtaa

SEQ ID NO: 256165 - DNA, 75 bp, synthetic construct
  source 1..75: mol_type = other DNA
tgagccgttatcgtgccgggcggctgatgaaatacctgaatctgagcagttgtcagcccggaaaacatccataca

SEQ ID NO: 256166 - DNA, 75 bp, synthetic construct
  source 1..75: mol_type = other DNA
ggatgtcgtgttccatagcgaccagggaagccagtatacaggccttaaatatcaacaacttctctggcgttgcag

SEQ ID NO: 256167 - DNA, 75 bp, synthetic construct
  source 1..75: mol_type = other DNA
atgatgatcccgccgttgtcatggatgatggtaaagggcacttgggcgcaggatttttccagcgtgtacagccat

SEQ ID NO: 256168 - DNA, 75 bp, synthetic construct
  source 1..75: mol_type = other DNA
ttcacgggccagccatgatgcccgtcatgatattgatgccagagctacacaagactttaaagaagcaagcgatta

SEQ ID NO: 256169 - DNA, 75 bp, synthetic construct
  source 1..75: mol_type = other DNA
cggagattgcagaacgtcgtcgggcgatggcctggtcttttgtgcaggaacaggtacagcctggtgttgatagcc

SEQ ID NO: 256170 - DNA, 75 bp, synthetic construct
  source 1..75: mol_type = other DNA
gccagtatacaggccttaaatatcaacaacttctctggcgttgcagaataaatcaaagcgtcagtcggcggggaa

SEQ ID NO: 256171 - DNA, 75 bp, synthetic construct
  source 1..75: mol_type = other DNA
tttctacggttccagccagtcagccagccagattatgcgccagaacgttaccatgaatgccctgaaagatggtat

SEQ ID NO: 256172 - DNA, 75 bp, synthetic construct
  source 1..75: mol_type = other DNA
cgccctgcatgggttcagcagcagtattgccagtgcctggaactcgctcagtcagtttggttctaaccgggggag

SEQ ID NO: 256173 - DNA, 75 bp, synthetic construct
  source 1..75: mol_type = other DNA
ttcacgggccagccatgatgctcgacatgatatcgatgctaaagccagtaaggactttaaagaggccagcgatta

SEQ ID NO: 256174 - DNA, 75 bp, synthetic construct
  source 1..75: mol_type = other DNA
ccagcctgttaaagcacggttgccaggtcacgcactaccgcaatacacgcggctggattgaatgcccggacgggc

SEQ ID NO: 256175 - DNA, 75 bp, synthetic construct
  source 1..75: mol_type = other DNA
aacgtgaacggcttcagctggagcaccaacagcaccacgtcgtttggtcagatgacctaccagaccggcagtggc

SEQ ID NO: 256176 - DNA, 75 bp, synthetic construct
  source 1..75: mol_type = other DNA
acctggtccaggttcaccgggtggacaatgtaccggtcggactggcgatgccactttcactgacgacccgtatcg

SEQ ID NO: 256177 - DNA, 75 bp, synthetic construct
  source 1..75: mol_type = other DNA
gaaagtgccctgcatgggttcagcagcagtattgccagcgcatggaacacgctcagccagtttggttctaaccgg

SEQ ID NO: 256178 - DNA, 75 bp, synthetic construct
  source 1..75: mol_type = other DNA
cagctgaaatactccgacctggcgtccactgccggatatatatctgtcatgatacccccgttgtcatggatgatg

SEQ ID NO: 256179 - DNA, 75 bp, synthetic construct
  source 1..75: mol_type = other DNA
catattgcagaattttaccgttgggtaatttcatccatccatcaccactggcaaaagaggccatgtccggtatct

SEQ ID NO: 256180 - DNA, 75 bp, synthetic construct
  source 1..75: mol_type = other DNA
aactgctcagtgacagttacagctatttctacggtgccagccagtcggccagccagattatgcgtaagaatgtga

SEQ ID NO: 256181 - DNA, 75 bp, synthetic construct
  source 1..75: mol_type = other DNA
gatacccccgttgtcatggatgatggtaaaaggccttggcgcaggtttttccagcgtgtacagccacttcgcctc

SEQ ID NO: 256182 - DNA, 75 bp, synthetic construct
  source 1..75: mol_type = other DNA
gcagtcatggccaatgttgtacgccattctgaacagcgccatgacattttatgcgaagcagaatggtgcaccggt

SEQ ID NO: 256183 - DNA, 75 bp, synthetic construct
  source 1..75: mol_type = other DNA
ttgagtgtgctgcaaagttaatccggagctatctgacggatattgcgggtaagaaggcagacctgattatcagct

SEQ ID NO: 256184 - DNA, 75 bp, synthetic construct
  source 1..75: mol_type = other DNA
caggccggcatcctctggttcatacgccagcaatttgcgggaatatgagtctgtcagggagtttatgaccagcgc

SEQ ID NO: 256185 - DNA, 75 bp, synthetic construct
  source 1..75: mol_type = other DNA
atcaggggtgaagagttccaagcatggctgctttgtttatggcgatacctcgttttctttcagtgaggtaatgga

SEQ ID NO: 256186 - DNA, 75 bp, synthetic construct
  source 1..75: mol_type = other DNA
cattctgggaacgtaccttattcacagtgatgacccacataaccgtatcaccatgggggcactgattgcagccgt

SEQ ID NO: 256187 - DNA, 75 bp, synthetic construct
  source 1..75: mol_type = other DNA
ctgttagggagtttatgaccagtgccacgttactggcttttgttgatttgccttttatcctgcttttcatcggtg

SEQ ID NO: 256188 - DNA, 75 bp, synthetic construct
  source 1..75: mol_type = other DNA
atgaaggccgggtaatgatggatggtccccgcgatgaaatactgaaaaaactgtcagggaaacagcagagtgggg

SEQ ID NO: 256189 - DNA, 75 bp, synthetic construct
  source 1..75: mol_type = other DNA
tggtgatggaccgcaacttcaaaccgggcttccgtattgatctgcatattaaggatctggcgaatgcgctggata

SEQ ID NO: 256190 - DNA, 75 bp, synthetic construct
  source 1..75: mol_type = other DNA
tgctgccggtgcagaaacagcctctacggctaaagcgatcgctgaacagtgcgacgtcatcataaccatgctgcc

SEQ ID NO: 256191 - DNA, 75 bp, synthetic construct
  source 1..75: mol_type = other DNA
acccagaagctatcgctgacgtgattgctgccggtgcagaaacagcctctacggctaaagcgatcgctgaacagt

SEQ ID NO: 256192 - DNA, 75 bp, synthetic construct
  source 1..75: mol_type = other DNA
tcgcagcgccagggattacttgtggaggctctggacggaatagaaaccctgaagctgaataatgcagttaactgg

SEQ ID NO: 256193 - DNA, 75 bp, synthetic construct
  source 1..75: mol_type = other DNA
aatgcatgcggaaacggctcatgactttctggatatccatttgccagcggagctacgcgaactgtgtggatttag

SEQ ID NO: 256194 - DNA, 75 bp, synthetic construct
  source 1..75: mol_type = other DNA
tgtcagtgatggtaggtggcgataaggctattttcgacaaatactatgatttgatgaaatcgatggcggggtccg

SEQ ID NO: 256195 - DNA, 75 bp, synthetic construct
  source 1..75: mol_type = other DNA
ccactggtgattctggcaggaatattactgcagcgaccgctttcccgtcatattaatgcctccatgcgggaatca

SEQ ID NO: 256196 - DNA, 75 bp, synthetic construct
  source 1..75: mol_type = other DNA
tgatcctgaatatgcccgccgcctggtcggtaacagagcattcaagaacatagaaattggtaacgccagagggga

SEQ ID NO: 256197 - DNA, 75 bp, synthetic construct
  source 1..75: mol_type = other DNA
aagcgccgcatgaaatcacctttaaccttgatggcgaaccattaagtggccaacgttttcatatagaaatacttc

SEQ ID NO: 256198 - DNA, 75 bp, synthetic construct
  source 1..75: mol_type = other DNA
ctggacagagatgttggtgcttatatagatgaggtaagaaaaccgtccgggccaacgacatgggatattgaatgg

SEQ ID NO: 256199 - DNA, 75 bp, synthetic construct
  source 1..75: mol_type = other DNA
gcttctctgtaccagaaaacaccaagattctgatcggtgaagtgaccgttgttgatgaaagcgaaccgttcgcac

SEQ ID NO: 256200 - DNA, 75 bp, synthetic construct
  source 1..75: mol_type = other DNA
atggctgttactaatgtcgctgaacttaacgcactcgtagagcgtgtaaaaaaagcccagcgtgaatatgccagt

SEQ ID NO: 256201 - DNA, 75 bp, synthetic construct
  source 1..75: mol_type = other DNA
agtaaggtgttatcgcttctggaaagcagtaaacgatatctctggcacggtaatgttgccactgcactggatcgc

SEQ ID NO: 256202 - DNA, 75 bp, synthetic construct
  source 1..75: mol_type = other DNA
gttgctactgctgcatggtctacttcattgggtaataactggggtgtaactgcttcaaactatccagtaactgac

SEQ ID NO: 256203 - DNA, 75 bp, synthetic construct
  source 1..75: mol_type = other DNA
gctgggtcggatcatcggctgtttctgtaactggcaagcgatggatgcgtgaggctatgcaagcgttaaaagttg

SEQ ID NO: 256204 - DNA, 75 bp, synthetic construct
  source 1..75: mol_type = other DNA
gtatcatgtgcttcagcccggaggtctccgtaagacactttctcacgatgcattaatggctgtttattctggtta

SEQ ID NO: 256205 - DNA, 75 bp, synthetic construct
  source 1..75: mol_type = other DNA
gggttaaaaactggctgagcatttacgggcgtctgacctgcggcgttctggctcaaagaatgaatatgccgccat

SEQ ID NO: 256206 - DNA, 75 bp, synthetic construct
  source 1..75: mol_type = other DNA
gtgattgatgcaaaaattctgaacggtgtcagtacattattacgcgcttacggccgtctgacctgtggtgttctg

SEQ ID NO: 256207 - DNA, 75 bp, synthetic construct
  source 1..75: mol_type = other DNA
ggctggaatatcaccgaccacgtcctgcgctatctcattcttgattattcaccagttccggcggaaacacaggaa

SEQ ID NO: 256208 - DNA, 75 bp, synthetic construct
  source 1..75: mol_type = other DNA
tccttgagtaaaagacttgcaactgttagtgatgaaaaaattactccaatcgaactttatcggttcatgggcgaa

SEQ ID NO: 256209 - DNA, 75 bp, synthetic construct
  source 1..75: mol_type = other DNA
tcctcttaaaaaaagaactgacagacattaatgaatatatagaaacaaatactgaatataagaagtttttaaaag

SEQ ID NO: 256210 - DNA, 75 bp, synthetic construct
  source 1..75: mol_type = other DNA
tgccttctgatttggatgaaatccacaagttagagcgctttggctggcctgtcgctgacatcgcccaaaagctgg

SEQ ID NO: 256211 - DNA, 75 bp, synthetic construct
  source 1..75: mol_type = other DNA
tgaaacggtattagctatcgcccattcccgctttagcaatgcccaaacgcacccgatgccgaaagctgttaaagc

SEQ ID NO: 256212 - DNA, 75 bp, synthetic construct
  source 1..75: mol_type = other DNA
tgaaaacagcaagaatgaaccaactgtaagtgataaacttgaaaatttgaaagcgatagttaattacaaggatat

SEQ ID NO: 256213 - DNA, 75 bp, synthetic construct
  source 1..75: mol_type = other DNA
agtttactttgacaaaaatggagacattccacaaatccctattaacaatatcaaaaaggatgttttaaaagaaca

SEQ ID NO: 256214 - DNA, 75 bp, synthetic construct
  source 1..75: mol_type = other DNA
aacaactaaaagcgatgctggcaaaacacggcattcgccatgacaccacggtcattctgtacgggcgtgacgtat

SEQ ID NO: 256215 - DNA, 75 bp, synthetic construct
  source 1..75: mol_type = other DNA
cggtgccggagatattccggacaacctttctcctttctatgaagcattgcaggaacagaagcccgatctttctgc

SEQ ID NO: 256216 - DNA, 75 bp, synthetic construct
  source 1..75: mol_type = other DNA
tcactgtcgtacccgcgcatttctgcgcagaccagtgtcagcaaaacctgccattttttctctggtgaggcgatt

SEQ ID NO: 256217 - DNA, 75 bp, synthetic construct
  source 1..75: mol_type = other DNA
caacaaaatggcaaagcgatagatactcgccccagcgcgttttataacggctggccacaaaccttaaatggccct

SEQ ID NO: 256218 - DNA, 75 bp, synthetic construct
  source 1..75: mol_type = other DNA
acgcacgcgccatgggttggaagaatgtttccgtgtatgacggcggctggtacgaatggagcagcgatccaaaaa

SEQ ID NO: 256219 - DNA, 75 bp, synthetic construct
  source 1..75: mol_type = other DNA
aaagcatggaatatcaaaccagatcagcaagtttcattctactgcggcaccggctggcgcgcgtccgaaaccttt

SEQ ID NO: 256220 - DNA, 75 bp, synthetic construct
  source 1..75: mol_type = other DNA
cggctgctcaagcgctgcgcctgatgcgtaatcgctggagctatcccgatattttagaagacgttaacgcgcgat

SEQ ID NO: 256221 - DNA, 75 bp, synthetic construct
  source 1..75: mol_type = other DNA
ctccttgctggaatatgcgcgggaaaaactaaatggcctcgatgtagaggtttatcactggaatctgcaaaactt

SEQ ID NO: 256222 - DNA, 75 bp, synthetic construct
  source 1..75: mol_type = other DNA
ctgaccgaggatgatgccgatttgatggctatcgttcgggatcgtctggaaaacccacaggcgggcgtaaaggtg

SEQ ID NO: 256223 - DNA, 75 bp, synthetic construct
  source 1..75: mol_type = other DNA
ttagtagtggtgcagtacttgtatcaaaacatggctactgcaagcactcatatgcgtttaagccgtgtgataatt

SEQ ID NO: 256224 - DNA, 75 bp, synthetic construct
  source 1..75: mol_type = other DNA
ccgtctatgtcggcacctaccataaatataactgcggcagcattgctggtaagtggtttgatttaaccgattttg

SEQ ID NO: 256225 - DNA, 75 bp, synthetic construct
  source 1..75: mol_type = other DNA
ctgccgggcgttgcatgccgccgaggatgaccccgagtttatgtttcaggactgggaagggatcccgtctcagtt

SEQ ID NO: 256226 - DNA, 75 bp, synthetic construct
  source 1..75: mol_type = other DNA
gtcctcgctttccttctcgctccagctctttgctggaatatgcgcgggaaaaattgaatggcctggatgtggaag

SEQ ID NO: 256227 - DNA, 75 bp, synthetic construct
  source 1..75: mol_type = other DNA
tgcgtacccactattgcataagaatgttgaaaaattgctcgtttctgggctgtgtgttaaactcgccgcccccga

SEQ ID NO: 256228 - DNA, 75 bp, synthetic construct
  source 1..75: mol_type = other DNA
gctaaggttaagaccattaatgatgcctatactttctttaacagagaacgtcatggcctgtttcatatggagata

SEQ ID NO: 256229 - DNA, 75 bp, synthetic construct
  source 1..75: mol_type = other DNA
gttcttatgctgtttccagcaaagataattatacgcttacatttgagtgcgatgttggatttaataatacggatc

SEQ ID NO: 256230 - DNA, 75 bp, synthetic construct
  source 1..75: mol_type = other DNA
aggattatgctaaaaagaaagcagaaatcgataaataccggactgataacaaactggtagataaatccaaagcat

SEQ ID NO: 256231 - DNA, 75 bp, synthetic construct
  source 1..75: mol_type = other DNA
cattggtgataaagcggatagcagaaagatgaacggtgacaactcgatatcaataggtaaatcttcctctatcgg

SEQ ID NO: 256232 - DNA, 75 bp, synthetic construct
  source 1..75: mol_type = other DNA
caatcctgctgaatttgagcaggtaaatatggtactgcaaggatttgtagagacaagcgttctacctgtacttga

SEQ ID NO: 256233 - DNA, 75 bp, synthetic construct
  source 1..75: mol_type = other DNA
agaattggttgagagcgatcaaaactggcgggtgatttatcaggatccgcgcaccagtacgccggggctgggtct

SEQ ID NO: 256234 - DNA, 75 bp, synthetic construct
  source 1..75: mol_type = other DNA
ctgactctggttccaggcacggcgtattacgctatacaacctgactcgcgccggatcaatggtatcgcgccgctt

SEQ ID NO: 256235 - DNA, 75 bp, synthetic construct
  source 1..75: mol_type = other DNA
ataacaaccgccagatagcaccagcgatttcctgcccagagatacgtaatatctccacaccatacccggtctggc

SEQ ID NO: 256236 - DNA, 75 bp, synthetic construct
  source 1..75: mol_type = other DNA
atcgacaacaaagtggtccgcgtaccttatgttggcgtagataaagacaacctggctgaattcagcaagaaataa

SEQ ID NO: 256237 - DNA, 75 bp, synthetic construct
  source 1..75: mol_type = other DNA
tggctgaaggatctttctcatacgggcaggcggttgctgtcataacagcttaccgcaatgtgtttatccagaatg

SEQ ID NO: 256238 - DNA, 75 bp, synthetic construct
  source 1..75: mol_type = other DNA
tggcgggtgatttatcaggatccgcgcaccagcacgccggggctgggtctgctgttgtggatgcaaaaagtctat

SEQ ID NO: 256239 - DNA, 75 bp, synthetic construct
  source 1..75: mol_type = other DNA
tcgttcggaaagcgatctggcacaaagcctggacactctacaactgccgccgggcgtaacaatgggctatcgctc

SEQ ID NO: 256240 - DNA, 75 bp, synthetic construct
  source 1..75: mol_type = other DNA
tcagccgggaattgcaacgtcgccagttcagtctgacgttgagcgagcaattcaccggtggtttattggcgttgc

SEQ ID NO: 256241 - DNA, 75 bp, synthetic construct
  source 1..75: mol_type = other DNA
tcatgaagcctggctgcaagagatggaacgctatttccgcgaacgtgggcgcgtgatggcgtcgagtaaccgcaa

SEQ ID NO: 256242 - DNA, 75 bp, synthetic construct
  source 1..75: mol_type = other DNA
tggttaaacggccaggacatcgccagtgagcatggctggattgaggttgttgagtccatgaccttatccgtctga

SEQ ID NO: 256243 - DNA, 75 bp, synthetic construct
  source 1..75: mol_type = other DNA
atctcaactttgcgctagccacgccagatggcactttagctctgcgtgtgcgtttcagcactacacgctatagcc

SEQ ID NO: 256244 - DNA, 75 bp, synthetic construct
  source 1..75: mol_type = other DNA
gggtgatggcaccgagcaaccgtaaacaagcggagctacctgccagtgcagaatttatcaataacccggtaggca

SEQ ID NO: 256245 - DNA, 75 bp, synthetic construct
  source 1..75: mol_type = other DNA
actccaaagagtccggcattattcagggcgatttgattgctaaacactgggcggcgaatcagggttgggatctga

SEQ ID NO: 256246 - DNA, 75 bp, synthetic construct
  source 1..75: mol_type = other DNA
acaacaacaagttggtacacaaattgcgatgcaacgaattgtgttcccggttgattctcctagtttaaagcttga

SEQ ID NO: 256247 - DNA, 75 bp, synthetic construct
  source 1..75: mol_type = other DNA
gcagcagttggtgccattgatggccgtgtcacccgtaacacgcaatccattgagaaaaacagcaaggcgattgca

SEQ ID NO: 256248 - DNA, 75 bp, synthetic construct
  source 1..75: mol_type = other DNA
tggtattccagatccgttacatgacggtgagatgttggcggtattgttgctttctgatgctgttacttataaggg

SEQ ID NO: 256249 - DNA, 75 bp, synthetic construct
  source 1..75: mol_type = other DNA
gttttacttaatgaattcggcaaactcaacaagaatgtaaatcaactgaaaaatgccactacatttgcccttgat

SEQ ID NO: 256250 - DNA, 75 bp, synthetic construct
  source 1..75: mol_type = other DNA
gggtgtgggttaccgcttcaacgagcagaccgcagcgaaagcaggcgtggcattcagtgatggcgatgcctcctg

SEQ ID NO: 256251 - DNA, 75 bp, synthetic construct
  source 1..75: mol_type = other DNA
gcaggcactggcagtgggtgtgggttaccgcttcaacgagcagaccgcagcgaaagcaggcgtggcattcagtga

SEQ ID NO: 256252 - DNA, 75 bp, synthetic construct
  source 1..75: mol_type = other DNA
ggtttaggaacggcggatcatagcgccctggcgtgctactacgaaaaactggcgaaagtcgaagttactcgttaa

SEQ ID NO: 256253 - DNA, 75 bp, synthetic construct
  source 1..75: mol_type = other DNA
atggctgtcacaacagcttaccgcaatgtgcttattgaagatgatcagggaacgcatttccggctggttatccac

SEQ ID NO: 256254 - DNA, 75 bp, synthetic construct
  source 1..75: mol_type = other DNA
aacaagtccagcattccggtgtttggcgtcgatgcgctgccagaagcgctggcgctggtgaaatccggtgcactg

SEQ ID NO: 256255 - DNA, 75 bp, synthetic construct
  source 1..75: mol_type = other DNA
cggacagaaacagcgacatattttttgctattccagacccattacatgacggggaaatgctggcggtattgttgg

SEQ ID NO: 256256 - DNA, 75 bp, synthetic construct
  source 1..75: mol_type = other DNA
acgaaaatagcaaagctaattgtcaacgacggatgaaaagtgatccacttatatctccaccaacggcccaatatt

SEQ ID NO: 256257 - DNA, 75 bp, synthetic construct
  source 1..75: mol_type = other DNA
acaggctcttgccgtcacaacggcttaccttaatgtgcttattgaagatgaccagggaacgcatttccggctggt

SEQ ID NO: 256258 - DNA, 75 bp, synthetic construct
  source 1..75: mol_type = other DNA
gattcacctctcgtttctgaagcatatcttgaatacaaagccaaagagtttggtgggtgcaatagcgataaatat

SEQ ID NO: 256259 - DNA, 75 bp, synthetic construct
  source 1..75: mol_type = other DNA
atgtcaggcttgtcggtcatgagctatatcaaaaaacgctgggattaattgggcttggtgcaattggtcagcatg

SEQ ID NO: 256260 - DNA, 75 bp, synthetic construct
  source 1..75: mol_type = other DNA
gacctttcgtgggtaaaggaaagatttatattgaaaacctgcaatctgcgggttatgacgttgaatgtaatacca

SEQ ID NO: 256261 - DNA, 75 bp, synthetic construct
  source 1..75: mol_type = other DNA
ctggttgaactgtttttcgaagagatacgtcgcgctctggaaaacggcgaacaggtgaaactctctggttttggt

SEQ ID NO: 256262 - DNA, 75 bp, synthetic construct
  source 1..75: mol_type = other DNA
gattcacctctcgtttctgaagcatatcttgaattcaaagccaaagagtttggtgggcgcaatagcgatgaatat

SEQ ID NO: 256263 - DNA, 75 bp, synthetic construct
  source 1..75: mol_type = other DNA
cctggcaggatgtggctgaagaggcatttgtcgaaaaaccaccaagagatttgcacgagcactgttggctgacat

SEQ ID NO: 256264 - DNA, 75 bp, synthetic construct
  source 1..75: mol_type = other DNA
gctgcgaagatcatgtgggttatgtacgaacacccggaaactcacttcgaagaactggcgctgcgttttatggac

SEQ ID NO: 256265 - DNA, 75 bp, synthetic construct
  source 1..75: mol_type = other DNA
aaccggtggtcctggcatggttaaagccgcgtacagctccggtaaaccggctatcggcgtaggtgcgggtaacac

SEQ ID NO: 256266 - DNA, 75 bp, synthetic construct
  source 1..75: mol_type = other DNA
taaaaaccacttcgcttcagaatatatctacaacgcgtataaagatgaaaaaacctgcggtattctgtccgaaga

SEQ ID NO: 256267 - DNA, 75 bp, synthetic construct
  source 1..75: mol_type = other DNA
atgacgcggtacgtgagcgtttcgctacccacggcggttacatactgcagggcaaagagctgaaagcagttcagg

SEQ ID NO: 256268 - DNA, 75 bp, synthetic construct
  source 1..75: mol_type = other DNA
catctgggtctgagcgcaccgggcgaccgtactgcggcaaaaatccagaaactgctgggctggctggaagaaatc

SEQ ID NO: 256269 - DNA, 75 bp, synthetic construct
  source 1..75: mol_type = other DNA
aaaccactaagattctgatcggtgaagtgaaggttgtcgacgaaagcgagccgtttgcacacgaaaaactgtctc

SEQ ID NO: 256270 - DNA, 75 bp, synthetic construct
  source 1..75: mol_type = other DNA
acaggtgaaactctctggttttgggaacttcgatctgcgtgataagaatcaacgcccgggacgtaacccgaaaac

SEQ ID NO: 256271 - DNA, 75 bp, synthetic construct
  source 1..75: mol_type = other DNA
atgtaggactggccccctgttttattgcccgaaggccctttctcacgcgaacaggcggttggcgtcacaacagct

SEQ ID NO: 256272 - DNA, 75 bp, synthetic construct
  source 1..75: mol_type = other DNA
gaaggggtaagcctgctgtccaaaccagtttcactcggtttgcgactgttcggtaacatgtatgccggtgagctg

SEQ ID NO: 256273 - DNA, 75 bp, synthetic construct
  source 1..75: mol_type = other DNA
ttctcgctggtggatccgcataaccccccagccaccttctggacaatcaatattgactccatgttcttctcggtg

SEQ ID NO: 256274 - DNA, 75 bp, synthetic construct
  source 1..75: mol_type = other DNA
atggtctggcgtacctggaattttgaggacggtgccgggtactggatgaaccatgtacatcagggatttcgggat

SEQ ID NO: 256275 - DNA, 75 bp, synthetic construct
  source 1..75: mol_type = other DNA
atgtgggactgaccccctgttttattgcccgaaggccctttctcacgcgaacaggcggttggcgtcacaacagct

SEQ ID NO: 256276 - DNA, 75 bp, synthetic construct
  source 1..75: mol_type = other DNA
atgtcggactgccaccctgttttattgcccgaaggccctttctcacgcgaacaggcggttggcgtcacaacagct

SEQ ID NO: 256277 - DNA, 75 bp, synthetic construct
  source 1..75: mol_type = other DNA
gcgtcctggcgtatcgtatcgccccggacgatggtgcactgacattcgccgcagagtcggcgctgccgggtagcc

SEQ ID NO: 256278 - DNA, 75 bp, synthetic construct
  source 1..75: mol_type = other DNA
ggcagaagtggctaccgtcgaaggggctggaccgcgccatatggtattccatccaaacgggcaatacgcatattg

SEQ ID NO: 256279 - DNA, 75 bp, synthetic construct
  source 1..75: mol_type = other DNA
cgcgtctggaagatggcctgccagtgggcgtcgtcgatgtggtcgaggggctggacggttgccattccgccaata

SEQ ID NO: 256280 - DNA, 75 bp, synthetic construct
  source 1..75: mol_type = other DNA
tcgtgttaaccattatacatggctattaagcattttattatttctgtatgctaccacccagcaaaacaataactc

SEQ ID NO: 256281 - DNA, 75 bp, synthetic construct
  source 1..75: mol_type = other DNA
cacgcgagttgagtgtgattgatcgtgagctaaaagcatgtgaagcgcgcattcaggctctgctgaatgaggtgg

SEQ ID NO: 256282 - DNA, 75 bp, synthetic construct
  source 1..75: mol_type = other DNA
tataatgcgggtaacgtgagcgtaacgcgactggaagatggcctgcctgtgggcgttgtcgatgtggttgaggga

SEQ ID NO: 256283 - DNA, 75 bp, synthetic construct
  source 1..75: mol_type = other DNA
ccttcaccgaacaattgcaacaggccgatgggttgattgtcgccacgccagtgtataaagccgcctattccggaa

SEQ ID NO: 256284 - DNA, 75 bp, synthetic construct
  source 1..75: mol_type = other DNA
ttttgtcgggttaatttatcctgtaatatcaatgaaagatgatgtgacacatccaggctccaggaagcaattact

SEQ ID NO: 256285 - DNA, 75 bp, synthetic construct
  source 1..75: mol_type = other DNA
tgtttgacaaggagggaacagcattagcaccattctttttgtctgaaggatatactctctttgttctgacttatc

SEQ ID NO: 256286 - DNA, 75 bp, synthetic construct
  source 1..75: mol_type = other DNA
aagctggtgaacatattggcatatgttcagtctgttctgcacatccgttggttatcgaagcggcgctggcatttg

SEQ ID NO: 256287 - DNA, 75 bp, synthetic construct
  source 1..75: mol_type = other DNA
cgaaataacggatattgtaataaagcccgatacctctgggctttacgaagaattattaatggatcagcttttaga

SEQ ID NO: 256288 - DNA, 75 bp, synthetic construct
  source 1..75: mol_type = other DNA
ttttctgctggggggcatatcgcctcaacgggtggggaatcagattggtgatttcaaacgtacttctgacagtaa

SEQ ID NO: 256289 - DNA, 75 bp, synthetic construct
  source 1..75: mol_type = other DNA
ttttctgctggggggcatatcgcctcaacgggtggggaatcagattagtgatttcaaacgtgcttctgacagtaa

SEQ ID NO: 256290 - DNA, 75 bp, synthetic construct
  source 1..75: mol_type = other DNA
caacaaggatgatgagtctatctacctaccttctggctccatcctgacaggggtgctcatcaacggtatggacgc

SEQ ID NO: 256291 - DNA, 75 bp, synthetic construct
  source 1..75: mol_type = other DNA
ggaaaccaaaaccactgccgggaaatccagtgatgttggccgtgagatgacccgccttcgtcaagatttggaccg

SEQ ID NO: 256292 - DNA, 75 bp, synthetic construct
  source 1..75: mol_type = other DNA
gcttatcgctatgttatgaaacccacactgccagtgcgtcgcgatagcccgaaaaaggctattaccttgattctg

SEQ ID NO: 256293 - DNA, 75 bp, synthetic construct
  source 1..75: mol_type = other DNA
taacgtttacgcagtcaagaaacgaaacgatcatcccagtcgaacagcaaaaattaatctatgtttttgataaat

SEQ ID NO: 256294 - DNA, 75 bp, synthetic construct
  source 1..75: mol_type = other DNA
gctgaatgccgcgggcgaaaccacgcttgaattgcctgccgtcggcggcggcaaaaagctggtgtataccgggaa

SEQ ID NO: 256295 - DNA, 75 bp, synthetic construct
  source 1..75: mol_type = other DNA
gcgcgcggcggtcaaactgatcgaagagaaaaaagtgcaggccgcaaaagtggtaacacatattcttgggctgaa

SEQ ID NO: 256296 - DNA, 75 bp, synthetic construct
  source 1..75: mol_type = other DNA
gacattggatgaattcaggaagaacgagcctgctacttattggcactttcatcaaacaggggaaaatttaatata

SEQ ID NO: 256297 - DNA, 75 bp, synthetic construct
  source 1..75: mol_type = other DNA
acactattaactaacggtgtgctatccgtttccggaaaagtgagaaatattgtcaacatgaagctggcgcaccca

SEQ ID NO: 256298 - DNA, 75 bp, synthetic construct
  source 1..75: mol_type = other DNA
tggcgcgccaatatccggcaaaccaaaagtatgggttgttgtctggcggcaacgatgtatccactcgcccactga

SEQ ID NO: 256299 - DNA, 75 bp, synthetic construct
  source 1..75: mol_type = other DNA
ggcgaaatggtattaagcgaagcattaacgcctgttctggccgccagcttgcgcgctaaccgtgccactactgaa

SEQ ID NO: 256300 - DNA, 75 bp, synthetic construct
  source 1..75: mol_type = other DNA
catggtgtgcttctgttcaccatggagatggcgaacatccagattggtgaacgtatggtgtctgcggctggaggg

SEQ ID NO: 256301 - DNA, 75 bp, synthetic construct
  source 1..75: mol_type = other DNA
atgataatgaaacagataaagaaactaccataatcgtagccgacggtgcttttgattcggtcgctactcacatgg

SEQ ID NO: 256302 - DNA, 75 bp, synthetic construct
  source 1..75: mol_type = other DNA
agtccgaagagagtttctaaggagtaccgttgtcaaagtcacacgggtatgaatacgggcaacacgatgagtgct

SEQ ID NO: 256303 - DNA, 75 bp, synthetic construct
  source 1..75: mol_type = other DNA
ctctggaagatgatgagctggatctggtggcatttggtgtgccctacatcgctaacccggatctggttgaaagaa

SEQ ID NO: 256304 - DNA, 75 bp, synthetic construct
  source 1..75: mol_type = other DNA
tgccgtggctgacgcggtgggtaacagccacgttgccgtgcgcctttctcccttcggccgtatttatgacctcgc

SEQ ID NO: 256305 - DNA, 75 bp, synthetic construct
  source 1..75: mol_type = other DNA
aatcatctgggaattcctttatcaaatattgatataattattgacttaagagatgagttaaccgaggataaactt

SEQ ID NO: 256306 - DNA, 75 bp, synthetic construct
  source 1..75: mol_type = other DNA
taacccctgttctggccgccagcctgcgtgctaaccgcgccacgactgaacgcgacgtcaaccagttaacgccgc

SEQ ID NO: 256307 - DNA, 75 bp, synthetic construct
  source 1..75: mol_type = other DNA
atgagtaatcaggaaccggctactatcctgctgatcgacgatcacccgatgctgcgaactggcgtaaaacagctt

SEQ ID NO: 256308 - DNA, 75 bp, synthetic construct
  source 1..75: mol_type = other DNA
aagtgaccgtaccacgtactacggcgtcagtggttctccggaaaaaggctataccgattatccggtctggcaggc

SEQ ID NO: 256309 - DNA, 75 bp, synthetic construct
  source 1..75: mol_type = other DNA
gcagtagaaatgcaatatctgccgggtcagggtctgcaatcttaccagttaatgaccaaaatctggtctaacgac

SEQ ID NO: 256310 - DNA, 75 bp, synthetic construct
  source 1..75: mol_type = other DNA
gaccgataacactgcgttgccgaaagcagtagaaatgcaatatctgccggggcagggtctgcaatcttaccagtt

SEQ ID NO: 256311 - DNA, 75 bp, synthetic construct
  source 1..75: mol_type = other DNA
cgacgatcaatgtgaaacgtttctgctggcgttaaaacgtggtagcggccctgcagggctttcggctatggcgga

SEQ ID NO: 256312 - DNA, 75 bp, synthetic construct
  source 1..75: mol_type = other DNA
gaagcttctcatccttccccgcatgggcagaatatttgattgcggattcgtttgagaattccggggcttttgaaa

SEQ ID NO: 256313 - DNA, 75 bp, synthetic construct
  source 1..75: mol_type = other DNA
ctgacgctcgagccgaaccttagtcgaagcttctcatccttccccgcatgggcagaatatttgattgcggattcg

SEQ ID NO: 256314 - DNA, 75 bp, synthetic construct
  source 1..75: mol_type = other DNA
tgcaggttctgcattagcagtacaaaaagatatcactgttactgctaacgttgatgctgctctggatatgacgca

SEQ ID NO: 256315 - DNA, 75 bp, synthetic construct
  source 1..75: mol_type = other DNA
cctacgatcgtaactttctgcgcttgcatgtggtgccgttattgcagcagcgttggccgcattttaccgaagcaa

SEQ ID NO: 256316 - DNA, 75 bp, synthetic construct
  source 1..75: mol_type = other DNA
accgatgccttcccgcgacgcgttggtgaggatctggcaggaagtggcgctggcgcgggaagatgcttccccctg

SEQ ID NO: 256317 - DNA, 75 bp, synthetic construct
  source 1..75: mol_type = other DNA
taataaaatttatgcatatgcaatgaataatgccatttcattctctaaaatcatcaatgaagatataaagaatga

SEQ ID NO: 256318 - DNA, 75 bp, synthetic construct
  source 1..75: mol_type = other DNA
cactctgcgcgctatccatgtgcatcacggtttaagtgccaatgccgacgcctgggttacgcattgcgaaaacat

SEQ ID NO: 256319 - DNA, 75 bp, synthetic construct
  source 1..75: mol_type = other DNA
tgcgggaggagatattcgtcctccgcgtgctgacgaagcggttagcgttcgttttaaggcgtcgggattgctgca

SEQ ID NO: 256320 - DNA, 75 bp, synthetic construct
  source 1..75: mol_type = other DNA
gtgcagacgaagcggtcagcgtgcgtttcaaagcgccaggattgctgcatattgtcgggcgcaacggcggacgta

SEQ ID NO: 256321 - DNA, 75 bp, synthetic construct
  source 1..75: mol_type = other DNA
ctggcgctcgagtcgaaccttagtcaaagcttctcatccttccccgcatgggcagaatattcagttacggattcg

SEQ ID NO: 256322 - DNA, 75 bp, synthetic construct
  source 1..75: mol_type = other DNA
gattgatttgattgatttactggtccaactatggcgcggcaagatgactatcatcatttctgtcattgtggctat

SEQ ID NO: 256323 - DNA, 75 bp, synthetic construct
  source 1..75: mol_type = other DNA
ccgggcaaaactatgatccggaacaaattgatttaattgacttattaatgcagttgtggcgtggcaagatgacaa

SEQ ID NO: 256324 - DNA, 75 bp, synthetic construct
  source 1..75: mol_type = other DNA
tacattcagcaagttgatgataaagtgaatcaagagctagaaaaggatctcaaggacaacattgctctgggacgg

SEQ ID NO: 256325 - DNA, 75 bp, synthetic construct
  source 1..75: mol_type = other DNA
ctgggcaaaaccatgacccggaacagattgatttgattgatttactggtccaactatggcgcggcaagatgacta

SEQ ID NO: 256326 - DNA, 75 bp, synthetic construct
  source 1..75: mol_type = other DNA
aaaagagctgcgtattcgtcaaattcaggaagcgttgcagtatgcgaatcaggcacaggtgacaaagccgcagat

SEQ ID NO: 256327 - DNA, 75 bp, synthetic construct
  source 1..75: mol_type = other DNA
ctgggcacaacaatgacccggaacagattgatttaattgatttactggtacaactgtggcgcggtaagatgacca

SEQ ID NO: 256328 - DNA, 75 bp, synthetic construct
  source 1..75: mol_type = other DNA
gtttggtaattcagccttactgcgtcatcattttcaccagcgttttttattatccccttcacaatatcggaaaaa

SEQ ID NO: 256329 - DNA, 75 bp, synthetic construct
  source 1..75: mol_type = other DNA
gttaggcgcattattcgactttttacagcaaaatctggcacaaacgcataccgttgcctctctcgccggacgagt

SEQ ID NO: 256330 - DNA, 75 bp, synthetic construct
  source 1..75: mol_type = other DNA
aaagcaaccacccactggcgctacacggaacaactccagcatcgttacccttcaattcacgtaagtgacaatgtg

SEQ ID NO: 256331 - DNA, 75 bp, synthetic construct
  source 1..75: mol_type = other DNA
gcagtgctgctgggcggtatggtgggcgcagggattgtgttggggcgtaacgctctgcgtaattataacgcgaaa

SEQ ID NO: 256332 - DNA, 75 bp, synthetic construct
  source 1..75: mol_type = other DNA
atgcactggagtcgatggttaagcatgaagcgagccgtccgttggtgttctcgtcaacctactatcagactcgtc

SEQ ID NO: 256333 - DNA, 75 bp, synthetic construct
  source 1..75: mol_type = other DNA
tggctattgccctggctattggttatttggcagtagcgaaggagaaatggacgtcaacagcaattatcactcagc

SEQ ID NO: 256334 - DNA, 75 bp, synthetic construct
  source 1..75: mol_type = other DNA
cttctttaggaggctaccgaaaaggctgaataaatatggtctggagttgcattgtgacaaatcacaattaattcc

SEQ ID NO: 256335 - DNA, 75 bp, synthetic construct
  source 1..75: mol_type = other DNA
gctaaccagtcgggaaacgcctgcctacgtttaattttctgggattcacatgctactggggtaaaacacgaaaag

SEQ ID NO: 256336 - DNA, 75 bp, synthetic construct
  source 1..75: mol_type = other DNA
gtcgttttctcaggctggtcgaggtctcaataacggcacctgttatcagggggaaagagatatcagagaatgaac

SEQ ID NO: 256337 - DNA, 75 bp, synthetic construct
  source 1..75: mol_type = other DNA
ggaaaacgaaaacaacggatgaaaagatacatacattcaatacagctacgctcaatgatgcgtttaaagttgtag

SEQ ID NO: 256338 - DNA, 75 bp, synthetic construct
  source 1..75: mol_type = other DNA
aacttcggagatggtccatttgaattaaaaaatacaggatggggaacctatactactattggttatcaattttaa

SEQ ID NO: 256339 - DNA, 75 bp, synthetic construct
  source 1..75: mol_type = other DNA
gaaagatcgtttcgcagccaaactaaagggcctcagagatttcctctggagaaacctgaatgcccccaataaaag

SEQ ID NO: 256340 - DNA, 75 bp, synthetic construct
  source 1..75: mol_type = other DNA
atggtatcgactggtttttcaatttcctatacgtcaagtttcaatcaacatcaacaacccaatggaaaaatattg

SEQ ID NO: 256341 - DNA, 75 bp, synthetic construct
  source 1..75: mol_type = other DNA
tagcagggttatcgttactaatggttcttactgtatatattattaagtatattctttatgcgaataaaaaaacta

SEQ ID NO: 256342 - DNA, 75 bp, synthetic construct
  source 1..75: mol_type = other DNA
caaccgaagtttgcgtaaccaccaccgtgcgcgaagcaaatgatcgtggctatgaatgcattatcccggaagatt

SEQ ID NO: 256343 - DNA, 75 bp, synthetic construct
  source 1..75: mol_type = other DNA
aagtacgcgaataatctacagatggtttaatcgtaaaggtgtgcgtcgccgaatgacgtggaaaacgctgaatat

SEQ ID NO: 256344 - DNA, 75 bp, synthetic construct
  source 1..75: mol_type = other DNA
cagccgcgcagaatcgccgttgggcgagccggaatggggcatctcgcaaacgccgcaggtctggatagatcatct

SEQ ID NO: 256345 - DNA, 75 bp, synthetic construct
  source 1..75: mol_type = other DNA
aattgatcgtccgtccgggttaacacgagtgatggatctggcctccaggcatcccgaatggcatcagtatgtaag

SEQ ID NO: 256346 - DNA, 75 bp, synthetic construct
  source 1..75: mol_type = other DNA
agttcaaaccagacgtcgtgctggttcacggcgacacaacgacgacgctggcaaccagcctggcggcgttttatc

SEQ ID NO: 256347 - DNA, 75 bp, synthetic construct
  source 1..75: mol_type = other DNA
cgccagccgttgaccgaaatagagatgatcgctgcaatggctgcgaatgcagttcagcagcaaaagcggattcat

SEQ ID NO: 256348 - DNA, 75 bp, synthetic construct
  source 1..75: mol_type = other DNA
acccgctggtctttgtccccagcgggtgcatgtccggaactaataaaagttgaaatcccccctatggggcaattg

SEQ ID NO: 256349 - DNA, 75 bp, synthetic construct
  source 1..75: mol_type = other DNA
agagaatatgaattttttcataaaagcaggtgcctgtactgtgaaaatcagtttcttatgaataaaaatccggat

SEQ ID NO: 256350 - DNA, 75 bp, synthetic construct
  source 1..75: mol_type = other DNA
gtcctcgctttccttctcgctccagctccttgctggaatatgcgcgggaaaaactgaatggcctggatgtagagg

SEQ ID NO: 256351 - DNA, 75 bp, synthetic construct
  source 1..75: mol_type = other DNA
cttttaccgaacagctgcaacaggccgatgggttaattgtcgccacacctgtgtataaggccgcctattccggag

SEQ ID NO: 256352 - DNA, 75 bp, synthetic construct
  source 1..75: mol_type = other DNA
cgtaccgtttgattacggctatttcgccttcgtctatgacaagaacaaactgaaaaatccgccgcaaagcctgaa

SEQ ID NO: 256353 - DNA, 75 bp, synthetic construct
  source 1..75: mol_type = other DNA
cgtcaggggattgaatctgctcaggcgggaatgcttgcccgtaaggttgcagccgcacaggccgggtacatgggc

SEQ ID NO: 256354 - DNA, 75 bp, synthetic construct
  source 1..75: mol_type = other DNA
caacaaatgaccagaacacggaattgcagcgtaatgcgctggagtgtgcaggatgtgagctgattttgaggataa

SEQ ID NO: 256355 - DNA, 75 bp, synthetic construct
  source 1..75: mol_type = other DNA
tggggcatgtgaaaaatgtcattctgatcgatccccaggagtatttaccgtttgtctggctgatgaaccacgcct

SEQ ID NO: 256356 - DNA, 75 bp, synthetic construct
  source 1..75: mol_type = other DNA
gtggtgtacattaccggccaatccggttccggcaaatccgttgtgctgcgcgagctgcaacaccagatgaaggat

SEQ ID NO: 256357 - DNA, 75 bp, synthetic construct
  source 1..75: mol_type = other DNA
ttctggatacttcaggttcgatgcacggagaacctatagaggctgtaaaaaatggtgttcagacccttctgacca

SEQ ID NO: 256358 - DNA, 75 bp, synthetic construct
  source 1..75: mol_type = other DNA
gcaaccgcgatagccggtgttcgcaaaggtgaaaacgacatcgccatcggtaatatcattagcgcgaatattttt

SEQ ID NO: 256359 - DNA, 75 bp, synthetic construct
  source 1..75: mol_type = other DNA
ttgatgaactggacgcaaaaacaggcggcatggagcccggcgacctggtatttattgctgctcgtccttcgatgg

SEQ ID NO: 256360 - DNA, 75 bp, synthetic construct
  source 1..75: mol_type = other DNA
tcacgcctgaaatctgtcactcactttgaagacgaagactgggcacgtttctcacaaggagtggggcggatgacc

SEQ ID NO: 256361 - DNA, 75 bp, synthetic construct
  source 1..75: mol_type = other DNA
acctgtgaagcagctgaagatgccctgaaggatgcgcagaacatgatggcctcattgtcgacggaaaagggcatt

SEQ ID NO: 256362 - DNA, 75 bp, synthetic construct
  source 1..75: mol_type = other DNA
atgcgcaacaacgaaacaccacctgattaaacatccggaaacggcgctggtggtggttgattatctcggactgat

SEQ ID NO: 256363 - DNA, 75 bp, synthetic construct
  source 1..75: mol_type = other DNA
ggaaaaccgaacttgcgctggatatcatcgacaaggtgactgagcaggggcatggcgtgcttctgttcaccatgg

SEQ ID NO: 256364 - DNA, 75 bp, synthetic construct
  source 1..75: mol_type = other DNA
aaatctcaaaggggcttaaaggcctggcaaaatccggtggttttccgttgattgcgctgagccagctctcccgcg

SEQ ID NO: 256365 - DNA, 75 bp, synthetic construct
  source 1..75: mol_type = other DNA
atgacaactccagtatggcgtaacgatgaccttgaaggcgctgtcatcggcgcgttctttctgcgcggagcagat

SEQ ID NO: 256366 - DNA, 75 bp, synthetic construct
  source 1..75: mol_type = other DNA
cgtgctgctgtgcaatgagatgccggaacttgccccggtgattaccgacaccggacgcaaaacctgggtgaagtc

SEQ ID NO: 256367 - DNA, 75 bp, synthetic construct
  source 1..75: mol_type = other DNA
tcccatgaagcccggcaatccgcgcagatacagtaataaacgaactgacagcagtaagatggagcgtttcttttg

SEQ ID NO: 256368 - DNA, 75 bp, synthetic construct
  source 1..75: mol_type = other DNA
cgctggttctttccacaccaatgcagccgtccaagccgcgcaggtacagtaacaaacgaactgacagcagtaaga

SEQ ID NO: 256369 - DNA, 75 bp, synthetic construct
  source 1..75: mol_type = other DNA
ctgatgaccggacgcaatatctggatggtggaccaggcgaacctgaccattgacgagatatgcgcaacaacgaaa

SEQ ID NO: 256370 - DNA, 75 bp, synthetic construct
  source 1..75: mol_type = other DNA
tggtggttgattatctcgggctgataaaaacccgaaccacggggcgtcatgaccttgccgtgggtgaaatctcaa

SEQ ID NO: 256371 - DNA, 75 bp, synthetic construct
  source 1..75: mol_type = other DNA
atgtgtatccaccttaacttaatgatttttaccaaaatcattaggggattcatcagtgctgagtatgtccgcctg

SEQ ID NO: 256372 - DNA, 75 bp, synthetic construct
  source 1..75: mol_type = other DNA
cccaatgcagcagccccagccgcgcagatacagcaacaaacgaactgacagcagtaagatggagcgtttcttttg

SEQ ID NO: 256373 - DNA, 75 bp, synthetic construct
  source 1..75: mol_type = other DNA
ctcagacctgaaaaactccggagaaatagaggcggatgcagacatcattctgatgctttacagggatgaagtgta

SEQ ID NO: 256374 - DNA, 75 bp, synthetic construct
  source 1..75: mol_type = other DNA
gaccttgccgtgggtgaaatctcaaaggggcttaaaggcctggcaaaatccggcggattaccggtggttgcgctg

SEQ ID NO: 256375 - DNA, 75 bp, synthetic construct
  source 1..75: mol_type = other DNA
gtttcctgccgaacccgcactgggatcccaaactgcgtccgatgaccggtcttgataagcccgtcgccgcattcc

SEQ ID NO: 256376 - DNA, 75 bp, synthetic construct
  source 1..75: mol_type = other DNA
cttgagctatggttacctatgctggaaaccaacaaccgtagctacctgacggtcgccattggttgtaccggcggg

SEQ ID NO: 256377 - DNA, 75 bp, synthetic construct
  source 1..75: mol_type = other DNA
gcgagaggcatagcagaaatcaacatcacgaaacagcgtaatggcacgctcgggaccatttaccggcgttttcat

SEQ ID NO: 256378 - DNA, 75 bp, synthetic construct
  source 1..75: mol_type = other DNA
tttgaagatttttttattgccgttgatccgaaaaccgatctcagcgccgtcactcgcccgcgtgcgttaccgtta

SEQ ID NO: 256379 - DNA, 75 bp, synthetic construct
  source 1..75: mol_type = other DNA
acctatatggatgcgttaagccgccgtgagagtagcgatgaagaacgttgcgccaggtttatccttgcccatgcg

SEQ ID NO: 256380 - DNA, 75 bp, synthetic construct
  source 1..75: mol_type = other DNA
ttacctggacgaaatctacggtggaacatttaccgcaactcatttacagaaacttgtaacgcgtcttgagagtgc

SEQ ID NO: 256381 - DNA, 75 bp, synthetic construct
  source 1..75: mol_type = other DNA
ggcgtaatgatgacctggaaggtgcagtgattggcgcgttttttctgcgtggtgctgatccggaagtgatggata

SEQ ID NO: 256382 - DNA, 75 bp, synthetic construct
  source 1..75: mol_type = other DNA
gcagctgaagatgccctgaaggatgcgcagaacatgatggtcacactgtcgacaggaaagggcgtcattcagccg

SEQ ID NO: 256383 - DNA, 75 bp, synthetic construct
  source 1..75: mol_type = other DNA
ttaacgccattccagatgcgcgatcattcaacgcgtcatttatggaccacctttagcgacgatcaaattgacctc

SEQ ID NO: 256384 - DNA, 75 bp, synthetic construct
  source 1..75: mol_type = other DNA
ggcttaggtattccggcaataacccggagtaaaaacattgctgacagttggttatcaaagggctggtatgttcag

SEQ ID NO: 256385 - DNA, 75 bp, synthetic construct
  source 1..75: mol_type = other DNA
acaaatataatatcacatgggagaaatgctagtaatgaatttaatataaaaactattattcatacttcgaaagaa

SEQ ID NO: 256386 - DNA, 75 bp, synthetic construct
  source 1..75: mol_type = other DNA
atataggtgtgttaatattgattgcatgaaaaaagtcaaagaactcgttgagatttttgagtccaacatcaaata

SEQ ID NO: 256387 - DNA, 75 bp, synthetic construct
  source 1..75: mol_type = other DNA
ttattaatattacttaccgttatcaacattctggcgggtgtatatctgaacaaactgttaaggacaaaacaatga

SEQ ID NO: 256388 - DNA, 75 bp, synthetic construct
  source 1..75: mol_type = other DNA
cggtgcgctggcgggtgtttcccgcgtaactatctggagcgatgtcgccggggtatacagcgccgacccgcgcaa

SEQ ID NO: 256389 - DNA, 75 bp, synthetic construct
  source 1..75: mol_type = other DNA
tttcggcacgtaccggctttgagtttgtgctggcaggtgtggtggacagccgccgcagcctgttgagctatgacg

SEQ ID NO: 256390 - DNA, 75 bp, synthetic construct
  source 1..75: mol_type = other DNA
aaccattatccatacttcagaagaatatccttgcacaaaaaataccacatatccaaacatttatgctcacttcac

SEQ ID NO: 256391 - DNA, 75 bp, synthetic construct
  source 1..75: mol_type = other DNA
aaaaaggacaactttctggcgttatcaaatcctcggtgggtttcttgattgtgcgtctggatgatgttcagccag

SEQ ID NO: 256392 - DNA, 75 bp, synthetic construct
  source 1..75: mol_type = other DNA
ataacagccgctataacagcatcctcaaccaaatggggatgagcgccgatcaatacgcgcaagcattacgcaatc

SEQ ID NO: 256393 - DNA, 75 bp, synthetic construct
  source 1..75: mol_type = other DNA
caaatcttcggtgggtttcttgatcgtgcgtctggacgatattcagcctgcgaaagtgaagtcgttagacgaagt

SEQ ID NO: 256394 - DNA, 75 bp, synthetic construct
  source 1..75: mol_type = other DNA
atgcaggactttaataactctaagggattctacatgaaaaaagacgatctaattacgcgttgtaaattacttaaa

SEQ ID NO: 256395 - DNA, 75 bp, synthetic construct
  source 1..75: mol_type = other DNA
gtagagttaataaacaacggcgttaaacagtttgctcttgcagataaatcattaggacataaaagaggcatgatt

SEQ ID NO: 256396 - DNA, 75 bp, synthetic construct
  source 1..75: mol_type = other DNA
atgaatttttttccgcacatgaatctcctgacatcagcaatatatcaaaagatgaggctgtattctcatggaggt

SEQ ID NO: 256397 - DNA, 75 bp, synthetic construct
  source 1..75: mol_type = other DNA
atcagcgggatcttctccggcacgctctcctggctgttcctgcaattcgacggtagcgtgccgtttaccgagctg

SEQ ID NO: 256398 - DNA, 75 bp, synthetic construct
  source 1..75: mol_type = other DNA
ggcaaccgcctgtttcaggggattgaagacggcgcgtacttttactttgttcacagctacgcaatgccggtcaat

SEQ ID NO: 256399 - DNA, 75 bp, synthetic construct
  source 1..75: mol_type = other DNA
atctgcttagggatgcaactgctggggcggcgcagcgaagagagcaacggcgtcgatttgctgggcatcatcgac

SEQ ID NO: 256400 - DNA, 75 bp, synthetic construct
  source 1..75: mol_type = other DNA
agcgtgagttgtttgatctcatcaaagcctgtacccaaccggtgctgggcatctgcctggggatgcaactgcttg

SEQ ID NO: 256401 - DNA, 75 bp, synthetic construct
  source 1..75: mol_type = other DNA
tggtgttacaggtgggcaaggggattttttcgcgtcctcacagccacttgatactaacgtgaaaaaatattcaca

SEQ ID NO: 256402 - DNA, 75 bp, synthetic construct
  source 1..75: mol_type = other DNA
tcttaagcgcccgctggtccgcaatgtatggtcactcttctctgccactgatggtgttaggcctggcggtgatgg

SEQ ID NO: 256403 - DNA, 75 bp, synthetic construct
  source 1..75: mol_type = other DNA
atctgtttaggaatgcaactgctggggcgacgcagcgaagagagtaacggcgtcgatttgctgggcatcatcgac

SEQ ID NO: 256404 - DNA, 75 bp, synthetic construct
  source 1..75: mol_type = other DNA
ctgcttgattgagtttcaggtgtccgccagccaggatttcaaactggcgcataaagagatcgaccagatcctgaa

SEQ ID NO: 256405 - DNA, 75 bp, synthetic construct
  source 1..75: mol_type = other DNA
gttccgactattccgccacccaaatcggtgcgctggcaggcgtttcccgcgtaactatctggagcgacgtcgccg

SEQ ID NO: 256406 - DNA, 75 bp, synthetic construct
  source 1..75: mol_type = other DNA
acgtgctcaggtgcgtccgctggcagttggcgtgcataacgatcgccagttgctgcaattttgctatacctccga

SEQ ID NO: 256407 - DNA, 75 bp, synthetic construct
  source 1..75: mol_type = other DNA
gcagtcgtagcgcagagagcaacggcgtcgacatgttggggattatcgaccaggcggtgccgaaaatgaccgact

SEQ ID NO: 256408 - DNA, 75 bp, synthetic construct
  source 1..75: mol_type = other DNA
atgaacgtggtgatccttgataccggctgcgccaatctgaactcagtgaggtcagccattgcgcgtcacggctat

SEQ ID NO: 256409 - DNA, 75 bp, synthetic construct
  source 1..75: mol_type = other DNA
gtctgccattgcgcgccacggttatgaacccaaagtcagccgtgacccggacgtcgtgttgctggccgataaact

SEQ ID NO: 256410 - DNA, 75 bp, synthetic construct
  source 1..75: mol_type = other DNA
gatagaagctattgaattggcaaccctcaatcgaaatcacttagtgcatcgtggtggaaaggataaagaagggaa

SEQ ID NO: 256411 - DNA, 75 bp, synthetic construct
  source 1..75: mol_type = other DNA
gtggcagtactgcgcaccggcccgaccgaaagcctgattcaggggctgcatcagtccgtcttccgcgcagaaaaa

SEQ ID NO: 256412 - DNA, 75 bp, synthetic construct
  source 1..75: mol_type = other DNA
ccagcaaaatattgaagcgcattacggtaaatcgcttcatgaagttgtcggtattgtgacgccttttagcgctca

SEQ ID NO: 256413 - DNA, 75 bp, synthetic construct
  source 1..75: mol_type = other DNA
tccgatgacggcatcagcctggtggcagtactgcgcaccggcccgaccgaaagcctgattcaggggctgcatcag

SEQ ID NO: 256414 - DNA, 75 bp, synthetic construct
  source 1..75: mol_type = other DNA
ttcattcgctgaatttcgttatacgccctgatgttgaaggtggctatgttaatgatcctgccgaccgtggcggcg

SEQ ID NO: 256415 - DNA, 75 bp, synthetic construct
  source 1..75: mol_type = other DNA
tttaacccgcgaacaggttgcgcagatttactggcgcgattactggctgcctgccggatgtgaccagtggcctga

SEQ ID NO: 256416 - DNA, 75 bp, synthetic construct
  source 1..75: mol_type = other DNA
atcaaggccgagaagcaggacttcatcaaaacggtgatcccgcagtgggaagagcaggcacgtaaaaacggtctg

SEQ ID NO: 256417 - DNA, 75 bp, synthetic construct
  source 1..75: mol_type = other DNA
atgcggctcgcgcgatggaagccattggtaaaccttttgagaaagccggacgtttcgaccagcaatcgatggttt

SEQ ID NO: 256418 - DNA, 75 bp, synthetic construct
  source 1..75: mol_type = other DNA
atgccgaacgtgcaatgaatgctattggcaagccgtttgaaaaaggtgggcgcttcgatcagcaatcgatggtct

SEQ ID NO: 256419 - DNA, 75 bp, synthetic construct
  source 1..75: mol_type = other DNA
tgaaatcgttcttaaagaacagcaggcggttcaggagtggcagaggctggcatttgatttagggtatgagggcga

SEQ ID NO: 256420 - DNA, 75 bp, synthetic construct
  source 1..75: mol_type = other DNA
aaaaccacgctggtgctttctatcatcgccacgcagtgggccagagcggctctcgaaaaatctgagcctccggtt

SEQ ID NO: 256421 - DNA, 75 bp, synthetic construct
  source 1..75: mol_type = other DNA
tgccgctcttcaatcgcttcgcctcgcgagaggttcatgctgcagagtctttgctggcccctggagcaaaattca

SEQ ID NO: 256422 - DNA, 75 bp, synthetic construct
  source 1..75: mol_type = other DNA
cgggttacgacatcgaaccagatcaggtgcgcgtggaatcgctggtgcctgcccattgcgaaggcggtagcatcg

SEQ ID NO: 256423 - DNA, 75 bp, synthetic construct
  source 1..75: mol_type = other DNA
cgatgccaacggcaaagcgcgtgtgggcgtggaagcggtgcgtgaagaccatccgctggcatcactactgccatg

SEQ ID NO: 256424 - DNA, 75 bp, synthetic construct
  source 1..75: mol_type = other DNA
tattcatccttatttaacctgcaacttaacatctgttgatgactatcttttccagcttccggcagaacaggttta

SEQ ID NO: 256425 - DNA, 75 bp, synthetic construct
  source 1..75: mol_type = other DNA
gccaaagaaaaatctgccgatattatctctgcccgtaacggcggcgatatgggttggttagaagatgccactatc

SEQ ID NO: 256426 - DNA, 75 bp, synthetic construct
  source 1..75: mol_type = other DNA
aaagaataagtttagtaaaattttccctcagcagtattgggctgatgatgagttttttattgagtatagtaataa

SEQ ID NO: 256427 - DNA, 75 bp, synthetic construct
  source 1..75: mol_type = other DNA
tttagtggtgctggacgttaccgccagccagcagctcgctgaccagtatcttgatttcgccagccacggtttcca

SEQ ID NO: 256428 - DNA, 75 bp, synthetic construct
  source 1..75: mol_type = other DNA
ttagccaaatcgaagcctcgctcaaccgtgcccagcaaagcgccagaaccagcgtcagcgagcgctactactttg

SEQ ID NO: 256429 - DNA, 75 bp, synthetic construct
  source 1..75: mol_type = other DNA
gaggggatgaatattcatcatgttgctcatcgttatactgtaccacgtggtaagacaagcagtgtcagcgagctg

SEQ ID NO: 256430 - DNA, 75 bp, synthetic construct
  source 1..75: mol_type = other DNA
taatgactaccgcgccgctcacgggggcgattggctttatcattcttatgctcttcctggcggtacgctggttac

SEQ ID NO: 256431 - DNA, 75 bp, synthetic construct
  source 1..75: mol_type = other DNA
ttccagctaccggcaaatcaggtttatgccgttgataagcacgccaatccgacaacgcttcaccacgttgacgag

SEQ ID NO: 256432 - DNA, 75 bp, synthetic construct
  source 1..75: mol_type = other DNA
cattacctcacccccacccgcgcccagccgagagatacggcagcacttgtcgggcaataccgtgaggagaaaatc

SEQ ID NO: 256433 - DNA, 75 bp, synthetic construct
  source 1..75: mol_type = other DNA
cattacctcacacccgctcgcgcccagccgcgagatacagcgacgctggttgggcaataccgtgaggagaaaacc

SEQ ID NO: 256434 - DNA, 75 bp, synthetic construct
  source 1..75: mol_type = other DNA
atcggcctgatggtgccattatgttcgccacgcgcatcaatggttacgtgaaaattcgcggcgttcgtgtttcac

SEQ ID NO: 256435 - DNA, 75 bp, synthetic construct
  source 1..75: mol_type = other DNA
cgatggtgaactgtatgctcaggtcgcattttcagcagcgcccgaacaaggattccgcgcggggggcacggcgta

SEQ ID NO: 256436 - DNA, 75 bp, synthetic construct
  source 1..75: mol_type = other DNA
agccagctgcctctgcagctgaccggtgaagcgaaacaggcggacctcattttatatgcccgtttacctgcgcag

SEQ ID NO: 256437 - DNA, 75 bp, synthetic construct
  source 1..75: mol_type = other DNA
ggcgacggcgcaggcgctggtcacgctgccggtttcgctcatcggttatcttgtcgcctgttactggctgaatac

SEQ ID NO: 256438 - DNA, 75 bp, synthetic construct
  source 1..75: mol_type = other DNA
atctggcgcgccagctggcgtcgcgaaacgcaaaccagcccgtgctgccgctgatcctcactaactgtctggcgt

SEQ ID NO: 256439 - DNA, 75 bp, synthetic construct
  source 1..75: mol_type = other DNA
acgacgcggtcacgccgtcgcgtttgccctggcaacgaccgctgagcgaaataacgcgccccgaatggcgacgtg

SEQ ID NO: 256440 - DNA, 75 bp, synthetic construct
  source 1..75: mol_type = other DNA
ttaccggcggggagagtttcgcggagattgcccgtcgcccgggagggacggtggtgatgctctgcctgaaccccg

SEQ ID NO: 256441 - DNA, 75 bp, synthetic construct
  source 1..75: mol_type = other DNA
tgtcagccggaacggcggaagggccgtttgctggtcgcaggcagggaaccgccgcgcatctgtttgtggcggtgc

SEQ ID NO: 256442 - DNA, 75 bp, synthetic construct
  source 1..75: mol_type = other DNA
ggcagaaatcaccgactatttccaaaacgtcagcaacggaagtattctctatggctcttcagttgtatcatgaca

SEQ ID NO: 256443 - DNA, 75 bp, synthetic construct
  source 1..75: mol_type = other DNA
gctgaaagggcaacaacttacagtcagcgaactggatgtcgccgcgtttgaaaatcagccgccggtaaaactggt

SEQ ID NO: 256444 - DNA, 75 bp, synthetic construct
  source 1..75: mol_type = other DNA
actccgcagacgaaaatgagtgaaattaaaaccggcgacaaagtggcgtttaattttgtccagcagggcaacctt

SEQ ID NO: 256445 - DNA, 75 bp, synthetic construct
  source 1..75: mol_type = other DNA
agcaaaaaaatcaccatccatcacgatccgattgctgctgtgaactggccggagatgaccatgcgctttaccatc

SEQ ID NO: 256446 - DNA, 75 bp, synthetic construct
  source 1..75: mol_type = other DNA
agcaaatgccaccgctaatgacgctgagcggtatcgcgctgttagtggtcggcgtggtgattgcagtcagagcaa

SEQ ID NO: 256447 - DNA, 75 bp, synthetic construct
  source 1..75: mol_type = other DNA
atgcggtagacctggtaaggcaatcgaaggagtcaggccagcatattaccgatgttattgctcagggggatatgt

SEQ ID NO: 256448 - DNA, 75 bp, synthetic construct
  source 1..75: mol_type = other DNA
acctgtggcgatcgcggtatcgacaacgacttccgtgatgtaaacgactggcagttcttcaaaggtgcgcagaag

SEQ ID NO: 256449 - DNA, 75 bp, synthetic construct
  source 1..75: mol_type = other DNA
tttcaaaggcattatgtttgggatatcaaacgagcatcaaaactcattgaatctcttttaataggccttcctata

SEQ ID NO: 256450 - DNA, 75 bp, synthetic construct
  source 1..75: mol_type = other DNA
ggtttggattgtaccaacccttatgtcatttgtaatgaacaacaccgctttatagttgctgaacagcttagaaaa

SEQ ID NO: 256451 - DNA, 75 bp, synthetic construct
  source 1..75: mol_type = other DNA
tatgcaaatctaaatggtgttgttgctgtcaatttgaacgatgaaaatgcaagtgcactgtggcacgagctgggt

SEQ ID NO: 256452 - DNA, 75 bp, synthetic construct
  source 1..75: mol_type = other DNA
tgaacatgcgaccgaattcggcatacgacctgaaaaggttgaatcaatgacggctccggtactggtgcgccgccg

SEQ ID NO: 256453 - DNA, 75 bp, synthetic construct
  source 1..75: mol_type = other DNA
atgcgcaagcttatcgtgcctacacattatctcaacacacgtaggccggataagatgcgccatgaactgaacccc

SEQ ID NO: 256454 - DNA, 75 bp, synthetic construct
  source 1..75: mol_type = other DNA
tcgtcgcttgttactggctgaatacgcaaacgccggacttctccctaccttttggcccccgtccgcttgtatttg

SEQ ID NO: 256455 - DNA, 75 bp, synthetic construct
  source 1..75: mol_type = other DNA
tcggcctggcgtgtgtgaatattgctgagttaaaccacggactccccgattttgactgggcacgttatacctctg

SEQ ID NO: 256456 - DNA, 75 bp, synthetic construct
  source 1..75: mol_type = other DNA
taattggagcaaccccatccctgtatctcccctcaggaagtataggagtccgtgcagctgaatgtgaggacttcg

SEQ ID NO: 256457 - DNA, 75 bp, synthetic construct
  source 1..75: mol_type = other DNA
ttccgctcgccatacagagacagggtaattggagcaaccccatccctgtatctcccctcaggaagtataggagtc

SEQ ID NO: 256458 - DNA, 75 bp, synthetic construct
  source 1..75: mol_type = other DNA
acagaaaggctgtgtcattggtagtggaagccggatacagtcgcacacgtttatttgtgagaacgtaacactggg

SEQ ID NO: 256459 - DNA, 75 bp, synthetic construct
  source 1..75: mol_type = other DNA
gcatatcaggaaaaacagcttaatgcggaagaaccttcatttaaggaagcattttctatgaatgactatcggatg

SEQ ID NO: 256460 - DNA, 75 bp, synthetic construct
  source 1..75: mol_type = other DNA
gtgagccactaccagaaacagatcaatgcctataagcaggagctgctgaccaaaacgggcattcgtgatgttcag

SEQ ID NO: 256461 - DNA, 75 bp, synthetic construct
  source 1..75: mol_type = other DNA
tttatccttgaaaagcgtcttgttatagatattatgattataagggaagcggatggaaatttatatgatgtggtg

SEQ ID NO: 256462 - DNA, 75 bp, synthetic construct
  source 1..75: mol_type = other DNA
tatttgattggtcaggatccatcgcgcatcaatgacttatggcaagtgatgtatcgcgccggattttatcgtggc

SEQ ID NO: 256463 - DNA, 75 bp, synthetic construct
  source 1..75: mol_type = other DNA
gctgcccccccctgaacgtggaaagaaaagcccgcgcatcgctgcgtttattccgcgacggcgtgcggaattttt

SEQ ID NO: 256464 - DNA, 75 bp, synthetic construct
  source 1..75: mol_type = other DNA
gtggaatacggtaacaagctggagagcaagcttcgtcaggacaaccagacgatgaaagaccttattgatcaagtc

SEQ ID NO: 256465 - DNA, 75 bp, synthetic construct
  source 1..75: mol_type = other DNA
taaccgagcctgatccgcgtgacgacctctccggcaaagacgtaatgcgcaagctggtgattctggcgcgtgaag

SEQ ID NO: 256466 - DNA, 75 bp, synthetic construct
  source 1..75: mol_type = other DNA
gaaacggtgctgctggggcgtaacggttccgactattccgcgacacaaatcggtgcgctggcgggtgtttctcgt

SEQ ID NO: 256467 - DNA, 75 bp, synthetic construct
  source 1..75: mol_type = other DNA
ttcagttaagacgttgctcaacactcgacacacttgaaaagattattgaaaaaaaccaaaactgcctcccccctt

SEQ ID NO: 256468 - DNA, 75 bp, synthetic construct
  source 1..75: mol_type = other DNA
ttggcgttgacagccgatgcgttatggggggcgattattggttacggcacattcgctgtcatttactgggggtat

SEQ ID NO: 256469 - DNA, 75 bp, synthetic construct
  source 1..75: mol_type = other DNA
tgtgctggcaggcgtggtggacagccgccgcagtctgttgagctatgacgggctggacgccagccgcgcgttagc

SEQ ID NO: 256470 - DNA, 75 bp, synthetic construct
  source 1..75: mol_type = other DNA
ctgcttgattgagtttcaggtgcccgccagtcaggatttcaaactggcgcataaagagatcgaccagatcctgaa

SEQ ID NO: 256471 - DNA, 75 bp, synthetic construct
  source 1..75: mol_type = other DNA
ggcacaaattcgtgaagcttttggcaatcagattgagtttggtcttgatttccacggtcgcgtcagcgcgccgat

SEQ ID NO: 256472 - DNA, 75 bp, synthetic construct
  source 1..75: mol_type = other DNA
gtaaccacagatgacaggaactgggaattacgttactcagcttctgcacttcgttttaacttaagccgggccgta

SEQ ID NO: 256473 - DNA, 75 bp, synthetic construct
  source 1..75: mol_type = other DNA
ataagggctccggtctgaccccagctcaggcactggataaactcgacgcgctgtatgagcaatctgtagtcgcat

SEQ ID NO: 256474 - DNA, 75 bp, synthetic construct
  source 1..75: mol_type = other DNA
ttgagcaaactgcgccaaatatacatgttatgttcaagtcttcattaaatcagaacactgaacatcaactgcgtt

SEQ ID NO: 256475 - DNA, 75 bp, synthetic construct
  source 1..75: mol_type = other DNA
gtcattgatggctccgagttaacgcttgatcgctcaatgagcgccgggctaacgcgttatttcccgacaacagag

SEQ ID NO: 256476 - DNA, 75 bp, synthetic construct
  source 1..75: mol_type = other DNA
atgctaaaaccatctgcgatcatctggcggtgctacgcccggatgtctggctgatgattggtcactgcggtggat

SEQ ID NO: 256477 - DNA, 75 bp, synthetic construct
  source 1..75: mol_type = other DNA
gcaattgatatggaaagtgcaaccattgccgcgcaaggatatcgtttccgcgtgccatacgggacactactgtgt

SEQ ID NO: 256478 - DNA, 75 bp, synthetic construct
  source 1..75: mol_type = other DNA
tccggtgcagcgtagccgactggatgtctggcggcattttcttcagccggcaggcgtcagcccgtcactgaaaag

SEQ ID NO: 256479 - DNA, 75 bp, synthetic construct
  source 1..75: mol_type = other DNA
ccgggatcgaccaggcgttatgggatatcaaaggtaaagtgctgaatgcgccggtctggcaactgatgggcggcc

SEQ ID NO: 256480 - DNA, 75 bp, synthetic construct
  source 1..75: mol_type = other DNA
cttcaaactgaacggttgtgaagaactggggctaattgataactcccgcgcggtagatgcggcggtcaacaccgt

SEQ ID NO: 256481 - DNA, 75 bp, synthetic construct
  source 1..75: mol_type = other DNA
tcgccagcgaaacgctgttaatttatccggtgcagcgtagccgactggatgtctggcgccattttcttcagccag

SEQ ID NO: 256482 - DNA, 75 bp, synthetic construct
  source 1..75: mol_type = other DNA
tctgccgtttgtgaagagcgcggagcgacccacttacgatgcacccacagtgaggccaggatcaccagcgcgcct

SEQ ID NO: 256483 - DNA, 75 bp, synthetic construct
  source 1..75: mol_type = other DNA
caggcgtcagcccgtcactgaaaagcgtcgataacaccttattgttgattcagatggttgccgcgcggatgggta

SEQ ID NO: 256484 - DNA, 75 bp, synthetic construct
  source 1..75: mol_type = other DNA
gatcaatatctctcctggaaagccacctcggaacagtcagagcgtgttgacgccctggcggaagatccacggctg

SEQ ID NO: 256485 - DNA, 75 bp, synthetic construct
  source 1..75: mol_type = other DNA
atgacaagtcaaagcgtactgcctccgaacgcaataacccctgagagggcgcttgaggttgttttatctcacgtc

SEQ ID NO: 256486 - DNA, 75 bp, synthetic construct
  source 1..75: mol_type = other DNA
agagatgatcaaacgcagcggtcgcaccacggttccgcagatttttattgacgcacagcacattggcggctgtga

SEQ ID NO: 256487 - DNA, 75 bp, synthetic construct
  source 1..75: mol_type = other DNA
tacccgacacaacgtacgaccagcggccacagccgcatcacggcggcatttgtccggcctgccggatgaatgccg

SEQ ID NO: 256488 - DNA, 75 bp, synthetic construct
  source 1..75: mol_type = other DNA
gcagattatctgaaaatacagaaaactggcaggcaggaactaatgtttatcactacctgccgctaagtcaggcac

SEQ ID NO: 256489 - DNA, 75 bp, synthetic construct
  source 1..75: mol_type = other DNA
taaaaattaacggcgggctatatatatcaggctcgccaattgtgagtttgttagtggagataggacctaatggct

SEQ ID NO: 256490 - DNA, 75 bp, synthetic construct
  source 1..75: mol_type = other DNA
catttattgcacaaatatttgatgcaaaaaattgtcgttcattattaaaggaaataaatttcgaaacaggtgttg

SEQ ID NO: 256491 - DNA, 75 bp, synthetic construct
  source 1..75: mol_type = other DNA
atttaagtgatgaaaaaggcggaactctagttgcgcgatcatcaaacttatacgaagggaagtttaagtatggtg

SEQ ID NO: 256492 - DNA, 75 bp, synthetic construct
  source 1..75: mol_type = other DNA
taagtgatgaaaaaggcggaactctagttgcgcgatcatcaaacttatacgaagggaagtttaagtatggtgaaa

SEQ ID NO: 256493 - DNA, 75 bp, synthetic construct
  source 1..75: mol_type = other DNA
gtttgatggcagagtcatctatacagataccattatctgtcctccaggtgacgaacatattgaagccgtcattcg

SEQ ID NO: 256494 - DNA, 75 bp, synthetic construct
  source 1..75: mol_type = other DNA
tcgagcccggccggaacataacgaccgcaacagaagcctgccgccactacctggaacagcacctgccgttcacca

SEQ ID NO: 256495 - DNA, 75 bp, synthetic construct
  source 1..75: mol_type = other DNA
tgagtccgtcagcgacgacagcgacgacgtcggtcccggatacgctgcaacagcttgcggcatatttacaaacct

SEQ ID NO: 256496 - DNA, 75 bp, synthetic construct
  source 1..75: mol_type = other DNA
ttcctttgaaggtggtttggagtattgtcatcatgatggaatcataagccctgcttatacggtgttaaaaactaa

SEQ ID NO: 256497 - DNA, 75 bp, synthetic construct
  source 1..75: mol_type = other DNA
cactacctgccgctaagtcaggcactggaacctgttgctacatgtaatctaccgaagcctgtccggtggggattc

SEQ ID NO: 256498 - DNA, 75 bp, synthetic construct
  source 1..75: mol_type = other DNA
ttactcaaggtacgctccagcaggacgcacttaacatctgtgagaatgtggtccgcaccattaactctaagatgg

SEQ ID NO: 256499 - DNA, 75 bp, synthetic construct
  source 1..75: mol_type = other DNA
gtccgtaccatcaacgctcgcatggtcgacgttctggagtcctccaaactgttgaagaccgtagagcttccggtc

SEQ ID NO: 256500 - DNA, 75 bp, synthetic construct
  source 1..75: mol_type = other DNA
aggcagacactatcatggacgcgctgtttagaacaccgagtcctctttcggctctgaagtgtctgattacggcat

SEQ ID NO: 256501 - DNA, 75 bp, synthetic construct
  source 1..75: mol_type = other DNA
tcattttgaaactagcgcagtgtaatttactccgttaccttcctgagattttggaagaggatccgcgaggcatct

SEQ ID NO: 256502 - DNA, 75 bp, synthetic construct
  source 1..75: mol_type = other DNA
gctctttcaaacgctggcgctgcaatgtgcgaatgtatcttttcccatactcgtgagttttacgattaccttgcc

SEQ ID NO: 256503 - DNA, 75 bp, synthetic construct
  source 1..75: mol_type = other DNA
atgctaacgcgactatcgaaagtctccgcgctgatgtttctgctggtcgtaagcgcctgcaagtcgccgccacct

SEQ ID NO: 256504 - DNA, 75 bp, synthetic construct
  source 1..75: mol_type = other DNA
atgactatgactaaagacgctttccagttcggcattgagcctgttcgtatcaccgacaccgacaaccttcagatt

SEQ ID NO: 256505 - DNA, 75 bp, synthetic construct
  source 1..75: mol_type = other DNA
ctgactggtagcctgacagctaaggcagacactatcatggacgcgctgtatgagaacaccgagtcttctttcggt

SEQ ID NO: 256506 - DNA, 75 bp, synthetic construct
  source 1..75: mol_type = other DNA
accgttccgtctggacaagaaatcgtggtcgaaccaatcgagcaggctattctcatctctgagcagaccaagctc

SEQ ID NO: 256507 - DNA, 75 bp, synthetic construct
  source 1..75: mol_type = other DNA
atgaccatgacaaaagacgctttacagtttggcattgagccagttcgcattactgatactgacaacattcaggta

SEQ ID NO: 256508 - DNA, 75 bp, synthetic construct
  source 1..75: mol_type = other DNA
gctgctacgaccatcaagatggggactggctcggctactgctgtcctgcctgtagtcaaacgcctgagcttcact

SEQ ID NO: 256509 - DNA, 75 bp, synthetic construct
  source 1..75: mol_type = other DNA
ataacattccattcccgattgagattctgccaactcgcaatagcttaccgaccccaatcattgctcacactctgg

SEQ ID NO: 256510 - DNA, 75 bp, synthetic construct
  source 1..75: mol_type = other DNA
gttgagaccgtgctcgccgcaaatccgggactggctgaactgggtgcggtgctgccacacggcaccgccgtcgaa

SEQ ID NO: 256511 - DNA, 75 bp, synthetic construct
  source 1..75: mol_type = other DNA
ccgcacggcaccgccgtcgaactgcccgacgttcagaccgcgcccgtggctgaaactgtcaatctgtgggagtaa

SEQ ID NO: 256512 - DNA, 75 bp, synthetic construct
  source 1..75: mol_type = other DNA
gtgttgatgccgcacaggcgacgcttaaacaggcacaatggcaactggcgcaaacggaaattcgcgctccggtga

SEQ ID NO: 256513 - DNA, 75 bp, synthetic construct
  source 1..75: mol_type = other DNA
cactgcattcacgtcaggacccaatgcaggagagcccattttatgtaagcgtaaactgaccgccgtatgtagcca

SEQ ID NO: 256514 - DNA, 75 bp, synthetic construct
  source 1..75: mol_type = other DNA
atttttctcggggcgagtgtgggcggacgatagtgcaccagaaaaaagagaaatagccgtctggcgacaatgtct

SEQ ID NO: 256515 - DNA, 75 bp, synthetic construct
  source 1..75: mol_type = other DNA
aaatagccgtctggcggcaatgcttttttctcttacccgcgctattaaccctggttgggcgtttttttagtctca

SEQ ID NO: 256516 - DNA, 75 bp, synthetic construct
  source 1..75: mol_type = other DNA
tctatagatcaaggggctggctatttgcagttttttgacaactacacaattacatccttaacggaccaaacatgg

SEQ ID NO: 256517 - DNA, 75 bp, synthetic construct
  source 1..75: mol_type = other DNA
tgcagttttttaacaactacacagttacatccttaactgaccaaacatggaccggagggggtatcattactgaaa

SEQ ID NO: 256518 - DNA, 75 bp, synthetic construct
  source 1..75: mol_type = other DNA
agtgttagttggagtgcttgataaagctccaatgcctgattttagtagtgccacgatgaatacagggacattacc

SEQ ID NO: 256519 - DNA, 75 bp, synthetic construct
  source 1..75: mol_type = other DNA
atgtcaattaaaaccattaaatatttctcaacaattattgtagcggtttttgcagttcttgccggatggtggcta

SEQ ID NO: 256520 - DNA, 75 bp, synthetic construct
  source 1..75: mol_type = other DNA
agaacaggtttctatcacgccacaggtgtctggacgtattgttgcgatgaatataaaagacaaccagttggttaa

SEQ ID NO: 256521 - DNA, 75 bp, synthetic construct
  source 1..75: mol_type = other DNA
aacaataacaataacaaatctgaattaacacttaaattacaaacactaaatgaaaatgacattagtgttgatgtg

SEQ ID NO: 256522 - DNA, 75 bp, synthetic construct
  source 1..75: mol_type = other DNA
agcttggaccgaaagtgggaagctgaggcagaagaggtgaagcgtcagaataagacttgtaagcggcgacgcaac

SEQ ID NO: 256523 - DNA, 75 bp, synthetic construct
  source 1..75: mol_type = other DNA
ttaactggctcactcgttgtggcgatattttcagcaccgagagcgagtatcttactggactggatcgcgagattg

SEQ ID NO: 256524 - DNA, 75 bp, synthetic construct
  source 1..75: mol_type = other DNA
cgcaacatctggtgatctttcaggaagtcatcagaagtggctctatcggctcggctgcaaaagagttagggctaa

SEQ ID NO: 256525 - DNA, 75 bp, synthetic construct
  source 1..75: mol_type = other DNA
atcaaaactgccaccggatagctgggcacttgtcacttctgcaggcagaatgcttgccgaaaacaggatgaaagc

SEQ ID NO: 256526 - DNA, 75 bp, synthetic construct
  source 1..75: mol_type = other DNA
aaaacagaaagtgcggttcatgctctgtgtgctgcacttcgctacgaattgaacagccaacgttaaaaaagttgg

SEQ ID NO: 256527 - DNA, 75 bp, synthetic construct
  source 1..75: mol_type = other DNA
atttttataccactagcattttttcttgggacgtcctttaaaaatgttgagaacgaatttattagcaagattatc

SEQ ID NO: 256528 - DNA, 75 bp, synthetic construct
  source 1..75: mol_type = other DNA
tattttattagcagtgtatggaatcgttaggtttaatttaaggttgactaaaagtggaaaggcactcttattatt

SEQ ID NO: 256529 - DNA, 75 bp, synthetic construct
  source 1..75: mol_type = other DNA
tgccctttacctctgccgggggtgtgatcagacaggtttggttcatggatttcctgagtctcgcatgaagaaagg

SEQ ID NO: 256530 - DNA, 75 bp, synthetic construct
  source 1..75: mol_type = other DNA
gggctttttctttggttcaacggcctatgacgaggtgtactgggctgatgtggaagacgtcagacgctggctgtc

SEQ ID NO: 256531 - DNA, 75 bp, synthetic construct
  source 1..75: mol_type = other DNA
taatcggcgtttctgtgtttcttgctggttctattatagttgcgctgataaacgtatatatcaagtatttggtgg

SEQ ID NO: 256532 - DNA, 75 bp, synthetic construct
  source 1..75: mol_type = other DNA
tctgctggtcagccacgatgccgatgtcatcgcacatatgtctgaccgtgcggcaatgatgaccggggggaaaat

SEQ ID NO: 256533 - DNA, 75 bp, synthetic construct
  source 1..75: mol_type = other DNA
cgcgccctattattacggccacaacttcttctgctggatgaacccacctcagcactggatatgtcggtacaagcg

SEQ ID NO: 256534 - DNA, 75 bp, synthetic construct
  source 1..75: mol_type = other DNA
gttaatgccggagagacatttagtttaattggcgaatcaggctgcggaaaatccacgattttgcgcgtacttgct

SEQ ID NO: 256535 - DNA, 75 bp, synthetic construct
  source 1..75: mol_type = other DNA
ttccgatggtcaatatcaccgaagtgacccaactgtgggacattgcccaggcacgcgtgtgtgaagtgattgtcg

SEQ ID NO: 256536 - DNA, 75 bp, synthetic construct
  source 1..75: mol_type = other DNA
ctatgtggagcggactgcgtacattttgtacgttgatgatgattggcgcatggagtattgcttcgcaatgggatg

SEQ ID NO: 256537 - DNA, 75 bp, synthetic construct
  source 1..75: mol_type = other DNA
actttcgctattcagctttgtggtcaaatttggcctgatggtccagattagcgatctgtggcaatttttactgtt

SEQ ID NO: 256538 - DNA, 75 bp, synthetic construct
  source 1..75: mol_type = other DNA
cgcaattagctgcgtactctactccgccgtcgcggcaccgtttaagtccttgtcactgctaatgcgcacgctagt

SEQ ID NO: 256539 - DNA, 75 bp, synthetic construct
  source 1..75: mol_type = other DNA
aagcctcggacgcatcgcgggtagtttgctgggagccatcgcggcattgcttcttgccggacatacgctcaacga

SEQ ID NO: 256540 - DNA, 75 bp, synthetic construct
  source 1..75: mol_type = other DNA
actgattgtttttatgggatcgtttatcgctgtcactaacccgccagtatataatttcgcagattttcttaatga

SEQ ID NO: 256541 - DNA, 75 bp, synthetic construct
  source 1..75: mol_type = other DNA
ataacagactcgtcagcctgaaaacctggggagatatgaacagggaaccaacagcaaaatttgtcggccaaaata

SEQ ID NO: 256542 - DNA, 75 bp, synthetic construct
  source 1..75: mol_type = other DNA
cctttaaagaagaacatagaagattgcttgattgttcggggcaaaatactaatgatgtcagcaaactgaaagaac

SEQ ID NO: 256543 - DNA, 75 bp, synthetic construct
  source 1..75: mol_type = other DNA
atgctgaagaaaagaaaatgaaatacacagattctattgaattttctggaattcggaataacatcataaatgcag

SEQ ID NO: 256544 - DNA, 75 bp, synthetic construct
  source 1..75: mol_type = other DNA
aagcctcggacgcatcgctggcagtttactgggagccattgcagcactgattcttgccggacatacgctcaacga

SEQ ID NO: 256545 - DNA, 75 bp, synthetic construct
  source 1..75: mol_type = other DNA
gatgatcctgcctagcagttccgatgctacagcccttttaaccgcattgaaaaacatgcacgcccgattactgga

SEQ ID NO: 256546 - DNA, 75 bp, synthetic construct
  source 1..75: mol_type = other DNA
caggaaagatggacgtaaaaggcactggcgctttaactgacatgcccgacaacgttatggcggtctggcgtaata

SEQ ID NO: 256547 - DNA, 75 bp, synthetic construct
  source 1..75: mol_type = other DNA
tacgcagcttggctatgatgccctgtctgttccctttggcggtggcaaaggggccaaacagcagtggattgaata

SEQ ID NO: 256548 - DNA, 75 bp, synthetic construct
  source 1..75: mol_type = other DNA
tcggctgcaaaagaattagggttaactcaaccggccgtcagtaaaatcattaacgatattgaagattattttggt

SEQ ID NO: 256549 - DNA, 75 bp, synthetic construct
  source 1..75: mol_type = other DNA
caatgtgattttcagtcagttggtgaatgaaatcaccaccgagccggattacgacgcagcgctggctgtactgaa

SEQ ID NO: 256550 - DNA, 75 bp, synthetic construct
  source 1..75: mol_type = other DNA
gaaagagcgattgttatattctcgccagtctattcaaaacatgaagacggcgggtttattgatagcgataacagc

SEQ ID NO: 256551 - DNA, 75 bp, synthetic construct
  source 1..75: mol_type = other DNA
gaagagagcaatttaatgcccgcaatgggttatctccatattgatggtaaaggagagctggcaagtagtggaagt

SEQ ID NO: 256552 - DNA, 75 bp, synthetic construct
  source 1..75: mol_type = other DNA
ggcaaacaaggtatcagtacaggcgcgaatgaaaagtcgctcacagtgggcaccgtgcactctcttcagggagcg

SEQ ID NO: 256553 - DNA, 75 bp, synthetic construct
  source 1..75: mol_type = other DNA
cttaactgtaattccttgtgatatgacgtcaccttttggttctaatcaatttattactattccggttgaagaaac

SEQ ID NO: 256554 - DNA, 75 bp, synthetic construct
  source 1..75: mol_type = other DNA
gaaaaaaaataaaagattcccctacagcaaagatcgacatgcgatccaacctttatggagcaaatgtttgatcga

SEQ ID NO: 256555 - DNA, 75 bp, synthetic construct
  source 1..75: mol_type = other DNA
aataatattaaatttcattctctcctggagctcagtaaagataatgagaagcgtctggaaacatttcaaaaatgg

SEQ ID NO: 256556 - DNA, 75 bp, synthetic construct
  source 1..75: mol_type = other DNA
aggctgtcacgaacattatcgaggcgttcgggaaagatttttcccagggcaccggtgcgatggccggacgatggt

SEQ ID NO: 256557 - DNA, 75 bp, synthetic construct
  source 1..75: mol_type = other DNA
aatccgagcaattgaaaagactgaacgcaacatggcaaacgttaagccaggtacgggctgcgcgtgagcttattg

SEQ ID NO: 256558 - DNA, 75 bp, synthetic construct
  source 1..75: mol_type = other DNA
aattatgggacaacgccgaaagggttgcaaagtacctgctgccaaaaggtcacctggaaggcaaagaatggtgtg

SEQ ID NO: 256559 - DNA, 75 bp, synthetic construct
  source 1..75: mol_type = other DNA
accggaagcagattgactccgcccatgaaatctttcttaaagaacagcaggcggttcaggagtggcagaggctgg

SEQ ID NO: 256560 - DNA, 75 bp, synthetic construct
  source 1..75: mol_type = other DNA
tcaacccgtatgttgccagcgataaagatctctgcgaagaagcggcacaacacggctatctggcaaaagatgcct

SEQ ID NO: 256561 - DNA, 75 bp, synthetic construct
  source 1..75: mol_type = other DNA
ttaaagagctgattgcgcgtgacaaaaaccacccaagcgtggtgatgtggagtattgccaacgaaccggataccc

SEQ ID NO: 256562 - DNA, 75 bp, synthetic construct
  source 1..75: mol_type = other DNA
gaagtcggcggcttttctgcttcaaaaacgctggactggcatgaacttcggtgaaaaaccgcagcggggaggcaa

SEQ ID NO: 256563 - DNA, 75 bp, synthetic construct
  source 1..75: mol_type = other DNA
atggaaagtaaagatcatgcgccagtcattgtcgtcacggaaatcggtaactgtatcgatacatggaatgaggtg

SEQ ID NO: 256564 - DNA, 75 bp, synthetic construct
  source 1..75: mol_type = other DNA
tgtccgtatgacctcctttggtaaacgcgtgatgtggaactggaaatggaatagcgaaaactatccgcaactgga

SEQ ID NO: 256565 - DNA, 75 bp, synthetic construct
  source 1..75: mol_type = other DNA
gttaatgcgcccatcggtaaaccgccggtcttttatcgcgccggtagcgaatgggcggcactgttcgccacgtta

SEQ ID NO: 256566 - DNA, 75 bp, synthetic construct
  source 1..75: mol_type = other DNA
cgaagccgaagccgaagccgaagccgaagccgaagccgaagccgaagccgaagccggacaggatgctccccggaa

SEQ ID NO: 256567 - DNA, 75 bp, synthetic construct
  source 1..75: mol_type = other DNA
aagccgaagccgaagccgtacaggatgcggcccggaaaaagaccggcaataaagctaaacagaaaaaaaaggcgc

SEQ ID NO: 256568 - DNA, 75 bp, synthetic construct
  source 1..75: mol_type = other DNA
gaagccgaagccgaagccgaagccgaagccggacaggatgctccctggaaaaagaccggtaacaaagcgaaacag

SEQ ID NO: 256569 - DNA, 75 bp, synthetic construct
  source 1..75: mol_type = other DNA
tattgccaacgaaccggatacccgtccgcaaggtgcacgggaatatttcgcgccactggcggaagcaacgcgtaa

SEQ ID NO: 256570 - DNA, 75 bp, synthetic construct
  source 1..75: mol_type = other DNA
gcgtatggcagcagcagggcggtaaagcaccggcaatgatggccggtcacagcctgggggaatactccgcgctgg

SEQ ID NO: 256571 - DNA, 75 bp, synthetic construct
  source 1..75: mol_type = other DNA
catccgtgacgcattggtacgtcagttgtataacccggttcagtggacgaagtccgttgaatacatggcagcaca

SEQ ID NO: 256572 - DNA, 75 bp, synthetic construct
  source 1..75: mol_type = other DNA
ggaaaaactgattgtgcattacaaaaacttaccggcatcagcgccactgtttacgctgatgtatcaacaagataa

SEQ ID NO: 256573 - DNA, 75 bp, synthetic construct
  source 1..75: mol_type = other DNA
gccacgcttagtgtcaaacttcaacattttgaaaataatgcaaaaaaacgctgccttcttgcagcccgttaccat

SEQ ID NO: 256574 - DNA, 75 bp, synthetic construct
  source 1..75: mol_type = other DNA
ttttaaacgtgtgctggaggcaggcggtatttcgattctgcaaccggatctctcccatgcactgtctcttataca

SEQ ID NO: 256575 - DNA, 75 bp, synthetic construct
  source 1..75: mol_type = other DNA
aacgtgaaaaggatgacccgcaaaactcaacgaccaccgataccggagaaacgccgcgtattgaagggattctcc

SEQ ID NO: 256576 - DNA, 75 bp, synthetic construct
  source 1..75: mol_type = other DNA
tatacaatggttttgatgaaggaaatatcagcctgaaaagctggggagcgatgcaagaggtacagacaacaccag

SEQ ID NO: 256577 - DNA, 75 bp, synthetic construct
  source 1..75: mol_type = other DNA
aatgtatttcattctaattttctcactcaaattgaacgattaaaacctgtccatgtgattattttctcccccttt

SEQ ID NO: 256578 - DNA, 75 bp, synthetic construct
  source 1..75: mol_type = other DNA
agccagccgaatcgctcatggcgttccggttggcggcgagctagaaatggtcgacggcaccacgttgtcacactc

SEQ ID NO: 256579 - DNA, 75 bp, synthetic construct
  source 1..75: mol_type = other DNA
atgcttgaggtggagttacccggtggctcccgtatcacggccctgccggcaaatcccgacacggcacgtgggttt

SEQ ID NO: 256580 - DNA, 75 bp, synthetic construct
  source 1..75: mol_type = other DNA
atacgggtgggatgcttgggagctctatgccctccatgagggtgtaagtccagaacttgcatcgcttggccgaag

SEQ ID NO: 256581 - DNA, 75 bp, synthetic construct
  source 1..75: mol_type = other DNA
ccattgtcgtcatggtaatcggtgcttacaccaacgcatgggatgaggtgcttttcggtattgaagaagagggga

SEQ ID NO: 256582 - DNA, 75 bp, synthetic construct
  source 1..75: mol_type = other DNA
tatcaaaggcaaagtgctgaattcgccggtctggcaactgatgggcggcctggtgcgtgacaaaattaaagccta

SEQ ID NO: 256583 - DNA, 75 bp, synthetic construct
  source 1..75: mol_type = other DNA
tgtcccacgcgggcgggatcacggagtgctttaaaatcgccgcgatggcggagtcttatgacgttgcgctggccc

SEQ ID NO: 256584 - DNA, 75 bp, synthetic construct
  source 1..75: mol_type = other DNA
aacgcagtattggtcaccaggaccccggtgcgacctcggtgatgtttatgatgcaaatgttggcgttagccgcaa

SEQ ID NO: 256585 - DNA, 75 bp, synthetic construct
  source 1..75: mol_type = other DNA
tatcggcgggcgggcgctactaatgcatggtactgaaggtgaagtgtatgctaatccgcagcgctgcccgcagat

SEQ ID NO: 256586 - DNA, 75 bp, synthetic construct
  source 1..75: mol_type = other DNA
tgaaagacctgattgcttacctggaagagaagccagaaatggcggaacatctggcggcggttaaggcctatcgcg

SEQ ID NO: 256587 - DNA, 75 bp, synthetic construct
  source 1..75: mol_type = other DNA
aggacgcgtaatgctggtagatgatgtgatcaccgccggaacggcgattcgcgagtcgatggaaattattcaggc

SEQ ID NO: 256588 - DNA, 75 bp, synthetic construct
  source 1..75: mol_type = other DNA
atttgtcagttttgttgctcgatttaccgaaggtggcaaaacaggtgcaataattgaacgttcgcgatttttgaa

SEQ ID NO: 256589 - DNA, 75 bp, synthetic construct
  source 1..75: mol_type = other DNA
atggactatcgcaaaatcattaaagagatcgggcgcgggaaaaaccacgcacgcgatctggaccaggatacggcg

SEQ ID NO: 256590 - DNA, 75 bp, synthetic construct
  source 1..75: mol_type = other DNA
acgccgcctgcaggcaagccgatgccgattgtcatccccagttacaacggcgcgcgtaaacaggccaacctgacg

SEQ ID NO: 256591 - DNA, 75 bp, synthetic construct
  source 1..75: mol_type = other DNA
ttatgcagtgaactggaacgggcacagcataccgcgcgactggttctcagtgaccgccagctccccgtgcaaatc

SEQ ID NO: 256592 - DNA, 75 bp, synthetic construct
  source 1..75: mol_type = other DNA
gcgaaacacaagcgaatgtcgatggtctgtacagcggtcatgcgcccacccccctgaccgcacgcggtattgagc

SEQ ID NO: 256593 - DNA, 75 bp, synthetic construct
  source 1..75: mol_type = other DNA
ttatgcagtgaactggaacgtgcgcagcataccgcgcggctggttctcagcgatcgtcagctctccctacacacc

SEQ ID NO: 256594 - DNA, 75 bp, synthetic construct
  source 1..75: mol_type = other DNA
gcgagtcgatggagattattcaggccaatggcgcgacgcttgctggcgtattgatttcgcttgatcgtcaggaac

SEQ ID NO: 256595 - DNA, 75 bp, synthetic construct
  source 1..75: mol_type = other DNA
tatccacaatgaaagcgaacgggcgggcggcccctacatcgccgtcaactgccagctatatgccgacagcgtgct

SEQ ID NO: 256596 - DNA, 75 bp, synthetic construct
  source 1..75: mol_type = other DNA
acgtaagctactcacacaggaagaatgggagaagacattcaatctggataatctgattgctccgaagttcgaaca

SEQ ID NO: 256597 - DNA, 75 bp, synthetic construct
  source 1..75: mol_type = other DNA
tggggcatcacgtgaaactggaaattgaaccgggtcgcttcctggtggcgcagtctggcgtgttgattactcagg

SEQ ID NO: 256598 - DNA, 75 bp, synthetic construct
  source 1..75: mol_type = other DNA
atgagtctgttgaatgacgttcagaaattcattgaagcccatccggggtgtacttccggtgacattgcggatgct

SEQ ID NO: 256599 - DNA, 75 bp, synthetic construct
  source 1..75: mol_type = other DNA
atgagtctgtttaatgacgttcagaaattcattgaagcccatccggggtgtacttccggggacattgcggatgct

SEQ ID NO: 256600 - DNA, 75 bp, synthetic construct
  source 1..75: mol_type = other DNA
atgagtcttttcaatgacgttcagaaattcattgaagcccatccggggtgtacttccggcgacattgcggatgct

SEQ ID NO: 256601 - DNA, 75 bp, synthetic construct
  source 1..75: mol_type = other DNA
caggcggaagaactggagtccaggggcttattccgtcgagctgcaacggtgtggatggaggcattccgtgaaagc

SEQ ID NO: 256602 - DNA, 75 bp, synthetic construct
  source 1..75: mol_type = other DNA
ggggtgtacttccggagacattgcggatgcttttgcaggttactcacggcagcgcgttctgcagtcagcaagcaa

SEQ ID NO: 256603 - DNA, 75 bp, synthetic construct
  source 1..75: mol_type = other DNA
atgtcggcactaacgatccccgggtgattttgggcctgactcgccaggcggaaaaactggtcagggagatggcgg

SEQ ID NO: 256604 - DNA, 75 bp, synthetic construct
  source 1..75: mol_type = other DNA
gtgcagcataataagcaggcagaactgattgcgctaagcaatgctgagtctctacaacgccaggagttgagcgac

SEQ ID NO: 256605 - DNA, 75 bp, synthetic construct
  source 1..75: mol_type = other DNA
attatcgttagcggctatctccggtcaggctgtgaaaacgaaggccgatcaacattttaagcagatgctttggga

SEQ ID NO: 256606 - DNA, 75 bp, synthetic construct
  source 1..75: mol_type = other DNA
gccgggggctttctcccttaattgcagcctcctgggagcgatgctgtaagctgatgaaacgggagttatggagca

SEQ ID NO: 256607 - DNA, 75 bp, synthetic construct
  source 1..75: mol_type = other DNA
gaactggcatcgtttaatgaatcgtcagcggtggcttgattactggcagaatatttattcgcgctcgcttagcgt

SEQ ID NO: 256608 - DNA, 75 bp, synthetic construct
  source 1..75: mol_type = other DNA
tggcggcgggatacaatccgcaaacgcatcccgatgacatcgtctttaccgcggatgttatcgatcaggcaacgc

SEQ ID NO: 256609 - DNA, 75 bp, synthetic construct
  source 1..75: mol_type = other DNA
ggagttgagcgacaattttcataccattaaagagaactggcatcgtttaatgaatcgtcagcggtggcttgatta

SEQ ID NO: 256610 - DNA, 75 bp, synthetic construct
  source 1..75: mol_type = other DNA
tggacgaaggtactggagcacaggattgtagtatcacgctaataaataaaccgggtctggtgacctgcttccagt

SEQ ID NO: 256611 - DNA, 75 bp, synthetic construct
  source 1..75: mol_type = other DNA
atgcgcagggtgtcgccactgtggaaattaagcagccacaaggcgtgggtttagtgacgccgctgaatattacgc

SEQ ID NO: 256612 - DNA, 75 bp, synthetic construct
  source 1..75: mol_type = other DNA
cacgctctatggcacatcgcaaccgtctttagtctataccggtactacggatgcgcagggtgtcgccactgtgga

SEQ ID NO: 256613 - DNA, 75 bp, synthetic construct
  source 1..75: mol_type = other DNA
ggaatgaccatagatgcaccatatgaactaataaaaggaagaacagatctttctagaactcaaattcatctatca

SEQ ID NO: 256614 - DNA, 75 bp, synthetic construct
  source 1..75: mol_type = other DNA
caacaaattaccggtcatgtttaccgtcataaccagcccggatacgccactggcaagttactgggggcatatgcc

SEQ ID NO: 256615 - DNA, 75 bp, synthetic construct
  source 1..75: mol_type = other DNA
gggtaacgtcaatcttgtatggggatgggacgcaggctcttctgaagacagggagcgatggtaaagctacgtttg

SEQ ID NO: 256616 - DNA, 75 bp, synthetic construct
  source 1..75: mol_type = other DNA
tacggtaaagcaggatgattctataggcctggtaaccaatgtgtacgctcaggcctatcagtcgagcctggaatc

SEQ ID NO: 256617 - DNA, 75 bp, synthetic construct
  source 1..75: mol_type = other DNA
attacccgcccggatacccatggcacaaaaacgtcgctgaccgccgcgctctattcagacacaacgaaaaaagcg

SEQ ID NO: 256618 - DNA, 75 bp, synthetic construct
  source 1..75: mol_type = other DNA
gctggcgtactactacttttcgctgcatctggatgacggcgttaaccgtaagaatcaaactgacgccgcgtggga

SEQ ID NO: 256619 - DNA, 75 bp, synthetic construct
  source 1..75: mol_type = other DNA
ctcggatgagaaagacgttatttttacggtgatcaccagccccgataccgacaaagcgcggatgtggggacatat

SEQ ID NO: 256620 - DNA, 75 bp, synthetic construct
  source 1..75: mol_type = other DNA
ctattcagacacaacgaaaaaagcgaccctcgataccatttttaccgttgtcaccagcccggacagcaataaagc

SEQ ID NO: 256621 - DNA, 75 bp, synthetic construct
  source 1..75: mol_type = other DNA
ggaagagcgtcttcaaccacctcggcattaatgctgtgcctggtaaaccctcatccagaggcggcttctattgaa

SEQ ID NO: 256622 - DNA, 75 bp, synthetic construct
  source 1..75: mol_type = other DNA
aaccttattgatgaaagcgaatttacccaaaaggctggtgttgcaaccgataatataattgctgttggcatgatg

SEQ ID NO: 256623 - DNA, 75 bp, synthetic construct
  source 1..75: mol_type = other DNA
gttgcgccctttgaaccagaagtcaaacgtcaggctgtcatggcactctgtacacgacaagtatcagccagtgaa

SEQ ID NO: 256624 - DNA, 75 bp, synthetic construct
  source 1..75: mol_type = other DNA
gctgtcatggcactctgtacacgacaagtatcagccagtgaaatcgccaggcgtattggtgtcagtcgtgcggta

SEQ ID NO: 256625 - DNA, 75 bp, synthetic construct
  source 1..75: mol_type = other DNA
gccaaggtcccagccctttccgtaagtgtgaccattaagggggtacgtcagcgatttgtctacggtgttgccgat

SEQ ID NO: 256626 - DNA, 75 bp, synthetic construct
  source 1..75: mol_type = other DNA
atggccttcgaagtggataacgatagctttcccggagcaattgaaggattaaaagccctcaaaatgcgcggaact

SEQ ID NO: 256627 - DNA, 75 bp, synthetic construct
  source 1..75: mol_type = other DNA
cttagaaaaagcgggattgccatttacctatatggcctttgaagtggataacgatagttttcccggagcaattga

SEQ ID NO: 256628 - DNA, 75 bp, synthetic construct
  source 1..75: mol_type = other DNA
aaaacaaagattactgatgccctgagacaaacatatcccctgacagaattactgcgtgttctgggtcttgctgta

SEQ ID NO: 256629 - DNA, 75 bp, synthetic construct
  source 1..75: mol_type = other DNA
actgaaattatttctgaaccgtggctggaggatgaactggtggtttttgccgcgccaacttcaccacttgctcac

SEQ ID NO: 256630 - DNA, 75 bp, synthetic construct
  source 1..75: mol_type = other DNA
tgagcgcagccttgaccgacctggaagggcagcttggcgtgcaactgtttgatcgcgtggggaaaagactggttg

SEQ ID NO: 256631 - DNA, 75 bp, synthetic construct
  source 1..75: mol_type = other DNA
atgccgacagaaccagtctgcaggaaaaagaaggtcgtaaacgtttcatgacatcgaaagattcagaaggaaaag

SEQ ID NO: 256632 - DNA, 75 bp, synthetic construct
  source 1..75: mol_type = other DNA
agagcaacattctcacacgcatgggccgggccgtgctctgggtccttcttccggtcgacgccctgcgtgttatcg

SEQ ID NO: 256633 - DNA, 75 bp, synthetic construct
  source 1..75: mol_type = other DNA
cgcgccgacttcgccgttggctcgtggtccggtcaccttagaacagctggccgctgcgccgtggatcctgcgtga

SEQ ID NO: 256634 - DNA, 75 bp, synthetic construct
  source 1..75: mol_type = other DNA
caggcggttgaaatcgaacaactgtttcgcgaagacaacggtgcgattcgtatctatgccagtagtaccatcggt

SEQ ID NO: 256635 - DNA, 75 bp, synthetic construct
  source 1..75: mol_type = other DNA
gacgtttgtatcaaaatcaggatgtccatacaggcttacagttcgaagcgcgaattgcccaacggcagtctctgg

SEQ ID NO: 256636 - DNA, 75 bp, synthetic construct
  source 1..75: mol_type = other DNA
ccagctcggcagagctggtactgcaacagattacaatgcttaatggttgtacctggttgcctatgagttgggcgc

SEQ ID NO: 256637 - DNA, 75 bp, synthetic construct
  source 1..75: mol_type = other DNA
gctgacgaagtgcccattctgacaaccagttctgctgaactggcacagcaacagattgcgatgcttaatggttgc

SEQ ID NO: 256638 - DNA, 75 bp, synthetic construct
  source 1..75: mol_type = other DNA
ctgccttatggctacaacccttaccccttcacaccctgaatttgtctttgtgtttgcggctgtccgtcgcgcaga

SEQ ID NO: 256639 - DNA, 75 bp, synthetic construct
  source 1..75: mol_type = other DNA
ttatgcagaaacgctcatgagcacctggcaggccgcccgcaaggaggtggcgcatacctcacgacataacgagtt

SEQ ID NO: 256640 - DNA, 75 bp, synthetic construct
  source 1..75: mol_type = other DNA
cctctctatgctatatggctgcaaaatagtgataaacacgcgttgattcgcgatctattgaaaattaacgttctg

SEQ ID NO: 256641 - DNA, 75 bp, synthetic construct
  source 1..75: mol_type = other DNA
ggcgcacgcccatacggtcggtattggcgctcataaccacaccgtcggaattggtgctcacagtcacacggtggc

SEQ ID NO: 256642 - DNA, 75 bp, synthetic construct
  source 1..75: mol_type = other DNA
gattaacaaggccagcggcacgctggcgatgattgtgcatgcgcctgtccagcaaaagctgaaaactgcagaagg

SEQ ID NO: 256643 - DNA, 75 bp, synthetic construct
  source 1..75: mol_type = other DNA
atagtcatatctctggtgtgagaacgccttctgatgtggccatttatggattaacgtctggattatcaagcgggc

SEQ ID NO: 256644 - DNA, 75 bp, synthetic construct
  source 1..75: mol_type = other DNA
ttacaccttagcccctgtcagataatggtgatccgggcggggcagccttcgggctggccggtattcattgaggcc

SEQ ID NO: 256645 - DNA, 75 bp, synthetic construct
  source 1..75: mol_type = other DNA
aaagcagccagactaaaagaagcttacattgcaaaatttaacgcaatggaagaagaactccacaaacaaccacca

SEQ ID NO: 256646 - DNA, 75 bp, synthetic construct
  source 1..75: mol_type = other DNA
cggtgaagtttacactggcatcgatgggcatgtccgatcaccagtatgttgctgccatccaccgggatacagata

SEQ ID NO: 256647 - DNA, 75 bp, synthetic construct
  source 1..75: mol_type = other DNA
aaggaagaagctaaaacgacaagctatgttgacctgagtaacagaactatccgtttttacgacactaagaatcga

SEQ ID NO: 256648 - DNA, 75 bp, synthetic construct
  source 1..75: mol_type = other DNA
acccgcaatgctcgcccggcggtgatggcgctctctcagtcgctgggcgattttgtcgttgccagcgccgggccg

SEQ ID NO: 256649 - DNA, 75 bp, synthetic construct
  source 1..75: mol_type = other DNA
ttcagctggatctttgccccaaatctgacgcgtacgtgctggcgcttcccgcctcgctgcctgtgcgttacgccg

SEQ ID NO: 256650 - DNA, 75 bp, synthetic construct
  source 1..75: mol_type = other DNA
tccaatctgtgatgctacaaagcgaattctggaagaccgacgagatatcgtcaacgataccgaaatacgggcaga

SEQ ID NO: 256651 - DNA, 75 bp, synthetic construct
  source 1..75: mol_type = other DNA
ccggtgttctttacccctgtcgataaacagggtggtttagaagaagcggaactgaagtcgctgattttagagcaa

SEQ ID NO: 256652 - DNA, 75 bp, synthetic construct
  source 1..75: mol_type = other DNA
aacagggcggattaaaagaagcggaactgaaaactttaatccttgagcaatatcaggctgcgggcattgcaccgg

SEQ ID NO: 256653 - DNA, 75 bp, synthetic construct
  source 1..75: mol_type = other DNA
tgtcgttgccagcgccgggccgcacctcgaatccgtgatcgccggtcacggtgccggggcgcaaaccctttctga

SEQ ID NO: 256654 - DNA, 75 bp, synthetic construct
  source 1..75: mol_type = other DNA
cacacttaatgtgctgaacaaagcagaaaacagactttctgaatggtcaggacttcgagtgaaagatctaacagg

SEQ ID NO: 256655 - DNA, 75 bp, synthetic construct
  source 1..75: mol_type = other DNA
atacatcgatgaaaatgacactcaatcagtcgattataatcaataagttatctatcgacgtgaaaccgagccttg

SEQ ID NO: 256656 - DNA, 75 bp, synthetic construct
  source 1..75: mol_type = other DNA
tggtatgcatgatctacgaaggacatttggtagggttgctgaagaacttgtttcatatgccgtcgttaagagact

SEQ ID NO: 256657 - DNA, 75 bp, synthetic construct
  source 1..75: mol_type = other DNA
ttgttggcttgaatcccttacagacgaagaagctaaaacggcaagttatgtagatcttgaaaatcgtatcattcg

SEQ ID NO: 256658 - DNA, 75 bp, synthetic construct
  source 1..75: mol_type = other DNA
aattgcatatgttgatgactgcgcctacgttatacaatgcacttttagcatcagcaaaatatccaccattatctg

SEQ ID NO: 256659 - DNA, 75 bp, synthetic construct
  source 1..75: mol_type = other DNA
gaaacagaggcttctgaactcactatcagcgaagtctttgctcaatacagaaatcatttgatgggtagatctaaa

SEQ ID NO: 256660 - DNA, 75 bp, synthetic construct
  source 1..75: mol_type = other DNA
atgaaaaataaatcaggtaattcttgttatagagaagcagtcaatattcatagctcacttgagctttcatttata

SEQ ID NO: 256661 - DNA, 75 bp, synthetic construct
  source 1..75: mol_type = other DNA
tatattaggatatttttcagacttagttctaagccgactcgcatcttgggctgaaaaattgctccctaaaaaacc

SEQ ID NO: 256662 - DNA, 75 bp, synthetic construct
  source 1..75: mol_type = other DNA
ccaaaattgcattctcgatttgttttatattaggatatttttcagacttagttctaagccgactcgcatcttggg

SEQ ID NO: 256663 - DNA, 75 bp, synthetic construct
  source 1..75: mol_type = other DNA
ccgcgccgttcaggctgatacgggctctatcggcggcagcgcctctcacgaattccaggtgctggcgcagagtgg

SEQ ID NO: 256664 - DNA, 75 bp, synthetic construct
  source 1..75: mol_type = other DNA
ggaatccctgcaggaaacctacgatgcaatgtatgcggcctacagcaaaatcttcagccgcatggggctggattt

SEQ ID NO: 256665 - DNA, 75 bp, synthetic construct
  source 1..75: mol_type = other DNA
cccgctgactttcgcgaccgaagaagaaattcgtgccgtggttaaagcaggcccaggctcactgggtccggtaaa

SEQ ID NO: 256666 - DNA, 75 bp, synthetic construct
  source 1..75: mol_type = other DNA
ggaggcggaaccgcaaccagttcgtgaaaccagacctgtgcgcaatttctatgtcggcactaacgacccgcggga

SEQ ID NO: 256667 - DNA, 75 bp, synthetic construct
  source 1..75: mol_type = other DNA
tgtgaaggggatacacgcagacatttcccgcggctgactgagataccgcaggagccggaaccgcaaccagttcgt

SEQ ID NO: 256668 - DNA, 75 bp, synthetic construct
  source 1..75: mol_type = other DNA
gtggatggaggcattccgtgaaagccactcccagccagaacgaaacaattttctggcgcatcgtgagcggtgctt

SEQ ID NO: 256669 - DNA, 75 bp, synthetic construct
  source 1..75: mol_type = other DNA
atcgacatcgcgggtaaaatgatccgctggattgaacttcacgcgacgacagaatttagccttaaaacgggcggt

SEQ ID NO: 256670 - DNA, 75 bp, synthetic construct
  source 1..75: mol_type = other DNA
tcgcgggctgaacgctcatattctggtacaggaatatataaaagaggcgcaagggtgtgatattcgttgtttggt

SEQ ID NO: 256671 - DNA, 75 bp, synthetic construct
  source 1..75: mol_type = other DNA
ggttgaaggcacgcagggaattggcgtcgtgctggcggagacgcgtcaggcggccgaaagcgtgattgacgcttt

SEQ ID NO: 256672 - DNA, 75 bp, synthetic construct
  source 1..75: mol_type = other DNA
tgggcgaccgtaacctcgacaatgacgatattgaatacaaatatcgtcgtaatggcgagaaacagttaatcaaga

SEQ ID NO: 256673 - DNA, 75 bp, synthetic construct
  source 1..75: mol_type = other DNA
tgacaggaagggagctatgttttttctaggaagtggttgcgcggagaaaggtattaataattatcttcattcaaa

SEQ ID NO: 256674 - DNA, 75 bp, synthetic construct
  source 1..75: mol_type = other DNA
tgatgataccaaagtatctttgattgatacgaaatatggtcgctatgtttttaaagtctttgctccgaaaacgaa

SEQ ID NO: 256675 - DNA, 75 bp, synthetic construct
  source 1..75: mol_type = other DNA
atgatattacaacccatgggacgaaaaggccgtgcacccgctcatgttcgtgcatggacacctgaagaagatgca

SEQ ID NO: 256676 - DNA, 75 bp, synthetic construct
  source 1..75: mol_type = other DNA
acccatcgggtgttcttcctgatatgcgccgccagacaatcaaagggaaaccagatggccgcgcagtattgtcct

SEQ ID NO: 256677 - DNA, 75 bp, synthetic construct
  source 1..75: mol_type = other DNA
aataccgatttagggacaaaaaccacatcatcgtttgattatggaactaaatctacgaataacactggtgctcat

SEQ ID NO: 256678 - DNA, 75 bp, synthetic construct
  source 1..75: mol_type = other DNA
tcttccagatggcagaggaagatatgcgcgttcctggtgcggaaaaaatggttgaatgcgggtgtgtaatcgacg

SEQ ID NO: 256679 - DNA, 75 bp, synthetic construct
  source 1..75: mol_type = other DNA
atgcgtactagccaatacctgctctcaactctcaaggagacacctgccgacgccgaggtgatcagccatcagctg

SEQ ID NO: 256680 - DNA, 75 bp, synthetic construct
  source 1..75: mol_type = other DNA
ataggcgagaaatttgaattatccgagagtacggtgaattttatttatcaccatcgccggactgccgaagatgtt

SEQ ID NO: 256681 - DNA, 75 bp, synthetic construct
  source 1..75: mol_type = other DNA
ctgctgattgcgctttattcatccaccccggttaaggatattgctgccagaataaaaagaactgtctgggctgta

SEQ ID NO: 256682 - DNA, 75 bp, synthetic construct
  source 1..75: mol_type = other DNA
gactatcgatgcaaaacgcagtgctgaatatgaagaacaaaacttcagcggtagccgctcagttatggaatcagt

SEQ ID NO: 256683 - DNA, 75 bp, synthetic construct
  source 1..75: mol_type = other DNA
tgaaaacacacatcaccgcgaaaatgcgcagtgattttaccgcctcggatgagaaagacgttatttttacggtga

SEQ ID NO: 256684 - DNA, 75 bp, synthetic construct
  source 1..75: mol_type = other DNA
ggataagcaaaaattcagtggtcataagacagaatcacaggtacttgtttacgacaggaaagttaaaatcagccc

SEQ ID NO: 256685 - DNA, 75 bp, synthetic construct
  source 1..75: mol_type = other DNA
gaagaaacggttaaccatcgcgatcgcgcaatgacatttgggcgtttgtgggaaaaatttctcgccagcgcctat

SEQ ID NO: 256686 - DNA, 75 bp, synthetic construct
  source 1..75: mol_type = other DNA
caaaaattcagtggtcataagacagaatcacaggtacttgtttacgacaggaaagttaaaatcagcccgactttg

SEQ ID NO: 256687 - DNA, 75 bp, synthetic construct
  source 1..75: mol_type = other DNA
gtccagcgaggcgcttcgcgatcgttatgattttatgaaattccaggtcttccagtggttgattggcgcaacgga

SEQ ID NO: 256688 - DNA, 75 bp, synthetic construct
  source 1..75: mol_type = other DNA
tggaaattgcttatctctgtgccgccagggtttccgatgttctgaaaatggactggaatcagataatggataaag

SEQ ID NO: 256689 - DNA, 75 bp, synthetic construct
  source 1..75: mol_type = other DNA
aaactactcacctttcaacaattgtggaaaaaatttttaaatagtgctgactatgcagaccttgcccccaggaca

SEQ ID NO: 256690 - DNA, 75 bp, synthetic construct
  source 1..75: mol_type = other DNA
tatcttctgctcacttctgggggcatatggcagacacggcagtggtgaatggaaaaacattacatcgaccgatac

SEQ ID NO: 256691 - DNA, 75 bp, synthetic construct
  source 1..75: mol_type = other DNA
gcgacgctatatggcgatgtggcggctatggatgatattaccatccagccatcatcgggggcggctaccctattg

SEQ ID NO: 256692 - DNA, 75 bp, synthetic construct
  source 1..75: mol_type = other DNA
aatggcatcatcacgttaaccgctacgcaggataatacctggggactggtaacaccgtttacggcgacgcttgca

SEQ ID NO: 256693 - DNA, 75 bp, synthetic construct
  source 1..75: mol_type = other DNA
tccacgacataatgaccgtagctaaattatggcatatgtttatggactcccctgcatttacagaactggcccccc

SEQ ID NO: 256694 - DNA, 75 bp, synthetic construct
  source 1..75: mol_type = other DNA
tcagtggacacaaaacagaaaatcaggtgttgatttacgatcgtaaaaccaaaatcacgccaacactggatttgc

SEQ ID NO: 256695 - DNA, 75 bp, synthetic construct
  source 1..75: mol_type = other DNA
tgcagcgaggatttccgatgtgttatcgctgaaatgggagcagattggaaacgacgggatctttatccagcaagg

SEQ ID NO: 256696 - DNA, 75 bp, synthetic construct
  source 1..75: mol_type = other DNA
aacatccgcctatgtaatcagcaatcaatatggcaaccgatatatgtacaaaggctttaacgaaatgtgggtaga

SEQ ID NO: 256697 - DNA, 75 bp, synthetic construct
  source 1..75: mol_type = other DNA
tttactgtggtcaccagcccggatagtagcaaagcgaaaatgtggggccatatgccggaaaccttaacggcggca

SEQ ID NO: 256698 - DNA, 75 bp, synthetic construct
  source 1..75: mol_type = other DNA
cgttgaatgacaccgcaacggtgtataccgccatgaccggcagtgacggcagcaaaatccttaatattacccgcc

SEQ ID NO: 256699 - DNA, 75 bp, synthetic construct
  source 1..75: mol_type = other DNA
gatagcgtgtcgatccgcatttcgactaaagatgcacaggggaatttagtcggcaatacgccgtttgccctgaaa

SEQ ID NO: 256700 - DNA, 75 bp, synthetic construct
  source 1..75: mol_type = other DNA
aacagcggggcgacattgtatggtgatgtggacgcgatggacgatttgactgtgcaaccctcatccggtgcagca

SEQ ID NO: 256701 - DNA, 75 bp, synthetic construct
  source 1..75: mol_type = other DNA
cccagattctcctaaagcgaatttttgggggcacatgcctgaaacggtaacggcctctgatggcatgacgtataa

SEQ ID NO: 256702 - DNA, 75 bp, synthetic construct
  source 1..75: mol_type = other DNA
gttaacgacgacggcaaccgagtatcgtggcacatcggatgccaacggtacggcaaccatcacggtgacccaacc

SEQ ID NO: 256703 - DNA, 75 bp, synthetic construct
  source 1..75: mol_type = other DNA
caagtcggcctatgtaatcagcaatcagtacggcaaccgttacatgtataaaggatttaatgaaatgtgggttga

SEQ ID NO: 256704 - DNA, 75 bp, synthetic construct
  source 1..75: mol_type = other DNA
ggaaaaattcctcgccagcgcctgttacagtgacctcagtccaagaacacaaaaagattatctgcaacatcaaaa

SEQ ID NO: 256705 - DNA, 75 bp, synthetic construct
  source 1..75: mol_type = other DNA
atattccaagaaaatattccaagaaaatattccaagtaattccaagtgtgatttttgtcactgacttaatgatgt

SEQ ID NO: 256706 - DNA, 75 bp, synthetic construct
  source 1..75: mol_type = other DNA
ccgtcatcaccagcccggatacaccgctggcggccaactggggccatatggcggaaacctttaccagcagcgaag

SEQ ID NO: 256707 - DNA, 75 bp, synthetic construct
  source 1..75: mol_type = other DNA
tggataccatgatccgctatcagcgcatgcagggcaaaaacaccctgtggcaggtcggtactgaccacgccggga

SEQ ID NO: 256708 - DNA, 75 bp, synthetic construct
  source 1..75: mol_type = other DNA
aaggctttaacgaaatgtgggtagaagcaagaaatcgcgcaggcaaaatttcaggtattttaactgtattagtcg

SEQ ID NO: 256709 - DNA, 75 bp, synthetic construct
  source 1..75: mol_type = other DNA
atggcaaagctgttcgccgcagagcaatttgatcgcgtgatccacctggccgcccaggccggtgtgcgttactcg

SEQ ID NO: 256710 - DNA, 75 bp, synthetic construct
  source 1..75: mol_type = other DNA
accgttgagcacctgaatgctgcgctcgcgggcttaggcatcgataacatcgttatcgaagttaacgcaccggaa

SEQ ID NO: 256711 - DNA, 75 bp, synthetic construct
  source 1..75: mol_type = other DNA
tcgatttcaaccatccggctatcgattccagcaatcaacgttatgcgatgaacttctctgctgatgcgtttatgc

SEQ ID NO: 256712 - DNA, 75 bp, synthetic construct
  source 1..75: mol_type = other DNA
tgttcagcatctactttacgcttcctccagttctgtttatggcatgaaccgcaagatgcctttctctacagatga

SEQ ID NO: 256713 - DNA, 75 bp, synthetic construct
  source 1..75: mol_type = other DNA
cgtcgaggcgctagtgcgtgttcaggatgtgaccccgcaggccaatgccgactggaccgttgagagcggttcccc

SEQ ID NO: 256714 - DNA, 75 bp, synthetic construct
  source 1..75: mol_type = other DNA
cagacacccaaccgctatatgacctggtgggtttcaagccgcagacgtcagtgaaggaaggcgtgaagaactttg

SEQ ID NO: 256715 - DNA, 75 bp, synthetic construct
  source 1..75: mol_type = other DNA
tacacttatttgaatcattaactacagagcaaaagattgatatcgcaagacgcttactacaaaacaaagaaataa

SEQ ID NO: 256716 - DNA, 75 bp, synthetic construct
  source 1..75: mol_type = other DNA
caaacatattcaaaaaactaaaacagaaaggcattctcgttgatcatcatggacatctttatattaactcaaaca

SEQ ID NO: 256717 - DNA, 75 bp, synthetic construct
  source 1..75: mol_type = other DNA
tcgcaacggcttttattttgtctggaacataacgttcaaagcacattgcacctgccggatagtctcacgcaccag

SEQ ID NO: 256718 - DNA, 75 bp, synthetic construct
  source 1..75: mol_type = other DNA
taagtgggctgaattcaggccgtacaatggtttttcgctggatttcaccatcgatttcaatcatccggctatcga

SEQ ID NO: 256719 - DNA, 75 bp, synthetic construct
  source 1..75: mol_type = other DNA
atttgttttcagtaagaagaaaaagaataacgctgttcctaatcccaataacagcatacatattgataaaccacg

SEQ ID NO: 256720 - DNA, 75 bp, synthetic construct
  source 1..75: mol_type = other DNA
aaacgtatataaaagaacaaaggaaaacgaggaagcaaggaggaactctgttgacatagagtctcatatgcagaa

SEQ ID NO: 256721 - DNA, 75 bp, synthetic construct
  source 1..75: mol_type = other DNA
tgtagaaacaggctcgcctgcaacaagttcagcaccatatcgtgtctataacattggtaatagttcgcctgtgga

SEQ ID NO: 256722 - DNA, 75 bp, synthetic construct
  source 1..75: mol_type = other DNA
gtcgattgcttcattggtggtaacggatgcatggggaaatactcaggacagttttctttccacgtccctggtcat

SEQ ID NO: 256723 - DNA, 75 bp, synthetic construct
  source 1..75: mol_type = other DNA
tatgttcctgcgcaggttgggctggagtcattgtttgacaataaccgcagcaacgcgatgaaaaccgtacaaggt

SEQ ID NO: 256724 - DNA, 75 bp, synthetic construct
  source 1..75: mol_type = other DNA
attaattgcgctgcccattgcctggctggggcgcgtgcgtctgcgccagttggcgcgtcgcgactggcttaccgc

SEQ ID NO: 256725 - DNA, 75 bp, synthetic construct
  source 1..75: mol_type = other DNA
cagggggttaaagcaaaaaccaattatgaagttgatcatgatttcatcaccattaaggtcacaacgcgcgacgcg

SEQ ID NO: 256726 - DNA, 75 bp, synthetic construct
  source 1..75: mol_type = other DNA
ccgttcagccgacatcgggagcggcggtgacgtggcctgacagtggcaatgctttgcagggaaccaccggttctg

SEQ ID NO: 256727 - DNA, 75 bp, synthetic construct
  source 1..75: mol_type = other DNA
agtaataatgagtcgtggtcataccttaatgttaacgacagagctacgtcggattgctcactggagtatcagccg

SEQ ID NO: 256728 - DNA, 75 bp, synthetic construct
  source 1..75: mol_type = other DNA
atgcgctggaacgccaggtgccacaactgatcggctttggtaaaggcttaacgcccgatggagatgactatttgt

SEQ ID NO: 256729 - DNA, 75 bp, synthetic construct
  source 1..75: mol_type = other DNA
atgattaagtcggttattgccggtgcggtagctatggcagtggtgtcttttggtgcaaatgcagctccacagggg

SEQ ID NO: 256730 - DNA, 75 bp, synthetic construct
  source 1..75: mol_type = other DNA
gaagaggctctgggtattgaagccaacaaaaatatgatgcctctccaacccggtgatgtactggaaaccagtgct

SEQ ID NO: 256731 - DNA, 75 bp, synthetic construct
  source 1..75: mol_type = other DNA
ttgctgtacacctttttactccgccagcaaatgccgccgctaatgacgctgagcggtatcgcgctgttagtgatt

SEQ ID NO: 256732 - DNA, 75 bp, synthetic construct
  source 1..75: mol_type = other DNA
atgattaagtcggttattgccggtgcggtagctatggcagtggtgtcttttggtgcacatgctgctccaactatt

SEQ ID NO: 256733 - DNA, 75 bp, synthetic construct
  source 1..75: mol_type = other DNA
acgcccgatggagatgactatttgttgggctatctggcagcgctctggttatggcaactccctgcaccacttgcc

SEQ ID NO: 256734 - DNA, 75 bp, synthetic construct
  source 1..75: mol_type = other DNA
cagaagaatttgctgccgcgccggtattaaccccgcagcaggagagccactacttgcaggcctatttaccgttgg

SEQ ID NO: 256735 - DNA, 75 bp, synthetic construct
  source 1..75: mol_type = other DNA
ccgttctgttttgccgatatcggcccgcttctggcaacggcgctgcatgaccatccgcgcctgcgtgagatgaac

SEQ ID NO: 256736 - DNA, 75 bp, synthetic construct
  source 1..75: mol_type = other DNA
gaaacttcaggatgaatgctggtgggaaggggagcacgatggcctggtcgcgagcaaaatattacgccgccggga

SEQ ID NO: 256737 - DNA, 75 bp, synthetic construct
  source 1..75: mol_type = other DNA
tgccattatggggcacaaagtgttaccgtccagccaggcttcaacaggctacagcgccacggatatcgttgaata

SEQ ID NO: 256738 - DNA, 75 bp, synthetic construct
  source 1..75: mol_type = other DNA
gtaaagtggtgcggcaacttgccccgcagtgtaattgcattattgaccgtcaggatatggaacaaacggcgttaa

SEQ ID NO: 256739 - DNA, 75 bp, synthetic construct
  source 1..75: mol_type = other DNA
tgccctcgactggcgaccgcgccagctgcggcagaaatatcatcagatgaaagacctgattcgtgagacgcgcaa

SEQ ID NO: 256740 - DNA, 75 bp, synthetic construct
  source 1..75: mol_type = other DNA
catacccatgaactgccttcgcgctcagcattgctggggctgctggctgccggggtagggattcggcgtgatgat

SEQ ID NO: 256741 - DNA, 75 bp, synthetic construct
  source 1..75: mol_type = other DNA
tcaatcctgctcatactgatatgcagtggcttattaatcgctggcgctctgctcagaaagtttttcagaaaataa

SEQ ID NO: 256742 - DNA, 75 bp, synthetic construct
  source 1..75: mol_type = other DNA
atggaaaagaaacatttatctgttttgttctgcgggcatgtctacctctttactggtatcaaaaatgcgcgcaca

SEQ ID NO: 256743 - DNA, 75 bp, synthetic construct
  source 1..75: mol_type = other DNA
cgctttatctggggcgaaaaagtcatccgctggcgttaccacttgcgccgttactgctcgaaggcaacgcgtctg

SEQ ID NO: 256744 - DNA, 75 bp, synthetic construct
  source 1..75: mol_type = other DNA
ttcatgggccgatggcgtcctggggggtcgatgctccaggtgaagttcgtcatacccatgaacttccttcgcgct

SEQ ID NO: 256745 - DNA, 75 bp, synthetic construct
  source 1..75: mol_type = other DNA
aacagttgcaggacggtttacgtcatccggtttttccgctttatctggggcgaaaaagtcatccgctggcattac

SEQ ID NO: 256746 - DNA, 75 bp, synthetic construct
  source 1..75: mol_type = other DNA
ccttcgctaacgtggtaatgctattagttgctgcgggggtatttgcccagggacttagcaccatcggttttatcc

SEQ ID NO: 256747 - DNA, 75 bp, synthetic construct
  source 1..75: mol_type = other DNA
gcagaacttgttatctttcctggcatgaagccgccgggcgcgataaaggtcaccagtggatggaagagcaattag

SEQ ID NO: 256748 - DNA, 75 bp, synthetic construct
  source 1..75: mol_type = other DNA
tatgccatatggctgcaaaatagcgataaaaatgcgttgattcgcgatcttttgaaaattaacgtgctggatgaa

SEQ ID NO: 256749 - DNA, 75 bp, synthetic construct
  source 1..75: mol_type = other DNA
tagcacaacactttcacggccgctttatgccatatggctgcaaaatagcgataaaaatgcgttgattcgcgatct

SEQ ID NO: 256750 - DNA, 75 bp, synthetic construct
  source 1..75: mol_type = other DNA
tgatcttactatcgtgccggtcacccctgccggagtaaacatgtcactctataataatggggcacaggcacttct

SEQ ID NO: 256751 - DNA, 75 bp, synthetic construct
  source 1..75: mol_type = other DNA
atgacgttacgggatggcctgtatcacgtgcctatatctccagtacagcagtcgcctattatactcaaaccttta

SEQ ID NO: 256752 - DNA, 75 bp, synthetic construct
  source 1..75: mol_type = other DNA
gacgggctatccctatgaaagtgttctgaccctcgccgatcagaaagtgacgctgaagattgcgcccgcgcaggg

SEQ ID NO: 256753 - DNA, 75 bp, synthetic construct
  source 1..75: mol_type = other DNA
tcacgaccggttcaggcaatgcgccgttttatgcgtttgttgagatgatcccgaaactggcgcactcttccggca

SEQ ID NO: 256754 - DNA, 75 bp, synthetic construct
  source 1..75: mol_type = other DNA
tgccgcctattgtgttgcctgtctgatgtcactggccgtctcttccgcaaccggtctgggtgttttgctgatggc

SEQ ID NO: 256755 - DNA, 75 bp, synthetic construct
  source 1..75: mol_type = other DNA
tttgactatcccgatgctgcaggcgtcaaacctgggccgtaccctttcgcccgtttctggcgtagtcgttgcggt

SEQ ID NO: 256756 - DNA, 75 bp, synthetic construct
  source 1..75: mol_type = other DNA
aaatgcatgggaagaagggactgaacggcgatggtagactcttacgttggtttttggttccattgctccccaaac

SEQ ID NO: 256757 - DNA, 75 bp, synthetic construct
  source 1..75: mol_type = other DNA
caaatatacctaccattaacgttgtcggttcccctttcagtccggctcaaattaccatcgaaacagcattttttg

SEQ ID NO: 256758 - DNA, 75 bp, synthetic construct
  source 1..75: mol_type = other DNA
cagttggagatgttttctcaagaagctctcctattttatcaaaaaaacatcgcgttgaattattagtcgaaggaa

SEQ ID NO: 256759 - DNA, 75 bp, synthetic construct
  source 1..75: mol_type = other DNA
tggttacacgttcagtagaccaaaactggcggcggaagtcagtaacgaaaatgccacggtcgtcgatcacaatga

SEQ ID NO: 256760 - DNA, 75 bp, synthetic construct
  source 1..75: mol_type = other DNA
acgattttcaccgtgccgaccagtcctaatgtcgcacggcgtatttctggggtcatatggcggataccgccacgg

SEQ ID NO: 256761 - DNA, 75 bp, synthetic construct
  source 1..75: mol_type = other DNA
gttgcggcgatggatgatatgacggtacaacctgccagcgggacggtggtaacgctggctgacagtgggaatacg

SEQ ID NO: 256762 - DNA, 75 bp, synthetic construct
  source 1..75: mol_type = other DNA
tatgccggatgaagaagcccgtacatggcgacccaacgttgcttattttgaaggcgacaatgaaatgaaacgtac

SEQ ID NO: 256763 - DNA, 75 bp, synthetic construct
  source 1..75: mol_type = other DNA
gtcaccaccaaagattgtcagggtaacgtcgcgggtaatattccgtttattatcaagcgtaaagatgcccaaaac

SEQ ID NO: 256764 - DNA, 75 bp, synthetic construct
  source 1..75: mol_type = other DNA
ggcacatcgcagccgtcgatggtttatacgggtacgacagatgcacaaggcgtggcaacggtcgaaatagagcaa

SEQ ID NO: 256765 - DNA, 75 bp, synthetic construct
  source 1..75: mol_type = other DNA
gacacctttaccagttcggcaggcgtcaccttcagacgaccgctgctgaaagccgaagcgacttcagggtcatcg

SEQ ID NO: 256766 - DNA, 75 bp, synthetic construct
  source 1..75: mol_type = other DNA
caaagtgggtgacaccatcgtaatgaccgtgcgtacggttaacgggttgaataacacgccggtgccgtttaccgc

SEQ ID NO: 256767 - DNA, 75 bp, synthetic construct
  source 1..75: mol_type = other DNA
ctgcggctgttgccagccacgtgtctctggagcctgcggacgccacgcaattcgttaaggttgacgataatctga

SEQ ID NO: 256768 - DNA, 75 bp, synthetic construct
  source 1..75: mol_type = other DNA
cgcagcccatcgccaaccgcagcttttgcgcgcaaggtctggccgggcgttcgctggtggcctggccacagattg

SEQ ID NO: 256769 - DNA, 75 bp, synthetic construct
  source 1..75: mol_type = other DNA
agcatggagcagcgtaactacaaggcggtagatctcagcaatggcacgagtgcggcagtgtcatcaacggcgctg

SEQ ID NO: 256770 - DNA, 75 bp, synthetic construct
  source 1..75: mol_type = other DNA
ggatatgccatttaccctcagtcgcggtgatggctatacccgtagcggcgaaaaacatattgccggtagcggcga

SEQ ID NO: 256771 - DNA, 75 bp, synthetic construct
  source 1..75: mol_type = other DNA
acccgtgttagataagttattagataaaacattagataataatattatagataagagtaaagagactggacttaa

SEQ ID NO: 256772 - DNA, 75 bp, synthetic construct
  source 1..75: mol_type = other DNA
gccgatgtcgtgttattagggccgcagattgcttatatgttgcccgaaatccagcgtttgttaggctttgttgaa

SEQ ID NO: 256773 - DNA, 75 bp, synthetic construct
  source 1..75: mol_type = other DNA
gcaagacagagaaggcgatatcattgccaccccacgttgggaaaaccaaacgccaccggcagtatctttagtttg

SEQ ID NO: 256774 - DNA, 75 bp, synthetic construct
  source 1..75: mol_type = other DNA
tgggcagcaccatgcagcggatgtttccaaccgtagcgaagcgcaaaaaccggacgatacgacgtttattgtcag

SEQ ID NO: 256775 - DNA, 75 bp, synthetic construct
  source 1..75: mol_type = other DNA
aaatgcccggcttcgtagtaaacgctgacggcacggtcagcgactcaagagccgatcacaatgtaagttttaata

SEQ ID NO: 256776 - DNA, 75 bp, synthetic construct
  source 1..75: mol_type = other DNA
atggctatgaaacagagatggcaggacctggccaaaaccaggatgaaagaagtcggcatgactcaagaacagctg

SEQ ID NO: 256777 - DNA, 75 bp, synthetic construct
  source 1..75: mol_type = other DNA
gaaaatccagatggcttgctgcctggtggctacgggggaagcggcaactatcagcgatggcctggcgcgcgttaa

SEQ ID NO: 256778 - DNA, 75 bp, synthetic construct
  source 1..75: mol_type = other DNA
ttactggacccacagccagtcgcagatcgctcgttttgtgcacagggacttgccgggcgttcgctggtcgcctgg

SEQ ID NO: 256779 - DNA, 75 bp, synthetic construct
  source 1..75: mol_type = other DNA
ttagtgaacttgatgactttgatgatagtgacgatgattttacttttgcaccaagaaagaaaacccgcatcgagc

SEQ ID NO: 256780 - DNA, 75 bp, synthetic construct
  source 1..75: mol_type = other DNA
ccttcgatgattaccttgatgatgaagaagaccctgaagaggaattgaaacgtgaacagcgtaaatgcgaagcta

SEQ ID NO: 256781 - DNA, 75 bp, synthetic construct
  source 1..75: mol_type = other DNA
tcaccagccctgattccgacaaagcgcggatgtggggacatatgttaggcattattgaagcgaataatatcttta

SEQ ID NO: 256782 - DNA, 75 bp, synthetic construct
  source 1..75: mol_type = other DNA
aaaatcatttcagccttgcctggctaacgcgcgttcaacggtttccagcgtcacacttacctcaacagcgtttga

SEQ ID NO: 256783 - DNA, 75 bp, synthetic construct
  source 1..75: mol_type = other DNA
gaccctggttatttatggcgtgacgggggctgatggcaccaccactttcacattgaagcaagaccagactaccgg

SEQ ID NO: 256784 - DNA, 75 bp, synthetic construct
  source 1..75: mol_type = other DNA
agagagcaaaatcgccctttccagcgcagcggaaacccgcgcatcgctgccgtttatcagcgatgagctggcaac

SEQ ID NO: 256785 - DNA, 75 bp, synthetic construct
  source 1..75: mol_type = other DNA
ggcactggcggaacagctgccgggcatcccgattgcaggtggcgacgattttggttccgttactgccgggctggc

SEQ ID NO: 256786 - DNA, 75 bp, synthetic construct
  source 1..75: mol_type = other DNA
cgtggtggaatgcggtcgccatcaacgacgtacctgcgcaaagcgatttctacagtagcgccaatggtcgtctgc

SEQ ID NO: 256787 - DNA, 75 bp, synthetic construct
  source 1..75: mol_type = other DNA
aacctctggctgcttcaggctgatattcagcatcaggggcgctattaccatgaatacagtatgcacattactgtt

SEQ ID NO: 256788 - DNA, 75 bp, synthetic construct
  source 1..75: mol_type = other DNA
tgagctgcaggcaattcagcagcgtaacctctggctgcttcaggctgatattcagcatcaggggcgctattacca

SEQ ID NO: 256789 - DNA, 75 bp, synthetic construct
  source 1..75: mol_type = other DNA
atcctgggtgtaagactcaaaacacgtaccttcaccaccaccggcggcagatcccacgaaaaaacctgcatctgg

SEQ ID NO: 256790 - DNA, 75 bp, synthetic construct
  source 1..75: mol_type = other DNA
tgatttcgcttactgcgacagcggcatgatcccgtggctgctggtcgccgaactggtgtgtctgaaaggaaaaac

SEQ ID NO: 256791 - DNA, 75 bp, synthetic construct
  source 1..75: mol_type = other DNA
acgcttacgttgatcacctgttcggttatatcaacgtcaaaaacctcacgccgctcaagctggtgattaactccg

SEQ ID NO: 256792 - DNA, 75 bp, synthetic construct
  source 1..75: mol_type = other DNA
tgttcggttatatcaatgtcaaaaacctcacgccgctcaagctggtgatcaactccgggaacggcgcagcgggtc

SEQ ID NO: 256793 - DNA, 75 bp, synthetic construct
  source 1..75: mol_type = other DNA
gcttggtcacagtggctgccgtattggcggtaacgatctggatatcgcactggcgtttaaacacctgatgccact

SEQ ID NO: 256794 - DNA, 75 bp, synthetic construct
  source 1..75: mol_type = other DNA
cgagccggaaaaagtcgctctgttgcaaaaagtctggcaccagcggttaagttatcgactggtgcgcagcgcgga

SEQ ID NO: 256795 - DNA, 75 bp, synthetic construct
  source 1..75: mol_type = other DNA
aaaacgctgggcgaactggtgcgcgaccggatggcggcgtttccggcaagcggtgagatcaacagcaaactggcg

SEQ ID NO: 256796 - DNA, 75 bp, synthetic construct
  source 1..75: mol_type = other DNA
gcaactggtatgaaaacgtgtatgaggacttcagggaggtctgtggcattttcggaattgacctccgccagcgcg

SEQ ID NO: 256797 - DNA, 75 bp, synthetic construct
  source 1..75: mol_type = other DNA
gtttgatgcgtatatcaacggtcttgctcattcggggcgacggggcatcaccagcctgttaaaccgcagcgctgg

SEQ ID NO: 256798 - DNA, 75 bp, synthetic construct
  source 1..75: mol_type = other DNA
ccgtgccggtggtgcaaaccaccgtgtttgatgcgtatatcaacggtcttgctcattcggggcgacggggcatca

SEQ ID NO: 256799 - DNA, 75 bp, synthetic construct
  source 1..75: mol_type = other DNA
acatatccacgacaacccgctatgactgtcgtggtgagagcatgaaagtcagcgccagcaaacgcatcaggtgtt

SEQ ID NO: 256800 - DNA, 75 bp, synthetic construct
  source 1..75: mol_type = other DNA
gaaaggggcgtaaataccgtgaaattcacgtggcggatgcagtggataaggctattcgcgcgtggctgaaagttg

SEQ ID NO: 256801 - DNA, 75 bp, synthetic construct
  source 1..75: mol_type = other DNA
gcatgtacggcgctaccgtgatgtcgctattgcgctgacactttgcggaacaggcctgcgggccggggaactggt

SEQ ID NO: 256802 - DNA, 75 bp, synthetic construct
  source 1..75: mol_type = other DNA
atggtgcaaacaaccgtgtttgatgcgtatattggcggtctggctccttcggggcgaagaggtatcatcagcctg

SEQ ID NO: 256803 - DNA, 75 bp, synthetic construct
  source 1..75: mol_type = other DNA
ttaccgctgaacgtattagcgactatatgactgaagcagttaatacagactctatagccgttgcggaaatgtttc

SEQ ID NO: 256804 - DNA, 75 bp, synthetic construct
  source 1..75: mol_type = other DNA
accaccacgctgtcggttaaaaaaggcggcacgcttaaaggcgcttacactcacagcggcggcagttttacctcc

SEQ ID NO: 256805 - DNA, 75 bp, synthetic construct
  source 1..75: mol_type = other DNA
gttaactctgttactcgagtattactcattggttcggcaatgatggtaattattgttgaaataattaacagtcaa

SEQ ID NO: 256806 - DNA, 75 bp, synthetic construct
  source 1..75: mol_type = other DNA
caattgcatggatgccgaaacgctggcccgtatccggtctgttaagcgtgtgagcggcgatatccagcgtaaggg

SEQ ID NO: 256807 - DNA, 75 bp, synthetic construct
  source 1..75: mol_type = other DNA
ggtgtccgaaatcgtacaattctgaacatctacgcaagggaatgtacggaagtaagccaaatggttatcggacgg

SEQ ID NO: 256808 - DNA, 75 bp, synthetic construct
  source 1..75: mol_type = other DNA
agaaccgatggtatcagcatgtcgtttgttgactggcgtttcaatctgcgttcgtccaataccgagccgctggtg

SEQ ID NO: 256809 - DNA, 75 bp, synthetic construct
  source 1..75: mol_type = other DNA
aacttgtttgtgaccggatggcggctttccctgcaagcggggaaattaatcgcaaactggatgagccggcggcag

SEQ ID NO: 256810 - DNA, 75 bp, synthetic construct
  source 1..75: mol_type = other DNA
tggtatgtcgggcaccgaagagatctatttcgccaccttccatctgggcgtcgacggcggtattgaagtgaccgc

SEQ ID NO: 256811 - DNA, 75 bp, synthetic construct
  source 1..75: mol_type = other DNA
cttggtcactataatgccgaacagtttcgtaatattggcgagcgtagcccaaaaattccattcactattccttta

SEQ ID NO: 256812 - DNA, 75 bp, synthetic construct
  source 1..75: mol_type = other DNA
aactccggaaacggcgcagcaggtccggtggtggacgccatcgaagcccgctttaaagccctcggcgcaccggtg

SEQ ID NO: 256813 - DNA, 75 bp, synthetic construct
  source 1..75: mol_type = other DNA
actttccccccgtcgatgaaaccaaacgcggtcgctatcagcaaatcaacctgcgtgatgcatacgttgatcacc

SEQ ID NO: 256814 - DNA, 75 bp, synthetic construct
  source 1..75: mol_type = other DNA
cggcaacgctggcggcgatgccggagatgacggtggaaaaagcccgccctgtcctggctggcttcaccgcaggcg

SEQ ID NO: 256815 - DNA, 75 bp, synthetic construct
  source 1..75: mol_type = other DNA
aagcgaaaggacgtgaacagcttgccacgatgctggcaggacaacagggcatgagcgttgaacaggcccgggcga

SEQ ID NO: 256816 - DNA, 75 bp, synthetic construct
  source 1..75: mol_type = other DNA
ccattggggtgatgatgggccatgtcagctatgccggtcatctggcacaggccggtgtggatatcacgctgattt

SEQ ID NO: 256817 - DNA, 75 bp, synthetic construct
  source 1..75: mol_type = other DNA
ggcacgtgattgatgaggtggagaaacgcttcgcggcggctggggtgccggtaacctttatcaaggtgcatcacc

SEQ ID NO: 256818 - DNA, 75 bp, synthetic construct
  source 1..75: mol_type = other DNA
gaaaaaaatccaggaacgcagatcctccacgatccacgtccctcctggaacacccttgctgacttcactctggcc

SEQ ID NO: 256819 - DNA, 75 bp, synthetic construct
  source 1..75: mol_type = other DNA
ttctggccgcggcggcaccgcagcagccggtggcatccacgcagagtgaagccgatcgcattatggcgtgtgaag

SEQ ID NO: 256820 - DNA, 75 bp, synthetic construct
  source 1..75: mol_type = other DNA
gtctttattctcaatgttcagggcatcggatgatgtacgctactgcaggacaatatttctggttcccggacaact

SEQ ID NO: 256821 - DNA, 75 bp, synthetic construct
  source 1..75: mol_type = other DNA
gtgagacgtaatctttcacatattatcgctgcggcattcaatgagccgctgcttctggagcccgcctatgcgcgg

SEQ ID NO: 256822 - DNA, 75 bp, synthetic construct
  source 1..75: mol_type = other DNA
ccggcacgctggtgcaccggctgggtggcatgcggccattttccggaatgacaggctatgacggcattgtcgcct

SEQ ID NO: 256823 - DNA, 75 bp, synthetic construct
  source 1..75: mol_type = other DNA
aagtggcgatgtatacggggctgtctgtggaagctgtcacggggacagaggctgccgtttttgaaggtcagtccg

SEQ ID NO: 256824 - DNA, 75 bp, synthetic construct
  source 1..75: mol_type = other DNA
gtgcagtgcttggcggaagagaatgagttcgcggttctcgatgagacaaaacgtggccgctaccagcgaattact

SEQ ID NO: 256825 - DNA, 75 bp, synthetic construct
  source 1..75: mol_type = other DNA
atgccacgatggctgtttgattgtgatggtaagtacgcaatagatccaaatatgcaaaatgtaattaactttact

SEQ ID NO: 256826 - DNA, 75 bp, synthetic construct
  source 1..75: mol_type = other DNA
gcggatgaattaatcaatgcgtcggatgccatcagtgtgatggctgcggcgctgaacactcatgatacaggaggc

SEQ ID NO: 256827 - DNA, 75 bp, synthetic construct
  source 1..75: mol_type = other DNA
tactgctggacattgacagtccgggcgggcaggccgccggcgcgtttgactgcgctgacatgatttaccgcctcc

SEQ ID NO: 256828 - DNA, 75 bp, synthetic construct
  source 1..75: mol_type = other DNA
cgaccggacagttaatgctcgatcacccgatggtcgctgccgacgtgcaaaatccccaccagccgaaaacagcaa

SEQ ID NO: 256829 - DNA, 75 bp, synthetic construct
  source 1..75: mol_type = other DNA
atgattgaatgccttattattgcggttattctcctttacctggctggcgtaattttaatgggcgcttttcagaaa

SEQ ID NO: 256830 - DNA, 75 bp, synthetic construct
  source 1..75: mol_type = other DNA
ggggcagaggcgcaggctgaaaaactggcggcctgtccggggatgaccgtggagaatgcccgggctgtactggcg

SEQ ID NO: 256831 - DNA, 75 bp, synthetic construct
  source 1..75: mol_type = other DNA
gaagcgaaaggacgtgaacaactggccacgatgctggcagggcaacagggtatgagcgttgagcaggcccgggcg

SEQ ID NO: 256832 - DNA, 75 bp, synthetic construct
  source 1..75: mol_type = other DNA
gccggggtggatatcacgctgatttatgccggggcgcacaaggtggatggcaatcagtttgaagccttaccggca

SEQ ID NO: 256833 - DNA, 75 bp, synthetic construct
  source 1..75: mol_type = other DNA
catcggaacactgtttgcactggtcggtgcaattgttaccactattccggaatacagagcctcgaaaacaatgaa

SEQ ID NO: 256834 - DNA, 75 bp, synthetic construct
  source 1..75: mol_type = other DNA
ttgctgaaagccgccgaaattgcggagaaaaaacgccaggaagatgatgcattcaacaaaaaacttgcgccctta

SEQ ID NO: 256835 - DNA, 75 bp, synthetic construct
  source 1..75: mol_type = other DNA
tcctgacactcgtcggactactttgcgtcgagtttacgcttgcccctgtaaccgaatggtttatgcaaatgggct

SEQ ID NO: 256836 - DNA, 75 bp, synthetic construct
  source 1..75: mol_type = other DNA
tcccggctgctgtgctgatgatattcttccctcagatggccctggctgctggcggtcaggacctcatgcagtccg

SEQ ID NO: 256837 - DNA, 75 bp, synthetic construct
  source 1..75: mol_type = other DNA
ggcggtcaggacctcatgcagtccgggaatgacaccgtcaaagccacctttggtaaggactccagtgttgttaaa

SEQ ID NO: 256838 - DNA, 75 bp, synthetic construct
  source 1..75: mol_type = other DNA
tctccgcgctattgctgtctggtttactttgcgatcgctttggtatcggtgtcgacgagaaaaaatactttaccc

SEQ ID NO: 256839 - DNA, 75 bp, synthetic construct
  source 1..75: mol_type = other DNA
aagtttacaactcaaaatcattactcactaaattaggtgtcggcggtgttaccgacaggttatccagtctggact

SEQ ID NO: 256840 - DNA, 75 bp, synthetic construct
  source 1..75: mol_type = other DNA
tggtctgtatgatgatgccggaacactgattgcggtcgctaacatggcagaaagctataagcctgaactggctga

SEQ ID NO: 256841 - DNA, 75 bp, synthetic construct
  source 1..75: mol_type = other DNA
ccaggataaatcagcttttctggacaatgttggcgttaccagcctgacgtttatgaaaaacaacggcgaaatgcc

SEQ ID NO: 256842 - DNA, 75 bp, synthetic construct
  source 1..75: mol_type = other DNA
cagttgctattaacaccgggaccaatctgccctcagtcgccacgccaaacggacaggcggcattcctgttcctgc

SEQ ID NO: 256843 - DNA, 75 bp, synthetic construct
  source 1..75: mol_type = other DNA
atgcttcgcctggctcgcgctgtgatccctgctgctgttctgatgatgttcttcccgcaactggcaatggcagca

SEQ ID NO: 256844 - DNA, 75 bp, synthetic construct
  source 1..75: mol_type = other DNA
gaaagcgttcgagaggccttgcggcttcttgtccttagctacaatgcgagccattcgacactcatgactcgtgta

SEQ ID NO: 256845 - DNA, 75 bp, synthetic construct
  source 1..75: mol_type = other DNA
ctgaatatgcttcgcctggttcgcgcagtgatcccggttgctgttctgatgatgttcttcccgcaactggcaatg

SEQ ID NO: 256846 - DNA, 75 bp, synthetic construct
  source 1..75: mol_type = other DNA
ttgaagatgattatgacagtgaattccgctatcacggtaagccgctaccggcgttgaaaagtctcgatgcgccgc

SEQ ID NO: 256847 - DNA, 75 bp, synthetic construct
  source 1..75: mol_type = other DNA
aaaggcggcatccagatggttatcagcatggtgggcgacgatattttccacgcgcgtaaagccaatactgctggc

SEQ ID NO: 256848 - DNA, 75 bp, synthetic construct
  source 1..75: mol_type = other DNA
ccagacgcgctttgatttggcgttaggcgatgtctgcggtgaggtggcgttgcgcgaggcaatagttgattactt

SEQ ID NO: 256849 - DNA, 75 bp, synthetic construct
  source 1..75: mol_type = other DNA
cgatcattaaacgtcactggatgtcgctgacggcgggcgtactgacggcaacggtggtggcagtgaccagctcgg

SEQ ID NO: 256850 - DNA, 75 bp, synthetic construct
  source 1..75: mol_type = other DNA
gtgattaattttcagttaagtgtgctttgtctggcgataaccctggttatctattttcttaacaaacgcctttat

SEQ ID NO: 256851 - DNA, 75 bp, synthetic construct
  source 1..75: mol_type = other DNA
ggcgtatccgctcaagcgaggacggaggattattgctctcgtttacgaatatcgttagcgaaagtatggcgcgac

SEQ ID NO: 256852 - DNA, 75 bp, synthetic construct
  source 1..75: mol_type = other DNA
caatttttatggtctggagtcgtctcttgaagaggcgaaagcccataacgggttgccgaccaaaaccgaaacgcg

SEQ ID NO: 256853 - DNA, 75 bp, synthetic construct
  source 1..75: mol_type = other DNA
gcttctgctggtaaaggcacggacctgatggctaaaggtcaggaaacggttaaagcaactttcggtaaggactcc

SEQ ID NO: 256854 - DNA, 75 bp, synthetic construct
  source 1..75: mol_type = other DNA
ctgtgatccctgctgctgttctgatgatgttcttcccgcaactggcactggccgcccagggggcaggtcaggacc

SEQ ID NO: 256855 - DNA, 75 bp, synthetic construct
  source 1..75: mol_type = other DNA
taaggcgaccttcggtaaggactccagtattgttaaatgggttgttctggctgaagttctggtcggtgcggtcat

SEQ ID NO: 256856 - DNA, 75 bp, synthetic construct
  source 1..75: mol_type = other DNA
gtcgtttttttctaaattcactcgtctgaatatgcttcgcctggttcgcgctgtgatcccggctgctgttctgat

SEQ ID NO: 256857 - DNA, 75 bp, synthetic construct
  source 1..75: mol_type = other DNA
cttgaagaggcgaaagaccataatggcctgccgaccaaaaccgaaacgcggttaaagaaccgcctcgcgctggat

SEQ ID NO: 256858 - DNA, 75 bp, synthetic construct
  source 1..75: mol_type = other DNA
tttccaaaattaagtcatgcaaggaattttacagcgtcatatgcagagcaaaaaaaagcttatatattaatgact

SEQ ID NO: 256859 - DNA, 75 bp, synthetic construct
  source 1..75: mol_type = other DNA
gaatccctgctaagaaaagcattgggaacctaccaggatagggcggggcacatcaagcggatacgcttcaccgat

SEQ ID NO: 256860 - DNA, 75 bp, synthetic construct
  source 1..75: mol_type = other DNA
aagatgtttaaggcgattaaatcgttgattactgatgtgagcgaaacgcacaagattagcgctgaattgctggca

SEQ ID NO: 256861 - DNA, 75 bp, synthetic construct
  source 1..75: mol_type = other DNA
gttatggacaattcgagtaataattgattttttgatgcttttatatatgagttatcgttgtaataatcttatgaa

SEQ ID NO: 256862 - DNA, 75 bp, synthetic construct
  source 1..75: mol_type = other DNA
agcacgataacggcaacgttgaagcgtctttccgtctatggctagaaacgcgggataatggtaccgttcctaact

SEQ ID NO: 256863 - DNA, 75 bp, synthetic construct
  source 1..75: mol_type = other DNA
ttgtgggcttacttgcgcttttcgcaggtaatgccgctgcaaccgatggtgaaatagtttttgatggcgagattt

SEQ ID NO: 256864 - DNA, 75 bp, synthetic construct
  source 1..75: mol_type = other DNA
cgtttcagaccgcactgaaccgccccgggtttcctggagagtgttttatctgtgaactcaggctgccagatcatc

SEQ ID NO: 256865 - DNA, 75 bp, synthetic construct
  source 1..75: mol_type = other DNA
atgaccacgagccgcaatggtaaacgcgcggcacctgcccacccgcaaaatgccctctccatcaacccagcattg

SEQ ID NO: 256866 - DNA, 75 bp, synthetic construct
  source 1..75: mol_type = other DNA
caaacttgagcgccgggactataacaatggcattctgacagtgaggcaaggaaaggggcgcaaataccgtgaaat

SEQ ID NO: 256867 - DNA, 75 bp, synthetic construct
  source 1..75: mol_type = other DNA
acctcaacctcttattgatacccaaatcctcgcggctttctgcggtcgtccgatgtcatggggctttgcttccat

SEQ ID NO: 256868 - DNA, 75 bp, synthetic construct
  source 1..75: mol_type = other DNA
aagttatctttataaagcaaaatactttagcaaccggtctgcagactatcaacttgcggaactatttgatgcccc

SEQ ID NO: 256869 - DNA, 75 bp, synthetic construct
  source 1..75: mol_type = other DNA
gtatctaccagcccattcgataaattccctccagggcgtaggtcattaaatcaccaaaggaaagaaaataattat

SEQ ID NO: 256870 - DNA, 75 bp, synthetic construct
  source 1..75: mol_type = other DNA
gtcgtcagaccgaagaccagctcaagaagttaaagggatatactggaattacgcccaatgtcgcggctcgactag

SEQ ID NO: 256871 - DNA, 75 bp, synthetic construct
  source 1..75: mol_type = other DNA
gcgtcgaacctgttccatatcggtattctggggatttttgttggtcacttcttcggtatgctgacgccgcactgg

SEQ ID NO: 256872 - DNA, 75 bp, synthetic construct
  source 1..75: mol_type = other DNA
tacctgaatgggttaaaaaaaatgaaattgcagcattctggttctggttagttataattaacacagatcccaaac

SEQ ID NO: 256873 - DNA, 75 bp, synthetic construct
  source 1..75: mol_type = other DNA
atgaaacaatatgaagatggttataacgtgaatggatatagctgggaaaatgaaacaattgagtatttgttgaat

SEQ ID NO: 256874 - DNA, 75 bp, synthetic construct
  source 1..75: mol_type = other DNA
ggttcggggcgctcaatgcatgtatggcgcagcactgtaagtaaagcgaactaccgcttttttatggtgcgcatc

SEQ ID NO: 256875 - DNA, 75 bp, synthetic construct
  source 1..75: mol_type = other DNA
gctgaactggttgtaccgcccgaagtgggcggcttctggatgcgtgagcttggtctgtatgacgatgccggaaca

SEQ ID NO: 256876 - DNA, 75 bp, synthetic construct
  source 1..75: mol_type = other DNA
tgctgattcagtgtctgctggggctaagtaccataccgttttcagcacagtatcctgatggtagcgaaatgatga

SEQ ID NO: 256877 - DNA, 75 bp, synthetic construct
  source 1..75: mol_type = other DNA
ctgcaagctcgtcaggagaaacttgacgccctgcgtaagttaatggaagaagatggtatcaacccggaagagctg

SEQ ID NO: 256878 - DNA, 75 bp, synthetic construct
  source 1..75: mol_type = other DNA
acaatattcgtactcttcgcgcccagggccgcgagctgcctttagaagtacttgaggaaatcctcgaaaagctta

SEQ ID NO: 256879 - DNA, 75 bp, synthetic construct
  source 1..75: mol_type = other DNA
gccgtcagactgaagatcagcttaaaaagttaaaaggatatactgggattacgcccaatgtcgcggctcgactgg

SEQ ID NO: 256880 - DNA, 75 bp, synthetic construct
  source 1..75: mol_type = other DNA
atgattcagtatctgaacgtctttttttacgatatctacccatacatttgtgcgacggtgtttttccttggcagc

SEQ ID NO: 256881 - DNA, 75 bp, synthetic construct
  source 1..75: mol_type = other DNA
taaaggccaggggataccgaaaccgggaacgctttaaactgggagttatgttccactatgggaaactgaatatgg

SEQ ID NO: 256882 - DNA, 75 bp, synthetic construct
  source 1..75: mol_type = other DNA
tatcgctggcgtctgaatgtgatgtgccgatgatgaaaaacgcagcgaaaaccattaaaaaacggttatacggaa

SEQ ID NO: 256883 - DNA, 75 bp, synthetic construct
  source 1..75: mol_type = other DNA
ccggcagcggtacagggtggcgtgtcacagacgtcagcagacggtgatgcggacgtgaaaatgctcatggccatg

SEQ ID NO: 256884 - DNA, 75 bp, synthetic construct
  source 1..75: mol_type = other DNA
atgacgggcaaagaagcaattattcattatctggagacgcacaagagcttctgtgcgccggacgttgccgcacta

SEQ ID NO: 256885 - DNA, 75 bp, synthetic construct
  source 1..75: mol_type = other DNA
ttctttgccgcgccctgttttattggcgagattgagttaatcgataaagaccatgaaccgcgtgcggtgcaggct

SEQ ID NO: 256886 - DNA, 75 bp, synthetic construct
  source 1..75: mol_type = other DNA
tggctgcctgcccgggaataactgtggagagcgcccgggctgtgctggctgcgggatcaggtaaggcagaaccgg

SEQ ID NO: 256887 - DNA, 75 bp, synthetic construct
  source 1..75: mol_type = other DNA
attacctcgggacgcataagagcttctgtgcacaggacgtttccgcggtaacaggcgcaaccgtaaccagcataa

SEQ ID NO: 256888 - DNA, 75 bp, synthetic construct
  source 1..75: mol_type = other DNA
ctctcaattcatacggcgacaatggcagtgagcccagcaagtcacttccgttgtcatagccttccagaagagcag

SEQ ID NO: 256889 - DNA, 75 bp, synthetic construct
  source 1..75: mol_type = other DNA
cttccggttgggccagatgtcaatggttatgcttcatccagctcattactgtagtcattgccgttcagttgagct

SEQ ID NO: 256890 - DNA, 75 bp, synthetic construct
  source 1..75: mol_type = other DNA
gaatttgttcgtacgcgcacttattacccgcagctgggtttaattcaactttttgatggtgagcatctggcgcta

SEQ ID NO: 256891 - DNA, 75 bp, synthetic construct
  source 1..75: mol_type = other DNA
gtgaaagaaatccacaataatgatcttaagcagcaattaattgacgaatccgcatttaaggtgtgctttgcaacg

SEQ ID NO: 256892 - DNA, 75 bp, synthetic construct
  source 1..75: mol_type = other DNA
cccccgtgaactgccgcaggatgccgcacgggaaaccgttctcgcctttgtcagagaaaactttgtcagtcaggg

SEQ ID NO: 256893 - DNA, 75 bp, synthetic construct
  source 1..75: mol_type = other DNA
atcgctttggcagcgatccgttctcgctaattgaagcagcacgggatgaaataaccgagctggcacagatggctg

SEQ ID NO: 256894 - DNA, 75 bp, synthetic construct
  source 1..75: mol_type = other DNA
cgtcgaactttgttaaaccttgaagcccgtggtgagtttcctgagcgtgttcaggttactgaggggcgtaaggca

SEQ ID NO: 256895 - DNA, 75 bp, synthetic construct
  source 1..75: mol_type = other DNA
ccacgatgctggcaggacaacagggcatgagcgttgaacaggcccgggcgattctggccgcggcggcaccacagc

SEQ ID NO: 256896 - DNA, 75 bp, synthetic construct
  source 1..75: mol_type = other DNA
ttatattaagataccaagaacaaaaaaagaggttcgagaaatttaaaccaaagcaccctgttattatgcttcttg

SEQ ID NO: 256897 - DNA, 75 bp, synthetic construct
  source 1..75: mol_type = other DNA
gaggttttttcttatcaaacagagattttagattaaataatactgttgctacaacgatcgcacaaattgcatgtt

SEQ ID NO: 256898 - DNA, 75 bp, synthetic construct
  source 1..75: mol_type = other DNA
ttgcagcagcattcaatgaaccgctgcttctggagcccgcctatgcgcgggttttcttttgcgcgctcgggcgcg

SEQ ID NO: 256899 - DNA, 75 bp, synthetic construct
  source 1..75: mol_type = other DNA
gatttaccgcctccgtcagcagaagccggtctgggcactgtgcaatgacacggcctgctctgcagccatgctgct

SEQ ID NO: 256900 - DNA, 75 bp, synthetic construct
  source 1..75: mol_type = other DNA
atgccgaaatttcgagtggctttatttagcctggccctgatgctggctgtgccttttgcaccggatgccgttgcg

SEQ ID NO: 256901 - DNA, 75 bp, synthetic construct
  source 1..75: mol_type = other DNA
atcattatcccggtggctacaaagcttttattaaggcgatgaatgcgaaagcgaagtctcttgggatgaacaata

SEQ ID NO: 256902 - DNA, 75 bp, synthetic construct
  source 1..75: mol_type = other DNA
ggcgcaaggcatggtatttaagcgaggttgttgcgtggattaacaacattccgcgcgcatcaaattattgccttg

SEQ ID NO: 256903 - DNA, 75 bp, synthetic construct
  source 1..75: mol_type = other DNA
ggaaaatagattttaaggcattttgttgtatttttgatgctataaaagatataaaggaacattataaattaatgt

SEQ ID NO: 256904 - DNA, 75 bp, synthetic construct
  source 1..75: mol_type = other DNA
actcaggggcgcacaaggtggatggcaatcagtttgaagcgttgccggcagaggttcgccaggacatgcagcagc

SEQ ID NO: 256905 - DNA, 75 bp, synthetic construct
  source 1..75: mol_type = other DNA
atggcgaccttctcaaacccggcttataccttgccattccgtaatactaaccacctggtgtatcgcgataactgg

SEQ ID NO: 256906 - DNA, 75 bp, synthetic construct
  source 1..75: mol_type = other DNA
ccggatttacggggcgaatttatccgtggctgggatgacggacgaggtattgatgcaggacgagagatactttca

SEQ ID NO: 256907 - DNA, 75 bp, synthetic construct
  source 1..75: mol_type = other DNA
cgcaatggctcacccggcggcacgctggatgttggaagcacctggttactgcgaagcatcaatgtactggaacga

SEQ ID NO: 256908 - DNA, 75 bp, synthetic construct
  source 1..75: mol_type = other DNA
aaagttgatcttcgaactacgaagggaaaagtggcattagctgcattcaaagaatcaatagatgggatggatata

SEQ ID NO: 256909 - DNA, 75 bp, synthetic construct
  source 1..75: mol_type = other DNA
ccatgaaaaccagtgagtttgtactggagactgaccgcacgcgcattaacagtgaagtggtgatcaatggtggcg

SEQ ID NO: 256910 - DNA, 75 bp, synthetic construct
  source 1..75: mol_type = other DNA
tccggttttgatgataatgataccggagatatcagttcgctcggctctacacaatacggatttggtgacgcttta

SEQ ID NO: 256911 - DNA, 75 bp, synthetic construct
  source 1..75: mol_type = other DNA
ccataaatggcaaaaagtggatatttgatgcatccagtaaaggtgccaaaaaatatgactggtgggcttatgtat

SEQ ID NO: 256912 - DNA, 75 bp, synthetic construct
  source 1..75: mol_type = other DNA
gtccgctgacaatatcaccttgaaaaccagtgagtttgtactggaggctgaccgcacgcgaattaacagcgaagt

SEQ ID NO: 256913 - DNA, 75 bp, synthetic construct
  source 1..75: mol_type = other DNA
gaccgctgacaatatcaccgtgaaaaccagtgagtttgtactggaggctgaccgcacgcgcattaacagcgaagt

SEQ ID NO: 256914 - DNA, 75 bp, synthetic construct
  source 1..75: mol_type = other DNA
gaccgctgacaatatcaccctgaaaaccagtgagtttgtactggaggctgaccgcacgcggattaacagcgaagt

SEQ ID NO: 256915 - DNA, 75 bp, synthetic construct
  source 1..75: mol_type = other DNA
atgaataccggtatctatttcgacatcagcaatgaggactaccacgacggtgacggagtgagtaagtcacaactg

SEQ ID NO: 256916 - DNA, 75 bp, synthetic construct
  source 1..75: mol_type = other DNA
ctggatgcgccggatgtcgatgccgggcacgctctgttccgccgggatctgaatacctatcacgaatgccgcatc

SEQ ID NO: 256917 - DNA, 75 bp, synthetic construct
  source 1..75: mol_type = other DNA
ggccgctgacaatatcaccttgaaaaccagtgagtttgtactggaggctgaccgcacgcgtattaacagcgaagt

SEQ ID NO: 256918 - DNA, 75 bp, synthetic construct
  source 1..75: mol_type = other DNA
cgggaaaactggctttgtcgggtgaaaacgggcgaccttgaaaccaactggattaactggctgacgctgcgcgcg

SEQ ID NO: 256919 - DNA, 75 bp, synthetic construct
  source 1..75: mol_type = other DNA
ccctgaaaaccagtgagtttgtactggaggctgaccgcacgcgtattaacagcgaagtggtgatcaatggtggcg

SEQ ID NO: 256920 - DNA, 75 bp, synthetic construct
  source 1..75: mol_type = other DNA
atgacggcagcatttggcaatctaattgccatgaacgctcaactaacagaaatcatgcgccttatcaccaatctg

SEQ ID NO: 256921 - DNA, 75 bp, synthetic construct
  source 1..75: mol_type = other DNA
atgaatacacaactcacagaaatcatgcgccttatcaccaacctgatccgcacaggggtagtcactgaagtggac

SEQ ID NO: 256922 - DNA, 75 bp, synthetic construct
  source 1..75: mol_type = other DNA
caaatgacggccatgaaaaactaattgatctaagtccagataatgatttagctaaaattacaaaatcattgcgta

SEQ ID NO: 256923 - DNA, 75 bp, synthetic construct
  source 1..75: mol_type = other DNA
catcggaaggtgagcaggtggtgctgctgagtctgggcggcaatctggagactgcctttgcgctgcccgctgtct

SEQ ID NO: 256924 - DNA, 75 bp, synthetic construct
  source 1..75: mol_type = other DNA
gggaatgcccgcacatggtggcgaccatcggaaggtgaacaggtggtgctgctgagtctgggaggtaatctggaa

SEQ ID NO: 256925 - DNA, 75 bp, synthetic construct
  source 1..75: mol_type = other DNA
agactctgaggacggcaacgtggttgagtacccggacggtggctggtttgaatacgaacccgctaccgggcgctg

SEQ ID NO: 256926 - DNA, 75 bp, synthetic construct
  source 1..75: mol_type = other DNA
caccgaagtggaccgggaaaactggctttgccgggtgaaaacgggcgagcttgaaaccaactggatcagctggct

SEQ ID NO: 256927 - DNA, 75 bp, synthetic construct
  source 1..75: mol_type = other DNA
attccaatcagtttccaccgccctcggattctgtggacggcagtgtgacggagtacttggacgggggctggtttg

SEQ ID NO: 256928 - DNA, 75 bp, synthetic construct
  source 1..75: mol_type = other DNA
accgcctttgcgttacccgccatctattcgaatcagttcgcgccaccgtcgacgtcggcgaacgcctgcgtgaca

SEQ ID NO: 256929 - DNA, 75 bp, synthetic construct
  source 1..75: mol_type = other DNA
ccctgaaaaccagtgagtttgtgctggaggctgaccgcacgcgtattaacagcgaagtagtgatcaatggtggcg

SEQ ID NO: 256930 - DNA, 75 bp, synthetic construct
  source 1..75: mol_type = other DNA
gcccgctgtctattcgaatcagttcgcgccaccgtcgacgtcggcagacgcctgcgtgacagaacatcctgacgg

SEQ ID NO: 256931 - DNA, 75 bp, synthetic construct
  source 1..75: mol_type = other DNA
accgaaccggtggtgcgcctgaatgtggaatcgcgcggtgatgtgccgctgatggaagaaaagacaaaacttatc

SEQ ID NO: 256932 - DNA, 75 bp, synthetic construct
  source 1..75: mol_type = other DNA
cctatgatattcgcgggaaattaggcgaagaactgaatgaagatatcgcctggcgtattgggcgtgcctatggcg

SEQ ID NO: 256933 - DNA, 75 bp, synthetic construct
  source 1..75: mol_type = other DNA
gcgtttaacagtaagctggtcatggcgacagtacgcagtcacgatcagtacaacacgacgatttatggtatggat

SEQ ID NO: 256934 - DNA, 75 bp, synthetic construct
  source 1..75: mol_type = other DNA
atgagttctttaacttgttttaaggcttacgacattcgcgggaaattaggcgaagaactgaatgaagatatcgcc

SEQ ID NO: 256935 - DNA, 75 bp, synthetic construct
  source 1..75: mol_type = other DNA
gttgatcacctgttcggttatatcaacgtcaaaaacctcacgccgctcaagctggtgattaactccgggaacggc

SEQ ID NO: 256936 - DNA, 75 bp, synthetic construct
  source 1..75: mol_type = other DNA
atgcaaaaaattacatgttttaaagcctatgatattcgcgggaaattaggcgaagaattgaatgaagatatcgcc

SEQ ID NO: 256937 - DNA, 75 bp, synthetic construct
  source 1..75: mol_type = other DNA
tttccccaacggtattcctaacccgctgctgcctgaatgccgcgacgacacccgcaatgcggtcatcaaacacgg

SEQ ID NO: 256938 - DNA, 75 bp, synthetic construct
  source 1..75: mol_type = other DNA
tgtttcctgtttgacgaaaaagggcagtttattgagggttactacattgtcggtttgctggcagaggcgttcctc

SEQ ID NO: 256939 - DNA, 75 bp, synthetic construct
  source 1..75: mol_type = other DNA
ccgatgaactacaacggcatgaagctggtgcgcgagaacgcgaagcccatcagcggcgacaccggcctgcgggat

SEQ ID NO: 256940 - DNA, 75 bp, synthetic construct
  source 1..75: mol_type = other DNA
ggaaagatatcgaacgtatttctggactaagtcagacacaaatcgccgaactggctgatgcatatgccgctgccg

SEQ ID NO: 256941 - DNA, 75 bp, synthetic construct
  source 1..75: mol_type = other DNA
atgaagaaaaaaattgaatcctaccagggtgctgcaggtgggtggggtgctgtcaaatccgtagcgaatgcagta

SEQ ID NO: 256942 - DNA, 75 bp, synthetic construct
  source 1..75: mol_type = other DNA
ctgcgcacctccaacaccgaaccggtggtgcggttgaatgttgagtcaaatgcaaatagagaacttatgatagcg

SEQ ID NO: 256943 - DNA, 75 bp, synthetic construct
  source 1..75: mol_type = other DNA
ctttaaagtcctcggcgcacctgtggaattaatcaaagtgcacaacacgccggacggcaatttccccaacggtat

SEQ ID NO: 256944 - DNA, 75 bp, synthetic construct
  source 1..75: mol_type = other DNA
cagcggtgataccggactgcgcgatgtccagcgtctggcagaagcgaacgactttccccccgtcgatgaaaccaa

SEQ ID NO: 256945 - DNA, 75 bp, synthetic construct
  source 1..75: mol_type = other DNA
cagcggtgataccggactgcgcgaagtccagcgtctggcagaagctaacgactttccccccgtcgatgaaaccaa

SEQ ID NO: 256946 - DNA, 75 bp, synthetic construct
  source 1..75: mol_type = other DNA
cagcggagataccggactgcgcgacgtccagcgtctggcagaagcaaacgactttccccccgtcgatgaaaccaa

SEQ ID NO: 256947 - DNA, 75 bp, synthetic construct
  source 1..75: mol_type = other DNA
gaaaagaaccccggcgcgcgcatcattcacgacccgcgtctgtcgtggaacaccgtggacgtcgtcacggcggcg

SEQ ID NO: 256948 - DNA, 75 bp, synthetic construct
  source 1..75: mol_type = other DNA
agtttatcgagggctactacattgtcggcctgctggcagaagcattcctcgaaaaaaatcccggcgcgaagatca

SEQ ID NO: 256949 - DNA, 75 bp, synthetic construct
  source 1..75: mol_type = other DNA
cagcggcgataccggactgcgcgaggtccagcgtctggcagaagccaacgactttccccccgtcgatgaaaccaa

SEQ ID NO: 256950 - DNA, 75 bp, synthetic construct
  source 1..75: mol_type = other DNA
ggcaccgaagagatttatttcgccacgttccatctcggcgtggatggcggcattgaagttactgccagccataaa

SEQ ID NO: 256951 - DNA, 75 bp, synthetic construct
  source 1..75: mol_type = other DNA
ggcaccgaagagatttatttcgccacgttccatctcggcgtggatggcggcattgaagttacagccagccataat

SEQ ID NO: 256952 - DNA, 75 bp, synthetic construct
  source 1..75: mol_type = other DNA
tatgcgcaaggaagacgccatctacggtggcgaaatgagcgctcaccattacttccgtgatttcgcttactgcga

SEQ ID NO: 256953 - DNA, 75 bp, synthetic construct
  source 1..75: mol_type = other DNA
ggcaccgaagagatttatttcgccacgttccatctcggcgtggatggcggcatggaagttacggccagccataac

SEQ ID NO: 256954 - DNA, 75 bp, synthetic construct
  source 1..75: mol_type = other DNA
ggcaccgaagagatttatttcgccacgttccatctcggcgtggatggcggcatggaagttaccgccagccataag

SEQ ID NO: 256955 - DNA, 75 bp, synthetic construct
  source 1..75: mol_type = other DNA
ggcaccgaagagatttatttcgccacgttccatctcggcgtggatggcggcatcgaagttacggccagccataag

SEQ ID NO: 256956 - DNA, 75 bp, synthetic construct
  source 1..75: mol_type = other DNA
cccgtcgctaaacagtcagttcaacgtgctggttaacctggccgtggtgaccatatcattccgtatattctgtca

SEQ ID NO: 256957 - DNA, 75 bp, synthetic construct
  source 1..75: mol_type = other DNA
aaggtcgctaatgtgcccccctcaaaagcgaaagttgcaaactttgttgcttttgttggcgcgatgtatagcttt

SEQ ID NO: 256958 - DNA, 75 bp, synthetic construct
  source 1..75: mol_type = other DNA
tcccgaaaattttctcccgtgtgagcaaagtcgatgcaccagtacagggaatgctgaccattgtcatcatccaga

SEQ ID NO: 256959 - DNA, 75 bp, synthetic construct
  source 1..75: mol_type = other DNA
cggcggtgatttatatcgtctccaccaacgtgattgccgggattggggatgcggacgatttcctggactctcagg

SEQ ID NO: 256960 - DNA, 75 bp, synthetic construct
  source 1..75: mol_type = other DNA
aggtggtatgggcggttatgccgagtatgctttcggtaaatccggtaactttatggcgaactacacctacggtgt

SEQ ID NO: 256961 - DNA, 75 bp, synthetic construct
  source 1..75: mol_type = other DNA
ttccggtcgtcggtctgtgcattattggctggttctggtttagcccgacgctgtacgttgattcctggaatccgc

SEQ ID NO: 256962 - DNA, 75 bp, synthetic construct
  source 1..75: mol_type = other DNA
acgctggcggcgatgccggagatgacggtggaaaaagcccgcccgatcctggctgcttcaccgcaggcggatgcc

SEQ ID NO: 256963 - DNA, 75 bp, synthetic construct
  source 1..75: mol_type = other DNA
gtcttcagcaggcaatggcagatagccaggtgcggggcatactgctggacattgacagtccgggcgggcaggccg

SEQ ID NO: 256964 - DNA, 75 bp, synthetic construct
  source 1..75: mol_type = other DNA
ggtcgtgaacaactggcggcaacgctggcggcgatgccggagatgacggtggaaaaagcccgcccgatcctggct

SEQ ID NO: 256965 - DNA, 75 bp, synthetic construct
  source 1..75: mol_type = other DNA
cattatggcgtgtgaagaagcgaacggtcgtgaacaactggcggcaacgctggcggcgatgccggagatgacggt

SEQ ID NO: 256966 - DNA, 75 bp, synthetic construct
  source 1..75: mol_type = other DNA
cattgatgccgggctggcggatgaattagtcaatgcgtcggatgccatcagtgtgatggccacggcgctgaacag

SEQ ID NO: 256967 - DNA, 75 bp, synthetic construct
  source 1..75: mol_type = other DNA
cggcggtgatttatatcgtctccaccaacgtgattgccgggattgtgcctaatatggagctggcaaattcaacgg

SEQ ID NO: 256968 - DNA, 75 bp, synthetic construct
  source 1..75: mol_type = other DNA
catgcgccgcgaagatgccatttatggtggcgaaatgagcgcacaccactacttccgcgattttgcctattgcga

SEQ ID NO: 256969 - DNA, 75 bp, synthetic construct
  source 1..75: mol_type = other DNA
gagaagtatcccggggagaaaattgtccacgatccgcgcctgtcctggaataccgtggatgtggtgacggcggca

SEQ ID NO: 256970 - DNA, 75 bp, synthetic construct
  source 1..75: mol_type = other DNA
cgatgctggcagggcaacagggcatgagcgttgaacaggcccgggcgattctggccgcggcggcaccgcagcagc

SEQ ID NO: 256971 - DNA, 75 bp, synthetic construct
  source 1..75: mol_type = other DNA
cccgtcgatgaaaccaaacgcggtcgctatcagcaaatcaatctgcgtgacgcttacgttgatcacctgttcggt

SEQ ID NO: 256972 - DNA, 75 bp, synthetic construct
  source 1..75: mol_type = other DNA
agcggtgagatcaacagcaaactggcgcaacccgttgaggcaattaatcgcgtggaacagcattttagccgtgag

SEQ ID NO: 256973 - DNA, 75 bp, synthetic construct
  source 1..75: mol_type = other DNA
ccgatggattacaacggcatgaagctggtgcgcgaaggggctcgcccgatcagcggtgataccggactgcgcgat

SEQ ID NO: 256974 - DNA, 75 bp, synthetic construct
  source 1..75: mol_type = other DNA
agcagcgacgaaatgaacgcgctcgcgatgagctgggacggcagcgagcgaccgcgccagaaagcgtaccgcgtg

SEQ ID NO: 256975 - DNA, 75 bp, synthetic construct
  source 1..75: mol_type = other DNA
tatgacggtggaaaaagcccgcccgatcctggcggctgcaccacaggcgggtgtcgggccctcactccgtgatca

SEQ ID NO: 256976 - DNA, 75 bp, synthetic construct
  source 1..75: mol_type = other DNA
ccggcagcggtgcagggtggcgtgtcacaggcgtcagcagacggtgatgcggacgtgaaaatgctcatggccatg

SEQ ID NO: 256977 - DNA, 75 bp, synthetic construct
  source 1..75: mol_type = other DNA
gcagcggtgcggggtggcgtgtcacagacgtcagcagacggtgatgcggacgtgaaaatgctcatggccatgcca

SEQ ID NO: 256978 - DNA, 75 bp, synthetic construct
  source 1..75: mol_type = other DNA
ccctgtttgaacgcatcatggcgaaccattcaccggcagcggtacagggtggcgtgccacagacgtcagcagacg

SEQ ID NO: 256979 - DNA, 75 bp, synthetic construct
  source 1..75: mol_type = other DNA
ccggggcgtttgactgtgccgacatgatttaccgcctccgggagaaaaaaccagtctgggcgttgtgcaatgaga

SEQ ID NO: 256980 - DNA, 75 bp, synthetic construct
  source 1..75: mol_type = other DNA
cgtagcgagtcagtgagcgaggaagcggaaaagcgcctggacgagcattttctccttacgcatctgtgcggcatt

SEQ ID NO: 256981 - DNA, 75 bp, synthetic construct
  source 1..75: mol_type = other DNA
gctgaattcccctccaaccaggtattgtcggaaaaacgggcgacggaagtggcttcactgctgacgtccggtggt

SEQ ID NO: 256982 - DNA, 75 bp, synthetic construct
  source 1..75: mol_type = other DNA
tattgtgaaatcatcccagtccactgctcaggttgaaggtgcgtaccgcctgatacgtaacccgtctgtgtcccc

SEQ ID NO: 256983 - DNA, 75 bp, synthetic construct
  source 1..75: mol_type = other DNA
cgtacccgtgacgctaacttctctctggaaggtctgaccggctttactatgtatggcaaaacggcaggcgttatc

SEQ ID NO: 256984 - DNA, 75 bp, synthetic construct
  source 1..75: mol_type = other DNA
gtggtttaccgtcctgacatcaaccaggggaactatctgaccgctaacgacgtatccaaaatacgtgttggcatg

SEQ ID NO: 256985 - DNA, 75 bp, synthetic construct
  source 1..75: mol_type = other DNA
tcgggaaaggagataccgtaccggtggccgataaccgcactaaaaccggacgggcgcagaaccgtcgggtggaaa

SEQ ID NO: 256986 - DNA, 75 bp, synthetic construct
  source 1..75: mol_type = other DNA
ctggtcacttttcatggcgaaagtgaaggcggcatcaagctgtttcagataattgggcgtctggccgccagcttc

SEQ ID NO: 256987 - DNA, 75 bp, synthetic construct
  source 1..75: mol_type = other DNA
ggaaatggacaggtacgttgagcgtgaaccatcaggatcacaggccagtcagtttgccggacgtgcgggaaattg

SEQ ID NO: 256988 - DNA, 75 bp, synthetic construct
  source 1..75: mol_type = other DNA
gtattccgtggcgatacgatgtttgtaccagggcagaaaaccgtaaatgatgcgctccgctcggttattgataaa

SEQ ID NO: 256989 - DNA, 75 bp, synthetic construct
  source 1..75: mol_type = other DNA
ctgtgcgcactggcgcagatgccccgtgaacttgcccctgcttttgtcgaacattaccgcgccctgctggagcgt

SEQ ID NO: 256990 - DNA, 75 bp, synthetic construct
  source 1..75: mol_type = other DNA
tgatgttgaccttatttggtttttacaactaccggatgagtctcgccacagaagccgtacagcagcgtatcgatg

SEQ ID NO: 256991 - DNA, 75 bp, synthetic construct
  source 1..75: mol_type = other DNA
cgcgctttgcacatggccaacgtggtaaagctatcggaagaggagctggtcttcatcagcagcagtaatgattta

SEQ ID NO: 256992 - DNA, 75 bp, synthetic construct
  source 1..75: mol_type = other DNA
aaatccactctcttatgcgatcctcgaatcttgcggtcgcctgcgttccactcagcctaacctcagcgtgcgcta

SEQ ID NO: 256993 - DNA, 75 bp, synthetic construct
  source 1..75: mol_type = other DNA
agacctatatcgacgaactgaagcagtaccataacccgcgctacggtcgtggtccgattggcggcaactattatg

SEQ ID NO: 256994 - DNA, 75 bp, synthetic construct
  source 1..75: mol_type = other DNA
aaccaggcaagcgaagttcgcgccgcgccgatcttcccggaatataccgtctcctggatcgaaaaagagattgat

SEQ ID NO: 256995 - DNA, 75 bp, synthetic construct
  source 1..75: mol_type = other DNA
atgcgctgtaaaacgctgactgctgcagcagcagtactattgatgttgaccgcaagctgttccactctggagcga

SEQ ID NO: 256996 - DNA, 75 bp, synthetic construct
  source 1..75: mol_type = other DNA
actaccggcagttaagcctccagttgccaaagggaagcgatccggtataccaaaaagacgataccatcaaaaaat

SEQ ID NO: 256997 - DNA, 75 bp, synthetic construct
  source 1..75: mol_type = other DNA
acaacatcgtttcccgcgaaacgctgctggaagcgaaaaaacatccggatcagtaccgcgatctggtagtgcgtg

SEQ ID NO: 256998 - DNA, 75 bp, synthetic construct
  source 1..75: mol_type = other DNA
atgagcacaagagtatgggtactcggtgatgcggttgttgatttattacccgaaagccaggggagactactacag

SEQ ID NO: 256999 - DNA, 75 bp, synthetic construct
  source 1..75: mol_type = other DNA
cgtatccgcatcattctcatgcgaataaacggatgcttgaacaggcaaggacgctggaaggcgtcgaagttcgct

SEQ ID NO: 257000 - DNA, 75 bp, synthetic construct
  source 1..75: mol_type = other DNA
ggaataccaccactaacccgaagacgcgcgggctgctggctcactctgtcctgatgtacgcccctgacagcgccc

SEQ ID NO: 257001 - DNA, 75 bp, synthetic construct
  source 1..75: mol_type = other DNA
ggtacccggaagggattagaaacaggagactggaggcctttatttgtcactctggagaagagtgcggtagatttc

SEQ ID NO: 257002 - DNA, 75 bp, synthetic construct
  source 1..75: mol_type = other DNA
tgcaggagagcttgaaaacgctcagaagagtgttgacgtgaaggtcaccggatttccgggatggcgtgacgttca

SEQ ID NO: 257003 - DNA, 75 bp, synthetic construct
  source 1..75: mol_type = other DNA
aggagaaagaaactttacctttatggtacgcccaagtgccgatctttttttacaacctgatgaccttcctgcatt

SEQ ID NO: 257004 - DNA, 75 bp, synthetic construct
  source 1..75: mol_type = other DNA
gtgaatcaggacggcgagctggatgtgagcggcggcggtcacggtattgatatcaccggcgacagcgcaacggtg

SEQ ID NO: 257005 - DNA, 75 bp, synthetic construct
  source 1..75: mol_type = other DNA
gaaacacgggaatatatttccacatcaactgaatatcttgcggttggcgtcggtatcccggcatgttcttgttta

SEQ ID NO: 257006 - DNA, 75 bp, synthetic construct
  source 1..75: mol_type = other DNA
cagtcactgattgatactgcaatggcttccattagtctgattcaactgaaattgcaggccgggcggaagctgatg

SEQ ID NO: 257007 - DNA, 75 bp, synthetic construct
  source 1..75: mol_type = other DNA
aacggcaacaccaccgttgacggcaaggattccacgggcaccgagataaacggtgacaaagccatcgtcaacaac

SEQ ID NO: 257008 - DNA, 75 bp, synthetic construct
  source 1..75: mol_type = other DNA
gattccaccggtacggaaatcaacggtaataacggaaaagttattcaggacggcgatctggatgtcagcggcggc

SEQ ID NO: 257009 - DNA, 75 bp, synthetic construct
  source 1..75: mol_type = other DNA
gtgagcgcagatggcgcaacgaagtggcaatataatcacaacggtgagcttgttattacgggtgataatgggctt

SEQ ID NO: 257010 - DNA, 75 bp, synthetic construct
  source 1..75: mol_type = other DNA
gtggccaggctggccggacaaaatgctggcgcaggcgcagcaggggcaaggctggttctggcagcagaacagcga

SEQ ID NO: 257011 - DNA, 75 bp, synthetic construct
  source 1..75: mol_type = other DNA
cagaccgtggccgctggtgatttatcagcgtgccggacgggaatggctggaagagagcctggatgacacgcaggg

SEQ ID NO: 257012 - DNA, 75 bp, synthetic construct
  source 1..75: mol_type = other DNA
attgttctgccggaaggaacggatgctgcgaagaccggagtaaatgacggttggatgcacctgtcaccgcgcgag

SEQ ID NO: 257013 - DNA, 75 bp, synthetic construct
  source 1..75: mol_type = other DNA
ctggattacattgacgcggtgacggtaacagataccagcaccgcgccggatatcatctggcctgaactgccggag

SEQ ID NO: 257014 - DNA, 75 bp, synthetic construct
  source 1..75: mol_type = other DNA
acgtatgaatatactggctggtctgatgaatatattaatactggcgtaagtatgcccgcttgttccactggtatt

SEQ ID NO: 257015 - DNA, 75 bp, synthetic construct
  source 1..75: mol_type = other DNA
gccgtggccactggtgatttaccagcgtgccgggcgggaatggctggaagagagcctggatgacacacagggctg

SEQ ID NO: 257016 - DNA, 75 bp, synthetic construct
  source 1..75: mol_type = other DNA
atgattcagacgacactccagttcctccaactcctggcggagatgagataataccagacgatggtccggatgata

SEQ ID NO: 257017 - DNA, 75 bp, synthetic construct
  source 1..75: mol_type = other DNA
aaaaaaagaaaacaatgattttttggcatagtgatatcgtaagacaaaagaagctcaaacttattttaggttttt

SEQ ID NO: 257018 - DNA, 75 bp, synthetic construct
  source 1..75: mol_type = other DNA
tggccgggcagcatacaaatttaagcctgatataagcaaaccagaagatgaacgtgatgatagctattttgtgaa

SEQ ID NO: 257019 - DNA, 75 bp, synthetic construct
  source 1..75: mol_type = other DNA
agtgaaattcttttacgcccacctccaggaaaatcaaatatcagtgtgaacaggtttaatggtgatataccccaa

SEQ ID NO: 257020 - DNA, 75 bp, synthetic construct
  source 1..75: mol_type = other DNA
acaaaataaaaatggatatttagaaggtttaactgagcgaggacatgcgactatagatatattacagttgaatag

SEQ ID NO: 257021 - DNA, 75 bp, synthetic construct
  source 1..75: mol_type = other DNA
aacttgaactatgggagaagtttaagcatcaatgtgcttactgtggcactaaactttatgaaccattgatggcgg

SEQ ID NO: 257022 - DNA, 75 bp, synthetic construct
  source 1..75: mol_type = other DNA
cataggaatgtttgtcgtaaaatttaccccgttcctacaaaaaaaccacataccagaagccgtcgttggtggctt

SEQ ID NO: 257023 - DNA, 75 bp, synthetic construct
  source 1..75: mol_type = other DNA
tcgatgttcctggactttcgaccatgctggaaggcgccagccgtccagggcattttcgcggtgtttcaaccatcg

SEQ ID NO: 257024 - DNA, 75 bp, synthetic construct
  source 1..75: mol_type = other DNA
tctgacggcagaacaacgcaaaattgcgcccggtctgtacaaggttttatgttcgattgcagacaaattgcaggc

SEQ ID NO: 257025 - DNA, 75 bp, synthetic construct
  source 1..75: mol_type = other DNA
aacgggcagtgattctggtagccgcctggcttggcgatgcccgcctgatcgacaataaaatagtcgagctggcgt

SEQ ID NO: 257026 - DNA, 75 bp, synthetic construct
  source 1..75: mol_type = other DNA
aacgagcggtgattctggtagccgcctggcttggcgatgctcgcctgatcgacaacaaaatcgtcgaactggcgt

SEQ ID NO: 257027 - DNA, 75 bp, synthetic construct
  source 1..75: mol_type = other DNA
gctggaaggtgccagccgtccaggacattttcgcggcgtatcgaccatcgtcagcaaactgttcaacctggtcca

SEQ ID NO: 257028 - DNA, 75 bp, synthetic construct
  source 1..75: mol_type = other DNA
cgagctgtgattctggtagccgcctggcttggcgatgcccgcctgatcgacaacaaaatggtcgaactggcgtaa

SEQ ID NO: 257029 - DNA, 75 bp, synthetic construct
  source 1..75: mol_type = other DNA
tgatgcagctgatgctcaggctatctgtgaagctgttcgtcgtccgcatatgcggttcgtaccagtgaaagacga

SEQ ID NO: 257030 - DNA, 75 bp, synthetic construct
  source 1..75: mol_type = other DNA
gggatggaagcatgctccggggctcactactgggcaagattgtttcggcagtatggtcatgagccacgtctgatg

SEQ ID NO: 257031 - DNA, 75 bp, synthetic construct
  source 1..75: mol_type = other DNA
gtaggggcagagaatagaacggacccgtttagccgttgggtctgctcgttgattggtaggacattacggcgatga

SEQ ID NO: 257032 - DNA, 75 bp, synthetic construct
  source 1..75: mol_type = other DNA
actggcgtgctgtcgttgcaatcgccgccaagaatgcgaggttgtgctgggcatcattatattacggcgatgact

SEQ ID NO: 257033 - DNA, 75 bp, synthetic construct
  source 1..75: mol_type = other DNA
accctactggtccagggagcccgttctgtaatggtaggggcagagaatagaacggacccgtttagccgttgggtc

SEQ ID NO: 257034 - DNA, 75 bp, synthetic construct
  source 1..75: mol_type = other DNA
acgcttctggtacagggggctcgttcagtactgattggcgctgagaaaaggactgactcattcagtcgttgggtc

SEQ ID NO: 257035 - DNA, 75 bp, synthetic construct
  source 1..75: mol_type = other DNA
attccgccgccgctgcgtgaatatggcgcgtccgaggtgcgttccgttacccgcgcctttaaccatatggcggct

SEQ ID NO: 257036 - DNA, 75 bp, synthetic construct
  source 1..75: mol_type = other DNA
ggcacggggttaggactggcgattgtgcagcgtatcgtggacaaccataacgggatgctggagcttggtaccagt

SEQ ID NO: 257037 - DNA, 75 bp, synthetic construct
  source 1..75: mol_type = other DNA
tgtgaatctgtccgtcgtccgcatatgcggttcgtaccagtgaaagacgaaagccagcaggccatgcagtgttta

SEQ ID NO: 257038 - DNA, 75 bp, synthetic construct
  source 1..75: mol_type = other DNA
gccaaaacagatcatcgcagccagcagttaatggaactgaaaggtgttgggcccaccacagcgagtgcgctggtc

SEQ ID NO: 257039 - DNA, 75 bp, synthetic construct
  source 1..75: mol_type = other DNA
atcggtgagtggatttcgcagttgcctggtattggcgcgccttttgggcgttatctgcggggcaaagcggccgac

SEQ ID NO: 257040 - DNA, 75 bp, synthetic construct
  source 1..75: mol_type = other DNA
gcaattcacgccgcgctttcccgatcaccaaaatggataggggatgatttaacgaatggatgcactacaaactca

SEQ ID NO: 257041 - DNA, 75 bp, synthetic construct
  source 1..75: mol_type = other DNA
gcatttgctaataaaaaagcagaggttaccgcgctggttaatgagaatgccaaatttgcgacgctcaagaaggaa

SEQ ID NO: 257042 - DNA, 75 bp, synthetic construct
  source 1..75: mol_type = other DNA
ggacggcatgaagtggatttcccgcgcgacaacgggatgcgttttcataacggcaacctgccgctgcatgaaaac

SEQ ID NO: 257043 - DNA, 75 bp, synthetic construct
  source 1..75: mol_type = other DNA
gccaccacaccgatatcgccattattatgggtcttgcaggtaacgaacctgccaccgtggatatcgacagtattc

SEQ ID NO: 257044 - DNA, 75 bp, synthetic construct
  source 1..75: mol_type = other DNA
gtgacaacgggatgcgttttcacaatggcaacctgccgctgcatgaaaacggcatgcagatccacgcgtataacg

SEQ ID NO: 257045 - DNA, 75 bp, synthetic construct
  source 1..75: mol_type = other DNA
gtgaaagcgatcaacgccgcacgcatggccttacgccgcaccagtgcaccgcgcgtctcgctggataaggtcatc

SEQ ID NO: 257046 - DNA, 75 bp, synthetic construct
  source 1..75: mol_type = other DNA
gcggtagcccggaacaggtttgtgtggcagcggaaattgggatggaacacaacctcggtctgacctgcgatccgg

SEQ ID NO: 257047 - DNA, 75 bp, synthetic construct
  source 1..75: mol_type = other DNA
aacctcggtctgacctgcgaccccgttgcagggcaagttcaggtgccgtgcattgaacgtaatgccattgcctct

SEQ ID NO: 257048 - DNA, 75 bp, synthetic construct
  source 1..75: mol_type = other DNA
tgacgaacaaacactgctggcgatgcggacatggctagcaggtgatttagcggggcaggattgggtgacgctggg

SEQ ID NO: 257049 - DNA, 75 bp, synthetic construct
  source 1..75: mol_type = other DNA
gaaatcttacccgtactgaccagtgaactgggtatggggccgcaccactccgatgaaggatattgcgcatgtctg

SEQ ID NO: 257050 - DNA, 75 bp, synthetic construct
  source 1..75: mol_type = other DNA
cggcaagaagacttcttgatgtttgctatgcacttagcgatgcatgggaaaaagagaacggcggcactatttacg

SEQ ID NO: 257051 - DNA, 75 bp, synthetic construct
  source 1..75: mol_type = other DNA
tattattgcccggacgcttttcacgccccatgagttagcgaccggtgtcatgacggcgttagttggtgcgcctgt

SEQ ID NO: 257052 - DNA, 75 bp, synthetic construct
  source 1..75: mol_type = other DNA
ctgctccctctttcagcttgtgtcggcgcgcttttgttattactggcagatattattgcccggacgcttttcacg

SEQ ID NO: 257053 - DNA, 75 bp, synthetic construct
  source 1..75: mol_type = other DNA
tggcatttcctgttgggcgtccattgctggcatcagcgggaggcgcggtactgttcctgctgatattgctgctct

SEQ ID NO: 257054 - DNA, 75 bp, synthetic construct
  source 1..75: mol_type = other DNA
gatatcgcagcatttaacgacctgaaaaccgctggggtggaatgcttcgttcagggcgtcccgacagagcctgct

SEQ ID NO: 257055 - DNA, 75 bp, synthetic construct
  source 1..75: mol_type = other DNA
ggtacaacaaaacctgatggaaatggtactggcagaagggatcgccgtacgtttctggacgctgcaaaaagttat

SEQ ID NO: 257056 - DNA, 75 bp, synthetic construct
  source 1..75: mol_type = other DNA
gacgggcgcggtcaccctgatccagcgttttggatcggcgctcaatctgaatgttcacttccacatgctgtttct

SEQ ID NO: 257057 - DNA, 75 bp, synthetic construct
  source 1..75: mol_type = other DNA
ggttcacctgcctgttctttttacaatacatctgctgcaccgtctggatatccgattctcgcttgtcagagggta

SEQ ID NO: 257058 - DNA, 75 bp, synthetic construct
  source 1..75: mol_type = other DNA
gccatgaaagtcatcgcctgcattgaagaccctatagtgatcaagcagatcctggggtcgtttgcgggagggggc

SEQ ID NO: 257059 - DNA, 75 bp, synthetic construct
  source 1..75: mol_type = other DNA
gcaaggcctgctggaacgggatgtcgaaaacagctatctggcctcggatgcggtggatgacgacccgatgacacc

SEQ ID NO: 257060 - DNA, 75 bp, synthetic construct
  source 1..75: mol_type = other DNA
caaatggtggcagaaaccgtgggagttccggtcagcgatgtccgcgtaatttcgacacaagacaccgacgttaca

SEQ ID NO: 257061 - DNA, 75 bp, synthetic construct
  source 1..75: mol_type = other DNA
atcagctacgacagcttttccagcagcacacagctcgctggcagcatgagttacctgatctgaccaaacctcagt

SEQ ID NO: 257062 - DNA, 75 bp, synthetic construct
  source 1..75: mol_type = other DNA
gaatacttcatggaccgcgttcgtcttagcctgacactgccaaaagcatccgatccgtgttatctggatatggca

SEQ ID NO: 257063 - DNA, 75 bp, synthetic construct
  source 1..75: mol_type = other DNA
tcggcaccgggcgttggtcacgccggcaaaacggggcaggggcaacaaggtcagggtggctgatgaaccggcaac

SEQ ID NO: 257064 - DNA, 75 bp, synthetic construct
  source 1..75: mol_type = other DNA
aaacagtcacgatcaacatcagtgatatcaaaaacggcctgacaacgcgtcttaaaaaccatctggacggcgaag

SEQ ID NO: 257065 - DNA, 75 bp, synthetic construct
  source 1..75: mol_type = other DNA
ataccctggctgacacatgccgctggtgtaaagccaatccggataaattcactgtctgcgtggaatccggcagca

SEQ ID NO: 257066 - DNA, 75 bp, synthetic construct
  source 1..75: mol_type = other DNA
cggatttatatgagtagtgttgatgatttaaacacactattgaaccgccccgggtttcctggagagtgttttatc

SEQ ID NO: 257067 - DNA, 75 bp, synthetic construct
  source 1..75: mol_type = other DNA
gtgcgcagctacttgggcatgtgcgcggcgaaacggaaacagaggtgcgatatagcaaagacctcaaaccgattc

SEQ ID NO: 257068 - DNA, 75 bp, synthetic construct
  source 1..75: mol_type = other DNA
tgattggctggctaagaccacgcctccagtcgctagtgttcatcctaccgtgcctcttgccgctcctgcccctac

SEQ ID NO: 257069 - DNA, 75 bp, synthetic construct
  source 1..75: mol_type = other DNA
cgattcgaaaacgtttgggtggtaggtaagaaatgcttccaaagcgatcgctctgcggggcttaattttgaagca

SEQ ID NO: 257070 - DNA, 75 bp, synthetic construct
  source 1..75: mol_type = other DNA
taaaggccacacagccttagattatctttcttatatcgcgaagatctttgctttaattaaacttctgagcggtga

SEQ ID NO: 257071 - DNA, 75 bp, synthetic construct
  source 1..75: mol_type = other DNA
ttgaaaagagaatcgaggagaattctaaaggccacacagccttagattatctttcttatatcgcgaagatctttg

SEQ ID NO: 257072 - DNA, 75 bp, synthetic construct
  source 1..75: mol_type = other DNA
ctggataaggtggttaactgccgtactgacgaccgtatgattgatgagattatgcgtcttggccgtcttcagaag

SEQ ID NO: 257073 - DNA, 75 bp, synthetic construct
  source 1..75: mol_type = other DNA
aatatgttcaccgcaaacattacaatgaaaacttgtcatggcttcgtgaagagtatttgaaacatcgacgtaagg

SEQ ID NO: 257074 - DNA, 75 bp, synthetic construct
  source 1..75: mol_type = other DNA
acaagcccatatcatccccttggatgaggattgtatacctatacaagggctaaagtttgaactgaaatggaaacc

SEQ ID NO: 257075 - DNA, 75 bp, synthetic construct
  source 1..75: mol_type = other DNA
ctgtagcagtcataacatccctgctgagtggaaccggcgtattccttctcggagttagagacgggcgcatttctg

SEQ ID NO: 257076 - DNA, 75 bp, synthetic construct
  source 1..75: mol_type = other DNA
tgatttttctttgcccgagatagcgagattcaacattcctgatgggctggatgctgtaagagatgcgctgcgaag

SEQ ID NO: 257077 - DNA, 75 bp, synthetic construct
  source 1..75: mol_type = other DNA
gacgctggatgagttaatcgccaaagcggcagaatgtggcgataaactgatgacagaagagtctgtcaaaaagta

SEQ ID NO: 257078 - DNA, 75 bp, synthetic construct
  source 1..75: mol_type = other DNA
ggaactgttgaacgcaatgcgcaagggcgattccatcaatattgcccgtttaactattgggcacctttgctgggc

SEQ ID NO: 257079 - DNA, 75 bp, synthetic construct
  source 1..75: mol_type = other DNA
gccgggctggccggagaaaatgctggcgcagcaggagcagggctggttctggcagcagaacagcgaggggcggta

SEQ ID NO: 257080 - DNA, 75 bp, synthetic construct
  source 1..75: mol_type = other DNA
ggcgtatctaaagataacggttcatcttttacgaatatgaagctagacaataccccattacgtattgacgttacg

SEQ ID NO: 257081 - DNA, 75 bp, synthetic construct
  source 1..75: mol_type = other DNA
agcagttaaattgtcatcaaatactgcaactgatataggtcaaggcaattatagcgcatcttttgttgtaactgc

SEQ ID NO: 257082 - DNA, 75 bp, synthetic construct
  source 1..75: mol_type = other DNA
agttgacgatagacaacaagggtggctaggtctggcttttgctgtatcaacagataacggctcgtcttttaataa

SEQ ID NO: 257083 - DNA, 75 bp, synthetic construct
  source 1..75: mol_type = other DNA
tttgatcaggtggcagagcaggagatcatggacgaaatcagaaaacgctttaaaaaggccacagaaacgccgtaa

SEQ ID NO: 257084 - DNA, 75 bp, synthetic construct
  source 1..75: mol_type = other DNA
atctcttcagattggcatatcattatgtttatgagttttcaaaacaacatcaaacaaaaattcaaaactatgttg

SEQ ID NO: 257085 - DNA, 75 bp, synthetic construct
  source 1..75: mol_type = other DNA
gagaaaaataaaatactgcataatcaaagtaatgttattcccgataataccatgggattacgccactcaaaaact

SEQ ID NO: 257086 - DNA, 75 bp, synthetic construct
  source 1..75: mol_type = other DNA
agaagcgcagcaaacagtagctgatgaaaaaactttatctggtgtaaatacgcctagccctaaaagaatctggtg

SEQ ID NO: 257087 - DNA, 75 bp, synthetic construct
  source 1..75: mol_type = other DNA
ctccctgctttaacagtaatattgaatgcactgctgacgagatcaatgcaatacgcagtgctcaacaggacagct

SEQ ID NO: 257088 - DNA, 75 bp, synthetic construct
  source 1..75: mol_type = other DNA
gcgcaggctcaggctgataaagaggcccagcaagcggctgcatcagaaacttttagggcagggacttataccaaa

SEQ ID NO: 257089 - DNA, 75 bp, synthetic construct
  source 1..75: mol_type = other DNA
gcgggaatttcagctggcaggcgtgccatgagatgtttgcgcgtaaagggcttatgttgcagaaacagcatcatg

SEQ ID NO: 257090 - DNA, 75 bp, synthetic construct
  source 1..75: mol_type = other DNA
tgcagttccgggatccacaattgcgtaagctgcattaccatattgcggaagtgcagcgtatgcaggcgctgatca

SEQ ID NO: 257091 - DNA, 75 bp, synthetic construct
  source 1..75: mol_type = other DNA
aacttgttcgcaccttccctgttattgatggaactaacgtggttcagaccacaatcagcgcagtcaacaacgttc

SEQ ID NO: 257092 - DNA, 75 bp, synthetic construct
  source 1..75: mol_type = other DNA
ctggatatacagccaaccttccggcgggacttattacagaccttgccagcacggctgtcggggcgctggcattaa

SEQ ID NO: 257093 - DNA, 75 bp, synthetic construct
  source 1..75: mol_type = other DNA
taagaaaagcaatgcgggattatctggagttccttggcaatatgccgctggctgagcgcgttagaaacgctgctg

SEQ ID NO: 257094 - DNA, 75 bp, synthetic construct
  source 1..75: mol_type = other DNA
gcgcgtacgggctgtgacgcaccgcgctgcgaactcggcggagggtgggtatcgtgtcgggcgcatggcgaggct

SEQ ID NO: 257095 - DNA, 75 bp, synthetic construct
  source 1..75: mol_type = other DNA
gccgtcatgcagcgccatctggacaaaggctatgacagagtccctctggtagtgccaatgctgttttatcacggc

SEQ ID NO: 257096 - DNA, 75 bp, synthetic construct
  source 1..75: mol_type = other DNA
atatctatccttatgtgccattgttaatgttttctaccggttttatattttttgtggataaccaagtaaggcaag

SEQ ID NO: 257097 - DNA, 75 bp, synthetic construct
  source 1..75: mol_type = other DNA
aatagaaccgacatttatattgctatccagattgctggaacagtatgattatggctttaattatctaatggcaat

SEQ ID NO: 257098 - DNA, 75 bp, synthetic construct
  source 1..75: mol_type = other DNA
gacaatggttaagcgtttcgctcagaccaaagtcgggcgctatcttatggggcagaaaaaccgccgcataaagaa

SEQ ID NO: 257099 - DNA, 75 bp, synthetic construct
  source 1..75: mol_type = other DNA
ctcacccggtagcatgaatttcatgctaccagcctaccgccgccactacaaggggctgggtattatttatccagc

SEQ ID NO: 257100 - DNA, 75 bp, synthetic construct
  source 1..75: mol_type = other DNA
tttttgaagaaaatcatccacagtgcaaatgtattctgagtcagacacagggcgaactgtatgcctttatacagt

SEQ ID NO: 257101 - DNA, 75 bp, synthetic construct
  source 1..75: mol_type = other DNA
ttgccggacaggtacaaatcccgtgcattgaacgtaatgccattaatgccgtgaaagcagtaaacgccgcgcgga

SEQ ID NO: 257102 - DNA, 75 bp, synthetic construct
  source 1..75: mol_type = other DNA
ggcaggaaggacatcaaattggctggcaagaaggtaaattagtaggtttgcaggaaggtaaattagaaggttggc

SEQ ID NO: 257103 - DNA, 75 bp, synthetic construct
  source 1..75: mol_type = other DNA
taaaattgccttgcgcatgctggagcagggctttgaacgtgagattgtgctggcggcaacccaactcactgatgc

SEQ ID NO: 257104 - DNA, 75 bp, synthetic construct
  source 1..75: mol_type = other DNA
gcggaacggattacaaacgctgctgcattcgaagatgtgtatcgcttcctgttgaatggttccggtcggctggag

SEQ ID NO: 257105 - DNA, 75 bp, synthetic construct
  source 1..75: mol_type = other DNA
gctgattttgaagacaatgacttcagcggcaaacgctccctgatggagtctgtcgaagcgaaaaccaaagacatt

SEQ ID NO: 257106 - DNA, 75 bp, synthetic construct
  source 1..75: mol_type = other DNA
tggttctgcgcattattcagctggaggcggtgcaggaagaaatggctaacgaatttcgtgatctgcttgttgaga

SEQ ID NO: 257107 - DNA, 75 bp, synthetic construct
  source 1..75: mol_type = other DNA
ttgagtttaaatgcgttccgtttgaaggtctgaaagaacgtccgtttaaattacgcctcagcattatcactggcg

SEQ ID NO: 257108 - DNA, 75 bp, synthetic construct
  source 1..75: mol_type = other DNA
tgacgggattgccgggtcgtcgggttcttgatgaatccttcgatcatcagttacgcaatgctgaacctctgaatc

SEQ ID NO: 257109 - DNA, 75 bp, synthetic construct
  source 1..75: mol_type = other DNA
tttatttaatgttgttggatattgaccgatttaaattggttaatgatacctacgggcatttaatcggcgatgtag

SEQ ID NO: 257110 - DNA, 75 bp, synthetic construct
  source 1..75: mol_type = other DNA
aaccgattacaaaatttatttgctgacgatccgtagcaatatggatgttttgacgggattgccggggcgtcgggt

SEQ ID NO: 257111 - DNA, 75 bp, synthetic construct
  source 1..75: mol_type = other DNA
aggaagaaatggctaacgaatttcgtgatctgcttgttgagaaattcaaagacagcaaagtagaaacctttattg

SEQ ID NO: 257112 - DNA, 75 bp, synthetic construct
  source 1..75: mol_type = other DNA
tgtgcttaacctgggtactattgatgaaccaggtcacgcagataacaccgccacactcaaactgaaaaagacagc

SEQ ID NO: 257113 - DNA, 75 bp, synthetic construct
  source 1..75: mol_type = other DNA
gcggctcaggtgctaaatttaccgattcagtagggattggatcaaccagtagtaacattaccgttagcaacggta

SEQ ID NO: 257114 - DNA, 75 bp, synthetic construct
  source 1..75: mol_type = other DNA
aatgaccatcttcctgctcttcccgttcacccgactggtgcatgtatggagcgcaccgtttgagtactttacccg

SEQ ID NO: 257115 - DNA, 75 bp, synthetic construct
  source 1..75: mol_type = other DNA
tttccactgccagcattgatgactttacccgttattctaaagatcttgcagatgaaggcacccgctgctttatcg

SEQ ID NO: 257116 - DNA, 75 bp, synthetic construct
  source 1..75: mol_type = other DNA
ggaatgatgccatttgctcgttatttctgcatcttcataaacgttggtttgggagaagcggcaaaacgggacgtg

SEQ ID NO: 257117 - DNA, 75 bp, synthetic construct
  source 1..75: mol_type = other DNA
gctaatggtgatgccattcaggcaacaaaagcggctgcggcagtccgtaaaatcacgattgaagcaaaccagacc

SEQ ID NO: 257118 - DNA, 75 bp, synthetic construct
  source 1..75: mol_type = other DNA
gcacaggctcaggccgataaagaggcccagcaagcagctgcatcagaaacattcagggctgggacttataccaaa

SEQ ID NO: 257119 - DNA, 75 bp, synthetic construct
  source 1..75: mol_type = other DNA
aggtttgggtgctgccgaacccgagcggacttaacagggcaacgcttgaaaagctggtggagtcctatcgggagc

SEQ ID NO: 257120 - DNA, 75 bp, synthetic construct
  source 1..75: mol_type = other DNA
gtcgaatacatttcatggggtgttcccgggaaaacaagactgatgtttgagtcaaaggagcaggcactggaagtt

SEQ ID NO: 257121 - DNA, 75 bp, synthetic construct
  source 1..75: mol_type = other DNA
cagcaaaacgctgcagcaacactggcacaggctcaggcagataaagaatcacaacagatagccgctgatgaaaaa

SEQ ID NO: 257122 - DNA, 75 bp, synthetic construct
  source 1..75: mol_type = other DNA
agggcaaatggaagctattcaggccgctaaccagcttgccagtgctcaaacgaaccagttgctgcaaatccgctc

SEQ ID NO: 257123 - DNA, 75 bp, synthetic construct
  source 1..75: mol_type = other DNA
tcgatgcttacctaggcaagttccaggacgtggcctattaccgcagctcgccttgtttctcgtcggcgggatgca

SEQ ID NO: 257124 - DNA, 75 bp, synthetic construct
  source 1..75: mol_type = other DNA
tgtacttaacctgggtactatcgatgaaccaggtcacgcagataacaccgccactctcaaactgaaaaagacagc

SEQ ID NO: 257125 - DNA, 75 bp, synthetic construct
  source 1..75: mol_type = other DNA
agcagtgcaggaagaaatggctaacgaatttcgtgatctgcttgttgaaaaattcaaagacagcaaagtagaaac

SEQ ID NO: 257126 - DNA, 75 bp, synthetic construct
  source 1..75: mol_type = other DNA
agcagtgcaggaagaaatggctaacgaatttcgtgatctgcttgttgagaaattcaaggacagcaaagtagaaac

SEQ ID NO: 257127 - DNA, 75 bp, synthetic construct
  source 1..75: mol_type = other DNA
tatccccggatgactgggcagcactggaagaggccgaatatcagctttactggctgcgggctcttgccggtgggc

SEQ ID NO: 257128 - DNA, 75 bp, synthetic construct
  source 1..75: mol_type = other DNA
tattaaccaccccggtaaggggagatgcgtttgacagcttactgctgcagtttttgtccggtcaggggcgacagt

SEQ ID NO: 257129 - DNA, 75 bp, synthetic construct
  source 1..75: mol_type = other DNA
tccgtaaaatcacgattgaagcaaaccagaccgctgattttgaagacaatgacttcagcggcaaacgctctctga

SEQ ID NO: 257130 - DNA, 75 bp, synthetic construct
  source 1..75: mol_type = other DNA
aaatctggaaaaactgaaaagctgcggcgtctctttccttgatgcaccggaagaagtttttgctaccgtgctgaa

SEQ ID NO: 257131 - DNA, 75 bp, synthetic construct
  source 1..75: mol_type = other DNA
gattccgaaagaaggggcgatggcgttctttgatgtcttcgccatgcctgcggatgccaaaaataaagcgaagcc

SEQ ID NO: 257132 - DNA, 75 bp, synthetic construct
  source 1..75: mol_type = other DNA
gcgtcaaaccgcgcgaaggaagcgaagaatggcgtgaatgtctcgttctcgatccctaaagaaggggcgatggcg

SEQ ID NO: 257133 - DNA, 75 bp, synthetic construct
  source 1..75: mol_type = other DNA
gaatggtggtggacagcctttctccgtcgttcaggtgcaacatatcttcacgcctgtcgcgatcagtcacacgct

SEQ ID NO: 257134 - DNA, 75 bp, synthetic construct
  source 1..75: mol_type = other DNA
tccgctcgctaaattgtgtcagacgcaccaacatccattttctgtcattcaggtcgatcttgaccattttaaagc

SEQ ID NO: 257135 - DNA, 75 bp, synthetic construct
  source 1..75: mol_type = other DNA
gtcattcaggtcgatcttgaccattttaaagcgattaatgaccgctttggtcatcaggcgggcgaccgtgttctt

SEQ ID NO: 257136 - DNA, 75 bp, synthetic construct
  source 1..75: mol_type = other DNA
tgcatggtatccggctaacagcacagcggaacaggtgacaatcatcaacgttaaaaccggagagcagacagcatg

SEQ ID NO: 257137 - DNA, 75 bp, synthetic construct
  source 1..75: mol_type = other DNA
tctgaaatattaccggtactcactggtgatatgggaatgacaccacatcacagcgcagagggatattgcgaatgc

SEQ ID NO: 257138 - DNA, 75 bp, synthetic construct
  source 1..75: mol_type = other DNA
ccagcccacgaacgtttccacctggcattatgttcgccgggagacgtctctcagctctggatgctggttctggtg

SEQ ID NO: 257139 - DNA, 75 bp, synthetic construct
  source 1..75: mol_type = other DNA
ccgaccatgtgttctatgccaatgctaacaaagaagcaacgccgctggtgagtgcggaagtgcgtgataacccag

SEQ ID NO: 257140 - DNA, 75 bp, synthetic construct
  source 1..75: mol_type = other DNA
ctgggtgaaaacgcgcccgtcgatagctgggacttgatcctcaaacctgaaaatctggaaaaactgaaaagctgc

SEQ ID NO: 257141 - DNA, 75 bp, synthetic construct
  source 1..75: mol_type = other DNA
ctatcagttcctgaattacctgctgcgcccggatgtagtagcgcatatttccgaccatgtgttctatgccaacgc

SEQ ID NO: 257142 - DNA, 75 bp, synthetic construct
  source 1..75: mol_type = other DNA
tattacagaccatgagcgcacaggaatacgaagacagtcgtgctgcgggaggtgatgttcgttgtcgcctcacac

SEQ ID NO: 257143 - DNA, 75 bp, synthetic construct
  source 1..75: mol_type = other DNA
attaaagagaacgaagaggcacagcctaatttacttattggcattgaagccgatggtgatatcgaagaaattatt

SEQ ID NO: 257144 - DNA, 75 bp, synthetic construct
  source 1..75: mol_type = other DNA
gctggcgcttgctgcgacactggatgcgcagggatacagtgttaacgacatcatccatatcctgatgacagaagg

SEQ ID NO: 257145 - DNA, 75 bp, synthetic construct
  source 1..75: mol_type = other DNA
atggttgaggatattttggctccagggttacgggtcgtgttttgcggtatcaaccctgggctttcatccgccgga

SEQ ID NO: 257146 - DNA, 75 bp, synthetic construct
  source 1..75: mol_type = other DNA
gtgcttgatttcatagatgtgcttaatgcgactgacatcagcactgcaccggatatcaactggccggaaatgcct

SEQ ID NO: 257147 - DNA, 75 bp, synthetic construct
  source 1..75: mol_type = other DNA
ttcgctgtccccgagccagaccaggtatggtgtggagatattacctatatctgggccggaaatcgctggtgctat

SEQ ID NO: 257148 - DNA, 75 bp, synthetic construct
  source 1..75: mol_type = other DNA
ccgaacatattgtgccattctatgaacgtcgctggggtggttttttgcgtgactttaaacaaaaccggataatct

SEQ ID NO: 257149 - DNA, 75 bp, synthetic construct
  source 1..75: mol_type = other DNA
tacaggccatgaacgcacaggaatatgaagatatccgggctgccggaagtgatgaacgccgtgagctgactcacg

SEQ ID NO: 257150 - DNA, 75 bp, synthetic construct
  source 1..75: mol_type = other DNA
ctcaggtctgggtgctggttctggtcaatgccggtggtgagccgtttgcggtggttcaggtacagcagcggtttg

SEQ ID NO: 257151 - DNA, 75 bp, synthetic construct
  source 1..75: mol_type = other DNA
gagtacggcagcgagtttggcggatttttccccgtccaggtccgtttcacgcctgcccacgaacgttttcacctg

SEQ ID NO: 257152 - DNA, 75 bp, synthetic construct
  source 1..75: mol_type = other DNA
gattgaaaaaattgagaattttcagccgcaggcgctggcgattctgggtaaacaggcgtttgagcaaggattccg

SEQ ID NO: 257153 - DNA, 75 bp, synthetic construct
  source 1..75: mol_type = other DNA
tgcagaccatgaacgcacaggaatatgaagatatccgggctgccggaagtgatgaacgccgtgagctgactcacg

SEQ ID NO: 257154 - DNA, 75 bp, synthetic construct
  source 1..75: mol_type = other DNA
ttcagtccatgaacgcacaggaatatgaagatatccgggctgccggaagtgatgaacgccgtgagctgactcacg

SEQ ID NO: 257155 - DNA, 75 bp, synthetic construct
  source 1..75: mol_type = other DNA
aactccgcaggtcaatggaaggtgatgagtaaggaggatatgaagaaaaaactcaacctgcactcaccagaccat

SEQ ID NO: 257156 - DNA, 75 bp, synthetic construct
  source 1..75: mol_type = other DNA
atatctgtaaagtgtctggtcaccgggaaaagcggcgtgttgttaactttaaggtaatggaaatgccagggacta

SEQ ID NO: 257157 - DNA, 75 bp, synthetic construct
  source 1..75: mol_type = other DNA
ggtgctaatcccgttcgcatccgttggggtaaacctatgtttgcgctaagagacagagaacgctttgtcaatcag

SEQ ID NO: 257158 - DNA, 75 bp, synthetic construct
  source 1..75: mol_type = other DNA
tcgagtctattgtctctctcacccatgaagcctttgggcaacgggcgctggtggttgaaattatggcggaaggga

SEQ ID NO: 257159 - DNA, 75 bp, synthetic construct
  source 1..75: mol_type = other DNA
catcttccggagaacgtgtgaaacgtttctggccgcggcatttcttcgcaatgttctatgctgtgcacctggcgg

SEQ ID NO: 257160 - DNA, 75 bp, synthetic construct
  source 1..75: mol_type = other DNA
gaaccctggttccagctgatttcagccatcattattcttgccactgcggcatggatgttctggcgtacatggcgc

SEQ ID NO: 257161 - DNA, 75 bp, synthetic construct
  source 1..75: mol_type = other DNA
gatattatcggaagtcgcagagccgccagcacaaatgattgattcactcaccaccttatttaaaaccattaagcc

SEQ ID NO: 257162 - DNA, 75 bp, synthetic construct
  source 1..75: mol_type = other DNA
aatgcccgttcgcacgctgtttgagatgacccttggtgaaacactctttctcaatgccaaactgcctaccggtaa

SEQ ID NO: 257163 - DNA, 75 bp, synthetic construct
  source 1..75: mol_type = other DNA
atgattgtggttcttatgtccgaaattaaaaacgaacttgaagacctgctggaaaaagcagcaaccgaaccggca

SEQ ID NO: 257164 - DNA, 75 bp, synthetic construct
  source 1..75: mol_type = other DNA
tacgtgtgcgcagcttgtccgccgtggtgctaatcccgttcgcatccgttggggtaaacctatgtttgcgctaag

SEQ ID NO: 257165 - DNA, 75 bp, synthetic construct
  source 1..75: mol_type = other DNA
acatctgcaaggtatcaggtcacagggataagcggcgcgttgttaactttaaggtaatggagatgcctggcacta

SEQ ID NO: 257166 - DNA, 75 bp, synthetic construct
  source 1..75: mol_type = other DNA
caggaaacggggagtaggactaccgtcacgtccggacacggaacggggaagtcgtcccttaccgcgatgttgctg

SEQ ID NO: 257167 - DNA, 75 bp, synthetic construct
  source 1..75: mol_type = other DNA
aagccgcgattatcttacaggaccaggagagggcgctggcccgtttccgggaaccgattgaagggattcatttcg

SEQ ID NO: 257168 - DNA, 75 bp, synthetic construct
  source 1..75: mol_type = other DNA
gagtatggcagtgagtttggcggctttttccccgtccaggtccgtttcacacctgcccacgaacgttttcacctg

SEQ ID NO: 257169 - DNA, 75 bp, synthetic construct
  source 1..75: mol_type = other DNA
atgaatatccatttattttcagaagtattgttctgcgtatgggttatagctttgattgtgattttatttatattt

SEQ ID NO: 257170 - DNA, 75 bp, synthetic construct
  source 1..75: mol_type = other DNA
catgctgactgattacggaataaccaagtggcagatgctggttagccatatcgcaaacgctatagaccacgtggg

SEQ ID NO: 257171 - DNA, 75 bp, synthetic construct
  source 1..75: mol_type = other DNA
gcctgcccacgaatgttttcacctggcgttatgttcaccgggcgatgtctctcaggtctgggtgctggttctggt

SEQ ID NO: 257172 - DNA, 75 bp, synthetic construct
  source 1..75: mol_type = other DNA
gcgtctggcagcgagtctggatgaggccggatattccacgtccagcatcatcaacctgctggtcacagaaggagg

SEQ ID NO: 257173 - DNA, 75 bp, synthetic construct
  source 1..75: mol_type = other DNA
gtgagtatggaatggcaccgtatcatcaggaagatggtttttacgaatgcatgtatttgccaaacacaaaattca

SEQ ID NO: 257174 - DNA, 75 bp, synthetic construct
  source 1..75: mol_type = other DNA
tgtcaccgccgggatgttcggcgcgatgagtctgtatggttacaccacgaaacgcgatttaagtggcttcggcaa

SEQ ID NO: 257175 - DNA, 75 bp, synthetic construct
  source 1..75: mol_type = other DNA
ctactgttcaccaaccgtgtctttttaattgctctgataattgcacaattagcgctggttattgtgctatcagcg

SEQ ID NO: 257176 - DNA, 75 bp, synthetic construct
  source 1..75: mol_type = other DNA
caatcgttcaaccccgggccggcctgcaaacctatatggcgcaggtctatggctggatgaccgtcggtctgctac

SEQ ID NO: 257177 - DNA, 75 bp, synthetic construct
  source 1..75: mol_type = other DNA
gaattcatgcctaatatggtaaatgctggtttaggttacgattattcaattaatgactattataagataattgca

SEQ ID NO: 257178 - DNA, 75 bp, synthetic construct
  source 1..75: mol_type = other DNA
atttgaatttattagataaaaatgaaatagaaaaattcatgcttatcaacatgccagactgtattatacatgcag

SEQ ID NO: 257179 - DNA, 75 bp, synthetic construct
  source 1..75: mol_type = other DNA
aacctgcgcaaatattccattcttggcgcgttaaccttgtatctggacttcatcaacctgttcctgatgttgctg

SEQ ID NO: 257180 - DNA, 75 bp, synthetic construct
  source 1..75: mol_type = other DNA
ggggcatcaaatcaatggtcattgagaccgctgacaagatcaccctgaaaaccagtgagtttgtcctggaggctg

SEQ ID NO: 257181 - DNA, 75 bp, synthetic construct
  source 1..75: mol_type = other DNA
ggggattcagcgataatcaggtgcagatcctcgaccgcgacaactggattgtgacgctggatctgaccgtcgatg

SEQ ID NO: 257182 - DNA, 75 bp, synthetic construct
  source 1..75: mol_type = other DNA
ccgcgcgggatgcgcatatccgcaccctgcatattgcgctggtcgcgttattcctgctggcatcaggcatgggat

SEQ ID NO: 257183 - DNA, 75 bp, synthetic construct
  source 1..75: mol_type = other DNA
atcacccacattaatctccatattaattcaccgggtggcgatgtctttgaaggcatcgccatttttaatgcactg

SEQ ID NO: 257184 - DNA, 75 bp, synthetic construct
  source 1..75: mol_type = other DNA
cttcgggctggcacttgactgctacagcggtacacctcaacggctggaagccgcacctgctgcaggaggaacaca

SEQ ID NO: 257185 - DNA, 75 bp, synthetic construct
  source 1..75: mol_type = other DNA
cttcgggctggcgcttgactgctacagcagtacaccacaacggctggaagccgcgccggtggcttcaggcacagg

SEQ ID NO: 257186 - DNA, 75 bp, synthetic construct
  source 1..75: mol_type = other DNA
atgagtaaatttcgtcatgctctgcaaaaccgggaccagcatattctgaccttgcgggtgatctgcggggtgctg

SEQ ID NO: 257187 - DNA, 75 bp, synthetic construct
  source 1..75: mol_type = other DNA
ggattcagtggcggggatgctgaggatatgcgcagttatgccgatttgctggataaagtcgaatcggttctgtta

SEQ ID NO: 257188 - DNA, 75 bp, synthetic construct
  source 1..75: mol_type = other DNA
ccttccgtgacgcgctgggtaaactcagcctgaatgatgcctcactgttctatgagccggaaagctccagcgcgc

SEQ ID NO: 257189 - DNA, 75 bp, synthetic construct
  source 1..75: mol_type = other DNA
tctgatcccacgccagcagtttgatatcgccattcaggcagcgattggtacgcacatcattgcgcgctccaccgt

SEQ ID NO: 257190 - DNA, 75 bp, synthetic construct
  source 1..75: mol_type = other DNA
gcgggtcataaaagtgacgcagatatttatatctatgacgagattggtttctggggagttacggcgaagcagttt

SEQ ID NO: 257191 - DNA, 75 bp, synthetic construct
  source 1..75: mol_type = other DNA
ggcgatggagtctgttgctaaccaggtcattcgctcctcaagtgtcaagggggctgacattaacgccggtattat

SEQ ID NO: 257192 - DNA, 75 bp, synthetic construct
  source 1..75: mol_type = other DNA
aaacgtacagaggaatttaaaaagatgccggaatccattcgaaacatgattactccgccacgcaacagtgctcca

SEQ ID NO: 257193 - DNA, 75 bp, synthetic construct
  source 1..75: mol_type = other DNA
aaaacgctgatcctgtctcacctgcggtttgttgttcatattgctcgtaattatgcgggctatggcctgccacag

SEQ ID NO: 257194 - DNA, 75 bp, synthetic construct
  source 1..75: mol_type = other DNA
catgttaaatctattgttgataagttaagattagaaaatagagatgaggtaaatattcaccaagcagtttataga

SEQ ID NO: 257195 - DNA, 75 bp, synthetic construct
  source 1..75: mol_type = other DNA
gtcgaaaagcccgagcttgaaaccgcacaacaatattttaatagcggagaatattattggaatagtggtatgttc

SEQ ID NO: 257196 - DNA, 75 bp, synthetic construct
  source 1..75: mol_type = other DNA
aaaaaatatagttgagaaactaaaaaatagctgccgtacagaacatcgtatacaccgggaagtttttcgcccttg

SEQ ID NO: 257197 - DNA, 75 bp, synthetic construct
  source 1..75: mol_type = other DNA
cgatcccatccgatttcggttcagttcatcatgaagtcgaactggcggtgttgattggcgcgacgctgcgtcagg

SEQ ID NO: 257198 - DNA, 75 bp, synthetic construct
  source 1..75: mol_type = other DNA
ccgctcgacctgattgaggtgcgatctggcgcctatctggaagaggacgacgtggtgcgtttccaggatcgttac

SEQ ID NO: 257199 - DNA, 75 bp, synthetic construct
  source 1..75: mol_type = other DNA
gtttcgttgagaaaccagatataaatactgcaaaactttatatttctagcggagattactattggaatagtgggg

SEQ ID NO: 257200 - DNA, 75 bp, synthetic construct
  source 1..75: mol_type = other DNA
ggctaaaccagacacaaatccattcgcgtgctggtcttacctttcagggggttttacgcgcgttattacgccagg

SEQ ID NO: 257201 - DNA, 75 bp, synthetic construct
  source 1..75: mol_type = other DNA
agcggcaaaacggtcacgctttatagtgccctgcaaacgctgaataccgctgacattaatatttgtagcgtcgaa

SEQ ID NO: 257202 - DNA, 75 bp, synthetic construct
  source 1..75: mol_type = other DNA
ccgccagattaaaagtgctgggaaacctggatattgcggaacatcgcctgccgcaggacgggcaattcactgtcg

SEQ ID NO: 257203 - DNA, 75 bp, synthetic construct
  source 1..75: mol_type = other DNA
gaattattggtacgctggtggtggcaatgtatctgccaattttccatttaggcgatgcgatgagtgggatgggat

SEQ ID NO: 257204 - DNA, 75 bp, synthetic construct
  source 1..75: mol_type = other DNA
acgattctggcgctgacacaaagtgcaggcattacttttttacagggcgtagagagcgtcagagaaacaatgcgc

SEQ ID NO: 257205 - DNA, 75 bp, synthetic construct
  source 1..75: mol_type = other DNA
ttgaaaacggctgccttgctgtggagcaaggcttaaccacctttgaagaaatgattcgtgtattaggaatgccgc

SEQ ID NO: 257206 - DNA, 75 bp, synthetic construct
  source 1..75: mol_type = other DNA
acggcgcatcgtgtcggtatgggtgggttcccttctctgcgacaggttcgcgaaggggctgagtacaagtacatc

SEQ ID NO: 257207 - DNA, 75 bp, synthetic construct
  source 1..75: mol_type = other DNA
cagacaagatttcccaggtgccgactcatgatgttggtccataccagaatgtgccgtcaaagccggtcgttatcc

SEQ ID NO: 257208 - DNA, 75 bp, synthetic construct
  source 1..75: mol_type = other DNA
ccgataagatttcccaggtgccgactcatgacgttggtccgtaccagaatgtgccgtcaaaaccggtagttatcc

SEQ ID NO: 257209 - DNA, 75 bp, synthetic construct
  source 1..75: mol_type = other DNA
atcgctgggcgtatttctcgctggcggcactgtcgttctggctgccgaccccagcgccacgctctgcttcccatt

SEQ ID NO: 257210 - DNA, 75 bp, synthetic construct
  source 1..75: mol_type = other DNA
gttaggtgaaaaaagactggtttcatctgtaacaaaagaggatttgcttttcgtaaggagagatctgttgaccgg

SEQ ID NO: 257211 - DNA, 75 bp, synthetic construct
  source 1..75: mol_type = other DNA
catgattactccgccacgcaacagtgctccacgcgtacaggatgatgaacctgcagcctcccggacgccagtgca

SEQ ID NO: 257212 - DNA, 75 bp, synthetic construct
  source 1..75: mol_type = other DNA
ggcgtggaagatcgcggtgtgatgacggcgtttatgcaggcactgggatttacggcacaacagggcggctgggag

SEQ ID NO: 257213 - DNA, 75 bp, synthetic construct
  source 1..75: mol_type = other DNA
tgtgagggaagtcacccgccgtcgcggtgtggggcaatatctgctggaagaggttttgcgtaacaatcctggcgt

SEQ ID NO: 257214 - DNA, 75 bp, synthetic construct
  source 1..75: mol_type = other DNA
gaataaatcctggttcaggatgcagactggggggccgggtgacgcggatatttatatttatgacgagattggttt

SEQ ID NO: 257215 - DNA, 75 bp, synthetic construct
  source 1..75: mol_type = other DNA
tgacggataacccgaaactgtcagacggtaaggcgctgttccatgccgatcacaaaaatattgccaccggtggga

SEQ ID NO: 257216 - DNA, 75 bp, synthetic construct
  source 1..75: mol_type = other DNA
taaccccatccagaactttgctgaggtgattgcagaagcgcgtcttgatgcggcagatccgaaaacctggtatct

SEQ ID NO: 257217 - DNA, 75 bp, synthetic construct
  source 1..75: mol_type = other DNA
gaaggcgatcgcgccctgaatatccgtccggcctttatgctggtaccggtggcactggagacggtggcgaaccag

SEQ ID NO: 257218 - DNA, 75 bp, synthetic construct
  source 1..75: mol_type = other DNA
ctctattgatccagagggttacatcaccgtgcaggggcgcgagaaagatcagattaaccgtggcggcgagaagat

SEQ ID NO: 257219 - DNA, 75 bp, synthetic construct
  source 1..75: mol_type = other DNA
atccaggagcgtctggagcgtgagtacgatctggacctgattaccacggcgccgaccgtagtgtatgaagttgaa

SEQ ID NO: 257220 - DNA, 75 bp, synthetic construct
  source 1..75: mol_type = other DNA
atattaaaccgtttatggtggcagatgcgctggccgatttcagccgtgacgagcatttgatgtcgctgaaatatg

SEQ ID NO: 257221 - DNA, 75 bp, synthetic construct
  source 1..75: mol_type = other DNA
ggcactgtggttctggcggacgatcccagcgccacgctctgtttcccattgattgccaaacatcaggttaacgtt

SEQ ID NO: 257222 - DNA, 75 bp, synthetic construct
  source 1..75: mol_type = other DNA
gtacgagatcccgatggcggaagtggtgctcgacttcttcgatcgtctgaagtccacttcgcgtggctatgcgtc

SEQ ID NO: 257223 - DNA, 75 bp, synthetic construct
  source 1..75: mol_type = other DNA
gcgtaagggtgacaaagtgaaagttatgagcaccgggcagacctataacgccgaccgcctggggatcttcacgcc

SEQ ID NO: 257224 - DNA, 75 bp, synthetic construct
  source 1..75: mol_type = other DNA
tgccagttacagcaggtattcggcatggcggaagggctggtgaactacacccgacttgatgatagcgcggagaaa

SEQ ID NO: 257225 - DNA, 75 bp, synthetic construct
  source 1..75: mol_type = other DNA
tgacgcgcgggccgtacaccttccgcggttattacaaaagcccgcagcacaatgccagtgcctttgatgccaacg

SEQ ID NO: 257226 - DNA, 75 bp, synthetic construct
  source 1..75: mol_type = other DNA
tgcgtgaggttatcctgccgttgctggacgagtccgatgaaccgttcgatgacgacaacctgatcgactacggtc

SEQ ID NO: 257227 - DNA, 75 bp, synthetic construct
  source 1..75: mol_type = other DNA
aggtgaaaaccggacgcagcttgcctcgctgaaactgttacaggtcggcggcgctcgtctttctgccacgctggc

SEQ ID NO: 257228 - DNA, 75 bp, synthetic construct
  source 1..75: mol_type = other DNA
acagcgtgcgccgtagcgtcgagatttgtcagttcacgcaacagacacgctacctgtgcgcgatcccggcagctc

SEQ ID NO: 257229 - DNA, 75 bp, synthetic construct
  source 1..75: mol_type = other DNA
ccgcgtacccataacgactattactacagcgtgcgtcgtagcgtcgagatttgtcagttcacgcaacagacgcgc

SEQ ID NO: 257230 - DNA, 75 bp, synthetic construct
  source 1..75: mol_type = other DNA
tcgcgttgcatacttccagtacgcacctcggcaaaaactatgaatggcgcgatctggccgtggtattcaacgtcg

SEQ ID NO: 257231 - DNA, 75 bp, synthetic construct
  source 1..75: mol_type = other DNA
tcggtaaggcgtatcgccagtatcactcaaagaccgggagactgatcgaatggttatcccctctgaataccaaac

SEQ ID NO: 257232 - DNA, 75 bp, synthetic construct
  source 1..75: mol_type = other DNA
atgtctctaagtactgaagcaacagctaaaatcgtttctgagtttggtcgtgacgcaaacgacacaggttctacc

SEQ ID NO: 257233 - DNA, 75 bp, synthetic construct
  source 1..75: mol_type = other DNA
actatgctaatttactgttaaatgacccccatatctcttttccctattccccccggtctgcggtaccccccacct

SEQ ID NO: 257234 - DNA, 75 bp, synthetic construct
  source 1..75: mol_type = other DNA
gcttgatatgaatataggggtcggcgaatatagcatatcagctgctttacataaagaaagagatcactacgaaga

SEQ ID NO: 257235 - DNA, 75 bp, synthetic construct
  source 1..75: mol_type = other DNA
attattacaatgcgcttctggccgataaacaaaatcagtccattaaacaagttgagcataatggtaaaacgcaaa

SEQ ID NO: 257236 - DNA, 75 bp, synthetic construct
  source 1..75: mol_type = other DNA
tacctgttaagtccgaaaggacagcgtattctggccgatgccaatacaggaaaatatccggtgacaccacttgcc

SEQ ID NO: 257237 - DNA, 75 bp, synthetic construct
  source 1..75: mol_type = other DNA
ccattaccagaaatacgtgcactgttagcacaagtgccagttgcagcggccagcagtgaagatcccttctggctg

SEQ ID NO: 257238 - DNA, 75 bp, synthetic construct
  source 1..75: mol_type = other DNA
ggcccaggggctggagattatgcgtaaagctatccagttcgcccaggacgtcggtattcgcgtgatccaactggc

SEQ ID NO: 257239 - DNA, 75 bp, synthetic construct
  source 1..75: mol_type = other DNA
aaaaagccaaagaaccggtgctggagattattcaggcgcggcgctggattgaagcgcgtatgcaggaggccggat

SEQ ID NO: 257240 - DNA, 75 bp, synthetic construct
  source 1..75: mol_type = other DNA
attacttttcgccttaccgagcttcaaaacagctggaaatcattatatgccgcagaacatcggcttaagcgtaaa

SEQ ID NO: 257241 - DNA, 75 bp, synthetic construct
  source 1..75: mol_type = other DNA
atcagtacagggctgggtgacgcaggtccagtcatcgacaattacgctaacgtactgcttaataattcaacttta

SEQ ID NO: 257242 - DNA, 75 bp, synthetic construct
  source 1..75: mol_type = other DNA
ccagttgcagcggccagtagtgaagatcccgtctggctggcacagttcgataacaaaagctttgccgagcagcaa

SEQ ID NO: 257243 - DNA, 75 bp, synthetic construct
  source 1..75: mol_type = other DNA
cagttctgaatctgcctgtcttcaggcacataagattcagaccgcgttaattagtcaggatgaaggctgtggcaa

SEQ ID NO: 257244 - DNA, 75 bp, synthetic construct
  source 1..75: mol_type = other DNA
atgtttgcagatgaagaacttgttatggagttactggtcaacgcggggcaggctcgttctgatgcgatggaagcc

SEQ ID NO: 257245 - DNA, 75 bp, synthetic construct
  source 1..75: mol_type = other DNA
aacagacagcagcaaaagctggcgttgcctttagcgatggtgatgcctcctggaacgttggtgttaactttgagt

SEQ ID NO: 257246 - DNA, 75 bp, synthetic construct
  source 1..75: mol_type = other DNA
ctgcacttgatgagacgcttaatgatggtgattttatcgatgggttgaataccgaagtattcccctgtgagcagc

SEQ ID NO: 257247 - DNA, 75 bp, synthetic construct
  source 1..75: mol_type = other DNA
ttagtcaggatgaaggctgtggcaaaatagaagttaatttaattctggttcatgcacaggatcatttgatgaatg

SEQ ID NO: 257248 - DNA, 75 bp, synthetic construct
  source 1..75: mol_type = other DNA
ttagtcaggatgaaggctgtggcaaaataaaagttaatttaattctgattcatgcacaggatcatttgatgaatg

SEQ ID NO: 257249 - DNA, 75 bp, synthetic construct
  source 1..75: mol_type = other DNA
aaatcacaatgaaaggctgtttggccgaagctgaatataaaaaatggaatggtgccggaaagccgtcagcggatg

SEQ ID NO: 257250 - DNA, 75 bp, synthetic construct
  source 1..75: mol_type = other DNA
ctgacgctgaaagcggaatggcccaccctgaaaaccatgagcaaagacaggctgctgcggcagctgaagtatgaa

SEQ ID NO: 257251 - DNA, 75 bp, synthetic construct
  source 1..75: mol_type = other DNA
cagtaccgaggcacgcctgaagaaaccattaccagaaatacgtgcactgttaacacaagtgcccgttgcagcggc

SEQ ID NO: 257252 - DNA, 75 bp, synthetic construct
  source 1..75: mol_type = other DNA
cctcagggagcagtcagtcggcaatctgattaataagatttcacacataaaagaatcctctgttaatgttggtct

SEQ ID NO: 257253 - DNA, 75 bp, synthetic construct
  source 1..75: mol_type = other DNA
gtactgaccgtattgatgcagcagttggtgccattgatggccgtgtcacccgtaacacgcaatccattgagaaaa

SEQ ID NO: 257254 - DNA, 75 bp, synthetic construct
  source 1..75: mol_type = other DNA
tctctgattttctgaaaactgtagaagcgcttcgaaatgagtatggcgaagtgcgtatggtgtttgggtttgata

SEQ ID NO: 257255 - DNA, 75 bp, synthetic construct
  source 1..75: mol_type = other DNA
tggggcgtgagccggatatatccgggagtgccgcagagatagcgcagcgggtggcagaatgggaagaggaaatgc

SEQ ID NO: 257256 - DNA, 75 bp, synthetic construct
  source 1..75: mol_type = other DNA
gctggggcgcgaggcggatatgtcggggagtgctgcggatatcgcacagcgtgtggcagagtgggaagaggaggt

SEQ ID NO: 257257 - DNA, 75 bp, synthetic construct
  source 1..75: mol_type = other DNA
tggtcggtacctgattgccgaagcagatgagagtgatgcatcgttcctgcatctgcaaccgatggtggcgattgt

SEQ ID NO: 257258 - DNA, 75 bp, synthetic construct
  source 1..75: mol_type = other DNA
aagccaattgatgaagcgcgactggagaaaacgctggcgcgtttgcgtcaggaacgcagtaagcaggatgtttcg

SEQ ID NO: 257259 - DNA, 75 bp, synthetic construct
  source 1..75: mol_type = other DNA
atgattaaagtcttaattgtcgatgacgaaccgttagcacgggagaacctgcgcgtatttttgcaggagcagagt

SEQ ID NO: 257260 - DNA, 75 bp, synthetic construct
  source 1..75: mol_type = other DNA
cggaagcgttgttgatatcagtacgtatgaatataccttgctggataatggcaaccatagctggagtctcgcaga

SEQ ID NO: 257261 - DNA, 75 bp, synthetic construct
  source 1..75: mol_type = other DNA
tcatcatgaagtagaactggctgtgttgattggcgcgacgctacgtcaggctacggaagagcatgtgcgcaaagc

SEQ ID NO: 257262 - DNA, 75 bp, synthetic construct
  source 1..75: mol_type = other DNA
atgtatcaacatcacaactggcaaggtgcactgctggattatccggtgagtaaagtagtttgtgttggcagtaat

SEQ ID NO: 257263 - DNA, 75 bp, synthetic construct
  source 1..75: mol_type = other DNA
taaaatcgttccgctgatcgcttatatgagcaagttttttaccctcaaggccggtgacgttgtgctgacaggcac

SEQ ID NO: 257264 - DNA, 75 bp, synthetic construct
  source 1..75: mol_type = other DNA
atgtctaatcagtttggtgatacacgtattgatgatgacctgacgctgcttagtgaaacactggaagaggtgctc

SEQ ID NO: 257265 - DNA, 75 bp, synthetic construct
  source 1..75: mol_type = other DNA
cggtcatcacgcgggtattgatgacaatacagcggcaaaagccattgcccatgccattctcggtggtgtgacagc

SEQ ID NO: 257266 - DNA, 75 bp, synthetic construct
  source 1..75: mol_type = other DNA
aaattatccagccggacactgaccattgccccgaatgtgacgagccgctgcactatatccgtgatgcggtgagtg

SEQ ID NO: 257267 - DNA, 75 bp, synthetic construct
  source 1..75: mol_type = other DNA
tcgtcagtatctggttaacctcgcgcatttacaggagattcgtctggaagataacggccaggccgagttgatttt

SEQ ID NO: 257268 - DNA, 75 bp, synthetic construct
  source 1..75: mol_type = other DNA
gatgtgctggtgggaatacctgaggacaaggcaggacgtgaggatggctctccgattaataacgcggaactgggc

SEQ ID NO: 257269 - DNA, 75 bp, synthetic construct
  source 1..75: mol_type = other DNA
ttactggaactgactgccgatgatgtcgtattaagttgtacccgcgtcacgttatccgtggaacgcaaaccaatg

SEQ ID NO: 257270 - DNA, 75 bp, synthetic construct
  source 1..75: mol_type = other DNA
tcgtattaagttgtacccgcgtcacgttatccgtggaacgcaaaccaatggagtatgtagagatggtgtatcccg

SEQ ID NO: 257271 - DNA, 75 bp, synthetic construct
  source 1..75: mol_type = other DNA
gtttcagggatttggtcacatccgccggagaaacaatcactctacatcaggatataatcaaatctaagggctcag

SEQ ID NO: 257272 - DNA, 75 bp, synthetic construct
  source 1..75: mol_type = other DNA
gttaattatacctcagagccgtatgtgagtgctccagctagtctggtatatgatacggaagcaataattcaatgg

SEQ ID NO: 257273 - DNA, 75 bp, synthetic construct
  source 1..75: mol_type = other DNA
gcctcccattccaggcgataagccgttgcgtgcccgcggattcctgttcagagcgattcagtatgtcgtgaggaa

SEQ ID NO: 257274 - DNA, 75 bp, synthetic construct
  source 1..75: mol_type = other DNA
ttaccggtactgtaccggatgccgaagagatcgcgcgtaaagccgaactttttcgtcaacaaaccgggattgcgc

SEQ ID NO: 257275 - DNA, 75 bp, synthetic construct
  source 1..75: mol_type = other DNA
gatccacccggcagtaccacgacattaggcctttttgcctgggcagttgcattcatcgtctttgctgcatttttt

SEQ ID NO: 257276 - DNA, 75 bp, synthetic construct
  source 1..75: mol_type = other DNA
tctccgccggtacaggtaacccgttctttaccaccgactcagcagcttgcctgcgtggtatcgaaattgaagccg

SEQ ID NO: 257277 - DNA, 75 bp, synthetic construct
  source 1..75: mol_type = other DNA
catatccaaaccgtattctgtataaaacgcgttcgctatatgggaagtacccccctgggtattcagacatcatgg

SEQ ID NO: 257278 - DNA, 75 bp, synthetic construct
  source 1..75: mol_type = other DNA
ccgggcctgggagctgggcatcaaaaaagtgccagcagtggtatttgatgaccgcgatgtggtgtacggcaccac

SEQ ID NO: 257279 - DNA, 75 bp, synthetic construct
  source 1..75: mol_type = other DNA
tgcctggtcccttggactgaaaaaatatccggctgtggtttttgatgacagtgaagtggtctacggaaccacaga

SEQ ID NO: 257280 - DNA, 75 bp, synthetic construct
  source 1..75: mol_type = other DNA
cggcagacccgaaaacctggtatctggcggcggcacagggcactgacaccattgaagtggcctggctggatggtg

SEQ ID NO: 257281 - DNA, 75 bp, synthetic construct
  source 1..75: mol_type = other DNA
ctgcgccacaagttgttccagattgattacctcactacgctgagtaatcaggcggtggtttccctgctgtaccat

SEQ ID NO: 257282 - DNA, 75 bp, synthetic construct
  source 1..75: mol_type = other DNA
ctgatgctggcaattcagtctttctggtcgttgatcatctgccatggactgacagcgataaaataaattggtatc

SEQ ID NO: 257283 - DNA, 75 bp, synthetic construct
  source 1..75: mol_type = other DNA
aatagagccagaaaatactgtcatgaaaacaataaaaaaatgatatattctataggagctttcaggcctgaatgg

SEQ ID NO: 257284 - DNA, 75 bp, synthetic construct
  source 1..75: mol_type = other DNA
cagacattttcccaggtaatggcttccggcatggctactgtaccggaacacctccggggaaatccatcagactgc

SEQ ID NO: 257285 - DNA, 75 bp, synthetic construct
  source 1..75: mol_type = other DNA
gcgacatcaaaggctcatattttctgtgtaatggaaaccaagttgggataatggcaagaagatcttatcctctct

SEQ ID NO: 257286 - DNA, 75 bp, synthetic construct
  source 1..75: mol_type = other DNA
tgcatccggatgttgtttcatactttatgatacatcatgactggaagtttgatttttttcactatgaaaaagatg

SEQ ID NO: 257287 - DNA, 75 bp, synthetic construct
  source 1..75: mol_type = other DNA
attccaattaattagagaagaaaaactctttaaaactaaagaagaactggaagaacttgcacgcaagaaagaaga

SEQ ID NO: 257288 - DNA, 75 bp, synthetic construct
  source 1..75: mol_type = other DNA
agaacgtaactctgctttggttgatagttatttcgacgcttcattattacaaaagctcaagagcggtcaattggg

SEQ ID NO: 257289 - DNA, 75 bp, synthetic construct
  source 1..75: mol_type = other DNA
attacactaataaacaccaccgacttggtatttataaattttctaataaaagcatcattttcactgaaacaaaat

SEQ ID NO: 257290 - DNA, 75 bp, synthetic construct
  source 1..75: mol_type = other DNA
ctattaaaagcaatgcttatcaaagagatattacaataacgaattcaattgcaaccataaaaaacagactgaatg

SEQ ID NO: 257291 - DNA, 75 bp, synthetic construct
  source 1..75: mol_type = other DNA
caaacatcattcaactcaacattttgggaagtctatctttatgcagtgttgaaaaattatggcttagatgttaac

SEQ ID NO: 257292 - DNA, 75 bp, synthetic construct
  source 1..75: mol_type = other DNA
aagaacttgcacgcaagaaagaagaagaacgtaaagctgcaacattgagcatgttcgatccatctttgcttgaga

SEQ ID NO: 257293 - DNA, 75 bp, synthetic construct
  source 1..75: mol_type = other DNA
gtgattacgcgtaattctcctttatggacctcaaacccgaaacaacagctcgcctatctggcgttgaaatactgg

SEQ ID NO: 257294 - DNA, 75 bp, synthetic construct
  source 1..75: mol_type = other DNA
ctggaagccataagggtcatgattggggacagattcattcttgtattgcaccgcaaggggcagtaattacagtta

SEQ ID NO: 257295 - DNA, 75 bp, synthetic construct
  source 1..75: mol_type = other DNA
ccgcaaggggcagtaattacagttagcacgaatagagggattgctcatcttcgttatcgtaggttgagtaaccgt

SEQ ID NO: 257296 - DNA, 75 bp, synthetic construct
  source 1..75: mol_type = other DNA
gtggaccccaaacctgaatttctcaatggttgacttccatgaacgccagcgtcgcattcaagaagaaattgatcg

SEQ ID NO: 257297 - DNA, 75 bp, synthetic construct
  source 1..75: mol_type = other DNA
aagattgtgtagaagaattcaacgttgtgaccagactgtcacaacgtcaaagagttagttcattccgtgaattta

SEQ ID NO: 257298 - DNA, 75 bp, synthetic construct
  source 1..75: mol_type = other DNA
ggtttctggcaagtggtaagggtgaatgcatggaagacgacggtgcaacggtcattctcaatctggttggtgagt

SEQ ID NO: 257299 - DNA, 75 bp, synthetic construct
  source 1..75: mol_type = other DNA
tgctggcgaatggtggcgatcctttccagattgctttcggtaccatcggcatggataacccggcacaggcaatca

SEQ ID NO: 257300 - DNA, 75 bp, synthetic construct
  source 1..75: mol_type = other DNA
cagaagcagaacaaaaatttactgctctggaaaatacgctgaatactgctcggccacatctgggtgaattatatg

SEQ ID NO: 257301 - DNA, 75 bp, synthetic construct
  source 1..75: mol_type = other DNA
aaaacacacctggtaaacggagttctgggttatgaagcacaactggttaacgctgtgatctctagctcaagtgca

SEQ ID NO: 257302 - DNA, 75 bp, synthetic construct
  source 1..75: mol_type = other DNA
cagagcagacaccaaataccatttctgccagtaacactatttttaacgttcaggcgttgacgcaacttcaggcag

SEQ ID NO: 257303 - DNA, 75 bp, synthetic construct
  source 1..75: mol_type = other DNA
actcatggatgctctccaggccatcgatccggagttacttaaacaagctcttggtggcgaaaaattccagaaatg

SEQ ID NO: 257304 - DNA, 75 bp, synthetic construct
  source 1..75: mol_type = other DNA
tgatcatcgtctgacttacgttcatctcggcattattgcggctgtcttgttaaacagcagaactgttgatttcgt

SEQ ID NO: 257305 - DNA, 75 bp, synthetic construct
  source 1..75: mol_type = other DNA
acgtacaaattattcgtatggcggcagaagaatttacccaggcgatgaatggtgtgcgcgagtttaaccgcctgc

SEQ ID NO: 257306 - DNA, 75 bp, synthetic construct
  source 1..75: mol_type = other DNA
ctaaccattgttcccttcttctggggcatgctggcgttacgggcctggcactacgacgagaatcattacagtggc

SEQ ID NO: 257307 - DNA, 75 bp, synthetic construct
  source 1..75: mol_type = other DNA
tttatcgcgtcaatgtgattaaacgtcaccctgtggccgatcgctatatggatgaaatcacgaccgttgatatcg

SEQ ID NO: 257308 - DNA, 75 bp, synthetic construct
  source 1..75: mol_type = other DNA
tcgatgcaaggcgtaaacagaccagcaaaatttccccttattttgttccctaccctgcaactgtcagaaacagaa

SEQ ID NO: 257309 - DNA, 75 bp, synthetic construct
  source 1..75: mol_type = other DNA
cgcggaggcgcttaacaaggacattgcgacaattcatcacaatgttgttaaagaatacaacacgctcaataaata

SEQ ID NO: 257310 - DNA, 75 bp, synthetic construct
  source 1..75: mol_type = other DNA
atgacgtgacatttattccgggtcacggaccattatccacacttggttatgaacgcctgcataatcccttcctgc

SEQ ID NO: 257311 - DNA, 75 bp, synthetic construct
  source 1..75: mol_type = other DNA
gtattttagatcgtattgatagcctgacggctgcggtgccggtctttgcttgcctgttgttgctggtattcaaga

SEQ ID NO: 257312 - DNA, 75 bp, synthetic construct
  source 1..75: mol_type = other DNA
ctgagcgattacgctgtattggtccctgagaaacttgaggcaatcttggaccgagctgctcaacgtgcaggtcat

SEQ ID NO: 257313 - DNA, 75 bp, synthetic construct
  source 1..75: mol_type = other DNA
tgtccctgtcacgtgcactggataagtacctgaaaacagtttctgttcacaagaaagggcatcaacaggagtttt

SEQ ID NO: 257314 - DNA, 75 bp, synthetic construct
  source 1..75: mol_type = other DNA
tttcatgcagcaggcgcagcagcagcgcattcagttcactacgcaggccgggcggcacgagatagggcaaataaa

SEQ ID NO: 257315 - DNA, 75 bp, synthetic construct
  source 1..75: mol_type = other DNA
gaaagcccgtagttacctgcaaatgctgccgacacagcttaacggtaatattttttcttatacctcttcgggatt

SEQ ID NO: 257316 - DNA, 75 bp, synthetic construct
  source 1..75: mol_type = other DNA
atgcaaggcgtaaacagaccagcaaaatttccccttattttgttccctaccctgcaactgtcgggtgcagaaacg

SEQ ID NO: 257317 - DNA, 75 bp, synthetic construct
  source 1..75: mol_type = other DNA
tctggcgaagaacgccgactctcccgctatttcagagataaaaatcagcagctctacgttatcttccatctggct

SEQ ID NO: 257318 - DNA, 75 bp, synthetic construct
  source 1..75: mol_type = other DNA
acggaggtcgtgtatcagaaaattgttgatattgaaaagaaactggacaaaccagcaacagggaagagccggaaa

SEQ ID NO: 257319 - DNA, 75 bp, synthetic construct
  source 1..75: mol_type = other DNA
tcattgcctcaaagtaatcatctaaaagggcccacaacggcaacgtaccaggttatacctgatatcgcggcacat

SEQ ID NO: 257320 - DNA, 75 bp, synthetic construct
  source 1..75: mol_type = other DNA
agcttggtttacgcgcgctggcggcggcgacactttctaacctgatgagtgccaccattgccgggttctttattg

SEQ ID NO: 257321 - DNA, 75 bp, synthetic construct
  source 1..75: mol_type = other DNA
gcgtgggtaatgggtgttgactggactgatgcgaatcttgccgggagtttgattggacagaaactggcaataaat

SEQ ID NO: 257322 - DNA, 75 bp, synthetic construct
  source 1..75: mol_type = other DNA
ggcaggtatctactcatctatggacgaaacgggagaatgcctggtgagctgggaaagggagcatgttccggacaa

SEQ ID NO: 257323 - DNA, 75 bp, synthetic construct
  source 1..75: mol_type = other DNA
gcttatatgctcagtggtgagctggcggtagatccttctaatgccggaacaatgggactgcttgatctaaaaacc

SEQ ID NO: 257324 - DNA, 75 bp, synthetic construct
  source 1..75: mol_type = other DNA
gaatcgcgcgagaaatggcaggcggtataccaggaacagttaggtctggtcgatcacgggttgacgacctctttg

SEQ ID NO: 257325 - DNA, 75 bp, synthetic construct
  source 1..75: mol_type = other DNA
tctgcaacataccgcaatggagcaacagaaagctgttgctgattctctggctgtggcaagggaaacgcttcgcgg

SEQ ID NO: 257326 - DNA, 75 bp, synthetic construct
  source 1..75: mol_type = other DNA
aaaccattgcgattatctcctttgcgctttgtggttttgctaactttggttctatcggtgttgtcgttggcgcat

SEQ ID NO: 257327 - DNA, 75 bp, synthetic construct
  source 1..75: mol_type = other DNA
aatgctcgacaggaactacaacgccacagcggcggtgtatcagaaagttgtgacactggaagataaactggcgga

SEQ ID NO: 257328 - DNA, 75 bp, synthetic construct
  source 1..75: mol_type = other DNA
ttaacgaattcgtcgcttacctgagtttctccccatacctgcaaacgggcggcacgctggaagtgaaaaccattg

SEQ ID NO: 257329 - DNA, 75 bp, synthetic construct
  source 1..75: mol_type = other DNA
cgcccagcttggtttacgggcgctggcagcagcaacgctttccaacctgatgagtgcgaccattgccgggttctt

SEQ ID NO: 257330 - DNA, 75 bp, synthetic construct
  source 1..75: mol_type = other DNA
actacaacgccacagcggcggtgtatcagaaagttgtgacactggaagataaactggcggagaaacctgtcacgg

SEQ ID NO: 257331 - DNA, 75 bp, synthetic construct
  source 1..75: mol_type = other DNA
atatgcgttttggcctggagctggagaaatcggcgttcgggaaatataacgtggataatgcgataaacgccaact

SEQ ID NO: 257332 - DNA, 75 bp, synthetic construct
  source 1..75: mol_type = other DNA
atgtcagcggctctgacacgatgagcttcggatacaccaaaaacacctatactgcggtgggtacaaataataata

SEQ ID NO: 257333 - DNA, 75 bp, synthetic construct
  source 1..75: mol_type = other DNA
taatgagtacacggcgagttttgcgtctcttggaacaaaagactacagctctcattcctggtatgccggtgcaga

SEQ ID NO: 257334 - DNA, 75 bp, synthetic construct
  source 1..75: mol_type = other DNA
cagtttgatacccaaaaagataatagtcgcctgattctggacggtaatgtcgatattacaaatgacattaacatt

SEQ ID NO: 257335 - DNA, 75 bp, synthetic construct
  source 1..75: mol_type = other DNA
tcatggtattgtaaaaattaatcatgacgcagcgcttaaccagaacaatgactatagaggtattttctttactga

SEQ ID NO: 257336 - DNA, 75 bp, synthetic construct
  source 1..75: mol_type = other DNA
acctcggagataaggccagcctttctgttaaaaacatgggctatctgagttcggatattcatgcaggaaccacgg

SEQ ID NO: 257337 - DNA, 75 bp, synthetic construct
  source 1..75: mol_type = other DNA
aattcgactggatatggaccctgaagttgctttacctgaaaaggttgtgtgcgcacaaaaacatgtgctatggtt

SEQ ID NO: 257338 - DNA, 75 bp, synthetic construct
  source 1..75: mol_type = other DNA
tggagcggtgggggcgatgggcggcgagcgaggaatactgttcaatggttgactggccctcaatgtcggttactt

SEQ ID NO: 257339 - DNA, 75 bp, synthetic construct
  source 1..75: mol_type = other DNA
gagctggaagaagatgtctggcagcgggaagagattgtcactaccggcgttggttttggcgtggcgatcccgcac

SEQ ID NO: 257340 - DNA, 75 bp, synthetic construct
  source 1..75: mol_type = other DNA
aatgctgaagagtacggggggacgagttgaactggggggcgggaaagactttgccaccctgcgggtaaaagagct

SEQ ID NO: 257341 - DNA, 75 bp, synthetic construct
  source 1..75: mol_type = other DNA
ccgttctcaacacttaacaactactttgagaaagatgcgacaccatctctacaagtagctagtcagattgctttt

SEQ ID NO: 257342 - DNA, 75 bp, synthetic construct
  source 1..75: mol_type = other DNA
tcaacactgtttcacagagtttagaactttcccttgatcaaccaatggctatagttacaaaccctgctgatatta

SEQ ID NO: 257343 - DNA, 75 bp, synthetic construct
  source 1..75: mol_type = other DNA
tagagagggcggggtttcctgtctgataccaggtgttctttgtgacaaggattatgtttcaggcatacagcaaca

SEQ ID NO: 257344 - DNA, 75 bp, synthetic construct
  source 1..75: mol_type = other DNA
tttgttatcatccggtaaaaaataagcttgaaaacctggttgacaaggtttccggcccaggaacaatagtttata

SEQ ID NO: 257345 - DNA, 75 bp, synthetic construct
  source 1..75: mol_type = other DNA
gtctgccctgaatggccagacatggatgggcggcgggattatcacagataaaggaactcacgttctgtggcaggt

SEQ ID NO: 257346 - DNA, 75 bp, synthetic construct
  source 1..75: mol_type = other DNA
aaccacagttggtgaccagagtgattacagcggaaatgttacgctggaaaataaatcatccctgcaaatcatgga

SEQ ID NO: 257347 - DNA, 75 bp, synthetic construct
  source 1..75: mol_type = other DNA
gcaggccaccgacagccagcatgaagaataaatcctggttcaggatgctggcgggtagtcagggtgaggcggata

SEQ ID NO: 257348 - DNA, 75 bp, synthetic construct
  source 1..75: mol_type = other DNA
aaccgtggggtatctctggcggaaatgctggcgatatgcgtgattatgctgatttgctggataaggtggaaaccg

SEQ ID NO: 257349 - DNA, 75 bp, synthetic construct
  source 1..75: mol_type = other DNA
acggcgattccctgaatattacccctgcttttgttctggtccctgccgcgctggagtctgccgcacatcgcgcca

SEQ ID NO: 257350 - DNA, 75 bp, synthetic construct
  source 1..75: mol_type = other DNA
ctgcagtggaaatatgatgcggctaatggcaccggcacactgactcagggaaacacgacttgggatatgcatgga

SEQ ID NO: 257351 - DNA, 75 bp, synthetic construct
  source 1..75: mol_type = other DNA
tagctgggaagaccggggaatggccctgagcatgaaagacaaggattataacccactgattggccgtaccggtgt

SEQ ID NO: 257352 - DNA, 75 bp, synthetic construct
  source 1..75: mol_type = other DNA
aaagactacagctctcattcctggtatgccggtgcagaggtcgggtatcgttaccacctgtcggaagagtcctgg

SEQ ID NO: 257353 - DNA, 75 bp, synthetic construct
  source 1..75: mol_type = other DNA
catcctgaaagcgagttcatattccccgtttttctccgatctgaacaacagcagtgtctggcagaatgtcggaaa

SEQ ID NO: 257354 - DNA, 75 bp, synthetic construct
  source 1..75: mol_type = other DNA
gttgactttttaaacaaaccagccagtgaaatgagcgtgacgttaattaccgcaccgaaagggagtgatgagaaa

SEQ ID NO: 257355 - DNA, 75 bp, synthetic construct
  source 1..75: mol_type = other DNA
cagtattacgggggcacagagtacggtaaatatgatcaatgctctgtggtactctgacggaaaatcagaggccgg

SEQ ID NO: 257356 - DNA, 75 bp, synthetic construct
  source 1..75: mol_type = other DNA
aatcctctcagccaagcctgcgaacatgtttgagcgtgaggtgaaaaatgcgatgcgcagatggcgttatgagcc

SEQ ID NO: 257357 - DNA, 75 bp, synthetic construct
  source 1..75: mol_type = other DNA
cgatgcgcagatggcgttatgagccgggtaagccaggcagtgggattgtggtgaacatcctgtttaaaattaacg

SEQ ID NO: 257358 - DNA, 75 bp, synthetic construct
  source 1..75: mol_type = other DNA
gtggtagagccagaaccggaacctgagccgatccccgaaccgccaaaagaagcaccggtggtcattgaaaagccg

SEQ ID NO: 257359 - DNA, 75 bp, synthetic construct
  source 1..75: mol_type = other DNA
gtcggcgttggttcgttaacgttgttgcagagcgacagcctcgacagttatcgggcgatccctgccagtgcgcaa

SEQ ID NO: 257360 - DNA, 75 bp, synthetic construct
  source 1..75: mol_type = other DNA
tccggcgtgggagcttaaagagcagtgtagccagtggcaaagcgaagtgaccttcataaaccaccgccagaatac

SEQ ID NO: 257361 - DNA, 75 bp, synthetic construct
  source 1..75: mol_type = other DNA
aagcaaaactatcctcagcgcccatttgtcgctgattcaggatgatgaatttgcaggcaatatccgtcgcctgat

SEQ ID NO: 257362 - DNA, 75 bp, synthetic construct
  source 1..75: mol_type = other DNA
gccggattgcgtagatttgggtcgtgtaaacgttgaaccgcgctcttatgtgcaaactgctactatcgtcggcat

SEQ ID NO: 257363 - DNA, 75 bp, synthetic construct
  source 1..75: mol_type = other DNA
agacgctggccgtgggcatgggactgaagacatcagataaccaaccgctggcgtatctgcggaccaatagcatcc

SEQ ID NO: 257364 - DNA, 75 bp, synthetic construct
  source 1..75: mol_type = other DNA
tacattatttaggaacatatcgtgacggttacgtcgcgaataattttttccctaatgagcagagacgagatcgtt

SEQ ID NO: 257365 - DNA, 75 bp, synthetic construct
  source 1..75: mol_type = other DNA
gcattaagccgcaatcagccgcagtatccagcgcgtgcgcaggcattgcgcattgaagggcaggttaaagttaaa

SEQ ID NO: 257366 - DNA, 75 bp, synthetic construct
  source 1..75: mol_type = other DNA
aaatatcaaaatcatgacaattttagtttccagttgtttgagtatgacactgataatattaaaaaaaatattgag

SEQ ID NO: 257367 - DNA, 75 bp, synthetic construct
  source 1..75: mol_type = other DNA
ttggcagtggctaagcagtgctctgaaagtgaccgtaacgcattgtttacatttataaccagtgatactggggct

SEQ ID NO: 257368 - DNA, 75 bp, synthetic construct
  source 1..75: mol_type = other DNA
tccgccagtgactacttgcgcgagcgggtcagcgatattcgcgatatcagtgagcagttgttgcatattacctgg

SEQ ID NO: 257369 - DNA, 75 bp, synthetic construct
  source 1..75: mol_type = other DNA
tggacatcggcggcgataaaagcattccttacctcaacattccccaggaagagaacccgttcctcggctatcgtg

SEQ ID NO: 257370 - DNA, 75 bp, synthetic construct
  source 1..75: mol_type = other DNA
gtacggcaatgtgctggcaagcggcgtcggcgtgggtacgttgaccctgctacagagcaacagcctcgacagtta

SEQ ID NO: 257371 - DNA, 75 bp, synthetic construct
  source 1..75: mol_type = other DNA
acttcatgaattgacagatgatatttctgcaaaatcatcctcgccttcgccattcgcacccaacgcacatactcg

SEQ ID NO: 257372 - DNA, 75 bp, synthetic construct
  source 1..75: mol_type = other DNA
gcggcaaccttggcgttaacgggcgtactgaacatccgtttgagctggaagaagatgtctggcagcgggaagaga

SEQ ID NO: 257373 - DNA, 75 bp, synthetic construct
  source 1..75: mol_type = other DNA
taccagcaggtgctactggcggcgggcgacaagccgattatcttccgcacaatggacatcggcggcgataaaagc

SEQ ID NO: 257374 - DNA, 75 bp, synthetic construct
  source 1..75: mol_type = other DNA
gcaacgcccagttgatgatcccaatggtccacagtctcgatcagatcttatgggtgaagggtgagatccaaaaag

SEQ ID NO: 257375 - DNA, 75 bp, synthetic construct
  source 1..75: mol_type = other DNA
atcggtgtgctacatcatcgaccacttctgcgatgaggttgatttcttcagtattggttccaacgatatgacgca

SEQ ID NO: 257376 - DNA, 75 bp, synthetic construct
  source 1..75: mol_type = other DNA
tgcgtttgccaatggcgcggaaggcgtcgggctgttccgtaccgaaatgctgtatatggatcgcgacagcgcgcc

SEQ ID NO: 257377 - DNA, 75 bp, synthetic construct
  source 1..75: mol_type = other DNA
ggtccacagtctcgatcagatcttatgggtgaagggcgagatccaaaaagcgatcgttgagcttaagcgcgatgg

SEQ ID NO: 257378 - DNA, 75 bp, synthetic construct
  source 1..75: mol_type = other DNA
aagccgttatctgccgctactgcttgggctgggcctggatgagctgagtatgagtagcccgcgcattccggcggt

SEQ ID NO: 257379 - DNA, 75 bp, synthetic construct
  source 1..75: mol_type = other DNA
agcggttattatcaggtcgcgcagacgctggcggataaacgccaaaaacaacaggcgcaagctgccgcgcagctg

SEQ ID NO: 257380 - DNA, 75 bp, synthetic construct
  source 1..75: mol_type = other DNA
cgccggacgagcaggagcaatttgaagcctaccagcaggtgctactggcagcgggcgacaagccgattatcttcc

SEQ ID NO: 257381 - DNA, 75 bp, synthetic construct
  source 1..75: mol_type = other DNA
gcctgccagtgcttccgtggtgaaagggaagagcaccacgctgaccgtggcattccagccggaaggcgcaaccga

SEQ ID NO: 257382 - DNA, 75 bp, synthetic construct
  source 1..75: mol_type = other DNA
tgacggcagaatcctacgatgataactacctggatgatgaagacgcggactggaccgcgaccgggcaggggcaga

SEQ ID NO: 257383 - DNA, 75 bp, synthetic construct
  source 1..75: mol_type = other DNA
ggtcaccaatgttggacgcccgtcgatggctgaagatcgcagtacggtgacggcagcaaccggcatgacggtaac

SEQ ID NO: 257384 - DNA, 75 bp, synthetic construct
  source 1..75: mol_type = other DNA
gggaaaacaaccaccctgaccgttactgtggaaccggaaaatgcaacggataagacattcagggcgatttccgcc

SEQ ID NO: 257385 - DNA, 75 bp, synthetic construct
  source 1..75: mol_type = other DNA
gcttatgcaaacccgttgtcagacgatgactggcagcgactggctaaggtgaaggatctgacgcccgggcgagat

SEQ ID NO: 257386 - DNA, 75 bp, synthetic construct
  source 1..75: mol_type = other DNA
gtcgtcaggtcgaaagcagagggtttcagtctcctggttttcaggcattcgatcagccaaatatcggagatgccc

SEQ ID NO: 257387 - DNA, 75 bp, synthetic construct
  source 1..75: mol_type = other DNA
atccctgtgatttccggtaatggtcagtttgctgcggtggctgaaattaccgttaataatgtgccgggtggctaa

SEQ ID NO: 257388 - DNA, 75 bp, synthetic construct
  source 1..75: mol_type = other DNA
atgactggcagcgactggcgaaggtgaaggatctgacgccgggcgagatgacggcagaatcctacgatgataact

SEQ ID NO: 257389 - DNA, 75 bp, synthetic construct
  source 1..75: mol_type = other DNA
cccgtgatttccggtaatggtcagtttgccacggtagctgaagtcaccgttactgaagcgggcgctgcagggtaa

SEQ ID NO: 257390 - DNA, 75 bp, synthetic construct
  source 1..75: mol_type = other DNA
cagattatccacgcgggcctggaatgtggtctgttcaaaaaaccgtatccggaaatggacatggtgtctatcggg

SEQ ID NO: 257391 - DNA, 75 bp, synthetic construct
  source 1..75: mol_type = other DNA
cggatgagcaagttcacatcgaaagcgtaggtcattactggacactgctgactgaactgctgaaagaaattccgg

SEQ ID NO: 257392 - DNA, 75 bp, synthetic construct
  source 1..75: mol_type = other DNA
agctagcaacgatgccccaacaagtcagccatttgttgcgcctgaagctgtaaaggtaaagaaagctgcgtcggt

SEQ ID NO: 257393 - DNA, 75 bp, synthetic construct
  source 1..75: mol_type = other DNA
gtcgtcaggttgaaagtcgcgggtttcagtctccagggctacaaacatttaatactccacagatgggcgatgttt

SEQ ID NO: 257394 - DNA, 75 bp, synthetic construct
  source 1..75: mol_type = other DNA
ctaccgaacgaaagcgattatctgaaattacagtcgctgtttgcccgggtggcagaagagaaacatcagcgggga

SEQ ID NO: 257395 - DNA, 75 bp, synthetic construct
  source 1..75: mol_type = other DNA
cgtgcaacaggcgttgagctggagactgaacgttttgagcagacggtcagggaagttcaggatttagccagtcag

SEQ ID NO: 257396 - DNA, 75 bp, synthetic construct
  source 1..75: mol_type = other DNA
gcagtcgtccgggagacctggttgcagatttcttcatggggtcaggttcaacggtaaaagcggcgctgtcactgg

SEQ ID NO: 257397 - DNA, 75 bp, synthetic construct
  source 1..75: mol_type = other DNA
aaaagcggcgatggcactggggcgttgtgcgattggtgttgagctggagaccgaacgttttgagcagacagtcag

SEQ ID NO: 257398 - DNA, 75 bp, synthetic construct
  source 1..75: mol_type = other DNA
aacattaccaagggccatatcgcccgaaagatgccgggtatgaggcgaagggcagggcactgaaacagcatgtga

SEQ ID NO: 257399 - DNA, 75 bp, synthetic construct
  source 1..75: mol_type = other DNA
attgttgcacccccgacctcacggtaactgcccccctgccactggatacgattttaccaccgctgaagacacaat

SEQ ID NO: 257400 - DNA, 75 bp, synthetic construct
  source 1..75: mol_type = other DNA
tgacgaagatgccatgctggaaatcgccattgtcgatgacgctggcacaatcctgctcaattccctgattgcgcc

SEQ ID NO: 257401 - DNA, 75 bp, synthetic construct
  source 1..75: mol_type = other DNA
acagcaaaacagattgctgatgtcacaggaaagaaaaacatggcttcacactggttcagtgccagtcagtggcag

SEQ ID NO: 257402 - DNA, 75 bp, synthetic construct
  source 1..75: mol_type = other DNA
tgctgaaccatattatctgggcgaagccgtccggacgctggaacgggtgcaacaaggaaagcctgagggcgtatt

SEQ ID NO: 257403 - DNA, 75 bp, synthetic construct
  source 1..75: mol_type = other DNA
gatgcgtgaacgctttaatgtgctgaaccatattatatgggcgaagccgtccggacgctggaacggatgcaacaa

SEQ ID NO: 257404 - DNA, 75 bp, synthetic construct
  source 1..75: mol_type = other DNA
cggtaaaaggctccggcaccacactctggctttattccggaaatggtgatgcttatgcaaacccgttgtcagacg

SEQ ID NO: 257405 - DNA, 75 bp, synthetic construct
  source 1..75: mol_type = other DNA
agtcaccaatatcggacgcccgtcgctggcggaggacagcggcaccatcacgccggtgacggggatctccgtcac

SEQ ID NO: 257406 - DNA, 75 bp, synthetic construct
  source 1..75: mol_type = other DNA
aggtgttgcggcaggtaaagcgcagatccctgttgtcaccggcaacggtgagtttgcggcggtggtggagatcac

SEQ ID NO: 257407 - DNA, 75 bp, synthetic construct
  source 1..75: mol_type = other DNA
aagaagtgattacccgtacggtaaaaatcaccaatattggtcgtccttcgctggcggaggatcggggagaaatca

SEQ ID NO: 257408 - DNA, 75 bp, synthetic construct
  source 1..75: mol_type = other DNA
agtcaccaatatcggacgcccgtcgctggcggaggacagcgggaccatcacgccggtgacggggatcactgtcac

SEQ ID NO: 257409 - DNA, 75 bp, synthetic construct
  source 1..75: mol_type = other DNA
cgatgtgttccgcggctgggtcagcagcatcggtaaggcggtgacggcgaaagaagtgatcacccgcacggtgaa

SEQ ID NO: 257410 - DNA, 75 bp, synthetic construct
  source 1..75: mol_type = other DNA
aagattacatccgcaccgcgcgcgccaaagggttgacccgccttagggtgattatcgtccacgcgctgcgtaacg

SEQ ID NO: 257411 - DNA, 75 bp, synthetic construct
  source 1..75: mol_type = other DNA
accgctgagtcctatgacgacagttatctcgatgatgaagatgcggactggaccgcgaccgggcaggggcagaaa

SEQ ID NO: 257412 - DNA, 75 bp, synthetic construct
  source 1..75: mol_type = other DNA
gtccgtcgatggcagaagatcgcagcacggtgacggcgacaaccggcatgacggtgacacccgccagtgcttccg

SEQ ID NO: 257413 - DNA, 75 bp, synthetic construct
  source 1..75: mol_type = other DNA
aggtgtggcggcaggtaaggcgcagatcccggttgtgacggggaacggtcagtttgctgacgtggcggaaatcac

SEQ ID NO: 257414 - DNA, 75 bp, synthetic construct
  source 1..75: mol_type = other DNA
atgactggcagcgactggcgaaggtgaaggatctgacccccggcgagatgacggcagaatcctacgatgataact

SEQ ID NO: 257415 - DNA, 75 bp, synthetic construct
  source 1..75: mol_type = other DNA
aggtgttgcggccggtaaagcgcagatccctgtggtgaccggaaatggtcagtttgcggcagtggcagaaattac

SEQ ID NO: 257416 - DNA, 75 bp, synthetic construct
  source 1..75: mol_type = other DNA
ggatgtgttccgtggctgggtgagcgccattggtaaagcggtgactgccaaagaagtgatcacccgtacggtaaa

SEQ ID NO: 257417 - DNA, 75 bp, synthetic construct
  source 1..75: mol_type = other DNA
ccgttcagccggaaggcgcaacggataaaacattccgcgcaacgtcagcgaatcagaatttcgccaccattaccg

SEQ ID NO: 257418 - DNA, 75 bp, synthetic construct
  source 1..75: mol_type = other DNA
atccctgtggttaccggcaatggtgagtttgcggcagtggcggaaattaccgtcacggatggtgcagcgggttaa

SEQ ID NO: 257419 - DNA, 75 bp, synthetic construct
  source 1..75: mol_type = other DNA
aggtgttgcggcagggaaagcacagatccctgtggttaccggcaatggtgagtttgcggcagtggcggaaattac

SEQ ID NO: 257420 - DNA, 75 bp, synthetic construct
  source 1..75: mol_type = other DNA
gcgtaatccggttgggtacatgttgcaattgttaaaagctgcccgtgaaggtcgctataattcgatttctttcag

SEQ ID NO: 257421 - DNA, 75 bp, synthetic construct
  source 1..75: mol_type = other DNA
acaaaatccgcttcccgaacggcacggtggatgtgttccgtggctgggtgagtgccattggtaaagccgtgacgg

SEQ ID NO: 257422 - DNA, 75 bp, synthetic construct
  source 1..75: mol_type = other DNA
acggcagaatcctacgatgataactatctggatgatgatgatgcggactgggtatccaccgggcaggggcagaaa

SEQ ID NO: 257423 - DNA, 75 bp, synthetic construct
  source 1..75: mol_type = other DNA
aggtgttgcggcaggtaaagcgcagatccctgtggttaccggcaatggtgagtttgcggcggtggcggagatcaa

SEQ ID NO: 257424 - DNA, 75 bp, synthetic construct
  source 1..75: mol_type = other DNA
gcacagtaccggaagatgcatctgataaaacggtgagtgtggcgtcatcctctcctgagatcgccacggttacac

SEQ ID NO: 257425 - DNA, 75 bp, synthetic construct
  source 1..75: mol_type = other DNA
aaatcactgcggcgttatttttctgtatcggctgctgttccgtatacggatgtctggatgtataagcctgtacag

SEQ ID NO: 257426 - DNA, 75 bp, synthetic construct
  source 1..75: mol_type = other DNA
atggccaatactgtaaaaatatccagttgtgagttaatcaacgctgattgcctggaatttatccagaccttaccg

SEQ ID NO: 257427 - DNA, 75 bp, synthetic construct
  source 1..75: mol_type = other DNA
tacggatgtctggacgcacaagcccgtgcagtattatccgggcaaacatccctgtgaaaaaccggcggatatgtt

SEQ ID NO: 257428 - DNA, 75 bp, synthetic construct
  source 1..75: mol_type = other DNA
cagcatgtgatggccccgctgatttcttactttcgtgatgcgcgcgcggccctggggataacggcaaaacagatt

SEQ ID NO: 257429 - DNA, 75 bp, synthetic construct
  source 1..75: mol_type = other DNA
gagtacaaatctctgcggcgttatttttccgtatcggctgccgttccgtatacggatgtctggacgcacaagcct

SEQ ID NO: 257430 - DNA, 75 bp, synthetic construct
  source 1..75: mol_type = other DNA
ggggagaactggaaaagccacatcaccaactggtcagcacatacagtgagctgaaccggcagtatgccagcctgc

SEQ ID NO: 257431 - DNA, 75 bp, synthetic construct
  source 1..75: mol_type = other DNA
gaactggaaaagtcccattaccaactggtcagcacatacagtgagctgaaccgacagtacatggaactgctgagt

SEQ ID NO: 257432 - DNA, 75 bp, synthetic construct
  source 1..75: mol_type = other DNA
aagggcgacgatgattacctgaaatggctggatcagtgtctggcgcagttctggcgggtactgaagcctgccgga

SEQ ID NO: 257433 - DNA, 75 bp, synthetic construct
  source 1..75: mol_type = other DNA
cgtgcaactggcgttgagctggagactgaacgttttgagcagacggtcagggaagtacaggatttagtcagccag

SEQ ID NO: 257434 - DNA, 75 bp, synthetic construct
  source 1..75: mol_type = other DNA
gaactggaatggccacaccaccagctggtcagtacatacagtgaactgaaccgacaatatgtcagcctgcaggaa

SEQ ID NO: 257435 - DNA, 75 bp, synthetic construct
  source 1..75: mol_type = other DNA
tttttatggggtctggctcaacaataaaagcagcactttcgctggggcgtcgtgcggttggcgtggaactggaag

SEQ ID NO: 257436 - DNA, 75 bp, synthetic construct
  source 1..75: mol_type = other DNA
caaaaatgacggctatgcggcaaagggacgcgagctaaaacagcacgtcatggcctcgctgatttcttactttcg

SEQ ID NO: 257437 - DNA, 75 bp, synthetic construct
  source 1..75: mol_type = other DNA
cgtgcgattggcgttgagctggagactgagcgttttgagcagacggtcagggaagttcaggatttagtcagccag

SEQ ID NO: 257438 - DNA, 75 bp, synthetic construct
  source 1..75: mol_type = other DNA
cacaggtgtagttaccgaagtggaccgggagaactggctttgccgggtgaaaacgggcgaccttgaaactaactg

SEQ ID NO: 257439 - DNA, 75 bp, synthetic construct
  source 1..75: mol_type = other DNA
cacaggtgtagtcaccgaagtggaccgggaaaactggctttgccgggtgaaaacaggcgagcttgaaaccaactg

SEQ ID NO: 257440 - DNA, 75 bp, synthetic construct
  source 1..75: mol_type = other DNA
accgcgtttgccctgcctgcggtctactcaaaccagtttccgccaccttcaggctctgaggacggcaacgtgacg

SEQ ID NO: 257441 - DNA, 75 bp, synthetic construct
  source 1..75: mol_type = other DNA
ggggcatcaaatcaatggtcattgagaccgctgacaacatcaccatgaaaaccagtgagtttgtactggaggctg

SEQ ID NO: 257442 - DNA, 75 bp, synthetic construct
  source 1..75: mol_type = other DNA
gctgagtctgggcggcaatctggagactgcctttgcgctgcccgctgtctattcgaaacagttcgcaccaccgtc

SEQ ID NO: 257443 - DNA, 75 bp, synthetic construct
  source 1..75: mol_type = other DNA
agcgaagtggtggtcaatggtggcgttactcagggcggcggagtgatgagttctaacgggatcgtcgttgatgcg

SEQ ID NO: 257444 - DNA, 75 bp, synthetic construct
  source 1..75: mol_type = other DNA
cgtccgggagaccaggttgcagatttttttatgggctcaggttcaacggtaaaagcggcactggcgctcgggcgt

SEQ ID NO: 257445 - DNA, 75 bp, synthetic construct
  source 1..75: mol_type = other DNA
taacggcaaaacagatagtggatgccacgggcaagaaaaatatggcgtcgcactggtttagtgccagtcagtggc

SEQ ID NO: 257446 - DNA, 75 bp, synthetic construct
  source 1..75: mol_type = other DNA
tttgcccgggtggcagaagagaaacatcagcgcggtgaactggaaaagccccaccaccagctggtggatacgtat

SEQ ID NO: 257447 - DNA, 75 bp, synthetic construct
  source 1..75: mol_type = other DNA
tcgcaccaccgtcgacgtcggcagacgcctgcgtgacagaacatcctgacggcggctggtttgaatacgaaccca

SEQ ID NO: 257448 - DNA, 75 bp, synthetic construct
  source 1..75: mol_type = other DNA
acagcttttgcgctgcccgccatctattcgaatcagttcacaccaccgtcgacgtcggcggacgcctgcgtgaca

SEQ ID NO: 257449 - DNA, 75 bp, synthetic construct
  source 1..75: mol_type = other DNA
ctgctggcagaggctgtcactgatgaattgagcagcgtggacgtgatgactgaagagcttgagtcccgaatcagg

SEQ ID NO: 257450 - DNA, 75 bp, synthetic construct
  source 1..75: mol_type = other DNA
aacattatcaggggccatatcagccgaaaaatgacggctatgcggcaaaggggcgcgagcttaagcagcacgcga

SEQ ID NO: 257451 - DNA, 75 bp, synthetic construct
  source 1..75: mol_type = other DNA
cagaaaacttcaggtgctgtttgcccgggtggcagaagagaaacatcagcggggtgaactggaaaagccacatca

SEQ ID NO: 257452 - DNA, 75 bp, synthetic construct
  source 1..75: mol_type = other DNA
tcgcactggttcagtgccagccagtggcagttaccgaacgaggatgattacagaaaacttcaggtgctgtttgcc

SEQ ID NO: 257453 - DNA, 75 bp, synthetic construct
  source 1..75: mol_type = other DNA
gggcgcgagctaaaacagcacgtcatggccccgctgatttcttactttcgtgatgcgcgtgaatcactgggaata

SEQ ID NO: 257454 - DNA, 75 bp, synthetic construct
  source 1..75: mol_type = other DNA
ggaaagtttacgggcatatttcccggcaacagagcgcattctgtttgctgaacattatcaggggccataccagcc

SEQ ID NO: 257455 - DNA, 75 bp, synthetic construct
  source 1..75: mol_type = other DNA
gagtacaaatccctgcggcgttatttttccgtatcggctgccgttccgtatacggatgtctggacgcacaagccc

SEQ ID NO: 257456 - DNA, 75 bp, synthetic construct
  source 1..75: mol_type = other DNA
cgtgcgaaaaaccggcagaaatgttgcagcagataatcagcgcaagcagtcgtccgggagatctggttgcagatt

SEQ ID NO: 257457 - DNA, 75 bp, synthetic construct
  source 1..75: mol_type = other DNA
gtgttgatttaatcaacgctgattgcctgcattttattcagtccttgcctgatgattccattgatctgattgtta

SEQ ID NO: 257458 - DNA, 75 bp, synthetic construct
  source 1..75: mol_type = other DNA
tgctggagacgtatacttcactgaaccggcagtatgcggaactgcagagtgaatataagcatctgcggcggtatt

SEQ ID NO: 257459 - DNA, 75 bp, synthetic construct
  source 1..75: mol_type = other DNA
cctgtgaaaaaccggcgggtatgttgcggcagataattgaggccagcagtcgtccgggtgatttggttgctgatt

SEQ ID NO: 257460 - DNA, 75 bp, synthetic construct
  source 1..75: mol_type = other DNA
tctctgcggcgttatttttctgtatcggccgccgttccttatacggacgtctggacgcataagcccgtgcagtat

SEQ ID NO: 257461 - DNA, 75 bp, synthetic construct
  source 1..75: mol_type = other DNA
cgtgctactggcgttgagctggagactgaacgttttgagcagacggtcagggaagttcaggatttagccagtcag

SEQ ID NO: 257462 - DNA, 75 bp, synthetic construct
  source 1..75: mol_type = other DNA
atgacaatgaggtcttgcagagagtgtggtcagaaggtttcttcagaagcgaaagtgtgtccaggatgtggtgtt

SEQ ID NO: 257463 - DNA, 75 bp, synthetic construct
  source 1..75: mol_type = other DNA
tttttatggggtcggggtcgacaataaaagcggcactgtcgctgggacgcagggcgattggcgtggaactggaag

SEQ ID NO: 257464 - DNA, 75 bp, synthetic construct
  source 1..75: mol_type = other DNA
agagtgaatataagcatctgcggcggtattttggtgtgacggcgcaggtgccgtacacggatgtgtggacacata

SEQ ID NO: 257465 - DNA, 75 bp, synthetic construct
  source 1..75: mol_type = other DNA
ggctggaccagtgtctggcgcagttctggcgtgtactgaagcctgccggaagtctttacctgttctgtggtcatc

SEQ ID NO: 257466 - DNA, 75 bp, synthetic construct
  source 1..75: mol_type = other DNA
gagggcgacgatgattacctgaaatggctggaccagtgtctggcgcagttctggcggggactgaagcctaccgga

SEQ ID NO: 257467 - DNA, 75 bp, synthetic construct
  source 1..75: mol_type = other DNA
gcagcagataatcagcgcaagtagtcgtcctggtgatctggttgcggattttttcatggggtcgggttcaacggt

SEQ ID NO: 257468 - DNA, 75 bp, synthetic construct
  source 1..75: mol_type = other DNA
cgtgcaattggtgtcgagctggaggctgaacgttttgagcagaccgcaatggatgtacagaatttaatcagaaag

SEQ ID NO: 257469 - DNA, 75 bp, synthetic construct
  source 1..75: mol_type = other DNA
ctggtttggtaccagtcagtggcagttaccgaacgaagctgattacagaaaactgcaggcgctgttcgcgcgtgt

SEQ ID NO: 257470 - DNA, 75 bp, synthetic construct
  source 1..75: mol_type = other DNA
cagtcagtggcagttaccgaatgaacgcgattatctgaaattgcaggcgctgtttgccagggtggcagaagagaa

SEQ ID NO: 257471 - DNA, 75 bp, synthetic construct
  source 1..75: mol_type = other DNA
tgggcgaagccatccggacgctggaacgggtgcaacaaggaaagcctgcgtgcgtatttcccggccacagagcgc

SEQ ID NO: 257472 - DNA, 75 bp, synthetic construct
  source 1..75: mol_type = other DNA
ggcgttgagctggagactgagcgttttgagcagacggtcagggaagttcaggatttagccagtcagaacggatga

SEQ ID NO: 257473 - DNA, 75 bp, synthetic construct
  source 1..75: mol_type = other DNA
cgtgtgattggtgttgagctggagactgagcgttttgagcagacggtcagggaagtacaggatttagtcagtcag

SEQ ID NO: 257474 - DNA, 75 bp, synthetic construct
  source 1..75: mol_type = other DNA
cgtccgggtgatttggttgctgattttttcatgggctcaggctcaacaataaaagcggcactttcactgggacgc

SEQ ID NO: 257475 - DNA, 75 bp, synthetic construct
  source 1..75: mol_type = other DNA
tgggatctccccagaacgtcatgcgcaactgctggctgaactcggcttagataaaccgatgtggcagcagtacct

SEQ ID NO: 257476 - DNA, 75 bp, synthetic construct
  source 1..75: mol_type = other DNA
gtgcgataaatggcatccacgcggcgtttcattatttgaaaaagaattacatttcaggttgcgttatgacagtcc

SEQ ID NO: 257477 - DNA, 75 bp, synthetic construct
  source 1..75: mol_type = other DNA
atccgcgaagtgcatctcgattactaccgcgcgggcgcgcaggtggcgatcaccgccagctatcaggccacgcct

SEQ ID NO: 257478 - DNA, 75 bp, synthetic construct
  source 1..75: mol_type = other DNA
attatgatgcggtcaccaaaacctggcaccaccacggcggagcgtgcgagacgctggcggggtatctaccgcagt

SEQ ID NO: 257479 - DNA, 75 bp, synthetic construct
  source 1..75: mol_type = other DNA
gtgcgtaatcatccgttagggatttatgaaaaggcgctggcgaaagatctctcctggccggagcggctggtgctg

SEQ ID NO: 257480 - DNA, 75 bp, synthetic construct
  source 1..75: mol_type = other DNA
aatcaaaactgggtatttttaacgccgagaatcaattaaccgaagaagtttccttagatagtgacagttcaaaaa

SEQ ID NO: 257481 - DNA, 75 bp, synthetic construct
  source 1..75: mol_type = other DNA
tggcagcagtttgcgtggcagagagcagaatactgccagttgcgcagcaggggtaaggccgggcatccaccatgc

SEQ ID NO: 257482 - DNA, 75 bp, synthetic construct
  source 1..75: mol_type = other DNA
ggtaacgcggttgaagtgcgtgaagcggtgcagttcctgaccggtgagtatcgtaacccgcgtctgtttgatgtc

SEQ ID NO: 257483 - DNA, 75 bp, synthetic construct
  source 1..75: mol_type = other DNA
ctgaccatggcgatgcgagattcaggaaccgttctcgactggaaaagcctgcatctgaatggcccgattgttgat

SEQ ID NO: 257484 - DNA, 75 bp, synthetic construct
  source 1..75: mol_type = other DNA
acattttcccggatgacaaccgtttccgcgaaattattaaagacgtcggcgtggcgattatcggccagaccagct

SEQ ID NO: 257485 - DNA, 75 bp, synthetic construct
  source 1..75: mol_type = other DNA
gatagcggtgattatcctgcggatatgacacccgacagtagtacgcttgcgaactctctgactgggttaacggaa

SEQ ID NO: 257486 - DNA, 75 bp, synthetic construct
  source 1..75: mol_type = other DNA
cagcatattcatactccccgcaaccagtaccggaagcctggaaaatgcgattcagcgctaacagtgcgtggttct

SEQ ID NO: 257487 - DNA, 75 bp, synthetic construct
  source 1..75: mol_type = other DNA
ttatccctttaatgaacgtgcaatttatgctttggctgatgttcactgtagcgatggcaataagggcataaaatt

SEQ ID NO: 257488 - DNA, 75 bp, synthetic construct
  source 1..75: mol_type = other DNA
agcaccgcacaaaggacttcgctggttgccgcgatgatcgaaacgggtgttgggatcccgtcgatgtgcctgtcc

SEQ ID NO: 257489 - DNA, 75 bp, synthetic construct
  source 1..75: mol_type = other DNA
aacaacagaatgccctttcatcacctgctagggctggagtccacgcaagaaaagagccatactgagaccgagtgc

SEQ ID NO: 257490 - DNA, 75 bp, synthetic construct
  source 1..75: mol_type = other DNA
catgcttggcaaacactgataagaactctacttaataactcaagaacagaacaaccaaattatgattttaaacag

SEQ ID NO: 257491 - DNA, 75 bp, synthetic construct
  source 1..75: mol_type = other DNA
attttgaaaataggtattatataagacaaggaacagctacgcatttaatcactgacggtgaagcaattagtagtt

SEQ ID NO: 257492 - DNA, 75 bp, synthetic construct
  source 1..75: mol_type = other DNA
gagtttgaaatcgaaaaggttttgtcatctcagccagatgaattatggaatatgacaaaaaagtatgcaggtatt

SEQ ID NO: 257493 - DNA, 75 bp, synthetic construct
  source 1..75: mol_type = other DNA
ctgagtttgcagaaaaaatattgaacggaacaaagcggttcgagtttcgtaaaggtatattcaaaaatccgcaaa

SEQ ID NO: 257494 - DNA, 75 bp, synthetic construct
  source 1..75: mol_type = other DNA
aacaacagaatgccctttcatcacctgctaggcctggagtctacggaagaaaagagccataccgagaccgagtgc

SEQ ID NO: 257495 - DNA, 75 bp, synthetic construct
  source 1..75: mol_type = other DNA
ccgtggttcaccgtctacccggacgtcggcaaccttagcgcctggggcaatgatgttcccgctgaactgaaactg

SEQ ID NO: 257496 - DNA, 75 bp, synthetic construct
  source 1..75: mol_type = other DNA
gccgtgacgacgcggtacgccagcgagcacgggagatcatgagtaaagcgattcgcctggcgcgcgatctcggca

SEQ ID NO: 257497 - DNA, 75 bp, synthetic construct
  source 1..75: mol_type = other DNA
ccgtggttcaccgtctacccggacgtcggcaacctcagcgcctggggcaatgatgttcccgccgaactgaaactg

SEQ ID NO: 257498 - DNA, 75 bp, synthetic construct
  source 1..75: mol_type = other DNA
gatacctcccgtgggctgaacagccctctgccgccttcgtcagtcacccagccattctttgctgcacatgtcacg

SEQ ID NO: 257499 - DNA, 75 bp, synthetic construct
  source 1..75: mol_type = other DNA
ccagcaaacaatatccgttgatcgggcagttaagtactacccgggaagatatggcaaccttctctaacccgacgt

SEQ ID NO: 257500 - DNA, 75 bp, synthetic construct
  source 1..75: mol_type = other DNA
tggcaaaccgctctctgtaccacaaggcatcatcggtctgatgactcgcttcggtatagatgtcaccctggccca

SEQ ID NO: 257501 - DNA, 75 bp, synthetic construct
  source 1..75: mol_type = other DNA
tctatgaccatgttgaacaggcgatgaatgatttcgctgccgcgacaggtcgtcagtatcagccgtttgagtatt

SEQ ID NO: 257502 - DNA, 75 bp, synthetic construct
  source 1..75: mol_type = other DNA
tcaacattctggtgctggatacgcaatgctattccaacaccggtggtcaggcgtcgaaagcgacaccgctgggtg

SEQ ID NO: 257503 - DNA, 75 bp, synthetic construct
  source 1..75: mol_type = other DNA
gtgctggcagtatttgccgaacttaacacagccaaaccaaaaccccgttttaccgtcggtatttacgatgatgta

SEQ ID NO: 257504 - DNA, 75 bp, synthetic construct
  source 1..75: mol_type = other DNA
cagggtgcgattgccaaaagttacagtagcaaaggtcaggatctggtggaacgcaactggcaggctctggcgctg

SEQ ID NO: 257505 - DNA, 75 bp, synthetic construct
  source 1..75: mol_type = other DNA
ggcgagcgcgaaaccctgccccgtgtcatcggcgggcgctatggtctttcatccaaagaatttggcccggactgt

SEQ ID NO: 257506 - DNA, 75 bp, synthetic construct
  source 1..75: mol_type = other DNA
gaacaggttgcagctttacgccagcaactcaacgatgttgccgaagcacatgaactgctacgtgacgcagatgca

SEQ ID NO: 257507 - DNA, 75 bp, synthetic construct
  source 1..75: mol_type = other DNA
gtgaatctattgaagaagtaccgctacagccggtaaatccgcacagtgcaaatcgtccgcctgtggtttccgatg

SEQ ID NO: 257508 - DNA, 75 bp, synthetic construct
  source 1..75: mol_type = other DNA
gcacggcgcgttgcaaacgggtgctctctcgacatcgtttacatcatcgcagggtttactgctgatgattccgac

SEQ ID NO: 257509 - DNA, 75 bp, synthetic construct
  source 1..75: mol_type = other DNA
taccgtccgttctctgccagacatctgctgcaagcattgccagaatccgtgcgtaccgtggcggtgctggatcgc

SEQ ID NO: 257510 - DNA, 75 bp, synthetic construct
  source 1..75: mol_type = other DNA
ccatctgacgcaaattctgcctggcgatagcgccctcgcagaattgcagggtgcgattgccaaaagttacagtag

SEQ ID NO: 257511 - DNA, 75 bp, synthetic construct
  source 1..75: mol_type = other DNA
ggtgattatcctgatgggatctgccatcggtacttgtgaagaagtggttgatgagttacttacccgtggcgaaaa

SEQ ID NO: 257512 - DNA, 75 bp, synthetic construct
  source 1..75: mol_type = other DNA
gaagctactaacccgtggtacaacgcagtttacgaccatgttgaacaggcgatgaatgatttcgccgccgctacg

SEQ ID NO: 257513 - DNA, 75 bp, synthetic construct
  source 1..75: mol_type = other DNA
atgattactattgacggtaatggcgcggttgcttcggtcgcatttcgcactagtgaagttatcgccatctaccct

SEQ ID NO: 257514 - DNA, 75 bp, synthetic construct
  source 1..75: mol_type = other DNA
taaaatttgcagtggcgatgactattgccaatatgggctatcaggctttatgcctgtatatcgataatagctttg

SEQ ID NO: 257515 - DNA, 75 bp, synthetic construct
  source 1..75: mol_type = other DNA
tcccggacaacagcaggagaatgatcctcccggcagcaccacgacattaggcctttttgcctgggcggttgcatt

SEQ ID NO: 257516 - DNA, 75 bp, synthetic construct
  source 1..75: mol_type = other DNA
ggtaaccagtaagcccttaatcccaataatgaagacactttttacggatgttacaggtactgtaccggatgctga

SEQ ID NO: 257517 - DNA, 75 bp, synthetic construct
  source 1..75: mol_type = other DNA
ttccgatgatctccggtcgcggcctcggtcatactggcggtacgctcgacaaactggaatccatccctggcttcg

SEQ ID NO: 257518 - DNA, 75 bp, synthetic construct
  source 1..75: mol_type = other DNA
taaatgctgatctctggtatcagggtatgaataatgcactggatattttacaagcacagatattaaaacaactga

SEQ ID NO: 257519 - DNA, 75 bp, synthetic construct
  source 1..75: mol_type = other DNA
taataatgaagccagtctcaggcaaaatggcaaagcgatgctggcgcatgcggcatcttcaatgagtaatgtaaa

SEQ ID NO: 257520 - DNA, 75 bp, synthetic construct
  source 1..75: mol_type = other DNA
aaagcgccggtagtcgtgaaaaactatccgaaagacattaaagcgttctacatgcgccttaacgaagacggtaaa

SEQ ID NO: 257521 - DNA, 75 bp, synthetic construct
  source 1..75: mol_type = other DNA
gacttctttggtaaagagtctttcctgaccgtatctggccagttgaacggcgaaacctacgcttgcgcattgtcc

SEQ ID NO: 257522 - DNA, 75 bp, synthetic construct
  source 1..75: mol_type = other DNA
acgacttcttcctgaatttaccagaaatcgatcgcagcaaactggaacgtattgatattcgtacatcgcaactga

SEQ ID NO: 257523 - DNA, 75 bp, synthetic construct
  source 1..75: mol_type = other DNA
tgtctgtatatcgataacacttttgctattaccagaatatcgccgctctgggcggggctgattggagtctgtacg

SEQ ID NO: 257524 - DNA, 75 bp, synthetic construct
  source 1..75: mol_type = other DNA
ttaccggtactgtaccagatgctgaagagatcgcgcataaagccgagctttttcgccaacaaacgggaattgcac

SEQ ID NO: 257525 - DNA, 75 bp, synthetic construct
  source 1..75: mol_type = other DNA
tctggacgataaacatctcggccttctgatagaaaatcacacgctggcttatttaaatgcagatctctggtatca

SEQ ID NO: 257526 - DNA, 75 bp, synthetic construct
  source 1..75: mol_type = other DNA
caacgccacctgtccaggctccgtgcgtgaagcccccaccacctccggcgtggataatgcaaccggcccccaact

SEQ ID NO: 257527 - DNA, 75 bp, synthetic construct
  source 1..75: mol_type = other DNA
attactgacatgcagcaacgccagcgtgctgctgatgcactcgatgctaaatacacgaaggagttagctgatgcg

SEQ ID NO: 257528 - DNA, 75 bp, synthetic construct
  source 1..75: mol_type = other DNA
taccgtgataacgccatctcctacaaagaccagcgcgataaagcgaaggaaaaactcagccaggcgaacgccacc

SEQ ID NO: 257529 - DNA, 75 bp, synthetic construct
  source 1..75: mol_type = other DNA
cgaaacgttctcggtatccgatccggaatcctcagcgaccaaacagccctgagggcgctgcaggaatacatcacc

SEQ ID NO: 257530 - DNA, 75 bp, synthetic construct
  source 1..75: mol_type = other DNA
cgtcgaactctctgcagttgctggacgaaacgttctcggtatccgatccggaatcctcagcgaccaaacagccct

SEQ ID NO: 257531 - DNA, 75 bp, synthetic construct
  source 1..75: mol_type = other DNA
tgctcagcggtgaactggcagtcgatccatcgaatgcggggactaccgggcttctcgacctctccacccgtaact

SEQ ID NO: 257532 - DNA, 75 bp, synthetic construct
  source 1..75: mol_type = other DNA
cctccggcgtggataatgcaaccggcccccgactggcagacacagttgaacgggattatttcactctcagagagc

SEQ ID NO: 257533 - DNA, 75 bp, synthetic construct
  source 1..75: mol_type = other DNA
aagaacagcgagataaaaaagtcagtgagctgaagcaggcgaccgccaccattactgacatgcagcagcgccagc

SEQ ID NO: 257534 - DNA, 75 bp, synthetic construct
  source 1..75: mol_type = other DNA
tcaaatagcagtgggacaggcggagtggcggcacctggcagtaccggacgttcctggttctatggaatttgatct

SEQ ID NO: 257535 - DNA, 75 bp, synthetic construct
  source 1..75: mol_type = other DNA
gcggcgattgtatcagcgtgtaacttgcagcaaattgctgatttctcgaatattcatcccacctcgctggttttt

SEQ ID NO: 257536 - DNA, 75 bp, synthetic construct
  source 1..75: mol_type = other DNA
gaaagcggggatgtgcgggcctataaaatccgtttcccgaacggcacggtggatgtgttccgtggctgggtcagc

SEQ ID NO: 257537 - DNA, 75 bp, synthetic construct
  source 1..75: mol_type = other DNA
gtttgatgcagagacattagatccgcgctggatggatgtgctggaaaaaagctgttatcacaaaaataagagtgt

SEQ ID NO: 257538 - DNA, 75 bp, synthetic construct
  source 1..75: mol_type = other DNA
ttctggatctgtcagttgccacaactgacgcttatgctgacattggtacgtattctatctctgatatttccaagc

SEQ ID NO: 257539 - DNA, 75 bp, synthetic construct
  source 1..75: mol_type = other DNA
aggaagtgatcacccgtacggtgaaagtgaccaacgtgggtaaaccttccgtggcggaagaacgcagcgaaatta

SEQ ID NO: 257540 - DNA, 75 bp, synthetic construct
  source 1..75: mol_type = other DNA
caattacggtaaacggcgtggcgacaggtaaggtgcagatccctgtggtgagcggaaatggtcagttcgccgcag

SEQ ID NO: 257541 - DNA, 75 bp, synthetic construct
  source 1..75: mol_type = other DNA
tgttacatgatgaaccggtgaatgcgtttgatgcagaaacattagatccgcgctggatggatgtactggaaaaaa

SEQ ID NO: 257542 - DNA, 75 bp, synthetic construct
  source 1..75: mol_type = other DNA
atgccaacaccaaatcctctggtaccggtgaaaggggccgggaccacactgtgggtttataacgggagcggcgac

SEQ ID NO: 257543 - DNA, 75 bp, synthetic construct
  source 1..75: mol_type = other DNA
gcgcagagttccgccctgactttcagctgattgcccctatgattcgctcactgaaagccctaggaaaatgccgtt

SEQ ID NO: 257544 - DNA, 75 bp, synthetic construct
  source 1..75: mol_type = other DNA
catcgaacatggtgcgcaagtgccgctaatgcgctgtcgctggactcttttatcaggcaactacaacatgtcaat

SEQ ID NO: 257545 - DNA, 75 bp, synthetic construct
  source 1..75: mol_type = other DNA
ccatatctggatactcaggtggtaaaacctgcatgatgaatactggtgtgtcgacttttacacttccgttactgt

SEQ ID NO: 257546 - DNA, 75 bp, synthetic construct
  source 1..75: mol_type = other DNA
catggctgactcactatcagggattcggtcaacaggccgccatccggacgctgctaacgtctgataataactgta

SEQ ID NO: 257547 - DNA, 75 bp, synthetic construct
  source 1..75: mol_type = other DNA
acagcgtgatttgatagcctggtttgacagcagcgagacccgggcttacaaaatccgcttcccgaatggcacggt

SEQ ID NO: 257548 - DNA, 75 bp, synthetic construct
  source 1..75: mol_type = other DNA
tgattgtacttgctggtttgtatctgaggccggtcctggctccatttggcaggcagtattttaaggggattgaaa

SEQ ID NO: 257549 - DNA, 75 bp, synthetic construct
  source 1..75: mol_type = other DNA
cctgatgatacgatgttctgcacattctgccgggaaaatgctgatgacccgcttaaaagtattattacccatctc

SEQ ID NO: 257550 - DNA, 75 bp, synthetic construct
  source 1..75: mol_type = other DNA
gacttttattacgttgaaaagatgttttcagtatgatgataaaaattatatggataatgtatctgtttcattttt

SEQ ID NO: 257551 - DNA, 75 bp, synthetic construct
  source 1..75: mol_type = other DNA
aaacatcttccggattatggtctgccggatatgacaaccattttgcagggaatgccgggtacggcacatcaactg

SEQ ID NO: 257552 - DNA, 75 bp, synthetic construct
  source 1..75: mol_type = other DNA
ggtattgtttttccattagttgttggtctaatcagcgtcctttttcagaaaaaatcgacccgcgaacatatccag

SEQ ID NO: 257553 - DNA, 75 bp, synthetic construct
  source 1..75: mol_type = other DNA
aaatggatgaacgtgtgagagatgtctatacacttccattattatttcttctcaggagattaaaaactgtcggaa

SEQ ID NO: 257554 - DNA, 75 bp, synthetic construct
  source 1..75: mol_type = other DNA
gccggttatttccgggcggatttatatgggctgggttgatgatttaaaaacactataccctgcatttgctgatat

SEQ ID NO: 257555 - DNA, 75 bp, synthetic construct
  source 1..75: mol_type = other DNA
ttgatgatgtgtccgtttcattttttccacaaagtttaagccagtcttttcataatgatttctaccgtcttgcag

SEQ ID NO: 257556 - DNA, 75 bp, synthetic construct
  source 1..75: mol_type = other DNA
tatttccatcaaaagccctaaaagatataaattccctgtcgacttaaatgagttgattcccggcggcgtcgcccc

SEQ ID NO: 257557 - DNA, 75 bp, synthetic construct
  source 1..75: mol_type = other DNA
tttttattcagagtctgaatgttctggatgatcgccggcgtgatcgaattatgcttaagtattttatttcaaaag

SEQ ID NO: 257558 - DNA, 75 bp, synthetic construct
  source 1..75: mol_type = other DNA
accggttatttccgggcggatttatatgggcagggttgatgatttaaaaacactataccctgcatttgttgatat

SEQ ID NO: 257559 - DNA, 75 bp, synthetic construct
  source 1..75: mol_type = other DNA
tatgttgcaatgctgcaaaattttatcggagagtgggaaagttggcatatgtggttgcgtcagacgtttaagaat

SEQ ID NO: 257560 - DNA, 75 bp, synthetic construct
  source 1..75: mol_type = other DNA
cctggtgagttgcattatgtcattgatgcagaacttaaagacgcaggactggttcgttacggaacaacatttatg

SEQ ID NO: 257561 - DNA, 75 bp, synthetic construct
  source 1..75: mol_type = other DNA
attcgtgacagccagacgctgcccgcgtggtgtgaaaactgggcgcaagaagtcgatgcccggttgacgaaagag

SEQ ID NO: 257562 - DNA, 75 bp, synthetic construct
  source 1..75: mol_type = other DNA
taagcgaaggtgacgttacagagcttgaatttgtagaaattgcgttagtactgcatcaaattctgtccaaaatgg

SEQ ID NO: 257563 - DNA, 75 bp, synthetic construct
  source 1..75: mol_type = other DNA
ttctataaccttcttaagctaaggtggattggtttaatctttgattcctataaaatccctgactcagtgccgggt

SEQ ID NO: 257564 - DNA, 75 bp, synthetic construct
  source 1..75: mol_type = other DNA
cagaatgggagttctcattcaggtggggcgtcaagttggtatgaatacaaacatttcagagtggaaaacgaaagt

SEQ ID NO: 257565 - DNA, 75 bp, synthetic construct
  source 1..75: mol_type = other DNA
aggttcttccatcgctatgacgctgtgggcttttcttggtctggagtctgcgtgtgcgaatactgatgtagtgga

SEQ ID NO: 257566 - DNA, 75 bp, synthetic construct
  source 1..75: mol_type = other DNA
tggcgcagctgctgtgccgtattacggggcggaagatgcctgtatcgttaataacaatgcggcggcggtgttatt

SEQ ID NO: 257567 - DNA, 75 bp, synthetic construct
  source 1..75: mol_type = other DNA
aaaaataaccgttgttctgctggaacaagaggttcccggtgagctgtgctatgccattgatgctgaacttaaagg

SEQ ID NO: 257568 - DNA, 75 bp, synthetic construct
  source 1..75: mol_type = other DNA
gtggcgaatcatgggcaacggcacctgaaatcgcacttgctctggcactcggggctgatattacgatccataacg

SEQ ID NO: 257569 - DNA, 75 bp, synthetic construct
  source 1..75: mol_type = other DNA
atcgatacactgcttatcactcccgggggtatgggtctggctgaatgtggtgaattactgggtcttcccaaactc

SEQ ID NO: 257570 - DNA, 75 bp, synthetic construct
  source 1..75: mol_type = other DNA
tgcgggtattcatggcctgatgcgtcagattgaagaaacgctgctgcgttatgaaccacgcctgagtcagataca

SEQ ID NO: 257571 - DNA, 75 bp, synthetic construct
  source 1..75: mol_type = other DNA
ccggagggcagggtgttgctgcgccatctgaaacagcagcggtacgttcagacgtgggccggagcagggagggca

SEQ ID NO: 257572 - DNA, 75 bp, synthetic construct
  source 1..75: mol_type = other DNA
taaagatgcagggctggttcgttacgaaacaacctttatgccggagggcagagtatttctgcgttatccggataa

SEQ ID NO: 257573 - DNA, 75 bp, synthetic construct
  source 1..75: mol_type = other DNA
gctgacctcagtgaggaggtggtgaggcggtatctgcggttctgcacgccattatccggtatggcagtcagcccg

SEQ ID NO: 257574 - DNA, 75 bp, synthetic construct
  source 1..75: mol_type = other DNA
agggtttgcgtcagctcatttttatctggccttgtgcgctggcaattattgctgcattgacgatgggattctttt

SEQ ID NO: 257575 - DNA, 75 bp, synthetic construct
  source 1..75: mol_type = other DNA
aaatcaaatgggtaattttacctttcaattcctattagtaccagaaccttcaattacattacccgctgatacctt

SEQ ID NO: 257576 - DNA, 75 bp, synthetic construct
  source 1..75: mol_type = other DNA
cacgacagcgacactgctgctgacggctcccgctgcggtgggcgttctgcggattcccgcccaggcggcggtggc

SEQ ID NO: 257577 - DNA, 75 bp, synthetic construct
  source 1..75: mol_type = other DNA
agggtttgcgtcagctcatttttatttggccttgtgcgctggcgataattgctgcattgacgatgggattctttt

SEQ ID NO: 257578 - DNA, 75 bp, synthetic construct
  source 1..75: mol_type = other DNA
gcatttaatatcaaactggccattcaggtgtattacactcaatatgtactgaatgatatccacttattatcgtgg

SEQ ID NO: 257579 - DNA, 75 bp, synthetic construct
  source 1..75: mol_type = other DNA
attattgaggaaatcaaccaacgcaaaaataaagaaattgagacagaagaaaaaacggcttccgtaacgttataa

SEQ ID NO: 257580 - DNA, 75 bp, synthetic construct
  source 1..75: mol_type = other DNA
cttcctgaacctgcagcgattcagccagtgcagaacgcctcccctgaaccaacggcagaaaataaaccgcaggaa

SEQ ID NO: 257581 - DNA, 75 bp, synthetic construct
  source 1..75: mol_type = other DNA
gactccccgttgtttgccgccatccacaaaccggaagagcagccggacaagcttttccgctctctgggttttgag

SEQ ID NO: 257582 - DNA, 75 bp, synthetic construct
  source 1..75: mol_type = other DNA
gcaggaagttcgctcccccaaaaatcctcccaataatctgtacattggtgaagacaggcaacctgcatcagcacc

SEQ ID NO: 257583 - DNA, 75 bp, synthetic construct
  source 1..75: mol_type = other DNA
ggcctttgccggtcgttgtcagcacgacagcgacactgctgctgacggctcccgctgcggtgggcgttctgcgga

SEQ ID NO: 257584 - DNA, 75 bp, synthetic construct
  source 1..75: mol_type = other DNA
ggtgaagaaccaccaggaaaacttcgcccgggagagagcgtgactgccgtactgcacaattttggtcgtgctgaa

SEQ ID NO: 257585 - DNA, 75 bp, synthetic construct
  source 1..75: mol_type = other DNA
ggaggccgaaactgcgacagaggctgcagcaccaccgccaccaccggaaaccagcccggaagacacatcgtcagc

SEQ ID NO: 257586 - DNA, 75 bp, synthetic construct
  source 1..75: mol_type = other DNA
gttaattattgaggacatcaaccaacgtaaaaataaagagattgagacaaaagaaaaaactgcttctgtaacgtt

SEQ ID NO: 257587 - DNA, 75 bp, synthetic construct
  source 1..75: mol_type = other DNA
gtaaaaatggcgtagtaaatgaaatctggacgcgcaatcacgccgatatcccgctgcgtccacgctttgccgtgc

SEQ ID NO: 257588 - DNA, 75 bp, synthetic construct
  source 1..75: mol_type = other DNA
actgtacggcaggcggcaaatttgtctgtaatgatggttctattagtgcatcgaaaaaacatgcactaactgaag

SEQ ID NO: 257589 - DNA, 75 bp, synthetic construct
  source 1..75: mol_type = other DNA
cgaaaacaaaaatgtattacagattgctgttcgcacccgcatcaaactgttttatcgcccggcagggttacaggg

SEQ ID NO: 257590 - DNA, 75 bp, synthetic construct
  source 1..75: mol_type = other DNA
atgggcaaaggctgggacgcctccctgaaagccgggcggcgtgaccgcctgcgtcaggaggttttacaccgcatg

SEQ ID NO: 257591 - DNA, 75 bp, synthetic construct
  source 1..75: mol_type = other DNA
cgctgatcgggtcatcgtggtttcctgtgcgaatcctgatcgacgccatgtcgttctgggtcgccgggtccgaac

SEQ ID NO: 257592 - DNA, 75 bp, synthetic construct
  source 1..75: mol_type = other DNA
agccacgcaagcaccttaaaatcaccatcatacactaaatcagtaagttggcagcattacccgaaaagtgctgaa

SEQ ID NO: 257593 - DNA, 75 bp, synthetic construct
  source 1..75: mol_type = other DNA
ccgtttccttgataatgaagaaaactggtcgctgttacttgatgcgcttattcctgtcgccaatacctgcgaaat

SEQ ID NO: 257594 - DNA, 75 bp, synthetic construct
  source 1..75: mol_type = other DNA
atggacacgtaatcacgccgatattccgctacgtccgcgctttgcggtacttgccagcggcagtttctttagcgg

SEQ ID NO: 257595 - DNA, 75 bp, synthetic construct
  source 1..75: mol_type = other DNA
taaccgattgtccgattgaaacaagtgcagtgacggcaatcgtgacaggttcaactgacaatacgggttattaca

SEQ ID NO: 257596 - DNA, 75 bp, synthetic construct
  source 1..75: mol_type = other DNA
accattcatcattactccgccattattcaaacttgagccaggaaaaaacaacatcttacgtatcgtaaatgtgaa

SEQ ID NO: 257597 - DNA, 75 bp, synthetic construct
  source 1..75: mol_type = other DNA
ttcctgtcgccaataccagcgaaatgatcctgatgcccgcctgcttcggcctggctgatgacaaactctggcggt

SEQ ID NO: 257598 - DNA, 75 bp, synthetic construct
  source 1..75: mol_type = other DNA
tgctcgatctcgcttgtcaggcacagacattaatcgctgaaagcggtgcgcaattacagggcagcgtagagctgg

SEQ ID NO: 257599 - DNA, 75 bp, synthetic construct
  source 1..75: mol_type = other DNA
tgggtaatgtcacctttgatggtcgccatcttgagttcctcgatctgctggcaatcaccattccatcgacgttaa

SEQ ID NO: 257600 - DNA, 75 bp, synthetic construct
  source 1..75: mol_type = other DNA
taatactgatatgtctgttttatggtgccagaaagggtggtatcgcgctgggtttattaggcggtatcggtctgg

SEQ ID NO: 257601 - DNA, 75 bp, synthetic construct
  source 1..75: mol_type = other DNA
atggaaagcagtgatccgaaaaaaagaaagaaagttgtggcatacctgcacccgacactttatccgcaggacaac

SEQ ID NO: 257602 - DNA, 75 bp, synthetic construct
  source 1..75: mol_type = other DNA
ggcggaaaccatgttcggtgcgcatatgtctgaaattcagggcgtactgggtgaaatggtgaaagagtatccgtg

SEQ ID NO: 257603 - DNA, 75 bp, synthetic construct
  source 1..75: mol_type = other DNA
atgttatttactatccaacttatcataatactgatatgtctgttttatggtgcccgaaagggtggtatcgcgctg

SEQ ID NO: 257604 - DNA, 75 bp, synthetic construct
  source 1..75: mol_type = other DNA
ccctcaatgccgtgcgctacagacaacgcaagggacttgtttgatgatgccggaccgaatgttggtgtcgcatat

SEQ ID NO: 257605 - DNA, 75 bp, synthetic construct
  source 1..75: mol_type = other DNA
atacgagatatgaaggcgaatatcacgagtggtgtgatgctatttcatcttgtcaaaagttcggaattcagcatc

SEQ ID NO: 257606 - DNA, 75 bp, synthetic construct
  source 1..75: mol_type = other DNA
cctgcgcaggcctgataagacgtgccatcgtcgcatcaggcaagaccgtattaattcggcgtatagcccattacc

SEQ ID NO: 257607 - DNA, 75 bp, synthetic construct
  source 1..75: mol_type = other DNA
atagaggcatcttcagaaaacaaatcagagaacatcactccgaaagatgatttcgaagaaaaaaccagacgcaat

SEQ ID NO: 257608 - DNA, 75 bp, synthetic construct
  source 1..75: mol_type = other DNA
ttcatgttttctgcgatagaaaatcatatgcctggcgcgttccgtggactgtcaaatgatgagttgcagatgatg

SEQ ID NO: 257609 - DNA, 75 bp, synthetic construct
  source 1..75: mol_type = other DNA
aattccaccagcaggaaaaactccgccaacatttcatgaacaacgctctctatcagaacggctgtaccgtgcaca

SEQ ID NO: 257610 - DNA, 75 bp, synthetic construct
  source 1..75: mol_type = other DNA
gagcactcatcagtcaattgcatttccctcatagtcttggagaggctatttcgtttttaaaatatcctgtatgtg

SEQ ID NO: 257611 - DNA, 75 bp, synthetic construct
  source 1..75: mol_type = other DNA
cgcggagccttaggaattatcaccggcaataaagaacagtgcgatcgcctgttttgcagtgaattttgtgctgaa

SEQ ID NO: 257612 - DNA, 75 bp, synthetic construct
  source 1..75: mol_type = other DNA
agccatcccacgacttgtggatgggttttctttgctttcagagtataagcaaaggaaaataattcaaagtataga

SEQ ID NO: 257613 - DNA, 75 bp, synthetic construct
  source 1..75: mol_type = other DNA
tttatattgtggttgagggagttatatgattttttagaaatgaagtatcagaaatccattaaacttgagacagat

SEQ ID NO: 257614 - DNA, 75 bp, synthetic construct
  source 1..75: mol_type = other DNA
tgcaacaacactggccacagataatgcaggaagttcgctcccccaaaaatcctcccaataatctgtacattggtg

SEQ ID NO: 257615 - DNA, 75 bp, synthetic construct
  source 1..75: mol_type = other DNA
tggttttgtagcgagttttgcgcggagtttttggagttgcgggacgcgtggcgatattcgccggggcagttatac

SEQ ID NO: 257616 - DNA, 75 bp, synthetic construct
  source 1..75: mol_type = other DNA
cataaccgcgttgttgatgcggtgctgtttaatgtacaggggatctctgaaaaccgcagcggctttttctgggtt

SEQ ID NO: 257617 - DNA, 75 bp, synthetic construct
  source 1..75: mol_type = other DNA
ccccattcgttttgccttacagcagtatattgaatggaatttaattcaaaaatacggcgaggcagaaggaatggg

SEQ ID NO: 257618 - DNA, 75 bp, synthetic construct
  source 1..75: mol_type = other DNA
gcacaagccgacaatgcaggattactgggtaaactccctgttgagatgaaggtagcccagtggcgctggttgtac

SEQ ID NO: 257619 - DNA, 75 bp, synthetic construct
  source 1..75: mol_type = other DNA
cataatttatatctgcacgattaaatatataaagaatgcaattattcttcgtgagtttttgttggggaataaaca

SEQ ID NO: 257620 - DNA, 75 bp, synthetic construct
  source 1..75: mol_type = other DNA
cctcatggcaatgagctacagctatgagcttcaggcgcaggtgtatgaccacatgacggagcttgagggcgggaa

SEQ ID NO: 257621 - DNA, 75 bp, synthetic construct
  source 1..75: mol_type = other DNA
gcgccgtggcgaacatcgttatcacaagcactctgtttgagttccgaaaacatagcagagtggtagatttcacgc

SEQ ID NO: 257622 - DNA, 75 bp, synthetic construct
  source 1..75: mol_type = other DNA
acctcatgaaagaggttgtggaatcagggaactacacggcggcaaagatgcttaaactgcaattcttgctgggcg

SEQ ID NO: 257623 - DNA, 75 bp, synthetic construct
  source 1..75: mol_type = other DNA
atgaaagaacaagaccgtaaagtaatgcgtatttccttcaaacgtgcgacagagcagcaacgcaaagagttcctg

SEQ ID NO: 257624 - DNA, 75 bp, synthetic construct
  source 1..75: mol_type = other DNA
ctgacggggatgtattctctgaatcccggtgttgatgctgtcagtagtgaacagaatgtcgtggaacaccctgca

SEQ ID NO: 257625 - DNA, 75 bp, synthetic construct
  source 1..75: mol_type = other DNA
aggtatggctggcaaccaaacagggcggctaccattttgatctgaaaggcgatgagtggatttgcgatcgcagcg

SEQ ID NO: 257626 - DNA, 75 bp, synthetic construct
  source 1..75: mol_type = other DNA
ttgcaaccgaacaagcaacctatttcgagatccctgccgaagactcctggctttttatcgctgacggatctgata

SEQ ID NO: 257627 - DNA, 75 bp, synthetic construct
  source 1..75: mol_type = other DNA
agggaactacacggcggcaaagatgcttaaactgcaattcttgctgggcgacctgaaatacaaatccgaagttgt

SEQ ID NO: 257628 - DNA, 75 bp, synthetic construct
  source 1..75: mol_type = other DNA
cgctgattgaccagatcaaggaagaagcggcgaattctcctgttgtggaggagttacggcaggaaattaaggatg

SEQ ID NO: 257629 - DNA, 75 bp, synthetic construct
  source 1..75: mol_type = other DNA
tggaagagctgcgtaaggaaataaagaatgctcaggggcaggcagtaaaggacgcggcaatcgagacgacggaag

SEQ ID NO: 257630 - DNA, 75 bp, synthetic construct
  source 1..75: mol_type = other DNA
gctggttgccacgacgccggggcaggtttacggtgatccggttgatccgggctggtcgggattctactggatacg

SEQ ID NO: 257631 - DNA, 75 bp, synthetic construct
  source 1..75: mol_type = other DNA
gattaatgagcgaatcactgaactggatgaaggaggcagtaaagcctttctgtccatgtggtcaaaaaaagccgg

SEQ ID NO: 257632 - DNA, 75 bp, synthetic construct
  source 1..75: mol_type = other DNA
cagaatgtggggctggtgatccgcaatgataaaattgaagtttatgatgaaaacggaagactggctgtccgaatc

SEQ ID NO: 257633 - DNA, 75 bp, synthetic construct
  source 1..75: mol_type = other DNA
gggtaatctcagggaggagacattaaaaacgattggtggcgtggaaacccgcataaccgatatggactcatcaac

SEQ ID NO: 257634 - DNA, 75 bp, synthetic construct
  source 1..75: mol_type = other DNA
tcaacggcggcgtactgaccattacctttgaaaatggcagcaaaatcattatcaaccgccaggaaccgctgcacc

SEQ ID NO: 257635 - DNA, 75 bp, synthetic construct
  source 1..75: mol_type = other DNA
tcgccagtaccatgaaagaaccgccgtatgtcagcagcttgcgcattgaaatcccatcggacattgccgcaaacg

SEQ ID NO: 257636 - DNA, 75 bp, synthetic construct
  source 1..75: mol_type = other DNA
tgcagcttttctttgtggcgtttaatttgatggaagccctcctcccctcgcttatcagtaaagagtcgccagccg

SEQ ID NO: 257637 - DNA, 75 bp, synthetic construct
  source 1..75: mol_type = other DNA
gcgatggtgcttggcccgatcatcactcacaaacttgggctgcacgcgctgttctggatgatcgctattctggca

SEQ ID NO: 257638 - DNA, 75 bp, synthetic construct
  source 1..75: mol_type = other DNA
ccccaccaaatgcgacagataaaactttcactgtcgaatccgatcatccggaaattgtgagagttgatggaacca

SEQ ID NO: 257639 - DNA, 75 bp, synthetic construct
  source 1..75: mol_type = other DNA
atattattgccgaggtgctcggaaaagttggggatttgaaaaccccgtccgccgcatcccagccggtgatatctc

SEQ ID NO: 257640 - DNA, 75 bp, synthetic construct
  source 1..75: mol_type = other DNA
ttatgaaagtttaacttttttagctacgtatatagttccttttatgggtttcagtttcgatgacattcagaaaaa

SEQ ID NO: 257641 - DNA, 75 bp, synthetic construct
  source 1..75: mol_type = other DNA
tgcaatctcgatggatgtgctgactgttgacgatcaagtattctatagtttttttgatgactacgttttcatagc

SEQ ID NO: 257642 - DNA, 75 bp, synthetic construct
  source 1..75: mol_type = other DNA
tttttctatttagtatttatttttataatagattaaaaaacataacaaaatacaatggacaagatagcgttaaaa

SEQ ID NO: 257643 - DNA, 75 bp, synthetic construct
  source 1..75: mol_type = other DNA
gcggtgcaattatcgaaacgccgctgggcaccatgcagggtcactacgaaatgatcgatgaaaatggcgttcctt

SEQ ID NO: 257644 - DNA, 75 bp, synthetic construct
  source 1..75: mol_type = other DNA
cacttggattagctattcaaatcgggaagctagcatctgatcaaagtgtattaaaattctttgagcttatcgatt

SEQ ID NO: 257645 - DNA, 75 bp, synthetic construct
  source 1..75: mol_type = other DNA
ttgtcactgcatcttccgttgaacaaaaccttaaagatgctcccgccagtatcagcgtcattacccaggaagacc

SEQ ID NO: 257646 - DNA, 75 bp, synthetic construct
  source 1..75: mol_type = other DNA
tgagcacgaagagtttcccgacaggacagcgctctaccgtgttgacggcgaaccagccttcctggacagactcta

SEQ ID NO: 257647 - DNA, 75 bp, synthetic construct
  source 1..75: mol_type = other DNA
gcacaacagaaacagcctcaccttctgaacctgcagaaactcagccagtccggcaggccaccgctgaaccgacgg

SEQ ID NO: 257648 - DNA, 75 bp, synthetic construct
  source 1..75: mol_type = other DNA
ttcaccttcggaaccccggaaaatggccgtcccctgttatttgcggaaggttacgctactgccgcctccctgcac

SEQ ID NO: 257649 - DNA, 75 bp, synthetic construct
  source 1..75: mol_type = other DNA
cctatgccacgatgaactatgttgatcgcaaggttatcagccttgatgcttccgtgctcttcgatatgccaagcc

SEQ ID NO: 257650 - DNA, 75 bp, synthetic construct
  source 1..75: mol_type = other DNA
gcctcaccttctgaacctgcagaaattcagcccgtacagcaggcaacccctgaaccaacggcagaagataaaccg

SEQ ID NO: 257651 - DNA, 75 bp, synthetic construct
  source 1..75: mol_type = other DNA
tgcccgggcgggtaccgaactttcactgctggagcgctggttaccccggccgcaggaactgtcgatggatgccgg

SEQ ID NO: 257652 - DNA, 75 bp, synthetic construct
  source 1..75: mol_type = other DNA
tgatagaaatacattgcagcttgatacctccgtcttattcgacatgccaagccctgcaatgcgcatatttaatga

SEQ ID NO: 257653 - DNA, 75 bp, synthetic construct
  source 1..75: mol_type = other DNA
agcatttattggtattgatggctggcaacctgaaactggattcaccggtcgcgatatgatgcgtaccgatgtggt

SEQ ID NO: 257654 - DNA, 75 bp, synthetic construct
  source 1..75: mol_type = other DNA
ttcatcttggcagacgtgagcggctgcgtcaggaggttttgcaccgtgtcgccggtgggccacggcctgcgcccc

SEQ ID NO: 257655 - DNA, 75 bp, synthetic construct
  source 1..75: mol_type = other DNA
gggccatgactcctgtcagtaacggcattaccgtcgataatgaccatcctcatgctggtcagcatatcctggatt

SEQ ID NO: 257656 - DNA, 75 bp, synthetic construct
  source 1..75: mol_type = other DNA
attatgttgcccccctgtatgccgaggtagccgagaaggcaattcgcgggatcgtgaaaaatatttctccggagg

SEQ ID NO: 257657 - DNA, 75 bp, synthetic construct
  source 1..75: mol_type = other DNA
gggaacagaaacaactggccctgtcttctcctgcgatgaatatcaattttcctttatcgtggttttcagagcatc

SEQ ID NO: 257658 - DNA, 75 bp, synthetic construct
  source 1..75: mol_type = other DNA
gcagctgtcgctgaatttaacgccttcaaacatctgacggaagaaatgcgccgcacgctacaggatatttcaaga

SEQ ID NO: 257659 - DNA, 75 bp, synthetic construct
  source 1..75: mol_type = other DNA
gctggtcgggattctactggatacgctttgttaatgcagcgggagtgaaagggccatggaacgcggtaaaaggca

SEQ ID NO: 257660 - DNA, 75 bp, synthetic construct
  source 1..75: mol_type = other DNA
ttgtatcgcagaaaattgtcgcggatgaagtaaaggccggggtaagtatcacctcgccggtgattcgcagtgctg

SEQ ID NO: 257661 - DNA, 75 bp, synthetic construct
  source 1..75: mol_type = other DNA
ctgggcgagcagttctcgctgtttggcgatggctgggagctggcggaatcggacgatgtacgccgcatgcttatc

SEQ ID NO: 257662 - DNA, 75 bp, synthetic construct
  source 1..75: mol_type = other DNA
gtaatgacatctggacagagtgcttcctgcatgttgatcagaatggacgccggatttattcaggcaggtcagtgg

SEQ ID NO: 257663 - DNA, 75 bp, synthetic construct
  source 1..75: mol_type = other DNA
gaagctggctcgtcgtcgtgcttctggtggtggctcatacgccctgaatccgggggtagagatagacagtagcct

SEQ ID NO: 257664 - DNA, 75 bp, synthetic construct
  source 1..75: mol_type = other DNA
taatcagaatgtggggctggtgatccgcaatgataaaattgaagcttatgatgaaaacggaagactggctgtacg

SEQ ID NO: 257665 - DNA, 75 bp, synthetic construct
  source 1..75: mol_type = other DNA
tcaatcctgaagcgatggtcgcggagcgtatttactgggcagaagatgaatccttagctcgtcttcatctaaaac

SEQ ID NO: 257666 - DNA, 75 bp, synthetic construct
  source 1..75: mol_type = other DNA
tttacggcagaacgttgcattggatgcggtgcctgtgtgaaagcctgtgctcaccacgccgtggggtgtctgtca

SEQ ID NO: 257667 - DNA, 75 bp, synthetic construct
  source 1..75: mol_type = other DNA
gacggtggcacgcgagattgctgaaacctggggtaatggtcagatccatctgaccacccgtcagaaactggccat

SEQ ID NO: 257668 - DNA, 75 bp, synthetic construct
  source 1..75: mol_type = other DNA
tctatcgggtcatccttcaacagcccatcactaatgatcaggcagcgctgttacgtcagacgctcgctgcctttg

SEQ ID NO: 257669 - DNA, 75 bp, synthetic construct
  source 1..75: mol_type = other DNA
tctggaatatcagtctgtcgccattcgctacaacagtactacccgttataacggtagttacaaccacgggagcag

SEQ ID NO: 257670 - DNA, 75 bp, synthetic construct
  source 1..75: mol_type = other DNA
ttacagttggatcgacaccctgaaagaagtggcggcgcagcaggtttctgatcagcaactggaaactgcccgctt

SEQ ID NO: 257671 - DNA, 75 bp, synthetic construct
  source 1..75: mol_type = other DNA
atccgacctacagttctgctccagcacaggcctgataagacgcgctggcgtcacatcaggcaacggctgtcggat

SEQ ID NO: 257672 - DNA, 75 bp, synthetic construct
  source 1..75: mol_type = other DNA
gctcagttaacaggactgtcaaggcagaatgttaacaaggctaaaaaagaactgatttcaatgaattgcctgttt

SEQ ID NO: 257673 - DNA, 75 bp, synthetic construct
  source 1..75: mol_type = other DNA
gccctgcgcatcgggcatgacaaactactgaatggcctaataaggcttaaatcctatctatccagaaaagggtga

SEQ ID NO: 257674 - DNA, 75 bp, synthetic construct
  source 1..75: mol_type = other DNA
gaccagcccgcgcaggcggcgctatggcacgataaacaaggccatctttctcattatatggtgctgatccagcgt

SEQ ID NO: 257675 - DNA, 75 bp, synthetic construct
  source 1..75: mol_type = other DNA
gcgtctgattgccggttacgacggtatcgcgccggaggtgtcagcaagcgacgtcgggacagtgcgggaagttga

SEQ ID NO: 257676 - DNA, 75 bp, synthetic construct
  source 1..75: mol_type = other DNA
caggctggaagcatgctgacctgtttgatttgggtatgcagtcccttagcccttatggcattacagagggaagca

SEQ ID NO: 257677 - DNA, 75 bp, synthetic construct
  source 1..75: mol_type = other DNA
atggtcttatccagctcgatcaggcttcagtttaccgcgccgcgcttggcaatagcgaaatcgctcagtcgcccg

SEQ ID NO: 257678 - DNA, 75 bp, synthetic construct
  source 1..75: mol_type = other DNA
gctttatctcaacaaccgcgttatgtcatgaagctggcccagatggaacccggtgccgcctggcagtggctaccc

SEQ ID NO: 257679 - DNA, 75 bp, synthetic construct
  source 1..75: mol_type = other DNA
ctcaacaacctcgctatgtcataaagctggctcagatggaacccggtgcagcctggcagtggatacccattacct

SEQ ID NO: 257680 - DNA, 75 bp, synthetic construct
  source 1..75: mol_type = other DNA
gccggaaaaacaccagtacgtcagcgtatcgtggttagcgcaaatttgctgggctttggctaccagcgacttatc

SEQ ID NO: 257681 - DNA, 75 bp, synthetic construct
  source 1..75: mol_type = other DNA
ttagacggtggcgccgggctgtgctggtatgaagactcaaaattacaaaccccgctatttgttggtcaatttgat

SEQ ID NO: 257682 - DNA, 75 bp, synthetic construct
  source 1..75: mol_type = other DNA
ccttcttttgctggcgtacgcttcgaaatgggtaacgacggctggcacagttttctggcgttaaacgatgaatcc

SEQ ID NO: 257683 - DNA, 75 bp, synthetic construct
  source 1..75: mol_type = other DNA
tgctgtttaaagatgaccagcaggataccgaagccacggcgatcgcaagtgatttgttgagcggtaaaaaacgct

SEQ ID NO: 257684 - DNA, 75 bp, synthetic construct
  source 1..75: mol_type = other DNA
attgcgggtaaccgcccgctgttcattctgtgcattgccaacctctgcactttaggggcgtttaacgtcaagctc

SEQ ID NO: 257685 - DNA, 75 bp, synthetic construct
  source 1..75: mol_type = other DNA
gtgccaggctgctttagctggctatgggcagcaaaacgttggggggctttgccttgcctgacggcgaatttgctg

SEQ ID NO: 257686 - DNA, 75 bp, synthetic construct
  source 1..75: mol_type = other DNA
atgggcagcaaaacgttgggggctttgccctgcctgacggcgaatttgctggtgcaggctattagtgtgttgctt

SEQ ID NO: 257687 - DNA, 75 bp, synthetic construct
  source 1..75: mol_type = other DNA
gcaggatgctgtttccgtaaacgggtatacgctattttccctgggtatttttttgttctggttaattttgatatt

SEQ ID NO: 257688 - DNA, 75 bp, synthetic construct
  source 1..75: mol_type = other DNA
tctgtttgggtattaattatcggaggcttaaggatatcggtggtttccgcattacaggtatctcctgccctaggc

SEQ ID NO: 257689 - DNA, 75 bp, synthetic construct
  source 1..75: mol_type = other DNA
ttccctggacacccctgatactgaaaaaagtccgccgcacggataaagtctgtggttaccgtcgacatatacacg

SEQ ID NO: 257690 - DNA, 75 bp, synthetic construct
  source 1..75: mol_type = other DNA
agtacctcctccggcttgatgcacagcctctgccggagtcgaggatcgccctgctcctgcacctggtatctgatg

SEQ ID NO: 257691 - DNA, 75 bp, synthetic construct
  source 1..75: mol_type = other DNA
taaatcatgtacccaaagaccgtttaatacgaacatatcaagtcggacaacaagctgaaaaattaaaaaatttat

SEQ ID NO: 257692 - DNA, 75 bp, synthetic construct
  source 1..75: mol_type = other DNA
taaaaatgggaaaagccatattgttactttacatccgtatatgctttctttaataaaaacacaacgtgaattcac

SEQ ID NO: 257693 - DNA, 75 bp, synthetic construct
  source 1..75: mol_type = other DNA
taacaagcataaaaagatcccaaccagtgacgtgtatgtgatttatctggtcacatctgaacgccatgccttcct

SEQ ID NO: 257694 - DNA, 75 bp, synthetic construct
  source 1..75: mol_type = other DNA
tcactcgcatggtacaggatttgagaaaaaagcatggatgcagtgatgagctcaaatggcagaaagcacattcaa

SEQ ID NO: 257695 - DNA, 75 bp, synthetic construct
  source 1..75: mol_type = other DNA
atgtgtaccccgctgtgtacccaaaaggctgaagatatgacttttactattacacaagacagacaattggcttca

SEQ ID NO: 257696 - DNA, 75 bp, synthetic construct
  source 1..75: mol_type = other DNA
cgatgaataaacctcgcgagcgatggcttcctgagaatgaactccggatgctatggaaggctttggatgatgcta

SEQ ID NO: 257697 - DNA, 75 bp, synthetic construct
  source 1..75: mol_type = other DNA
aatcagaagcttaagttctatataggtgatgttcgcgattattcgagtattctcaatgcttctcgaggtgttgat

SEQ ID NO: 257698 - DNA, 75 bp, synthetic construct
  source 1..75: mol_type = other DNA
ctaaaaaaccattgactattacaaatcctgatatgacacgttttatgatgacgcttgaggatgcagtagatctgg

SEQ ID NO: 257699 - DNA, 75 bp, synthetic construct
  source 1..75: mol_type = other DNA
tcaagagatggtttcattactacgtaaacttacctatatcaataaaattgaagctggtgaaaaggctgatcctga

SEQ ID NO: 257700 - DNA, 75 bp, synthetic construct
  source 1..75: mol_type = other DNA
cgtatctccgttgttgaagattataactcccataatacacagcgactggatgtagaagggatgaaaacgctgctt

SEQ ID NO: 257701 - DNA, 75 bp, synthetic construct
  source 1..75: mol_type = other DNA
tcactggtggcactggttcttttggtaatgccgtacttaagcgttttctagatacagatattactgaaatacgaa

SEQ ID NO: 257702 - DNA, 75 bp, synthetic construct
  source 1..75: mol_type = other DNA
aaaagtcattgttgcaaaatcacgtaatcttgatagttcaaaaacagttatctgcggaacacgttatgggaatgt

SEQ ID NO: 257703 - DNA, 75 bp, synthetic construct
  source 1..75: mol_type = other DNA
gatgaccctgccatcgacatggccgcgcaccttatggtctttggtgaagaggggctcgcgaagctcctcctcacg

SEQ ID NO: 257704 - DNA, 75 bp, synthetic construct
  source 1..75: mol_type = other DNA
ccgacatgggctcaagctccatggcccgctgactgtcaatgagcttgggctcgactataggatcgtgatcgccac

SEQ ID NO: 257705 - DNA, 75 bp, synthetic construct
  source 1..75: mol_type = other DNA
aaaatattagcatcaaaaaactatattctctggaggatggtaagactggtaaatagaaaaaagaataaacgttag

SEQ ID NO: 257706 - DNA, 75 bp, synthetic construct
  source 1..75: mol_type = other DNA
gttgaaacaatagatgattataattcacataatacatatcgtttaaatactcaagagatggtttcattactacgt

SEQ ID NO: 257707 - DNA, 75 bp, synthetic construct
  source 1..75: mol_type = other DNA
cgtatatccgaggttgaagattacaactctcataatacacaacggttgaacgttgaaggcatgaaaacgcttttg

SEQ ID NO: 257708 - DNA, 75 bp, synthetic construct
  source 1..75: mol_type = other DNA
tccgcttgaagcagttaaaactaatgtgttaggtactgaaaatgttttagaagccgcaattaatcattctgtgaa

SEQ ID NO: 257709 - DNA, 75 bp, synthetic construct
  source 1..75: mol_type = other DNA
tttgcggtactcgctacggcaacgtgatggcttcacgtggttccgttattcccttattcgttgatctgatcaaag

SEQ ID NO: 257710 - DNA, 75 bp, synthetic construct
  source 1..75: mol_type = other DNA
ctggcagtgggccagaaaaaacgttgtcgccgctggtggtgcacaacaatctgcaaatcgatctcaatgagccgg

SEQ ID NO: 257711 - DNA, 75 bp, synthetic construct
  source 1..75: mol_type = other DNA
cgagctctgggaccggatgcgtgatgcctgtggcggagatgatttttgcgaatccctggagctcgatccgaggtc

SEQ ID NO: 257712 - DNA, 75 bp, synthetic construct
  source 1..75: mol_type = other DNA
atttcaacttttgtaaataagatggagttaaataataaattcattgtttttcttaggttgaagaagtttgttttg

SEQ ID NO: 257713 - DNA, 75 bp, synthetic construct
  source 1..75: mol_type = other DNA
ctggaacagtatgcctgccggggccagcttctgtgtggcggtgccgtattcacacggtattgccgaagagatgct

SEQ ID NO: 257714 - DNA, 75 bp, synthetic construct
  source 1..75: mol_type = other DNA
acgctttatcgcaacaaccccgttatgcaatgaaactggtcaagatggagcccggggctgcctggcagtggttgc

SEQ ID NO: 257715 - DNA, 75 bp, synthetic construct
  source 1..75: mol_type = other DNA
ggcactgccgaacaggcgcaattgccagggaaactgtttacgcaaaatattggcgcgcacgaaagcaaagcgcca

SEQ ID NO: 257716 - DNA, 75 bp, synthetic construct
  source 1..75: mol_type = other DNA
cgcggtagcctgcgcctggctgagtgtctgccatcagcaaaaccgccacccgcagctcactctggatgaaattga

SEQ ID NO: 257717 - DNA, 75 bp, synthetic construct
  source 1..75: mol_type = other DNA
tgggaacatcaaaagcaatgatggaaaaagtaattgttgcaaaatcacgcaatttgcccgaaggcataactattt

SEQ ID NO: 257718 - DNA, 75 bp, synthetic construct
  source 1..75: mol_type = other DNA
ccgctgtttgttgatctgatcaaagcaggtaaagcgctgactgtcactgatccaaacatgactcgtttcatgatg

SEQ ID NO: 257719 - DNA, 75 bp, synthetic construct
  source 1..75: mol_type = other DNA
cacggttgtgacccgacctggaccggtactgaccacacgcgtgaacacattccggtactggtttacggcccgaaa

SEQ ID NO: 257720 - DNA, 75 bp, synthetic construct
  source 1..75: mol_type = other DNA
gcagaagttcagtggggaaactcatttttggatgtggttgcttttttgatatgtagttggaatagccattttgta

SEQ ID NO: 257721 - DNA, 75 bp, synthetic construct
  source 1..75: mol_type = other DNA
atgaaatcacgcactctttccctttcacttcgggtagcgttgtatcgccgcgcggtagcttgcgcatggctgagt

SEQ ID NO: 257722 - DNA, 75 bp, synthetic construct
  source 1..75: mol_type = other DNA
ttgcttatggcatcatggtgaaaaccatggccgtggtcgcaccgctggtactacatttacctgctgaagaaatcg

SEQ ID NO: 257723 - DNA, 75 bp, synthetic construct
  source 1..75: mol_type = other DNA
ggccaccgagtctgttttcctgtcacggaaaccagcaatccggagatacagacattcatcaccggcctgttgcgc

SEQ ID NO: 257724 - DNA, 75 bp, synthetic construct
  source 1..75: mol_type = other DNA
caccacgccgaagggcgtctttgccgtgatgcgtcttatccctgacgacggcagtgccccaccctcgctggagac

SEQ ID NO: 257725 - DNA, 75 bp, synthetic construct
  source 1..75: mol_type = other DNA
gataacacagtgttaataaaaggtttccatgatgttattcatgttagcttttgcagagacacgcgacttatagaa

SEQ ID NO: 257726 - DNA, 75 bp, synthetic construct
  source 1..75: mol_type = other DNA
caaaacaccagcgatgtgctgactttgcttgccgcaaccctggagatgcacgaacagtatgccgatcgcccgatc

SEQ ID NO: 257727 - DNA, 75 bp, synthetic construct
  source 1..75: mol_type = other DNA
ggtgcggtaaaaaaagcctctgcgccagggcaaatctcggtaaatgatttgcgcacagtattaactattttacat

SEQ ID NO: 257728 - DNA, 75 bp, synthetic construct
  source 1..75: mol_type = other DNA
agtatttggctcggcggcaacttttggtgcggtaaaaaaagcctctgcgccagggcaaatctcggtaaatgattt

SEQ ID NO: 257729 - DNA, 75 bp, synthetic construct
  source 1..75: mol_type = other DNA
aaggggacagcatcattctgcgccccgtccggccgacctggggctcattcctggagctagaaaaggccgatccgg

SEQ ID NO: 257730 - DNA, 75 bp, synthetic construct
  source 1..75: mol_type = other DNA
tttgtttagcgtacaagggggggagattcgttctcgtggctttgagattgaggctaaagcagctgtcaacgctaa

SEQ ID NO: 257731 - DNA, 75 bp, synthetic construct
  source 1..75: mol_type = other DNA
tggattcctgtacggataatgctgattgcgaatgttctgttgcagtttttcagaatgctctttaactggagtcat

SEQ ID NO: 257732 - DNA, 75 bp, synthetic construct
  source 1..75: mol_type = other DNA
aatcgtgcggatgactactaccatgatcgtctggcgctgaccgttgataattcaacgatcgatgacaactacgaa

SEQ ID NO: 257733 - DNA, 75 bp, synthetic construct
  source 1..75: mol_type = other DNA
ttgaagtagcaagatcctttgaagaacataatttaaagcgtgatgagagagataagaaagtaggcttttttatcg

SEQ ID NO: 257734 - DNA, 75 bp, synthetic construct
  source 1..75: mol_type = other DNA
gtattccgctatgccaatcgttatccggtcacgattgaagctatttcttcagggcgattcgatgtgaaatcgatg

SEQ ID NO: 257735 - DNA, 75 bp, synthetic construct
  source 1..75: mol_type = other DNA
agcagtcctggcggtctgttgaatatggtcagcaagcgtccgaccaccgaaccgctgaaagaagttcagtttaaa

SEQ ID NO: 257736 - DNA, 75 bp, synthetic construct
  source 1..75: mol_type = other DNA
tggtgatgctcggcgtgggccaggtgatttttggtccgctctcagacagaatcgggcgacggccaattctacttg

SEQ ID NO: 257737 - DNA, 75 bp, synthetic construct
  source 1..75: mol_type = other DNA
tacatcagtatcatgcccaaaccagacgggttaacggcagcaaagaaccttgcagaggcgttcgagcattataac

SEQ ID NO: 257738 - DNA, 75 bp, synthetic construct
  source 1..75: mol_type = other DNA
cagaaacctctgtgatgagtgttggagatattttattatttgctctgcttttgttgaattaccacaatgcggtgt

SEQ ID NO: 257739 - DNA, 75 bp, synthetic construct
  source 1..75: mol_type = other DNA
attgcaagctgggatgatgttgcattagctgtagttgcacatccgaatgctgataatgctatgcaccaccaccgc

SEQ ID NO: 257740 - DNA, 75 bp, synthetic construct
  source 1..75: mol_type = other DNA
ccgggcattttcacgatgatgtgacgattaactttgctgagttctgcgaaagcatcagtggcggattcacggtac

SEQ ID NO: 257741 - DNA, 75 bp, synthetic construct
  source 1..75: mol_type = other DNA
atgatcgtctgacactgagcgttgataattcaacgatcgatgacaactacgagcattatacttacaacggtacct

SEQ ID NO: 257742 - DNA, 75 bp, synthetic construct
  source 1..75: mol_type = other DNA
tgcgtgaggaaagggaaagattgggacttagtcaagttgccatgagcgacattggtggagtcaaaaagctaactc

SEQ ID NO: 257743 - DNA, 75 bp, synthetic construct
  source 1..75: mol_type = other DNA
atctcattggcgatgtgccagcatacaggtatcgccgtgtctgggcgatactcaggcggcagtcccgaaatgaag

SEQ ID NO: 257744 - DNA, 75 bp, synthetic construct
  source 1..75: mol_type = other DNA
agtattagaacattggtacctgctgacgcaaatgcactggcgaagcaagggtttatcgatagcgtcagcccggaa

SEQ ID NO: 257745 - DNA, 75 bp, synthetic construct
  source 1..75: mol_type = other DNA
tggaacgtgactggtaaccactggccgtttgaaatctataagacccgatttccactcaagttccctgatatcgcg

SEQ ID NO: 257746 - DNA, 75 bp, synthetic construct
  source 1..75: mol_type = other DNA
actctaccgctggcctcacgctttacttagcaatgccccggctccacaaacgacgaatattttcagccatcttct

SEQ ID NO: 257747 - DNA, 75 bp, synthetic construct
  source 1..75: mol_type = other DNA
tttttaagattatctcaatattcaatgcagacataatatcaagtggttatattcaagctattaatactattatca

SEQ ID NO: 257748 - DNA, 75 bp, synthetic construct
  source 1..75: mol_type = other DNA
ttgcgtgggcaaccatgcttgctgtcattaacgaaccgattggcggcgaaggagaaaacgagcgttttacggtta

SEQ ID NO: 257749 - DNA, 75 bp, synthetic construct
  source 1..75: mol_type = other DNA
tgctgcaaataatgcgtgccgggcggtgggaatatgatcgcgccgaacgcgagctggtcgcggcctttaacgccg

SEQ ID NO: 257750 - DNA, 75 bp, synthetic construct
  source 1..75: mol_type = other DNA
gacggaagaattgaatccagcgatccgttttatcgtgaagatttcacggtactctatactctaccgttggcctca

SEQ ID NO: 257751 - DNA, 75 bp, synthetic construct
  source 1..75: mol_type = other DNA
ctctgcagacttgggctgaaccagggatgattttgcgttcgtggcggtacgccgcaccgttggtgcttgacatgc

SEQ ID NO: 257752 - DNA, 75 bp, synthetic construct
  source 1..75: mol_type = other DNA
ggcaaaaccgcttaaagaatgaaggcttgacgactacattgcgcttggagttacgcgagttgctttctcccaagg

SEQ ID NO: 257753 - DNA, 75 bp, synthetic construct
  source 1..75: mol_type = other DNA
acacgaccgttggatgcttctgattgagagcgaactagatcgcttagcagcactggtgcgggagcgcaagacttc

SEQ ID NO: 257754 - DNA, 75 bp, synthetic construct
  source 1..75: mol_type = other DNA
agaaatagtcaagaacaatatagtgattttaatcatatcactgttatcgttcatgttgtcacaaacagtgctcaa

SEQ ID NO: 257755 - DNA, 75 bp, synthetic construct
  source 1..75: mol_type = other DNA
atgctgaaacgcggcattggctatacgccagaaaaccgcaaagaagcggggatcattccctggttgggcgttgac

SEQ ID NO: 257756 - DNA, 75 bp, synthetic construct
  source 1..75: mol_type = other DNA
ttcagcagaaatacctgtgcctaaagaagatgaagttttgattaaagtggaatatgtcggtatttgtggttcaga

SEQ ID NO: 257757 - DNA, 75 bp, synthetic construct
  source 1..75: mol_type = other DNA
attaactatatcataaaaaaatactggcctacacgaattgatacatgcggtaagatttgtgcggagctgttactc

SEQ ID NO: 257758 - DNA, 75 bp, synthetic construct
  source 1..75: mol_type = other DNA
ggcgacacctcaagtttctacactacgggtgataagaccaatcagacattcaatgttggggggtataccttagtt

SEQ ID NO: 257759 - DNA, 75 bp, synthetic construct
  source 1..75: mol_type = other DNA
attaattggctacagttttgctcatgaatttaatgatacttttactgtacgtcagaatctgcgctatacccgcat

SEQ ID NO: 257760 - DNA, 75 bp, synthetic construct
  source 1..75: mol_type = other DNA
atggttagttccgtcgatataaaaaatgaaatcaagaatacatccgtcgttcggcgtgttgcgtcggcctcagcg

SEQ ID NO: 257761 - DNA, 75 bp, synthetic construct
  source 1..75: mol_type = other DNA
ccttctcgcggtaagcagtacgaagcaggtgtcaaatacgtaccaaaagatacgcctgtcactgtcactgcctcg

SEQ ID NO: 257762 - DNA, 75 bp, synthetic construct
  source 1..75: mol_type = other DNA
aggatgcgcaacaaaagtacgcaaaaactacaaggtatgcagtagctccctcattcagttggcgtcctgatgata

SEQ ID NO: 257763 - DNA, 75 bp, synthetic construct
  source 1..75: mol_type = other DNA
gccaatatcaatatcaatttcccatatgcggtaattaaccgtcaggaacagacaggcctttatattcaggatcag

SEQ ID NO: 257764 - DNA, 75 bp, synthetic construct
  source 1..75: mol_type = other DNA
acaggctgatggccattgctgacaaagtgccaggctatcaattagaactaagcgataatggcatcgatgattatg

SEQ ID NO: 257765 - DNA, 75 bp, synthetic construct
  source 1..75: mol_type = other DNA
caagtttgcccttaaagataaaaaaacaaagaaaacggtagatccttatattgtggcatcccgattcgcaacata

SEQ ID NO: 257766 - DNA, 75 bp, synthetic construct
  source 1..75: mol_type = other DNA
gttatctttttgaaggaattgcgttatctttcggttttttcatattatcggttacttttcttttgataaataagg

SEQ ID NO: 257767 - DNA, 75 bp, synthetic construct
  source 1..75: mol_type = other DNA
gatgattatggataacaacactgacgtatttgttctggtgattggtgaatctgcaaggactgataacatgtccat

SEQ ID NO: 257768 - DNA, 75 bp, synthetic construct
  source 1..75: mol_type = other DNA
atggcgaatcaggcggggtttgatacctggtggctcagtgcgcagtcagctttccgacagaacggaacggctgtg

SEQ ID NO: 257769 - DNA, 75 bp, synthetic construct
  source 1..75: mol_type = other DNA
atttgatcacgatatccagcattaccctgacaacatcattaatatggctaatcaggctgggtttgacacatactg

SEQ ID NO: 257770 - DNA, 75 bp, synthetic construct
  source 1..75: mol_type = other DNA
ccctacggcaatgaagctattcatgtcgatgaactgaatccggcgggtaaaaatgtgttgctcaacacgggcggc

SEQ ID NO: 257771 - DNA, 75 bp, synthetic construct
  source 1..75: mol_type = other DNA
aaatgtgctgctgaatactggcggtacggtattgaatattttctggctgattttctttggctggtggttatgcct

SEQ ID NO: 257772 - DNA, 75 bp, synthetic construct
  source 1..75: mol_type = other DNA
tcccgatgtggccgtggtcggcattctggaagacggtattccgtgggaaatgccgtaccgctgcccggacattgt

SEQ ID NO: 257773 - DNA, 75 bp, synthetic construct
  source 1..75: mol_type = other DNA
agaggataagcaaggtaaccccacccctgaaggcagggttgatgtcgaattactggcctttgttttccagattct

SEQ ID NO: 257774 - DNA, 75 bp, synthetic construct
  source 1..75: mol_type = other DNA
aatatgacaatctggccgtggtgctgaatttcgaacgtgaacgcctgaaaggggcgtgtgacagcacggccaccg

SEQ ID NO: 257775 - DNA, 75 bp, synthetic construct
  source 1..75: mol_type = other DNA
ctgaccggactgtcagcggcaacactcccgcacatggattatgaggtggcaggcacaccggcacagcgcaaggtg

SEQ ID NO: 257776 - DNA, 75 bp, synthetic construct
  source 1..75: mol_type = other DNA
gtttacctctttctcagggagtttagtctccaggatttccggggcggttcaggttctcattttttccagcttctg

SEQ ID NO: 257777 - DNA, 75 bp, synthetic construct
  source 1..75: mol_type = other DNA
gccccgtaaaccggcatgcggtactgaaagaaatggccggagacccggaattacagaaatggcgggagaaatatc

SEQ ID NO: 257778 - DNA, 75 bp, synthetic construct
  source 1..75: mol_type = other DNA
gaacccttaccggcgcacctacaccatcctcattcgtattattgccggtggccgtatggcagaaattccgctcag

SEQ ID NO: 257779 - DNA, 75 bp, synthetic construct
  source 1..75: mol_type = other DNA
ctggaacacgccctgaatgaaacctgtgaggcgcttgtccgggcaatgcatctgagcattctggtacaggaaaat

SEQ ID NO: 257780 - DNA, 75 bp, synthetic construct
  source 1..75: mol_type = other DNA
taaaccggcatgcggtactgaaagaaatggccggagacccggaattacagaaatggcgggaaaaatatctggata

SEQ ID NO: 257781 - DNA, 75 bp, synthetic construct
  source 1..75: mol_type = other DNA
tcttgaaagtaatggttcgccagtcacacttttaaatatcactaacagcagtaaaggatacacaaatttaaaaga

SEQ ID NO: 257782 - DNA, 75 bp, synthetic construct
  source 1..75: mol_type = other DNA
cgggtaatcattgccggattcggtcgttttgggcagataaccggacgtttactgctctccagcggggtgaaaatg

SEQ ID NO: 257783 - DNA, 75 bp, synthetic construct
  source 1..75: mol_type = other DNA
tagactttggcacgctgcttgaaaatccgttgcgcattgtcattttgctgctcggtttcctcatcatcaaaatcg

SEQ ID NO: 257784 - DNA, 75 bp, synthetic construct
  source 1..75: mol_type = other DNA
gttgaaaaagcaaaacagaagaaagaagtcgcgaagcgggaaggtgcgttggaattgtccgcattgcggaaaaat

SEQ ID NO: 257785 - DNA, 75 bp, synthetic construct
  source 1..75: mol_type = other DNA
agcccaaaaagcctggaattgtggacgagatatcgatcagcctgtttgcgctgatagcgtggatgcaatggctgt

SEQ ID NO: 257786 - DNA, 75 bp, synthetic construct
  source 1..75: mol_type = other DNA
atgaaaaatcgcataatgttatttatattaatgatgatggctattcctgtgagctatgcggcatgttatggagag

SEQ ID NO: 257787 - DNA, 75 bp, synthetic construct
  source 1..75: mol_type = other DNA
ccgacattatcgccgggctgaaaaaacgaggcacttcgctgtcagcgctttcgcgtcaggcaggtctggcgtcct

SEQ ID NO: 257788 - DNA, 75 bp, synthetic construct
  source 1..75: mol_type = other DNA
gtgctgctgttccaggatatcgcggcgatcccactgggggggagggtcccgcttctggcagcgagccgtgcttcg

SEQ ID NO: 257789 - DNA, 75 bp, synthetic construct
  source 1..75: mol_type = other DNA
tgaggcggtttacgagagtgacgacgagtatcgtcatcgcatacagctatcatggtacgcgcggaatactgccgg

SEQ ID NO: 257790 - DNA, 75 bp, synthetic construct
  source 1..75: mol_type = other DNA
cggcagtgttcggcggtggcgcattgcagatggtgatttgcggcggcctgctggggctgttttgtatgttacttg

SEQ ID NO: 257791 - DNA, 75 bp, synthetic construct
  source 1..75: mol_type = other DNA
cgttattacgaaggtgatttgaatgatgtaacctcaccaggtatttacagcgttacaggtaaagcgaccaacggt

SEQ ID NO: 257792 - DNA, 75 bp, synthetic construct
  source 1..75: mol_type = other DNA
cgtcacgaaacaggccacaaatgcaccagtcaccgactctaaagatcttgctgttggctcaatagttgaagtgaa

SEQ ID NO: 257793 - DNA, 75 bp, synthetic construct
  source 1..75: mol_type = other DNA
gaagctcttagctatacgccaggcgtttcggtcggtacgcgtggtgcatcaaacacttatgatcatttgattatt

SEQ ID NO: 257794 - DNA, 75 bp, synthetic construct
  source 1..75: mol_type = other DNA
gtcgttatgactgggcagatcaagaatcgcttaaccgcgtagcgggaacgactgacaaacgtgatgacaaacagt

SEQ ID NO: 257795 - DNA, 75 bp, synthetic construct
  source 1..75: mol_type = other DNA
tttcgatttcaatgccaaagacccggataactccggcccgtaccgcatcctgaataagcagaagcaaacaggcat

SEQ ID NO: 257796 - DNA, 75 bp, synthetic construct
  source 1..75: mol_type = other DNA
tggtgctgatcaaagtgccgaaaacactggcattgctggaacaacaactgcgtgcgctgcgcaaagtggtcacgc

SEQ ID NO: 257797 - DNA, 75 bp, synthetic construct
  source 1..75: mol_type = other DNA
gaagctggagggtactgactggactatccacaaccatgcgaatgtcttctcccgcaccgggcttgatatcggcgc

SEQ ID NO: 257798 - DNA, 75 bp, synthetic construct
  source 1..75: mol_type = other DNA
cgtaaatacgtcgttgatgatgagaagctgcaaaacttctccgttgataccagttgcagagcaagtttgccactg

SEQ ID NO: 257799 - DNA, 75 bp, synthetic construct
  source 1..75: mol_type = other DNA
gctttgcgcaaaataaagtttcgcaaaagagcgtatatggctacggcatgtgttcagatcctctctattcctcaa

SEQ ID NO: 257800 - DNA, 75 bp, synthetic construct
  source 1..75: mol_type = other DNA
tcaacaacctgttcgatcgtgaatacgtcgccagctgctttaacacttatggctgcttctggggcgcagaacgtc

SEQ ID NO: 257801 - DNA, 75 bp, synthetic construct
  source 1..75: mol_type = other DNA
ctggagtttgaaaaatcggcatctggtaagtacaacgtggataacgcggtgaacgccaacttccgttattccttc

SEQ ID NO: 257802 - DNA, 75 bp, synthetic construct
  source 1..75: mol_type = other DNA
aaaacctcgcaaaacagcgtttatggttacggcgtctgctccgatccggcgaatgcttacagcaaacagtgtgcg

SEQ ID NO: 257803 - DNA, 75 bp, synthetic construct
  source 1..75: mol_type = other DNA
gtgatccggctaactcctttaaagtgggaagttatacggtcgtggatgcgttagtgcgttatgatctggcgcgag

SEQ ID NO: 257804 - DNA, 75 bp, synthetic construct
  source 1..75: mol_type = other DNA
tgcaaacggcgatctgtttgcaccttcgaaaggcaaacagtatgaagtcggcgtgaaatatgtgccagaagatcg

SEQ ID NO: 257805 - DNA, 75 bp, synthetic construct
  source 1..75: mol_type = other DNA
gctgtgcgctggcagaacataagccgtacagcattggcgactcgtatatcagcgaactggcaacgcgcgagaatt

SEQ ID NO: 257806 - DNA, 75 bp, synthetic construct
  source 1..75: mol_type = other DNA
tttgtcgatgataaccgggtgaaagtgaatagtgacggtaatttcgtcaatgatttgtcgggcagacgtggaata

SEQ ID NO: 257807 - DNA, 75 bp, synthetic construct
  source 1..75: mol_type = other DNA
ttgtccatgcttcttgagggcatcaactggaagcacccgaaacgaacggaacgcgctggaatccgcatataaccc

SEQ ID NO: 257808 - DNA, 75 bp, synthetic construct
  source 1..75: mol_type = other DNA
agtcgatacccgcagtatatatcgtgaactgggggcaacgctgagttacaacatgcgtctggggaacggtatgga

SEQ ID NO: 257809 - DNA, 75 bp, synthetic construct
  source 1..75: mol_type = other DNA
aagaacttgattcctgtaccctttcaccaaatataaacgaccactttgcctttcatcctattgtcgatcccttat

SEQ ID NO: 257810 - DNA, 75 bp, synthetic construct
  source 1..75: mol_type = other DNA
cagcaggtgaaatcatcgctggagcagaaaattaaacagatgcaaatcagcctcaccggcgagccggttctccgg

SEQ ID NO: 257811 - DNA, 75 bp, synthetic construct
  source 1..75: mol_type = other DNA
tgtactggcaaaaagccaatggcgaaacgtggggaacgttacatgctctactggcggatatgaatagtcagggtc

SEQ ID NO: 257812 - DNA, 75 bp, synthetic construct
  source 1..75: mol_type = other DNA
atgccagaggcgttggatcgctgcgagtttatgatcaacaacgcgctctccggcgtggagcctttccgctttaat

SEQ ID NO: 257813 - DNA, 75 bp, synthetic construct
  source 1..75: mol_type = other DNA
ccgcaggcgaaagtggtgtttgtcgatgaatcgccgatggcggttgcttccagccgtttaaacgttgaaaccaac

SEQ ID NO: 257814 - DNA, 75 bp, synthetic construct
  source 1..75: mol_type = other DNA
caaagcccgtgacattcacacttccacgctggaactgttcgaaaaagtgctcggcccgaccaccaccacgctggc

SEQ ID NO: 257815 - DNA, 75 bp, synthetic construct
  source 1..75: mol_type = other DNA
atgaatcccctggtctggtgcctgcgggctgatgttgcagcagagcttaggtcacttagacgctactatcattta

SEQ ID NO: 257816 - DNA, 75 bp, synthetic construct
  source 1..75: mol_type = other DNA
atcataaagaaaaacaagcctaagttatgtcttttggagaatgtgcgtggattaacttcacatgataaaggaaga

SEQ ID NO: 257817 - DNA, 75 bp, synthetic construct
  source 1..75: mol_type = other DNA
agttcccggttgaaatcaccagaccctttgcagggaagcgggggttaacagacgggcggctgttcagggaaatgc

SEQ ID NO: 257818 - DNA, 75 bp, synthetic construct
  source 1..75: mol_type = other DNA
gactggcaggaagaagctgcgcggcaatccaacgatggcggcagcagtcagggctttggctatacggcgcgggca

SEQ ID NO: 257819 - DNA, 75 bp, synthetic construct
  source 1..75: mol_type = other DNA
ggctgcgccgtatttttgtctggcatggctcagtattatccaagatatcctcgcgcttactactcaattttctct

SEQ ID NO: 257820 - DNA, 75 bp, synthetic construct
  source 1..75: mol_type = other DNA
gcagacgcaccacttaataagataataatagaaaatgaatatatgagaataactttagatccgttagaacaaata

SEQ ID NO: 257821 - DNA, 75 bp, synthetic construct
  source 1..75: mol_type = other DNA
gaaagagaacgcggcaaatattaaagggttaacctttacatacgaacccaaagtattacgtcacttcactgcaaa

SEQ ID NO: 257822 - DNA, 75 bp, synthetic construct
  source 1..75: mol_type = other DNA
gttacaacaaactgttcaatggtgcgctgccggaaggtgacattgccgtcgagtactggagtacggtggcgaaaa

SEQ ID NO: 257823 - DNA, 75 bp, synthetic construct
  source 1..75: mol_type = other DNA
gacaacgcagccaggccgatacgttaatgcgcaatctggcgcagcagaagccgaatgacccggagcaggtttacg

SEQ ID NO: 257824 - DNA, 75 bp, synthetic construct
  source 1..75: mol_type = other DNA
ggggagcatgccaggtttaggatggattccaggtacggttcgagcatttagtagcaatatctcttcacaaaacct

SEQ ID NO: 257825 - DNA, 75 bp, synthetic construct
  source 1..75: mol_type = other DNA
gttgccgcgttcaaaaattacggcaaaaaaggaacgatcgcaccgtttgatctcgaagtacgccccggcgagatc

SEQ ID NO: 257826 - DNA, 75 bp, synthetic construct
  source 1..75: mol_type = other DNA
agatcgaactggtcaaaatgatgcttgggcgcgaactcgacacccacgcgctacaacgtgccgggcggacattac

SEQ ID NO: 257827 - DNA, 75 bp, synthetic construct
  source 1..75: mol_type = other DNA
taatgcattacattctttagacacatcatcaagaattaattgggatgatttacttaatgaagtcgtaagggaaac

SEQ ID NO: 257828 - DNA, 75 bp, synthetic construct
  source 1..75: mol_type = other DNA
aactttagacccattagagcaaataagtattttattgaattcatttaaagataattatcttagcattattcagga

SEQ ID NO: 257829 - DNA, 75 bp, synthetic construct
  source 1..75: mol_type = other DNA
aagcattatcgttactggcgcggagacgtccgctcgctgcatattttcatcgaccagtctagcgtggagattttc

SEQ ID NO: 257830 - DNA, 75 bp, synthetic construct
  source 1..75: mol_type = other DNA
cgtaacgtctatatcaaagaagccttcgatacgggcgtgcgttacgactttaaaggcaactttgacctcgaagga

SEQ ID NO: 257831 - DNA, 75 bp, synthetic construct
  source 1..75: mol_type = other DNA
ctggcgtatctctattttctatttgtgttctatttttgtcgttgttgcattaatcccgtggaatatgccaggctg

SEQ ID NO: 257832 - DNA, 75 bp, synthetic construct
  source 1..75: mol_type = other DNA
atgcccaacggcttcggtgcggtattaagcgcgatgttgatcaccatgttctcgtttatgggcgcagaaattgtc

SEQ ID NO: 257833 - DNA, 75 bp, synthetic construct
  source 1..75: mol_type = other DNA
ttagtcatcgccgtttcgcaattgcggatgcgtaaaatcctgctggcggaaggcggcgaaattcgcctgcgcatg

SEQ ID NO: 257834 - DNA, 75 bp, synthetic construct
  source 1..75: mol_type = other DNA
ctgcaagttgccgcgcgtgagctgggtgtagaagcgaagttactgcacccggagacagaagccgccctgacgcgt

SEQ ID NO: 257835 - DNA, 75 bp, synthetic construct
  source 1..75: mol_type = other DNA
cgatatgccgctggatgtgcagacacggttactgcgcgtgctggcagacggtcagttttaccgcgttggcggcta

SEQ ID NO: 257836 - DNA, 75 bp, synthetic construct
  source 1..75: mol_type = other DNA
gttccgtgaggatctgttccaccgcctgaacgttatccgcgttcatctgccgccgctgcgtgagcgtcgggaaga

SEQ ID NO: 257837 - DNA, 75 bp, synthetic construct
  source 1..75: mol_type = other DNA
agcaaatctatattccggtactgattaaaaaacgcgagcaggaaaaaggcctggatcgcagcaaaatggtggcgt

SEQ ID NO: 257838 - DNA, 75 bp, synthetic construct
  source 1..75: mol_type = other DNA
gatgcgtggcgacgaagcctacagcggcagccgcagctactacgcattagccgagtcagtgaaaaatatctttgg

SEQ ID NO: 257839 - DNA, 75 bp, synthetic construct
  source 1..75: mol_type = other DNA
aaccattccgcattcgtgttattgagccagtaaaacgtacgactcgcgcttaccgtgaagaggcaattattaaat

SEQ ID NO: 257840 - DNA, 75 bp, synthetic construct
  source 1..75: mol_type = other DNA
gcggtatttcaagattgtgggatagcggcggctttatgccgaacggctttggcgcggtattaagcgcgatgctga

SEQ ID NO: 257841 - DNA, 75 bp, synthetic construct
  source 1..75: mol_type = other DNA
tggctttatccgtggctcacctggctggtcatcggctttattacctttgtgttggtagtgatgctattccgcccg

SEQ ID NO: 257842 - DNA, 75 bp, synthetic construct
  source 1..75: mol_type = other DNA
cggcattcgttgatgccgggaactggtctgccgcatatcccggcagaccagttcccggcacaggcgctggcgtgc

SEQ ID NO: 257843 - DNA, 75 bp, synthetic construct
  source 1..75: mol_type = other DNA
agcggaagaaagacccttactttcagcagaaggcagcgtataacgcaaagttagtagaaacgctggcgagtatgt

SEQ ID NO: 257844 - DNA, 75 bp, synthetic construct
  source 1..75: mol_type = other DNA
gaaaacaggaggcaggacgaaacgaacaaagatgatccgctcactaacgccgcgcggctttgcccgtgctgtatt

SEQ ID NO: 257845 - DNA, 75 bp, synthetic construct
  source 1..75: mol_type = other DNA
tcgacgtgcagagtcttactgaagattacgacattggcttccgcctgaaagaaaaaggtatgacggaaatttttg

SEQ ID NO: 257846 - DNA, 75 bp, synthetic construct
  source 1..75: mol_type = other DNA
agggtacaacgcggaagtggtccgcatgaaaaaacagaagttacagttgaaagatgagatacttaaaatcctgca

SEQ ID NO: 257847 - DNA, 75 bp, synthetic construct
  source 1..75: mol_type = other DNA
acatttattttcgaagggcattctatccttgatagatgaatatatccacctgaatattgaaagaataccaacatc

SEQ ID NO: 257848 - DNA, 75 bp, synthetic construct
  source 1..75: mol_type = other DNA
tatatgcttatatgcttatatgcttatatgcttatatgcttatatgcttatatgcttatatgcttatataattgt

SEQ ID NO: 257849 - DNA, 75 bp, synthetic construct
  source 1..75: mol_type = other DNA
atactctcagcctgaactggttaaaatgaaactggataagctggaaatcaaaagggaaattcaggagatcctcag

SEQ ID NO: 257850 - DNA, 75 bp, synthetic construct
  source 1..75: mol_type = other DNA
acattgataatcaggcgctgataaccccactgaccccagaacaaaatcaacaacgcttcaatttccgccgtttgc

SEQ ID NO: 257851 - DNA, 75 bp, synthetic construct
  source 1..75: mol_type = other DNA
cgcttcattccattgccataacggcaatggttacagttctgatatcgatcgcgctcatgtttacacgctggaaga

SEQ ID NO: 257852 - DNA, 75 bp, synthetic construct
  source 1..75: mol_type = other DNA
cgcgattgttaaatacgtttcccagcgtgccgggatcggcatcaatgccgggcgtattcgtgcgctgggtagccc

SEQ ID NO: 257853 - DNA, 75 bp, synthetic construct
  source 1..75: mol_type = other DNA
tgtgaaagccgttgaactgttctcgctgatgatgcaggaacgtgcgtctaccggtcgtatctatattcagaacgt

SEQ ID NO: 257854 - DNA, 75 bp, synthetic construct
  source 1..75: mol_type = other DNA
gctgctgtgggaaatgccgggtaacgatggctatctgcaactggtgggtatcatgcagaaatttatcgatcagtc

SEQ ID NO: 257855 - DNA, 75 bp, synthetic construct
  source 1..75: mol_type = other DNA
cgaaccagcttattactaattctgaggggctgaaatctgatcttgaggggaagagagtttctaaagacggagaac

SEQ ID NO: 257856 - DNA, 75 bp, synthetic construct
  source 1..75: mol_type = other DNA
actgacccgaccgcaatttctgatcctcgacgagccaacccgcggcattgatgttgggcccacgccgagatcatc

SEQ ID NO: 257857 - DNA, 75 bp, synthetic construct
  source 1..75: mol_type = other DNA
agacaggaaaaccgatggcatcatcgctgccgcctcggtgcgggaaaatatcatcctcgctctccaggcccagcg

SEQ ID NO: 257858 - DNA, 75 bp, synthetic construct
  source 1..75: mol_type = other DNA
gccctggcgagatcgtcggcctggcaggtttgctgggatcagggcggacagaaaccgctgaagtgatcttcggca

SEQ ID NO: 257859 - DNA, 75 bp, synthetic construct
  source 1..75: mol_type = other DNA
gcggtgaaattatggcgctgctcggtgaaaacggagccggtaaatcgacgctgatcaaagcacttaccggtgtct

SEQ ID NO: 257860 - DNA, 75 bp, synthetic construct
  source 1..75: mol_type = other DNA
tctatcaggaagtcaacctgctacccaatatgtcggtcgctgataatctattcataggtcgcgaacccaaacgtt

SEQ ID NO: 257861 - DNA, 75 bp, synthetic construct
  source 1..75: mol_type = other DNA
aaagaacagcaagaaattgccgaacgctttatccgccagcttggcattcgcaccccttccactgaacagccgata

SEQ ID NO: 257862 - DNA, 75 bp, synthetic construct
  source 1..75: mol_type = other DNA
ggcgagatcatcaacctgatcacaggagaggatattgatttctcaaacatttatgcactgaggatgaagcaatga

SEQ ID NO: 257863 - DNA, 75 bp, synthetic construct
  source 1..75: mol_type = other DNA
gatcatcaacctaatcacaggcgaggatattgatttttccaacatctatacactgaggttgaaaaatgaccgcta

SEQ ID NO: 257864 - DNA, 75 bp, synthetic construct
  source 1..75: mol_type = other DNA
ccattatgccagagaaggtagaggtcttgctagagaggttggttaaaggcctgcagcgtgtgatgcaccctctca

SEQ ID NO: 257865 - DNA, 75 bp, synthetic construct
  source 1..75: mol_type = other DNA
gttgccgacaatctctttatcggccgtgagcccaaacgtttcggcttgctacggcgcaaagagatggaaaagcgc

SEQ ID NO: 257866 - DNA, 75 bp, synthetic construct
  source 1..75: mol_type = other DNA
ttcgccgtgatggttcggccaccacacagaaccaggtcaaaacccggcagcaggaaatgacactggcatcggcga

SEQ ID NO: 257867 - DNA, 75 bp, synthetic construct
  source 1..75: mol_type = other DNA
gaatcagggcgagatcatcaatctgatcacaggcgaggatattgatttttccaacatctatacactaaggttgaa

SEQ ID NO: 257868 - DNA, 75 bp, synthetic construct
  source 1..75: mol_type = other DNA
gtctgtcttctttcttatctgatgggcggcgatacttcattcgccaatacttcgacccggtctgggatacttcaa

SEQ ID NO: 257869 - DNA, 75 bp, synthetic construct
  source 1..75: mol_type = other DNA
ccatactcatagtgtcacaggcgcatcagcagtcagccagtggtcacaaaatgggtcagtacataaggtagtgtc

SEQ ID NO: 257870 - DNA, 75 bp, synthetic construct
  source 1..75: mol_type = other DNA
atgactcaagcaaaagctaatctgagaaaacttcgccgtgcacgttatgtcccccctcgaacagtaaagaaaagc

SEQ ID NO: 257871 - DNA, 75 bp, synthetic construct
  source 1..75: mol_type = other DNA
ttgctgccacaagagctggatgggcagtatccgtctcactggcgcgttaaccacagcgtattgcagcaggtgcga

SEQ ID NO: 257872 - DNA, 75 bp, synthetic construct
  source 1..75: mol_type = other DNA
acggacggtacagtttattcactctatacgccatcagagcagttttatccgcctggcgcaccaatcccgtggcca

SEQ ID NO: 257873 - DNA, 75 bp, synthetic construct
  source 1..75: mol_type = other DNA
gaaacgcttgctgcgacaccgaaagcagtgaaagcagctaatgacaatgcgaatggtcgggtaccttctgcccgt

SEQ ID NO: 257874 - DNA, 75 bp, synthetic construct
  source 1..75: mol_type = other DNA
taatcacggaacagattattcacctggctggcgaagggactataactccagaaataagccaacggcatcagagat

SEQ ID NO: 257875 - DNA, 75 bp, synthetic construct
  source 1..75: mol_type = other DNA
cctgggtaggcgttgatgctactggtaaagtgacattcaaaaatgacggtgatagcaatacagtaataatcacag

SEQ ID NO: 257876 - DNA, 75 bp, synthetic construct
  source 1..75: mol_type = other DNA
accgctggatcggctacccgcgcgcggtcgaggcgctgaaccggctggaaaccctgtatgcgtggccaaacaagc

SEQ ID NO: 257877 - DNA, 75 bp, synthetic construct
  source 1..75: mol_type = other DNA
ggcatgggcttaaagcacgcctgaatgcctgggtgcagggaggggaatttggctgggtgtttgataacccggacg

SEQ ID NO: 257878 - DNA, 75 bp, synthetic construct
  source 1..75: mol_type = other DNA
aagctatttcccgtggctggttgcgattctggcagggtatatgacgttaacccagttggtgaaaggtttctatag

SEQ ID NO: 257879 - DNA, 75 bp, synthetic construct
  source 1..75: mol_type = other DNA
ggactttaccgatagtgctgagctacatcttgttctgcacgatatatcaggcaatccgatcaaagtttctgaagg

SEQ ID NO: 257880 - DNA, 75 bp, synthetic construct
  source 1..75: mol_type = other DNA
gtgactgcatcgttccataacggcgtcacaatacagacacagacaaccgtgaaggttactggcaacccaagcacc

SEQ ID NO: 257881 - DNA, 75 bp, synthetic construct
  source 1..75: mol_type = other DNA
ctccgggaagtggatcacctgattattctaaatacagtgttaacacttcttctgcaggcgctcatacgcactctg

SEQ ID NO: 257882 - DNA, 75 bp, synthetic construct
  source 1..75: mol_type = other DNA
gtggttaagcagcaacgcgttgaatgtcggggggcgtggtttactaatttttatatgcgatataaacagcaacat

SEQ ID NO: 257883 - DNA, 75 bp, synthetic construct
  source 1..75: mol_type = other DNA
gagaagctcgtgcaatcacaagtgcgggttgcggtcattaatgcacaactggtcggctttattacctgcattgaa

SEQ ID NO: 257884 - DNA, 75 bp, synthetic construct
  source 1..75: mol_type = other DNA
ccagcacatctgcccgtgaggcggcaacccatgcgactgatgctgcaggctcagcacgtgcagccagcacgtcag

SEQ ID NO: 257885 - DNA, 75 bp, synthetic construct
  source 1..75: mol_type = other DNA
tgctaataagccggaagggttaacggacggtacagtttattcactctatacgccatcagagcagttttatccgcc

SEQ ID NO: 257886 - DNA, 75 bp, synthetic construct
  source 1..75: mol_type = other DNA
tacccatagtattagcgggactgcaaatagtgccggtgcgcaccaacacaagagttccggtgcatttggtggcac

SEQ ID NO: 257887 - DNA, 75 bp, synthetic construct
  source 1..75: mol_type = other DNA
taaagtcagcgatgacgatccgcattaccacaccgaccacctccactggtggtggaacaactaacgcccagttta

SEQ ID NO: 257888 - DNA, 75 bp, synthetic construct
  source 1..75: mol_type = other DNA
acagtcttggtacgcacaatagcttaaggccgtttataattagtaaccatactggcaatgttacaattgcaacta

SEQ ID NO: 257889 - DNA, 75 bp, synthetic construct
  source 1..75: mol_type = other DNA
tatatcgatatgttatttgttgaaccggaatacacccgacgcggagttgccagcgctttgttaaaaccattgatt

SEQ ID NO: 257890 - DNA, 75 bp, synthetic construct
  source 1..75: mol_type = other DNA
atggacgttgagtacggccagtacggtgtcatcctgctggttgacggttttccgccttcacatgccggcaccatc

SEQ ID NO: 257891 - DNA, 75 bp, synthetic construct
  source 1..75: mol_type = other DNA
aagccgttaaggccgcgtatgagctggctaacgggaaatacaccgcacaggatgcaacgacagcacagaaaggga

SEQ ID NO: 257892 - DNA, 75 bp, synthetic construct
  source 1..75: mol_type = other DNA
atcatactcatggtaatggtattcgttggccaggaggcggcggttctgcgttagcattttatgatggcggtgggt

SEQ ID NO: 257893 - DNA, 75 bp, synthetic construct
  source 1..75: mol_type = other DNA
taatgcgaatggtcgggtaccttctgcccgtaaggtgaatggtaaggcgctttcagcggatataacactgacgcc

SEQ ID NO: 257894 - DNA, 75 bp, synthetic construct
  source 1..75: mol_type = other DNA
tctcggtacgtctaacgtgggtaaaaccgtattactgatgacaaaagcatttgccgcccagcagttcggtacgcc

SEQ ID NO: 257895 - DNA, 75 bp, synthetic construct
  source 1..75: mol_type = other DNA
acctggggtaataatctgattaccctgggcggttcaggaaatgatgtttatcacctcaattatcacatgactacc

SEQ ID NO: 257896 - DNA, 75 bp, synthetic construct
  source 1..75: mol_type = other DNA
aagtcaccagacactgattgtttacgcagattcgccggagcgtctggtgaaggacaccaatattgtaacgacgac

SEQ ID NO: 257897 - DNA, 75 bp, synthetic construct
  source 1..75: mol_type = other DNA
ttataaaactggcggcgggggatatgatcccggcagatttacgtatcttgcaggcgcgggatctgttcgtcgctc

SEQ ID NO: 257898 - DNA, 75 bp, synthetic construct
  source 1..75: mol_type = other DNA
cctgaaaatggcggtgatgcccgaagaagaattgtggaaaacgttcgacacccatccggaagggttaaatctggc

SEQ ID NO: 257899 - DNA, 75 bp, synthetic construct
  source 1..75: mol_type = other DNA
agggggaaagtgatgattttgcggctttcgcaagactggatttgggaaaagcggcgtattacctaccggttctca

SEQ ID NO: 257900 - DNA, 75 bp, synthetic construct
  source 1..75: mol_type = other DNA
gaaaaagacgaagcgttaaccacgattgttaaagttgaaaatccgtcgccagcattattgccatgcccgaagtca

SEQ ID NO: 257901 - DNA, 75 bp, synthetic construct
  source 1..75: mol_type = other DNA
gtaatgggttaaataattcaatagacaacctgcgtctagttagtctcggtgaaaacctaaaaaacaaatctaaat

SEQ ID NO: 257902 - DNA, 66 bp, synthetic construct
  source 1..66: mol_type = other DNA
accacgccttcagtagcggagcaggaaggacatctgatggaaatggaagccacgcaagcaccttaa

SEQ ID NO: 257903 - DNA, 75 bp, synthetic construct
  source 1..75: mol_type = other DNA
atttgctggcaacctggcagatagacggtgcttactttgagtgtgttgattctgaagatttgtcaattctgacag

SEQ ID NO: 257904 - DNA, 75 bp, synthetic construct
  source 1..75: mol_type = other DNA
cctgttctttggtaacgatgctggacaaatcactgcctctgaccatgcccggtactttcgttgcatcgagatcaa

SEQ ID NO: 257905 - DNA, 75 bp, synthetic construct
  source 1..75: mol_type = other DNA
gcgagaaccaggatatttatttagttaatgaaggggcaaataccctggataatgcacgaaatattattgataacc

SEQ ID NO: 257906 - DNA, 75 bp, synthetic construct
  source 1..75: mol_type = other DNA
tagataagcttgaactgacggatgacgctgctaaatccctccttgctgatttgcgcgttggtcttgatatggttt

SEQ ID NO: 257907 - DNA, 75 bp, synthetic construct
  source 1..75: mol_type = other DNA
tcgccagcggcagtttctttagtggcggactggtagcggaacgtaacggcattcgagagccgattctcggccttg

SEQ ID NO: 257908 - DNA, 75 bp, synthetic construct
  source 1..75: mol_type = other DNA
tgctgggcggatttgatcctatcgctcagggatgcggcggcggcgtttgtgctgtcagtgcattacatgctgctc

SEQ ID NO: 257909 - DNA, 75 bp, synthetic construct
  source 1..75: mol_type = other DNA
gatcctgatgcccgcctgcttcggcctggctgatgacaaactctggcgctggctgaacgaacaattgccctgttc

SEQ ID NO: 257910 - DNA, 75 bp, synthetic construct
  source 1..75: mol_type = other DNA
gtcagagttaccaacagcccgttttacacgtacctgggtggtaaagatgtgttctttggtaacgatgcagggcaa

SEQ ID NO: 257911 - DNA, 75 bp, synthetic construct
  source 1..75: mol_type = other DNA
ctactttcaggaaacggatgccggaatttttgatgcactgatgtatctcccggttgagtatgtacagacttcctc

SEQ ID NO: 257912 - DNA, 75 bp, synthetic construct
  source 1..75: mol_type = other DNA
ttaatcctcttaggtggcaatgatgtttccgatgtgaaacgcggtattgaagttgcgctgaaagagcttgaccgg

SEQ ID NO: 257913 - DNA, 75 bp, synthetic construct
  source 1..75: mol_type = other DNA
gatcctgatgcccgcctgtttcggcctgaccgataacaaactgtggcgctggctgaatgagcaactgccctgttc

SEQ ID NO: 257914 - DNA, 75 bp, synthetic construct
  source 1..75: mol_type = other DNA
tgtttttggcatcgatggaacagaattccttgatgataaggttgtagccccggttgcttctttttacctgattta

SEQ ID NO: 257915 - DNA, 75 bp, synthetic construct
  source 1..75: mol_type = other DNA
tatgtaagctcaacggcaatacggttgatgattaccaacattcgctgatttcttcagccgttgaccgtcttatgc

SEQ ID NO: 257916 - DNA, 75 bp, synthetic construct
  source 1..75: mol_type = other DNA
gcgccagggtggcgtgtggatgccgggcgatgaagtgaaaaaagtgacctgtaaaaatggcgtagtgaatgaaat

SEQ ID NO: 257917 - DNA, 75 bp, synthetic construct
  source 1..75: mol_type = other DNA
atcgttgattgcagaaagcggcgcacaattgcaaggcagcgtagaactggcgcaccaacggattaccccactcgg

SEQ ID NO: 257918 - DNA, 75 bp, synthetic construct
  source 1..75: mol_type = other DNA
ctggatgtgctacgtaataacgccaccgagttccgcgcggtaaatattgcccgtttccttgataacgaagaaaac

SEQ ID NO: 257919 - DNA, 75 bp, synthetic construct
  source 1..75: mol_type = other DNA
aaataccattctaaacagcattgccaatgccattagcggtctggataacgcagttgcagcctggtttatgttgct

SEQ ID NO: 257920 - DNA, 75 bp, synthetic construct
  source 1..75: mol_type = other DNA
cattgataacggcatcctggcgcttatccgccatacacgagggaatgaaattctctttattcctgcgctgtttat

SEQ ID NO: 257921 - DNA, 75 bp, synthetic construct
  source 1..75: mol_type = other DNA
taatgcatggtttattccagaaatcgccagccagttcttcactatggggctggtgattggcatcatcggcgttgt

SEQ ID NO: 257922 - DNA, 75 bp, synthetic construct
  source 1..75: mol_type = other DNA
gaagaaaaggcactggcaacgcattatggatggttttgcctgtggtgttcaacactgtaccaggtcactggaaaa

SEQ ID NO: 257923 - DNA, 75 bp, synthetic construct
  source 1..75: mol_type = other DNA
gaagaaaaggcactggcaacgcattatggttttgcctgtggtgttcaacactgtaccaggtcactggaaaaccta

SEQ ID NO: 257924 - DNA, 75 bp, synthetic construct
  source 1..75: mol_type = other DNA
tttcgcattttgaccaacgaggcaggtgaaccggagtatcaccgcatacaactgttttcgacgggagatgaacgt

SEQ ID NO: 257925 - DNA, 75 bp, synthetic construct
  source 1..75: mol_type = other DNA
ttcacagaaatggacgatgccactgcgggactggcgtatggcaatgagccgctttattatcgagttcggtgaccg

SEQ ID NO: 257926 - DNA, 75 bp, synthetic construct
  source 1..75: mol_type = other DNA
acagaaatggacgatgccacttcaggactggcggatagccatgagtcgctttattatcgagttcggtgaccgcct

SEQ ID NO: 257927 - DNA, 75 bp, synthetic construct
  source 1..75: mol_type = other DNA
ataagtcgcagctggcgggcaaactggccgaatattgccaccttcttcgtgtacccggaggcgatccgcaaggtt

SEQ ID NO: 257928 - DNA, 75 bp, synthetic construct
  source 1..75: mol_type = other DNA
tttatgctggtgattggcggcgcgtttggcattgtgatgcgtacaggaaccattgataacggtatcctggcgctt

SEQ ID NO: 257929 - DNA, 75 bp, synthetic construct
  source 1..75: mol_type = other DNA
ttaatgttgccagttgatgatgatctgataagtgaacaggaacttaaagattacggtgtggatattgatgcgctc

SEQ ID NO: 257930 - DNA, 75 bp, synthetic construct
  source 1..75: mol_type = other DNA
ccgacagacgactcggtgaaaaaagtggtgtggctggcaatccagtctgcgtcccagaaatggacgatgccgttg

SEQ ID NO: 257931 - DNA, 75 bp, synthetic construct
  source 1..75: mol_type = other DNA
ataaaacgccgcgatcaggagaacgaggatattgcgctaacggtagggaagctgcgcgttgagcttgaggagaca

SEQ ID NO: 257932 - DNA, 75 bp, synthetic construct
  source 1..75: mol_type = other DNA
gatcctgtttatctgtggcggtgcgtttgccggtctggataaagtgatttcccatcgtgtagaaactggctccgg

SEQ ID NO: 257933 - DNA, 75 bp, synthetic construct
  source 1..75: mol_type = other DNA
gtcagacaacccgtccattacccgagacgtttccggtgaaggcgtacagcaggcactgttgaaactgatcgaagg

SEQ ID NO: 257934 - DNA, 75 bp, synthetic construct
  source 1..75: mol_type = other DNA
catcagactcgttatgaaccccgagaagtccgaaaagtgttatttgatgactatgaggttcactacgaaatccgt

SEQ ID NO: 257935 - DNA, 75 bp, synthetic construct
  source 1..75: mol_type = other DNA
atgcgttaactatcagcaatcttacgcagggaaactatcagccaggcgattttctcctggtcgattctgcgctgg

SEQ ID NO: 257936 - DNA, 75 bp, synthetic construct
  source 1..75: mol_type = other DNA
gcgagctgctggcgcaggttgaaccggaagatctgatcaagtttggtcttatccctgagttcattggtcgtctgc

SEQ ID NO: 257937 - DNA, 75 bp, synthetic construct
  source 1..75: mol_type = other DNA
aaaatatcattcagaagctgttgcagaagtgcgattacgacgtacagaaagcgcagcgcgggattgtctacatcg

SEQ ID NO: 257938 - DNA, 75 bp, synthetic construct
  source 1..75: mol_type = other DNA
ggcggctatacgccactggcagcaatccttaacgctgctaaacgcgcatatgaagaatcagcaagcgcagctggc

SEQ ID NO: 257939 - DNA, 75 bp, synthetic construct
  source 1..75: mol_type = other DNA
cattgttgcgatagaaaacgaacaggaaaggctttttgatgaagattacctaatggattcgaaagaatgcattga

SEQ ID NO: 257940 - DNA, 75 bp, synthetic construct
  source 1..75: mol_type = other DNA
tggttgcggcgctggaatccgcagagaatcgcatagcagaactggaggagcgggaaatactgctcccggaacgta

SEQ ID NO: 257941 - DNA, 75 bp, synthetic construct
  source 1..75: mol_type = other DNA
gaaggcagtctggaatatgctactgatgtaataatacaccttcaacagattgatattaaatgggattatgcgaat

SEQ ID NO: 257942 - DNA, 75 bp, synthetic construct
  source 1..75: mol_type = other DNA
gccgatctactgccggccatagtagtctccccaccatggctttcgaaaaagaaaaatcgccgattccggtgctgg

SEQ ID NO: 257943 - DNA, 75 bp, synthetic construct
  source 1..75: mol_type = other DNA
tccgcaaccggttcaaagagctggacctgttaatcgggaaaaacattctggtcatgcaggctgcgattatcgaat

SEQ ID NO: 257944 - DNA, 75 bp, synthetic construct
  source 1..75: mol_type = other DNA
gatattggtacgcttaactcaacaactatgtcattcagcggtggtgctggttggttcaaattagcaacggtaacc

SEQ ID NO: 257945 - DNA, 75 bp, synthetic construct
  source 1..75: mol_type = other DNA
ggttgtgcttaaaaatgccgggataacacagatttactatgtgtataacacatccagaagctatacccgcagcca

SEQ ID NO: 257946 - DNA, 75 bp, synthetic construct
  source 1..75: mol_type = other DNA
ggttatgccctgatgcaggggcagacttttgacaaatctgcctacccgaaacttgcagccgcttatccgtcaggc

SEQ ID NO: 257947 - DNA, 75 bp, synthetic construct
  source 1..75: mol_type = other DNA
ctgaaacacaggctgcaacgccaaaagcagtaaaggcagtaaatgaccttgctaacgggaaatataccgcacagg

SEQ ID NO: 257948 - DNA, 75 bp, synthetic construct
  source 1..75: mol_type = other DNA
tgacaatgcgaatggtcgggtaccttctgcccgtaaggtgaatggtaaggcgctttcagcggatataacactgac

SEQ ID NO: 257949 - DNA, 75 bp, synthetic construct
  source 1..75: mol_type = other DNA
agccagtgccaccgctgccggaaagtcggcagaaagcgccgcatcatccgcttcaacagccacaacgaaggctgg

SEQ ID NO: 257950 - DNA, 75 bp, synthetic construct
  source 1..75: mol_type = other DNA
ccggacaggctgcatcatctgctcagtcagcatcttccagcgcaggaacggcatcaacaaaggccagtgaagcat

SEQ ID NO: 257951 - DNA, 75 bp, synthetic construct
  source 1..75: mol_type = other DNA
tgaaagacggtgcaggtaaaccggtacagaactgcacaatccagctgaaagcaaaacgtaacagcatcacggtgg

SEQ ID NO: 257952 - DNA, 75 bp, synthetic construct
  source 1..75: mol_type = other DNA
tacccgatacattaagaccgtttgctattgataacgcaaccggcgaactggttattggaaccaaactgtccgcaa

SEQ ID NO: 257953 - DNA, 75 bp, synthetic construct
  source 1..75: mol_type = other DNA
ctcagctgcggcaggctcaaaaacagcggctgcattatctgccagtgccgcgtcaacaagtgccgggcaggcctc

SEQ ID NO: 257954 - DNA, 75 bp, synthetic construct
  source 1..75: mol_type = other DNA
taaatcgcacacccacagcgccagcgcatccagtacggatttggggacgaaaaacacatcgtcgtttgattacgg

SEQ ID NO: 257955 - DNA, 75 bp, synthetic construct
  source 1..75: mol_type = other DNA
aaatacccagagaattttgcgggtacactggttgtgcttaaaaatgccgggataacacagatttactatgtgtat

SEQ ID NO: 257956 - DNA, 75 bp, synthetic construct
  source 1..75: mol_type = other DNA
gtcgtttgattacggcactaaatccacgaataacactggtgcgcatacccatagtttaagtggcagcacgaatgc

SEQ ID NO: 257957 - DNA, 75 bp, synthetic construct
  source 1..75: mol_type = other DNA
gcgtctcgtttgatggttctaaagatattgaacttaacccacggtctataggtacgatcaactccacaacaatgt

SEQ ID NO: 257958 - DNA, 75 bp, synthetic construct
  source 1..75: mol_type = other DNA
agtacgaatgcaaagataattttggactttaaaaatggacgaggttattactgttcacatccatttatttcaagt

SEQ ID NO: 257959 - DNA, 75 bp, synthetic construct
  source 1..75: mol_type = other DNA
ggtgcattatgtctttcatttgtttttgtcttcttctggtttattgcgattatacaagtttatataaatgagtta

SEQ ID NO: 257960 - DNA, 75 bp, synthetic construct
  source 1..75: mol_type = other DNA
caagcggtagtggccagactcgtaatgcagggaagacatcatcagatggtgctcatacccactcgctgtccggca

SEQ ID NO: 257961 - DNA, 75 bp, synthetic construct
  source 1..75: mol_type = other DNA
acgacagcacaaaaaggaattgtccagctcagtagtgcaaccaacagcacatctgaaacgcttgccgcgacaccg

SEQ ID NO: 257962 - DNA, 75 bp, synthetic construct
  source 1..75: mol_type = other DNA
gcccgtgaggcggcaacccatgcgactgatgctgcaggctcagcgcgtgcagccagcacgtcagccggacaggcc

SEQ ID NO: 257963 - DNA, 75 bp, synthetic construct
  source 1..75: mol_type = other DNA
cctcagcccgggatgcgtcggcttcaaaagaagcggcaaaatcatcagaaacgaacgcatcatcaagcgccagta

SEQ ID NO: 257964 - DNA, 75 bp, synthetic construct
  source 1..75: mol_type = other DNA
ctcaacgggtgactggacaccatggacgccacaagattcatttccggtaggtgcggcgataccgtggccttctga

SEQ ID NO: 257965 - DNA, 75 bp, synthetic construct
  source 1..75: mol_type = other DNA
ggggacttcttcccgtagatcgtattatcaacgtattcagacacagtcagcaggtgctcatacccactcgctgtc

SEQ ID NO: 257966 - DNA, 75 bp, synthetic construct
  source 1..75: mol_type = other DNA
acgaacgcagcctcgagcgccagcagcgcagcttcctcggcaacggcggcagcaaattccgcgaaggcggcaaaa

SEQ ID NO: 257967 - DNA, 75 bp, synthetic construct
  source 1..75: mol_type = other DNA
cgaatggtcgggtaccttctgcccgtaaggtgaatggtaaggcgctttcagcggatataacactgacgccgaaag

SEQ ID NO: 257968 - DNA, 75 bp, synthetic construct
  source 1..75: mol_type = other DNA
gtaatcaccctggaatgccagtacccacgaaagggcagattgcgagaagcgcggttgaatactggtacagggcaa

SEQ ID NO: 257969 - DNA, 75 bp, synthetic construct
  source 1..75: mol_type = other DNA
cacaagaaaaagcgttgtcggcaggtaactttaacaatttcgatgaagtaatggacgcgtgggatacgcaaatcc

SEQ ID NO: 257970 - DNA, 75 bp, synthetic construct
  source 1..75: mol_type = other DNA
atggggattttaaaaagtttatttacgctggggaaatcatttatcgcgcaggcggaagagtccattgaagaaacc

SEQ ID NO: 257971 - DNA, 75 bp, synthetic construct
  source 1..75: mol_type = other DNA
aggcggcactgacttaccgttatggtgatgaacatcagcccgtcaccactgccgacattctgacaccacgacgcc

SEQ ID NO: 257972 - DNA, 75 bp, synthetic construct
  source 1..75: mol_type = other DNA
gtgttacttcatccagttgatattgcagatcgaatctaacggtcactcagtatcttttggtcgtatggaccagta

SEQ ID NO: 257973 - DNA, 75 bp, synthetic construct
  source 1..75: mol_type = other DNA
gctgctggcaatggccgaaaactgcgatctcatcgcccaccagccaccgcagactttctggcaggcgctgcaatt

SEQ ID NO: 257974 - DNA, 75 bp, synthetic construct
  source 1..75: mol_type = other DNA
gcaacgccggacgggcgtaaagcccacaccccgctggcagaaggcgctagtccggcctctggtactgatcatctt

SEQ ID NO: 257975 - DNA, 75 bp, synthetic construct
  source 1..75: mol_type = other DNA
gtgcgtgttccgcaccggggaaatgtggtggacagagtcattgaaggggcttacgaggtagtgggcgtgtttgac

SEQ ID NO: 257976 - DNA, 75 bp, synthetic construct
  source 1..75: mol_type = other DNA
aaaggcggaatttcaggtcgcagcgctaaaggaaaacgtatccatacccgtgccattcacagcattgacactgac

SEQ ID NO: 257977 - DNA, 75 bp, synthetic construct
  source 1..75: mol_type = other DNA
gagtgcttatcagaccatacaggagaatatgctgaaaggcaggatttccggccgcagtgcaaaaggaaaacgtat

SEQ ID NO: 257978 - DNA, 75 bp, synthetic construct
  source 1..75: mol_type = other DNA
ggggaaatgtggtggacagagtcattgaaggggcttacgaggtagtgggcgtgtttgaccggattgaggaaaagc

SEQ ID NO: 257979 - DNA, 75 bp, synthetic construct
  source 1..75: mol_type = other DNA
ccgcgccattcacagtatcgacaccgacatcaagctcaatcgcgcattgtgggtgatggcggaaacgctgctgga

SEQ ID NO: 257980 - DNA, 75 bp, synthetic construct
  source 1..75: mol_type = other DNA
ggagaaagttattgaaggggcttacgaggtggtgggcgtttttgaccggattgaggaaaagcgtgatgccatgca

SEQ ID NO: 257981 - DNA, 75 bp, synthetic construct
  source 1..75: mol_type = other DNA
aaaggtcttgatggtctgcgcgagaaagtagcggaacgtcgctcgcgcatcaacctgacggtgctggaagatttg

SEQ ID NO: 257982 - DNA, 75 bp, synthetic construct
  source 1..75: mol_type = other DNA
gaaggcgcgtatgaggtgctggggatttttgaccgggtggaggagaaacgggatgccatgcagtcgttgctgttg

SEQ ID NO: 257983 - DNA, 75 bp, synthetic construct
  source 1..75: mol_type = other DNA
gtggactacctggcagcgtattcaggagaacctgattaaaggtgggctcagtggccgtaatgccaaaggcggacg

SEQ ID NO: 257984 - DNA, 75 bp, synthetic construct
  source 1..75: mol_type = other DNA
gtgcagcaaatcttatccgccgtgaccgtccgttaacccgtgaagagttgtttcgagtggtccccagcgtattca

SEQ ID NO: 257985 - DNA, 75 bp, synthetic construct
  source 1..75: mol_type = other DNA
atgacccgtctggcttcgcgctttggcgcagcaaaccttattcgtcgtgaccgtccgttaacccaggaagagctg

SEQ ID NO: 257986 - DNA, 75 bp, synthetic construct
  source 1..75: mol_type = other DNA
atagacggtgatgtgaagcttaaccgggcactgtgggtgatggcggaagcgatgctcagtggttttcggcctgcg

SEQ ID NO: 257987 - DNA, 75 bp, synthetic construct
  source 1..75: mol_type = other DNA
ttggcgaggtgcgggtgccgcacaagggggacgtggtgagtcaggtgattgaaggcgcgtatgaggtactgggga

SEQ ID NO: 257988 - DNA, 75 bp, synthetic construct
  source 1..75: mol_type = other DNA
cggtgaggaccaccagccggtgacagcacctcagatactctccccacgccgctggcaggatgagagcaatgacct

SEQ ID NO: 257989 - DNA, 75 bp, synthetic construct
  source 1..75: mol_type = other DNA
atggacgcatgggatacgcaaatccgttactacacgcgtaaatcaatcgaaatcgaatatgtcgtcgacaccatg

SEQ ID NO: 257990 - DNA, 75 bp, synthetic construct
  source 1..75: mol_type = other DNA
tcagcgtgcgttaccatgcgggaatgagtaacgatttcctcgacgcctgcgtacaggtgatccgctgcggcttcg

SEQ ID NO: 257991 - DNA, 75 bp, synthetic construct
  source 1..75: mol_type = other DNA
aagataaacacacctcccggagccggaactatacatacatccccaccatcaccgtgctggaaagcctgcagcggg

SEQ ID NO: 257992 - DNA, 75 bp, synthetic construct
  source 1..75: mol_type = other DNA
gtcgcagtgcaaaaggaaaacgtatccatacccgggccattcacagcattgataccgatattaagctcaaccgcg

SEQ ID NO: 257993 - DNA, 75 bp, synthetic construct
  source 1..75: mol_type = other DNA
aacgcatactcgcgccgtgcgtggcattgacggagatgtgaagcttaaccgtgcgctgtgggtgatggctgaaac

SEQ ID NO: 257994 - DNA, 75 bp, synthetic construct
  source 1..75: mol_type = other DNA
acgcaaaaaatccagactcgctttacgctcaaagcgcccattgatggcgtgatcaccgcgtttgatctgcgcgcg

SEQ ID NO: 257995 - DNA, 75 bp, synthetic construct
  source 1..75: mol_type = other DNA
atactggtaacgaacagcgggtgattaccgttgatgccgacgggcgctttgtaccgaaacgcgttgctgttttcc

SEQ ID NO: 257996 - DNA, 75 bp, synthetic construct
  source 1..75: mol_type = other DNA
aaggctttcagccattcttcgcctgccagacccgtgtgcgcgacccgggccgccggggataccgacaaaacacat

SEQ ID NO: 257997 - DNA, 75 bp, synthetic construct
  source 1..75: mol_type = other DNA
tgtttgaccggatagaggagaagcttgatgccatgcagtcgctggtcctgacgccaccggcacgccaggcgctgg

SEQ ID NO: 257998 - DNA, 75 bp, synthetic construct
  source 1..75: mol_type = other DNA
accgtgctggaaagtctgcagcgggaaggcttccagcccttcttcgcctgccagacccgcgtgcgcgacccgggc

SEQ ID NO: 257999 - DNA, 75 bp, synthetic construct
  source 1..75: mol_type = other DNA
cgagtatcagtatgccattgtgcaggctcgcgccgccgggtttatcgacaaggtgtatccgcttaccgtgggcga

SEQ ID NO: 258000 - DNA, 75 bp, synthetic construct
  source 1..75: mol_type = other DNA
ggaggattacggtaaggacctgtggagtgcttatcagaccatacaggagaatatgctgaaaggcgggatttccgg

SEQ ID NO: 258001 - DNA, 75 bp, synthetic construct
  source 1..75: mol_type = other DNA
atgttgaatagccgtaaccacagcggcggtgcgggaactggcgcaattatgggttcgaaaaacctgaaagcgatt

SEQ ID NO: 258002 - DNA, 75 bp, synthetic construct
  source 1..75: mol_type = other DNA
atcaccgtgctggaaagtctgcagcgggaaggcttccagccattcttcgcctgccagacccgtgtgcgcgacccg

SEQ ID NO: 258003 - DNA, 75 bp, synthetic construct
  source 1..75: mol_type = other DNA
ggtgaagaccggcatacttcccgcagtaaacgatatgcgtacattcccaccatcaccgtactggaaagcctgcag

SEQ ID NO: 258004 - DNA, 75 bp, synthetic construct
  source 1..75: mol_type = other DNA
gccattcacagcatcgacacggacattaagctcaatcgcgcattgtgggtaatgacagaaacgctgctggagaac

SEQ ID NO: 258005 - DNA, 75 bp, synthetic construct
  source 1..75: mol_type = other DNA
aagaccggcatacctcccgcagtgaacgctatacgcatatccccaccatcaccgtgctggaaagtctgcagcggg

SEQ ID NO: 258006 - DNA, 75 bp, synthetic construct
  source 1..75: mol_type = other DNA
gaccatctacaaccgtattcaggagaacctgagtaagggcggactggccggacgttctgcgcagggtaaacacag

SEQ ID NO: 258007 - DNA, 75 bp, synthetic construct
  source 1..75: mol_type = other DNA
accgctgacattctgacaccacgacgcagggaggattacggtcaggacctgtggagcgcatatcagaccatccag

SEQ ID NO: 258008 - DNA, 75 bp, synthetic construct
  source 1..75: mol_type = other DNA
ggggcttacgaggtggcgggggtttttgaccggattgaggaaaagcgtgatgccatgcagtcgctgattctgccg

SEQ ID NO: 258009 - DNA, 75 bp, synthetic construct
  source 1..75: mol_type = other DNA
gggaggattacggtaaggacctgtggagtgcttatcagatcattcaggagaatatgctgaaaggcgggatttccg

SEQ ID NO: 258010 - DNA, 75 bp, synthetic construct
  source 1..75: mol_type = other DNA
aagagaaacacacatccagaagcgagaactatacctggatccccaccatcaccgtgccggaaagcctgcagcggg

SEQ ID NO: 258011 - DNA, 75 bp, synthetic construct
  source 1..75: mol_type = other DNA
atgtaaatcagatccgtcgggagcgcccactgacacgcgaagaactgatgcactatgttcccagtattttcggtg

SEQ ID NO: 258012 - DNA, 75 bp, synthetic construct
  source 1..75: mol_type = other DNA
tatccaaacccgtgccattcacagcatagacacagaaattaagctcaaccgcgcattgtgggtaatggcagaaac

SEQ ID NO: 258013 - DNA, 75 bp, synthetic construct
  source 1..75: mol_type = other DNA
atttaacagcccggaagaagctcgcgcgcagattcattatcagtaccgttatttctacccgcaaactgaacctga

SEQ ID NO: 258014 - DNA, 75 bp, synthetic construct
  source 1..75: mol_type = other DNA
ataccacgcgggggcatttctatcgcgcggcgctggaagggttaaccgcgcaattacagcgcaatctacagatgc

SEQ ID NO: 258015 - DNA, 75 bp, synthetic construct
  source 1..75: mol_type = other DNA
tttccggtcgcagtgcaaaaggaaaacgtatccatacccgggccattcacagcattgataccgacattaagctca

SEQ ID NO: 258016 - DNA, 75 bp, synthetic construct
  source 1..75: mol_type = other DNA
attctgctcaactcccatgacggttcatccagctaccagatgctgccgggttacttcaggttcgtctgccagaac

SEQ ID NO: 258017 - DNA, 75 bp, synthetic construct
  source 1..75: mol_type = other DNA
ggatgcgtctgtggtcagtctctgggagaagtgcgtgttccgcaccggggaaatgtggtggacagagtcattgaa

SEQ ID NO: 258018 - DNA, 75 bp, synthetic construct
  source 1..75: mol_type = other DNA
atttaacagcccggaagaagcccgcgcgcaaattcattatcagtaccgttatttctacccacaaactgaacccga

SEQ ID NO: 258019 - DNA, 75 bp, synthetic construct
  source 1..75: mol_type = other DNA
ttgctgcactgattgcctgctgggtaaaaatcaaacccgcaacatcacgcctgcgtagcgttcttttccgtggag

SEQ ID NO: 258020 - DNA, 75 bp, synthetic construct
  source 1..75: mol_type = other DNA
cctctttgaatttactcgcctggctattgctggcctctttttatattgctatctgcctgaacattgcctttttta

SEQ ID NO: 258021 - DNA, 75 bp, synthetic construct
  source 1..75: mol_type = other DNA
cgcgctgaatctgcctgatcagtgcatcaacggcgaatgctatgacgaagtgctgttccacgggctggaagagta

SEQ ID NO: 258022 - DNA, 75 bp, synthetic construct
  source 1..75: mol_type = other DNA
ggtgaatacctacgacaatacggtgctctatgtcgattatattgttgataaagcgattaatctgctgaaagaaca

SEQ ID NO: 258023 - DNA, 75 bp, synthetic construct
  source 1..75: mol_type = other DNA
gccacggcccgacctattacaaccgctatccgccgcagttcaggaaatttaccccaacctgcgacaccaatgaga

SEQ ID NO: 258024 - DNA, 75 bp, synthetic construct
  source 1..75: mol_type = other DNA
tgcgctgatgacaccgcaaatgttattaacgctgggactcagcggcgtacttgctgcgctaattgcctgctggat

SEQ ID NO: 258025 - DNA, 75 bp, synthetic construct
  source 1..75: mol_type = other DNA
gaaggggcttacgaggtggtgggggtgtttgaccggatggaggacaagcgtgatgccatgcagtcgctgctactg

SEQ ID NO: 258026 - DNA, 75 bp, synthetic construct
  source 1..75: mol_type = other DNA
gaaggggcttacgaggtggtgggcgtgtttgaccggatcgaggacaagcgtgatgccatgcagtcgctgctactg

SEQ ID NO: 258027 - DNA, 75 bp, synthetic construct
  source 1..75: mol_type = other DNA
gaaggggcttacgaggtggtgggcgtctttgaccggatggaggacaagcgtgatgccatgcagtcgctgctactg

SEQ ID NO: 258028 - DNA, 75 bp, synthetic construct
  source 1..75: mol_type = other DNA
agtctgggccgcaaaaactacctgttcttcggttcggatcatggaggagagcggggagcgctgctgtacagcctg

SEQ ID NO: 258029 - DNA, 75 bp, synthetic construct
  source 1..75: mol_type = other DNA
tatccatacccgtgccattcacagcatcgacacagacattaagctcaatcgcgcattgtgggtgatggcagaaac

SEQ ID NO: 258030 - DNA, 75 bp, synthetic construct
  source 1..75: mol_type = other DNA
ttttcggtgaagaccggcatacctcccgcagtgaacgctatacgcatatccccaccatcaccgtgctggaaagtc

SEQ ID NO: 258031 - DNA, 75 bp, synthetic construct
  source 1..75: mol_type = other DNA
attctcaaccttattgggcctgactggcgttgagacgaagtattaccaggctgcggatgatattctgcaaacttg

SEQ ID NO: 258032 - DNA, 75 bp, synthetic construct
  source 1..75: mol_type = other DNA
ggggcgtgaagatggcctgcgtgagcttgagcgtaaggcgatgcaggtgggcaatgatgaagatggtggttatgc

SEQ ID NO: 258033 - DNA, 75 bp, synthetic construct
  source 1..75: mol_type = other DNA
cctttatgggggaaatctacggcaacccgcaggccacccagaaaatgctcgatgacgctttcttcaatgtggaag

SEQ ID NO: 258034 - DNA, 75 bp, synthetic construct
  source 1..75: mol_type = other DNA
agcgagctggagaacctgaaaagcgacctggaaaaagagctggcagacatcaagcgtccggcaggcggcacgcaa

SEQ ID NO: 258035 - DNA, 75 bp, synthetic construct
  source 1..75: mol_type = other DNA
taaggcacaccgcaccggcgcgaagttcatgatgaacaacaacagcctgtttgccattcgtctgctgaaagacac

SEQ ID NO: 258036 - DNA, 75 bp, synthetic construct
  source 1..75: mol_type = other DNA
tcaaagcaaagaacgacaagcgcgtggatgcgattgagcaggaaaaaggcaaacttgccgggcaggtggaaaccc

SEQ ID NO: 258037 - DNA, 75 bp, synthetic construct
  source 1..75: mol_type = other DNA
gaagtttgacgattttaaggcaaaaaacgacaaacgtatcgacgcgatcgagcaggaaaagggaaaacttgccgg

SEQ ID NO: 258038 - DNA, 75 bp, synthetic construct
  source 1..75: mol_type = other DNA
tgaaatccctggaaagctggttgcgtgaaaagatgaagaccctgttcttcggctctggccatggtggtgagcggg

SEQ ID NO: 258039 - DNA, 75 bp, synthetic construct
  source 1..75: mol_type = other DNA
aaaccaacccgcggctggcgaaagataacgtgatctattttcctaatactgcgtcttgcggcacagcaacggctg

SEQ ID NO: 258040 - DNA, 75 bp, synthetic construct
  source 1..75: mol_type = other DNA
ttcttgtcgatgccagtcgtcgcgttcagcgtgattaatattgttctgacactaggctctttcttatggcttaat

SEQ ID NO: 258041 - DNA, 75 bp, synthetic construct
  source 1..75: mol_type = other DNA
taaaggccgtgaagacggtctgcgcgatctggagcgtaaggcattgcaggtgggcaccgatgaagacggcggcta

SEQ ID NO: 258042 - DNA, 75 bp, synthetic construct
  source 1..75: mol_type = other DNA
gaacaacaacagcctgtttgccatccgtctgcttaaagacagcgagggtaactatctgtggcgtccggggctgga

SEQ ID NO: 258043 - DNA, 75 bp, synthetic construct
  source 1..75: mol_type = other DNA
caaggggcgtgaagacggtctgcgtgaacttgaacgtaaggcgcttcaggtgggcaatgatgaagatggtggtta

SEQ ID NO: 258044 - DNA, 75 bp, synthetic construct
  source 1..75: mol_type = other DNA
gcgagaaaatccggatttggtgttactcgacatcatgctaccaggcaaggacggcatgaccatttgtcgtgattt

SEQ ID NO: 258045 - DNA, 75 bp, synthetic construct
  source 1..75: mol_type = other DNA
atgcattgctgaaaatttacgcggcgtcagttatgacggactggatcgtagcgtggacgtggctatttcgcggtt

SEQ ID NO: 258046 - DNA, 75 bp, synthetic construct
  source 1..75: mol_type = other DNA
ttgaccggattgaagagaaacgtgatgccatgcagtcgctggttctgccgccaccggcatgccaggcgctggcac

SEQ ID NO: 258047 - DNA, 75 bp, synthetic construct
  source 1..75: mol_type = other DNA
aatgggcgcctgcgactatattctcaaaacaacgccccccgcagtcctgctggcgcggttacgtttacatttgcg

SEQ ID NO: 258048 - DNA, 75 bp, synthetic construct
  source 1..75: mol_type = other DNA
ctcgatatcatgctacctggcaaagacggcatgactatctgtcgcgatttaggttctaagtggtccggaccaatc

SEQ ID NO: 258049 - DNA, 75 bp, synthetic construct
  source 1..75: mol_type = other DNA
atgacgcagaagttggttcactgattgccgcatacctggcgaaacatgatatgcaggtaaccatagaacctcgcg

SEQ ID NO: 258050 - DNA, 75 bp, synthetic construct
  source 1..75: mol_type = other DNA
gagggagcctatgaggtactggggatttttgaccgtgtagaagagaaacgggatgccatgcagtcgttgatgctg

SEQ ID NO: 258051 - DNA, 75 bp, synthetic construct
  source 1..75: mol_type = other DNA
gcgcagcaaaccttattcgccgtgaccgcccgctaacccgtgaagagttgtgtcgggtggtgcccagcgtgttca

SEQ ID NO: 258052 - DNA, 75 bp, synthetic construct
  source 1..75: mol_type = other DNA
ggatgccatgcagtcgttgcttttaccgccacctgtgcagcaggcactggcaaaagcagcgcttacgtatcgctt

SEQ ID NO: 258053 - DNA, 75 bp, synthetic construct
  source 1..75: mol_type = other DNA
atatccctgctggacagcctgcagcgcgaaggcttccagccgttctttgcctgtcagacccgggtacgcgacctg

SEQ ID NO: 258054 - DNA, 75 bp, synthetic construct
  source 1..75: mol_type = other DNA
atgtaaatcagatacgccgtgaccgccccttaactcgtgaagaactgatgcaggtcgtccccagcgtattcggag

SEQ ID NO: 258055 - DNA, 75 bp, synthetic construct
  source 1..75: mol_type = other DNA
attactgttcttaaaaatctgcagcgtgaaggctttcagcctttctttgcctgccagacccgtgttcgtgaccca

SEQ ID NO: 258056 - DNA, 75 bp, synthetic construct
  source 1..75: mol_type = other DNA
cgccctacaaagcattgcatttcggcacgttgaccatcgaccctattaaccgcgtagtcacccttgctaacactg

SEQ ID NO: 258057 - DNA, 75 bp, synthetic construct
  source 1..75: mol_type = other DNA
gaaggggcttacgaggtggtgggagtttttgaccggattgaggacaagcgtgatgccatgcagtcgctgctactg

SEQ ID NO: 258058 - DNA, 75 bp, synthetic construct
  source 1..75: mol_type = other DNA
gaaggggcttacgaggtggtgggagtatttgaccggatggaggacaagcgtgatgccatgcagtcgctgctactg

SEQ ID NO: 258059 - DNA, 75 bp, synthetic construct
  source 1..75: mol_type = other DNA
aacggctgcgtctgtgggcagtctctgggggaagtgcgtgttccgcaccggggaaatgtcgtggacacagttatt

SEQ ID NO: 258060 - DNA, 75 bp, synthetic construct
  source 1..75: mol_type = other DNA
gaaggggcttacgaggtggtgggtgtgtttgaccggattgaggacaagcgtgatgccatgcagtcgctgctactg

SEQ ID NO: 258061 - DNA, 75 bp, synthetic construct
  source 1..75: mol_type = other DNA
gaaggggcttacgaggtggtgggtgtttttgaccggatggaggacaagcgtgatgccatgcagtcgctgctactg

SEQ ID NO: 258062 - DNA, 75 bp, synthetic construct
  source 1..75: mol_type = other DNA
gaaggggcttacgaggtggtgggagtgtttgaccggatagaggacaagcgtgatgccatgcagtcgctgctactg

SEQ ID NO: 258063 - DNA, 75 bp, synthetic construct
  source 1..75: mol_type = other DNA
aacgggtgcgtctgtggccagtctctgggggaagtgcgtgttccactccggggaaatgtagtggagaaagttatc

SEQ ID NO: 258064 - DNA, 75 bp, synthetic construct
  source 1..75: mol_type = other DNA
actgacttaccgttatggtgatgaacatcagcccgtcaccactgccgacattctgacaccgcgacgccgggagga

SEQ ID NO: 258065 - DNA, 75 bp, synthetic construct
  source 1..75: mol_type = other DNA
gccattcacagcattgataccgacattaagctcaatcgcgcattgtgggtgatggcagaaacgctgctggagagc

SEQ ID NO: 258066 - DNA, 75 bp, synthetic construct
  source 1..75: mol_type = other DNA
aacggctgcgtctgtggccagtctctgggggaagtgcgtgttccgcaccggggaaatgtcgtggagacagttatt

SEQ ID NO: 258067 - DNA, 75 bp, synthetic construct
  source 1..75: mol_type = other DNA
aacggctgcgtctgtggtcagtctctgggggaagtgcgtgttccgcaccggggaaatgtcgtggaaacagtgatt

SEQ ID NO: 258068 - DNA, 75 bp, synthetic construct
  source 1..75: mol_type = other DNA
aacggctgcgtctgtggacagtctctgggggaagtgcgtgttccgcaccggggaaatgtcgtggatacagtgatt

SEQ ID NO: 258069 - DNA, 75 bp, synthetic construct
  source 1..75: mol_type = other DNA
gtggagaaagttatcgaaggggcttacgaggtggtgggcgtgtttgaccggatagaggagaagcgtgatgccatg

SEQ ID NO: 258070 - DNA, 75 bp, synthetic construct
  source 1..75: mol_type = other DNA
gaactatacgtacatccccaccatcaccgtactggaaagtctgcagcgggaaggcttccagccattcttcgcctg

SEQ ID NO: 258071 - DNA, 75 bp, synthetic construct
  source 1..75: mol_type = other DNA
aattacgggtagtcaagtgcctgaaatcatcttacttaatagccatgatggctccagtagctatcagatgttacc

SEQ ID NO: 258072 - DNA, 75 bp, synthetic construct
  source 1..75: mol_type = other DNA
atctccctgctcgacagcctacagcgagaaggcttccagccattctttgcctgtcagacccgcgtgcgtgacccc

SEQ ID NO: 258073 - DNA, 75 bp, synthetic construct
  source 1..75: mol_type = other DNA
atataatttgtggctggattatctggatgcactggagctggttgatacctccagtgcgccagatattgaatggcc

SEQ ID NO: 258074 - DNA, 75 bp, synthetic construct
  source 1..75: mol_type = other DNA
ccatccaggagaatatgctgaaaggcgggatttccggtcgcagtgcaaaaggaaaacgtatccacacccgtgcca

SEQ ID NO: 258075 - DNA, 75 bp, synthetic construct
  source 1..75: mol_type = other DNA
aacgggctcgtctgcggcgaatcgtttggcgaggtgcgggtgccgcacaaaggagatgtcgtgagtcaggtgatt

SEQ ID NO: 258076 - DNA, 75 bp, synthetic construct
  source 1..75: mol_type = other DNA
accgtactagaaagcctgcagcgggagggctttcagcccttcttcgcctgccagaccggcgtgcgcgacccgggc

SEQ ID NO: 258077 - DNA, 75 bp, synthetic construct
  source 1..75: mol_type = other DNA
aaatgtggtggacagagtcattgaaggggcttacgaggtggtggacgtttttgaccggattgaggaaaagcgtga

SEQ ID NO: 258078 - DNA, 75 bp, synthetic construct
  source 1..75: mol_type = other DNA
cattgaaaaggcgctcgattttctgcgcgctaccgatttcaacgccctggagccgggcgttgtcgaaatcgacgg

SEQ ID NO: 258079 - DNA, 75 bp, synthetic construct
  source 1..75: mol_type = other DNA
aaacgtggtggacagggtcattgaaggggcttacgaagtggtgggcgtgtttgaccggattgaggaaaagcgtga

SEQ ID NO: 258080 - DNA, 75 bp, synthetic construct
  source 1..75: mol_type = other DNA
ccacacccgtgccattcacagcatcgataccgacattaagctcaaccgggcattgtgggtgatggcagaaacgct

SEQ ID NO: 258081 - DNA, 75 bp, synthetic construct
  source 1..75: mol_type = other DNA
catcacagacagaaagaacgagggtaccaataccattgatggtaactggcaggccgatgaaggacgccgttaccg

SEQ ID NO: 258082 - DNA, 75 bp, synthetic construct
  source 1..75: mol_type = other DNA
ctggttccaggtagaagatgacggtccgggtattgcgccagaacagcgtaagcacctgttccagccgtttgttcg

SEQ ID NO: 258083 - DNA, 75 bp, synthetic construct
  source 1..75: mol_type = other DNA
gctggagagccatgcgctgataaaacatatccctgaaggcgtgattcaggtaccagaatcacccgacgccccgga

SEQ ID NO: 258084 - DNA, 75 bp, synthetic construct
  source 1..75: mol_type = other DNA
gggatttccggtcgcagtgccagaggaaaacgtatccatacccgtgccattcacagcatcgacaccgacattaag

SEQ ID NO: 258085 - DNA, 75 bp, synthetic construct
  source 1..75: mol_type = other DNA
tgacgaacatcagccagtcaccaccgctgacattctgacaccacgacgccgggaggattacggtcaggacctgtg

SEQ ID NO: 258086 - DNA, 75 bp, synthetic construct
  source 1..75: mol_type = other DNA
cgaaggggcttacgaagtggtgggggtttttgaccggattgaggaaaagcgtgatgccatgcagtcgctggtcct

SEQ ID NO: 258087 - DNA, 75 bp, synthetic construct
  source 1..75: mol_type = other DNA
gtccactattctctcaggaatttcaggatctgccagacggtgctgagacgacgcttactgaccgtccgctgacac

SEQ ID NO: 258088 - DNA, 75 bp, synthetic construct
  source 1..75: mol_type = other DNA
tgacgaacatcagccagtcaccaccgctgacattctgacaccacgacgcagggaggattacggtaaggacctgtg

SEQ ID NO: 258089 - DNA, 75 bp, synthetic construct
  source 1..75: mol_type = other DNA
tattgaagcactggatgaactactggcaacgctgaccgatgataaaccgcgagtcattgcactgcagccgattag

SEQ ID NO: 258090 - DNA, 75 bp, synthetic construct
  source 1..75: mol_type = other DNA
gggaagtgcgtgttccacaccggggaaatgtggtggagaaagttatcgaaggggcttacgaggtggtgggcgtgt

SEQ ID NO: 258091 - DNA, 75 bp, synthetic construct
  source 1..75: mol_type = other DNA
caccggggaaatgtggtggacagagtcattgaaggggcttacgaggtggtgggcgtgtttgaccggattgaggaa

SEQ ID NO: 258092 - DNA, 75 bp, synthetic construct
  source 1..75: mol_type = other DNA
gcaacgctgaccgatgataaaccgcgagtcattgcactgcagccgattagccaaaaggatgatgccacacgtttg

SEQ ID NO: 258093 - DNA, 75 bp, synthetic construct
  source 1..75: mol_type = other DNA
atattcaggcgcataaggtgatacacccgaaaagcaacagcctgttaaagccgctggcagcaaaagcggcaacca

SEQ ID NO: 258094 - DNA, 75 bp, synthetic construct
  source 1..75: mol_type = other DNA
ccgtcgcagtgggtggagatgatgacaaagcgatttaatatctggtgccagggggctaccccgtggatgggtaac

SEQ ID NO: 258095 - DNA, 75 bp, synthetic construct
  source 1..75: mol_type = other DNA
tgccatgcagtcgctgattctgccgccaccggcacgccaggcgctggcacaggcggcactgacttaccgttatag

SEQ ID NO: 258096 - DNA, 75 bp, synthetic construct
  source 1..75: mol_type = other DNA
tatccatacccgggccattcacagcattgataccgacattaagctcaaccgcgcattgtgggtgatggcagaaac

SEQ ID NO: 258097 - DNA, 75 bp, synthetic construct
  source 1..75: mol_type = other DNA
ccgccaccggcacgccaggcgctggcacaggcggcgctgacttaccgttatggtgacgaacatcagcccgtcacc

SEQ ID NO: 258098 - DNA, 75 bp, synthetic construct
  source 1..75: mol_type = other DNA
ccgctggcagcaaaagcggcaaccatcgagggaacaaaccccagcctttccatcgtggacgaataccacttgcac

SEQ ID NO: 258099 - DNA, 75 bp, synthetic construct
  source 1..75: mol_type = other DNA
tcaaaaccgctgaaaaagcgcgtcagtattcaggcacacaaggtcattttcccgaagagcaacagcctgttaaag

SEQ ID NO: 258100 - DNA, 75 bp, synthetic construct
  source 1..75: mol_type = other DNA
ttttcccggctctgtccacacgtcaaaggcccgctgcgcggccagccaatcgagctggagccgtggcagcagttc

SEQ ID NO: 258101 - DNA, 75 bp, synthetic construct
  source 1..75: mol_type = other DNA
tatccatacccgtgccattcacagtatcgacaccgacatcaagctcaatcgcgcattgtgggtgatggcggaaac

SEQ ID NO: 258102 - DNA, 75 bp, synthetic construct
  source 1..75: mol_type = other DNA
tgaggctattttgttcgccataacgaccgccgggagtaacgttgtctcagcctgtaaacagcattacgactactg

SEQ ID NO: 258103 - DNA, 75 bp, synthetic construct
  source 1..75: mol_type = other DNA
ggcaccttccaggctgagcatgaggattttgctttcgatatgagcgatagccataagcagcgacttgccgaattt

SEQ ID NO: 258104 - DNA, 75 bp, synthetic construct
  source 1..75: mol_type = other DNA
ccaaacgtttcaatatctggtgtcagggctccacgccgtggatgggtgccggtgcatgggatgcctgtgcactcg

SEQ ID NO: 258105 - DNA, 75 bp, synthetic construct
  source 1..75: mol_type = other DNA
agctgatgcaccatgtgccggggattttcggggaagataaacacacgtcccgaagccagaactatacgtacatcc

SEQ ID NO: 258106 - DNA, 75 bp, synthetic construct
  source 1..75: mol_type = other DNA
gccgggaggattacggtaaggacctgtggagtgcttatcagaccatacaggagaatatgctgaaaggcgggattt

SEQ ID NO: 258107 - DNA, 75 bp, synthetic construct
  source 1..75: mol_type = other DNA
gggagacgtggtggagaaagttattgaaggggcttacgaagtggtgggcgtgtttgaccggattgaggaaaagcg

SEQ ID NO: 258108 - DNA, 75 bp, synthetic construct
  source 1..75: mol_type = other DNA
atgatttttggacatatcgcgcagcctaacccgtgccgtttgcccgctgctattgaaaaggcgctcgattttctg

SEQ ID NO: 258109 - DNA, 75 bp, synthetic construct
  source 1..75: mol_type = other DNA
ccggaacgttcgcggaggcggatttatacgggcaggagtgctacgcagggctggacttatcatcaaccagcgata

SEQ ID NO: 258110 - DNA, 75 bp, synthetic construct
  source 1..75: mol_type = other DNA
cccgataacggcgtttattctgcgcttgaactggggatgggggcacgtcccgaagggctgttatttgccattacc

SEQ ID NO: 258111 - DNA, 75 bp, synthetic construct
  source 1..75: mol_type = other DNA
aaaaccgccctgaagttcatcgtcgctatttggacattcagttcctggcgcggggcgaagagaaaataggtgtag

SEQ ID NO: 258112 - DNA, 75 bp, synthetic construct
  source 1..75: mol_type = other DNA
tggtgacgaacatcagcctgtcaccaccgctgacattctgaccccccgacgctgggaggattacggtgaggacct

SEQ ID NO: 258113 - DNA, 75 bp, synthetic construct
  source 1..75: mol_type = other DNA
tggtgacgaacatcagccagtcaccaccgctgacattctgaccccacgacgcggggaggattacggtgaggacct

SEQ ID NO: 258114 - DNA, 75 bp, synthetic construct
  source 1..75: mol_type = other DNA
gagtttaatatccttcaaataggaaatcgtaatggacatttttgggaacaaatcgaactccctcgttatctaaga

SEQ ID NO: 258115 - DNA, 75 bp, synthetic construct
  source 1..75: mol_type = other DNA
tcagacccgagtacgtgacccgggccgccgggaatacaccaaacacatgttgcgtctgcggcgggccggagagat

SEQ ID NO: 258116 - DNA, 75 bp, synthetic construct
  source 1..75: mol_type = other DNA
gtatatcgatattcagtttctggcgtggggtgaagagaaaatcggcattgctattgaggtgatgctgccaactta

SEQ ID NO: 258117 - DNA, 75 bp, synthetic construct
  source 1..75: mol_type = other DNA
tggtgacgaacatcagccggtcaccaccgctgacattctgaccccgcgacgccgggaggattacggtgaggacct

SEQ ID NO: 258118 - DNA, 75 bp, synthetic construct
  source 1..75: mol_type = other DNA
gccattcacagcatcgacaccgacattaagctcaatcgcgcattgtgggtgatggcagaaacgctactggagagc

SEQ ID NO: 258119 - DNA, 75 bp, synthetic construct
  source 1..75: mol_type = other DNA
tgcaaaaggaaaacgtatccacccccgtgccattcacagcatcgacaccgatattaagctcaaccgcgcattgtg

SEQ ID NO: 258120 - DNA, 75 bp, synthetic construct
  source 1..75: mol_type = other DNA
cattcacagcatcgacaccgatattaagctcaaccgcgcattgtgggtgatggcagaaacgctgctggagagtat

SEQ ID NO: 258121 - DNA, 75 bp, synthetic construct
  source 1..75: mol_type = other DNA
cgggcaattcatgaacgtggcctgaacatcccgcaggatatttcgcttatcagcgttaacgacattcctaccgcg

SEQ ID NO: 258122 - DNA, 75 bp, synthetic construct
  source 1..75: mol_type = other DNA
cctgccctacgcgccgccgccagtgcgttaaccgataatatctgttttatcgactttcacgagccaggcagcaat

SEQ ID NO: 258123 - DNA, 75 bp, synthetic construct
  source 1..75: mol_type = other DNA
ccgacattgaatgtgaaagaagagacgaaacatcgcattctcgagatcgccgaaaagctggagtacaagaccagt

SEQ ID NO: 258124 - DNA, 75 bp, synthetic construct
  source 1..75: mol_type = other DNA
atatgctgaaaggggggatttccggtcgcagtgccagaggaaaacgtatccacacccgtgccattcacagcatcg

SEQ ID NO: 258125 - DNA, 75 bp, synthetic construct
  source 1..75: mol_type = other DNA
aatgtagtggagaaagttatcgaaggggcttacgaggtggtgggggtttttgaccggatagaggagaagcgtgat

SEQ ID NO: 258126 - DNA, 75 bp, synthetic construct
  source 1..75: mol_type = other DNA
gacagcggcagaatccttaaaacgcctgcaaacgcgtcaggccgaacgtcaggctcgcctggatgctgccgcaca

SEQ ID NO: 258127 - DNA, 75 bp, synthetic construct
  source 1..75: mol_type = other DNA
gatcgtgacgatatgcatgcttcgctcacgatgttctacaaagaaatgggctgggacccacagcttggttgtccg

SEQ ID NO: 258128 - DNA, 75 bp, synthetic construct
  source 1..75: mol_type = other DNA
atgcaaacattcacacatattattaataagattcttgccagatgttgctgcattattctcgccattatggtgttc

SEQ ID NO: 258129 - DNA, 75 bp, synthetic construct
  source 1..75: mol_type = other DNA
tgcgtaacctggcaagttattgcacgttttatttttaacgctcccagcactgtgcttgatgagttcacccagatt

SEQ ID NO: 258130 - DNA, 75 bp, synthetic construct
  source 1..75: mol_type = other DNA
tatgaaaaagcccgcgatggtcgcgcgctgccgctgttagtcttcgttcccagcaaattaaaactgcgcggcacg

SEQ ID NO: 258131 - DNA, 75 bp, synthetic construct
  source 1..75: mol_type = other DNA
gtgaagaccggcatacctcccgcagtgaacgctatacgtacatccccaccatcaccgtactggaaagcctgcagc

SEQ ID NO: 258132 - DNA, 75 bp, synthetic construct
  source 1..75: mol_type = other DNA
gcccgtcaccaccgctgacattctgacaccacgacgcagggaggattacggtaaggacctgtggagtgcttatca

SEQ ID NO: 258133 - DNA, 75 bp, synthetic construct
  source 1..75: mol_type = other DNA
atgcagtcgctggtcctgccgccaccgtcacgccaggcgctggcacaggcggcactgacttaccgttatggtgac

SEQ ID NO: 258134 - DNA, 75 bp, synthetic construct
  source 1..75: mol_type = other DNA
accgtactggaaagcctgcagcaggaaggttttcagccattcttcgcctgccagacccgtgtgcgcgacccgggc

SEQ ID NO: 258135 - DNA, 75 bp, synthetic construct
  source 1..75: mol_type = other DNA
aggcggcactgacttaccgttatggtgacgaacatcagcccgtcaccaccgccgacattctgacaccacgacgcc

SEQ ID NO: 258136 - DNA, 75 bp, synthetic construct
  source 1..75: mol_type = other DNA
agcggctggcggttcggctgtccctcattatcagtcgccttgttgctggcgaaacactggatatgcgccttcttg

SEQ ID NO: 258137 - DNA, 75 bp, synthetic construct
  source 1..75: mol_type = other DNA
cacaggcggcactgacttaccgttatggtgacgaacatcagctgccacaacagcggacatccttacgcaacgacg

SEQ ID NO: 258138 - DNA, 75 bp, synthetic construct
  source 1..75: mol_type = other DNA
cacaggcggcactgacttaccgttatggtgacgaacatcagcagccacaacagcggacatcctaacgcaacgacg

SEQ ID NO: 258139 - DNA, 75 bp, synthetic construct
  source 1..75: mol_type = other DNA
cagttcgtcgggctatgaactggcaaaacagatgctggcgcgggaagactatccgaaggcactgtttgttgcttc

SEQ ID NO: 258140 - DNA, 75 bp, synthetic construct
  source 1..75: mol_type = other DNA
cttccagctaccagatgctgccgggttactgtaagcgactcgtcagaaccgtattgatatttactgagagctcag

SEQ ID NO: 258141 - DNA, 75 bp, synthetic construct
  source 1..75: mol_type = other DNA
cacaggcggcactgacttaccgttatggtgacgaacatcagcggccacaacagcggacatcctgacgcaacgacg

SEQ ID NO: 258142 - DNA, 75 bp, synthetic construct
  source 1..75: mol_type = other DNA
cacaggcggcactgacttaccgttatggtgacgaacatcagccgccacaacagcggacatcctcacgcaacgacg

SEQ ID NO: 258143 - DNA, 75 bp, synthetic construct
  source 1..75: mol_type = other DNA
ctacacggtaaaactgatgcaaactaaagatatgcgtaatgagcacgatcttatctgttcctgggtattcgataa

SEQ ID NO: 258144 - DNA, 75 bp, synthetic construct
  source 1..75: mol_type = other DNA
ggtgcttacgaagtggtgggcgtgtttgacctgattgaggaaaagcgtgatgccatgcagtcgctgcttctgccg

SEQ ID NO: 258145 - DNA, 75 bp, synthetic construct
  source 1..75: mol_type = other DNA
aaatgtggtggagaaagttattgaaggggcttatgaggtggtgggcgtgtttgaccggatagaggagaagcgtga

SEQ ID NO: 258146 - DNA, 75 bp, synthetic construct
  source 1..75: mol_type = other DNA
gggaggactacagcgatgacctgtggaccgtctaccagcgcgtgcaggagaacctgatgaaaggaggtctgtcag

SEQ ID NO: 258147 - DNA, 75 bp, synthetic construct
  source 1..75: mol_type = other DNA
gagaagtgcgggtgccgcataaaggtaatgtcgtcgagaaggtgattgaaggggcttacgaagtgctgggggtct

SEQ ID NO: 258148 - DNA, 75 bp, synthetic construct
  source 1..75: mol_type = other DNA
gggtgaaccagatacgccgcgaccgtcctttaacacgtgaagagctgataagccatgttcccagtgtgttcagcg

SEQ ID NO: 258149 - DNA, 75 bp, synthetic construct
  source 1..75: mol_type = other DNA
aaatgtggtggagaaagttatggaaggggcttacgaggtggtgggtgtgtttgaccggattgaggagaagcgtga

SEQ ID NO: 258150 - DNA, 75 bp, synthetic construct
  source 1..75: mol_type = other DNA
aaatgtggtggagaaagttattgaaggggcttacgaggtggtgggtgtgtttgaccggatagaggagaagcgtga

SEQ ID NO: 258151 - DNA, 75 bp, synthetic construct
  source 1..75: mol_type = other DNA
aaatgtggtggagaaagttatagaaggggcttacgaggtggtgggtgtgtttgaccggatcgaggataagcgtga

SEQ ID NO: 258152 - DNA, 75 bp, synthetic construct
  source 1..75: mol_type = other DNA
aaatgtggtggacagagtcattgaaggggcttacgaagtggtgggcgtttttgaccggattgaggaaaagcgtga

SEQ ID NO: 258153 - DNA, 75 bp, synthetic construct
  source 1..75: mol_type = other DNA
tgctgcgtctgcggcgggccggagagataaacggagaacatgtccctgaaattattcagctcaactctcatgacg

SEQ ID NO: 258154 - DNA, 75 bp, synthetic construct
  source 1..75: mol_type = other DNA
gcttttacgataacaaaaagccagaactggaaaatggggtgcgtttctatttcaaaacttttggttttcctgttg

SEQ ID NO: 258155 - DNA, 75 bp, synthetic construct
  source 1..75: mol_type = other DNA
cttgttcctctctctggcatgttgaatagccgtaaccacagcggcggtgcgggaactggcgcaataatgggttcg

SEQ ID NO: 258156 - DNA, 75 bp, synthetic construct
  source 1..75: mol_type = other DNA
catcgggaggatggcctgacgtttatgggaggcttgaatgggacaaacaatgcccaaccataacggcaggcttcg

SEQ ID NO: 258157 - DNA, 75 bp, synthetic construct
  source 1..75: mol_type = other DNA
tatgggaccgccaataatacgaaaatcaatcctggcggagaacagcatataaaagaattttggatttgcccctat

SEQ ID NO: 258158 - DNA, 75 bp, synthetic construct
  source 1..75: mol_type = other DNA
ttacttcaggttcgtctgccagaacggctgcgtctgtggtcagtctctgggggaagtgcgtgttccacaccgggg

SEQ ID NO: 258159 - DNA, 75 bp, synthetic construct
  source 1..75: mol_type = other DNA
acagcgacagcgcagcgtatcgctcagtttgagcagcaaatggaagtcgttaaagctactgaagccatgcagcgt

SEQ ID NO: 258160 - DNA, 75 bp, synthetic construct
  source 1..75: mol_type = other DNA
atggggattttaaaaagtttatttacgctggggaaatcgtttatctcccaggcggaagagtctattgaagaaacc

SEQ ID NO: 258161 - DNA, 75 bp, synthetic construct
  source 1..75: mol_type = other DNA
cttacaatcaggcgatggtaaactaatggctacctatcggcgcaataaaaaagcgatagacaagttagatgctga

SEQ ID NO: 258162 - DNA, 75 bp, synthetic construct
  source 1..75: mol_type = other DNA
gacgaacgactaaaggcaaacgtgcacatacccgtgctgtaaaaggtatcgatggtgatgtgaagctcaatcgcg

SEQ ID NO: 258163 - DNA, 75 bp, synthetic construct
  source 1..75: mol_type = other DNA
ggggcttacgaagtgctggggatatttgaccaagtggaggagaagcgcgatgccatgcaatcgcttttgttacca

SEQ ID NO: 258164 - DNA, 75 bp, synthetic construct
  source 1..75: mol_type = other DNA
ggaaattcgctgggatcaactggaagcgggtgacgttaacttcattaaagatttttactaccgtctggcgcatcg

SEQ ID NO: 258165 - DNA, 75 bp, synthetic construct
  source 1..75: mol_type = other DNA
gtggactacttaccaacgcattcaggagaacttgataaaaggcgggctatcgggacgaacgacgaaaggtaggcg

SEQ ID NO: 258166 - DNA, 75 bp, synthetic construct
  source 1..75: mol_type = other DNA
atttccctgctcgataacctacagcgtgaaggcttccagccattctttgcctgccagactcgagttcgagatcag

SEQ ID NO: 258167 - DNA, 75 bp, synthetic construct
  source 1..75: mol_type = other DNA
gagtgcttatcagaccattcaggagaatatgctgaaaggcggaatttccggtcgcagtgccagagggaaacgtat

SEQ ID NO: 258168 - DNA, 75 bp, synthetic construct
  source 1..75: mol_type = other DNA
aggtgtagagtttcgttcaatcgtaggacaaactgatatttcagcagccactggcaaaaccgctactacaaatga

SEQ ID NO: 258169 - DNA, 75 bp, synthetic construct
  source 1..75: mol_type = other DNA
gtcttagaatccagttaacttttcaggaaattaacttcaaagctattgttggtcagactgatatttctgctgcta

SEQ ID NO: 258170 - DNA, 75 bp, synthetic construct
  source 1..75: mol_type = other DNA
gcagtgacaaaattaccgttgatgggaaaatccttacataaaacaattgaacgaaatcaggtgaaaacagcaaaa

SEQ ID NO: 258171 - DNA, 75 bp, synthetic construct
  source 1..75: mol_type = other DNA
agggtcaattagtagaaaacttcattgacactcttgaaagctggcgtgaccagaaacaaattatttctgtcatct

SEQ ID NO: 258172 - DNA, 75 bp, synthetic construct
  source 1..75: mol_type = other DNA
aaatggaatatgactcccctatgatggtgacaactcaggctatgcagtctgggcagaccgttacagataacgttc

SEQ ID NO: 258173 - DNA, 75 bp, synthetic construct
  source 1..75: mol_type = other DNA
tggcggttctaccagtaaaaagaacactggcaacactacaacgagccttggaagccctatgctgacctgtaaaga

SEQ ID NO: 258174 - DNA, 75 bp, synthetic construct
  source 1..75: mol_type = other DNA
gagaaaggcggcaaagttagccaggcgctggaaaccgtcaccaccactgccgaaaaagtccaacgccaaccggtt

SEQ ID NO: 258175 - DNA, 75 bp, synthetic construct
  source 1..75: mol_type = other DNA
cggaagaagtattgacaccttacgtaatgggagcatcccctcaatctatggggaatggaatgattgagacattag

SEQ ID NO: 258176 - DNA, 75 bp, synthetic construct
  source 1..75: mol_type = other DNA
cttatctctcatcaaccgccggaattacgctcggcgatccgctggcgtatctggtggcaccgccgctggaagcga

SEQ ID NO: 258177 - DNA, 75 bp, synthetic construct
  source 1..75: mol_type = other DNA
ctcggttgccggttcggcgcagcaaatgattattagcgccctgcacctgaacagcattgagtggctgaaaccgac

SEQ ID NO: 258178 - DNA, 75 bp, synthetic construct
  source 1..75: mol_type = other DNA
cgcctgccgcgccaccgtccgcgtagaaaggcgctgattcgcgggacgttcctcgcagcgattggttttgaagtg

SEQ ID NO: 258179 - DNA, 75 bp, synthetic construct
  source 1..75: mol_type = other DNA
gtccccctcaggatccaattaaccacctgaaaaatagcgacaagggcaataaagtcagtctggcgctggaaaccg

SEQ ID NO: 258180 - DNA, 75 bp, synthetic construct
  source 1..75: mol_type = other DNA
ggaaattaacttcaaagccattgtgggtcagactgatatttcggctgcgacaggaaaaaccgctaccacaaatga

SEQ ID NO: 258181 - DNA, 75 bp, synthetic construct
  source 1..75: mol_type = other DNA
gaagtggtgaccaatggtctgaatatcgccggtggcatgatcgtggtggttggttatgcgatggttatcaacatg

SEQ ID NO: 258182 - DNA, 75 bp, synthetic construct
  source 1..75: mol_type = other DNA
aatcgtggagctggttttaagtatccaacgatgaaagctgaggatattgctcgtattcctgtctggcagcttgct

SEQ ID NO: 258183 - DNA, 75 bp, synthetic construct
  source 1..75: mol_type = other DNA
gactaagaatccagctaacttttcaggaaattaactttaaagctattgtaggccaaactgatatttcggctgcca

SEQ ID NO: 258184 - DNA, 75 bp, synthetic construct
  source 1..75: mol_type = other DNA
cagtcctgctggacgttgatttagctgagattgaagatttccctgataagatttacggcgttaatgcccggggaa

SEQ ID NO: 258185 - DNA, 75 bp, synthetic construct
  source 1..75: mol_type = other DNA
ataagatgctattgagggcaatcgcagatatggttgttcaaaatccctcctatgccagagaaatattcaatgacg

SEQ ID NO: 258186 - DNA, 75 bp, synthetic construct
  source 1..75: mol_type = other DNA
tgatttcgttgtttattgtgctggcctggggaaccggctggctgatgctgtggacgctcagcttttatctgacca

SEQ ID NO: 258187 - DNA, 75 bp, synthetic construct
  source 1..75: mol_type = other DNA
ctcactaatgagcaacttcaagcccgtatcaattgtggtaaaagtgtcaaagttgagaatggaaaaagcaccttc

SEQ ID NO: 258188 - DNA, 75 bp, synthetic construct
  source 1..75: mol_type = other DNA
ttcacagcctcagctaatgagcaggcttcaaaagtgcttaagtcgggtaatgctttacggaagtttagtgtgaat

SEQ ID NO: 258189 - DNA, 75 bp, synthetic construct
  source 1..75: mol_type = other DNA
ttccatcatcacaagctttaaagcctctaaagatgttggaatttcaaatggtctaagaatccagctaacttttca

SEQ ID NO: 258190 - DNA, 75 bp, synthetic construct
  source 1..75: mol_type = other DNA
tcagatgccgctaatgagcaagcttcgaaagtgcttaataatgctggtgcaggtaatgttttgaagaggctgtct

SEQ ID NO: 258191 - DNA, 75 bp, synthetic construct
  source 1..75: mol_type = other DNA
ggaaattaactttaaagctattgtagggcaaactgatgtttcagcagctactggaaagacagctaccacgaatga

SEQ ID NO: 258192 - DNA, 75 bp, synthetic construct
  source 1..75: mol_type = other DNA
acagcctcagctaatgagcaagcttcaaaggtgcttaagtcgggtaatgctttacggaagttttctgtgaatcct

SEQ ID NO: 258193 - DNA, 75 bp, synthetic construct
  source 1..75: mol_type = other DNA
gtcggccctaaagttcataactccacctgtccgtcacttccgttggcaacatatgatgtttcctgggatgagaat

SEQ ID NO: 258194 - DNA, 75 bp, synthetic construct
  source 1..75: mol_type = other DNA
gactacatctcgtatacgaaggtgctgtcactacagtcaacgggcggcatgattgagaaaacgctcccgaccttc

SEQ ID NO: 258195 - DNA, 75 bp, synthetic construct
  source 1..75: mol_type = other DNA
agcaccgaagtcaagctgtccaggacttgacgaatacgatgcccggtctaagaccgactgggtctgctacgagat

SEQ ID NO: 258196 - DNA, 75 bp, synthetic construct
  source 1..75: mol_type = other DNA
tgagaaaacgctgcccacctttttgatggaaagcggcaagctctgtgacggcagcgtgatggacgatcgaggcgc

SEQ ID NO: 258197 - DNA, 75 bp, synthetic construct
  source 1..75: mol_type = other DNA
ttatgatatttcgtggagtgaagattatgttgtccattcgaaagtgctgtcgctgcaatcgacgggtggaacgat

SEQ ID NO: 258198 - DNA, 75 bp, synthetic construct
  source 1..75: mol_type = other DNA
tggtgcgcgtagataccagcgcattgcagcccattgattcaacgtgtcgcttccagtatgtgttgaatatgttct

SEQ ID NO: 258199 - DNA, 75 bp, synthetic construct
  source 1..75: mol_type = other DNA
ctcctgcgccgacgattacggtaaaagatgggacaactgtaaataattcattttgtccgggcatggaggcactgg

SEQ ID NO: 258200 - DNA, 75 bp, synthetic construct
  source 1..75: mol_type = other DNA
tctttaacgcgtggcctgaaattactggagtggattgccgaatccaatggcagtgtggcgttgaccgaattagca

SEQ ID NO: 258201 - DNA, 75 bp, synthetic construct
  source 1..75: mol_type = other DNA
tctttaacgcgtggcctgaaattactggagtggattgccgaatccaatggcagtgtggcactcacggaactggca

SEQ ID NO: 258202 - DNA, 75 bp, synthetic construct
  source 1..75: mol_type = other DNA
gatggaagctacacgagcccgactgtgcataactcaatatgcccaacgataccggtcgcctcctatgatatctcc

SEQ ID NO: 258203 - DNA, 75 bp, synthetic construct
  source 1..75: mol_type = other DNA
tttcctggacgggttcgggcccggcaccaactctggttataacggattatgatacgattaataattcacattgcc

SEQ ID NO: 258204 - DNA, 75 bp, synthetic construct
  source 1..75: mol_type = other DNA
cgagcctgatgctgcttgtcctgaatgttgtcggcacacccaggagctatgctggggataaacttatgagttcaa

SEQ ID NO: 258205 - DNA, 75 bp, synthetic construct
  source 1..75: mol_type = other DNA
agttcacaactcatcatgccctgtccccgtcgccacttatgatatttcgtggagtgaagattatgttgcccattc

SEQ ID NO: 258206 - DNA, 75 bp, synthetic construct
  source 1..75: mol_type = other DNA
ccttctgggtggggctgtgggtttcttgaatttgaagttattgtttcagcggatattgaatcctacttttcttgc

SEQ ID NO: 258207 - DNA, 75 bp, synthetic construct
  source 1..75: mol_type = other DNA
cgcttggcaggtaaaaatcagtagtgctgatgaaaaagaaactgcgcatgagcaggcaagaatgcaggcacggta

SEQ ID NO: 258208 - DNA, 75 bp, synthetic construct
  source 1..75: mol_type = other DNA
tgcttgcggctctgttaggacaacaactgcaaccggttgataagcaaatgctgaataatttaaaaacaaatgcga

SEQ ID NO: 258209 - DNA, 75 bp, synthetic construct
  source 1..75: mol_type = other DNA
cctacggcattgatgcggcgctgaaatctgccgacgtgcaactggtgacctatgtcccgccaccgtcagaaacca

SEQ ID NO: 258210 - DNA, 75 bp, synthetic construct
  source 1..75: mol_type = other DNA
gcgtgtaaagcagcctgtaacgcctttaccgatgcagtgctggaaatcgcgcgtaatccaatccagcgtgcgtaa

SEQ ID NO: 258211 - DNA, 75 bp, synthetic construct
  source 1..75: mol_type = other DNA
catgattatgcgcctgctattcgcggactagtgctggcatctccggcctttaaggttaaattgtatgtgccgctg

SEQ ID NO: 258212 - DNA, 75 bp, synthetic construct
  source 1..75: mol_type = other DNA
agagaataacagtggtttcagctttgtgtttttctgtattatatacaaatacagctttcgctgtctggcccgtca

SEQ ID NO: 258213 - DNA, 75 bp, synthetic construct
  source 1..75: mol_type = other DNA
cgatatggtggtgcatgtggatacgacagaacgacaaccaatagactcaacttgccggttcacgtatgtgttgaa

SEQ ID NO: 258214 - DNA, 75 bp, synthetic construct
  source 1..75: mol_type = other DNA
aatttacagtaacaggagaggtcagcgggtgcccgtggctggtaacggtacgtgttatcagccattctgctaccg

SEQ ID NO: 258215 - DNA, 75 bp, synthetic construct
  source 1..75: mol_type = other DNA
aggtcgagaatatttatcggccttttcgagctttgtctccagaagcactgctggaacaaacgccattgattccgt

SEQ ID NO: 258216 - DNA, 75 bp, synthetic construct
  source 1..75: mol_type = other DNA
ctgttgagcagattgaggttgctgaagcggcaaaaagaaatcttatagggaacttgcccgttgaaccattgaaga

SEQ ID NO: 258217 - DNA, 75 bp, synthetic construct
  source 1..75: mol_type = other DNA
agcaggatcgaatacaagctcagctaaagaggctttatctgaaaacagcgttaagatgtttacacaagcaaatac

SEQ ID NO: 258218 - DNA, 75 bp, synthetic construct
  source 1..75: mol_type = other DNA
taacgttcgtcgggtgcgcattcttatctttaccctttcgggattattagcggcggtgaccggcattttgctggc

SEQ ID NO: 258219 - DNA, 75 bp, synthetic construct
  source 1..75: mol_type = other DNA
atgtctgcttcgtcattaccattgccgcagggcaagagcgtctcgctcaaacaatttgtcagtcgccatattaat

SEQ ID NO: 258220 - DNA, 75 bp, synthetic construct
  source 1..75: mol_type = other DNA
cgatgcataaggcttttagcaattataaaattaacttccctgtaaaatttgatggtagtaatgagtttttctatt

SEQ ID NO: 258221 - DNA, 75 bp, synthetic construct
  source 1..75: mol_type = other DNA
gaccgatggtggcttttgtctcggtgtgcctggcatttttgctgcaatttaacgttccgctggcgattgcttgtc

SEQ ID NO: 258222 - DNA, 75 bp, synthetic construct
  source 1..75: mol_type = other DNA
ttgacgaaaacgaggtgctggactggctgggcggacaatttctcggtgtgccggtatccgcgctgatcatgatgg

SEQ ID NO: 258223 - DNA, 75 bp, synthetic construct
  source 1..75: mol_type = other DNA
tgattacgctaatcggtaacggtctggtgctgctcgggattaactcctttttccagcaggtggtgcgcggcgtca

SEQ ID NO: 258224 - DNA, 75 bp, synthetic construct
  source 1..75: mol_type = other DNA
gcaacaaatttaatatgctggcaagttgcggacacggcgctggcggcttgttgctggcggggcataccgataccg

SEQ ID NO: 258225 - DNA, 75 bp, synthetic construct
  source 1..75: mol_type = other DNA
tgagaaattactcggtgcaaagaccgaagtggtgaactactgtaccgaagcgccgtttattcagacgttatgccc

SEQ ID NO: 258226 - DNA, 75 bp, synthetic construct
  source 1..75: mol_type = other DNA
tgcacgacgccatcgggcatattttgcaattgcgcgataacctgaaagaacgttatcactacgaagcgtttaccg

SEQ ID NO: 258227 - DNA, 75 bp, synthetic construct
  source 1..75: mol_type = other DNA
atgagaatattcatcgtattagctggtcttttattgggatgctggacgttatttgataactacagatcctataaa

SEQ ID NO: 258228 - DNA, 75 bp, synthetic construct
  source 1..75: mol_type = other DNA
gatgaagaaaccagtatggccggagcgcgttattttgccgaaactaccgccctgcgcccggattgcgccatcatt

SEQ ID NO: 258229 - DNA, 75 bp, synthetic construct
  source 1..75: mol_type = other DNA
ccctgcgcccggattgcgccatcattggcgaaccgacgtcactgcaaccggtacgcgcacataaaggtcatatct

SEQ ID NO: 258230 - DNA, 75 bp, synthetic construct
  source 1..75: mol_type = other DNA
cggtacggcactttccggcggacgcggttctctgttcggtacgttgcttggtgtgctggtgattacgttaatcgg

SEQ ID NO: 258231 - DNA, 75 bp, synthetic construct
  source 1..75: mol_type = other DNA
atgatcatcgcccagacccagcgcgaaggattaagcgaggaagcggcgcggcagaaagtctttatggtcgatcgc

SEQ ID NO: 258232 - DNA, 75 bp, synthetic construct
  source 1..75: mol_type = other DNA
ggatattggcccctaatggcagcctgtatatgtttaccggctctcgccttgcgtcaaaaattgaattattaactc

SEQ ID NO: 258233 - DNA, 75 bp, synthetic construct
  source 1..75: mol_type = other DNA
cgactgaaactggtgtattagaggtaataggttctggaattcaaaatttctttctctctgtatatctttatggtg

SEQ ID NO: 258234 - DNA, 75 bp, synthetic construct
  source 1..75: mol_type = other DNA
gaaaggatgcttgatgctctggatgaccaggagctggtgaaactggttactgaacgtagcagtcaacctctgcat

SEQ ID NO: 258235 - DNA, 75 bp, synthetic construct
  source 1..75: mol_type = other DNA
atgcctaacatcattctgtctgacaccagtgcaagtgtcagtgaactcaagaaaaatccgatggctacagtcagt

SEQ ID NO: 258236 - DNA, 75 bp, synthetic construct
  source 1..75: mol_type = other DNA
ctactgtgttccagctgagctctatgaaaggatgcttgatgccctagatgaccaggagctggtgaaactggttac

SEQ ID NO: 258237 - DNA, 75 bp, synthetic construct
  source 1..75: mol_type = other DNA
gtagcaatgaatttttttattacaggccggaagtattcgacatggtagaagaagcatataaagagattgtttgct

SEQ ID NO: 258238 - DNA, 75 bp, synthetic construct
  source 1..75: mol_type = other DNA
aactttggctatgaagagatgttgagcgagctggaagcgatagtagccgacgccgaaacgcggttagccgaggat

SEQ ID NO: 258239 - DNA, 75 bp, synthetic construct
  source 1..75: mol_type = other DNA
aattttggctatgaagagatgttgagcgagctggaagccatcgtcgcggatgctgaaacgcgtttagccgaggat

SEQ ID NO: 258240 - DNA, 75 bp, synthetic construct
  source 1..75: mol_type = other DNA
cctcaacgtgatggccgggccggtgcgcaaatggatgttcacgtgggaagaggaccatgcgtggataaacaaaac

SEQ ID NO: 258241 - DNA, 75 bp, synthetic construct
  source 1..75: mol_type = other DNA
gagcgctgtctggtgctggtggccgggcgcgctttcatcagcactccttctgcacagtttactgatatcggggag

SEQ ID NO: 258242 - DNA, 75 bp, synthetic construct
  source 1..75: mol_type = other DNA
gttacggccctgcttcactgtacggctacaaaggcaggggccgcacctttggtctgagttactcagtattattct

SEQ ID NO: 258243 - DNA, 75 bp, synthetic construct
  source 1..75: mol_type = other DNA
agcttaacgcgggtaaaaagaccagtatcatgcccgccggtgaatggctgctggacaattattatctgattgagg

SEQ ID NO: 258244 - DNA, 75 bp, synthetic construct
  source 1..75: mol_type = other DNA
gcttcggggagcatggcctgccgctgatgggggctggtgactggaatgacgggatgaaccgggtgggtatcgaag

SEQ ID NO: 258245 - DNA, 75 bp, synthetic construct
  source 1..75: mol_type = other DNA
tcaggagacgctggcccgctacatgaacgaggatacggtccgccaggagctgaaccggattcataatcactggca

SEQ ID NO: 258246 - DNA, 75 bp, synthetic construct
  source 1..75: mol_type = other DNA
cagaaacaacgctcacaaagacacttacccgggcgtttctctgggcgaagacccgacccaatgagcttaaaggaa

SEQ ID NO: 258247 - DNA, 75 bp, synthetic construct
  source 1..75: mol_type = other DNA
ccgaccacgtttttatctgttacatcgtcagcctgaatggaacccctcggaaggagtgtggatgggctacgaacg

SEQ ID NO: 258248 - DNA, 75 bp, synthetic construct
  source 1..75: mol_type = other DNA
aattactggggataaaacgttccggcactgactttagtgttcatgcccggtttccggatgagtggtcgtcttttt

SEQ ID NO: 258249 - DNA, 75 bp, synthetic construct
  source 1..75: mol_type = other DNA
agcggacaagacgaggaagtgttgttcaccgatgcgggggcagaattcagacgcagcttagggggactcagcgtc

SEQ ID NO: 258250 - DNA, 75 bp, synthetic construct
  source 1..75: mol_type = other DNA
gtgaagccgcatctgttactggtgggggcgggcgcgctaaagcgtctgtcaggtatcagccttaattttgcgata

SEQ ID NO: 258251 - DNA, 75 bp, synthetic construct
  source 1..75: mol_type = other DNA
atggatattcctcgcgaaattaaagaaattaacgaaatcattgaggttactgatcgccccgagtttaccctcatg

SEQ ID NO: 258252 - DNA, 75 bp, synthetic construct
  source 1..75: mol_type = other DNA
gatttataaagctgagccttatgtcatgagtgctgatgtctacagcgtcgctccccataccggacgtgcagggtg

SEQ ID NO: 258253 - DNA, 75 bp, synthetic construct
  source 1..75: mol_type = other DNA
aataccacaaccgacggtggcacaccgaacttctcctaccaatattggtctttcacttatggctaacctgacggc

SEQ ID NO: 258254 - DNA, 75 bp, synthetic construct
  source 1..75: mol_type = other DNA
ccgccatggttttggctacagcgtttttgcccatcgtgagagtggtatagacagcgagttgacggtcctggttgc

SEQ ID NO: 258255 - DNA, 75 bp, synthetic construct
  source 1..75: mol_type = other DNA
ctacgccgcttttcaggatatctcctacggtataacggggccgctggcaggaatgctggcgacctcatttggcta

SEQ ID NO: 258256 - DNA, 75 bp, synthetic construct
  source 1..75: mol_type = other DNA
gcctctccgccacaacgaaacggaaagcgtctattccgtcacctataaccgacgtctgctgaaaagcgccgtcag

SEQ ID NO: 258257 - DNA, 75 bp, synthetic construct
  source 1..75: mol_type = other DNA
cattcgcgatatcgctattgaaaacgcgtcaatggtggtactgaattttaccctgcaattcctggaaccttccga

SEQ ID NO: 258258 - DNA, 75 bp, synthetic construct
  source 1..75: mol_type = other DNA
cctgcataaagccggttttgagcatagcgagctgtggttccagtgctttaactttggttcactggtggcattaaa

SEQ ID NO: 258259 - DNA, 75 bp, synthetic construct
  source 1..75: mol_type = other DNA
ctagtgacggtatcgcagaacatgacacaaaaatacggactgtttcctatatggttggtcattgttgctattgtg

SEQ ID NO: 258260 - DNA, 75 bp, synthetic construct
  source 1..75: mol_type = other DNA
aagattgctgccgggaaggcgatatctgccgacgccattcctggtggttcggtagattacgataactttctgttc

SEQ ID NO: 258261 - DNA, 75 bp, synthetic construct
  source 1..75: mol_type = other DNA
ccaatctggcggccttcctgcaatccagctatgacattaatgatatttttaccgtcagcggtggcgtacgctatc

SEQ ID NO: 258262 - DNA, 75 bp, synthetic construct
  source 1..75: mol_type = other DNA
tccacaccgaggaggacacgcgaaaaaacctggcgcgagagctgcacgacgaaatcggtcagaacatcaccgcca

SEQ ID NO: 258263 - DNA, 75 bp, synthetic construct
  source 1..75: mol_type = other DNA
ggatgcgtgaacgcgtcagtgccctgggcggcgacttaatgctcgaaaaacataacggtacgcgggtaattgtta

SEQ ID NO: 258264 - DNA, 75 bp, synthetic construct
  source 1..75: mol_type = other DNA
gcgttgagaacctcttcgaccgtgactataccactgtctggggacagcgtgcacctctgtactacagcccgggtt

SEQ ID NO: 258265 - DNA, 75 bp, synthetic construct
  source 1..75: mol_type = other DNA
atgctggaaaacgtgatgctgaccgattccgtggaaacccataaagcacgcctgcataaagccggttttgagcat

SEQ ID NO: 258266 - DNA, 75 bp, synthetic construct
  source 1..75: mol_type = other DNA
tggagattttcctcgcgacccaggcattgctgggaattggcctgggcattgccatcagtcgccagcaacatctgg

SEQ ID NO: 258267 - DNA, 75 bp, synthetic construct
  source 1..75: mol_type = other DNA
gcgggcacgcgatccggcgcaagttcattccgcagccagccaaatcaacgaactcgcccgccgcattcatctctc

SEQ ID NO: 258268 - DNA, 75 bp, synthetic construct
  source 1..75: mol_type = other DNA
accgatttcacgtattaccgatgaccgcgtgaccgagtttggcgcgatggtgattaaagcggcgaaggaagtgac

SEQ ID NO: 258269 - DNA, 75 bp, synthetic construct
  source 1..75: mol_type = other DNA
tatggaatcgcaataaagaagcggtagaaacctgccacgcaaaagcggtagtgctggcaaccggaggcgcatcga

SEQ ID NO: 258270 - DNA, 75 bp, synthetic construct
  source 1..75: mol_type = other DNA
acgccactggtaaagaagtagaaactacgctggtgagcaaggcgcagagtcatccgaatattcgtgtactggaac

SEQ ID NO: 258271 - DNA, 75 bp, synthetic construct
  source 1..75: mol_type = other DNA
atgaaacgcctcggcgcagattgtatgttcctcgacatcagccataagcccgccgattttattcgccagcatttc

SEQ ID NO: 258272 - DNA, 75 bp, synthetic construct
  source 1..75: mol_type = other DNA
gggcgtgttacgcgatttgcacaaagccgcaattcctttgcgtatcagttggaatggcgggcagctgatcagcaa

SEQ ID NO: 258273 - DNA, 75 bp, synthetic construct
  source 1..75: mol_type = other DNA
cgttcgacggaaatactccaacagctagctatacattatctgacggaacaaataaaattccgttccaggctcttt

SEQ ID NO: 258274 - DNA, 75 bp, synthetic construct
  source 1..75: mol_type = other DNA
ggggtgttgtttgatacccacgttcaatcgaatggcgaagaaagttaccatttgacccgtgaaggtggacatagt

SEQ ID NO: 258275 - DNA, 75 bp, synthetic construct
  source 1..75: mol_type = other DNA
aggaagtctcagccctgctggttaagctgtttgaaatcgatccgcaggacatcaaacctgaagcgcgcctgtacg

SEQ ID NO: 258276 - DNA, 75 bp, synthetic construct
  source 1..75: mol_type = other DNA
atgtgtatccaccttaacttaatgatttttaccaaaatcattaagggattcatcagtgttaagcaggcgcaaatc

SEQ ID NO: 258277 - DNA, 75 bp, synthetic construct
  source 1..75: mol_type = other DNA
ttttttgatatgaataatgaaagctactatgcaaaatatacattagactttttagctgtttttatcattatgatt

SEQ ID NO: 258278 - DNA, 75 bp, synthetic construct
  source 1..75: mol_type = other DNA
cgcaggttgtgctggcgctactggatgaacgggaagcagacaaaaagcgcattgcagaactggaagcgcgggaaa

SEQ ID NO: 258279 - DNA, 75 bp, synthetic construct
  source 1..75: mol_type = other DNA
tgcgtgaggcagcagtagcaattgaaacagtggcaacgcctcaaaaattgctggcatttcgtatgaaagtcacac

SEQ ID NO: 258280 - DNA, 75 bp, synthetic construct
  source 1..75: mol_type = other DNA
ttgcggaaaaagcgccattgccggggaaatagaaatcgcgatgaaggctattggtgtaccagttcagtggactaa

SEQ ID NO: 258281 - DNA, 75 bp, synthetic construct
  source 1..75: mol_type = other DNA
gaaacccagggtgcgaaagtcgagtttactgttgaacaactacagcagagtgaatacttgcagcttccggcattt

SEQ ID NO: 258282 - DNA, 75 bp, synthetic construct
  source 1..75: mol_type = other DNA
tatgtttcacgtgctggattttacgtttcgacgcagccgacactgtttatgcgtgatgtgcctacgcgttactac

SEQ ID NO: 258283 - DNA, 75 bp, synthetic construct
  source 1..75: mol_type = other DNA
gctcgattttacctctttgcgcaatgctgttaccgagttcgaacaacggcgcgacgaacatgcctggcagatcga

SEQ ID NO: 258284 - DNA, 75 bp, synthetic construct
  source 1..75: mol_type = other DNA
gtcggtggtgaggagttttgtgtgattctgccaggcgcgagtctgacgcaggctgcggaggttgcagaacgtatt

SEQ ID NO: 258285 - DNA, 75 bp, synthetic construct
  source 1..75: mol_type = other DNA
gcgaattcacacgcttagcgaaggcgtacgcggcgattttggcagtatcagtattgccttaactctgctgtgggc

SEQ ID NO: 258286 - DNA, 75 bp, synthetic construct
  source 1..75: mol_type = other DNA
gaaaaaatggtccagcccttcacgccagccttccggtccttcacgctgcgttcgccagacgcgggccggatcctc

SEQ ID NO: 258287 - DNA, 75 bp, synthetic construct
  source 1..75: mol_type = other DNA
cgagcgataacgcttaatgggcggagaaaaaatggtccagcccttcacgccagccttccggtccttcacgctgcg

SEQ ID NO: 258288 - DNA, 75 bp, synthetic construct
  source 1..75: mol_type = other DNA
gtaaactgaaattattgacctcttccaacccggagaatcctaccgaagatctctttgatcctcgcgaactggcat

SEQ ID NO: 258289 - DNA, 75 bp, synthetic construct
  source 1..75: mol_type = other DNA
ctttcacaatcaccgcgtaatccattaccttcagtaagggcgcatcgtttggcccatcgcccaggccaagtgtgg

SEQ ID NO: 258290 - DNA, 75 bp, synthetic construct
  source 1..75: mol_type = other DNA
atgggcgcattgctggaaacggaaaaaccagccggattgcacgaaggcatgcgcttcgcacagattgaggtcaac

SEQ ID NO: 258291 - DNA, 75 bp, synthetic construct
  source 1..75: mol_type = other DNA
accttgctcacctggcgtgaagtggtggtgctggaagatgcctatatctccagccagcgtaatcatctggaaaac

SEQ ID NO: 258292 - DNA, 75 bp, synthetic construct
  source 1..75: mol_type = other DNA
ctggccttgctggcgcaggcaatggaacatgacacgcggggcggcattcgtatgaacagtcgctatgttagctgg

SEQ ID NO: 258293 - DNA, 75 bp, synthetic construct
  source 1..75: mol_type = other DNA
gctcttcacaaccatgttacttatctcctggtatgtgattcgccagatgggcagcaatatgtttgtcctgcaaag

SEQ ID NO: 258294 - DNA, 75 bp, synthetic construct
  source 1..75: mol_type = other DNA
atcagcgtagcagaagcctcacagctggccgtattgttccagactgatgaagacttctggattaacttgcaggcc

SEQ ID NO: 258295 - DNA, 75 bp, synthetic construct
  source 1..75: mol_type = other DNA
ccacagtcggtgaaatgttactggaagagttcatgaagccgttgggtattacgcagattgaactggctaaggcgc

SEQ ID NO: 258296 - DNA, 75 bp, synthetic construct
  source 1..75: mol_type = other DNA
acgttctttatatattaatggggattgtttttataagtttagtactgttagcggaaaagacttgcagcacattgt

SEQ ID NO: 258297 - DNA, 75 bp, synthetic construct
  source 1..75: mol_type = other DNA
atgaatcatcaattggctaatctcgatttccgggacatggtggttgtttctggtgatcgcgtgatcacaacctcc

SEQ ID NO: 258298 - DNA, 75 bp, synthetic construct
  source 1..75: mol_type = other DNA
tccgtacaccaacaaaccgtttgtgggcttttataccaccaaacgaaccggcggtatgctggtggattctcaggc

SEQ ID NO: 258299 - DNA, 75 bp, synthetic construct
  source 1..75: mol_type = other DNA
gctcatgaccgttgggagagccggaatattatagcgaataaccatttccgccctattcaggatctgctagcggag

SEQ ID NO: 258300 - DNA, 75 bp, synthetic construct
  source 1..75: mol_type = other DNA
cgtctgcttaaagacagcgagggtaactatctgtggcgtccggggctggaactggggcagccgtcctctctggcg

SEQ ID NO: 258301 - DNA, 75 bp, synthetic construct
  source 1..75: mol_type = other DNA
gacgcgcgcaacgacggaagaaatttgtcgattgaccagtccggaaacctgtgtggcggctattggtcaggctgg

SEQ ID NO: 258302 - DNA, 75 bp, synthetic construct
  source 1..75: mol_type = other DNA
cagagcaaagccgcaagcgaacataaaaccgctttcattggctttatgcgtaagggtaaagatgacgggctgcgc

SEQ ID NO: 258303 - DNA, 75 bp, synthetic construct
  source 1..75: mol_type = other DNA
gacactgtatttggtagtgggaaagaaggagttttatttacagagaactacttatgtcgaaaaagaatattcgaa

SEQ ID NO: 258304 - DNA, 75 bp, synthetic construct
  source 1..75: mol_type = other DNA
tatggggatccgcgattattttgccaacgatgccatctgcctggtggagtggccacaacaaggtacaggtgttct

SEQ ID NO: 258305 - DNA, 75 bp, synthetic construct
  source 1..75: mol_type = other DNA
gtttgacgattttaaggcaaaaaacgacaaacgtatcgaagcgatcgagcaggaaaagggaaaacttgccggaga

SEQ ID NO: 258306 - DNA, 75 bp, synthetic construct
  source 1..75: mol_type = other DNA
gaaacgatactcggctgaatttcagacgcagaacgagtatgtaaagggatggcagtcggccctaaagaaagcaca

SEQ ID NO: 258307 - DNA, 75 bp, synthetic construct
  source 1..75: mol_type = other DNA
cgaacgaaggcacgctgttctatgtctggtgcaggatggcaacgatatgtgggacgccactttcttctgcggttc

SEQ ID NO: 258308 - DNA, 75 bp, synthetic construct
  source 1..75: mol_type = other DNA
tggttatattaaagcattatttgttggtgttgacgcgccagcaaaccccaatattattgcgctacaaaccttcaa

SEQ ID NO: 258309 - DNA, 75 bp, synthetic construct
  source 1..75: mol_type = other DNA
ccgcctggacggaacgcgaagcgcgtagccgttgcccgtccggttgtgttgctgtattcgccgcccgtattcgtc

SEQ ID NO: 258310 - DNA, 75 bp, synthetic construct
  source 1..75: mol_type = other DNA
ttactgccgcggatatcccgccggagcattatgtcccgggctcgtacaccaacactcagtttgtggctaatattc

SEQ ID NO: 258311 - DNA, 75 bp, synthetic construct
  source 1..75: mol_type = other DNA
agcagagcaaatcagcacggtgctgaaaaccacggcttccgacctcggtgccccggggattgataatcgtttcgg

SEQ ID NO: 258312 - DNA, 75 bp, synthetic construct
  source 1..75: mol_type = other DNA
atgttgattgtgctgtcgctgaccgtttcttgccgttatatctggtggcgttacacctctacgctgaactgggac

SEQ ID NO: 258313 - DNA, 75 bp, synthetic construct
  source 1..75: mol_type = other DNA
acgctgaaatacacctgggacagcgtcagccgggatgccatcccgaccacaaacgtggaatatcagtacggtgat

SEQ ID NO: 258314 - DNA, 75 bp, synthetic construct
  source 1..75: mol_type = other DNA
acgtcaccagctgcggtaaccggcagaggcccttctgtaagagctcatcaaattgtgctgatgcacgttagcgag

SEQ ID NO: 258315 - DNA, 75 bp, synthetic construct
  source 1..75: mol_type = other DNA
atgaagcgattgtgtcccgtaaactggatgctgaacaccggcactatgcgaagcctatgcggtatgacgccagtg

SEQ ID NO: 258316 - DNA, 75 bp, synthetic construct
  source 1..75: mol_type = other DNA
ccctttattactatacctacatggtaattaccattgtacttgccattacacaaaaatcaacgccccgcagtgctg

SEQ ID NO: 258317 - DNA, 75 bp, synthetic construct
  source 1..75: mol_type = other DNA
acactggatgcaggcgtaattgtgggtcagtttgaggatatcagcgcggttcacggcaatccgggcataggggtt

SEQ ID NO: 258318 - DNA, 75 bp, synthetic construct
  source 1..75: mol_type = other DNA
ccgcagccctcttactgaccggctgcgccagccagtcacaagttgaccagctaaccaagcaggtgaatacgctca

SEQ ID NO: 258319 - DNA, 75 bp, synthetic construct
  source 1..75: mol_type = other DNA
aactcctttttccagcaggtggtgcgcggcgtcatcatcgtggtggcggtgctggcgaatatcttgctgacccag

SEQ ID NO: 258320 - DNA, 75 bp, synthetic construct
  source 1..75: mol_type = other DNA
agaatcattggtgaagtagatggcgatgatgaagccatcttcaggccaatacaaaaatacatcaatggcacatgg

SEQ ID NO: 258321 - DNA, 75 bp, synthetic construct
  source 1..75: mol_type = other DNA
ggtttacaggaaacggtaaacagggctggtaacgccgtgcaaaaaaatggcgataccttgtccggtgggcttact

SEQ ID NO: 258322 - DNA, 75 bp, synthetic construct
  source 1..75: mol_type = other DNA
gcactggaactggttgatacctccagtgctccagatattgaatggcctacgcatccggcagttcaggccagatga

SEQ ID NO: 258323 - DNA, 75 bp, synthetic construct
  source 1..75: mol_type = other DNA
gcataacgccgtcaccctgtgcaactgggtctggccaatgaccgtttcgccgctgaaaagccgtaattaccgggg

SEQ ID NO: 258324 - DNA, 75 bp, synthetic construct
  source 1..75: mol_type = other DNA
cttttgaggtgttcgaaagtggcggcagtaaagcacaaacaccgaatgtggatttgaaaacaattaatcagacta

SEQ ID NO: 258325 - DNA, 75 bp, synthetic construct
  source 1..75: mol_type = other DNA
aaccgtggcaagagccactggcggctggagcggtgattttacggcgttttgcttttaacgctgcggagcaactga

SEQ ID NO: 258326 - DNA, 75 bp, synthetic construct
  source 1..75: mol_type = other DNA
gtggtatggggcggtgaatcgcggctgttttatcacggcattcaaccgttgaaagcggggtttcatccactcacc

SEQ ID NO: 258327 - DNA, 75 bp, synthetic construct
  source 1..75: mol_type = other DNA
atgttggatctgtttgccgatgctgaaccgtggcaagaaccactggcggctggagcggtgattttgcaccgtttt

SEQ ID NO: 258328 - DNA, 75 bp, synthetic construct
  source 1..75: mol_type = other DNA
actgttgctggagcatggcgacgtggtggtttggggcggtgaatcgcggctgttttatcatggcgttcaaccgct

SEQ ID NO: 258329 - DNA, 75 bp, synthetic construct
  source 1..75: mol_type = other DNA
aaaaacggggtttcatccgctaactgccgactgtcgctacaatctgacattccgtcaggcaggtaaaaaagaata

SEQ ID NO: 258330 - DNA, 75 bp, synthetic construct
  source 1..75: mol_type = other DNA
aaacaaataatccgtggcctgtgatgccgcaaagttttcatgatttatgtcagcgtgcagccacggcggcgggct

SEQ ID NO: 258331 - DNA, 75 bp, synthetic construct
  source 1..75: mol_type = other DNA
aggctaccatgtgtgagaagctgcacgaactcgcagaagaactccagaacagcatccagacacgctttgaagtag

SEQ ID NO: 258332 - DNA, 75 bp, synthetic construct
  source 1..75: mol_type = other DNA
tggtgccggaagtgaacccgttcgtgctgaccgattaccgtaaccgcaacgttattgccgtaccggacagcctga

SEQ ID NO: 258333 - DNA, 75 bp, synthetic construct
  source 1..75: mol_type = other DNA
gaagcactgcgtccgctggcggcagaagaagcgcgtgatgcgtttgctcagggcgaagatattgtgctctctgaa

SEQ ID NO: 258334 - DNA, 75 bp, synthetic construct
  source 1..75: mol_type = other DNA
tctggtcggtggccgataacgttcgctttggcggcgcgctgatggcagtaaaaatcgccgagaaactggtgcagg

SEQ ID NO: 258335 - DNA, 75 bp, synthetic construct
  source 1..75: mol_type = other DNA
ggcggtaaattaccgatgcatgcttccggtgcgggtaaagcctttttagcccaattaagtgaagagcaggtgacg

SEQ ID NO: 258336 - DNA, 75 bp, synthetic construct
  source 1..75: mol_type = other DNA
aggcgaagatattgtgctctctgaagagaacgaattcccgactcaggtgggtgacgcttccgggtctccgcatct

SEQ ID NO: 258337 - DNA, 75 bp, synthetic construct
  source 1..75: mol_type = other DNA
tggtgccggaagtaaacccgtttgtactgaccgattaccgcaaccgaaatgtcatcgccgtaccggacagtctga

SEQ ID NO: 258338 - DNA, 75 bp, synthetic construct
  source 1..75: mol_type = other DNA
tcaacatggcgggattcataaaaagtcagagcctgacgctgctcgaaaaactggacgcactcaatgccgacgaac

SEQ ID NO: 258339 - DNA, 75 bp, synthetic construct
  source 1..75: mol_type = other DNA
aatgcgacgcctgaaagcgcgcgcatcatgatggaagtcatccgcgacatgggcgtagaaaaaaccgttggtttc

SEQ ID NO: 258340 - DNA, 75 bp, synthetic construct
  source 1..75: mol_type = other DNA
ggatctgagatggcaggggccggagtggatgtggcaatccggtgatgatatttcttctctgggggaagcgccgcc

SEQ ID NO: 258341 - DNA, 75 bp, synthetic construct
  source 1..75: mol_type = other DNA
gcaactggcgttttttgttgcaggtaaagaagctaccgccgcctgggttgaagaagccactaacgcgggatgtct

SEQ ID NO: 258342 - DNA, 75 bp, synthetic construct
  source 1..75: mol_type = other DNA
atgtctgaaggctggaacattgccgtcctgggcgcaactggcgctgtgggcgaagccctgcttgaaacgctggct

SEQ ID NO: 258343 - DNA, 75 bp, synthetic construct
  source 1..75: mol_type = other DNA
gaaacccggtgaactgcagctgctttacctcacaccatcgaagaaaggttcattcctcagagggacccgcccatg

SEQ ID NO: 258344 - DNA, 75 bp, synthetic construct
  source 1..75: mol_type = other DNA
agcgaagcgctgaagctggcgctggcgcgcggcctgcgcgatgcgggcgtcgatgtgcttgatattggcctttcc

SEQ ID NO: 258345 - DNA, 75 bp, synthetic construct
  source 1..75: mol_type = other DNA
ccggacacgcctttattaaagaacgtatgcgcaaggaagacgccatctacggtggcgaaatgagcgcgcatcatt

SEQ ID NO: 258346 - DNA, 75 bp, synthetic construct
  source 1..75: mol_type = other DNA
caccgttgacgtggtgtcagcggcaggcggcacgccggtgatgtccaaaaccggtcacgcgtttattaaagagcg

SEQ ID NO: 258347 - DNA, 75 bp, synthetic construct
  source 1..75: mol_type = other DNA
tcgccgataaggcgacaggcgacgacatcattttctgccaggacgacacgctgatcggtaaaggcgctggtggta

SEQ ID NO: 258348 - DNA, 75 bp, synthetic construct
  source 1..75: mol_type = other DNA
cggtagtggacgccattgaagcccgctttaacgccctcggcgcacctgtggaattcatcaaagtgcacaacacgc

SEQ ID NO: 258349 - DNA, 75 bp, synthetic construct
  source 1..75: mol_type = other DNA
cattgaagtcaccgccagtcataatccgatggattacaacggcatgaagctggtgcgcgaaggcgcgcgtccaat

SEQ ID NO: 258350 - DNA, 75 bp, synthetic construct
  source 1..75: mol_type = other DNA
tggcgcattggtcgcgcctatggcgaatttctcaaaccgaaaaccattgtgttaggcggtgatgtccgtctcacc

SEQ ID NO: 258351 - DNA, 75 bp, synthetic construct
  source 1..75: mol_type = other DNA
gcagtatgaatccaggaaggtcgagttgcgcgacaaagggctgagcaatgcggactatgaagccggttgtcgtca

SEQ ID NO: 258352 - DNA, 75 bp, synthetic construct
  source 1..75: mol_type = other DNA
atgaatcgagtaattccgctccctgatgagcaggcaacattagacctgggcgagcgggtagcgaaagcctgcgat

SEQ ID NO: 258353 - DNA, 75 bp, synthetic construct
  source 1..75: mol_type = other DNA
aactccgggaatggcgcagcgggtccggtggtggacgccattgaagcccgctttaaagccctcggcgcacccgtg

SEQ ID NO: 258354 - DNA, 75 bp, synthetic construct
  source 1..75: mol_type = other DNA
gattgaagtcacggccagccataacccgatggattacaacggtatgaagctggtgcgcaagggtgcgcgccctat

SEQ ID NO: 258355 - DNA, 75 bp, synthetic construct
  source 1..75: mol_type = other DNA
tttcgccacgttccatctcggtgtggatggcggcattgaagttaccgccagccataacccgatggattacaacgg

SEQ ID NO: 258356 - DNA, 75 bp, synthetic construct
  source 1..75: mol_type = other DNA
gatcaggaaaacagccgtatttttctgccgaaactgggctggatgcgctaccggaacagccgtcaggtcacggga

SEQ ID NO: 258357 - DNA, 75 bp, synthetic construct
  source 1..75: mol_type = other DNA
tctacatgattaataactcaaggacagccaatggcaccgatggtcaggcgtacatggataataacggtaactggc

SEQ ID NO: 258358 - DNA, 75 bp, synthetic construct
  source 1..75: mol_type = other DNA
ccgggcttggtattgtcggtgaagtcgatggtgatgaccccgcagtattcaggccaatacaaaaatacatcaatg

SEQ ID NO: 258359 - DNA, 75 bp, synthetic construct
  source 1..75: mol_type = other DNA
gcgtgttaatccctcggattacggtaactttgattcccgctatgtgagagatatcagacttggcacacgtgttgt

SEQ ID NO: 258360 - DNA, 75 bp, synthetic construct
  source 1..75: mol_type = other DNA
caaaagaccggaacggagcagatattcccaataagccgctgtttatccaaaacgtcggtttacaggaaacggtaa

SEQ ID NO: 258361 - DNA, 75 bp, synthetic construct
  source 1..75: mol_type = other DNA
gaattcattaataaagcaaataatgccgttcagcgttcaggcgatatcttgtccggcggacttacttttgaaaac

SEQ ID NO: 258362 - DNA, 75 bp, synthetic construct
  source 1..75: mol_type = other DNA
ataccgcgacgaaattgaaaacagccagaaacattaatggcgtcaggttcgatggttctggtgacattaatatca

SEQ ID NO: 258363 - DNA, 75 bp, synthetic construct
  source 1..75: mol_type = other DNA
aaactaatccgtccacaacaacgtggtcgttttttctcgctgttgatgatgcaggacagtgccggtgcggtcatt

SEQ ID NO: 258364 - DNA, 75 bp, synthetic construct
  source 1..75: mol_type = other DNA
cgggactcggcggcacgttgtttgatccgccgcgttcggcgctggtggtgaaactaatccgtccacaacagcgtg

SEQ ID NO: 258365 - DNA, 75 bp, synthetic construct
  source 1..75: mol_type = other DNA
cttcgcaggcgcatgtcgtttcgttttcaatcgtgctctggcgcttcagaatgagaatcatgaggccggtaataa

SEQ ID NO: 258366 - DNA, 75 bp, synthetic construct
  source 1..75: mol_type = other DNA
cgaccgttatcgcaggggaagatgcgcagaaagatgtcggtgaagcgaagtacaacccattcgctgacctgaaag

SEQ ID NO: 258367 - DNA, 75 bp, synthetic construct
  source 1..75: mol_type = other DNA
tgatttatcagaggtcatcatcaatgctgtcatgcttgccgctgttctgaagacgcgcggcaatgtcgtgcagat

SEQ ID NO: 258368 - DNA, 75 bp, synthetic construct
  source 1..75: mol_type = other DNA
aatgggtatcgcccacgaaccgtggctattgtggttttcatgcctgctctcgggactcggcggcacgttgtttga

SEQ ID NO: 258369 - DNA, 75 bp, synthetic construct
  source 1..75: mol_type = other DNA
gggacatgccgtatgaatcctgttgaactggtccgaaaacccaaaatcagtagtggacgcgatcgtcgcctgact

SEQ ID NO: 258370 - DNA, 75 bp, synthetic construct
  source 1..75: mol_type = other DNA
tcgttgcccggcaacatggtgtggcagccagccagttatttctctggcgtaagcaataccaggaaggaagtctta

SEQ ID NO: 258371 - DNA, 75 bp, synthetic construct
  source 1..75: mol_type = other DNA
cggagaaacgcagacggcgtaccacacaggaaaagatcgcaattgttcagcagagctttgaaccggggatgacgg

SEQ ID NO: 258372 - DNA, 75 bp, synthetic construct
  source 1..75: mol_type = other DNA
agaagaggcaccgtccgttgaggtgaaaaaagaagacggagcatcgaaaaacaccagtatgacctcggtgctgaa

SEQ ID NO: 258373 - DNA, 75 bp, synthetic construct
  source 1..75: mol_type = other DNA
aacatggtgtagcagccagccagttatttctctggcgtaagcaataccaggaaggaagtcttactgctgtggccg

SEQ ID NO: 258374 - DNA, 75 bp, synthetic construct
  source 1..75: mol_type = other DNA
aagcagtatcaggaaggcagcctcaccgccgttgccgcagtagaacaggttgtgcccgcttcggagctggcctct

SEQ ID NO: 258375 - DNA, 75 bp, synthetic construct
  source 1..75: mol_type = other DNA
ctcggcaaaaaaacgatggaaaatgaactccttaaagaagccgttgaatacgggcgtgcaaaaaagtggatagcg

SEQ ID NO: 258376 - DNA, 75 bp, synthetic construct
  source 1..75: mol_type = other DNA
gccatgaagcagattaaagaactccagcgcctgctcggcaaaaaaacgatggaaaatgaactcctcaaagaagcc

SEQ ID NO: 258377 - DNA, 75 bp, synthetic construct
  source 1..75: mol_type = other DNA
agcaacttccgcaagccgaccaacctgtttgttcacggctatgtgacggtgaacggcgcgaagatgtccaagtct

SEQ ID NO: 258378 - DNA, 75 bp, synthetic construct
  source 1..75: mol_type = other DNA
tcaggaaaccatcacctttgacgacttcgcaaaagttgacctgcgcgtggcgctgatcgaaaaacgaagagtttg

SEQ ID NO: 258379 - DNA, 75 bp, synthetic construct
  source 1..75: mol_type = other DNA
gtttactgtggcctgacattcttcattccattcctgaaaaacatctatctattgcccgttgcgctggtgggggct

SEQ ID NO: 258380 - DNA, 75 bp, synthetic construct
  source 1..75: mol_type = other DNA
gtttggcttcttcgaaacagggcgtggcattgtcgataccgtggtggcattttctgcgttggcagtatttacctg

SEQ ID NO: 258381 - DNA, 75 bp, synthetic construct
  source 1..75: mol_type = other DNA
tggaagttgagatcctcaaagaagccgcggagtacaccactctacagtagttgcgcaaagtcggagtggacgata

SEQ ID NO: 258382 - DNA, 75 bp, synthetic construct
  source 1..75: mol_type = other DNA
atgacggtctccctcgttgcccggcaacatggtgtagcagccagccagttatttctctggcgtaagaaataccag

SEQ ID NO: 258383 - DNA, 75 bp, synthetic construct
  source 1..75: mol_type = other DNA
ctcgggtattgcccatagtgaaatcagtctggtgttgaatacgttacgcgagaaagaacatttcaaattcaccac

SEQ ID NO: 258384 - DNA, 75 bp, synthetic construct
  source 1..75: mol_type = other DNA
gtagccaggcggcgctgacgcagctgcatattgctggcgtgttccggttgcgaagtgaaccagcgtaccgcgcgg

SEQ ID NO: 258385 - DNA, 75 bp, synthetic construct
  source 1..75: mol_type = other DNA
cgaaatcagccaggttttaaatacgctacgcgagaaagaacattttaaattcacaacttttgatgatgtcgacga

SEQ ID NO: 258386 - DNA, 75 bp, synthetic construct
  source 1..75: mol_type = other DNA
gcaggtagtggcaacggtgctgaacgatgaggcgttgaaagccagttggctggcggaagtagaagaaatgcggac

SEQ ID NO: 258387 - DNA, 75 bp, synthetic construct
  source 1..75: mol_type = other DNA
gtcagcgatcctacctgggaaaaccacgtagcaatattcgccggggctggattcgaagtgagtacttacccctgg

SEQ ID NO: 258388 - DNA, 75 bp, synthetic construct
  source 1..75: mol_type = other DNA
tgccggggcgtaatttcgattatctgcttaagcaacgcggtatgttcagctataccggtttaagcgccgcccagg

SEQ ID NO: 258389 - DNA, 75 bp, synthetic construct
  source 1..75: mol_type = other DNA
atgggctggcaaaagtgtagcggtattaagcgcagctatttagtttttagactagtcattggagtacagatgatt

SEQ ID NO: 258390 - DNA, 75 bp, synthetic construct
  source 1..75: mol_type = other DNA
taccaggaaggaagtcttactgctgtcgccgccggagaacaggttgttcctgcctctgaacttgctgccgccatg

SEQ ID NO: 258391 - DNA, 75 bp, synthetic construct
  source 1..75: mol_type = other DNA
tcggcaaaaaaacgatggaaaatgaactccttaaagaagccgttgaatacgggcgtgcaaaaaagtggatagcgc

SEQ ID NO: 258392 - DNA, 75 bp, synthetic construct
  source 1..75: mol_type = other DNA
ggccgcaggagagcaggtcgtttctgcctctgaacttgctgctgccatgaagcagattaaagaactccagcgcct

SEQ ID NO: 258393 - DNA, 75 bp, synthetic construct
  source 1..75: mol_type = other DNA
ttgttgcccggcaacacggtgtggctgccagccagttatttctctggcgtatcattaccttgaaggaagcttcac

SEQ ID NO: 258394 - DNA, 75 bp, synthetic construct
  source 1..75: mol_type = other DNA
tgatgtcttagggccggagaaacgcagacggcgtaccacacaggaaaagatcgcaattgttcagcagagctttga

SEQ ID NO: 258395 - DNA, 75 bp, synthetic construct
  source 1..75: mol_type = other DNA
gagttcggttgcgatgatggcgaaaaactgcgtgttacgttcgtcctggactgttgcgatcgtgaagccatagac

SEQ ID NO: 258396 - DNA, 75 bp, synthetic construct
  source 1..75: mol_type = other DNA
agccgcagagcgtgttctggggcaactgaaagccacggtacggcgtatttattccagcccgccgaattttggcgc

SEQ ID NO: 258397 - DNA, 75 bp, synthetic construct
  source 1..75: mol_type = other DNA
ttgaccgactacgtgaagaatttggtgtctatctcatcgccagcggtcgcatgtgtgtcgccgggcttaacgcgc

SEQ ID NO: 258398 - DNA, 75 bp, synthetic construct
  source 1..75: mol_type = other DNA
ttacaatgaaacccatccgcatagtgcgttaggttatctctcaccaagggaatatcgacgtcagcgggtaacgtc

SEQ ID NO: 258399 - DNA, 75 bp, synthetic construct
  source 1..75: mol_type = other DNA
tctggagccctgcacgacggcagtcagtagccctcagagcaatggaatggcagaaaggttcgtgaaaacgatgaa

SEQ ID NO: 258400 - DNA, 75 bp, synthetic construct
  source 1..75: mol_type = other DNA
agcttagtcagccgttgtctccgggtgtcgcgtgcgcagttgtacgtcattctcagacgaaccgatgactggatg

SEQ ID NO: 258401 - DNA, 75 bp, synthetic construct
  source 1..75: mol_type = other DNA
aacgattgctaaatcatattaatatcaattatcctgatgaaatatcgataataattactgatagaagtgcaattg

SEQ ID NO: 258402 - DNA, 75 bp, synthetic construct
  source 1..75: mol_type = other DNA
gtgcgactgaaaaattgcgtaaggttcgccagcgatgcggcgaggtgttccggtacgcaatcatcaccggacgcg

SEQ ID NO: 258403 - DNA, 75 bp, synthetic construct
  source 1..75: mol_type = other DNA
aaaagaatgcgcgtacattcgcaagaaaaaacgacgctgaatattttctctcctgtcagtatcaggattcagaaa

SEQ ID NO: 258404 - DNA, 75 bp, synthetic construct
  source 1..75: mol_type = other DNA
gacgaggcattgaaagccagctggctggcggaagtagaagagatgcgaactcgcattctggcaatgcgtcaggaa

SEQ ID NO: 258405 - DNA, 75 bp, synthetic construct
  source 1..75: mol_type = other DNA
aagtgggtgcagatttcctgaaacgctacttcccggaatcaggcgtctgggtcagcgatcctacctgggaaaacc

SEQ ID NO: 258406 - DNA, 75 bp, synthetic construct
  source 1..75: mol_type = other DNA
gtgtttcaaaaagttgacgcctacgctggcgacccgattcttacgcttatggagcgttttaaagaagaccctcgc

SEQ ID NO: 258407 - DNA, 75 bp, synthetic construct
  source 1..75: mol_type = other DNA
aacacggtgtggcagccagccagttatttctctggcgcaagcaataccaggagggaagtcttactgctgtggccg

SEQ ID NO: 258408 - DNA, 75 bp, synthetic construct
  source 1..75: mol_type = other DNA
cttcatcggtaaagatattgtttacttccacagcctgttctggccagcaatgctggaaggcagcaacttccgcaa

SEQ ID NO: 258409 - DNA, 75 bp, synthetic construct
  source 1..75: mol_type = other DNA
cggtggtgaaaagcgtaatgtcttctcaggcatccgttccgcttatccagatccacaggcactgattggtcgtca

SEQ ID NO: 258410 - DNA, 75 bp, synthetic construct
  source 1..75: mol_type = other DNA
ccgatatcgttaacaaagtggttaacctggcctcccgtaatgcgggctttatcaacaagcgttttgacggcgtgc

SEQ ID NO: 258411 - DNA, 75 bp, synthetic construct
  source 1..75: mol_type = other DNA
ccgattcaggaaaccatcacctttgacgacttcgccaaagttgacctgcgcgtggcgctgatcgaaaacgcagag

SEQ ID NO: 258412 - DNA, 75 bp, synthetic construct
  source 1..75: mol_type = other DNA
gatccacaggcactgattggtcgtcacaccattatggtggctaacctggcaccacgtaaaatgcgcttcggtatc

SEQ ID NO: 258413 - DNA, 75 bp, synthetic construct
  source 1..75: mol_type = other DNA
gctgaagtgattggcgaagcatgggaaagccgcgaatttggtaaagctatccgtgaaatcatggcactggctgac

SEQ ID NO: 258414 - DNA, 75 bp, synthetic construct
  source 1..75: mol_type = other DNA
ttgcccggcaacatggtgtagcagccagccagttatttctctggggtaagcaataccaggaaggaagtcttactg

SEQ ID NO: 258415 - DNA, 75 bp, synthetic construct
  source 1..75: mol_type = other DNA
ttggctggccgctggaaaaagccagaaatgcgctcgaacagctcttttctgccgggacgttacgtaaacgcagta

SEQ ID NO: 258416 - DNA, 75 bp, synthetic construct
  source 1..75: mol_type = other DNA
acgaagtgcttgaccctggtcgcttaacgctggtggtggaaggcgatctggcggcgtgtcgtgcggcgctggacg

SEQ ID NO: 258417 - DNA, 75 bp, synthetic construct
  source 1..75: mol_type = other DNA
agcactgtataaccgtatcgacatgaaacaggtggaagcattggtggaagcgtctaaagaagaagtgaaagctac

SEQ ID NO: 258418 - DNA, 75 bp, synthetic construct
  source 1..75: mol_type = other DNA
tccccggatcaatacggcgataactgcgaagtctgcggcgcgacctacagcccgactgaattgatcgagccgaaa

SEQ ID NO: 258419 - DNA, 75 bp, synthetic construct
  source 1..75: mol_type = other DNA
tgttctgcagagctttgaaccggggatgacggtctccctcgttgcccggcaacatggtgtagcagccagccagtt

SEQ ID NO: 258420 - DNA, 75 bp, synthetic construct
  source 1..75: mol_type = other DNA
tacgctgacggtaaacggtgattataccggcggcggtacgctactgctcgatagcgaattaaacggcgatgactc

SEQ ID NO: 258421 - DNA, 75 bp, synthetic construct
  source 1..75: mol_type = other DNA
gatactggtgccgtcgatttacgtgtcactaacgccatgtttcgcaataacatcgctaatgatggcaaaggtggc

SEQ ID NO: 258422 - DNA, 75 bp, synthetic construct
  source 1..75: mol_type = other DNA
cggcggtgacgggaaagatggcgtctacgtggtggtcgatgcgggcgacgggcaggtaagtctggcaaacaataa

SEQ ID NO: 258423 - DNA, 75 bp, synthetic construct
  source 1..75: mol_type = other DNA
cggcaaatcaggcgtttgtgatggagcgacacgatcacgctggtggcgatggtcagacgctgaatttacgtgtta

SEQ ID NO: 258424 - DNA, 75 bp, synthetic construct
  source 1..75: mol_type = other DNA
cccgacccggccccggaccctacgcctgcttatcagccggtgttgaatgccaaagttggtggatattttaataac

SEQ ID NO: 258425 - DNA, 75 bp, synthetic construct
  source 1..75: mol_type = other DNA
cagccggtgttgaatgccaaagttggcggttatctcaataacctgcgggcggcaaatcaggcgtttatgatggag

SEQ ID NO: 258426 - DNA, 75 bp, synthetic construct
  source 1..75: mol_type = other DNA
tttccggctcgattcagggtgaaggacagttgacggtagcgcaagatggcagctatctcctgacaggggcgcagt

SEQ ID NO: 258427 - DNA, 75 bp, synthetic construct
  source 1..75: mol_type = other DNA
cggtgcgcaagctccggcgctgtatgccatttcattgctggtggtattcctgtgtctggctgcactttatgaaag

SEQ ID NO: 258428 - DNA, 75 bp, synthetic construct
  source 1..75: mol_type = other DNA
ggatgcgcgggctggaaaacgacgtttacttccaggtgggcctgttaacggtcattggtttatcggcgaaaaacg

SEQ ID NO: 258429 - DNA, 75 bp, synthetic construct
  source 1..75: mol_type = other DNA
ggcggtacgctactgctcgacagcgaattaaacggcgatgactcggcaagtgaccaactggtattgaacggcaat

SEQ ID NO: 258430 - DNA, 75 bp, synthetic construct
  source 1..75: mol_type = other DNA
ggatggcgtagatacgcaatggggcgggttgatggcggatagtaccgggcaacaactggatagcgtaagcacgtt

SEQ ID NO: 258431 - DNA, 75 bp, synthetic construct
  source 1..75: mol_type = other DNA
cttaataccaaccttgaaactgacagcctgacttatctttccgacgtgacggttaatggcaatctgaccaatacg

SEQ ID NO: 258432 - DNA, 75 bp, synthetic construct
  source 1..75: mol_type = other DNA
gataccggtgtcgtcgatttaagtgtcactaacgccgtgtttcgcaataacatcgctaatgacggcaaaggtggt

SEQ ID NO: 258433 - DNA, 75 bp, synthetic construct
  source 1..75: mol_type = other DNA
atgacggatatcgatgacgaagcccgcaaagcagagcttgacgctaaacagcaacttctggcgcagcgcgacatt

SEQ ID NO: 258434 - DNA, 75 bp, synthetic construct
  source 1..75: mol_type = other DNA
ctttcaggtgaatgccacgaatgaagagctaaccgttgagtatacgatgaatgccgctaaatgccgcatggtatc

SEQ ID NO: 258435 - DNA, 75 bp, synthetic construct
  source 1..75: mol_type = other DNA
gagcgcggcgttgtcccctcatggtcgctggtccggtgcgatggtggaagaaaccggacgatgtgttacctcgca

SEQ ID NO: 258436 - DNA, 75 bp, synthetic construct
  source 1..75: mol_type = other DNA
cgatatcgcgatgtatcaggagaaaaaacacaaagagaaaacaccttttatcgcgcattctgacaggcattcctg

SEQ ID NO: 258437 - DNA, 75 bp, synthetic construct
  source 1..75: mol_type = other DNA
cccatttgctgcagtgttttatcagcggctctggctatttctctgatatcaattttttcaggtaataccggggga

SEQ ID NO: 258438 - DNA, 75 bp, synthetic construct
  source 1..75: mol_type = other DNA
atgactgatatcgatgacgaaggccgaaaagcagagattgacgccaaacagcaacttctggcgcagcgcgatatc

SEQ ID NO: 258439 - DNA, 75 bp, synthetic construct
  source 1..75: mol_type = other DNA
caaatcaggtgtggtgcggtgatattacttatagtgtgcccggagttcagggcgggcatggatgcttaaatgaac

SEQ ID NO: 258440 - DNA, 75 bp, synthetic construct
  source 1..75: mol_type = other DNA
cccgtggtaagcccgtcggggtgatgttccaagcgatcaaggcagtcattatacgagcaggcagttccggcagtt

SEQ ID NO: 258441 - DNA, 75 bp, synthetic construct
  source 1..75: mol_type = other DNA
ggtgatatggatttaaatatcactaatgcaatatttgagaataatatcgccaatgatggtaaaggtggcgctatt

SEQ ID NO: 258442 - DNA, 75 bp, synthetic construct
  source 1..75: mol_type = other DNA
gccgcacgaatataacggtgggttgccaccaaatgaatcggaaaaccgatactggaaaaactctaaagcggtggc

SEQ ID NO: 258443 - DNA, 75 bp, synthetic construct
  source 1..75: mol_type = other DNA
agcttcagcgatgcagctcacgccataacggactatatcgttggatattacagcgcactaagaccgcacgaatat

SEQ ID NO: 258444 - DNA, 75 bp, synthetic construct
  source 1..75: mol_type = other DNA
atcaggcaaagtatgagccgacgtggaaactgctgggataacagcccgatggaacgcttcttcagaagtctgaaa

SEQ ID NO: 258445 - DNA, 75 bp, synthetic construct
  source 1..75: mol_type = other DNA
gctgcagcaaaaaccgtgctttcagcgatgaaaagcgacgatttcagtaagcaaaaactggcggaatatcgtcag

SEQ ID NO: 258446 - DNA, 75 bp, synthetic construct
  source 1..75: mol_type = other DNA
ttccaggtttcgccgaatccgcccccgtagaacgcctgatcacccatgaaaaactcgcgtttatgacggaaaagt

SEQ ID NO: 258447 - DNA, 75 bp, synthetic construct
  source 1..75: mol_type = other DNA
ggcgtttcttgataacccacgcatgtttagcggctacccggaactggcggtaggcgtggcgcgtgacctgttcac

SEQ ID NO: 258448 - DNA, 75 bp, synthetic construct
  source 1..75: mol_type = other DNA
tgttactgttggtctgtttgctaaccgtggtgcggatgttgcactgattggcacggctgacggtgtcaaaaccat

SEQ ID NO: 258449 - DNA, 75 bp, synthetic construct
  source 1..75: mol_type = other DNA
caccatgaaagcgcgggaaatggcatgggaaacccgtggtaagcccggcggggtgatgttccacagcgatcaggg

SEQ ID NO: 258450 - DNA, 75 bp, synthetic construct
  source 1..75: mol_type = other DNA
cgttttatgccagttgtgagacggtgtttcgccctgatttatggggtaaaccggtggttgttttatctaataacg

SEQ ID NO: 258451 - DNA, 75 bp, synthetic construct
  source 1..75: mol_type = other DNA
ggaaatggcatgggaaacccgtggtaagcccgtcggggtgatgttccacagcgatcaaggcagtcattatacgag

SEQ ID NO: 258452 - DNA, 75 bp, synthetic construct
  source 1..75: mol_type = other DNA
cggcggggtgatgttccacagcgatcagggtagtcattatacgagcaggcagttccggcagttattgtggcgata

SEQ ID NO: 258453 - DNA, 75 bp, synthetic construct
  source 1..75: mol_type = other DNA
cagcccgatggaacgtttttttagaagcctgaaaacggagtgggtaccggagaatggatacgctaattttagcga

SEQ ID NO: 258454 - DNA, 75 bp, synthetic construct
  source 1..75: mol_type = other DNA
ggcgttccttgataacccacgcatgtttagcggctacccggagctggcggtgggtgtggcgcgtgacctgttcac

SEQ ID NO: 258455 - DNA, 75 bp, synthetic construct
  source 1..75: mol_type = other DNA
aaacccgtggtaagcccgtcggggtgatgttccacagcgatcaaggcagtcattatacgagcaggcagttccagc

SEQ ID NO: 258456 - DNA, 75 bp, synthetic construct
  source 1..75: mol_type = other DNA
tgggccatgtcgttctcgccggacagcaggcttaccatgaaagcactggaaatggcatgggaaacccgtggtaag

SEQ ID NO: 258457 - DNA, 75 bp, synthetic construct
  source 1..75: mol_type = other DNA
ctgggtaaattcccactgccggtagaagttatcccgatggcgcgtagtgcagtagctcgtcagttggtgaaatta

SEQ ID NO: 258458 - DNA, 75 bp, synthetic construct
  source 1..75: mol_type = other DNA
aagctcgcgttatcgccagcagcccgccagcaattagcggtcttggcagttctgcgggttttgatatggagttgc

SEQ ID NO: 258459 - DNA, 75 bp, synthetic construct
  source 1..75: mol_type = other DNA
atgtttatccgcctgaaagactggagcgaacgcgacagtaagaccggcacctcgtttgccattatcgagcgtgca

SEQ ID NO: 258460 - DNA, 75 bp, synthetic construct
  source 1..75: mol_type = other DNA
ggcgcatcggcccagacgctggaaaacaccgtgacccaggttatcgagcaaaatatgaccggcctcgataatctg

SEQ ID NO: 258461 - DNA, 75 bp, synthetic construct
  source 1..75: mol_type = other DNA
ggctttccggcgcgcaggctccggcgctgtacgctatttccttgctggtggtattcctgtgtctggcggcgttgt

SEQ ID NO: 258462 - DNA, 75 bp, synthetic construct
  source 1..75: mol_type = other DNA
gtcttgacgaactgtcgcagtatttcccacacgggctggagtacaaggtagcctatgaaacgacctcgtttgtta

SEQ ID NO: 258463 - DNA, 75 bp, synthetic construct
  source 1..75: mol_type = other DNA
cgtcgaaatgggggcggaaaaatacgattacctcagccgttttaacggtaagccagcctccgggctgggcgtaaa

SEQ ID NO: 258464 - DNA, 75 bp, synthetic construct
  source 1..75: mol_type = other DNA
aatcgagaaatattacttcacccatagaaaaagacaacatcatgtcggtgtttgccactgttggttctggccccg

SEQ ID NO: 258465 - DNA, 75 bp, synthetic construct
  source 1..75: mol_type = other DNA
atggagcgcttcttcaggagtctgaagaacgaatgggtgccggcgacgggctatgtaagcttcagcgatgcagct

SEQ ID NO: 258466 - DNA, 75 bp, synthetic construct
  source 1..75: mol_type = other DNA
aagcccgctaatttgctgtatcactcggatcaagggagccactataccagcagaaatttcagacagttactgtgg

SEQ ID NO: 258467 - DNA, 75 bp, synthetic construct
  source 1..75: mol_type = other DNA
ctggtcggtaccgttctcggtaatgctggtcgtgccgctgggggtaatcggcgcgctgctggcaacctggatgcg

SEQ ID NO: 258468 - DNA, 75 bp, synthetic construct
  source 1..75: mol_type = other DNA
gtggcgtatgaaaccacctcgtttgttaaagcctccattgaagacgtggtgaaaacgctgctggaagctatcgcc

SEQ ID NO: 258469 - DNA, 75 bp, synthetic construct
  source 1..75: mol_type = other DNA
agccagcctccgggctgggggtaaaactggcctccggcgcgaacgaaatggcgacagcggagctggtgctcaatc

SEQ ID NO: 258470 - DNA, 75 bp, synthetic construct
  source 1..75: mol_type = other DNA
aattgtggttaaatgaatcccaacgaaaacttcttgagttgtttaaccagctaccgggctcagaacaacaacgaa

SEQ ID NO: 258471 - DNA, 75 bp, synthetic construct
  source 1..75: mol_type = other DNA
cgggcatcgattttaccagggcaacgtctggcaaatgagatgacaccggatgttccccgtatcccctcgcctgaa

SEQ ID NO: 258472 - DNA, 75 bp, synthetic construct
  source 1..75: mol_type = other DNA
actggtcgccggcaggcctgctctataaagcctttgcagctgcgctgaaatatcttggtgttgatctgccggcaa

SEQ ID NO: 258473 - DNA, 75 bp, synthetic construct
  source 1..75: mol_type = other DNA
gttatctacccgcagaagtgaaaatacaccgcaatgacagcggttattttctctggcttgaacttcccgaaccgt

SEQ ID NO: 258474 - DNA, 75 bp, synthetic construct
  source 1..75: mol_type = other DNA
tgttttactccggaccaactggcatcgactgactaccgcactcggagaaggtggcaaattacgctggcttgtcac

SEQ ID NO: 258475 - DNA, 75 bp, synthetic construct
  source 1..75: mol_type = other DNA
tgattcttatttatcgaaaggcaagcagagcgcgaaacaagaagtttcattagatgctttaaaagaatatttgcc

SEQ ID NO: 258476 - DNA, 75 bp, synthetic construct
  source 1..75: mol_type = other DNA
cgcggttttatgagcgctgcacgtgccgttctctggattgggcgagcgctgatgatgaatcccatcggtctcgtt

SEQ ID NO: 258477 - DNA, 75 bp, synthetic construct
  source 1..75: mol_type = other DNA
ctccagatagcaaaaatcggtgcgggctccaccgatgaagcagccaataactttaaaaacttccttaccaaaatt

SEQ ID NO: 258478 - DNA, 75 bp, synthetic construct
  source 1..75: mol_type = other DNA
ctgaatatgagcctgcatgagctggaaaaaatgctggagcgtctgctggctcagaaacaacgtaaggagtaccgc

SEQ ID NO: 258479 - DNA, 75 bp, synthetic construct
  source 1..75: mol_type = other DNA
tcactcatcagcgacaacattgataatgtatctgatattgggtatttaatgccggacattgctcgtgcggcaaca

SEQ ID NO: 258480 - DNA, 75 bp, synthetic construct
  source 1..75: mol_type = other DNA
atgaaaaaataccagcagcttgcagaacaattacgcgagcagattgtgacgggtatctggcaacacggcgatcgt

SEQ ID NO: 258481 - DNA, 75 bp, synthetic construct
  source 1..75: mol_type = other DNA
gcactcggagaaggtggcaaattacgctggcttgtcactggattcagccggctggccagcggaggactgaaactc

SEQ ID NO: 258482 - DNA, 75 bp, synthetic construct
  source 1..75: mol_type = other DNA
tcactcatcagtaataatatcgacagcctgtctgatatcggatactacatgcctgatattgcccgtgcggcaaca

SEQ ID NO: 258483 - DNA, 75 bp, synthetic construct
  source 1..75: mol_type = other DNA
gcacttgccggacagataaaaggctgggcgcaaaaatacaatcagtatcaggatgaactgcaggaggcggtgggt

SEQ ID NO: 258484 - DNA, 75 bp, synthetic construct
  source 1..75: mol_type = other DNA
ctgcctgaacaacgtgctggacgccatcacccagtttgaacgtagcgccaatttcgcctttgctggttttatttt

SEQ ID NO: 258485 - DNA, 75 bp, synthetic construct
  source 1..75: mol_type = other DNA
ctcgatgggcatggacgtattcctttttggcccgctgccgacaacgtgcttctctttaaacagctatttatttcc

SEQ ID NO: 258486 - DNA, 75 bp, synthetic construct
  source 1..75: mol_type = other DNA
tggcattgtcgataccgtggtggcattttctgcgttggcagtatttacctggtttggcagtggcttattgggttt

SEQ ID NO: 258487 - DNA, 75 bp, synthetic construct
  source 1..75: mol_type = other DNA
gttagctgacggtgacggtattgctttcgacgtgcagagtctgactgaagattacgacattggtttccgcctgaa

SEQ ID NO: 258488 - DNA, 75 bp, synthetic construct
  source 1..75: mol_type = other DNA
aggcgttatcagccaggaaacgttggatcgcgtcctgacaattcaacgcgaattacaagtttcgatgcaatcact

SEQ ID NO: 258489 - DNA, 75 bp, synthetic construct
  source 1..75: mol_type = other DNA
cgtagcgtgggataaaacgacgcacgatttccccagcgtgactggcgatacccgttcgttgcgcccgttaggtca

SEQ ID NO: 258490 - DNA, 75 bp, synthetic construct
  source 1..75: mol_type = other DNA
cattacgccgcgcgtctggaacattacgcgctccagtcgcctctcgactggtttaattttttcgatttctggcaa

SEQ ID NO: 258491 - DNA, 75 bp, synthetic construct
  source 1..75: mol_type = other DNA
ggtatggatcgaaacgctctccctgcaactgaaagacagcatgtgcggctttcgcgtttatccggttgcgccaac

SEQ ID NO: 258492 - DNA, 75 bp, synthetic construct
  source 1..75: mol_type = other DNA
tggtctgacattcaggaggcctttaacggcggtatcgcgggaactggtaagctgctgattaactggtcgccggca

SEQ ID NO: 258493 - DNA, 75 bp, synthetic construct
  source 1..75: mol_type = other DNA
gtacgggtgaggtattaatacttgatggtgccacttttagcgctaaaactgacttgattgatggggctttgttga

SEQ ID NO: 258494 - DNA, 75 bp, synthetic construct
  source 1..75: mol_type = other DNA
aatgtcggtattcaaattttggaccgtacgggtgaggtattaatacttgatggggccacttttagtgctaaaacc

SEQ ID NO: 258495 - DNA, 75 bp, synthetic construct
  source 1..75: mol_type = other DNA
gcgtttagcgcgctgctttacccggtggtgggcgtctactggctcactgctgctcgtgcgcgcaaagcgtcgcaa

SEQ ID NO: 258496 - DNA, 75 bp, synthetic construct
  source 1..75: mol_type = other DNA
cgccctgttttgtggaaaagataaggagtccggtcttgggatcagcctgatgaccggtaacgggctgggtaagta

SEQ ID NO: 258497 - DNA, 75 bp, synthetic construct
  source 1..75: mol_type = other DNA
gatattgttcagagcggtgctcaggtagtaggcaaactggcagatcgtggattttgtgttggctcctctccacag

SEQ ID NO: 258498 - DNA, 75 bp, synthetic construct
  source 1..75: mol_type = other DNA
acaggatctggggggatggtcaccgttacgcaaaggcaggctgtatgctgaacgatttcgctcctgacggggttt

SEQ ID NO: 258499 - DNA, 75 bp, synthetic construct
  source 1..75: mol_type = other DNA
aagttaacggacaacgattttcttatgggattaccggtgggaatgtttttgttagttgtcttgtttttgtttttt

SEQ ID NO: 258500 - DNA, 75 bp, synthetic construct
  source 1..75: mol_type = other DNA
cttatacctgcatggtaacggattctgcagaacagccgcagagaattacctctgacgcgtgcacggtaacggtaa

SEQ ID NO: 258501 - DNA, 75 bp, synthetic construct
  source 1..75: mol_type = other DNA
ggtaacggattctgcagaacagccgcagagcattacctctgatgcgtgtacagtaacggttaatggtgcgggcgg

SEQ ID NO: 258502 - DNA, 75 bp, synthetic construct
  source 1..75: mol_type = other DNA
gcgttctgcgcgtgtagaacgggtgctcagcgagccgcatcatccctcgggggaattaaccgattttcgtatcca

SEQ ID NO: 258503 - DNA, 75 bp, synthetic construct
  source 1..75: mol_type = other DNA
cacaagtaagcttcatgcaatgggcataaccactgcgctggagctggctcgtactaaccctgcattcataagacg

SEQ ID NO: 258504 - DNA, 75 bp, synthetic construct
  source 1..75: mol_type = other DNA
atgcatggaaaatctcaaaatcgtcgattactccccgcagcaggaaggcaaagtcttttttggcgcgtgggtgga

SEQ ID NO: 258505 - DNA, 75 bp, synthetic construct
  source 1..75: mol_type = other DNA
ttaaagagtggcggcccgcgttctgcgcgtgtggaacgggtgcttagcgagccgcatcatccctcgggggaatta

SEQ ID NO: 258506 - DNA, 75 bp, synthetic construct
  source 1..75: mol_type = other DNA
gcgttctgcgcgtgtggaacgggtgctcagcgagccgcatcatccctcgggggaattaaccgattttcgtatccg

SEQ ID NO: 258507 - DNA, 75 bp, synthetic construct
  source 1..75: mol_type = other DNA
ggatttatggccgggttcagggggtaggttttcgctataccacccaatatgaagccaaaaggctgggcttaaccg

SEQ ID NO: 258508 - DNA, 75 bp, synthetic construct
  source 1..75: mol_type = other DNA
tctcatcttctgacagctaacagcgatcgcctttcctttgactgggaaggtgatgcaattgaattactgaacgaa

SEQ ID NO: 258509 - DNA, 75 bp, synthetic construct
  source 1..75: mol_type = other DNA
tggctggccagcgactggccgcagagatgacgccagacgttccccgtatcccgtcgccggaaatcatggctgcgg

SEQ ID NO: 258510 - DNA, 75 bp, synthetic construct
  source 1..75: mol_type = other DNA
ggatgagctgcaggaggcggtgggttcgctcatcagcgacaatattgataacttgtcagatatcggttttctgat

SEQ ID NO: 258511 - DNA, 75 bp, synthetic construct
  source 1..75: mol_type = other DNA
ccagttgattgcgctggcccgcgcgcaactggcgaatgctcacatcctgctgctcgacgaagccacgtcatgtct

SEQ ID NO: 258512 - DNA, 75 bp, synthetic construct
  source 1..75: mol_type = other DNA
ccatcggtctcgttatcaccgccgttgcggcagcagcttaccttatctaccacaactggggcgcagtcagtagct

SEQ ID NO: 258513 - DNA, 75 bp, synthetic construct
  source 1..75: mol_type = other DNA
attggccgggcgctgatgatgaatcccatcggtctcgttatcaccgccgttgcggcagcagcttaccttatctac

SEQ ID NO: 258514 - DNA, 75 bp, synthetic construct
  source 1..75: mol_type = other DNA
taccgcgagattcgtgccggtgccctcagggctgcggataacgatttgcttgccagtgcttacgatcagcggctg

SEQ ID NO: 258515 - DNA, 75 bp, synthetic construct
  source 1..75: mol_type = other DNA
cattcagacgttcgctaaccagatttatattgataccggcacgccgaaaagcgggcggctgtcattttataaaat

SEQ ID NO: 258516 - DNA, 75 bp, synthetic construct
  source 1..75: mol_type = other DNA
tcgtgccgttttatcaaatcaacaaactctggcctcttcctgaaactactctcctcttccgatctcttaagaagg

SEQ ID NO: 258517 - DNA, 75 bp, synthetic construct
  source 1..75: mol_type = other DNA
ttcacgtccgggatatgacgttttccaatacgttgagacttattgaagcccagacagcctggagagcaacaatcc

SEQ ID NO: 258518 - DNA, 75 bp, synthetic construct
  source 1..75: mol_type = other DNA
atgtctaaagcgcagatcatccagcaggccggtaactccgtgctgtccaaagctaaccaggtaccgcagcagatt

SEQ ID NO: 258519 - DNA, 75 bp, synthetic construct
  source 1..75: mol_type = other DNA
aggagtagagaaaattgtatcaccgtcatgcccaaagcgacgccatagccttatgtacgtgtgcatgaaaatgcg

SEQ ID NO: 258520 - DNA, 75 bp, synthetic construct
  source 1..75: mol_type = other DNA
gaagtggcccacattcttcctgccagcccgaaaggcccaaggggtaacaccggacacagcgaagaagaggctcag

SEQ ID NO: 258521 - DNA, 75 bp, synthetic construct
  source 1..75: mol_type = other DNA
gatggagattacctccgacgttgacacgcgttcagatgcggcaggccacggacgtgatattgaaatgcgcgccga

SEQ ID NO: 258522 - DNA, 75 bp, synthetic construct
  source 1..75: mol_type = other DNA
taacctcaagctggtttcagcacggtaatcagaagcagggggcctggctggataactggctgcaatacgcgtggt

SEQ ID NO: 258523 - DNA, 75 bp, synthetic construct
  source 1..75: mol_type = other DNA
cgcttaccagccggtgctgaatgccaaagttggcggttatctcaataacctgcgggcggcaaatcaggcgtttat

SEQ ID NO: 258524 - DNA, 75 bp, synthetic construct
  source 1..75: mol_type = other DNA
gatgagtccagagtcagaagcaaatctgaccaagaccaacatgtacaacgtcaacgtgtctgatcagctgaagaa

SEQ ID NO: 258525 - DNA, 75 bp, synthetic construct
  source 1..75: mol_type = other DNA
gggttgatggcgctacccaatgcctttgatgcattcgtggagcaaaccaagcgagtcacttcaacctgccttgtt

SEQ ID NO: 258526 - DNA, 75 bp, synthetic construct
  source 1..75: mol_type = other DNA
tagggagtattgatcagtatcagaatcaggcagagctaaatgttggctccacccaacaaacctttgtgcacgcat

SEQ ID NO: 258527 - DNA, 75 bp, synthetic construct
  source 1..75: mol_type = other DNA
ttggtcgccagcaggagcagcaaagaattaacgaaaccattcgcaataatgacatgacgaatgcgagggctatta

SEQ ID NO: 258528 - DNA, 75 bp, synthetic construct
  source 1..75: mol_type = other DNA
taaccagcaggtagacgaatatctggatacgtatggagatactattcctcaagggctgaaaaaaagcttagggag

SEQ ID NO: 258529 - DNA, 75 bp, synthetic construct
  source 1..75: mol_type = other DNA
tgtgcatttgatcgcggctgcaaaggtagtaccttctggtaaagtaccttatgccagtaactccgaactggcaga

SEQ ID NO: 258530 - DNA, 75 bp, synthetic construct
  source 1..75: mol_type = other DNA
gaaaatgaaactggaatgactctgtttgccaataacaccgttacaggagaatataataacggcggggccatattt

SEQ ID NO: 258531 - DNA, 75 bp, synthetic construct
  source 1..75: mol_type = other DNA
caatcgatgttaccgataataatagcgacagcaagcatccttcaggttatacgataataaataacactgccttta

SEQ ID NO: 258532 - DNA, 75 bp, synthetic construct
  source 1..75: mol_type = other DNA
ctgacgaactacggtttgctgaatgatccgtcgttatctgcaccaatcaccccggataccgttgacggtaaactg

SEQ ID NO: 258533 - DNA, 75 bp, synthetic construct
  source 1..75: mol_type = other DNA
cagccttcgggtctatccggccgtgctccatatcattgccgaaggcaggaaggtgacagagcatctgcgtgtgtt

SEQ ID NO: 258534 - DNA, 75 bp, synthetic construct
  source 1..75: mol_type = other DNA
aagctggtgaaatggtcaggctgaaaacgctggaggccatctggattcaagggaagctgcgcatgtggggccgct

SEQ ID NO: 258535 - DNA, 75 bp, synthetic construct
  source 1..75: mol_type = other DNA
gcatccgggaaaatcaccaaaacggcaattaacgaagcgctacgccggatgaagaaagcgggtatcagcaaacca

SEQ ID NO: 258536 - DNA, 75 bp, synthetic construct
  source 1..75: mol_type = other DNA
atgactacctttatcgaccatcagaaagccttcatttcgctgtttaaccggacagccccttatcacaaacgccat

SEQ ID NO: 258537 - DNA, 75 bp, synthetic construct
  source 1..75: mol_type = other DNA
gaaaaattaaagcaagatagtcggcacccacttatcgatttttttgagctgcggctgaaaggctctgaggttgac

SEQ ID NO: 258538 - DNA, 75 bp, synthetic construct
  source 1..75: mol_type = other DNA
aagtaagttccgttgattaccaccaagatgatcttactttaattaaaagagtatcatttataaatagaagcaagg

SEQ ID NO: 258539 - DNA, 75 bp, synthetic construct
  source 1..75: mol_type = other DNA
gaacaagtcctacttcttcggcgttgctggcctgaagaactacggcattctgaatgaccctaaccttccggcatc

SEQ ID NO: 258540 - DNA, 75 bp, synthetic construct
  source 1..75: mol_type = other DNA
attggagcattaatgcgaaaacttgtgcactggtgctatggtgtgctgaaaacgcagttaccattcgacgctgaa

SEQ ID NO: 258541 - DNA, 75 bp, synthetic construct
  source 1..75: mol_type = other DNA
gttaaggctgacattggaaccacaggccaacgtgaaccgctatgacagtttaaggagagcccatgatgcagcatg

SEQ ID NO: 258542 - DNA, 75 bp, synthetic construct
  source 1..75: mol_type = other DNA
ctggcatgcctttcaaatcttcggtggcattcccaagcgcggcatctacgacaacatgaagaccgctgtggattc

SEQ ID NO: 258543 - DNA, 75 bp, synthetic construct
  source 1..75: mol_type = other DNA
tcagtgaacctgcctgtggtgccggcagtatgattctggcaatggctgacaccctgaaccgttcggggtatccgg

SEQ ID NO: 258544 - DNA, 75 bp, synthetic construct
  source 1..75: mol_type = other DNA
aatgagcggcgccgggtgctgctgacgcccggacattacctgggtaactggtcatatcgtctacgtcattctcag

SEQ ID NO: 258545 - DNA, 75 bp, synthetic construct
  source 1..75: mol_type = other DNA
atggccacctttatcgaccatcagaaagccttcatttcgctgtttaatcagaccgcccgttatcacaaacgccat

SEQ ID NO: 258546 - DNA, 75 bp, synthetic construct
  source 1..75: mol_type = other DNA
gcccgtttctggcatgtgcttgatgcttctgtcgggaaagctcaggcggcaaactggattatcgcgacatatcaa

SEQ ID NO: 258547 - DNA, 75 bp, synthetic construct
  source 1..75: mol_type = other DNA
ttttcaggattttaacatccccaacgcacaaattattgatcaatttaaaattcgagaggtacctacaattttcct

SEQ ID NO: 258548 - DNA, 75 bp, synthetic construct
  source 1..75: mol_type = other DNA
ttccagagtacctgtgcgtactgtcacgagcaaagccagatactgaatttcatgcagaactattatcacattgac

SEQ ID NO: 258549 - DNA, 75 bp, synthetic construct
  source 1..75: mol_type = other DNA
acaaagccgcgaaacggtgtcggctgacgtcagccagtttgtcgccgggcttgatcagttggtgtctggttttga

SEQ ID NO: 258550 - DNA, 75 bp, synthetic construct
  source 1..75: mol_type = other DNA
tcaccctggttaatcaggttgcgcttatcgttttgctttccaccgccattggactggcggggatggcggtttccg

SEQ ID NO: 258551 - DNA, 75 bp, synthetic construct
  source 1..75: mol_type = other DNA
tcatcttagccatgatcaacaacaactggtggataccctggttgaacaactcaccgccacgctggcgctggatcg

SEQ ID NO: 258552 - DNA, 75 bp, synthetic construct
  source 1..75: mol_type = other DNA
gacccgacaaggaaaactgaggaagaaattacagagaccaagcctcctgttgcatcttcgacccagccaacacaa

SEQ ID NO: 258553 - DNA, 75 bp, synthetic construct
  source 1..75: mol_type = other DNA
tggttcgtgaaggaaacaaggtcactggcgtccaggccggggatgatattctcgaagcgaatgtggtgattctgg

SEQ ID NO: 258554 - DNA, 75 bp, synthetic construct
  source 1..75: mol_type = other DNA
caaatcatgaaggccatgcggacagtaccacgcagtcggcagtgtctgccgggaatatcaccatccgggatacgc

SEQ ID NO: 258555 - DNA, 75 bp, synthetic construct
  source 1..75: mol_type = other DNA
tgaaaaacttagcgggtacgacatgccaacaaccgatcgggttaataccggtatttcagaaaatgaagggggctt

SEQ ID NO: 258556 - DNA, 75 bp, synthetic construct
  source 1..75: mol_type = other DNA
gatcctgctaaaaaaagcgaagctgaagaagaaaaggttttgccaccaaccggtgctgctagctcgccttcaaaa

SEQ ID NO: 258557 - DNA, 75 bp, synthetic construct
  source 1..75: mol_type = other DNA
cgaataatggatcagaagttggaagggtacgatatgcctacggcggacccggtgaactacctgaatgcgggtggc

SEQ ID NO: 258558 - DNA, 75 bp, synthetic construct
  source 1..75: mol_type = other DNA
tcggtaaacaggcggagtcgctcatcggtaaggccggtagtctggcgaccagattcacggggatgacgggggcgg

SEQ ID NO: 258559 - DNA, 75 bp, synthetic construct
  source 1..75: mol_type = other DNA
aaaaactcaatgaaaaccatcaaaaacggatggctgcaattgaaaagaaatatgctgatgctcgccagtcaatag

SEQ ID NO: 258560 - DNA, 75 bp, synthetic construct
  source 1..75: mol_type = other DNA
ctttagatatgggcttaatctctcagcaagacgcagccgctaaacgtcagcaactgttagatcagaacgcagaaa

SEQ ID NO: 258561 - DNA, 75 bp, synthetic construct
  source 1..75: mol_type = other DNA
atgaggctattgtttctattgcgttggaaaaatatggcgcgtcgacggcgcttattatggcatttggtatggtag

SEQ ID NO: 258562 - DNA, 75 bp, synthetic construct
  source 1..75: mol_type = other DNA
gctttttgacatgagtgaatccgatcgcatgtttcgggaaacctatgcgaccgatcctgatagcgccattgaaaa

SEQ ID NO: 258563 - DNA, 75 bp, synthetic construct
  source 1..75: mol_type = other DNA
agatggtcatggatgctatcaaacgtcacgctaagttagttgcgcagcatgtagaagacgttcagcgtcgtaaga

SEQ ID NO: 258564 - DNA, 75 bp, synthetic construct
  source 1..75: mol_type = other DNA
ggaaaaggccgcgatccgtggtgctggtgtcgatcctcgtactgctggctttgatgttgaaggatttaagaaacg

SEQ ID NO: 258565 - DNA, 75 bp, synthetic construct
  source 1..75: mol_type = other DNA
ctaacacagcacctgatgcaacaaaagcatcgggagtgggtgtctctctgatgcgtaatggaaaaatactggcta

SEQ ID NO: 258566 - DNA, 75 bp, synthetic construct
  source 1..75: mol_type = other DNA
ggtgtcacttttatctatgaataattgtgattttgaccttagtctatgcgctccattcacgaaaattgcgcggat

SEQ ID NO: 258567 - DNA, 75 bp, synthetic construct
  source 1..75: mol_type = other DNA
tattggtgataagacaccgatgccattaccgttaaaactctatattaccccagtcggggcggccggtggagttgt

SEQ ID NO: 258568 - DNA, 75 bp, synthetic construct
  source 1..75: mol_type = other DNA
ggaaaaatatggcgcttctacggcgttaattatggcatttggtatggtggctaatattattgtcgccagatttac

SEQ ID NO: 258569 - DNA, 75 bp, synthetic construct
  source 1..75: mol_type = other DNA
attgtactgggcggtggtgccactgttttggttggttcgttaaatcctcttgggagtatgtttgaacatgccttt

SEQ ID NO: 258570 - DNA, 75 bp, synthetic construct
  source 1..75: mol_type = other DNA
cattaggaagcggaaatccgcgtaattttacgtggaatattatttcaaataacagtgttgttatgccaacaggcg

SEQ ID NO: 258571 - DNA, 75 bp, synthetic construct
  source 1..75: mol_type = other DNA
gctcgcgatgttgctgccctcgcagacttcagccataacccggcggatcaggcggcgatcatctcatccggttct

SEQ ID NO: 258572 - DNA, 75 bp, synthetic construct
  source 1..75: mol_type = other DNA
cgggagctggtggagacgcgggagcgactggtgagagacgctgatgattttgtcgcagtggcaatcgccggtttc

SEQ ID NO: 258573 - DNA, 75 bp, synthetic construct
  source 1..75: mol_type = other DNA
tgccacctctgctggtggcccgaatgcgcagtcatagctcagcctattttcgggaactagtggagacgcgggaac

SEQ ID NO: 258574 - DNA, 75 bp, synthetic construct
  source 1..75: mol_type = other DNA
tgtgcaggcgcggggcgcgtatccggcttactctgagcgcgtctttcgcgaaaaaggggtaaccatcgacaaagc

SEQ ID NO: 258575 - DNA, 75 bp, synthetic construct
  source 1..75: mol_type = other DNA
gcatggcgatgaatgcctgggcatatcctgatggtgagaaagttcccgcagctgaaatagcccggacttatttcg

SEQ ID NO: 258576 - DNA, 75 bp, synthetic construct
  source 1..75: mol_type = other DNA
gccctggctcgtaatacccagaaaattttccgttggctggataaagacacccctgatgctgttgaaaaaatgcag

SEQ ID NO: 258577 - DNA, 75 bp, synthetic construct
  source 1..75: mol_type = other DNA
tcggtatggtgtttcaacaatacaacctgtggccgcacctcaccgtgcagcaaaacctgattgaagcgccctgcc

SEQ ID NO: 258578 - DNA, 75 bp, synthetic construct
  source 1..75: mol_type = other DNA
attgcttctacggcgcacatcaagcgctgttcaatatcacgctggattgcccgcagggcgaaacactggtgttac

SEQ ID NO: 258579 - DNA, 75 bp, synthetic construct
  source 1..75: mol_type = other DNA
ggcgatttttaaacaactgcggattgtggatgcaccgggtagcccgacattcggggagtcctgtgcaccgtgggt

SEQ ID NO: 258580 - DNA, 75 bp, synthetic construct
  source 1..75: mol_type = other DNA
cgacagccatccggaagccatggctcgcaatactcagaaaattttccgctgggtggagaaagacactcctgatgc

SEQ ID NO: 258581 - DNA, 75 bp, synthetic construct
  source 1..75: mol_type = other DNA
attaccaaagcgtatttcgagctgggaatgacgttcccggaactgtatgacgacagccatccggaagccatggct

SEQ ID NO: 258582 - DNA, 75 bp, synthetic construct
  source 1..75: mol_type = other DNA
ttgccaagaagagaagatgttcagatggcacaattaggaaggaattgcagactgccatggggtttatcagcggtg

SEQ ID NO: 258583 - DNA, 75 bp, synthetic construct
  source 1..75: mol_type = other DNA
ggcgcaaaagatgaatttgctgccaatggcgagattaacgatgactatcgcatcagctatttacgcgaacatatc

SEQ ID NO: 258584 - DNA, 75 bp, synthetic construct
  source 1..75: mol_type = other DNA
gtgaaagatattgatgatttcgttgcatcagcgatcgttctgttcgatcagatgaatcgtggtggcccggcagga

SEQ ID NO: 258585 - DNA, 75 bp, synthetic construct
  source 1..75: mol_type = other DNA
gcatggcgatgaatgcctgggcatatcctgatggcgagaaagttcctgcagctgaaatagcccggacttatttcg

SEQ ID NO: 258586 - DNA, 75 bp, synthetic construct
  source 1..75: mol_type = other DNA
tgatgctgttgaaaaaattcaggcgttgttaccagcgatcgaaaaagcaatgccacctctgctggtggcccgaat

SEQ ID NO: 258587 - DNA, 75 bp, synthetic construct
  source 1..75: mol_type = other DNA
tatcgcagtggcaatcgccggtttcaatcagatgaaccgtggtggccctgcaggaaatattgtggctgtgcattg

SEQ ID NO: 258588 - DNA, 75 bp, synthetic construct
  source 1..75: mol_type = other DNA
cgttgcatcagcgatcgttctgttcgatcagatgaatcgtggtggtccggcgggaaatattgtggttgtgcattg

SEQ ID NO: 258589 - DNA, 75 bp, synthetic construct
  source 1..75: mol_type = other DNA
gcgaaaattaccaaagcgtatttcgagctggggatgacgttcccggaactgtacgacgacagtcatccggaagcc

SEQ ID NO: 258590 - DNA, 75 bp, synthetic construct
  source 1..75: mol_type = other DNA
ctcggtctgcgtatcaccatgaatatgatgtacgaccgttatcagaagccactgtttctggtggaaaacggcctg

SEQ ID NO: 258591 - DNA, 75 bp, synthetic construct
  source 1..75: mol_type = other DNA
atgtcagtatttccgcaaggttttttatggggcggcgcgcttgccgccaaccaatctgaaggtgcgtaccgtgaa

SEQ ID NO: 258592 - DNA, 75 bp, synthetic construct
  source 1..75: mol_type = other DNA
atggcgagattaacgatgactatcgcatcagctatttacgcgaacatatccgcgcaatgggcgaagcgattgcag

SEQ ID NO: 258593 - DNA, 75 bp, synthetic construct
  source 1..75: mol_type = other DNA
tgatgcggttaaaaaaattcaggcgttgttaccggcgatcgaaaaagcaatgccgcctccactggtggcccgaat

SEQ ID NO: 258594 - DNA, 75 bp, synthetic construct
  source 1..75: mol_type = other DNA
tggatatcggcattggcgaagaaaaccgtaagcgctggctgcgtaccggtaaatgctctttcctgccggaagagc

SEQ ID NO: 258595 - DNA, 75 bp, synthetic construct
  source 1..75: mol_type = other DNA
gatatcgccctgatggctgagatgggattcagggttttccgcacctcgattgcctggagccgcctctttccgcag

SEQ ID NO: 258596 - DNA, 75 bp, synthetic construct
  source 1..75: mol_type = other DNA
tgaggaagcatttcgtggcttcatgtcaaaacacgccaatgtggaaatcggtcttgccctgcgttctgaccgctg

SEQ ID NO: 258597 - DNA, 75 bp, synthetic construct
  source 1..75: mol_type = other DNA
agttactggagcatatcggtattgacccgtcaggtgtggggcagattctggattcactggcggaagccgggatcc

SEQ ID NO: 258598 - DNA, 75 bp, synthetic construct
  source 1..75: mol_type = other DNA
tttctgccggtgatatttgaacaccctcctgaaatggtggaaagcggggctcacctgctgatggaaaacctcgcc

SEQ ID NO: 258599 - DNA, 75 bp, synthetic construct
  source 1..75: mol_type = other DNA
ggtatctctattcatctcgccattgacgggctgtcgctgctgatggtcgtgctgaccggtctgctcggtgtgctg

SEQ ID NO: 258600 - DNA, 75 bp, synthetic construct
  source 1..75: mol_type = other DNA
ctctgtcagcgcctcggcattgatcaggtcccggcacgggtgagcgccgttcccggcgatcgcttcctgaaggtg

SEQ ID NO: 258601 - DNA, 75 bp, synthetic construct
  source 1..75: mol_type = other DNA
tctgcggccccctgccgtgcccggtatcggacgcacggagaaatacagcagccggttgtttgacccgtccgtcag

SEQ ID NO: 258602 - DNA, 75 bp, synthetic construct
  source 1..75: mol_type = other DNA
tatcggtcagaccatcactgccattcgtactcaggcgggcattgttcagcggctggcggcagataacgccagcgt

SEQ ID NO: 258603 - DNA, 75 bp, synthetic construct
  source 1..75: mol_type = other DNA
tcgcgctatcgccatcaacgtgactggcgcaccttgctgttacagggggcggccctgacggcggcggcgttgttg

SEQ ID NO: 258604 - DNA, 75 bp, synthetic construct
  source 1..75: mol_type = other DNA
cggcagataacgccagcgtgaagcagagcgggcagctcatcgaacaactatcgctgggcgtttacgatgcggtgc

SEQ ID NO: 258605 - DNA, 75 bp, synthetic construct
  source 1..75: mol_type = other DNA
ttcactggcggaagccgggatccccgacggaattgtggtggggataagccagggctggaaactgggcggggccat

SEQ ID NO: 258606 - DNA, 75 bp, synthetic construct
  source 1..75: mol_type = other DNA
tgctgatatgggggcagagtgtggctgcagccgatcttggcacctggggggatttgtggccggtaaaggagccgg

SEQ ID NO: 258607 - DNA, 75 bp, synthetic construct
  source 1..75: mol_type = other DNA
cggcggataacgccagcgtgaaacagagcgggcagctcatcgaacagttgtcgctgggcgtttacgacgcggtgc

SEQ ID NO: 258608 - DNA, 75 bp, synthetic construct
  source 1..75: mol_type = other DNA
gccagttggcctaccagggcgcggtaatccagatgattgcacacggcttgtcagcggcgggtctgtttattctct

SEQ ID NO: 258609 - DNA, 75 bp, synthetic construct
  source 1..75: mol_type = other DNA
cctctttgcctagctgctcgcggtcgtttccatcccagcgtgtttccgttttccaaaggccacgctccagatgcc

SEQ ID NO: 258610 - DNA, 75 bp, synthetic construct
  source 1..75: mol_type = other DNA
acacatatccggaccatcacccacagggtgacggacaccaccctgaaggtggtggcagccgatccgaatacggtg

SEQ ID NO: 258611 - DNA, 75 bp, synthetic construct
  source 1..75: mol_type = other DNA
aataagcgtagtcgagttttctccgggtgatatacacagtgtcgaatgtctctctccgagagcattaatgatgga

SEQ ID NO: 258612 - DNA, 75 bp, synthetic construct
  source 1..75: mol_type = other DNA
tcagccactgatggcctggtgcgttggcaatgcccgggtggagcctaaaggtaacgccattcttatcaccaaaca

SEQ ID NO: 258613 - DNA, 75 bp, synthetic construct
  source 1..75: mol_type = other DNA
cgcgaatggctgggctggggccatgcctgggcgcatgaaaccgcggtggtcagacggaagagtgaggcatcccgg

SEQ ID NO: 258614 - DNA, 75 bp, synthetic construct
  source 1..75: mol_type = other DNA
gaagagtgaggcatcccggtttctaggattttgtggcctgtggagacatgacgattgtccgtcgggtcggggatg

SEQ ID NO: 258615 - DNA, 75 bp, synthetic construct
  source 1..75: mol_type = other DNA
aaaatctgattagagatgatggtcaaacactaaatagttattttagtgaagttaaagttaattcattgattgaaa

SEQ ID NO: 258616 - DNA, 75 bp, synthetic construct
  source 1..75: mol_type = other DNA
gctccgaccgccggttccgtggacctcgcggggatcttgctgaaaaccgctgcttatggtctgctgcgtttctcc

SEQ ID NO: 258617 - DNA, 75 bp, synthetic construct
  source 1..75: mol_type = other DNA
ggtggcaacgcttgggatgccaggtaccggtaacttcgtcggcgaatttatgattctgtttggcagcttccaggt

SEQ ID NO: 258618 - DNA, 75 bp, synthetic construct
  source 1..75: mol_type = other DNA
atgaaaattattgatgatgcagttgttgacgaattggtaaataatgcacgcgtttcagaaagaaaaagaacacat

SEQ ID NO: 258619 - DNA, 75 bp, synthetic construct
  source 1..75: mol_type = other DNA
atatttatgggatatcattacatgtgtttttagtaccatttccatcagtggatagttttaggaaggcattgcttt

SEQ ID NO: 258620 - DNA, 75 bp, synthetic construct
  source 1..75: mol_type = other DNA
ataagttattgagggatgatggcgatacaatttatagttacttccatgaaataaaatcagattatttgattgaag

SEQ ID NO: 258621 - DNA, 75 bp, synthetic construct
  source 1..75: mol_type = other DNA
ggcgcgacttattactttaacaaaaatatgtccgctttcgttgactacaagatcaacctgattgatgaaagtgaa

SEQ ID NO: 258622 - DNA, 75 bp, synthetic construct
  source 1..75: mol_type = other DNA
acaatgatttcttcggcttggttgatggtctgaactttgctttgcagtatcagggtaaaaatgatagtgctgcaa

SEQ ID NO: 258623 - DNA, 75 bp, synthetic construct
  source 1..75: mol_type = other DNA
gactgatgtatttatgacccagcgtgctactggcgtcgcgacctatcgtaacaatgatttcttcggcttggttga

SEQ ID NO: 258624 - DNA, 75 bp, synthetic construct
  source 1..75: mol_type = other DNA
ctgcggttgcagtatctgttctgatggcaacgtctgctcaagctgcagaaatctataacaaagacagtaacaaac

SEQ ID NO: 258625 - DNA, 75 bp, synthetic construct
  source 1..75: mol_type = other DNA
ttcggtcagtgggaatatgaattcaaaggcaaccgcgctgaatctcaaggttcttccaaagacaaaacccgtctt

SEQ ID NO: 258626 - DNA, 75 bp, synthetic construct
  source 1..75: mol_type = other DNA
atgaaaaaattaacagtggcaatttctgctgtaactgcatcagtactgatggcgatgtctgctcaggcagctgaa

SEQ ID NO: 258627 - DNA, 75 bp, synthetic construct
  source 1..75: mol_type = other DNA
aattctggggctggtggatggagctggaagcgcaggaatcccgttttacctacagttaccagtttggtctgttcg

SEQ ID NO: 258628 - DNA, 75 bp, synthetic construct
  source 1..75: mol_type = other DNA
ggtatttcgagtaattaccgcgtggttgttcaattgttaatatcatcatgtctttctggtgatagcgatacgatt

SEQ ID NO: 258629 - DNA, 75 bp, synthetic construct
  source 1..75: mol_type = other DNA
gcttatgatctttcagctctgaatgttcaggatagcccatggttaattgtggggaaacttgatggtacagctcgc

SEQ ID NO: 258630 - DNA, 75 bp, synthetic construct
  source 1..75: mol_type = other DNA
tacctatgaatacgaaggattcggtatcggtgcaacttatgcgaaatctgatcgtaccgacactcaagttaatgc

SEQ ID NO: 258631 - DNA, 75 bp, synthetic construct
  source 1..75: mol_type = other DNA
tgacggtatttgctgatcgcttcgtcgctaataaagctcagaacgttgaggctgttgcacaatatcagttcgatt

SEQ ID NO: 258632 - DNA, 75 bp, synthetic construct
  source 1..75: mol_type = other DNA
ttcctccgcagacaaaactcgtcttgcatttgctggtctgaaattcggcgactacggctccatcgattatggtcg

SEQ ID NO: 258633 - DNA, 75 bp, synthetic construct
  source 1..75: mol_type = other DNA
actacggctctatcgattatggtcgtaactacggtgtagcatacgacattggtgcgtggactgacgtactgccag

SEQ ID NO: 258634 - DNA, 75 bp, synthetic construct
  source 1..75: mol_type = other DNA
ggcaagatgttcgcctgcgagcatgagaacgtacagccggatatcctctgccttgccaaagcgctcggcggtggc

SEQ ID NO: 258635 - DNA, 75 bp, synthetic construct
  source 1..75: mol_type = other DNA
gatgtggctgcagtgatcctcgaaccgattcagggcgaaggtggcgtaattctgccgccgccaggctatctcacc

SEQ ID NO: 258636 - DNA, 75 bp, synthetic construct
  source 1..75: mol_type = other DNA
tgttcgacaacccattcctgcataccaccacctttggcggcaacccgctggcctgtgcggcggcgctggcgacca

SEQ ID NO: 258637 - DNA, 75 bp, synthetic construct
  source 1..75: mol_type = other DNA
tctgccgccgccgagggcttttgccagacacaggatgtccggctgtacgttctcatgctcgcaggcgaacatctt

SEQ ID NO: 258638 - DNA, 75 bp, synthetic construct
  source 1..75: mol_type = other DNA
gggttccgtcatgtaccgtttggcaatatcgaagccatgcgcacggcccttagcgagtgcaaaaaaaccggtgat

SEQ ID NO: 258639 - DNA, 75 bp, synthetic construct
  source 1..75: mol_type = other DNA
aatatcgaagccatgcgcacggcccttagcgagtgcaaaaaaaccggtgatgatgttgctgcagtgatccttgag

SEQ ID NO: 258640 - DNA, 75 bp, synthetic construct
  source 1..75: mol_type = other DNA
gtaattgaaaattctgactacaacggttgggttggctgtgaatataaaccccaaaccaccacggaagccggttta

SEQ ID NO: 258641 - DNA, 75 bp, synthetic construct
  source 1..75: mol_type = other DNA
ttgcagaaacgatttcagctcgtcacggggatgggtgagagcaacgaaggcgctgacgcaggcgcaggggctgct

SEQ ID NO: 258642 - DNA, 75 bp, synthetic construct
  source 1..75: mol_type = other DNA
tttcaatccatgcttaccgtggttacagaatcctcccctgctatggcaggcaatggcgttactggcgagatggtt

SEQ ID NO: 258643 - DNA, 75 bp, synthetic construct
  source 1..75: mol_type = other DNA
cgccactgacactgaccattgaacagtgtgaactggtgatcaaagcggcgcgtaaggcgctggcggccatgcgag

SEQ ID NO: 258644 - DNA, 75 bp, synthetic construct
  source 1..75: mol_type = other DNA
ttctgccgccgccgggctatctcaccgccgtacgtaagctgtgcgatgagttcggcgcactgatgatcctcgatg

SEQ ID NO: 258645 - DNA, 75 bp, synthetic construct
  source 1..75: mol_type = other DNA
ttatgttcccttatgactacgacattgaagaattaaaacaggtgctggcgagtaataaactcgaacatacgctgc

SEQ ID NO: 258646 - DNA, 75 bp, synthetic construct
  source 1..75: mol_type = other DNA
tgattttgttcgtgacctgaaatatgacgtccttttcttattagatgagtttccggctattggttatatgccata

SEQ ID NO: 258647 - DNA, 75 bp, synthetic construct
  source 1..75: mol_type = other DNA
ttatgacttatcgtgcagccgacttgagaagctttggcattaaacattgtttttctattggtactattcttgagc

SEQ ID NO: 258648 - DNA, 75 bp, synthetic construct
  source 1..75: mol_type = other DNA
acacacagcctgattttatctctatgggggcgggaacgcgtgcgggtaaaggtgccggaattgttataccaaatc

SEQ ID NO: 258649 - DNA, 75 bp, synthetic construct
  source 1..75: mol_type = other DNA
aaaaatcaaaactgcttaagtgggagacagaaaatgatacggatattctggtcggcgcgtataaagggaaatatc

SEQ ID NO: 258650 - DNA, 75 bp, synthetic construct
  source 1..75: mol_type = other DNA
atcccaccctgaaacatgactgcctgatgtttcttgatgagttcccttcgattggttatatgccaattattaaaa

SEQ ID NO: 258651 - DNA, 75 bp, synthetic construct
  source 1..75: mol_type = other DNA
ccaaccgttcgtaaatgtactgatggtaatgatttcgatctccgtcagttgcgacgggaagatatcactgtttat

SEQ ID NO: 258652 - DNA, 75 bp, synthetic construct
  source 1..75: mol_type = other DNA
ctggacgtcttctacgtactggtcacagcattgttgctgagtcttttggcaagttggtatccggcgcggcgcgcc

SEQ ID NO: 258653 - DNA, 75 bp, synthetic construct
  source 1..75: mol_type = other DNA
gagacgcgggagcgactggtgagagacgctgatgattttgtcgcagtggcaatcgccggtttcaatcagatgaac

SEQ ID NO: 258654 - DNA, 75 bp, synthetic construct
  source 1..75: mol_type = other DNA
tgattttcttgctcatcgtgacaatcccactggcatgggtgattgctaccgtagttgtttatccgatgaatggac

SEQ ID NO: 258655 - DNA, 75 bp, synthetic construct
  source 1..75: mol_type = other DNA
agcagggcgattgggtgtcgattatgatcccaaattcgaatcccgagcataaactgatgcagccaaaacgtgtgc

SEQ ID NO: 258656 - DNA, 75 bp, synthetic construct
  source 1..75: mol_type = other DNA
gcgcaatccaggtgaagggcgttaacccacaacaggaacagcgtctgagcgcattaccctcgtttgttcaggggg

SEQ ID NO: 258657 - DNA, 75 bp, synthetic construct
  source 1..75: mol_type = other DNA
actgaagcgtggttatatctgcgtggccgttcctacggctcaggccggtactgccaagaagggtgacaaggttta

SEQ ID NO: 258658 - DNA, 75 bp, synthetic construct
  source 1..75: mol_type = other DNA
tgccagataatcaggttaacggtgtcgattttgtcctgcctttccgttttgccgatggagcctggcatctgggga

SEQ ID NO: 258659 - DNA, 75 bp, synthetic construct
  source 1..75: mol_type = other DNA
gtcatcaatttaattaatggcattgtagcccgaggtgcaaccgtacaggctggtaatgttctgagggagctttca

SEQ ID NO: 258660 - DNA, 75 bp, synthetic construct
  source 1..75: mol_type = other DNA
gaagtatctaactgaaaactcatggcgtctacgtgaaagcggtcaaatgcttgatatacctcattggacgccgca

SEQ ID NO: 258661 - DNA, 75 bp, synthetic construct
  source 1..75: mol_type = other DNA
cgtgagtttcatgaaaagctgcgtgaactgctgacgacgctgaattttaagctggaaccggcggatgattttcgc

SEQ ID NO: 258662 - DNA, 75 bp, synthetic construct
  source 1..75: mol_type = other DNA
gggaaagccatagacttcgatgccagaacggctattccattcgaaggtgagcgctataatgcacttgatgacgcc

SEQ ID NO: 258663 - DNA, 75 bp, synthetic construct
  source 1..75: mol_type = other DNA
ggcgcgtcagcgggggcggtgctggtgatcacccgttttggtgatcgacttggtgtattaacgctccccgtatcg

SEQ ID NO: 258664 - DNA, 75 bp, synthetic construct
  source 1..75: mol_type = other DNA
tggaaaataataacagagagtaatatacgtacagatatcaggttaaccgctatcccctctcttttgtcaggtatg

SEQ ID NO: 258665 - DNA, 75 bp, synthetic construct
  source 1..75: mol_type = other DNA
ctggcatcattgacgatggaactaaataagacgaaaaaaatatttggtgtgaaagggcttaaatatccgtcaaaa

SEQ ID NO: 258666 - DNA, 75 bp, synthetic construct
  source 1..75: mol_type = other DNA
ggaagcaaaaggtcagaaagtggcgctgaaagaggcgatgggcagtacacaaagcattatgattgggccggacgg

SEQ ID NO: 258667 - DNA, 75 bp, synthetic construct
  source 1..75: mol_type = other DNA
aagtgaggcgcagcgcgcccttgtgctcccgcaggagctgggaacgctggattttaaagaagaatttatcattct

SEQ ID NO: 258668 - DNA, 75 bp, synthetic construct
  source 1..75: mol_type = other DNA
gaagggggagaaccctgttaaagcagaaaaggcactttattaccttgatccgtattttatggacaggttaatgaa

SEQ ID NO: 258669 - DNA, 75 bp, synthetic construct
  source 1..75: mol_type = other DNA
taagaaaatgagcctgttttatctcccaaccgttcgtaaatgtactgatggtaatgatttcgatctccgtcagtt

SEQ ID NO: 258670 - DNA, 75 bp, synthetic construct
  source 1..75: mol_type = other DNA
atggcggtgctgttatttccgtttggcctgcggctagggctaatgctgcaatgcccgcgcggatactggccggtg

SEQ ID NO: 258671 - DNA, 75 bp, synthetic construct
  source 1..75: mol_type = other DNA
gtggctgctgatttactggttaacgcaggcggtcggtttaacccatttctccttattgatgatcggtagtttact

SEQ ID NO: 258672 - DNA, 75 bp, synthetic construct
  source 1..75: mol_type = other DNA
aaaaggaactggcgcgcaatcagcatctcgctgaacggttgctggaaaccgaagagagcgtgcgccgtgatgtgg

SEQ ID NO: 258673 - DNA, 75 bp, synthetic construct
  source 1..75: mol_type = other DNA
tcgctgaaagagcaggttatggatttgggtatccctgcatctgagctgataaagacagcctgggcttcagcttcc

SEQ ID NO: 258674 - DNA, 75 bp, synthetic construct
  source 1..75: mol_type = other DNA
catgttcggtaccaaagtacgatataccggcctttcttttgcttatcaattttccgcgattcttggcggactaag

SEQ ID NO: 258675 - DNA, 75 bp, synthetic construct
  source 1..75: mol_type = other DNA
ggtactggaaaaggaaagttctcctttcagcgccctgtacagcagcggtggtgatgttgtggtcgctattaccaa

SEQ ID NO: 258676 - DNA, 75 bp, synthetic construct
  source 1..75: mol_type = other DNA
acgacgtgctgaaaaaactgttcgatgatgctggtctgattttggtcgactttaaactggagtttggcctgtaca

SEQ ID NO: 258677 - DNA, 75 bp, synthetic construct
  source 1..75: mol_type = other DNA
cgatattcatgcctggggtggaaatcaaccattttttagttatccacgggttttaggccatgaaatatgtgggga

SEQ ID NO: 258678 - DNA, 75 bp, synthetic construct
  source 1..75: mol_type = other DNA
ctccatcttagccgggctggcagggatgaaagggtacgcttcgccgctgcggtcacccggtccctccttcccgtc

SEQ ID NO: 258679 - DNA, 75 bp, synthetic construct
  source 1..75: mol_type = other DNA
gtgccatgctgtgcgaaggttgggccaccagccagcaagacgcagaaaaccagataaacgcaggcgaaatcgacc

SEQ ID NO: 258680 - DNA, 75 bp, synthetic construct
  source 1..75: mol_type = other DNA
atgatgctaaagataaatttgttcaggattttgccaaagcatggaataaagtcatgaataatgacaggtttgatt

SEQ ID NO: 258681 - DNA, 75 bp, synthetic construct
  source 1..75: mol_type = other DNA
cagtatctgaagaatttatataaatatgaatgggagctgcacaagagtcctgccggtgcttatcagtggaagcct

SEQ ID NO: 258682 - DNA, 75 bp, synthetic construct
  source 1..75: mol_type = other DNA
cgtactgggtgccaacttcgatggcagcaaaaacggcgtcttcactgaccgcgttggcgtattgagcaatgactt

SEQ ID NO: 258683 - DNA, 75 bp, synthetic construct
  source 1..75: mol_type = other DNA
atgtcgctctgtttttatttgctgtctcagttctttcctttgtttgcgtctggctgattgagccgaccgatgaac

SEQ ID NO: 258684 - DNA, 75 bp, synthetic construct
  source 1..75: mol_type = other DNA
ctggaaatagaatttaaaggagaaacggtcagcaagtggtcgttctctgaaaataaaagcagaatgaatacgggt

SEQ ID NO: 258685 - DNA, 75 bp, synthetic construct
  source 1..75: mol_type = other DNA
tcaattgctaataaagataaaagagtgaaaatctttcagaatcatattaatagtggagcggcactatcgcggaat

SEQ ID NO: 258686 - DNA, 75 bp, synthetic construct
  source 1..75: mol_type = other DNA
ttcagaagaggattgcctggcgcgcattgctgaatccatcaatattgcgctggataaaacagaaggcgtaacggc

SEQ ID NO: 258687 - DNA, 75 bp, synthetic construct
  source 1..75: mol_type = other DNA
gggcaacggatgccgccggttttatggcgcggatggataccgttcttcagatgtatgcaaataaaatcacgcaat

SEQ ID NO: 258688 - DNA, 75 bp, synthetic construct
  source 1..75: mol_type = other DNA
gctcaacttggtgagcctgacactagaacgactcttgacgatggcaacgagcaatggagatatttcatgtataac

SEQ ID NO: 258689 - DNA, 75 bp, synthetic construct
  source 1..75: mol_type = other DNA
acatcgattgataccactgccgatgtatcgctggataaagtcgatgctggtttcgcgattaccaaaatcgcactg

SEQ ID NO: 258690 - DNA, 75 bp, synthetic construct
  source 1..75: mol_type = other DNA
ctttcgtcactcgctataccagttagggtttgtagaaatatacggatatccaaacgcatcagctaaaaagctgga

SEQ ID NO: 258691 - DNA, 75 bp, synthetic construct
  source 1..75: mol_type = other DNA
atgaaaaacattgcagctatcaaacgtaataaccgcaagattcacgctcgtaagttcctgtctacgccagaagga

SEQ ID NO: 258692 - DNA, 75 bp, synthetic construct
  source 1..75: mol_type = other DNA
ctcagttctttcctttgtttgcgtctggctgattgagccgaccgatgaacaagaaaccgcttcttaccgctacat

SEQ ID NO: 258693 - DNA, 75 bp, synthetic construct
  source 1..75: mol_type = other DNA
aaaatgccattaattaggactggtcaagattatgcgctgtggttaaaattactaaaatcttgtgaacgttgttat

SEQ ID NO: 258694 - DNA, 75 bp, synthetic construct
  source 1..75: mol_type = other DNA
cggatctcagctcattaaaaatatgaccttacgactgcgcctgcaggatcagcaggaagaaacatccgtgacatt

SEQ ID NO: 258695 - DNA, 75 bp, synthetic construct
  source 1..75: mol_type = other DNA
taatttgctgttcctgaattaccatccgcaaagtgaactagtaatgaacaggttgaagatccatgagccaaaact

SEQ ID NO: 258696 - DNA, 75 bp, synthetic construct
  source 1..75: mol_type = other DNA
tcccgtataccgccgattacttttctggcctgaccgccaccacggcggcgctggcagcactgcataaagtgcgtg

SEQ ID NO: 258697 - DNA, 75 bp, synthetic construct
  source 1..75: mol_type = other DNA
ggcgtctgcgacgtcgcaggatgttctggcggacaggattctggctgatgatgataccggtacttctgctgtgcg

SEQ ID NO: 258698 - DNA, 75 bp, synthetic construct
  source 1..75: mol_type = other DNA
aagcgaaatctacaacacccgcttgtatatttttaccgatcgcccgctatatcgcgcaggcgatcgtgtcgatgt

SEQ ID NO: 258699 - DNA, 75 bp, synthetic construct
  source 1..75: mol_type = other DNA
ggcagcgattaataaggcggtaggtctgggactatacccggattacgcaacggctgtcgacaaaatggttcgcgt

SEQ ID NO: 258700 - DNA, 75 bp, synthetic construct
  source 1..75: mol_type = other DNA
gtgggtattactcagatcgcagagtgctttaaagatattggtcttgcgcatctgcttggtacgccggaaatcccg

SEQ ID NO: 258701 - DNA, 75 bp, synthetic construct
  source 1..75: mol_type = other DNA
gtgggcattacccaaattgaagagtgctttaaagatattggcctcgcacatctactcagtacgccggaaatcccg

SEQ ID NO: 258702 - DNA, 75 bp, synthetic construct
  source 1..75: mol_type = other DNA
tttaccgttgagttattagttaataagtatcatagcggattagaggatgatactaacgaactctttgttcctgat

SEQ ID NO: 258703 - DNA, 75 bp, synthetic construct
  source 1..75: mol_type = other DNA
aaactattactgcaaaatctacacctcgagttagattcgaatctctcgctgttggcgcagcacttgcattacgtg

SEQ ID NO: 258704 - DNA, 75 bp, synthetic construct
  source 1..75: mol_type = other DNA
gtagaagtggatcctgaaaccaccgatgccgacagtgccctacatgctgccgatatcgcgatgtatcaggagaaa

SEQ ID NO: 258705 - DNA, 75 bp, synthetic construct
  source 1..75: mol_type = other DNA
actcaacccaaatatgcaaaaagctggcggtatttttgtccgtgaagaccgaactgacgcccattaccggttatg

SEQ ID NO: 258706 - DNA, 75 bp, synthetic construct
  source 1..75: mol_type = other DNA
tttactgttgagttattagttaataagtatcataacgggttagaggatgataccaacgaactctttgttcctgat

SEQ ID NO: 258707 - DNA, 75 bp, synthetic construct
  source 1..75: mol_type = other DNA
gcaggttattaagccatgctcgacaatatctaaatttaaggagttagcacctttatctgaggctaaagaaaaacg

SEQ ID NO: 258708 - DNA, 75 bp, synthetic construct
  source 1..75: mol_type = other DNA
atgactacaacacttttagccgttaacggaacgctgatgcgcggtttggaactcaacccaaatatgcaaaaagcg

SEQ ID NO: 258709 - DNA, 75 bp, synthetic construct
  source 1..75: mol_type = other DNA
tttagccagtcacagattcctgatgttgttcgtcagttgctaatatggagttttgtccatagcgcacttttccaa

SEQ ID NO: 258710 - DNA, 75 bp, synthetic construct
  source 1..75: mol_type = other DNA
ccgggcgatcgaggagtaacaattgccgctgatgtatcactgcgcggtgtgtccggattgggaaccggtatggcg

SEQ ID NO: 258711 - DNA, 75 bp, synthetic construct
  source 1..75: mol_type = other DNA
gagcttaaaggccgtgaattgccctgccatgttgtcgatgtcagtgggcagatagtgaccgttcagtttgatatg

SEQ ID NO: 258712 - DNA, 75 bp, synthetic construct
  source 1..75: mol_type = other DNA
ctccgcattgctcgccagtcagttaggcgctgatctgctggtgatccccaccggtgtagaaaaagtggcgattca

SEQ ID NO: 258713 - DNA, 75 bp, synthetic construct
  source 1..75: mol_type = other DNA
gcgccagtggtaaccgccacaccaccccggaccggagcggctccggtctggtaccgcctcagtaacggtcgtcag

SEQ ID NO: 258714 - DNA, 75 bp, synthetic construct
  source 1..75: mol_type = other DNA
cagcaatgaaacttcctagttttgcaagaacggcaagaaataatggcgagagatggacgtctttcgatggatgtc

SEQ ID NO: 258715 - DNA, 75 bp, synthetic construct
  source 1..75: mol_type = other DNA
agtccattattgatgatctgcgtgatcagatagccctgcgggtgaccgaagcaggcgcggatgatgaggaggaat

SEQ ID NO: 258716 - DNA, 75 bp, synthetic construct
  source 1..75: mol_type = other DNA
caggggatggcgcgcgcattgagcagtttgatcgcaaaggtatggtgaacaacaagttcaactacttcattatga

SEQ ID NO: 258717 - DNA, 75 bp, synthetic construct
  source 1..75: mol_type = other DNA
acgtctccagtgcgatgatgatgaaggaattatgattgatggatgtgtggcccggttgcggaaatataaaccaga

SEQ ID NO: 258718 - DNA, 75 bp, synthetic construct
  source 1..75: mol_type = other DNA
ggcattgacgccacgcaaaccaaccacggtcgccaacatctcgacgaaacccaggtgcgggtgtttggtcagcat

SEQ ID NO: 258719 - DNA, 75 bp, synthetic construct
  source 1..75: mol_type = other DNA
ggtcaccggacggtatgcgtgttgaggtcattcgggccggtgagtatgacgacgggacgcttcctgcccgggtgc

SEQ ID NO: 258720 - DNA, 75 bp, synthetic construct
  source 1..75: mol_type = other DNA
gagccgctcctgacgttagtcagttcaggctcatggcccctggatcaaacgctcgccagagatacccgcccatga

SEQ ID NO: 258721 - DNA, 75 bp, synthetic construct
  source 1..75: mol_type = other DNA
cctcccgtccggaagggtttgtggtgtatacgaccacccagtcgaatgaaccgcccgccggggtgttcagacaga

SEQ ID NO: 258722 - DNA, 75 bp, synthetic construct
  source 1..75: mol_type = other DNA
aaaatcgaccatcgctgcaggaattatgctgaccgcgctaatcctgtgctggcgtgaagatgaagagcacctgat

SEQ ID NO: 258723 - DNA, 75 bp, synthetic construct
  source 1..75: mol_type = other DNA
gcccgggatgtaaaaacagagctggataaccgggatgaaaaaattcaggcaacactgaatatgcttcacgacagc

SEQ ID NO: 258724 - DNA, 75 bp, synthetic construct
  source 1..75: mol_type = other DNA
ttaaggagcgggtgatccgtaacagtctgcggccccctgccgtgcccggtatcggacgcaccgagaaatacggga

SEQ ID NO: 258725 - DNA, 75 bp, synthetic construct
  source 1..75: mol_type = other DNA
taacctgctgatggaaaacctcgccatggtcaatccgaatctcggctattcagtggatgaggcctttctgtaccg

SEQ ID NO: 258726 - DNA, 75 bp, synthetic construct
  source 1..75: mol_type = other DNA
cctgattcccctttttataaaaagctaaaaatgcttgggaaaaaggaaataaaccaagataatgcatcattatca

SEQ ID NO: 258727 - DNA, 75 bp, synthetic construct
  source 1..75: mol_type = other DNA
ggtgattccctaattgtaaaattgttaatgagaaagcttaaacagtactggaaatttcttgtggttataaacctg

SEQ ID NO: 258728 - DNA, 75 bp, synthetic construct
  source 1..75: mol_type = other DNA
aaccgatattaatgccagcaaaacccggcagcagctcaacgatgtcgcggggaaaatgaaaattattgaggcacg

SEQ ID NO: 258729 - DNA, 75 bp, synthetic construct
  source 1..75: mol_type = other DNA
cttcagttgaaggtgtggaaaccgatattaatgccagcaaaacccgcagcagctcaacgatgtcgcggggaaaat

SEQ ID NO: 258730 - DNA, 75 bp, synthetic construct
  source 1..75: mol_type = other DNA
tgttacgtattatttgttgtatttttgtaataggaattcatgtcacgcccgactatgcttatactgttaccagta

SEQ ID NO: 258731 - DNA, 75 bp, synthetic construct
  source 1..75: mol_type = other DNA
aaaccggtgtcaccattatgcaaatggatgtcggcctggacacgggcgacatgctctataaactctcctgttcga

SEQ ID NO: 258732 - DNA, 75 bp, synthetic construct
  source 1..75: mol_type = other DNA
tcacccagccagaccgaccggcaggacgcggtaaaaaactgatgcccagcccgattaaagttctggctgaggaaa

SEQ ID NO: 258733 - DNA, 75 bp, synthetic construct
  source 1..75: mol_type = other DNA
ttaaggagcgggtgatccgtaacagtctgcggccccctgccgtgcccggtatcggacgcacggagaaatacggca

SEQ ID NO: 258734 - DNA, 75 bp, synthetic construct
  source 1..75: mol_type = other DNA
ctgatgttgcaatgcccgcgcggatactggcccgtgttgttgggcgcggaatggctgctgatttactggctgacg

SEQ ID NO: 258735 - DNA, 75 bp, synthetic construct
  source 1..75: mol_type = other DNA
accagcgcgtgacgctgtttcgtgtctgccaggaagggctgaacaacattgtgaaacatgccgatgccagcgcgg

SEQ ID NO: 258736 - DNA, 75 bp, synthetic construct
  source 1..75: mol_type = other DNA
gagtggacagttgatcgaacaactgtcgctgggggtttacgatgcggtacgccgtttgttagggcggttacgtcc

SEQ ID NO: 258737 - DNA, 75 bp, synthetic construct
  source 1..75: mol_type = other DNA
tcgagtctgccaggaaggtctgaacaacattgtgaaacatgccgatgccagtgcggtcacgctgcaaggctggca

SEQ ID NO: 258738 - DNA, 75 bp, synthetic construct
  source 1..75: mol_type = other DNA
gtgacggcgctgggcggcaccttaaccatctcctgtctgcacggcacacgcgtcagtgtctctctcccccaacgt

SEQ ID NO: 258739 - DNA, 75 bp, synthetic construct
  source 1..75: mol_type = other DNA
gctgctgtttgttatcagcctctggctgcaattgggactgccgaacgaactgtcgcgttttacgccattctgcct

SEQ ID NO: 258740 - DNA, 75 bp, synthetic construct
  source 1..75: mol_type = other DNA
ttgctaaaaaacggaaatgttcagatggaacaatacggaaagagatgcaaacggcaatggggtttattgatggat

SEQ ID NO: 258741 - DNA, 75 bp, synthetic construct
  source 1..75: mol_type = other DNA
ttaaggagcgggtgatccggaacagtctgcggccccctgccgtgcccggtatcggacgcactgagaaatacggaa

SEQ ID NO: 258742 - DNA, 75 bp, synthetic construct
  source 1..75: mol_type = other DNA
ttaaggagcgggtgatccggaacagtctgcggccccctgccgtgcccggtatcggacgcacagagaaatacggta

SEQ ID NO: 258743 - DNA, 75 bp, synthetic construct
  source 1..75: mol_type = other DNA
tgccgccgggttccgggcaacaaggttttggcctcaccggaatgcgcgagcgcgtaacggcgctgggcggcacat

SEQ ID NO: 258744 - DNA, 75 bp, synthetic construct
  source 1..75: mol_type = other DNA
aggtggcctggatgaaacgccagacgccgcccacactggagagcaaaattatcctcgtgcagggcagtatcctgg

SEQ ID NO: 258745 - DNA, 75 bp, synthetic construct
  source 1..75: mol_type = other DNA
atcctcgtgcagggaagtatcccggagatgcagaaagcgctggacagccgtatttactttgaccagaacggtgtg

SEQ ID NO: 258746 - DNA, 75 bp, synthetic construct
  source 1..75: mol_type = other DNA
tagtagcctcaccaaagcctgttgatattattgaaaaagagacagttaaagctctggtagatgcaggccaggtag

SEQ ID NO: 258747 - DNA, 75 bp, synthetic construct
  source 1..75: mol_type = other DNA
cattactccaggagtcagaaggctgaaaggagtttatgtgatttgcttcttaatatccggtcgggcagtatgacc

SEQ ID NO: 258748 - DNA, 75 bp, synthetic construct
  source 1..75: mol_type = other DNA
aggtcagtggacgctggatggaagcggcagaagcatggcgacgggctgccggtgttgcgccccggacagactggc

SEQ ID NO: 258749 - DNA, 75 bp, synthetic construct
  source 1..75: mol_type = other DNA
tagtagcctcaccgaagcctgttgatattattgaaaaagaaacggttaaagctctggtagatgcaggtcaggttg

SEQ ID NO: 258750 - DNA, 75 bp, synthetic construct
  source 1..75: mol_type = other DNA
caggtaggcatgattaaccaggcattcgaagctgccgcaaaaactgaagcgcactcgccgatgctgccgatgtct

SEQ ID NO: 258751 - DNA, 75 bp, synthetic construct
  source 1..75: mol_type = other DNA
ataaagactgggccagcgcccgtctggcagaaatgatcgatgccgatatgctgatcattctgactgcggtagaaa

SEQ ID NO: 258752 - DNA, 75 bp, synthetic construct
  source 1..75: mol_type = other DNA
ccctggatggtcagggtgatacggccttccctataccctggatggtcagggtgatacggccttcccgcaggcgtt

SEQ ID NO: 258753 - DNA, 75 bp, synthetic construct
  source 1..75: mol_type = other DNA
aacctggccgactggaaggtggtgctgtttatgcaggggcattgcccttactgtcaccagtttgacccggtactg

SEQ ID NO: 258754 - DNA, 75 bp, synthetic construct
  source 1..75: mol_type = other DNA
ttttacctcatggcaaaaagtcccggattcagtgtgatgatgatgaggggctcatgatcgatgggtgcgtagcta

SEQ ID NO: 258755 - DNA, 75 bp, synthetic construct
  source 1..75: mol_type = other DNA
atggattcagaaacagttcacggaacggtcaggtctggcgttaccagagtgccggaagccgggccgttattctgg

SEQ ID NO: 258756 - DNA, 75 bp, synthetic construct
  source 1..75: mol_type = other DNA
aaagaactgactgaagcgatgaacgcgcaaatgaaagcggaacgaactaagcgtgcccggattcttgaagcggaa

SEQ ID NO: 258757 - DNA, 75 bp, synthetic construct
  source 1..75: mol_type = other DNA
gtgcgacaggagaaagcagcaacccgctggttccgcctcagcaacggaactcaggtcaatcttgctgactggaaa

SEQ ID NO: 258758 - DNA, 75 bp, synthetic construct
  source 1..75: mol_type = other DNA
accaaaccgatcggatcgttctttaccgagcaggaagccgagcaactgacaaaacagggttacactctgaaagaa

SEQ ID NO: 258759 - DNA, 75 bp, synthetic construct
  source 1..75: mol_type = other DNA
ggtggtcggtgcggggccaatcggtctgggcgcggcggcaatcgctaaagctgatggtgcacaggtggtagtggc

SEQ ID NO: 258760 - DNA, 75 bp, synthetic construct
  source 1..75: mol_type = other DNA
catgtggcaacgcgtctggaattacctttactggacccgtcagccgaagattttgacgcgcagctacgggcgcag

SEQ ID NO: 258761 - DNA, 75 bp, synthetic construct
  source 1..75: mol_type = other DNA
ttaagtctgtcggaatttgtggtactgatattcatgcctggggtgggaatcaaccattttttagttatccacgtg

SEQ ID NO: 258762 - DNA, 75 bp, synthetic construct
  source 1..75: mol_type = other DNA
ctgcatccggttgcgctgcccaaagtggaaagcaaacttcctgacgacctgggctattctttgctggctcgccgg

SEQ ID NO: 258763 - DNA, 75 bp, synthetic construct
  source 1..75: mol_type = other DNA
gcgggctggcatctcgatatctggggaaagaatcgggcggaagtgactgcgcgcctcggtacggtaaaagcgcag

SEQ ID NO: 258764 - DNA, 75 bp, synthetic construct
  source 1..75: mol_type = other DNA
atacttcgcgcacgacatccgcgttatccgtctgccacgtcacggcgcatcctgcccggtaggcatgggcgtctc

SEQ ID NO: 258765 - DNA, 75 bp, synthetic construct
  source 1..75: mol_type = other DNA
gttcacgaaacacggttttatatggcacagagtgctgaggcgatgctggaagcaggtaagcgccttgtaattctt

SEQ ID NO: 258766 - DNA, 75 bp, synthetic construct
  source 1..75: mol_type = other DNA
gacgtatctctatcaggaaaccaaagcgttactgacgccggggaaactgaaaaattacttggttgagaagatgcg

SEQ ID NO: 258767 - DNA, 75 bp, synthetic construct
  source 1..75: mol_type = other DNA
gtcttggcgcgcagtttggcggtaaatacttcgcgcacgacatccgcgttatccgtctgccacgtcacggcgcat

SEQ ID NO: 258768 - DNA, 75 bp, synthetic construct
  source 1..75: mol_type = other DNA
ttagcgatgatttcaatggcgaatacttgcatcagaagtgcgcgaagaaaaagacggcgattaagccctggctga

SEQ ID NO: 258769 - DNA, 75 bp, synthetic construct
  source 1..75: mol_type = other DNA
aaaacggcgattaaaccgtggctgatggataacaagctggtggtaggcgtagggaatatctatgccagcgaatct

SEQ ID NO: 258770 - DNA, 75 bp, synthetic construct
  source 1..75: mol_type = other DNA
tgcaggtttacgggcgaaaaggcgagccgtgtcgggtgtgcggtacgccgattgtggcgactaaacatgcgcagc

SEQ ID NO: 258771 - DNA, 75 bp, synthetic construct
  source 1..75: mol_type = other DNA
aataaaaagcgcctgcgtgaaatcgaccgtcgcgtgcgctatctcactaaatgcatggaaaatctcaaaatcgtc

SEQ ID NO: 258772 - DNA, 75 bp, synthetic construct
  source 1..75: mol_type = other DNA
tgaattcctcggtaccgggttgttgattttcttcggtgtgggttgcgttgcagcactaaaagtcgctggtgcgtc

SEQ ID NO: 258773 - DNA, 75 bp, synthetic construct
  source 1..75: mol_type = other DNA
atctatgggcccattgacgggctttgccatgaacccagcgcgtgacatcggtccgaaagcctttgcctggcttgc

SEQ ID NO: 258774 - DNA, 75 bp, synthetic construct
  source 1..75: mol_type = other DNA
aaaattcgcgccatctggaaagtgatgcaccggcagggatttatctctgatggcggggaaacggcccttaaccgc

SEQ ID NO: 258775 - DNA, 75 bp, synthetic construct
  source 1..75: mol_type = other DNA
atgtcgggtaaattcagattcagccgtcgcagtgaaaaaaatctggagggtgtcaaaccacagctggttgctgtc

SEQ ID NO: 258776 - DNA, 75 bp, synthetic construct
  source 1..75: mol_type = other DNA
cgccggtattttgtggccgttcactggaacactgcttaacccggtggtcgccggagcggcaatggcgctctcatc

SEQ ID NO: 258777 - DNA, 75 bp, synthetic construct
  source 1..75: mol_type = other DNA
gtagcgagaataatatgaaaggtgttaaccccagacttgtagcgattgctcgtcgtgctctggttctttcagaag

SEQ ID NO: 258778 - DNA, 75 bp, synthetic construct
  source 1..75: mol_type = other DNA
gttcgccgtgcccttgagctgacggaggttgatttcggtattacggaaggcctgcgcagtaagtatcgccagaaa

SEQ ID NO: 258779 - DNA, 75 bp, synthetic construct
  source 1..75: mol_type = other DNA
atgtcgggtaaattcagattcagccgtcgcagtgaaaaaaatctggagggcgtcaaaccacagctggctgctgtc

SEQ ID NO: 258780 - DNA, 75 bp, synthetic construct
  source 1..75: mol_type = other DNA
acaggcatttaagcaggctgccgcagagctggggatcgctatcgaatggggtggggactggaaaacgctgaaaga

SEQ ID NO: 258781 - DNA, 75 bp, synthetic construct
  source 1..75: mol_type = other DNA
gtcgcagtgaaaaaaatctggagggtgtcaaaccacagctggttgctgtcgttcgccgtgcgctggagctgacgg

SEQ ID NO: 258782 - DNA, 75 bp, synthetic construct
  source 1..75: mol_type = other DNA
agaccatgaacagccgtcacctgaccggtgatgcggttgatgttgtggcttatattggcagccaagtgtcttggg

SEQ ID NO: 258783 - DNA, 75 bp, synthetic construct
  source 1..75: mol_type = other DNA
agtggcctctgtacgagaaaatcgcacaggcatttaagcaggctgccgcagagctggggatcgctatcgaatggg

SEQ ID NO: 258784 - DNA, 75 bp, synthetic construct
  source 1..75: mol_type = other DNA
caaaagacattgagcggattaaattcataaatgacatagacggcggagacaaacccggcgaggcatggtgtgatt

SEQ ID NO: 258785 - DNA, 75 bp, synthetic construct
  source 1..75: mol_type = other DNA
ttttggaccgtgtttaagtctgggcggtatagcaacaatttatctacaggcattgttttaatgataacaacgtca

SEQ ID NO: 258786 - DNA, 75 bp, synthetic construct
  source 1..75: mol_type = other DNA
ccgagtgcgcagtcaaaaataagcctggcgctgccacgctcgcactgtccgcattgccagcagactatccgcgtt

SEQ ID NO: 258787 - DNA, 75 bp, synthetic construct
  source 1..75: mol_type = other DNA
aatgttgctttaatcgcatcatgctgcggcctgatatatgcccaaaaagaggatcaaccacactgccttttggac

SEQ ID NO: 258788 - DNA, 75 bp, synthetic construct
  source 1..75: mol_type = other DNA
ttcctcttgtatggggtgtttctttacttggttcatcaatgctgcttgctgtaataggttttattgcaacaaaca

SEQ ID NO: 258789 - DNA, 75 bp, synthetic construct
  source 1..75: mol_type = other DNA
attcttaatggcggtggactttataagttatccccgtctttaggtgatgaaaatggggggaatgatgtctacgaa

SEQ ID NO: 258790 - DNA, 75 bp, synthetic construct
  source 1..75: mol_type = other DNA
ctggatagccggaatagttctgcgtaaagaagcattaggcatgggcgatgtattactcttcgccgcgttaggtgg

SEQ ID NO: 258791 - DNA, 75 bp, synthetic construct
  source 1..75: mol_type = other DNA
cggggctgctattggagctccagcattatcactaatccgccaactgggcagcaagaaagtaatttcggtaacaaa

SEQ ID NO: 258792 - DNA, 75 bp, synthetic construct
  source 1..75: mol_type = other DNA
tgactggaaagacgcaggaaactacatggaagaagcaaaacgcgcatcattaccgcacgttaacactagcgtgat

SEQ ID NO: 258793 - DNA, 75 bp, synthetic construct
  source 1..75: mol_type = other DNA
agtacgcaatatccgaaacccatatttacgacatcatacgacgactgagaaagaagcacgccaataaaatcacgc

SEQ ID NO: 258794 - DNA, 75 bp, synthetic construct
  source 1..75: mol_type = other DNA
gatgcagtcaccggcgtcctggtggggtttatcacttttttactctctgcgctggatagccggaatagttctgcg

SEQ ID NO: 258795 - DNA, 75 bp, synthetic construct
  source 1..75: mol_type = other DNA
ccgagtgcgcagtcaaaaataagccttgcgctaccgcgttcgcactgcccacattgtcagcagactatccgcgtt

SEQ ID NO: 258796 - DNA, 75 bp, synthetic construct
  source 1..75: mol_type = other DNA
tgcttctagaaacaacacgtacaacttccgcacgaggacaaacagaaaagtatgttatcaagaaagtacttcgtc

SEQ ID NO: 258797 - DNA, 75 bp, synthetic construct
  source 1..75: mol_type = other DNA
caactcctctgatggtctgctgaacctgaacacgccggatgataccggacataacaacgaccggttcacaaaata

SEQ ID NO: 258798 - DNA, 75 bp, synthetic construct
  source 1..75: mol_type = other DNA
ccggatacccgtctgccggacagcagcctgtttaaaacaaatccggcagtgaatgtgccatatctggttgaaacg

SEQ ID NO: 258799 - DNA, 75 bp, synthetic construct
  source 1..75: mol_type = other DNA
gcagattgagaaaaagaccggagatgtctcttcacagcctcagatggcactggatgtggccagtcttggcggaat

SEQ ID NO: 258800 - DNA, 75 bp, synthetic construct
  source 1..75: mol_type = other DNA
caatatgggcggtgctgcaatcagtagtagtatcaagggagaagatccaactaactcagttattggtgctggagc

SEQ ID NO: 258801 - DNA, 75 bp, synthetic construct
  source 1..75: mol_type = other DNA
gtaacggtgatgtcacgctgaccgccggacgggatatgacgtcacaggcggcatcgctgtcggctcagaaaggcc

SEQ ID NO: 258802 - DNA, 75 bp, synthetic construct
  source 1..75: mol_type = other DNA
cgggaacaggggatttttcactgaacctgccgggaggtgtggataaccgggaagggctgcttgcggcaaatggcg

SEQ ID NO: 258803 - DNA, 75 bp, synthetic construct
  source 1..75: mol_type = other DNA
gttcggtgcttatgtattgcgaatgaaccgcgcactgttgttcggcgcaatgatgggcgcacgcacctgcgcgcc

SEQ ID NO: 258804 - DNA, 75 bp, synthetic construct
  source 1..75: mol_type = other DNA
ggtgcttatgtattgcgaatgaaccgcgcactgttgttcggcgcaatgatgggcgcacgcacctgcgcgccggca

SEQ ID NO: 258805 - DNA, 75 bp, synthetic construct
  source 1..75: mol_type = other DNA
gcatcaggacttacagaccagcgcccagcaaatcgcccgcgaacgtggcctggacactgatgccaaccgtaaggt

SEQ ID NO: 258806 - DNA, 75 bp, synthetic construct
  source 1..75: mol_type = other DNA
tgtgcagaacgaccagggcagactggtgctgcaggccggacgggatatgaatctgacggctgcaacggtggtgaa

SEQ ID NO: 258807 - DNA, 75 bp, synthetic construct
  source 1..75: mol_type = other DNA
ttactcaggttaaagatctggctaacgatggctaccgtgctattcaggtgaccaccggtgctaaaaaagctaacc

SEQ ID NO: 258808 - DNA, 75 bp, synthetic construct
  source 1..75: mol_type = other DNA
acattacagcaattgttgatattggtagggcactaatagaagccaaagataatgacgatctaccacaatcacggt

SEQ ID NO: 258809 - DNA, 75 bp, synthetic construct
  source 1..75: mol_type = other DNA
aaccggttattaaagaaggtagtgctgaggtaattggggcagttacgggggctgtctcaggagaagttactggca

SEQ ID NO: 258810 - DNA, 75 bp, synthetic construct
  source 1..75: mol_type = other DNA
tgcttttgtcgggagatgctctgtccctgactgcaggcgtggttaacaatacatccggtcaggtggtggcgaacg

SEQ ID NO: 258811 - DNA, 75 bp, synthetic construct
  source 1..75: mol_type = other DNA
tcaccaccggacagcatacgcaactgaacggtgcggtgattgcgtccacggcaacggcagataaaaaccggctgg

SEQ ID NO: 258812 - DNA, 75 bp, synthetic construct
  source 1..75: mol_type = other DNA
tgccgtgattgcgtccacggcaacggcagataaaaaccggctggataccggcacactgggcttcagtgacattga

SEQ ID NO: 258813 - DNA, 75 bp, synthetic construct
  source 1..75: mol_type = other DNA
tgacattctgttcgacagtgtgcggggcgttgtggacaacgtctctggtctgattcgcagtggttctgccattac

SEQ ID NO: 258814 - DNA, 75 bp, synthetic construct
  source 1..75: mol_type = other DNA
cggttgagaataatgcgctgtctgagcttgtgccgcctcgcgtacagcaggatgcttccctggcttttgatctca

SEQ ID NO: 258815 - DNA, 75 bp, synthetic construct
  source 1..75: mol_type = other DNA
cacccgcacggcacaaagtgacgccggacagaaccattttgaacgcaccagcatcgacagtgtggcgggcgtgta

SEQ ID NO: 258816 - DNA, 75 bp, synthetic construct
  source 1..75: mol_type = other DNA
ggtacccggggaccggggcatgtgctgaatggcgacaatacagacgaaaacaaacagccgaatctgggcaaagac

SEQ ID NO: 258817 - DNA, 75 bp, synthetic construct
  source 1..75: mol_type = other DNA
gggacatggtgatgaagctggatggtgacctgtttaacagcggtaaactggccgggaagcagaccgtgcagctca

SEQ ID NO: 258818 - DNA, 75 bp, synthetic construct
  source 1..75: mol_type = other DNA
tgaactgagcgagacagagaagcagacggtctcgacactggcaacggttgctgccggtctggccggtggtctggt

SEQ ID NO: 258819 - DNA, 75 bp, synthetic construct
  source 1..75: mol_type = other DNA
tcaatgaccatttcaccacggagcgcgtggtggtttccacggaaaaggtgactgagtatcagcatcgcgggtcag

SEQ ID NO: 258820 - DNA, 75 bp, synthetic construct
  source 1..75: mol_type = other DNA
gcacagggaaataatgctcttgccggtgctgcaggtgcagccaccggcgaggtggtgggaatgatagccacacag

SEQ ID NO: 258821 - DNA, 75 bp, synthetic construct
  source 1..75: mol_type = other DNA
cggcagactggtggcacagcagtcactgaccctttcctcgacggatatcagcaatgatgcaggtggtctgataca

SEQ ID NO: 258822 - DNA, 75 bp, synthetic construct
  source 1..75: mol_type = other DNA
ggaagcactccctcttccgttgtatctgttggtgcagaaggatatgagcgccagatcgttaatgttggtgctggg

SEQ ID NO: 258823 - DNA, 75 bp, synthetic construct
  source 1..75: mol_type = other DNA
ccgataacggtaagatgataatgaaactgaatgcaggtcagaacacccggggtaatttctccgtcggtgccggtg

SEQ ID NO: 258824 - DNA, 75 bp, synthetic construct
  source 1..75: mol_type = other DNA
aagacccagctaaggggattgatttcgatcatgtatctccaattgctaaagggcgtaatgctattgcaattggta

SEQ ID NO: 258825 - DNA, 75 bp, synthetic construct
  source 1..75: mol_type = other DNA
gaccttgggtgaggaaatagataccattaatcctctgtggatgctcaaggatgaagacggtaatgtggcaacgat

SEQ ID NO: 258826 - DNA, 75 bp, synthetic construct
  source 1..75: mol_type = other DNA
caaacgtttctgttaatgacaagagtgtagctattggtgctggctcagttgataagttggctacacaagtcgttg

SEQ ID NO: 258827 - DNA, 75 bp, synthetic construct
  source 1..75: mol_type = other DNA
gttcaactgaatgggaaagggcaaaacgggagtgtaacactgtcatccgaaggtaataaactgacactctctgat

SEQ ID NO: 258828 - DNA, 75 bp, synthetic construct
  source 1..75: mol_type = other DNA
tatgaaccagaagcaatgtttttccgtatgattgcaggtgggtatgaccttgtaatggggaatacaaatggcata

SEQ ID NO: 258829 - DNA, 75 bp, synthetic construct
  source 1..75: mol_type = other DNA
tgataggtatgccatcgcaactcttcacaatggctagctcttttaaaaccgtagcaaatggaaaaatttatatcg

SEQ ID NO: 258830 - DNA, 75 bp, synthetic construct
  source 1..75: mol_type = other DNA
cgtgccgataaccagaaccgcggttatgccgttggtctgacatcaagctggtttcagcatggcagtcaaaagcag

SEQ ID NO: 258831 - DNA, 75 bp, synthetic construct
  source 1..75: mol_type = other DNA
atagggactactaatgaagttacaaaagacccagctaaggggattgatttcgatcatgtatctccaattgctaaa

SEQ ID NO: 258832 - DNA, 75 bp, synthetic construct
  source 1..75: mol_type = other DNA
tggatcaggatgcaattcttgacgcatggggtgacgtaaatattatcgtttaccagtggttgtccgatattaagg

SEQ ID NO: 258833 - DNA, 75 bp, synthetic construct
  source 1..75: mol_type = other DNA
tagagcaggcaaaccttgatgacaaaggattcactgtttcgagggcaacaacacaagccgcccgttatgatgcaa

SEQ ID NO: 258834 - DNA, 75 bp, synthetic construct
  source 1..75: mol_type = other DNA
taaatcctggtgatatggttacactgaaagccggtaaaaatctcagtgtgaaacaaaatgatggtgagtttactt

SEQ ID NO: 258835 - DNA, 75 bp, synthetic construct
  source 1..75: mol_type = other DNA
tgtctttccctctgttctggcagggctgcgaattacaggtcactcttgacgcgcagcgtattgcgattcgaactt

SEQ ID NO: 258836 - DNA, 75 bp, synthetic construct
  source 1..75: mol_type = other DNA
atatacataatgatcttgataaagagaaaaaaggtaatcaagttcatacacgtgcattacatgctgaggaaaacg

SEQ ID NO: 258837 - DNA, 75 bp, synthetic construct
  source 1..75: mol_type = other DNA
gataatgacaatattttaaaagcacaattagcgtggtacatcgcactgatgaagcatcctggtctgataacacct

SEQ ID NO: 258838 - DNA, 75 bp, synthetic construct
  source 1..75: mol_type = other DNA
caaaagcgatcaacatcattgagaacggactgcgggtgagtcttgatgaagagagcaaagacgaattaacccaaa

SEQ ID NO: 258839 - DNA, 75 bp, synthetic construct
  source 1..75: mol_type = other DNA
cggcagtgttcggcggtggcgcattgcagatggtgatttgcggcggcctgctggggctgttctgcatgttacttg

SEQ ID NO: 258840 - DNA, 75 bp, synthetic construct
  source 1..75: mol_type = other DNA
tctgcggttacgatctacgcctggatggtgcgctagttggtattgaagcagcccatatccactggaaaacctatg

SEQ ID NO: 258841 - DNA, 75 bp, synthetic construct
  source 1..75: mol_type = other DNA
ggtggcgataccaaagctaccggatggggggctattgttattggtggggatgatttaactcctttgcatggtaag

SEQ ID NO: 258842 - DNA, 75 bp, synthetic construct
  source 1..75: mol_type = other DNA
actacagacaaaaaatcaggtgttgctatagggcagggggcacgcgttaccgtcaaggaaaataatgtggctatt

SEQ ID NO: 258843 - DNA, 75 bp, synthetic construct
  source 1..75: mol_type = other DNA
atagggacgactaaagaggttccaaaaggcggggacatatattttgatcataaatcgccggtggcgatggggcat

SEQ ID NO: 258844 - DNA, 75 bp, synthetic construct
  source 1..75: mol_type = other DNA
ttacaattatctaaatatggtggcgttggtgtccaaggtggtaagttgtatactacagcaagtccttgtgaactt

SEQ ID NO: 258845 - DNA, 75 bp, synthetic construct
  source 1..75: mol_type = other DNA
tttacgagccggtgccggaagtactgacaaggcagacgccgatcccctttctggagcgaccggtgacctggtacc

SEQ ID NO: 258846 - DNA, 75 bp, synthetic construct
  source 1..75: mol_type = other DNA
gggagcctgacggtcagactcgctgataacattcgcctggcagatgacggcagtgtttctgttggcggaacccgg

SEQ ID NO: 258847 - DNA, 75 bp, synthetic construct
  source 1..75: mol_type = other DNA
ggtgaatggtggtgtacataaaacaccggataatgtggctgatgcagtgaatatgctgaaccgtgaaggcacgaa

SEQ ID NO: 258848 - DNA, 75 bp, synthetic construct
  source 1..75: mol_type = other DNA
atactacgctgtcacggatcattcgcatggtgcgccaggcccagagcagcaagcctgaaatcggccaactggcgg

SEQ ID NO: 258849 - DNA, 75 bp, synthetic construct
  source 1..75: mol_type = other DNA
cagaacctgctcggcgcgtttatctacaacagcattggtattccggtcgccgccggtattttgtggccgttcact

SEQ ID NO: 258850 - DNA, 75 bp, synthetic construct
  source 1..75: mol_type = other DNA
acaaaggaagagaaagcaagaccagaactaggtattaactttgatcataattctcctgttgctaaaggtcataac

SEQ ID NO: 258851 - DNA, 75 bp, synthetic construct
  source 1..75: mol_type = other DNA
ggccgcgcgaataccgggacttatgccctgaacggtcaggctgttgcgggacgtaccggaagtgatactgcggtg

SEQ ID NO: 258852 - DNA, 75 bp, synthetic construct
  source 1..75: mol_type = other DNA
acagtattgctgtcggacagggggccgtttcccggggacaaaacagcattgccatgggtaatggtgctgaagtca

SEQ ID NO: 258853 - DNA, 75 bp, synthetic construct
  source 1..75: mol_type = other DNA
agctaaaaacgaaaattttgatggcactaaggaccttttagaggttctgaatgaatttgtggcatttattcttca

SEQ ID NO: 258854 - DNA, 75 bp, synthetic construct
  source 1..75: mol_type = other DNA
tttcagaacaccatgatttaagtgttcttcctccaaatcaattctaccgaactcaaccaaattctccccacatca

SEQ ID NO: 258855 - DNA, 75 bp, synthetic construct
  source 1..75: mol_type = other DNA
ttccaggacgccacgatttaagcgtcctgcctccaaatcaattctaccgaactcaaccagattccccccacatca

SEQ ID NO: 258856 - DNA, 75 bp, synthetic construct
  source 1..75: mol_type = other DNA
tggacggcctgtcctgcggtcactgcgttaaacgcgtgaaagaaagtctcgaacagcgcccggatgttgaacagg

SEQ ID NO: 258857 - DNA, 75 bp, synthetic construct
  source 1..75: mol_type = other DNA
gacacagactctggcaaaagactgtatcattgataatttctttcagaaaagcatccagtttaattcttattctct

SEQ ID NO: 258858 - DNA, 75 bp, synthetic construct
  source 1..75: mol_type = other DNA
tgagttgcgtttcgcgcgttgggatgaattcgacttcgataaatctctatggcgcatacctgcaaaacgaaaaga

SEQ ID NO: 258859 - DNA, 75 bp, synthetic construct
  source 1..75: mol_type = other DNA
ccagtgatccatcctctgttgtttctgttggcactcaggggaaggaacgacagattgtgaatgtcgcagccggtg

SEQ ID NO: 258860 - DNA, 75 bp, synthetic construct
  source 1..75: mol_type = other DNA
gatatccgtgatgtctttatcaacgcgggtattaaaggtgaagagtacgacgcggcatggaacagctttgttgtt

SEQ ID NO: 258861 - DNA, 75 bp, synthetic construct
  source 1..75: mol_type = other DNA
gatatccgcgatgtatttatcaacgcaggtattaaaggtgaagagtacgacgcggcgtggaacagcttcgtggtc

SEQ ID NO: 258862 - DNA, 75 bp, synthetic construct
  source 1..75: mol_type = other DNA
cactgctatcagtttgaagaagttctgcatatttctgataatgtgaagaaaaaactgccggaaggcgtgaagatg

SEQ ID NO: 258863 - DNA, 75 bp, synthetic construct
  source 1..75: mol_type = other DNA
ctacgatacagcttagtggcaacctgttaagtgaaaactggggggatgatggcgaatggacactggcgggcgttg

SEQ ID NO: 258864 - DNA, 75 bp, synthetic construct
  source 1..75: mol_type = other DNA
tggcgatacggattacaaccgtcaggtcatttttaccgataaccagcaaaatagtgtaatggagataactgcaga

SEQ ID NO: 258865 - DNA, 75 bp, synthetic construct
  source 1..75: mol_type = other DNA
ttgacagcaatgtggcaggggggtatgggggggcgatctattccgcgggaacaaatgacgttggtgatattgatc

SEQ ID NO: 258866 - DNA, 75 bp, synthetic construct
  source 1..75: mol_type = other DNA
cgtcgttgtgaatctctgggactggcccgggaggaaatgcagatgctgcagggactgaccattgaggaaatccat

SEQ ID NO: 258867 - DNA, 75 bp, synthetic construct
  source 1..75: mol_type = other DNA
atgaataacagcttatctcaggcaaccaacggtctgctgatgcaactggtgatggacctcaggagcggctacctg

SEQ ID NO: 258868 - DNA, 75 bp, synthetic construct
  source 1..75: mol_type = other DNA
gtgaggggatggcatcagggaacagcggggcctaatgatgtatcggtcagtcgccggaaacggaacagggaaaaa

SEQ ID NO: 258869 - DNA, 75 bp, synthetic construct
  source 1..75: mol_type = other DNA
gataaatatggcggtatccccccttataaggaaacacaacagtatgtaaataagatcatggcaatgttaggaggt

SEQ ID NO: 258870 - DNA, 75 bp, synthetic construct
  source 1..75: mol_type = other DNA
cgtgcactgcgagaacgagagcatctgtctcaacctgtttttgccagatacctcaacgtcagtaaaaacctgata

SEQ ID NO: 258871 - DNA, 75 bp, synthetic construct
  source 1..75: mol_type = other DNA
atcactggatgcgctggaagccatgatgttaattgctgagcagcaggacatttcgttaaccgcagtctggacgtt

SEQ ID NO: 258872 - DNA, 75 bp, synthetic construct
  source 1..75: mol_type = other DNA
atgattggtttagtcggtaaaaaagcgggtatgacccgtatcttcacagaagacggcgtttctatcccagtaacc

SEQ ID NO: 258873 - DNA, 75 bp, synthetic construct
  source 1..75: mol_type = other DNA
caaacgcatccattcttaggcccgaaactgacgatttatcagcaggatgcgatgacctttaactttggcgaactg

SEQ ID NO: 258874 - DNA, 75 bp, synthetic construct
  source 1..75: mol_type = other DNA
gtacaggaaatgaccagtcaacctcttctgactgagggacgtaggcaaccaggtttttctgtagcgcctgtcgcg

SEQ ID NO: 258875 - DNA, 75 bp, synthetic construct
  source 1..75: mol_type = other DNA
agcgccggcacgctttccgcccggactgccgggcacttcagcaataatggtggcacgataaatgccgacacactg

SEQ ID NO: 258876 - DNA, 75 bp, synthetic construct
  source 1..75: mol_type = other DNA
acatggcaaacaatctgctggtcggtgcaaatcatgaaggccatgcggacagtaccacgcagtcggcagtgtctg

SEQ ID NO: 258877 - DNA, 75 bp, synthetic construct
  source 1..75: mol_type = other DNA
tcagcgatcgctttgtccagacgaccgacacgcaataccagtacagcgatgtgaatgtaatcgccattcatcacg

SEQ ID NO: 258878 - DNA, 75 bp, synthetic construct
  source 1..75: mol_type = other DNA
catcaaccgcaaaaaagcgaacgttatgcgcccggtggaataccagaacggcgaagcattcactatccgtaacgt

SEQ ID NO: 258879 - DNA, 75 bp, synthetic construct
  source 1..75: mol_type = other DNA
gatggtgcgggacgtgtggcagctcatgcagtagtgaatgcagccctgtctctggcacagggtaagaatgctctt

SEQ ID NO: 258880 - DNA, 75 bp, synthetic construct
  source 1..75: mol_type = other DNA
tgaactgagtgagacagagaagcagacggtctcgacactggcaacggttgctgccggcctggccggtggtctggt

SEQ ID NO: 258881 - DNA, 75 bp, synthetic construct
  source 1..75: mol_type = other DNA
gcggtggtgctgtctctgagtttaccaatggaattatcaaggatttcaataatcctcaagttcctgaaaaaaagg

SEQ ID NO: 258882 - DNA, 75 bp, synthetic construct
  source 1..75: mol_type = other DNA
cacatgcaaatcagacgctgtcccccatctttgacagggaaaaagagcagcagcggttgcagatggcgcagctca

SEQ ID NO: 258883 - DNA, 75 bp, synthetic construct
  source 1..75: mol_type = other DNA
gctggataaccgtgagggtggccggctggtcagtgaaggtgaaatccgtctgcatacgggaggtctgcagaacag

SEQ ID NO: 258884 - DNA, 75 bp, synthetic construct
  source 1..75: mol_type = other DNA
acagtcaggtaagacgactgttgagaataatgcgctcagtctgccatcaggaatggtgagttatggtcaggcggt

SEQ ID NO: 258885 - DNA, 75 bp, synthetic construct
  source 1..75: mol_type = other DNA
ggcgagtgtgagcctcagccgggataaaatgcacagtaactacgacagtgtgcaggagcagacggggatttttgc

SEQ ID NO: 258886 - DNA, 75 bp, synthetic construct
  source 1..75: mol_type = other DNA
agcgcagggaaccaatgccggaaataataacacagtgggcgtcagcctctcttacggcagtcagtcttcgaaatc

SEQ ID NO: 258887 - DNA, 75 bp, synthetic construct
  source 1..75: mol_type = other DNA
aggcggcgaaatctgccggaaacagccggcttgaagctctgcagggggtgaaggccgcgctctcaggcgctcagg

SEQ ID NO: 258888 - DNA, 75 bp, synthetic construct
  source 1..75: mol_type = other DNA
taattcagaccatcacgctgaagccgggggaactcaccagccacggacaggttcagggcagccagaccactcttt

SEQ ID NO: 258889 - DNA, 75 bp, synthetic construct
  source 1..75: mol_type = other DNA
tctggtatcagcagaaaacacgtcaaagctggaaggaaagaacacatcccgtggcagcagtgtgggagttggtat

SEQ ID NO: 258890 - DNA, 75 bp, synthetic construct
  source 1..75: mol_type = other DNA
tcaggtgatattattggtgctataggtggtgaatttatcagcaatgcagttaaagatgagataaatggaacgaaa

SEQ ID NO: 258891 - DNA, 75 bp, synthetic construct
  source 1..75: mol_type = other DNA
atggtccaaatacagcttcactggccggggctggtattggtgctggtctgggtggggcatttgggaagtatgccc

SEQ ID NO: 258892 - DNA, 75 bp, synthetic construct
  source 1..75: mol_type = other DNA
gcgcggcaattggtagtagtattaaaggcgaggatccgacaaattcagttattgggacaggattaggttcagtat

SEQ ID NO: 258893 - DNA, 75 bp, synthetic construct
  source 1..75: mol_type = other DNA
ctccaaagaaatggtgccgagcaagattccgggggctgcaggtaatatgggggcttctattacatcagaaatgac

SEQ ID NO: 258894 - DNA, 75 bp, synthetic construct
  source 1..75: mol_type = other DNA
ggctcagataaacgctggagtgctggtgaaccgggtgtttatgtggataacgattccagtgactcactgaaaaaa

SEQ ID NO: 258895 - DNA, 75 bp, synthetic construct
  source 1..75: mol_type = other DNA
ggacggtgcgggacgtgtggcagctcatgcagtagtgaatgcagccctgtctctggcacagggtaagaatgctct

SEQ ID NO: 258896 - DNA, 75 bp, synthetic construct
  source 1..75: mol_type = other DNA
aagcagggtctggagatcattgcggcttcggtgacaccaattttaggttctgccgcagcaaagcaattaagtaaa

SEQ ID NO: 258897 - DNA, 75 bp, synthetic construct
  source 1..75: mol_type = other DNA
agctcgctggatgaataccataaagtgaccggcagcagcgggatgttatcgaaaaccaccacaaccacgcatgat

SEQ ID NO: 258898 - DNA, 75 bp, synthetic construct
  source 1..75: mol_type = other DNA
aagcgaaagcgaaccctggcatggcggcgctggcgcaagggcaattccagcaagcgaccaatggcagctcggtgc

SEQ ID NO: 258899 - DNA, 75 bp, synthetic construct
  source 1..75: mol_type = other DNA
ctggcgtatcacgttggtattcaccgtgtttatgatggcgctcatggttgtaccgttgagcgtggttaacccacg

SEQ ID NO: 258900 - DNA, 75 bp, synthetic construct
  source 1..75: mol_type = other DNA
cagcattaacagaagcggctatcaatctaggatacgttacaagaagcaggcccgtacctggggctgcgctacttt

SEQ ID NO: 258901 - DNA, 75 bp, synthetic construct
  source 1..75: mol_type = other DNA
gtggatgcaatggaataatcttttatggagcattgcttcaattctgcttctctggactgcgattaatcgttgtcg

SEQ ID NO: 258902 - DNA, 75 bp, synthetic construct
  source 1..75: mol_type = other DNA
tctggtctggccggaaagtggatgggggctggcggtgatgatattatccgcctggctgattgccgcgagtgtcat

SEQ ID NO: 258903 - DNA, 75 bp, synthetic construct
  source 1..75: mol_type = other DNA
agggaacgcgcttcgaaggcactgcactgttacgtgatttccgcattacggacttccaggattatcaggcgatca

SEQ ID NO: 258904 - DNA, 75 bp, synthetic construct
  source 1..75: mol_type = other DNA
tggccacggcatttcgtggccaaattatccgcctctggacgcttcaatatcccggaacgcaatccgaagctgccg

SEQ ID NO: 258905 - DNA, 75 bp, synthetic construct
  source 1..75: mol_type = other DNA
tattgtagctaagctttatcataatgctccagaatcttattatctcctatgttcaagaagagctataaatcttgc

SEQ ID NO: 258906 - DNA, 75 bp, synthetic construct
  source 1..75: mol_type = other DNA
tgatgagactgctggccggaagcgggtttaagctgattcatgaaacgcagggcggtaagaaaacgtaccgcttta

SEQ ID NO: 258907 - DNA, 75 bp, synthetic construct
  source 1..75: mol_type = other DNA
cctgtgcctggagcagccttattatcatggttatcgaatcccgctgaaacgcctctgtgggcggctcagaccgca

SEQ ID NO: 258908 - DNA, 75 bp, synthetic construct
  source 1..75: mol_type = other DNA
ttgagcagttagtcgcttccttgcctgatagcatagacaggcaaactgctacaggatggttcgtggcagcaattg

SEQ ID NO: 258909 - DNA, 75 bp, synthetic construct
  source 1..75: mol_type = other DNA
tatcccggaacgcaatccgaagcagctgctgcattaacagaagcggctatcaatctgggatacgttacaagaagc

SEQ ID NO: 258910 - DNA, 75 bp, synthetic construct
  source 1..75: mol_type = other DNA
tggagcattgcttcaattctgcttctctggactgcgattaatcgttgtcggagtgtgctttttatgagtgcagaa

SEQ ID NO: 258911 - DNA, 75 bp, synthetic construct
  source 1..75: mol_type = other DNA
gacaacgcgtctgaccggcagtgagcggagtctgctggccgccggggtgaaagatgacggacgtctggcggaagc

SEQ ID NO: 258912 - DNA, 75 bp, synthetic construct
  source 1..75: mol_type = other DNA
gtgaccattgaagacatcctggaactgattgttggtgagattgaagacgagtatgacgaagaagatgatatcgac

SEQ ID NO: 258913 - DNA, 75 bp, synthetic construct
  source 1..75: mol_type = other DNA
tgaagacgagtatgacgaagaagatgatatcgacttccgtcagctgagtcgtcatacctggaccgtgcgcgcact

SEQ ID NO: 258914 - DNA, 75 bp, synthetic construct
  source 1..75: mol_type = other DNA
gaacaaacacaggctgggctggataagatagcgaaaggtgatatgccggacagtaccaatatcacgaaagtgatc

SEQ ID NO: 258915 - DNA, 75 bp, synthetic construct
  source 1..75: mol_type = other DNA
ggcgtttatgtggataacgattccagtaactcactgaaaaaactgcatacaccggaaggcgccagagataaattc

SEQ ID NO: 258916 - DNA, 75 bp, synthetic construct
  source 1..75: mol_type = other DNA
gcttacggttatggcagacaggacgctcagtaataatgacggcgtgctctcttccggcgcgacattgtttgtcag

SEQ ID NO: 258917 - DNA, 75 bp, synthetic construct
  source 1..75: mol_type = other DNA
atgcgtcaaactaaaaccggtatcctgctggcaaacctgggtacgcccgatgcccccacacctgaagcggtaaaa

SEQ ID NO: 258918 - DNA, 75 bp, synthetic construct
  source 1..75: mol_type = other DNA
actggcacgcattctggcgcgcaaacgtagcattccggggatatcgtttattcgtgattacgccgataaccacga

SEQ ID NO: 258919 - DNA, 75 bp, synthetic construct
  source 1..75: mol_type = other DNA
tgacaataaatcattctatctgcctgaaaagtaccgtccagaaaacaggattacggaactagccatgatgaaaga

SEQ ID NO: 258920 - DNA, 75 bp, synthetic construct
  source 1..75: mol_type = other DNA
atgagtcactcatccgcccccgaaagggctactggagctgtcattacagattggcgaccggaagatcctgcgttc

SEQ ID NO: 258921 - DNA, 75 bp, synthetic construct
  source 1..75: mol_type = other DNA
attttccgtaaactgacgatggatcgcgtgaaagcagaaggtggttctgacgaacgcgctatgcgtgaggcagca

SEQ ID NO: 258922 - DNA, 75 bp, synthetic construct
  source 1..75: mol_type = other DNA
aacgttgccggacaacgacccgtgaactggcttcagcactgggaatggcaccggaaaaagtgatgatgacctttc

SEQ ID NO: 258923 - DNA, 75 bp, synthetic construct
  source 1..75: mol_type = other DNA
tgctgaacgacccgaacacaccgctggtgaaccgcgccacgcagggggtttatccgccagcctcgactgttaagc

SEQ ID NO: 258924 - DNA, 75 bp, synthetic construct
  source 1..75: mol_type = other DNA
tggaagaatctgcggataccttcttctatcaggtggcctacgatatggggatcgatcgcctctccgaatggatgg

SEQ ID NO: 258925 - DNA, 75 bp, synthetic construct
  source 1..75: mol_type = other DNA
acgctggatgccctgcgcaacgtggtcgatctgaccgatgacgatattgcagccttcagaaaagagcgcgcacgt

SEQ ID NO: 258926 - DNA, 75 bp, synthetic construct
  source 1..75: mol_type = other DNA
gccggtaaaaatgaaggtattgccggcttcgagaaagtggatatgactgttggtagcgatctgaaagctgacaat

SEQ ID NO: 258927 - DNA, 75 bp, synthetic construct
  source 1..75: mol_type = other DNA
ccacagatgttaataccgtcactatttatggctctgtgtctggtgaaattttaggcggatacggcagtgataata

SEQ ID NO: 258928 - DNA, 75 bp, synthetic construct
  source 1..75: mol_type = other DNA
ggtgaaccgcgccacacagggggtttatcctcccgcgtctacagttaaaccctatgtggcggtttcggcattgag

SEQ ID NO: 258929 - DNA, 75 bp, synthetic construct
  source 1..75: mol_type = other DNA
cttaaaaccgggtacggtgaccgccaaaattcgcgccatctggaaagtgatgcaccggcagggctttatcgctga

SEQ ID NO: 258930 - DNA, 75 bp, synthetic construct
  source 1..75: mol_type = other DNA
ccactggactggtttatacggtttctctgaatcatgtcactacaacagatgtaacagttacagttacattgggta

SEQ ID NO: 258931 - DNA, 75 bp, synthetic construct
  source 1..75: mol_type = other DNA
accaacagtgagtattagcgttgagacaacatcaacagatgtcaatggtgatggttttactggtatagctagtgt

SEQ ID NO: 258932 - DNA, 75 bp, synthetic construct
  source 1..75: mol_type = other DNA
tggcgctggtttccacgccaagctatgacccaaacttgtttgttgacggtatatccagcaaagattattccgcat

SEQ ID NO: 258933 - DNA, 75 bp, synthetic construct
  source 1..75: mol_type = other DNA
tgctgaacgacccgaacacaccgctggtgaaccgagccacgcagggggtttatccaccggcgtctacggttaaac

SEQ ID NO: 258934 - DNA, 75 bp, synthetic construct
  source 1..75: mol_type = other DNA
ggtatccctctggcactcaaccgcactatctaccagatagaaatgatgccggagaaagtcgataacgtgcagcaa

SEQ ID NO: 258935 - DNA, 75 bp, synthetic construct
  source 1..75: mol_type = other DNA
tgggccagacggaacaaaaaccgatggcaatcaaagcattacgactgttgatttaggtgctggtgatgatctaat

SEQ ID NO: 258936 - DNA, 75 bp, synthetic construct
  source 1..75: mol_type = other DNA
tttgttaatcatccctttacccgtctggttacccagcgattaatatggggggtttatccggcaaatgaaccgcgt

SEQ ID NO: 258937 - DNA, 75 bp, synthetic construct
  source 1..75: mol_type = other DNA
gcgtaccggctggtccttaagttttcacccggttttaaccattacagtactgatagcaaagcgctaatgagcttc

SEQ ID NO: 258938 - DNA, 75 bp, synthetic construct
  source 1..75: mol_type = other DNA
caaaacgttcgcaagaaaagcgttccccggttgcgcgccgatgacgatcaactgaaagcgcccgaggcactggcc

SEQ ID NO: 258939 - DNA, 75 bp, synthetic construct
  source 1..75: mol_type = other DNA
acggggcatatcgagttgtatatgaagagccgcctttctgaagatatttccagacgcacacttcagaacgaaatg

SEQ ID NO: 258940 - DNA, 75 bp, synthetic construct
  source 1..75: mol_type = other DNA
cgaaagcacggcacgggatctgacgacacagatcctcgcctggccacaagaaggcaaatctgcccgtgctgtcag

SEQ ID NO: 258941 - DNA, 75 bp, synthetic construct
  source 1..75: mol_type = other DNA
cccacccgttagaaatgacagcagaaatgcgcagtgaatttgcacagctttttgccgattacgaaattatgccgc

SEQ ID NO: 258942 - DNA, 75 bp, synthetic construct
  source 1..75: mol_type = other DNA
ttcgagctgggttatatctacgcacataataagattgatgaatttagtggcgtggtttgtgataacgattgctgg

SEQ ID NO: 258943 - DNA, 75 bp, synthetic construct
  source 1..75: mol_type = other DNA
tggtatcagatacgcattgcgggcagggatgtatctgaacaggagcttcattccagagtatgtgagccgttgaat

SEQ ID NO: 258944 - DNA, 75 bp, synthetic construct
  source 1..75: mol_type = other DNA
ggacagatttatcttggttcaggtagtgatacatttatccagggggatgctactgacaataacgatacaacatta

SEQ ID NO: 258945 - DNA, 75 bp, synthetic construct
  source 1..75: mol_type = other DNA
cgaaaactggataatggctatttcgctgggttctccgtacaaccgctgggggatatgcacggttcagtaaatatc

SEQ ID NO: 258946 - DNA, 75 bp, synthetic construct
  source 1..75: mol_type = other DNA
tggcgatttaaaaatctacggtgacgtagaatttaatatggatgcggaaagtaatcatggcctgctggcaatgac

SEQ ID NO: 258947 - DNA, 75 bp, synthetic construct
  source 1..75: mol_type = other DNA
gggcggagattgtggcacccgctatccgcgaagcctgcggagttaatgcgactttcatcgcggacggggtgccac

SEQ ID NO: 258948 - DNA, 75 bp, synthetic construct
  source 1..75: mol_type = other DNA
atgcgcccggtggagtaccagaacggcgaagcattcactatccgtaacgtgcgggttatgcctgaatccattccg

SEQ ID NO: 258949 - DNA, 75 bp, synthetic construct
  source 1..75: mol_type = other DNA
catcagccgcaaaaaagcgaacgttatgcgcccggtggagtaccagaacggcgaagcattcactatccgtaacgt

SEQ ID NO: 258950 - DNA, 75 bp, synthetic construct
  source 1..75: mol_type = other DNA
gcgggggatggttgtcggtggaggggcggagattgtggcacccgctatccgcgaagcctgcggagttaatgcgac

SEQ ID NO: 258951 - DNA, 75 bp, synthetic construct
  source 1..75: mol_type = other DNA
acaggaagtggatgtggttgtcaccctgccactgagcgagtatttcgacacaaacgcacagccggatatgaccaa

SEQ ID NO: 258952 - DNA, 75 bp, synthetic construct
  source 1..75: mol_type = other DNA
gctggttttaaagcactggctgacatgagtccgtttgaatccctgctgattgtggatttaggcggaaccacgctg

SEQ ID NO: 258953 - DNA, 75 bp, synthetic construct
  source 1..75: mol_type = other DNA
tgcgtctgcgtgaagagtttggcgtgtatgcagtggcttctggtcgtgtgaacgtggccgggatgacgccagata

SEQ ID NO: 258954 - DNA, 75 bp, synthetic construct
  source 1..75: mol_type = other DNA
caaacgtgctcgcacggcacagactccgggtggcactggcgcactacgcgtggctgccgatttcctggcaaaaaa

SEQ ID NO: 258955 - DNA, 75 bp, synthetic construct
  source 1..75: mol_type = other DNA
ctgccgacccgattctgggcctggccgatctgtttcgtgccgatgaacgtcccggcaaaattaacctcgggattg

SEQ ID NO: 258956 - DNA, 75 bp, synthetic construct
  source 1..75: mol_type = other DNA
atgaataatcgagtccaccagggccacttagcccgtaaacgcttcgggcaaaactttctcaacgatcagttcgtg

SEQ ID NO: 258957 - DNA, 75 bp, synthetic construct
  source 1..75: mol_type = other DNA
tccgttgagaaaggctggttaccgctgtttgactttgcttaccagggttttgctcgcggtctggaagaagatgct

SEQ ID NO: 258958 - DNA, 75 bp, synthetic construct
  source 1..75: mol_type = other DNA
cgttgcacccaggaactgctgtttggtaaaggtagcgccctaatcaacgacaaacgcgcccacacagctcagacc

SEQ ID NO: 258959 - DNA, 75 bp, synthetic construct
  source 1..75: mol_type = other DNA
tgatgaagtggaaataccgttctatcaggaaattgaactatctgccggtaatggtacttatgttgatatagatcg

SEQ ID NO: 258960 - DNA, 75 bp, synthetic construct
  source 1..75: mol_type = other DNA
aggcggatacggtagtgataatattacggtaactaaaaatctgaccggtaatatttctgttggtgataatgccga

SEQ ID NO: 258961 - DNA, 75 bp, synthetic construct
  source 1..75: mol_type = other DNA
atgacgctctaccagataaaaccgctctttcagtcactgttaaggccgacgatgttttggcttcataagcggcaa

SEQ ID NO: 258962 - DNA, 75 bp, synthetic construct
  source 1..75: mol_type = other DNA
gttacagcgaatcacatcactcttgctgcactggcgctttctcttcttaccggtttgctgttgatgttggtgtca

SEQ ID NO: 258963 - DNA, 75 bp, synthetic construct
  source 1..75: mol_type = other DNA
accggacggcacgacggacacagtggagcacacgctgagcgcagatgaagtgactgcaggtaaagcagatgtgac

SEQ ID NO: 258964 - DNA, 75 bp, synthetic construct
  source 1..75: mol_type = other DNA
aggttccattaacggtggagaaggtagcgatactctggttctggcaggtaatatttctgtcaatctggctacagg

SEQ ID NO: 258965 - DNA, 75 bp, synthetic construct
  source 1..75: mol_type = other DNA
acggcaatgatactgttaccgtcactgatggtgcatataacacgactatttcactgggggcgggagatgatgtat

SEQ ID NO: 258966 - DNA, 75 bp, synthetic construct
  source 1..75: mol_type = other DNA
gcctgctcgattggcgtatatttgaaaacccatatttgatgcttaatgatataaagatacccattatggaatgca

SEQ ID NO: 258967 - DNA, 75 bp, synthetic construct
  source 1..75: mol_type = other DNA
atggttgtcggtggcggggcggagattgtggcacccgctatccgcgaagcctgcggagttaatgcgactttcatc

SEQ ID NO: 258968 - DNA, 75 bp, synthetic construct
  source 1..75: mol_type = other DNA
tggttgtcaccctgccactgagcgagtatttcgacacaaacgcacagccggacatggccaacatcaaccgcaaaa

SEQ ID NO: 258969 - DNA, 75 bp, synthetic construct
  source 1..75: mol_type = other DNA
gagtgcaatcagcaaacacgtctgggggcgattttgaatgaaactggcgatgttatttccgatattgcgctctat

SEQ ID NO: 258970 - DNA, 75 bp, synthetic construct
  source 1..75: mol_type = other DNA
atgacgctctaccagataaaaccgctctttcagtcgctgttaaggccgacgatgttttggctttacaagcaccac

SEQ ID NO: 258971 - DNA, 75 bp, synthetic construct
  source 1..75: mol_type = other DNA
tgcacagcggcgggatggatgaagtttcattacacgcgccgacaatcgttgccgaactgcatgatggcgaaatta

SEQ ID NO: 258972 - DNA, 75 bp, synthetic construct
  source 1..75: mol_type = other DNA
cggaagtgcgtcagcacacctggtcatccggtaccaacggtgtggtggctgcaacgttctcactgcgtctgaaag

SEQ ID NO: 258973 - DNA, 75 bp, synthetic construct
  source 1..75: mol_type = other DNA
cctggtcatccggtaccaacggcgtggtggcagcaacgttttcactgcgtatgaaaggcaaaccggtgtcctttg

SEQ ID NO: 258974 - DNA, 75 bp, synthetic construct
  source 1..75: mol_type = other DNA
aattcgacctcaatttactggtcatatttgagtgcatttatcaacacctcagcattagcaaagcagcagaatcat

SEQ ID NO: 258975 - DNA, 75 bp, synthetic construct
  source 1..75: mol_type = other DNA
caaaaatcccgctggatcatcggcattgttttccaaggctttaaaacccataaatggacctccagcctgacgctg

SEQ ID NO: 258976 - DNA, 75 bp, synthetic construct
  source 1..75: mol_type = other DNA
tccgttttccggtggtggacgaagccaaagaacgcgagcagcgtaaatttttacagcacgcgcggacatcaaaca

SEQ ID NO: 258977 - DNA, 75 bp, synthetic construct
  source 1..75: mol_type = other DNA
cttcagtaagccaggtgcgcagtccgctgatgcggggaaatatacctgcgtggtgaccgattcggcagagaaagc

SEQ ID NO: 258978 - DNA, 75 bp, synthetic construct
  source 1..75: mol_type = other DNA
atgagtatggagctaatggttaaagcgatgaaaattcgagtgggaaatccattgcgaaaactggttctgattaag

SEQ ID NO: 258979 - DNA, 75 bp, synthetic construct
  source 1..75: mol_type = other DNA
atgagccgttacgcccccacaccggaagttatggctattggtcaaattaatatttccggcaatgttacacctgcg

SEQ ID NO: 258980 - DNA, 75 bp, synthetic construct
  source 1..75: mol_type = other DNA
cttcaatttgtgggtaacacgccgtgtgcaaacggtggatgaggacgggatcggtagcgacagtgaagttaaaaa

SEQ ID NO: 258981 - DNA, 75 bp, synthetic construct
  source 1..75: mol_type = other DNA
atggtcatcatcaaacaggggaacagtaggttcattatatatttataataatccctatactcataccgtcgatta

SEQ ID NO: 258982 - DNA, 75 bp, synthetic construct
  source 1..75: mol_type = other DNA
tttaggtacacatgctcgccccggcgacagcggttctcctttatttgcatatgacattattctgcaaaaatgggt

SEQ ID NO: 258983 - DNA, 75 bp, synthetic construct
  source 1..75: mol_type = other DNA
gtggcaacaatccttaccagacataccgcgactttgcagaaaacaaagggcagtttcaggctggcgcaacaaaca

SEQ ID NO: 258984 - DNA, 75 bp, synthetic construct
  source 1..75: mol_type = other DNA
cggggaaacggcccttaaccgctgggtgaaatcgcagacggccgcgcagaacggcggcgaaggtgtggctaactg

SEQ ID NO: 258985 - DNA, 75 bp, synthetic construct
  source 1..75: mol_type = other DNA
tcgaaaacttcgacgcgatgggcatccatactggtgattccatcactgtagcgccagcgcaaacgctgaccgaca

SEQ ID NO: 258986 - DNA, 75 bp, synthetic construct
  source 1..75: mol_type = other DNA
tgccaccgccgacgcgatagataaagcagaagaccgtcgccgtttcgacgtggcgatgaagaaaatcggtctgga

SEQ ID NO: 258987 - DNA, 75 bp, synthetic construct
  source 1..75: mol_type = other DNA
agcgtatctggtatatcgccgatgctttccgcgcgggcctgtctgtagacggcgtgttcaacctgaccaacattg

SEQ ID NO: 258988 - DNA, 75 bp, synthetic construct
  source 1..75: mol_type = other DNA
atacctacatcatcaacaccacctcaggtcgtcgcgcgattgaagactcccgcgtgattcgtcgcagtgcgctgc

SEQ ID NO: 258989 - DNA, 75 bp, synthetic construct
  source 1..75: mol_type = other DNA
gaattcgactactgctgtgtacacgcctcgctggcgctgcgtgaagacggttacgaaaccattatggttaactgt

SEQ ID NO: 258990 - DNA, 75 bp, synthetic construct
  source 1..75: mol_type = other DNA
acccagatgaaatcggttggtgaagtgatggcgatcggtcgcacccagcaggaatcgctgcaaaaagccctgcgc

SEQ ID NO: 258991 - DNA, 75 bp, synthetic construct
  source 1..75: mol_type = other DNA
cgcccgcggtctggatctctctccgaccaaagagctgctgattgatgagtcgctgatcggctggaaagagtacga

SEQ ID NO: 258992 - DNA, 75 bp, synthetic construct
  source 1..75: mol_type = other DNA
gagcagggcgtaactaaagaagttatcccgccgtactactcggtgaaagaagtggtgctgccgttcaacaaattc

SEQ ID NO: 258993 - DNA, 75 bp, synthetic construct
  source 1..75: mol_type = other DNA
acccgctggtggtgcgtccgtcttatgttcttggcggtcgggcgatggagatcgtctacgacgaagccgacctgc

SEQ ID NO: 258994 - DNA, 75 bp, synthetic construct
  source 1..75: mol_type = other DNA
ggcgaaactggcggtgggttacaccctcgacgagctgatgaacgacatcaccggtggccgtactccggcctcctt

SEQ ID NO: 258995 - DNA, 75 bp, synthetic construct
  source 1..75: mol_type = other DNA
gagcagggcgtaaccaaagaggttattccgccgtactactcggtaaaagaagtggtgctgccgttcaacaaattc

SEQ ID NO: 258996 - DNA, 75 bp, synthetic construct
  source 1..75: mol_type = other DNA
tcgaaaactttgatgcgatgggcatccataccggtgactccatcactgtcgcgccagcccaaacgctgaccgaca

SEQ ID NO: 258997 - DNA, 75 bp, synthetic construct
  source 1..75: mol_type = other DNA
gctatgcgggcacttatgcaatagctaacgtactgctgacactggcagggacaatcattgtgatggtatggcccg

SEQ ID NO: 258998 - DNA, 75 bp, synthetic construct
  source 1..75: mol_type = other DNA
aggtttatttaccggtgatccgcgcctatcgcgtcggcccggagctggtggcctggaccgacggcaaaaatctgc

SEQ ID NO: 258999 - DNA, 75 bp, synthetic construct
  source 1..75: mol_type = other DNA
gcctgggccgacggcaagaacttgcgtgaattgggtatttatcgacagaccggttgctatattgaacgtatccgt

SEQ ID NO: 259000 - DNA, 75 bp, synthetic construct
  source 1..75: mol_type = other DNA
cagctgcgtactgagcctgactccggcggatctggcagcagcgaaagcacagaacatctcaattctgtcttacct

SEQ ID NO: 259001 - DNA, 75 bp, synthetic construct
  source 1..75: mol_type = other DNA
tgctgacggtaatgttcttcgtcttcagctgcgtactgagcctgtctccggcagacctggcagccgcaaaagagc

SEQ ID NO: 259002 - DNA, 75 bp, synthetic construct
  source 1..75: mol_type = other DNA
atggaaacgactcaaaccagcacgattgcgtcgaaagactctcgtagtgcctggcgcaagacagacaccatgtgg

SEQ ID NO: 259003 - DNA, 75 bp, synthetic construct
  source 1..75: mol_type = other DNA
gtccggcaccgcagattgtctataccctggtgattgccaccacggtactgattatcgcctgtccgtgtgcgctgg

SEQ ID NO: 259004 - DNA, 75 bp, synthetic construct
  source 1..75: mol_type = other DNA
gcgaaatcactcagggcgaagcgtggctggatgaggcgatgctgacgggcgaacctattccacagcaaaaaggcg

SEQ ID NO: 259005 - DNA, 75 bp, synthetic construct
  source 1..75: mol_type = other DNA
caaaacctgcttggcgcgtttatctacaacagtatcggtattccggtcgccgccggtattttgtggccgttcacc

SEQ ID NO: 259006 - DNA, 75 bp, synthetic construct
  source 1..75: mol_type = other DNA
cgccgatcgcattggctttatctcaattcacagccaggttaccgatttgctggcattctgcgcattctttgtcat

SEQ ID NO: 259007 - DNA, 75 bp, synthetic construct
  source 1..75: mol_type = other DNA
tgggctgatgatcgggatgatcaccttccagttcagcacattcagcttcggcatggggaacgctgccggtttgct

SEQ ID NO: 259008 - DNA, 75 bp, synthetic construct
  source 1..75: mol_type = other DNA
cgtctggcggcggcgctggaacaaggttccagccatccgctggcacgggcgatcctcgataaagcaggcaatatc

SEQ ID NO: 259009 - DNA, 75 bp, synthetic construct
  source 1..75: mol_type = other DNA
ccattatcgctatcaccaaatccttccttggccactacctgggcgcacgtgaaggctttaacgggatggtgatta

SEQ ID NO: 259010 - DNA, 75 bp, synthetic construct
  source 1..75: mol_type = other DNA
aacgcaggttacccaatcactgaaaccctgagcggcagcggcgatctgggtcaggttctggtggatgcaatcaag

SEQ ID NO: 259011 - DNA, 75 bp, synthetic construct
  source 1..75: mol_type = other DNA
caaactaatgtcttccgcacgtcagctgatcaacaccgttcacgttgatatgctgattgttccgctgcgcgacga

SEQ ID NO: 259012 - DNA, 75 bp, synthetic construct
  source 1..75: mol_type = other DNA
ccaggttctggtcgatgcaatcaagaaatacgatatggatctggtggtttgtggtcaccaccaggacttctggag

SEQ ID NO: 259013 - DNA, 75 bp, synthetic construct
  source 1..75: mol_type = other DNA
cgactgacgcagggacagactggccttgatgccgatatcgtgacgtatcaggaccgtgattatcgtgtgaccttc

SEQ ID NO: 259014 - DNA, 75 bp, synthetic construct
  source 1..75: mol_type = other DNA
tgcagtccggccaggttatcagtggcgcgattctcatcgtgacaactgagcggctgacgcaggggcagactggcc

SEQ ID NO: 259015 - DNA, 75 bp, synthetic construct
  source 1..75: mol_type = other DNA
gaccgctccctggagaaccgccgtatgcagtccgggcaagttatcagtggcgcgattcttatcgtgacaactgag

SEQ ID NO: 259016 - DNA, 75 bp, synthetic construct
  source 1..75: mol_type = other DNA
aactgcgactcgaaccgtggttaaaaacactgacccacactagtgactacaaagcgtttcagaataaaaacgtgg

SEQ ID NO: 259017 - DNA, 75 bp, synthetic construct
  source 1..75: mol_type = other DNA
ttcgcttctcttcaatgaagcaagcggatggtagttcttatgaacgccaaaagagaacagccgcagagatagccg

SEQ ID NO: 259018 - DNA, 75 bp, synthetic construct
  source 1..75: mol_type = other DNA
ggatcaccttaacgcgacatacacaccaccaccagccgcaagtcacaagaggcattcaaactggtcacgggcaat

SEQ ID NO: 259019 - DNA, 75 bp, synthetic construct
  source 1..75: mol_type = other DNA
tatcatggcaaaccgtaaaatatcgtttcgtagagaatctctgtttaccataatcaatactattgcagttacgga

SEQ ID NO: 259020 - DNA, 75 bp, synthetic construct
  source 1..75: mol_type = other DNA
tgatgtcaacagaaagcgctgaagatttattaagttaccgcaaggcagatttggtggtgacgctaactcccgtta

SEQ ID NO: 259021 - DNA, 75 bp, synthetic construct
  source 1..75: mol_type = other DNA
ttatatcgtaactatcaaaaaaaccttcaattaaaacaaataaaactagaacaaaatctaccttctaatactctt

SEQ ID NO: 259022 - DNA, 75 bp, synthetic construct
  source 1..75: mol_type = other DNA
gtaaaacagcagttgaaaagcctggtcgagattaccttcgtcatctgaaagaagccgtcaaacctgctgaggctg

SEQ ID NO: 259023 - DNA, 75 bp, synthetic construct
  source 1..75: mol_type = other DNA
atcgaacagatggaagcgcaggggattgtcagcgaacaggggcacaacggtaatcgtgaagtgctggccccaccg

SEQ ID NO: 259024 - DNA, 75 bp, synthetic construct
  source 1..75: mol_type = other DNA
tttactgttgattattccaatggcttcggtgatggaatggatgcttatgaggaaaacatccgcgctgctggagtc

SEQ ID NO: 259025 - DNA, 75 bp, synthetic construct
  source 1..75: mol_type = other DNA
cgggcaaccgatatgctgggaaccgttcagacggctttcaaaatggttaattctgctgtttctgccggaatgagg

SEQ ID NO: 259026 - DNA, 75 bp, synthetic construct
  source 1..75: mol_type = other DNA
agccgttgccgaggaacgccgacgccaagaggcggcagaaaaagcccgccttgacgaacagaagcgtatcgccga

SEQ ID NO: 259027 - DNA, 75 bp, synthetic construct
  source 1..75: mol_type = other DNA
gaagcagagaagaaggaagccgctgatcgtgccgagcgtgaaaagcaggaagctatcgaagccgagaagcgcaaa

SEQ ID NO: 259028 - DNA, 75 bp, synthetic construct
  source 1..75: mol_type = other DNA
gatattcagtcgcccactgcccgcggtgccgctacgctgtacaaaatgcgtttttctgatgtccgtaccgggctg

SEQ ID NO: 259029 - DNA, 75 bp, synthetic construct
  source 1..75: mol_type = other DNA
taaagtaatgacccgcctgaccttggttggtgcgctgtacattacttttatctgcctgatcccggagttcatgcg

SEQ ID NO: 259030 - DNA, 75 bp, synthetic construct
  source 1..75: mol_type = other DNA
ccggcaatcttcgcttccagtattattctgttcccggcgaccatcgcgtcatggttcgggggcggtactggttgg

SEQ ID NO: 259031 - DNA, 75 bp, synthetic construct
  source 1..75: mol_type = other DNA
tgcgtctgaaaggcaaaccggtgtcctttgtggtaccgctggcgtttgtgaaaaatctggataagacacttaccg

SEQ ID NO: 259032 - DNA, 75 bp, synthetic construct
  source 1..75: mol_type = other DNA
gcccgtaacaaaccggcgacattgagcaccggtctggtcattcaagtaccagaatacttaagcccaggcgaaaaa

SEQ ID NO: 259033 - DNA, 75 bp, synthetic construct
  source 1..75: mol_type = other DNA
gcgcttgaactgccgcaaaccgttgatctggaaattgttgaaaccgcaccgggcatcaaaggcgcgtctgccagc

SEQ ID NO: 259034 - DNA, 75 bp, synthetic construct
  source 1..75: mol_type = other DNA
atgacgtggaaagacaggcttcaggatgcgtcatttcgcagcgtgccgtttaaggttgaagaagaaagtgcggga

SEQ ID NO: 259035 - DNA, 75 bp, synthetic construct
  source 1..75: mol_type = other DNA
cattttatgccagctgtgaaacaatattcagacccgatttgcgcgggaggccggtggttgttctgtcgaataatg

SEQ ID NO: 259036 - DNA, 75 bp, synthetic construct
  source 1..75: mol_type = other DNA
gctttgcttccggtggatgaggtctggggcgtcgggcgccgcatcagtaaaaaactggaggccatggggattaaa

SEQ ID NO: 259037 - DNA, 75 bp, synthetic construct
  source 1..75: mol_type = other DNA
cggagtgatgctgggggatttctacagtcagggggtggcccagctaaacttgtttgatgataacgtgccacggcg

SEQ ID NO: 259038 - DNA, 75 bp, synthetic construct
  source 1..75: mol_type = other DNA
cagcgaaaatgctgactatcagtataataaaaagcgcctgcgtgaaatcgaccgtcgcgtgcgctatctcactaa

SEQ ID NO: 259039 - DNA, 75 bp, synthetic construct
  source 1..75: mol_type = other DNA
gccccgctgcgaaatctattcaattgatgaagctttttgtgacctgactggtgtaagaaactgcagggttctgca

SEQ ID NO: 259040 - DNA, 75 bp, synthetic construct
  source 1..75: mol_type = other DNA
cagtcggcgtcggcatagcgcagaccaagacgctggctaagctggctaaccatgctgcgaaaaaatggcagcggc

SEQ ID NO: 259041 - DNA, 75 bp, synthetic construct
  source 1..75: mol_type = other DNA
gcagacaatgtggcgttcggggaatcggctctctggtaatgccagcgatctgttcacaatgattaaaaatttttc

SEQ ID NO: 259042 - DNA, 75 bp, synthetic construct
  source 1..75: mol_type = other DNA
gtcaccatgatcaaaacgctttctggtgtcagcctcggcagcgatctgcaaccgcgcggcgtctggaaaacggac

SEQ ID NO: 259043 - DNA, 75 bp, synthetic construct
  source 1..75: mol_type = other DNA
tatggtgttagtttcattatatatgtctgatgattattgtcagtccccttctgatatttacaaggagttacaatt

SEQ ID NO: 259044 - DNA, 75 bp, synthetic construct
  source 1..75: mol_type = other DNA
ccgtactacggcaatagtgcatcagtgaaactattgaccccgacccaggacagtcgggacataatcacagcggcg

SEQ ID NO: 259045 - DNA, 75 bp, synthetic construct
  source 1..75: mol_type = other DNA
gaactgaaccagtcgggaaaagggaaagtgtggtttgcggggcgaggaaccgcccctgaatggcaaatgaaacgg

SEQ ID NO: 259046 - DNA, 75 bp, synthetic construct
  source 1..75: mol_type = other DNA
ggaggcaaaagcccttggcatcagaatggggcagccctggtttcaggtgagacagatgcgcctggagaagaaaat

SEQ ID NO: 259047 - DNA, 75 bp, synthetic construct
  source 1..75: mol_type = other DNA
tggtaacgtgcgcactaccgtacgccaacggctcaatccacctcggccatatgctggagcacatccaggctgatg

SEQ ID NO: 259048 - DNA, 75 bp, synthetic construct
  source 1..75: mol_type = other DNA
caaaaatctcgctggatcatcggcattgttttccagggctttaaaacccacaaatggacctccagcctgacgctg

SEQ ID NO: 259049 - DNA, 75 bp, synthetic construct
  source 1..75: mol_type = other DNA
aaggggcaatcagtaactttgtcagcttcctcgcgatgctggtgatgatccagcttttgctgttgctggcgtatg

SEQ ID NO: 259050 - DNA, 75 bp, synthetic construct
  source 1..75: mol_type = other DNA
tatctctgaaggcatggtgatggctgccggtcctggcgggaaagatatcttcctgttaagcccggatgctggtgc

SEQ ID NO: 259051 - DNA, 75 bp, synthetic construct
  source 1..75: mol_type = other DNA
cgaaactctcttcgcgcattgatgatatcgatctcaacctggaggatttcgttcagcgtgtgaatgccgatatcg

SEQ ID NO: 259052 - DNA, 75 bp, synthetic construct
  source 1..75: mol_type = other DNA
aggctccgtgggttgtggcgaaacaggaaggccgcgatgccgacctgcaggcgatttgctcaatgggcattaacc

SEQ ID NO: 259053 - DNA, 75 bp, synthetic construct
  source 1..75: mol_type = other DNA
ggaactgctgcgccgggagggttgccggggattttttattcataccggtcgtacagggccggtcagccgggccag

SEQ ID NO: 259054 - DNA, 75 bp, synthetic construct
  source 1..75: mol_type = other DNA
tcatatctttgttggcacctaccccaacgaccccgatactcagcgtgatgttgacgaagtgtgcgctcgcttccc

SEQ ID NO: 259055 - DNA, 75 bp, synthetic construct
  source 1..75: mol_type = other DNA
ggatgagttatcccgcgtgctggatgttttcaaaaaacgcggttttaaagtgcgtcagaagccggttaaccgggc

SEQ ID NO: 259056 - DNA, 75 bp, synthetic construct
  source 1..75: mol_type = other DNA
tatgacgaacgcgggcgggggaatgtcaccactcagggccgacgggccattgaataccactcccccgatgaacac

SEQ ID NO: 259057 - DNA, 75 bp, synthetic construct
  source 1..75: mol_type = other DNA
ttagctgacggtgacggtattgctttcgacgtgcagagtcttactgaagattacgacattggcttccgcctgaaa

SEQ ID NO: 259058 - DNA, 75 bp, synthetic construct
  source 1..75: mol_type = other DNA
ggcccgttcgatttgccggtggcgcgaacggacggggaaggccaccgctggcagtaccgctacgataaagacacg

SEQ ID NO: 259059 - DNA, 75 bp, synthetic construct
  source 1..75: mol_type = other DNA
gcgcgaaatcatggcgctggctgacctggctaaccgctatgttgacgagcaggctccgtgggtggtggcgaaaca

SEQ ID NO: 259060 - DNA, 75 bp, synthetic construct
  source 1..75: mol_type = other DNA
aagagaacggttatcaggtgattattgcgggcgcaggcggcgcagcgcacctgccaggcatgattgccgccaaaa

SEQ ID NO: 259061 - DNA, 75 bp, synthetic construct
  source 1..75: mol_type = other DNA
gtgtcgccatcgtgatggggtccaaaagcgactgggctaccatgcagttcgccgccgaaatcttcgaaatcctga

SEQ ID NO: 259062 - DNA, 75 bp, synthetic construct
  source 1..75: mol_type = other DNA
gattgcaaacactacatttacttagacctaaacactctatctgttttaatcatcctgccgtaactatttttgata

SEQ ID NO: 259063 - DNA, 75 bp, synthetic construct
  source 1..75: mol_type = other DNA
agaactgcaccagcgtctgaatgactggcgcaatgcccagaccgacgaagtactggaaaacccggacccgcgagg

SEQ ID NO: 259064 - DNA, 75 bp, synthetic construct
  source 1..75: mol_type = other DNA
cagcgtctgaatgactggcgcaaagcacaaactgatgaagtgctggaaaacccggacccgcgaggtgcggcatga

SEQ ID NO: 259065 - DNA, 75 bp, synthetic construct
  source 1..75: mol_type = other DNA
gcggcaaacgcggcattactggcagcacaaattcttgcgactcatgataaagaactgcaccagcgtctgaatgac

SEQ ID NO: 259066 - DNA, 75 bp, synthetic construct
  source 1..75: mol_type = other DNA
cagaactgacctgggatggtatccagcaaccgctgctgggccacaaagtgaatccgttcaaggcgctgtataacc

SEQ ID NO: 259067 - DNA, 75 bp, synthetic construct
  source 1..75: mol_type = other DNA
cattgatgatatcgatctcaacctcgaggatttcgtccagcgcgtgaatgccgatatcgttaataaggttgtaaa

SEQ ID NO: 259068 - DNA, 75 bp, synthetic construct
  source 1..75: mol_type = other DNA
gcgatttgctcgatgggtattaacctgttccgtgtgctgatgacgtatctgaagccggttctgccaaaactgacc

SEQ ID NO: 259069 - DNA, 75 bp, synthetic construct
  source 1..75: mol_type = other DNA
aaactggatagagttttgttccagaaatgataatattattccagtagtccagatgccggattcagcaaaacttag

SEQ ID NO: 259070 - DNA, 75 bp, synthetic construct
  source 1..75: mol_type = other DNA
atcattctggttattagctcagacgctggcttatattcctacagggattgcttatgctatctggtatatgcgtac

SEQ ID NO: 259071 - DNA, 75 bp, synthetic construct
  source 1..75: mol_type = other DNA
aaaacgcagagtttgtagaaggttctgacaaactgcttcgcctgacgctggatctcggtggtgaaaagcgtaatg

SEQ ID NO: 259072 - DNA, 75 bp, synthetic construct
  source 1..75: mol_type = other DNA
cgactggttactgacgaaggtgaaaagagtgtgccgctggcagacgttcagccaggtatgttgctgcgcctgaca

SEQ ID NO: 259073 - DNA, 75 bp, synthetic construct
  source 1..75: mol_type = other DNA
atgcaccatcgcctggctactgaaacctgaactgttcaccaccgttgaacgctgggtcggcgtggaaacacaggg

SEQ ID NO: 259074 - DNA, 75 bp, synthetic construct
  source 1..75: mol_type = other DNA
ataaaccaaataccaccataatggtcgatgtggatcgtcagggctttgttgatttactggccgatcgtctgaaat

SEQ ID NO: 259075 - DNA, 75 bp, synthetic construct
  source 1..75: mol_type = other DNA
ccgcaaactaacgttgccttgctgctcaatagccatccggaattgcatagcaaaatcgcccgaatcgtgattatg

SEQ ID NO: 259076 - DNA, 75 bp, synthetic construct
  source 1..75: mol_type = other DNA
aaaacaaaatcatggggtggtggtttctatgccagtggtctgttccggtccggcgcttactttgatgtgattgcc

SEQ ID NO: 259077 - DNA, 75 bp, synthetic construct
  source 1..75: mol_type = other DNA
ccgatattccggtggcaggcggcgcggtaaaaccgttaatgcgtgagttgattatcgcggacaatgtgcacggcg

SEQ ID NO: 259078 - DNA, 75 bp, synthetic construct
  source 1..75: mol_type = other DNA
attatcgcggataatgtgcacggcgaaagcggacttgacggcccggcactaccggaaccgacgtttgcaccgcaa

SEQ ID NO: 259079 - DNA, 75 bp, synthetic construct
  source 1..75: mol_type = other DNA
gcttaaatctaacggtaaatctattgatgacacgcacacccacaaaggcgttcagacgggtagcggcaattctgg

SEQ ID NO: 259080 - DNA, 75 bp, synthetic construct
  source 1..75: mol_type = other DNA
cctgaatcgacattctcagcgaaggtaacgattaccggtctactcacctggatgggggggatggtcggcagtctt

SEQ ID NO: 259081 - DNA, 75 bp, synthetic construct
  source 1..75: mol_type = other DNA
cacggtagccaaaaacagggggcctggctggatagctggctgcaatacgcgtggtttagcaatgatgtttccgaa

SEQ ID NO: 259082 - DNA, 75 bp, synthetic construct
  source 1..75: mol_type = other DNA
cgggggcaccttgcatttcctgacggcgtgctatacgacacctcactgtacacacgtagttacaaatttacccca

SEQ ID NO: 259083 - DNA, 75 bp, synthetic construct
  source 1..75: mol_type = other DNA
aagcaggaaaacagtaagaaaattgataatggacgaaaaactcaacctggcatcattgatgcttctggataatgg

SEQ ID NO: 259084 - DNA, 75 bp, synthetic construct
  source 1..75: mol_type = other DNA
accaggcgcacagcgaagcagtgaagtgggccaaagaaaccggggtcattggtcaagacgacgatgtggcgatgt

SEQ ID NO: 259085 - DNA, 75 bp, synthetic construct
  source 1..75: mol_type = other DNA
catttaactggaacgacagtggaatggatgtctcaatgcgtcgtaacagcgttaatcctctggtaggcagaaccg

SEQ ID NO: 259086 - DNA, 75 bp, synthetic construct
  source 1..75: mol_type = other DNA
tacgccaagaattttaggccaggcctataagtactttaacagtgaaacgcaaaagacagaattctttatattgaa

SEQ ID NO: 259087 - DNA, 75 bp, synthetic construct
  source 1..75: mol_type = other DNA
tgactcagcctacgtcattcagtcaggaggactgggagaaccgcagttttacctttgacaggctgtcactgaaga

SEQ ID NO: 259088 - DNA, 75 bp, synthetic construct
  source 1..75: mol_type = other DNA
aggcgataatctgcataaaatcggtgagggcacactgattgtacagggaactggtgttaatgaaggggggctgaa

SEQ ID NO: 259089 - DNA, 75 bp, synthetic construct
  source 1..75: mol_type = other DNA
aaaaccgactcggctgtgcgcgccacgcatctggcatccggtattagggtgaaggttcagtcagagcgcagtcag

SEQ ID NO: 259090 - DNA, 75 bp, synthetic construct
  source 1..75: mol_type = other DNA
gggcagtatccagaactttgccagcttcatctgcgcctctttcgcgccgatcattactggttttattgttgatac

SEQ ID NO: 259091 - DNA, 75 bp, synthetic construct
  source 1..75: mol_type = other DNA
tactggtacgcattggtatgggaatcggtgaagcgccaatgaacccgtgcggcgttaaggtaattaacgactggt

SEQ ID NO: 259092 - DNA, 75 bp, synthetic construct
  source 1..75: mol_type = other DNA
acactgattttggtcttggtcgcaatgccacactgaacacaaccatccaggcagataactccagcgtcacgctgg

SEQ ID NO: 259093 - DNA, 75 bp, synthetic construct
  source 1..75: mol_type = other DNA
aggtgcaggcgttcagcagtgttaatattgccagtggccggccgaccgtggtactgactgatgagcggcaggtaa

SEQ ID NO: 259094 - DNA, 75 bp, synthetic construct
  source 1..75: mol_type = other DNA
atcaccgttcacgacactgacaacagataatctggacgcggttcagtcagcatttgtcatgcgtacagaccttaa

SEQ ID NO: 259095 - DNA, 75 bp, synthetic construct
  source 1..75: mol_type = other DNA
aagggtatctgtatcatggcaagttgctgggaaatattaatttctcaaataaagcaaccccgggtacaaccggcg

SEQ ID NO: 259096 - DNA, 75 bp, synthetic construct
  source 1..75: mol_type = other DNA
gttccctggtattaaagaatgcggactttggtctggggcgcaatgccacactgaacacaatcattcaggcagata

SEQ ID NO: 259097 - DNA, 75 bp, synthetic construct
  source 1..75: mol_type = other DNA
acccttgaagaaggcacatctgttgcaactaaagatgcagataaaagtgtcttcaacggcaccgtcaacctggat

SEQ ID NO: 259098 - DNA, 75 bp, synthetic construct
  source 1..75: mol_type = other DNA
tacaacaaacggggatttaattgaatggacgaaatcatggcgctctggtggattttatggtgaaagcatactagg

SEQ ID NO: 259099 - DNA, 75 bp, synthetic construct
  source 1..75: mol_type = other DNA
tgcaacaaatggaaatttaattgaatggacgaagtcatggcgctcaggtggattttatgatgagagtatacttgg

SEQ ID NO: 259100 - DNA, 75 bp, synthetic construct
  source 1..75: mol_type = other DNA
ctaaaacactacaggcaagaggcaatccgccgtatacttttatatggggatatgaagagccagaaaataaccttg

SEQ ID NO: 259101 - DNA, 75 bp, synthetic construct
  source 1..75: mol_type = other DNA
acctgaacctgtttaacgacgggaataattggcaggggatcgttgagtcgctgacgctgccgaaattcacccgca

SEQ ID NO: 259102 - DNA, 75 bp, synthetic construct
  source 1..75: mol_type = other DNA
ggtgctctatgaggtcgatctggtgaacatggttgaaatcgtggacggtgtggacctgatggaagcacaccgtaa

SEQ ID NO: 259103 - DNA, 75 bp, synthetic construct
  source 1..75: mol_type = other DNA
agctgcgctttaccggctctatccagcgtgatgataccggggaagtgcaggctgtggagcttgtggtgcgtggac

SEQ ID NO: 259104 - DNA, 75 bp, synthetic construct
  source 1..75: mol_type = other DNA
cagttggtcaccatgctatttgatggagtgctgagcgcactggttagagcgcgcctgtttatgcaggacaacaat

SEQ ID NO: 259105 - DNA, 75 bp, synthetic construct
  source 1..75: mol_type = other DNA
cgtcgaaaaaagccagctcatgttacgcctggcaacggaagaacaatgggacgaactcatcgccagcgaaatggc

SEQ ID NO: 259106 - DNA, 75 bp, synthetic construct
  source 1..75: mol_type = other DNA
acttgattgctctttatagctatatggtcaggcgtttgctgcaagccaatttacgcaacgatgtctccgcagtcg

SEQ ID NO: 259107 - DNA, 75 bp, synthetic construct
  source 1..75: mol_type = other DNA
ctttacgcttagtccggcgaaaaaagcgcggctagtcgcgctccttgacaagcataatgtgatgctgattgaaga

SEQ ID NO: 259108 - DNA, 75 bp, synthetic construct
  source 1..75: mol_type = other DNA
gacgcagttctgacggaggaggattttaaatcgcggatcgtcggcagtgtcatgctgccgtatatccggggtgac

SEQ ID NO: 259109 - DNA, 75 bp, synthetic construct
  source 1..75: mol_type = other DNA
ctgaccgtaagccgctatcgcgcgaggatattttgcagatggtggcgcaattggcagggcaggagataaaattca

SEQ ID NO: 259110 - DNA, 75 bp, synthetic construct
  source 1..75: mol_type = other DNA
ggcaaagccacggtggatggtatccagttgcgctttaccggctctatccagcgtgatgataccggggaagtgcag

SEQ ID NO: 259111 - DNA, 75 bp, synthetic construct
  source 1..75: mol_type = other DNA
tctggcaggaagcggctacgtcaatatgggggcgtatgactacacgctggtggaagataacaacgactggtatct

SEQ ID NO: 259112 - DNA, 75 bp, synthetic construct
  source 1..75: mol_type = other DNA
ggtgagcttaataccaaccttgaaactgacagcctgacttatctttccgacgtgacggttaatggcaatctgacc

SEQ ID NO: 259113 - DNA, 75 bp, synthetic construct
  source 1..75: mol_type = other DNA
aatacgcaaatcgcctccggtacgcttgaagtcagcgataattcgcaattggggaacacaagttacaaccgttca

SEQ ID NO: 259114 - DNA, 75 bp, synthetic construct
  source 1..75: mol_type = other DNA
gcaagaagtaacgccaccatcgccacctgatccagacccgactccagatcctgatcctacgccggatcctgatcc

SEQ ID NO: 259115 - DNA, 75 bp, synthetic construct
  source 1..75: mol_type = other DNA
aacctcaggcgcaggttatctatcagggagtgaagcaaaacgatttcaccgcggccaatcatgcctgggtttcac

SEQ ID NO: 259116 - DNA, 75 bp, synthetic construct
  source 1..75: mol_type = other DNA
ttgtcgctggcgggaaatcaggccgatttactggcaatgcagtccgatccgcaatcgatcgtgttgaatggcgga

SEQ ID NO: 259117 - DNA, 75 bp, synthetic construct
  source 1..75: mol_type = other DNA
aacggcaagccaatcgataatacgcacactcatggtggtgttcagcgcggtggaagcagtaccgacggggtaaac

SEQ ID NO: 259118 - DNA, 75 bp, synthetic construct
  source 1..75: mol_type = other DNA
attaaaggctatgagccggactcaaatggaatcaaccagtcgacgacattacccctgctggtggatgtgccagtg

SEQ ID NO: 259119 - DNA, 75 bp, synthetic construct
  source 1..75: mol_type = other DNA
tggcttcaaaaatcactggtgctgttgagtttttggggagcgtgaaggctaatggcaagccaatcgatgatacac

SEQ ID NO: 259120 - DNA, 75 bp, synthetic construct
  source 1..75: mol_type = other DNA
cgctaacgttcccagttaaagccggtgatgaatgtttggtgatttttgccgatcgttgtattgatttctggtggc

SEQ ID NO: 259121 - DNA, 75 bp, synthetic construct
  source 1..75: mol_type = other DNA
cgttgacttttccggtaaaggctggggatgagtgtcttgtcgtttttgccgatcgttgtattgatttctggtggc

SEQ ID NO: 259122 - DNA, 75 bp, synthetic construct
  source 1..75: mol_type = other DNA
ttaatcgcgtgaaagacgatttgcaagaactggcagtggtcgaatccttcccaacgaagatcaaaggccgccaga

SEQ ID NO: 259123 - DNA, 75 bp, synthetic construct
  source 1..75: mol_type = other DNA
ggcagaagaaaatgttcagcttgagcaacttctggcgctctcttcgccgatttaccgccttgaactggcgatggt

SEQ ID NO: 259124 - DNA, 75 bp, synthetic construct
  source 1..75: mol_type = other DNA
agattgtattctggttgatctggcatcagtgaaaaatggaccattacaggccatgctggcggcgcacgatggccc

SEQ ID NO: 259125 - DNA, 75 bp, synthetic construct
  source 1..75: mol_type = other DNA
aacgctttgtccgtcactgcgtccggtggttattgttggaggcggcggtcagatggggcgtttgttcgagaagat

SEQ ID NO: 259126 - DNA, 75 bp, synthetic construct
  source 1..75: mol_type = other DNA
attcaggaagtacgtctctatttaccggacagcgtgtcagtaaaactcatcgacgtgtcgaagcctatggcacgc

SEQ ID NO: 259127 - DNA, 75 bp, synthetic construct
  source 1..75: mol_type = other DNA
gctgacgctctctggctatcaggtgcggatccttgaacaacatgactgggatcgcgcggctgagattgttgccga

SEQ ID NO: 259128 - DNA, 75 bp, synthetic construct
  source 1..75: mol_type = other DNA
ttggcaaattaccgcctttaccgaaagattgtattctggttgatctggcatcagtgaaaaatggaccattacagg

SEQ ID NO: 259129 - DNA, 75 bp, synthetic construct
  source 1..75: mol_type = other DNA
caacaactcgcgtatatggcccaactggtgatcgtttccttgaaatccatacaaacgggaattggggggtttata

SEQ ID NO: 259130 - DNA, 75 bp, synthetic construct
  source 1..75: mol_type = other DNA
aaacaaacgcggcgaaatctgcggcggacgcacttaattatcgcaaccaggcacaatcaattgttggtaacaata

SEQ ID NO: 259131 - DNA, 75 bp, synthetic construct
  source 1..75: mol_type = other DNA
cacagaaagaagtcttgaacttttccgggcatataactatactccccgcatagagcaacagcttctatgcggttt

SEQ ID NO: 259132 - DNA, 75 bp, synthetic construct
  source 1..75: mol_type = other DNA
acttatgttgcacagaaggagtgagcacagaaagaagtcttgaacttttccgggcatataactatactccccgca

SEQ ID NO: 259133 - DNA, 75 bp, synthetic construct
  source 1..75: mol_type = other DNA
atcccggttcctgattttgtgatccactacagtccctctgacagatataagctatatcaggtagatggaaagctg

SEQ ID NO: 259134 - DNA, 75 bp, synthetic construct
  source 1..75: mol_type = other DNA
ctattcagcaacaaatattttggtttagcgccgagctcgccagtgaaagcgaacagccgtcagcgcagcaacgtt

SEQ ID NO: 259135 - DNA, 75 bp, synthetic construct
  source 1..75: mol_type = other DNA
cagcagccatccagtcttgcgcgtggtattggtggggcagcatcaggcgctttagcgggtgcgcaacttggttcc

SEQ ID NO: 259136 - DNA, 75 bp, synthetic construct
  source 1..75: mol_type = other DNA
gcaccgttcacgccactcgctcagcagtacgtatcacagttgcagaatctttcctctcttcaggggcaaggtcag

SEQ ID NO: 259137 - DNA, 75 bp, synthetic construct
  source 1..75: mol_type = other DNA
gatgaatgcggcatcagggcaggcaacagcagggcaaaactacgccaataataccggacaactcttgcaggggct

SEQ ID NO: 259138 - DNA, 75 bp, synthetic construct
  source 1..75: mol_type = other DNA
cagcttatcgaaaccatcaagcaagcgggttatgacgcatctgtaagccacccaaaggctaaaccgctggcggag

SEQ ID NO: 259139 - DNA, 75 bp, synthetic construct
  source 1..75: mol_type = other DNA
gccatttttatcgtagcgcgtggaaaagcttgctgaacggcacggcgacgatggatacgctggtggcgctgggga

SEQ ID NO: 259140 - DNA, 75 bp, synthetic construct
  source 1..75: mol_type = other DNA
ttgcgtagtgatagcgtggcggcgctgcaacgcctgcataaagcgggatatcgtctggtgatgttgaccggggat

SEQ ID NO: 259141 - DNA, 75 bp, synthetic construct
  source 1..75: mol_type = other DNA
gtacaaccaacttgaggcccacgcctgtgacagaagatatgggaatactgcacggttagtggatgcctggaggcc

SEQ ID NO: 259142 - DNA, 75 bp, synthetic construct
  source 1..75: mol_type = other DNA
cacctccgtgaaggtgataccctcattacgcattccattgatcgcctcgcacgtaatacccgcgatttgttggag

SEQ ID NO: 259143 - DNA, 75 bp, synthetic construct
  source 1..75: mol_type = other DNA
ttcgtagtgcggcaatacgcgcggatgaactacatattcccgtagtcatcagcattgttgatgccaacgggacag

SEQ ID NO: 259144 - DNA, 75 bp, synthetic construct
  source 1..75: mol_type = other DNA
tagtgcgagtgctgataaaagccatcagatgactatgtctcgagccattaactatgctcgccttttttctgactg

SEQ ID NO: 259145 - DNA, 75 bp, synthetic construct
  source 1..75: mol_type = other DNA
ccagggaacatattcccggctggttatccgtaatgctgaaggtcagttgcgctggtgatgccggaacacagctta

SEQ ID NO: 259146 - DNA, 75 bp, synthetic construct
  source 1..75: mol_type = other DNA
gaatcttggctccagtcccttatcgtcttggttggaaccggtcgtcgtgcatgacctgcatttacaactcacagc

SEQ ID NO: 259147 - DNA, 75 bp, synthetic construct
  source 1..75: mol_type = other DNA
aattgggcaattgatactattgatgaatgtttgttcttaggtatgtaccgtgattctgaaatgggctttgttgcc

SEQ ID NO: 259148 - DNA, 75 bp, synthetic construct
  source 1..75: mol_type = other DNA
ggtacgcgccacgcatttggcatccggtattagcgtgaaggttcagtcagagcgtagtcagcatgctaacaagcg

SEQ ID NO: 259149 - DNA, 75 bp, synthetic construct
  source 1..75: mol_type = other DNA
cgaccagttcaccggggcgaccattacgcctcgcgcggtggtgaacgcggtaaaacgcgccggattgtatgccca

SEQ ID NO: 259150 - DNA, 75 bp, synthetic construct
  source 1..75: mol_type = other DNA
cgggatgcatactccacgcatatcccggcggtaattctggccgtgaacaataacccgatgcgcttcaccgaccgc

SEQ ID NO: 259151 - DNA, 75 bp, synthetic construct
  source 1..75: mol_type = other DNA
ccaggacaaacactccgtagcgattgtctctgacatgagcacatttgttcatgtgggagatttagtcacctttaa

SEQ ID NO: 259152 - DNA, 75 bp, synthetic construct
  source 1..75: mol_type = other DNA
aagaacactctagtttgcggcgtttacctattaatgcaagcaatgacaatctatcagaagataacataattgatt

SEQ ID NO: 259153 - DNA, 75 bp, synthetic construct
  source 1..75: mol_type = other DNA
agaaacgggccgctactctgacacgttgcgttcagcgctgatttctctggatggcgataacgcatgggcattaag

SEQ ID NO: 259154 - DNA, 75 bp, synthetic construct
  source 1..75: mol_type = other DNA
cgcatctggctaccgggattagcgtgaaggttcagtcagagcgcagccagcatgccaacaagcggctggcgcgat

SEQ ID NO: 259155 - DNA, 75 bp, synthetic construct
  source 1..75: mol_type = other DNA
ctgaaatcgcagcggcgaatgttccatcaccagattgaacgtggcaacccgcgacggacgtttacagggatggct

SEQ ID NO: 259156 - DNA, 75 bp, synthetic construct
  source 1..75: mol_type = other DNA
cggtgctaatcatgacggttttgagttgctgatgtggctcaataattgggactttaagcagtgtctgagcgaggt

SEQ ID NO: 259157 - DNA, 75 bp, synthetic construct
  source 1..75: mol_type = other DNA
cagaaagagtagaggtccctctttcctgtctcaaagtggggatgaagtgtggtggttccgatggtttttctggta

SEQ ID NO: 259158 - DNA, 75 bp, synthetic construct
  source 1..75: mol_type = other DNA
cccagggaccggaagaatgctgcctcgcagtcaaaaaggcgttggacaggctgattaaagaagcatcccaacagc

SEQ ID NO: 259159 - DNA, 75 bp, synthetic construct
  source 1..75: mol_type = other DNA
cactgctccagtcacagcagaattccgacgaggcgctcagcatcaagcgcgatgctgaccctacgtttgattttt

SEQ ID NO: 259160 - DNA, 75 bp, synthetic construct
  source 1..75: mol_type = other DNA
gctggcgcgattgctgattgcctggaagctggagcaacagcaacaggaaaatagcgcagtgctgaaatcgcagcg

SEQ ID NO: 259161 - DNA, 75 bp, synthetic construct
  source 1..75: mol_type = other DNA
atggctacatacggcggtcagtttacgcttacgaaaaaggcgctggacaggctaattaaagaagctgcccgacaa

SEQ ID NO: 259162 - DNA, 75 bp, synthetic construct
  source 1..75: mol_type = other DNA
gcttgaaagcgcgatcgataccgcaatgggacgtatcgcgcctgtacacagttttattttaccaggccgctgcga

SEQ ID NO: 259163 - DNA, 75 bp, synthetic construct
  source 1..75: mol_type = other DNA
ttggtgacaacggggttagatataagtttggtgtatcaacgtcaacggaggataacgacaagaactttgttaaaa

SEQ ID NO: 259164 - DNA, 75 bp, synthetic construct
  source 1..75: mol_type = other DNA
gtggctggagtgactccagagatatagcttgcggctcatttgttgcctatgacaaaaatgagctagggatacttt

SEQ ID NO: 259165 - DNA, 75 bp, synthetic construct
  source 1..75: mol_type = other DNA
atggatggattgtctataccatcgtttgcgatccttcggacatgctcgttgtgcagatggaagaggtggcgcgta

SEQ ID NO: 259166 - DNA, 75 bp, synthetic construct
  source 1..75: mol_type = other DNA
atgattttgctacaactctcctcagctcaggggccggaagaatgctgtctcgcagtcaaaaaggcgctggacagg

SEQ ID NO: 259167 - DNA, 75 bp, synthetic construct
  source 1..75: mol_type = other DNA
gcaagccaatctggccagttcgagggcaatagcttgggcgccgattctggcccagatagtaacgaagtcaggagt

SEQ ID NO: 259168 - DNA, 75 bp, synthetic construct
  source 1..75: mol_type = other DNA
gcgggtgcggcagttggggcggcggtgacggcggccagtatggcaactggcggcgctgccctggcaggtaaagcg

SEQ ID NO: 259169 - DNA, 75 bp, synthetic construct
  source 1..75: mol_type = other DNA
gacggaacaattattgggggactgggtatcagcggcggtagcgttgaacaggacatggatattgcacagaccgcc

SEQ ID NO: 259170 - DNA, 75 bp, synthetic construct
  source 1..75: mol_type = other DNA
ctgaaatcgcagcggcgaatgttccatcatcagattgaacgtggtaacccgcgacggacgtttacagggatggct

SEQ ID NO: 259171 - DNA, 75 bp, synthetic construct
  source 1..75: mol_type = other DNA
ctcaggggccggaagaatgttgtctcgcagtgagaaaagcactggacaggctgattaaagaagctacccgacagg

SEQ ID NO: 259172 - DNA, 75 bp, synthetic construct
  source 1..75: mol_type = other DNA
ttcggtcagtgggaatatgaattcaaaggaaaccgtactgaagaacagggagcagccaaagataaaacccgtctt

SEQ ID NO: 259173 - DNA, 75 bp, synthetic construct
  source 1..75: mol_type = other DNA
tggttagaccgcaacgtcgaaccgtaccaccgcgagcaaaaccagattcgtatcgggacgaagtatttcttctga

SEQ ID NO: 259174 - DNA, 75 bp, synthetic construct
  source 1..75: mol_type = other DNA
ccgatcagggcgaggttatgctacgtgtgggttataacttcgatatgggcgcgggtattatgttaaccaatacct

SEQ ID NO: 259175 - DNA, 75 bp, synthetic construct
  source 1..75: mol_type = other DNA
agcagagcaggcgctaaaacagagccgctatcgcctgggtgaaactggcgaggcaattgccaaacagactcgtga

SEQ ID NO: 259176 - DNA, 75 bp, synthetic construct
  source 1..75: mol_type = other DNA
ctacggcgtactatagtcctaagtttgaaagaggaatttgctggaaagatccttttttatccatcgaatggcctg

SEQ ID NO: 259177 - DNA, 75 bp, synthetic construct
  source 1..75: mol_type = other DNA
acctacctttggtaaatgggtgggggtaaatttgtctgctgagaataaacgtcagctatggatcccggaaggttt

SEQ ID NO: 259178 - DNA, 75 bp, synthetic construct
  source 1..75: mol_type = other DNA
ctgggaattcataccaatatccatagaagtgaatctattacgaacgtggggaaccctggcaccattttttgtgct

SEQ ID NO: 259179 - DNA, 75 bp, synthetic construct
  source 1..75: mol_type = other DNA
tagctgttgatattcgtaaatcgtcgcctacctttggtaaatgggttggggtgaatttatctgctgagaataagc

SEQ ID NO: 259180 - DNA, 75 bp, synthetic construct
  source 1..75: mol_type = other DNA
ctttaacagaaaaggtcaacccgtcttttttaattgcttatctagcaacaaagtatgcacaaaaatcactactac

SEQ ID NO: 259181 - DNA, 75 bp, synthetic construct
  source 1..75: mol_type = other DNA
ggagaactcacctctgtttatagagatcagggaacaactctttatcgcgtttccgatatcaacggtatttttctt

SEQ ID NO: 259182 - DNA, 75 bp, synthetic construct
  source 1..75: mol_type = other DNA
tcccagtcccagaaaggcgtattgcgtgggttgcactatcagctggatccgcacgcccagggcaaactggtccgc

SEQ ID NO: 259183 - DNA, 75 bp, synthetic construct
  source 1..75: mol_type = other DNA
cgtgtttggtgatgcgcggggtttcttctttgagagcttcagcagcaaggtgtttaatgaggcggtgggccgcca

SEQ ID NO: 259184 - DNA, 75 bp, synthetic construct
  source 1..75: mol_type = other DNA
tagctgttgatattcggaaatcgtcaccaacttttggcaaatgggttggggtgaatttatctgctgagaataagc

SEQ ID NO: 259185 - DNA, 75 bp, synthetic construct
  source 1..75: mol_type = other DNA
tctaaatcatctaagggtgtgttacgcggactgcactatcagctggaaccctatgctcaaggtaaattagttcgt

SEQ ID NO: 259186 - DNA, 75 bp, synthetic construct
  source 1..75: mol_type = other DNA
ccgcggcagtcacctgttccattttgcgcgcgctgtgtaaagagccgctacgcaccgggcgtattctcaatatca

SEQ ID NO: 259187 - DNA, 75 bp, synthetic construct
  source 1..75: mol_type = other DNA
gatttaaccgcgcacaacgcgcaagatgtggtttcagactggttaaacagcgtgggagttggcacgcaatggtaa

SEQ ID NO: 259188 - DNA, 75 bp, synthetic construct
  source 1..75: mol_type = other DNA
atggtgcagcacctgaaaagacggccattaagccgctatcttaaagactttaaacacagccagccccattgcgcg

SEQ ID NO: 259189 - DNA, 75 bp, synthetic construct
  source 1..75: mol_type = other DNA
gtgatatcgccgtgcaaatgggaaccccgaccgattgtgtatatcttggtgtgaatgcactgatgcgtccgcgtc

SEQ ID NO: 259190 - DNA, 75 bp, synthetic construct
  source 1..75: mol_type = other DNA
gtcccgggactgattttgcagcggttgatgaaggctatgtttccattacgccgctgcatgtggatttaaccgcgc

SEQ ID NO: 259191 - DNA, 75 bp, synthetic construct
  source 1..75: mol_type = other DNA
gacgggcataaacattacgacactgccgcggcggtaacctgttcaattttgcgcgcactgtgtaaagagccgctg

SEQ ID NO: 259192 - DNA, 75 bp, synthetic construct
  source 1..75: mol_type = other DNA
tttatggaaagctttaatcagaaagttttcgaagaggctgtagggcgtaaggttgaatttgttcaggataaccat

SEQ ID NO: 259193 - DNA, 75 bp, synthetic construct
  source 1..75: mol_type = other DNA
gtgaatttatctgctgagaataagcgccagttgtggatccctgagggatttgcacatggttttttggtgctgagt

SEQ ID NO: 259194 - DNA, 75 bp, synthetic construct
  source 1..75: mol_type = other DNA
gagacggcggagtttttatataaaacgacgaattattatgctccgaacagtgattgtggtttagcttggaatgat

SEQ ID NO: 259195 - DNA, 75 bp, synthetic construct
  source 1..75: mol_type = other DNA
gcagtttctttttgaccatactgaaatgagccccggtacagtgcgcgaatatgtggttcgtctacgtcgtttggg

SEQ ID NO: 259196 - DNA, 75 bp, synthetic construct
  source 1..75: mol_type = other DNA
cagatgtcttaatttttgaaccagagatttttgctgatgaacgtggcttcttttttgagagtttcaatcaagaat

SEQ ID NO: 259197 - DNA, 75 bp, synthetic construct
  source 1..75: mol_type = other DNA
ttgcggttgatattcgtaaatcgtcgcctacctttggtaaatgggttggggtgaatttatctgctgagaataagc

SEQ ID NO: 259198 - DNA, 75 bp, synthetic construct
  source 1..75: mol_type = other DNA
aaagacaatcgtcatgtcagaacgcttcccggaaaagcaaaagaaggtgttgtcgttgcttcttgccggacacag

SEQ ID NO: 259199 - DNA, 75 bp, synthetic construct
  source 1..75: mol_type = other DNA
agcaaaagaaggtgttgtcgttgcttcttgctggacacagctgggaatacagtgcgcagtttctcaaaacgggga

SEQ ID NO: 259200 - DNA, 75 bp, synthetic construct
  source 1..75: mol_type = other DNA
tgtgaaagcggtaacccgtgcgctggaacgttttccggtggttaatgccagcgtcgatggcaacgatattatctg

SEQ ID NO: 259201 - DNA, 75 bp, synthetic construct
  source 1..75: mol_type = other DNA
tcggccgctgattttcacggaatgagtgatgcactgacttatgccggaccggtggctaggactgccggtgtaagc

SEQ ID NO: 259202 - DNA, 75 bp, synthetic construct
  source 1..75: mol_type = other DNA
tgccggtgtggggattgcggcggcgggaacgatggccggagttaagttgctgatgcccggttatgagtttgcgca

SEQ ID NO: 259203 - DNA, 75 bp, synthetic construct
  source 1..75: mol_type = other DNA
ttggggaataccggacagcatgtcattgcgggaagccctgctgctgagcagcaataaatttcacggtgatggaaa

SEQ ID NO: 259204 - DNA, 75 bp, synthetic construct
  source 1..75: mol_type = other DNA
atgatagcgcgacaaataagctatcactatttatcgaattcgaacgccggatcgttgttgtaccttattcgcggc

SEQ ID NO: 259205 - DNA, 75 bp, synthetic construct
  source 1..75: mol_type = other DNA
gctgctggggctaatgcgccgcaacggtatcagtgacgaacgcgttaatgcgatggctgatgagctttatgttct

SEQ ID NO: 259206 - DNA, 75 bp, synthetic construct
  source 1..75: mol_type = other DNA
gctgctggggctgatgcgccgcaatggtatcagtgacgaacgtgttaatgcgatggccgtcgagctttatgctct

SEQ ID NO: 259207 - DNA, 75 bp, synthetic construct
  source 1..75: mol_type = other DNA
gcgtgattattgcgatatcggcattgcagtgagcagcaaccgcggcctggtagtgcctgtgttacgcaatgcgca

SEQ ID NO: 259208 - DNA, 75 bp, synthetic construct
  source 1..75: mol_type = other DNA
agaagagctacctatctcaattaatgagtgggagagcctcgtttggagaaaaggctgccagaagaatagagcaaa

SEQ ID NO: 259209 - DNA, 75 bp, synthetic construct
  source 1..75: mol_type = other DNA
atgaaaattaaattccataaagcatatgatagcgaaacaaacaagctatcactatttatcgaattcgaacgccgg

SEQ ID NO: 259210 - DNA, 75 bp, synthetic construct
  source 1..75: mol_type = other DNA
attcccgtataactcagaaagattttgcccaaattgttggcgcatctcagggaatggtgagtcatgtaattacag

SEQ ID NO: 259211 - DNA, 75 bp, synthetic construct
  source 1..75: mol_type = other DNA
aagctacggacttgatgaacttatccccaacatgcgtatcaccctgccgctacggctatggcgatacacgctctt

SEQ ID NO: 259212 - DNA, 75 bp, synthetic construct
  source 1..75: mol_type = other DNA
tattttctcggaattggtgcgacattagtattaagtggcacattcttgttggtcagccgacctgaatttgggttg

SEQ ID NO: 259213 - DNA, 75 bp, synthetic construct
  source 1..75: mol_type = other DNA
ttgattgcggtattgtcggttcgctaaacaaagaagataagcgctatctggcagagaactttatcgccttcttta

SEQ ID NO: 259214 - DNA, 75 bp, synthetic construct
  source 1..75: mol_type = other DNA
accatctttttattgttcgccctgacaaggctgacagtcactacatttgctcatttttaaatagcttccatggtc

SEQ ID NO: 259215 - DNA, 75 bp, synthetic construct
  source 1..75: mol_type = other DNA
tctaatgaacacattaagtctattccgctgtttagacctgatgataaagtacaaaaatacatcggggataaagtt

SEQ ID NO: 259216 - DNA, 75 bp, synthetic construct
  source 1..75: mol_type = other DNA
taacacaagtagccaaaaccctcgtcgaagccctcatcgaaggtcaactgcccgagcaacaattaatccaggctc

SEQ ID NO: 259217 - DNA, 75 bp, synthetic construct
  source 1..75: mol_type = other DNA
taacccagcctatgactctttccagattggtgggatcactgttattgatgtgtcaatgtttcctgagattgttgc

SEQ ID NO: 259218 - DNA, 75 bp, synthetic construct
  source 1..75: mol_type = other DNA
taccgtgcattggctaagattgttcgtcaacagtctaacatcctgggcgaatcccttgctgctaaacgttccggt

SEQ ID NO: 259219 - DNA, 75 bp, synthetic construct
  source 1..75: mol_type = other DNA
tgcctttccattttttccacacacagaggtttcatgtttctgctattcagatgcataaactctgttgcgctttag

SEQ ID NO: 259220 - DNA, 75 bp, synthetic construct
  source 1..75: mol_type = other DNA
ggtgcgcgagtacgaaaagaccttgattgatgaactgaatttgctgcgggaatctgccaacgccattcagcttcg

SEQ ID NO: 259221 - DNA, 75 bp, synthetic construct
  source 1..75: mol_type = other DNA
gaaaggatgactcgattcctgttaaagttgagggtgcgaatggtgaaacttacccttgtgaagcaacaccgggct

SEQ ID NO: 259222 - DNA, 75 bp, synthetic construct
  source 1..75: mol_type = other DNA
agatgtggcagcagagtgaaggaaaagcctactttactggagatccgcgtcgcgcagccctgaaagtgtcgttct

SEQ ID NO: 259223 - DNA, 75 bp, synthetic construct
  source 1..75: mol_type = other DNA
ttcgtgtttgtcgctcgccgtacaaggcgcgccgcttcgcgttgcatttcatcgataacttttggcgtcatcggc

SEQ ID NO: 259224 - DNA, 75 bp, synthetic construct
  source 1..75: mol_type = other DNA
gcgcctgaagctttcgctgccggatttacggatgaagccccggatgcccgtggctggataccggagccaccggat

SEQ ID NO: 259225 - DNA, 75 bp, synthetic construct
  source 1..75: mol_type = other DNA
gtgatgaacaggggtactggacacatcctgcgctggtacgaagtggctgtgaaacttccgcagaattaagttact

SEQ ID NO: 259226 - DNA, 75 bp, synthetic construct
  source 1..75: mol_type = other DNA
ctttctgtacggagcatgctggcgctctgtcttttcccggtcgttgctctcgttaacctgcaggacagcgtgact

SEQ ID NO: 259227 - DNA, 75 bp, synthetic construct
  source 1..75: mol_type = other DNA
atggctaagttgttggaggctgtagagaagcttactaataatacagcatttatagctgtgaccagtcttgcggaa

SEQ ID NO: 259228 - DNA, 75 bp, synthetic construct
  source 1..75: mol_type = other DNA
gaaaggggcaggcgaagctgctgaaaaagcaagctccgcatcttcaaaggctgctgatgctgcaagtaaaacact

SEQ ID NO: 259229 - DNA, 75 bp, synthetic construct
  source 1..75: mol_type = other DNA
atgagcactattaccaaagaacgtattgaattgttcattaaaaatccgcttgaaaacgggcttacccgtggtgaa

SEQ ID NO: 259230 - DNA, 75 bp, synthetic construct
  source 1..75: mol_type = other DNA
atttttgggaaatcgcggaaacgtcaaccaactatccggtaattcctagtgaggtgttgtccgcaatcctgaagg

SEQ ID NO: 259231 - DNA, 75 bp, synthetic construct
  source 1..75: mol_type = other DNA
gttgagcgatggcactttatcgtggttagggaacgccttgtactggatgccgctaccagaaccgccgcaggaggc

SEQ ID NO: 259232 - DNA, 75 bp, synthetic construct
  source 1..75: mol_type = other DNA
cccactgacccgggaaccaataacggcatcaataattgtaaaacatgaagaatgcgcatttatgacgataccaga

SEQ ID NO: 259233 - DNA, 75 bp, synthetic construct
  source 1..75: mol_type = other DNA
gagcagcctgaaaaaggtatttttgtgaagaattcagatggttcagatgtatgtactttatttgacgccgctgca

SEQ ID NO: 259234 - DNA, 75 bp, synthetic construct
  source 1..75: mol_type = other DNA
ctggttgtacgacgacccaatcgatcttgccagggcgattcgcaaaggtccggatatgcctactgttcagggtgg

SEQ ID NO: 259235 - DNA, 75 bp, synthetic construct
  source 1..75: mol_type = other DNA
ttctggtcaattaacgatatggaatgatctttctccaggaacattggttgttttctctttttatatgctgggtgt

SEQ ID NO: 259236 - DNA, 75 bp, synthetic construct
  source 1..75: mol_type = other DNA
agagcggaacgtctggcgctgttggcctgcctgctggcggttattccggcacttaaccttgccgccagtgatgca

SEQ ID NO: 259237 - DNA, 75 bp, synthetic construct
  source 1..75: mol_type = other DNA
agagcggaacgtctggcgctgttggcctgcctgctggccgttattccggcacttaaccttgcccccagtgatgca

SEQ ID NO: 259238 - DNA, 75 bp, synthetic construct
  source 1..75: mol_type = other DNA
agagcggaacgtctggcgctgttggcctgcctgctggctgttattccggctcttaaccttgccgccagtgatgca

SEQ ID NO: 259239 - DNA, 75 bp, synthetic construct
  source 1..75: mol_type = other DNA
tccgctgtttgccctggtgtgggggctgaatctgtcccgtcatacgcatatccggcagtcggccattaaccggct

SEQ ID NO: 259240 - DNA, 75 bp, synthetic construct
  source 1..75: mol_type = other DNA
gtcctgtgcaggaaaatcattaccccgtttctggcccggggattttttcccggtattctacgcctgtcatctggc

SEQ ID NO: 259241 - DNA, 75 bp, synthetic construct
  source 1..75: mol_type = other DNA
atgacaacggataacacgaacacgacacgtaacgattcactggctgcacggaccgatacctggttgcagtcgttg

SEQ ID NO: 259242 - DNA, 75 bp, synthetic construct
  source 1..75: mol_type = other DNA
agagcggaacgtctggcgctgttggcctgcctgctggcagttattccggctcttaaccttgcctccagtgatgca

SEQ ID NO: 259243 - DNA, 75 bp, synthetic construct
  source 1..75: mol_type = other DNA
agagcggaacgtctggcgctgttggcctgcctgctggcagttattccggcacttaaccttgccaccagtgatgca

SEQ ID NO: 259244 - DNA, 75 bp, synthetic construct
  source 1..75: mol_type = other DNA
tttccgctgtttgccctggtgtgggggctgaatctgtcccgtcatacgcatatccggcaggaggccattaaccgg

SEQ ID NO: 259245 - DNA, 75 bp, synthetic construct
  source 1..75: mol_type = other DNA
agagcggaacgtctggcgctgttggcctgcctgctggctgttattccggcacttaaccttgcctccagtgatgca

SEQ ID NO: 259246 - DNA, 75 bp, synthetic construct
  source 1..75: mol_type = other DNA
agagcggaacgtctggcgctgttggcctgcctgctggcagttattccggcgcttaaccttgccgccagtgatgca

SEQ ID NO: 259247 - DNA, 75 bp, synthetic construct
  source 1..75: mol_type = other DNA
agagcggaacgtctggcgctgttggcctgcctgctggcagttattccggcccttaaccttgcccccagtgatgca

SEQ ID NO: 259248 - DNA, 75 bp, synthetic construct
  source 1..75: mol_type = other DNA
accgccagtacaaaatgaacaatcaagacatctgcctgatgtggctcagcgcctgatacaacatcttgcagagca

SEQ ID NO: 259249 - DNA, 75 bp, synthetic construct
  source 1..75: mol_type = other DNA
aaacatccggccgggaaattattctgggctttaacggatgaaagcaataaagagcaaccggacgttattcctgtt

SEQ ID NO: 259250 - DNA, 75 bp, synthetic construct
  source 1..75: mol_type = other DNA
atgatcactattaccaaagggcgactgctgacaatcaagcagtggcgcgaaacatacagaccgggcagcaacgtt

SEQ ID NO: 259251 - DNA, 75 bp, synthetic construct
  source 1..75: mol_type = other DNA
ggaaactttcgggaaaacaagagttcgtcaaccaactatccggtaattcctagtgaggtgttgtccgcaatccag

SEQ ID NO: 259252 - DNA, 75 bp, synthetic construct
  source 1..75: mol_type = other DNA
ccggaagttgtgcgtgagctggcacggattgcactggcatcactggaagcagagcctgttctgtatcagtcctgc

SEQ ID NO: 259253 - DNA, 75 bp, synthetic construct
  source 1..75: mol_type = other DNA
gcccatatctggctgcaaacagctggagtatggccagaagatggcgagttaagcgaattaacgtggtgcagccac

SEQ ID NO: 259254 - DNA, 75 bp, synthetic construct
  source 1..75: mol_type = other DNA
aggcaatgtttacccgccccatgcatgctactgcggacatgtctaaacagcatgatattcttaacaaactctcat

SEQ ID NO: 259255 - DNA, 75 bp, synthetic construct
  source 1..75: mol_type = other DNA
ttcacccgtcacatggaaagaaaacgaagggcattatcgcgttattgttgaacctgaaaatacatttatatttgc

SEQ ID NO: 259256 - DNA, 75 bp, synthetic construct
  source 1..75: mol_type = other DNA
tatacccgcaaggctcatcttacaggtatagtgatgccttcatcaggactggtgaaaatcacaccgcaatatgcc

SEQ ID NO: 259257 - DNA, 75 bp, synthetic construct
  source 1..75: mol_type = other DNA
ggacgggcatgacattgattatcttgagccatctgaagtttacgcgcttgggcgaacagctggatggaacgcctg

SEQ ID NO: 259258 - DNA, 75 bp, synthetic construct
  source 1..75: mol_type = other DNA
caagttgacggcacaagtgactacatcaaggatggagagtggcctattgataatgggattattgaagtctacgcc

SEQ ID NO: 259259 - DNA, 75 bp, synthetic construct
  source 1..75: mol_type = other DNA
agcgcaacaactctctttcgagccccaaacgcccattcggcatcatttcatcgacagtctactgctgaaagttcg

SEQ ID NO: 259260 - DNA, 75 bp, synthetic construct
  source 1..75: mol_type = other DNA
gagtggaccggcaatcctgatattgataacgcaatcatcatgctcgaccgcatagatacggcggaaagttacgat

SEQ ID NO: 259261 - DNA, 75 bp, synthetic construct
  source 1..75: mol_type = other DNA
ttcaacaaactgcgcagtggtattgactgggtactggaaaaactcggtgttatcaacaaagagtcagacacactt

SEQ ID NO: 259262 - DNA, 75 bp, synthetic construct
  source 1..75: mol_type = other DNA
cgtgccgtgttaagccgcctgcaggcaccgacgggaaaagcatgggatgcactgaaagagcttggtgtgaaaacc

SEQ ID NO: 259263 - DNA, 75 bp, synthetic construct
  source 1..75: mol_type = other DNA
tggacaaactgaccgctgcgtttaaagcctcagacgggaagaccgccgagctggtaaatatcatgcaggacaacc

SEQ ID NO: 259264 - DNA, 75 bp, synthetic construct
  source 1..75: mol_type = other DNA
gaaagcgggtggggatgttgatgccattcaggcggcaacgccggtcacgctgaatatggcgctggcgaaccgccg

SEQ ID NO: 259265 - DNA, 75 bp, synthetic construct
  source 1..75: mol_type = other DNA
tattccggcgaccagctcttatgcaggctatcaggcttaccagccggtcacggcaccggctggccgctcttatgt

SEQ ID NO: 259266 - DNA, 75 bp, synthetic construct
  source 1..75: mol_type = other DNA
cggcaccggctggccgctcttatgtagaccagagtaaaaacgaatatcacatcagcctgacggggtggtactgcg

SEQ ID NO: 259267 - DNA, 75 bp, synthetic construct
  source 1..75: mol_type = other DNA
cggggcatcctgacgctaatgatgggtgggtaatacctggtgcgtcgtggattccatcacactggatgccgctac

SEQ ID NO: 259268 - DNA, 75 bp, synthetic construct
  source 1..75: mol_type = other DNA
ccattaggaattgacgtaggcaaacaaaagttcgtacaggccattggagagcttcctgactttggaggacatcta

SEQ ID NO: 259269 - DNA, 75 bp, synthetic construct
  source 1..75: mol_type = other DNA
agaacctatagcgcctaatgacgttcgagagcagacagccattccgcaagttccggtaactccggatggttggat

SEQ ID NO: 259270 - DNA, 75 bp, synthetic construct
  source 1..75: mol_type = other DNA
cggtgcgcagattattattgcgaaagccggtggggatgttgatgccattcaggcggcaacgccggtcacgctgaa

SEQ ID NO: 259271 - DNA, 75 bp, synthetic construct
  source 1..75: mol_type = other DNA
tattgctcagggctgttgaccaggcatcccgcccgtttaaatccatccgcacagcgagcaagtcgctgtcggggg

SEQ ID NO: 259272 - DNA, 75 bp, synthetic construct
  source 1..75: mol_type = other DNA
gagttgagcgacggcactttatcgtggttagggaacgccttgttctggatgccgctaccagaaccgccgcaggag

SEQ ID NO: 259273 - DNA, 75 bp, synthetic construct
  source 1..75: mol_type = other DNA
gcgctggcacgcgtgccggaaggtattggcgaaacggcgattgtgcaaattcgcaaccgtgaaatgccggttaaa

SEQ ID NO: 259274 - DNA, 75 bp, synthetic construct
  source 1..75: mol_type = other DNA
cgggattatttcaccctcagagagcggctgatgacgatgcagatgcaactggaaggggcacaggagtatatccgc

SEQ ID NO: 259275 - DNA, 75 bp, synthetic construct
  source 1..75: mol_type = other DNA
atgagcagggtaaccgcgattatctccggtctggttatctgcatcatcatctgcctgtcgtgggctgttaatcat

SEQ ID NO: 259276 - DNA, 75 bp, synthetic construct
  source 1..75: mol_type = other DNA
agttggatattatgattggtgaaggcccggcagcgcgttcgataaaaatcgatctaccaccgttcaccctgattg

SEQ ID NO: 259277 - DNA, 75 bp, synthetic construct
  source 1..75: mol_type = other DNA
gccaatgaaatgggcgttaatttacgcacgacttctggtccggtgctggaaaaggcgggcgatctggcagcgatg

SEQ ID NO: 259278 - DNA, 75 bp, synthetic construct
  source 1..75: mol_type = other DNA
caaagtactcgagagaattagccaatgcgaaagctgaaaatgaaactctgcgcgctgatgttgccgctggtcgta

SEQ ID NO: 259279 - DNA, 75 bp, synthetic construct
  source 1..75: mol_type = other DNA
atgaatcgtgttctgtgtgtggtgattattgtcctgctggtagcctgtggtgcgcttagtctggggctgaatcat

SEQ ID NO: 259280 - DNA, 75 bp, synthetic construct
  source 1..75: mol_type = other DNA
tgagctggagctggcgaacgcgacaattactgatatgcagatacgccagcgtgatgtcgctgcacttgatgccag

SEQ ID NO: 259281 - DNA, 75 bp, synthetic construct
  source 1..75: mol_type = other DNA
aatgatgccgccgtcgaactctctccggttgctggacgaaacgttctcggtatcagagacggaatcatcagcgac

SEQ ID NO: 259282 - DNA, 75 bp, synthetic construct
  source 1..75: mol_type = other DNA
taccgcgataacgccatcacctacaaagcgcagcgcgataaaaaagccagagagctggagctggcaaacgcaact

SEQ ID NO: 259283 - DNA, 75 bp, synthetic construct
  source 1..75: mol_type = other DNA
aaaacgctggagcggatttaacactctcgctaaacgcgccccctatttttccagtctgttgattggcttagtcgg

SEQ ID NO: 259284 - DNA, 75 bp, synthetic construct
  source 1..75: mol_type = other DNA
gtgatgttgctgcgcttgatgccagatactcaagggaattagccgatgcgagagctgaaaatgaaactctgcgtg

SEQ ID NO: 259285 - DNA, 75 bp, synthetic construct
  source 1..75: mol_type = other DNA
ctgtgtacttgtcggcatttcattttttagtcatgctggttgccatttcttttcacccgcctggcgagtcctgac

SEQ ID NO: 259286 - DNA, 75 bp, synthetic construct
  source 1..75: mol_type = other DNA
atggtctggaaggtgtcagctacataccatataaagatattgttggtgtatggactgtatgtcacgggcataacc

SEQ ID NO: 259287 - DNA, 75 bp, synthetic construct
  source 1..75: mol_type = other DNA
ctgcctgtcgtgggcggtcaatcattaccgtgataacgccatcacctacaaagcccagcgcgataaaaatgccag

SEQ ID NO: 259288 - DNA, 75 bp, synthetic construct
  source 1..75: mol_type = other DNA
cagactggcagatgtcgctgaacgggattattttaccctcagagaacgagtgatggtgatgcagaaacaactgga

SEQ ID NO: 259289 - DNA, 75 bp, synthetic construct
  source 1..75: mol_type = other DNA
attactgatatgcagcagcgccagcgtgatgttgctgcactcgatgaaaaatactcaagggagttagctgatgcg

SEQ ID NO: 259290 - DNA, 75 bp, synthetic construct
  source 1..75: mol_type = other DNA
tccagtacggccaacataccgttacactggaaactggcatgatggcgcgtcaagccactgccgcagttatggtta

SEQ ID NO: 259291 - DNA, 75 bp, synthetic construct
  source 1..75: mol_type = other DNA
cccggcagcaattaccgtgctgttgatttgcattcagttgaaagccctgacactgggcgcaacactggtcgtcag

SEQ ID NO: 259292 - DNA, 75 bp, synthetic construct
  source 1..75: mol_type = other DNA
taaacgcgccccctatttttccagtctgttgattggcttagtcggtgtgtatatgggcgtacatggcttcatggg

SEQ ID NO: 259293 - DNA, 75 bp, synthetic construct
  source 1..75: mol_type = other DNA
tggataatgcaaccgtcccccgactggcagacaccgctgaacgggattatttcatcctcagagaacggttgatga

SEQ ID NO: 259294 - DNA, 75 bp, synthetic construct
  source 1..75: mol_type = other DNA
cggcggtaaagaaggtctggtacacatttctcaaatcgccgacaaacgtgttgagaaagtgaccgattacctgca

SEQ ID NO: 259295 - DNA, 75 bp, synthetic construct
  source 1..75: mol_type = other DNA
atgaacaacagcaggttgttattcagaacatcaatgaactggtgaaagaagctggtaaaccgcgttgggactggc

SEQ ID NO: 259296 - DNA, 75 bp, synthetic construct
  source 1..75: mol_type = other DNA
acttacagctgatgctgaactcaattattaccgcctccgaagtgggatcgacaagataactgcacaggttaacta

SEQ ID NO: 259297 - DNA, 75 bp, synthetic construct
  source 1..75: mol_type = other DNA
cgcttctcgctggaacaggcaggtgatgcctatgcgctgatggcgagcggcaaatgcgggaaagttgtgattaac

SEQ ID NO: 259298 - DNA, 75 bp, synthetic construct
  source 1..75: mol_type = other DNA
tggcactgcaatccaccgctgactggggacgggtggtttacattggtgaaaccggaaaagtggaattcgaggtca

SEQ ID NO: 259299 - DNA, 75 bp, synthetic construct
  source 1..75: mol_type = other DNA
atgagcagagtaacggtgattatatccgctctggttatctgcatcatcgtctgcttgtcatgggctgttgataat

SEQ ID NO: 259300 - DNA, 75 bp, synthetic construct
  source 1..75: mol_type = other DNA
aatcatcaatctcagttatacattcagcaaaagattggcaggaagctatcgatttctcgatggcatcattgctgg

SEQ ID NO: 259301 - DNA, 75 bp, synthetic construct
  source 1..75: mol_type = other DNA
aatcatcaatctcagttatatcttcagcaaaagactggcaggatgttatcgatttttcgatggcgtcattgttag

SEQ ID NO: 259302 - DNA, 75 bp, synthetic construct
  source 1..75: mol_type = other DNA
aatcatcaatttcagttatacattcagcaaaagactggcaggaagctatcgatttctcgatggcatcattgctgg

SEQ ID NO: 259303 - DNA, 75 bp, synthetic construct
  source 1..75: mol_type = other DNA
acaaaaaacagcgcgacgaaaacgctatggcattagattcggctatggcgacgatctctgatatgcagaagcgtc

SEQ ID NO: 259304 - DNA, 75 bp, synthetic construct
  source 1..75: mol_type = other DNA
cagatatacaaaggagcttgctgatgctaacgcgactatcgaaagtctccgtgctgatgtttctgctgggcgtaa

SEQ ID NO: 259305 - DNA, 75 bp, synthetic construct
  source 1..75: mol_type = other DNA
atcggtctttctgctgccgatgccgattcgcacattggcgctattcaggcgttaagtgaattgctgtgcgaagaa

SEQ ID NO: 259306 - DNA, 75 bp, synthetic construct
  source 1..75: mol_type = other DNA
gcgggaagttgcggtgccgacgccggggattaaccaggtactgatcaaaatgaaatcctccggaatttgcggaag

SEQ ID NO: 259307 - DNA, 75 bp, synthetic construct
  source 1..75: mol_type = other DNA
tatcgggactggtggggtgaaagagagatgaaccgtgttctgtgtgtggtgattattgtcctgctggtagcctgt

SEQ ID NO: 259308 - DNA, 75 bp, synthetic construct
  source 1..75: mol_type = other DNA
atgaaccgaatgctttccgcgtttaccgttattctgctggtggtctgtggtgcgcttagtctggggctgaatcat

SEQ ID NO: 259309 - DNA, 75 bp, synthetic construct
  source 1..75: mol_type = other DNA
aattagccgatgcgagagctgaaaatgaaactcttcgcgctgacgttgccgctggtcgtaagcgcctgcggatca

SEQ ID NO: 259310 - DNA, 75 bp, synthetic construct
  source 1..75: mol_type = other DNA
cgggattatttcatcctcagagaacggctgatgacaatgcagaagcaacttgaaggggcacaggaatatatccgt

SEQ ID NO: 259311 - DNA, 75 bp, synthetic construct
  source 1..75: mol_type = other DNA
atcgctgacatgcagcagcgccagcacgatgttgctgcgctcgatgcaaaatactcgagggaattagccgatgcg

SEQ ID NO: 259312 - DNA, 75 bp, synthetic construct
  source 1..75: mol_type = other DNA
tcgctgttttcttcgtttctgtcgttggttcttttatctgttcagtgaatcattaccacaataaagctattgaat

SEQ ID NO: 259313 - DNA, 75 bp, synthetic construct
  source 1..75: mol_type = other DNA
ccagatatacaaaggagcttgctgatgctaacgcgactatcgaaagtcttcgtgctgatgtttctgctggtcgta

SEQ ID NO: 259314 - DNA, 75 bp, synthetic construct
  source 1..75: mol_type = other DNA
ttgtcctgctggtagcctgtggtgcgcttagtctggggctgaatcattaccgcgataacgccataacctacaaag

SEQ ID NO: 259315 - DNA, 75 bp, synthetic construct
  source 1..75: mol_type = other DNA
cggattcctgtacgccattggttatgctggcttagcggctaccatctgggcggcaattgttccggcgctgctggc

SEQ ID NO: 259316 - DNA, 75 bp, synthetic construct
  source 1..75: mol_type = other DNA
atgctctggttatctgcataatcgtctgcctgtcgtgggcggtcaatcattaccgtgataacgccatcgcctaca

SEQ ID NO: 259317 - DNA, 75 bp, synthetic construct
  source 1..75: mol_type = other DNA
gcaccgcccgcgtggataatgcaaccggcccccaactggcagacaccgttacacgggattatttcaccctcagag

SEQ ID NO: 259318 - DNA, 75 bp, synthetic construct
  source 1..75: mol_type = other DNA
agcctcggacggtaagactgaggaactggttaaggtgatgcaggataacctcggcggcgactttaaagagtttca

SEQ ID NO: 259319 - DNA, 75 bp, synthetic construct
  source 1..75: mol_type = other DNA
gcagcgcagttttgagaaaaacaatctcggaacgggtcagaaagccgaatacatgaaaaccattttcggtgaaga

SEQ ID NO: 259320 - DNA, 75 bp, synthetic construct
  source 1..75: mol_type = other DNA
gggcgctgcacgattctaaaatcaccggctcgatggcgggtacagggagccgtgccgttctgagtcgcctgcagg

SEQ ID NO: 259321 - DNA, 75 bp, synthetic construct
  source 1..75: mol_type = other DNA
tcaaacacaacagcttgcggcaggctgtacaacgccagcggcaggaactcagccaggcgggaatcaatacccgca

SEQ ID NO: 259322 - DNA, 75 bp, synthetic construct
  source 1..75: mol_type = other DNA
atctggcaaatgatgagcgggggcttaaatcgcgcatcagtgagacgactgcgcagctcaatcgtcagcgtgagg

SEQ ID NO: 259323 - DNA, 75 bp, synthetic construct
  source 1..75: mol_type = other DNA
gttgccggggcggtggtggccggggcgctgcttatccgtaaatactgggagccgattggcgcatttttctcgggt

SEQ ID NO: 259324 - DNA, 75 bp, synthetic construct
  source 1..75: mol_type = other DNA
aatctgccgggaggtgttgcgccggggcatcagcttgacagacaactacgcgacacgctcgaacagattgagcgc

SEQ ID NO: 259325 - DNA, 75 bp, synthetic construct
  source 1..75: mol_type = other DNA
gcagcgcagctttgagaaaaacaacctcgggacaagccagcgcggcgagtacatgaaaaccattttcggcgagga

SEQ ID NO: 259326 - DNA, 75 bp, synthetic construct
  source 1..75: mol_type = other DNA
atgcgaatattttctcctctcactcccttgtgtgcactgatggtcagcgcctgtctggtgtgcccggctcaggcc

SEQ ID NO: 259327 - DNA, 75 bp, synthetic construct
  source 1..75: mol_type = other DNA
atgaagtctgctttccagctctctaacgataaagtcgcgcatattggtgatgttctctcgatgacgatgaacaaa

SEQ ID NO: 259328 - DNA, 75 bp, synthetic construct
  source 1..75: mol_type = other DNA
ggtgcggcgggaattaatacccgcaaccttgccaatgacgagcgaggattaaaaagtcgcataagtgaaacgacg

SEQ ID NO: 259329 - DNA, 75 bp, synthetic construct
  source 1..75: mol_type = other DNA
gcaggcgcaggcactcgacgcggcaaagcgtgccgcctctgagctgcagacgaaatacaacagcctgagaacgtc

SEQ ID NO: 259330 - DNA, 75 bp, synthetic construct
  source 1..75: mol_type = other DNA
ggcaaagctcaacgcggttaagcagcgatatcaggccggtaaagagatggccggtaaaatggccggtgtgggtgc

SEQ ID NO: 259331 - DNA, 75 bp, synthetic construct
  source 1..75: mol_type = other DNA
gcgccagctcggcgacaataccgccgcctcggcagatgatgcagccggtgcacagattatcatcgcgaaagcggg

SEQ ID NO: 259332 - DNA, 75 bp, synthetic construct
  source 1..75: mol_type = other DNA
gcaggcacaggtgctcgaatccgcaaaacgtgccgccgaggggctgcagattaaatacaacagcctcaccgagtc

SEQ ID NO: 259333 - DNA, 75 bp, synthetic construct
  source 1..75: mol_type = other DNA
aaaacacggaacggccaacggcggcacaggccagagtgctggaatcagcaaagcgttcggctgaagggttacagg

SEQ ID NO: 259334 - DNA, 75 bp, synthetic construct
  source 1..75: mol_type = other DNA
acggttccactgttaagcaggtaaaaattaataatcctggcgatatttacactaaggcactggacgcgaccacta

SEQ ID NO: 259335 - DNA, 75 bp, synthetic construct
  source 1..75: mol_type = other DNA
aacccgtgttgacggcggtaacaaagatggcctgatcctgctgcaaaccgcaaccgttggtgaaatcgatgcagg

SEQ ID NO: 259336 - DNA, 75 bp, synthetic construct
  source 1..75: mol_type = other DNA
aaatgaccgcactacgcaaacaggcgcgccagctcggcgacaataccgccgcctcggcggatgatgcggccggtg

SEQ ID NO: 259337 - DNA, 75 bp, synthetic construct
  source 1..75: mol_type = other DNA
aagcgtgccgcctctgaactgcagacgaaatacaacagcctgagaacgtcggtacagcgccagcgctccgaactg

SEQ ID NO: 259338 - DNA, 75 bp, synthetic construct
  source 1..75: mol_type = other DNA
ctggttaaggttatgcaggataacctcggcggcgacttcaaagagtttcagtctgcctatgaggcggtcggtact

SEQ ID NO: 259339 - DNA, 75 bp, synthetic construct
  source 1..75: mol_type = other DNA
gcgccagctcggtgacaatacagccgcttctgctgatgatgcagccagtgcgcagattatcattgcaaaaggtgg

SEQ ID NO: 259340 - DNA, 75 bp, synthetic construct
  source 1..75: mol_type = other DNA
cgttatcaggcaggaaaggaactggccggaaatatggcctcagtgggcgctgccggtgcggggattgctgctgcg

SEQ ID NO: 259341 - DNA, 75 bp, synthetic construct
  source 1..75: mol_type = other DNA
ctctccagttgcaaaaatgtcggcgttacttttggccaggcgctggctgatgcgctgatgatgccgctcaagatg

SEQ ID NO: 259342 - DNA, 75 bp, synthetic construct
  source 1..75: mol_type = other DNA
cattaaagaacttggcgttaagacgatggataaaaagggcaatacgcggccaatatttaccatcctgaaagaaat

SEQ ID NO: 259343 - DNA, 75 bp, synthetic construct
  source 1..75: mol_type = other DNA
ttcctgtttcgcaaccaatcatcattaacgctgctggatatccggtatataacgggcagattgccaaattcgtaa

SEQ ID NO: 259344 - DNA, 75 bp, synthetic construct
  source 1..75: mol_type = other DNA
atgtatcttggcggcccgcttggactaatgtctatcggtttaatggccattttggtcagaggtctggggttactg

SEQ ID NO: 259345 - DNA, 75 bp, synthetic construct
  source 1..75: mol_type = other DNA
aatgtttatactgattatgaacatctaaatttttggagtactacacccagagagttattgataaaatatattaat

SEQ ID NO: 259346 - DNA, 75 bp, synthetic construct
  source 1..75: mol_type = other DNA
attcactaccttaccgatgccactacctacgaacagatgagagtgaacgacagcactgatgttaaaaacctgctg

SEQ ID NO: 259347 - DNA, 75 bp, synthetic construct
  source 1..75: mol_type = other DNA
ggggcgtctcctgggaggccgttggtgcatataatgcaggattcaggaaaaccgaacgccagaaccagagacgtc

SEQ ID NO: 259348 - DNA, 75 bp, synthetic construct
  source 1..75: mol_type = other DNA
ttcctgttgcacagccaatcgtcatcaatgccgctgggtatccagtatataacggacagattgccaaattcgtaa

SEQ ID NO: 259349 - DNA, 75 bp, synthetic construct
  source 1..75: mol_type = other DNA
atgagcagagtaaccgcgattatttccgctctggttatctgcatcatcgtttgcttgtcatgggctaatcattac

SEQ ID NO: 259350 - DNA, 75 bp, synthetic construct
  source 1..75: mol_type = other DNA
tgcgcttagtctggggctgaatcattaccgcgataacgccatcacctacaaagcgcagcgcgataaaaaagtcag

SEQ ID NO: 259351 - DNA, 75 bp, synthetic construct
  source 1..75: mol_type = other DNA
agagctgaaaatgaaactctgcgtgctgacgttgccgctggtcaccgcagcctgcggatcaacgccacctgtcca

SEQ ID NO: 259352 - DNA, 75 bp, synthetic construct
  source 1..75: mol_type = other DNA
atgaaacatcatttaagcattggtaagcacgaatacgagatcacggaaagcggctacacactggcaaaacagctt

SEQ ID NO: 259353 - DNA, 75 bp, synthetic construct
  source 1..75: mol_type = other DNA
gggtgattcagtatgaagctgtgaatagtcagacgttccgtttgcttgagataaacccgtttgaattgtgggtga

SEQ ID NO: 259354 - DNA, 75 bp, synthetic construct
  source 1..75: mol_type = other DNA
tactcgagggaattagccgatgcgagagctgaaaatgaaactctgcgcgctgatgttgccgctggtcgtaagcgc

SEQ ID NO: 259355 - DNA, 75 bp, synthetic construct
  source 1..75: mol_type = other DNA
ttcagtaacagccagggcactctgaacaacgatctctctatcagccaggcggcaaccggggtcgctattgccatt

SEQ ID NO: 259356 - DNA, 75 bp, synthetic construct
  source 1..75: mol_type = other DNA
cgcagattatcattgcaaaaggtggtggtgatgcggcggctatagcggccatgacacctgtgactctcaacctgt

SEQ ID NO: 259357 - DNA, 75 bp, synthetic construct
  source 1..75: mol_type = other DNA
ctggggcgtcacaccagaggagtggcagcgctatctcacgctgaaacagcaggcgcgcggcgtctggtcgccggg

SEQ ID NO: 259358 - DNA, 75 bp, synthetic construct
  source 1..75: mol_type = other DNA
cagggcgagcgcggcatctggtcaccgggactcgatcccctcaccaccctcggcgtggaagccaacagcgacgcc

SEQ ID NO: 259359 - DNA, 75 bp, synthetic construct
  source 1..75: mol_type = other DNA
aggctcaatggcggggacgggaagccgtgccgtgttaagtcgcctgcaggcaccgacgggaaaagcatgggatgc

SEQ ID NO: 259360 - DNA, 75 bp, synthetic construct
  source 1..75: mol_type = other DNA
acatcagggggtcaatggcgggtacgggtagtagtgccgttgtcacccgattacaggcaccgactggaaaagcat

SEQ ID NO: 259361 - DNA, 75 bp, synthetic construct
  source 1..75: mol_type = other DNA
atatgaaaaccattttcggtgaagaggccagctcgtcggctgcggtactcatgaccgctgcctcgagcgggaaat

SEQ ID NO: 259362 - DNA, 75 bp, synthetic construct
  source 1..75: mol_type = other DNA
taatggatcgaataatattgttggatattgtcttgttgttgccggtgtgttatcggcagcattttatgttgttat

SEQ ID NO: 259363 - DNA, 75 bp, synthetic construct
  source 1..75: mol_type = other DNA
agctatcgtaatgagcaaaaaaggagttgaagaactagatgccggaggggtgtttttctggcagatttgtagtgc

SEQ ID NO: 259364 - DNA, 75 bp, synthetic construct
  source 1..75: mol_type = other DNA
ttgacttcaaagcctcctatgttcgtgaagacgactcaacaccagcaacggctggttatgtaagaaccaacacag

SEQ ID NO: 259365 - DNA, 75 bp, synthetic construct
  source 1..75: mol_type = other DNA
acggttccactgttaagcaggtaaaaattaataatcctggcgatgtttacactaaagcactggacgcgaccacta

SEQ ID NO: 259366 - DNA, 75 bp, synthetic construct
  source 1..75: mol_type = other DNA
agaaatatgcttgcagcttttcaaatgcgacttcaaaaactgactgaattttattcagaatacgttgacccagca

SEQ ID NO: 259367 - DNA, 75 bp, synthetic construct
  source 1..75: mol_type = other DNA
ccttaataaatatggttggagtcctgaacagattaaaggtttccagactgatccattaggtttcctgggcgctgt

SEQ ID NO: 259368 - DNA, 75 bp, synthetic construct
  source 1..75: mol_type = other DNA
cggcttagagcacggggtagatagttccgttgatcaacgtcaagataaccttaaagacgttcaagaacgtttagg

SEQ ID NO: 259369 - DNA, 75 bp, synthetic construct
  source 1..75: mol_type = other DNA
ctgaacactaccccatctatgacgtatgcgccaagcattgtcgtaaacgtgccagaaagtaaggttgatgtgaat

SEQ ID NO: 259370 - DNA, 75 bp, synthetic construct
  source 1..75: mol_type = other DNA
gccggtctcagccagactggtgcaggacggaccaatgggcagacctttaatctacgcggctatgacaaaagcggg

SEQ ID NO: 259371 - DNA, 75 bp, synthetic construct
  source 1..75: mol_type = other DNA
aggcgctattattcgttggtcacacaaatcattaatggaatattttgcagctatgtttatctgtcgtgacacaaa

SEQ ID NO: 259372 - DNA, 75 bp, synthetic construct
  source 1..75: mol_type = other DNA
accatacacatgcctaataaaagacaatgcagatttattagataatttcaatcatatattaatcactgactcagc

SEQ ID NO: 259373 - DNA, 75 bp, synthetic construct
  source 1..75: mol_type = other DNA
gtccactggcgggatgattcttgactcggtcagctttcggggtgtccggctttacagtaatgatgacatgctgaa

SEQ ID NO: 259374 - DNA, 75 bp, synthetic construct
  source 1..75: mol_type = other DNA
aattacagtcagtatctgactgattcccggtgggcacacagccggagtgagagtaccagtttctacaacacttac

SEQ ID NO: 259375 - DNA, 75 bp, synthetic construct
  source 1..75: mol_type = other DNA
ctcactgcatcatgggggctgaataaaacttgtagcataccattccgtataaaccagcataaagctgaggccgtt

SEQ ID NO: 259376 - DNA, 75 bp, synthetic construct
  source 1..75: mol_type = other DNA
acaatatttccgtggtgctttcagtcgtaacggtgaagagctaaataaaaccatcgttaagatgcaaaaagccaa

SEQ ID NO: 259377 - DNA, 75 bp, synthetic construct
  source 1..75: mol_type = other DNA
acctggaatggtgatttcagcacggcatctctggggtatacccacagtggcgggtacagaacaacggatttcagc

SEQ ID NO: 259378 - DNA, 75 bp, synthetic construct
  source 1..75: mol_type = other DNA
gcttgggtgggaagagccaacctcctcttcggtgtcatggagtacgacacgcacggaccgccaggtgcgacagac

SEQ ID NO: 259379 - DNA, 75 bp, synthetic construct
  source 1..75: mol_type = other DNA
ctacattggttcttaaaaagattagattctacaattgtgccattatttatcttcgcaatgcccaattacttgtta

SEQ ID NO: 259380 - DNA, 75 bp, synthetic construct
  source 1..75: mol_type = other DNA
aacggatgcgctcttattcttataatgtatcccgggcccgtatctgggggtgggatgtgcagggaaactaccagt

SEQ ID NO: 259381 - DNA, 75 bp, synthetic construct
  source 1..75: mol_type = other DNA
gtccgaattccagcctgtacggcagtggaggactgggcggcgtggtggacttcagaactgccgacgcgaccgatt

SEQ ID NO: 259382 - DNA, 75 bp, synthetic construct
  source 1..75: mol_type = other DNA
tttatttaatagagtatatgtcattaaccataatatgcgcaggggatgtatatggttaataaaactaaaagacaa

SEQ ID NO: 259383 - DNA, 75 bp, synthetic construct
  source 1..75: mol_type = other DNA
gatggtgtagagttatgtgatatacccaatattgataacgagttaaaaaataaaattcagcaatcaattcattct

SEQ ID NO: 259384 - DNA, 75 bp, synthetic construct
  source 1..75: mol_type = other DNA
atgattcagaagagcaagatcaaagacttggttgtttttaccgatgaaaacaattcaaagtacctcaatgtatta

SEQ ID NO: 259385 - DNA, 75 bp, synthetic construct
  source 1..75: mol_type = other DNA
tttcactgtcttataagcctgtaagtgttaaaggctttgaggcgtcagtaactctggataatgccttcaacaagc

SEQ ID NO: 259386 - DNA, 75 bp, synthetic construct
  source 1..75: mol_type = other DNA
tacatcattgtatttccaggatgaaatgactatggaaagctacccggttaacattatcgtcggttcccgttatga

SEQ ID NO: 259387 - DNA, 75 bp, synthetic construct
  source 1..75: mol_type = other DNA
aaccgaaaaaacagatgcgctcctttctgtcattatgcgtaaaagaggaagtatctatcagagtgatggtgagcg

SEQ ID NO: 259388 - DNA, 75 bp, synthetic construct
  source 1..75: mol_type = other DNA
atgtatatgaacgtaatcaaaactgctatttgtacattaatcacactacctgtgggactacaggccgcgaccagt

SEQ ID NO: 259389 - DNA, 75 bp, synthetic construct
  source 1..75: mol_type = other DNA
tgcactcctggccgctgccgtcgttattgcccgcgttgattacaacaagaacgcggaaaaaaaggccagccaggt

SEQ ID NO: 259390 - DNA, 75 bp, synthetic construct
  source 1..75: mol_type = other DNA
gccgggcagttgagccgcctgacgggaagccacgttccggcaggaactggcacagaagcggcatctttgcgcgac

SEQ ID NO: 259391 - DNA, 75 bp, synthetic construct
  source 1..75: mol_type = other DNA
tcaccgttgtcgcgacaggaaatcagaacacggtatttgaaacgccgtcgatggtcagtgtcgtcacgaatgaca

SEQ ID NO: 259392 - DNA, 75 bp, synthetic construct
  source 1..75: mol_type = other DNA
tttcttgccgaccggtctttggctttacttttctggggggttaaagagtttgccggaagggtggatcaacattgc

SEQ ID NO: 259393 - DNA, 75 bp, synthetic construct
  source 1..75: mol_type = other DNA
gcgattcaacgcatggagaacgctgcctgcggtgtgtctggctggaggaattatgatgtgctggccgctatggca

SEQ ID NO: 259394 - DNA, 75 bp, synthetic construct
  source 1..75: mol_type = other DNA
ctgcgtgcacagtatctggcgtcattacaaacaacgctgcaaccctatccgtggaatgcggttattcttggttta

SEQ ID NO: 259395 - DNA, 75 bp, synthetic construct
  source 1..75: mol_type = other DNA
acgttcgtgcggttcacggccagcttaatgatggcggctttgacagccagcgttatgccattgcccagcatcagc

SEQ ID NO: 259396 - DNA, 75 bp, synthetic construct
  source 1..75: mol_type = other DNA
gctacgctggcataaccttgaaccggaaggcgtcattctgagtcatgagcatctggatcatcggggagggctgga

SEQ ID NO: 259397 - DNA, 75 bp, synthetic construct
  source 1..75: mol_type = other DNA
gtggaaagcggtgattcttggcttaggtatgggtgaacggttatctgtgcctaaagaaatcaaagatattatgcg

SEQ ID NO: 259398 - DNA, 75 bp, synthetic construct
  source 1..75: mol_type = other DNA
ctacaaggtcgacgtatattccctgcgccaggccttgtgctgtatggcgaatatcttccgcaagcggtttgtgct

SEQ ID NO: 259399 - DNA, 75 bp, synthetic construct
  source 1..75: mol_type = other DNA
aaagaccagaagaatgagaatacattacagctggcaattattagccgcataaaaatgttttatcgccccacgaac

SEQ ID NO: 259400 - DNA, 75 bp, synthetic construct
  source 1..75: mol_type = other DNA
gagttgtttctgaaacatggcaaaggtagcgttgccaatgatgttacagatgaaatggtcagactaaactggctg

SEQ ID NO: 259401 - DNA, 75 bp, synthetic construct
  source 1..75: mol_type = other DNA
tgccattgattggcggaatttgctgtgctgctttttatgcctggctgaccggaatgcagccgccagcactgcgta

SEQ ID NO: 259402 - DNA, 75 bp, synthetic construct
  source 1..75: mol_type = other DNA
aatcacactcctgcttatgcccgtgcaaatcgtcatatttcatggcattagtctgacctcgtttattgcaaatct

SEQ ID NO: 259403 - DNA, 75 bp, synthetic construct
  source 1..75: mol_type = other DNA
atgtcgggcaagggctggcaatggtcattgcgcgaaacggcaaagcgattctctatgacacgggactggcctggc

SEQ ID NO: 259404 - DNA, 75 bp, synthetic construct
  source 1..75: mol_type = other DNA
tggagtggctgggatgtgtggatatgctgccttgcagtaatattgctgatggaccctgttgccattctctcgcaa

SEQ ID NO: 259405 - DNA, 75 bp, synthetic construct
  source 1..75: mol_type = other DNA
gccaccaccattatcagtatggtgctgttcgccttctccacctgggtttccaccaacggggcgaaaatgctgggg

SEQ ID NO: 259406 - DNA, 75 bp, synthetic construct
  source 1..75: mol_type = other DNA
tggtggaaatacagtaaatatataaaaggattaacggctgcagagcgccatattgaagcatctcccgccagcaat

SEQ ID NO: 259407 - DNA, 75 bp, synthetic construct
  source 1..75: mol_type = other DNA
tggtggaaatatagtaaatatataaagggactcacagctgaagagcgccatattgaagcgacgccagccagcaat

SEQ ID NO: 259408 - DNA, 75 bp, synthetic construct
  source 1..75: mol_type = other DNA
ttcctcaggcatatcttggtgatggagcaaagttgatctcctcgcctgatacatgggaatatggggggccggcat

SEQ ID NO: 259409 - DNA, 75 bp, synthetic construct
  source 1..75: mol_type = other DNA
gttttctcctgaaaaatttgaaaatagaattactgatgctcttggattggtaatatcagtaattcatatgccact

SEQ ID NO: 259410 - DNA, 75 bp, synthetic construct
  source 1..75: mol_type = other DNA
atgtgtatccaccttaacttaatgatttttaccaaaatcattaggggattcatcagtgcttcgtatgccttcctc

SEQ ID NO: 259411 - DNA, 75 bp, synthetic construct
  source 1..75: mol_type = other DNA
agattgcgccaaaataccttgatgctgtggtggctggccagaaaaaggccgagctgcgtaaaaacgatcgcgggt

SEQ ID NO: 259412 - DNA, 75 bp, synthetic construct
  source 1..75: mol_type = other DNA
tggcgaccatctttcaatataaatgggaagttttatatttgtttaataaaggattttgattgggatgctcccatt

SEQ ID NO: 259413 - DNA, 75 bp, synthetic construct
  source 1..75: mol_type = other DNA
atgtggaatgcggttattcttggtttaggtatgggggaacggttatccgtccccaaagaaatcaaaaatatcatg

SEQ ID NO: 259414 - DNA, 75 bp, synthetic construct
  source 1..75: mol_type = other DNA
aacaacgttatcaataataatattgagcttggactggcctcggcaccgatgtttttcctcgcgacgattttttat

SEQ ID NO: 259415 - DNA, 75 bp, synthetic construct
  source 1..75: mol_type = other DNA
agcttgaaatcgcactggagcaggaactgagtcgtgatgaggtaggacaacgtcttcagacaatacccggtattg

SEQ ID NO: 259416 - DNA, 75 bp, synthetic construct
  source 1..75: mol_type = other DNA
atgacaatcaaaatccatgcggtaaaaattgcgccgaaataccttaatgctgtggtggctggtcagaaaaaggcc

SEQ ID NO: 259417 - DNA, 75 bp, synthetic construct
  source 1..75: mol_type = other DNA
gcccccactgccgcacagtcggttaacaatacacagattgccactacggcttttgtgaaatcggcgattgcggca

SEQ ID NO: 259418 - DNA, 75 bp, synthetic construct
  source 1..75: mol_type = other DNA
tcagataccggacatggcctcttttgccagtggtgatggatggatgaaattacccaacgggaaaatcctgcaata

SEQ ID NO: 259419 - DNA, 75 bp, synthetic construct
  source 1..75: mol_type = other DNA
gcgctgtcaggtaagcagccactggatgagacgctgactcatttgagtggaaaggatgtagctggtcttctcgca

SEQ ID NO: 259420 - DNA, 75 bp, synthetic construct
  source 1..75: mol_type = other DNA
atcaaggaacgtctcgtaccgttcctcgatgggcaggttatcaagaaagtcgatctcactactcgtttaatcgaa

SEQ ID NO: 259421 - DNA, 75 bp, synthetic construct
  source 1..75: mol_type = other DNA
cacctgttgatcccatcgttttgggaaaaatgggttcgtcttacggtattcgtgggtggctcagagtgttttctt

SEQ ID NO: 259422 - DNA, 75 bp, synthetic construct
  source 1..75: mol_type = other DNA
atgggttcgtcttacggtattcgtgggtggctcagagtgttttcttccaccgaagacgccgaaagcatttttgac

SEQ ID NO: 259423 - DNA, 75 bp, synthetic construct
  source 1..75: mol_type = other DNA
cacagaagcggcatctttgcgcgacagtctctgcctgctgcaaaaaagctatcgtttcggcagcgattctggcat

SEQ ID NO: 259424 - DNA, 75 bp, synthetic construct
  source 1..75: mol_type = other DNA
attgacgatccagttgccggaacgccactcgtggtgccgctcggaagaacggcaccttcaaccgcaaatagttaa

SEQ ID NO: 259425 - DNA, 75 bp, synthetic construct
  source 1..75: mol_type = other DNA
tctgcgctgcatgataattgacgacccggttgcaggaacgccacttgtggtgccgctcggacgaacggcaccttc

SEQ ID NO: 259426 - DNA, 75 bp, synthetic construct
  source 1..75: mol_type = other DNA
attcgtatctgggatgacgggcgaggtgcagacggtggtcgcgaattattaagctggcaggcagctacaaacttt

SEQ ID NO: 259427 - DNA, 75 bp, synthetic construct
  source 1..75: mol_type = other DNA
gaaatgtgggcaacggggaaaaccaaatccctgatatgtctttctggacggttactggtggcaatggaaattttg

SEQ ID NO: 259428 - DNA, 75 bp, synthetic construct
  source 1..75: mol_type = other DNA
attaactggcaaaaagttgcggcggcagtggcgctgacgcggcggatctcggtgatttccggcggccctggcacc

SEQ ID NO: 259429 - DNA, 75 bp, synthetic construct
  source 1..75: mol_type = other DNA
atcaaggaacgtctcgtaccgttcctcgatgggcaggttatcaagaaagtcgatctcactacacgttcaatcgac

SEQ ID NO: 259430 - DNA, 75 bp, synthetic construct
  source 1..75: mol_type = other DNA
ctgccagtaacatgaacgtttccggtttgtgccgtagcacctactacaccgcaccgacgctggcggagcgcaaac

SEQ ID NO: 259431 - DNA, 75 bp, synthetic construct
  source 1..75: mol_type = other DNA
ctccagcaaatcgcccgccagcttgctgccagtaacatgagcgtttccggtttgtgccgtagcacttactacacc

SEQ ID NO: 259432 - DNA, 75 bp, synthetic construct
  source 1..75: mol_type = other DNA
gccattattgatgcctgcgccgcgcgtggtattggcgcgattgctccctggcgcagggagttgcaaggtgaagat

SEQ ID NO: 259433 - DNA, 75 bp, synthetic construct
  source 1..75: mol_type = other DNA
tactcagccgtttaacccgctggcgcagtttatcttcctgatgctgctgtggggggggagcgctgatcgtacggc

SEQ ID NO: 259434 - DNA, 75 bp, synthetic construct
  source 1..75: mol_type = other DNA
tctgtttgcgatgaagggaaaaaaagagaataccttgcgtattcttgatgcaacaaataaccaattgccacagga

SEQ ID NO: 259435 - DNA, 75 bp, synthetic construct
  source 1..75: mol_type = other DNA
tggcgattgacgataaccgccgggcgctggacgacgccgctgtactgaacgccgcctgttatatgcaggtggttg

SEQ ID NO: 259436 - DNA, 75 bp, synthetic construct
  source 1..75: mol_type = other DNA
acagcgccatttggcgtcgttttgatgaggtgattgaatttcctttgcctgatcaggcacagttacgcgagttac

SEQ ID NO: 259437 - DNA, 75 bp, synthetic construct
  source 1..75: mol_type = other DNA
aaagtggtgcagatatcgaacgcatcgttcgccgagccactaaacacatgatcctgcgtcatcaggaattcctga

SEQ ID NO: 259438 - DNA, 75 bp, synthetic construct
  source 1..75: mol_type = other DNA
tgataaaaatgacactatgtcgtatatcaaagcagtgtgcgaacaacttggcgtttctgctgatgagcctctcga

SEQ ID NO: 259439 - DNA, 75 bp, synthetic construct
  source 1..75: mol_type = other DNA
ctggcctcggttgaggctggagctgtgctgggcgatatctgcgcttatgccaacgcaggctttaccgccgagcgt

SEQ ID NO: 259440 - DNA, 75 bp, synthetic construct
  source 1..75: mol_type = other DNA
gttggcgacctgtgtcagtgaaatcggtgagctacaaaattgggaagagtgcttgctggcttcacaagcggtcag

SEQ ID NO: 259441 - DNA, 75 bp, synthetic construct
  source 1..75: mol_type = other DNA
tgaggtgattgaatttcctttgcctgatcaggcacagttacgcgagttactggcgttaaagctacgcggcattcg

SEQ ID NO: 259442 - DNA, 75 bp, synthetic construct
  source 1..75: mol_type = other DNA
acgaatacctcagtgtgtatgcaatggctggtatgggggttgcaaaagtcaccactgacttgaaaattaacgaca

SEQ ID NO: 259443 - DNA, 75 bp, synthetic construct
  source 1..75: mol_type = other DNA
ctactatccggtccttcgtggcggtttaatgaatacctcagtgtgtattcaatggcaggtgttgcggttgcaaaa

SEQ ID NO: 259444 - DNA, 75 bp, synthetic construct
  source 1..75: mol_type = other DNA
tgcatccgtatttgtggcgcgaaggaaaagattttccgccttcgcctgcacgaatggatgccctgctaaaagccg

SEQ ID NO: 259445 - DNA, 75 bp, synthetic construct
  source 1..75: mol_type = other DNA
gcgaaagtctgatggctctgatgcgtttaaatgatgaaatagtgatgacgccagagatgaatttcagcaagcgcg

SEQ ID NO: 259446 - DNA, 75 bp, synthetic construct
  source 1..75: mol_type = other DNA
gctacctgatatgggtagttttatgctttctgcttcagttcctggatatcaaaaattgccatccggtttaattat

SEQ ID NO: 259447 - DNA, 75 bp, synthetic construct
  source 1..75: mol_type = other DNA
cggcactcactggaacgccaacagcccccactgcggcgcagtcggtcaataatacacagattgccactacggctt

SEQ ID NO: 259448 - DNA, 75 bp, synthetic construct
  source 1..75: mol_type = other DNA
cggttattatcttttagtttatcgtaaaaaaatacgtaatcttatgcggcgtttgaaagggaagccagcacgata

SEQ ID NO: 259449 - DNA, 75 bp, synthetic construct
  source 1..75: mol_type = other DNA
gtattaagaatgaggttaaagatctcggttattatcttttagtttatcgtaaaaaaatacgtaatcttatgcggc

SEQ ID NO: 259450 - DNA, 75 bp, synthetic construct
  source 1..75: mol_type = other DNA
attaaaaatgagattaaagatcttggttattatcttttagtttatcgtaaaaaaatgcgcaacgttatgcgacgc

SEQ ID NO: 259451 - DNA, 75 bp, synthetic construct
  source 1..75: mol_type = other DNA
ggcagaaacgcttcccaactggcgttacgtcgatacacaactgccggtacgggaagatttttctgtgccaaccga

SEQ ID NO: 259452 - DNA, 75 bp, synthetic construct
  source 1..75: mol_type = other DNA
gcggtgaagcgcattcagaccgaagctgctgccggacgtaaaacgggcggttcggtggatctgctctgggtgaac

SEQ ID NO: 259453 - DNA, 75 bp, synthetic construct
  source 1..75: mol_type = other DNA
cgataccgcaattaaccgctatctcgactgggttagcggcgagatgaaaacccattacgctataaacctgaagat

SEQ ID NO: 259454 - DNA, 75 bp, synthetic construct
  source 1..75: mol_type = other DNA
caccaattaccctgaggcgtgggttagttattatcaggcaaaaaactttctcgcaattgatccggtgctgaaccc

SEQ ID NO: 259455 - DNA, 75 bp, synthetic construct
  source 1..75: mol_type = other DNA
ttcctaacgctctgtttcatgccactgcgattgactcaggtgcttctgctagctcgtggaatggatcggccggca

SEQ ID NO: 259456 - DNA, 75 bp, synthetic construct
  source 1..75: mol_type = other DNA
ccgcagccattaacaatgacccgaaattcagtaccaccattaacaatgcgctgtcaggtaagcagccactggatg

SEQ ID NO: 259457 - DNA, 75 bp, synthetic construct
  source 1..75: mol_type = other DNA
ggtgaatgggtatgtagcaattccattaattatttctggcgttcggagaccacttattatccagtggggagtggg

SEQ ID NO: 259458 - DNA, 75 bp, synthetic construct
  source 1..75: mol_type = other DNA
tctgcgctgcatgattattgacgatccggtagccggaacgccgctcgtggtgccgctcggacgaacggcaccttc

SEQ ID NO: 259459 - DNA, 75 bp, synthetic construct
  source 1..75: mol_type = other DNA
gccgggagatatcaccgtgcaggagttagtagcgcgcgggcgttacccgcatcaaccgctgtttacccgctggcg

SEQ ID NO: 259460 - DNA, 75 bp, synthetic construct
  source 1..75: mol_type = other DNA
gccgggcgatatcaccgtgcaggagctggtggcgcgtgggcgttacccgcatcaaccgctgtttacccgctggcg

SEQ ID NO: 259461 - DNA, 75 bp, synthetic construct
  source 1..75: mol_type = other DNA
gcgcagggagttgcagggtgaagatctccagcaaatcgcccgccagcttgctgccagtaacatgaacgtttccgg

SEQ ID NO: 259462 - DNA, 75 bp, synthetic construct
  source 1..75: mol_type = other DNA
ccttttcccgtagcagtacgcgtgaaatacccattcttagtgatgaactgcaattaaaaatgcagctattggtgc

SEQ ID NO: 259463 - DNA, 75 bp, synthetic construct
  source 1..75: mol_type = other DNA
aacatgcagaaaaaaatcaatgcaccgaataagacccaggttgcctgttacgcggccgctactggcttaatttga

SEQ ID NO: 259464 - DNA, 75 bp, synthetic construct
  source 1..75: mol_type = other DNA
cgaccaataaattaccggatttacggggcgaatttatccgtggctgggatgacgggcgagggattgatgcaggac

SEQ ID NO: 259465 - DNA, 75 bp, synthetic construct
  source 1..75: mol_type = other DNA
cgacagctgcgtatatgcgtggcgttgaatttcctaacccacctggtgaggatgattttattgcagcttatggag

SEQ ID NO: 259466 - DNA, 75 bp, synthetic construct
  source 1..75: mol_type = other DNA
tccggatctcgccagtcagatcctgcgtgccggaaaacgcatcctcgcgtttcatgtttccgactggttagtgcc

SEQ ID NO: 259467 - DNA, 75 bp, synthetic construct
  source 1..75: mol_type = other DNA
gactatttgcaacagtgcccgacaatctatcgattgtatgggaagcccgatgcgccagagttgtttctgaaacat

SEQ ID NO: 259468 - DNA, 75 bp, synthetic construct
  source 1..75: mol_type = other DNA
ccctggataaaggtcacaggtaatgcaatggctgggcagactaatgtactggcaacaaatatagccaattttggt

SEQ ID NO: 259469 - DNA, 75 bp, synthetic construct
  source 1..75: mol_type = other DNA
cgaaaaccacatcgtcgtttgattacggcactaaatccacgaataacaccggggcgcatacgcacagtctgagtg

SEQ ID NO: 259470 - DNA, 75 bp, synthetic construct
  source 1..75: mol_type = other DNA
agcgcatccagtacggatttggggacgaaaaacacatcgtcgtttgattacggaaccaaatccacgaataacacc

SEQ ID NO: 259471 - DNA, 75 bp, synthetic construct
  source 1..75: mol_type = other DNA
attaatgatgaacttctgaaagaatatactgtcagaattgaaaaaataaaggctgtgctatcttcaggatattat

SEQ ID NO: 259472 - DNA, 75 bp, synthetic construct
  source 1..75: mol_type = other DNA
cggagtgacagcaggtctggacacagcacgttcaacgttcacctttacttcagtgccctttcgtaatggcagcgg

SEQ ID NO: 259473 - DNA, 75 bp, synthetic construct
  source 1..75: mol_type = other DNA
aatactatgggaggaggtcagaataatgtactggcaacaaatataactcattttggtatagcgctgtatcaggga

SEQ ID NO: 259474 - DNA, 75 bp, synthetic construct
  source 1..75: mol_type = other DNA
tcgtcgttttaattttcatggagaaatctatcaaataaggatggaaaatgtttcattttataatgaagaatctgt

SEQ ID NO: 259475 - DNA, 75 bp, synthetic construct
  source 1..75: mol_type = other DNA
cttgctgccatgacggcccacggcaaaggtgaacgtgttaatgaagattatctgcgtcaggctttccgtgaatta

SEQ ID NO: 259476 - DNA, 75 bp, synthetic construct
  source 1..75: mol_type = other DNA
gatcatcttggcgcagaagttctggaagaactccgcctgttacaggaatccgcccgtattggtcttgttctgatg

SEQ ID NO: 259477 - DNA, 75 bp, synthetic construct
  source 1..75: mol_type = other DNA
taagatcagggttggtgtccatcggtaatggactaaaagttggtggtagtgttactggtaatttgaccggaaacg

SEQ ID NO: 259478 - DNA, 75 bp, synthetic construct
  source 1..75: mol_type = other DNA
agcgcaggcgcacatgcacatactgtcggtattggtgctcatacgcactccgttgcatggacacaccatcaccgt

SEQ ID NO: 259479 - DNA, 75 bp, synthetic construct
  source 1..75: mol_type = other DNA
ctgataccctgaaggcgctttgtgcagccattatccatcatgagaacggtagccagccatacagtgatcagcagt

SEQ ID NO: 259480 - DNA, 75 bp, synthetic construct
  source 1..75: mol_type = other DNA
aagatgcaatgcatccttgggtatactatatggcattatgtcagttcacaggggaaatatctactttttatgact

SEQ ID NO: 259481 - DNA, 75 bp, synthetic construct
  source 1..75: mol_type = other DNA
tgatttgacatacaatcattatgagcagatttcctgtttcagtaatcttcagtattatattaaagtaatgcttga

SEQ ID NO: 259482 - DNA, 75 bp, synthetic construct
  source 1..75: mol_type = other DNA
ggtcgtgtagccctgatgatttactggtagagttagtattatcgcaggtaaaaatatgcagtaagctgttttctg

SEQ ID NO: 259483 - DNA, 75 bp, synthetic construct
  source 1..75: mol_type = other DNA
gataaaaaaaaggttgcattttattggtcatgtactcctgatgatttacttgtagagttagtattattgcagaaa

SEQ ID NO: 259484 - DNA, 75 bp, synthetic construct
  source 1..75: mol_type = other DNA
ggtcgtatagccctgatgatttactggtagagttagtattatcgcaggaaaaaatatgcagtaagccggcttctg

SEQ ID NO: 259485 - DNA, 75 bp, synthetic construct
  source 1..75: mol_type = other DNA
agatatacagaacgaacagtgtccgatggacgtctttataattttctgattctgtgtgctattaatagagtatca

SEQ ID NO: 259486 - DNA, 75 bp, synthetic construct
  source 1..75: mol_type = other DNA
agtattatattaaagaattattagatgatttatgcagagataaaattattagtgttaaatttaaacaattaacaa

SEQ ID NO: 259487 - DNA, 75 bp, synthetic construct
  source 1..75: mol_type = other DNA
caaaggttcagatcacggtaccgtggatttgtggcttgcgcttaagagattcaattccggtcataaaaatgtctc

SEQ ID NO: 259488 - DNA, 75 bp, synthetic construct
  source 1..75: mol_type = other DNA
cttgaaaaataaactagaagaatatagatatacagaaagaaccgtagcagatggacatctttatgattttttact

SEQ ID NO: 259489 - DNA, 75 bp, synthetic construct
  source 1..75: mol_type = other DNA
acaagagtcattcatggcaataatacattacgtattgatgatgagttttcattccccacactgagattatcagct

SEQ ID NO: 259490 - DNA, 75 bp, synthetic construct
  source 1..75: mol_type = other DNA
ggtcatgtagtcctgatgatttacttgtagagttagtattatcgcaggaaaaaatatgcagtaagccagtttcaa

SEQ ID NO: 259491 - DNA, 75 bp, synthetic construct
  source 1..75: mol_type = other DNA
taatttggttgcagatagataaacactcggaattatggttattagctcaggataaaaaaaggttgcattttattg

SEQ ID NO: 259492 - DNA, 75 bp, synthetic construct
  source 1..75: mol_type = other DNA
atttccagctatgaggttatcagctaatcatatacttagaggtaaagttgcagaaattaaatatatccttgactt

SEQ ID NO: 259493 - DNA, 75 bp, synthetic construct
  source 1..75: mol_type = other DNA
tcggggtgttgatgttagcggccagctaccgggtgtaccgggcggaatacagagcggagagtctggttctggtta

SEQ ID NO: 259494 - DNA, 75 bp, synthetic construct
  source 1..75: mol_type = other DNA
ttgtccggcaccagttacggcattgccgggctgctgatgctggctgtcagccaccggctgtaccgtgcggaagac

SEQ ID NO: 259495 - DNA, 75 bp, synthetic construct
  source 1..75: mol_type = other DNA
gttgcttctggcaatgtggttgcctttctccggcaccagttacggcattgccgggctgctgatgctggcagtcag

SEQ ID NO: 259496 - DNA, 75 bp, synthetic construct
  source 1..75: mol_type = other DNA
ctttctgtacggagcatgctggcgctctgtctttttccggtcgttgctcttgttaacctgcaggacagcgtgact

SEQ ID NO: 259497 - DNA, 75 bp, synthetic construct
  source 1..75: mol_type = other DNA
cctgcctgctggccgtgattccggcgcttaaccttgccaccagtgatgccgcggctgcagccggtcttgtgatga

SEQ ID NO: 259498 - DNA, 75 bp, synthetic construct
  source 1..75: mol_type = other DNA
gcggctgtagctggtcttgtgatgacggtgctgaccgttggtctggtgtcgtgtacagggaaatcattaccccgt

SEQ ID NO: 259499 - DNA, 75 bp, synthetic construct
  source 1..75: mol_type = other DNA
gggctgaatctgtcccgtcatgcgcatatccagcaggtggccattaaccggctgtggggatgggcagtgattgct

SEQ ID NO: 259500 - DNA, 75 bp, synthetic construct
  source 1..75: mol_type = other DNA
gtgggtggcgtacagcagcggccattctcctgatggcactgtgggacctttgtccggcaccagttacggcattgc

SEQ ID NO: 259501 - DNA, 75 bp, synthetic construct
  source 1..75: mol_type = other DNA
tatcaaataaggatggagaatgtttcgttttataatgatgagtctgttgttttatggcagattaacctctttcct

SEQ ID NO: 259502 - DNA, 75 bp, synthetic construct
  source 1..75: mol_type = other DNA
ttccctggtatgaggggaatatcctgtttgcctttgcagtggcggcacaggtgctgacgtggtgtgagacgcgca

SEQ ID NO: 259503 - DNA, 75 bp, synthetic construct
  source 1..75: mol_type = other DNA
ggcaccagttacggcattgccgggctgctgatgctggcggtcagtcaccggctgtaccgggcggaagacagaacg

SEQ ID NO: 259504 - DNA, 75 bp, synthetic construct
  source 1..75: mol_type = other DNA
ttcgatttgttcaggaataaatgtattaagacaggtgtaatgtacgaaatattaaacgttttgagtgaatatatg

SEQ ID NO: 259505 - DNA, 75 bp, synthetic construct
  source 1..75: mol_type = other DNA
aggaaaatcattaccccgtttctggcccggggattttttcccgacgttctatgcctgtcatctggctgtgctggg

SEQ ID NO: 259506 - DNA, 75 bp, synthetic construct
  source 1..75: mol_type = other DNA
gacacagtcagcaggtgctcatacccactcgctgtctggtactgcagcaaatgctggcgcacatgcacatactgt

SEQ ID NO: 259507 - DNA, 75 bp, synthetic construct
  source 1..75: mol_type = other DNA
ggtaccagttacggcattgccgggctgctgatgctggctgtcagccaccggctgtaccgggcggaagacagaatg

SEQ ID NO: 259508 - DNA, 75 bp, synthetic construct
  source 1..75: mol_type = other DNA
gtgctgacgtggtgtgaaacgcgcagtgggtggcgtacagcagcggccattctcctgatggcactgtgggggcct

SEQ ID NO: 259509 - DNA, 75 bp, synthetic construct
  source 1..75: mol_type = other DNA
agaaaccacctttaaacaaattgctcttgagagcgggctttctaccggaactatcagtagttttatcaatgataa

SEQ ID NO: 259510 - DNA, 75 bp, synthetic construct
  source 1..75: mol_type = other DNA
tttaaccatccatactggatgtgcaagggttcctggtcttatggcaataataaaatcattactgatactggctgc

SEQ ID NO: 259511 - DNA, 75 bp, synthetic construct
  source 1..75: mol_type = other DNA
aggatgcgagcacgacgaaaaaggggatagtacagctcagcagtgcgaccaacagcacgtctgaaacgctggcgg

SEQ ID NO: 259512 - DNA, 75 bp, synthetic construct
  source 1..75: mol_type = other DNA
ggcgaatggtacaacacgcgctttgtacctgccgcgctggttgaagccatcttgaactctccgcgtgtcgcagat

SEQ ID NO: 259513 - DNA, 75 bp, synthetic construct
  source 1..75: mol_type = other DNA
gctggatttccgggtttgttacaacggtgaatggtacaacacacgctatgttccaacagtactggtagagtctat

SEQ ID NO: 259514 - DNA, 75 bp, synthetic construct
  source 1..75: mol_type = other DNA
ctgaagcaggagtggatgttcctggccgggcggggtgcgtttccgctgtttgccctggtatgggggctgaatctg

SEQ ID NO: 259515 - DNA, 75 bp, synthetic construct
  source 1..75: mol_type = other DNA
aattcactggctgcccggatcgatacctggttgcagtcgtttctggtctggtcacccggacagcgggatatcatc

SEQ ID NO: 259516 - DNA, 75 bp, synthetic construct
  source 1..75: mol_type = other DNA
ccgaaacgattgattctctgaatacgcatgaaaaacgcgacaacaaaccccgctttagtatcagtttcatccgta

SEQ ID NO: 259517 - DNA, 75 bp, synthetic construct
  source 1..75: mol_type = other DNA
atttccgcgtttgctataacggcgaatggtacaacacgcgctttgtacctgccgcgctggttgaagccatcctga

SEQ ID NO: 259518 - DNA, 75 bp, synthetic construct
  source 1..75: mol_type = other DNA
accgtctgaacgccgaaccgacggtgttcagggggttcaccaccccggaactggggctggctgcactgaccgggt

SEQ ID NO: 259519 - DNA, 75 bp, synthetic construct
  source 1..75: mol_type = other DNA
acgcggttttccgcgacatcctgaacggactttccaccgccggacgtgcacgcacggcgagggctgtcgggcagg

SEQ ID NO: 259520 - DNA, 75 bp, synthetic construct
  source 1..75: mol_type = other DNA
acgcggtttttcgcgacatcctgagcgggctttccgccgccggacgggcacgcacggcgcgggctgtcgggcagg

SEQ ID NO: 259521 - DNA, 75 bp, synthetic construct
  source 1..75: mol_type = other DNA
agcggcgctgggcgtgggacgctccgggcttatcagggaggcccggggctggtccctgcgccgtacccgtgtcag

SEQ ID NO: 259522 - DNA, 75 bp, synthetic construct
  source 1..75: mol_type = other DNA
ttctctcactcaacaacccgtcatatcggcccggccgaattcgacaagttcatctccacctggatgaaaacagac

SEQ ID NO: 259523 - DNA, 75 bp, synthetic construct
  source 1..75: mol_type = other DNA
gtacgctctcatcctgaactggataagctgacaaaccaccatctgagcagactggcggagtcggtatccagagca

SEQ ID NO: 259524 - DNA, 75 bp, synthetic construct
  source 1..75: mol_type = other DNA
agagcgctggcgggcattgccctgactgtggtccagtaatgggcgatagcacttacacagaaacttttggagaaa

SEQ ID NO: 259525 - DNA, 75 bp, synthetic construct
  source 1..75: mol_type = other DNA
cattcatccaaagtaatggcgagttaagtgatactgctgctggagctcgccgtgctgtagcagatagtgactctt

SEQ ID NO: 259526 - DNA, 75 bp, synthetic construct
  source 1..75: mol_type = other DNA
gacacgcaatcactggaaaatgtctcatctgtagaaacgaaataccaggaactgagggaggaactcaataaagcc

SEQ ID NO: 259527 - DNA, 75 bp, synthetic construct
  source 1..75: mol_type = other DNA
cgctgcgccagagccagcaggcgcgtatccgtacgcagaagaacgcagacggttcgccgtatccggcgcgaaaac

SEQ ID NO: 259528 - DNA, 75 bp, synthetic construct
  source 1..75: mol_type = other DNA
tcttgtgtgctgattgccatgaacgttgtgcagtacacactaattaactggttgccaacaatattcatgacctag

SEQ ID NO: 259529 - DNA, 75 bp, synthetic construct
  source 1..75: mol_type = other DNA
tatattctggaattgccagagagggaatcaaagataagcccagcgcagcgcaaaaccgctggaaaaaccacttgc

SEQ ID NO: 259530 - DNA, 75 bp, synthetic construct
  source 1..75: mol_type = other DNA
agtacattgaaaggataaggtacgtcggtattatatcaacacttatagctcgaagagcaatcctcacagatctct

SEQ ID NO: 259531 - DNA, 75 bp, synthetic construct
  source 1..75: mol_type = other DNA
catcggtctggaccgaactgctttcccgtatgggccggaataatgagcgattaattgttgcggcagtgggtaatg

SEQ ID NO: 259532 - DNA, 75 bp, synthetic construct
  source 1..75: mol_type = other DNA
ctgataatacaataggtgttggtagtgggacttcagaagctaccgcgatagtttcaggtgttttagctgccatgt

SEQ ID NO: 259533 - DNA, 75 bp, synthetic construct
  source 1..75: mol_type = other DNA
aaaccggtcgcagaaatgcgttcatcctctatgaggccattcatattgcctcgatggttgtcggtgctttttcac

SEQ ID NO: 259534 - DNA, 75 bp, synthetic construct
  source 1..75: mol_type = other DNA
atccactgtcgcgttattcagggatttttctttccccgccccctacccgccgaagaaattccaggctggatgagc

SEQ ID NO: 259535 - DNA, 75 bp, synthetic construct
  source 1..75: mol_type = other DNA
caactctgataggtaaaattcaggttggcgagttttcctcaattattggtttgatcaagcgcacccagcgtatct

SEQ ID NO: 259536 - DNA, 75 bp, synthetic construct
  source 1..75: mol_type = other DNA
acatgcaatggtaaccgcgttatcaacagtgctgcctgcctgtgtactcggtgaccctatgcaggctatttttgg

SEQ ID NO: 259537 - DNA, 75 bp, synthetic construct
  source 1..75: mol_type = other DNA
tgttctcattttctggaattgccagagagggagtcaaagataagcgcagcgcggcgcaaaaccgctggaaaaaac

SEQ ID NO: 259538 - DNA, 75 bp, synthetic construct
  source 1..75: mol_type = other DNA
tataatcaaaaaacaataagatatactgacataatcttttactttaggactctgaaagaaattagattaaaatat

SEQ ID NO: 259539 - DNA, 75 bp, synthetic construct
  source 1..75: mol_type = other DNA
gtctgcgtgcggaagaggatgtccgcaacttacaagtcgctcgtgcgtcccaggcggatggcgaggctgtgaagg

SEQ ID NO: 259540 - DNA, 75 bp, synthetic construct
  source 1..75: mol_type = other DNA
cgaagaggagatgtgtgagctgtttgccgacatccccgaagcccttgccaacaccgttgagatcgccaaacgctg

SEQ ID NO: 259541 - DNA, 75 bp, synthetic construct
  source 1..75: mol_type = other DNA
ggccaggccgtggctccggtgcgggttcactggtggcctacgcgctgaaaatcaccgacctcgatccgctggaat

SEQ ID NO: 259542 - DNA, 75 bp, synthetic construct
  source 1..75: mol_type = other DNA
agatgggcttcccgggctacttcctcatcgttatggaatttatccagtggtcgaaagataacggcgtaccggtag

SEQ ID NO: 259543 - DNA, 75 bp, synthetic construct
  source 1..75: mol_type = other DNA
ctcaggcatgggtagagaatgaaaagaaagaaaaaattaccactggcccgcttattgccacaccgccagtacagc

SEQ ID NO: 259544 - DNA, 75 bp, synthetic construct
  source 1..75: mol_type = other DNA
cgtacgactttcccatttgaaatctccccatcccaaaacccaattaccattataccggaagtattaccaggaatt

SEQ ID NO: 259545 - DNA, 75 bp, synthetic construct
  source 1..75: mol_type = other DNA
gaaggtcctagtgatgaaataatagtaacacaacttgcaagaaagttcggtctccgtctccttgcacgtaatgct

SEQ ID NO: 259546 - DNA, 75 bp, synthetic construct
  source 1..75: mol_type = other DNA
tgaactgccggtacgttttaccgatgcgcagggcaaccagcatgaaggcattatcaccagcgggactttctcccc

SEQ ID NO: 259547 - DNA, 75 bp, synthetic construct
  source 1..75: mol_type = other DNA
ggaaaagtttgcagatttattgggtaaaccaaaaaccgcagttacagaaatgataaaggctaacaagctaccggt

SEQ ID NO: 259548 - DNA, 75 bp, synthetic construct
  source 1..75: mol_type = other DNA
tggttttcattcctgagttcaatcgtggtgtgcgtgaggcattctacaaccgaccgatagaacagcgggacgcgt

SEQ ID NO: 259549 - DNA, 75 bp, synthetic construct
  source 1..75: mol_type = other DNA
gaatatcagttattacaatcccgcttacatcaactctcttttttccccgaaatcgacttacttatttcggtaatg

SEQ ID NO: 259550 - DNA, 75 bp, synthetic construct
  source 1..75: mol_type = other DNA
tacatcaactctctttttgccctgaaaccgacttacttatttcggtaggcgataacggtgatgctgccaacttac

SEQ ID NO: 259551 - DNA, 75 bp, synthetic construct
  source 1..75: mol_type = other DNA
aactatttctcctttagccgccaacatgggctggactatcgcctgggaaccggcagatcgtgactttatcggtcg

SEQ ID NO: 259552 - DNA, 75 bp, synthetic construct
  source 1..75: mol_type = other DNA
cccaggcatgggtggagaatgaaaagaaagaaaaaatcaccacaggcccgattattgccactccgccagtacagc

SEQ ID NO: 259553 - DNA, 75 bp, synthetic construct
  source 1..75: mol_type = other DNA
aatccaaagccttccagtgaatgtatgtataacagaaaagcaataggtgcctgggtcgcttcaatgaaaaacaaa

SEQ ID NO: 259554 - DNA, 75 bp, synthetic construct
  source 1..75: mol_type = other DNA
atgaacgttgtgcagtacacactaattaactggttgccaacgatattcatgacccaggggattaatttaaaagac

SEQ ID NO: 259555 - DNA, 75 bp, synthetic construct
  source 1..75: mol_type = other DNA
tggaatcgcgcggacggtatcaggaagccgagaaagtcatgcggagtatagaagaaggcgtcatacgccagacgg

SEQ ID NO: 259556 - DNA, 75 bp, synthetic construct
  source 1..75: mol_type = other DNA
cgcagccatctggcgcaatggcagatgaacaggcaacgactgaagcagtggaaccggatacaactgaacataatc

SEQ ID NO: 259557 - DNA, 75 bp, synthetic construct
  source 1..75: mol_type = other DNA
tttgtccacgataatgcgtcagtggaacgtgacgttgccgctggcgttctggcccgttcaatggacatcgatatt

SEQ ID NO: 259558 - DNA, 75 bp, synthetic construct
  source 1..75: mol_type = other DNA
gagctacataaacgattacggtgggcgcccagtcttacaatttagctgcagtggagatcgttgtacggcggtgaa

SEQ ID NO: 259559 - DNA, 75 bp, synthetic construct
  source 1..75: mol_type = other DNA
cacaattgataatccaacaccatactatgtaacagtaataggtctggggggcagcaaaaaacaggcagaagaagg

SEQ ID NO: 259560 - DNA, 75 bp, synthetic construct
  source 1..75: mol_type = other DNA
ctcaggcatggatagaaaatgaaaagcaagaaaaaatcacaacgggaccgattgttgttacaccaccagtacaac

SEQ ID NO: 259561 - DNA, 75 bp, synthetic construct
  source 1..75: mol_type = other DNA
aaaaccgatactggaaaaactctaacgcggaggccagttttagttgaccacaacagactacctgaagggagccgc

SEQ ID NO: 259562 - DNA, 75 bp, synthetic construct
  source 1..75: mol_type = other DNA
agaatatattaatgattacagcatgtttggctgtagcacctattgttaatgcagccgtttcccttgaccgtactc

SEQ ID NO: 259563 - DNA, 75 bp, synthetic construct
  source 1..75: mol_type = other DNA
attcgcacattggcgctattcaggcgttaagtgaattactgtgcgaagaagaaatacttgaacaactcttaacag

SEQ ID NO: 259564 - DNA, 75 bp, synthetic construct
  source 1..75: mol_type = other DNA
tacgcaaaagacatttggcgttcactggagaaagatgtcttccctgccatcggtgagacccctgttcagcaaatc

SEQ ID NO: 259565 - DNA, 75 bp, synthetic construct
  source 1..75: mol_type = other DNA
gactattccagccgagcggatgaaggccaagcgtgagcatattgttcccctatcgacacaggcattagatattct

SEQ ID NO: 259566 - DNA, 75 bp, synthetic construct
  source 1..75: mol_type = other DNA
gcttgagactgtacgtcgactggtgcaacgcattaacgagataatgatttatgccgtaaacacgggtctgattga

SEQ ID NO: 259567 - DNA, 75 bp, synthetic construct
  source 1..75: mol_type = other DNA
gacgatcccagccgaacggatgaaggccaagcgtgaacatattgttcctctatctcctcaggcattagagattct

SEQ ID NO: 259568 - DNA, 75 bp, synthetic construct
  source 1..75: mol_type = other DNA
tagttgcacatggcttgaggtctatagccagtaccagcttgaatgaagctggctttaacccggatgtcatagaag

SEQ ID NO: 259569 - DNA, 75 bp, synthetic construct
  source 1..75: mol_type = other DNA
cgaaataatgaaacctatcagtgctcaccgagaacatcttttcccaagcagaaatgatccaaaacagccaatgaa

SEQ ID NO: 259570 - DNA, 75 bp, synthetic construct
  source 1..75: mol_type = other DNA
gacaattcctgccgaacggatgaaagctaagcgtgagcacatagtcccactatctcctcaggcgttagatattct

SEQ ID NO: 259571 - DNA, 75 bp, synthetic construct
  source 1..75: mol_type = other DNA
tgccagtaccgcgatgaatgaagctaattttaatcctgatgtaattgaagcagctttagctcatgctgataaaaa

SEQ ID NO: 259572 - DNA, 75 bp, synthetic construct
  source 1..75: mol_type = other DNA
tacgctcatgatatttggcgctcacttgaaagagacgttttccccgcaattggcaagatcaatattacggacatt

SEQ ID NO: 259573 - DNA, 75 bp, synthetic construct
  source 1..75: mol_type = other DNA
actcctcacccttgtacgtccatcggaggcctcaggagctcgttgggctgagattgatcttgatgcaaaaatatg

SEQ ID NO: 259574 - DNA, 75 bp, synthetic construct
  source 1..75: mol_type = other DNA
catgatggcgaggggcttttccttatagtgaaaaccagcggcaagaaactctggcgctttcgctatcaacgtccg

SEQ ID NO: 259575 - DNA, 75 bp, synthetic construct
  source 1..75: mol_type = other DNA
ttgagccaatcaaagctcgtggggcactcgaaacagttcgtcgtctagtgcagcgtattaacgagataatgattt

SEQ ID NO: 259576 - DNA, 75 bp, synthetic construct
  source 1..75: mol_type = other DNA
tagccaaacggcaaatgccgcattaaagcgaattggcttcgctggcaaactagtagcccatggtctacgttctat

SEQ ID NO: 259577 - DNA, 75 bp, synthetic construct
  source 1..75: mol_type = other DNA
atactgctggcggagtcattgatcgtgacgtcattaaatggtggctgaagcaatcacgtgaagcgcagtctgcca

SEQ ID NO: 259578 - DNA, 75 bp, synthetic construct
  source 1..75: mol_type = other DNA
tgaacggcaggggatcccctgcccatggcgttacaccaatgatcgcgatgtaagaacgatggttgctctgggact

SEQ ID NO: 259579 - DNA, 75 bp, synthetic construct
  source 1..75: mol_type = other DNA
aaccagaaacgaaacaggttaaaccagtagcgcaacaggagccggaaaaagcctgcaccgcctgcggtcagaccg

SEQ ID NO: 259580 - DNA, 75 bp, synthetic construct
  source 1..75: mol_type = other DNA
gatctcaatgccaaactctggacgattcccgccgaacgaatgaaggctaagcgtgaacacattgttcctttatca

SEQ ID NO: 259581 - DNA, 75 bp, synthetic construct
  source 1..75: mol_type = other DNA
tggagccaataaaagcacgtggcgcattagagacggttcgtcgcctagtccagcgtattaacgagataatgattt

SEQ ID NO: 259582 - DNA, 75 bp, synthetic construct
  source 1..75: mol_type = other DNA
agattgatatggataaacggctctggactatcccggctgaacgcatgaagatgaagcgtgagcaccaggtgccac

SEQ ID NO: 259583 - DNA, 75 bp, synthetic construct
  source 1..75: mol_type = other DNA
cagcgtgttaacgagataatgatttatgccgtaaatactggtcttattgatgccaatccagcatcaggcattgga

SEQ ID NO: 259584 - DNA, 75 bp, synthetic construct
  source 1..75: mol_type = other DNA
tatcaccccaagctttagatattttggaagtgatgaagcccatcagtgctcatcgtgaacatatttttcctagca

SEQ ID NO: 259585 - DNA, 75 bp, synthetic construct
  source 1..75: mol_type = other DNA
ttgagccaatcaaagctcgtggggctcttgaaactgtacgtcgactgatacagcggattaacgagataatgattt

SEQ ID NO: 259586 - DNA, 75 bp, synthetic construct
  source 1..75: mol_type = other DNA
actgaaaactcagtagcaaaaatcaacctagtcactgccgccattcgtcgcgaatacaagcagacatggaaaacg

SEQ ID NO: 259587 - DNA, 75 bp, synthetic construct
  source 1..75: mol_type = other DNA
ttttctcgaccgtaaaaaacgcctggaaaaggagcgcaaagaaagtggtgcatatacttctgttgttgatctttc

SEQ ID NO: 259588 - DNA, 75 bp, synthetic construct
  source 1..75: mol_type = other DNA
atgaataaagtctttatttgtgcagctattccagacgaacgggcaataaaggaagaaggtgcagtcgctgtggcc

SEQ ID NO: 259589 - DNA, 75 bp, synthetic construct
  source 1..75: mol_type = other DNA
caatatcccgtttctacgcgtctatcgctgaacggcaccattattgtcggtcgcgatatcgcccacgctaaactg

SEQ ID NO: 259590 - DNA, 75 bp, synthetic construct
  source 1..75: mol_type = other DNA
ggtgatgaagcagcgctggcgcgcggtgtctataacacttatatcgaggataatctgcgctactcgcaaaacgcg

SEQ ID NO: 259591 - DNA, 75 bp, synthetic construct
  source 1..75: mol_type = other DNA
ccgctggatatgtataaagaggtgaataccggcaccaatctgccagcgcagatcgatctttatgccgttgatggc

SEQ ID NO: 259592 - DNA, 75 bp, synthetic construct
  source 1..75: mol_type = other DNA
gaaagagatccttgctcagttgtcgcaatatcctgtttctacgcgattgtcgcttaacggtactatcatcgtcgg

SEQ ID NO: 259593 - DNA, 75 bp, synthetic construct
  source 1..75: mol_type = other DNA
agtggaagatttcccggcgtttatccttgtggatgataaaggaaatgacttcttccagcagatacaactcacaca

SEQ ID NO: 259594 - DNA, 75 bp, synthetic construct
  source 1..75: mol_type = other DNA
ccagcaggtgaccgatgcttgtaaaaaacacggcggtttctacctcggcagtatcggcggcccggcagcggtact

SEQ ID NO: 259595 - DNA, 75 bp, synthetic construct
  source 1..75: mol_type = other DNA
cgcaaacaaactctctggtctggataaggcactggctgctggcgccactgaaatcacaaaagaagaatattttgc

SEQ ID NO: 259596 - DNA, 75 bp, synthetic construct
  source 1..75: mol_type = other DNA
gtcagagcggtggcggcaactgccctgattgtggtgcggtgatgggtgacgcaacataccaggaaatattcgatg

SEQ ID NO: 259597 - DNA, 75 bp, synthetic construct
  source 1..75: mol_type = other DNA
actgccctgattgtggcgcggtgatgggcgacgcaacataccaggaaacattcgatgaagagaatcaggttgaag

SEQ ID NO: 259598 - DNA, 75 bp, synthetic construct
  source 1..75: mol_type = other DNA
gtgcgttccggcgtgctggtatcggtacacgcgtttgcctctgatccggcacgcggtatgtttatcctcgccttt

SEQ ID NO: 259599 - DNA, 75 bp, synthetic construct
  source 1..75: mol_type = other DNA
atgctttcgtggtcaacgactttaccgtcacctatgttgccagcaactccaatacccagcttccggtgtggtatc

SEQ ID NO: 259600 - DNA, 75 bp, synthetic construct
  source 1..75: mol_type = other DNA
aaaagttaccgctgacgaagtaaacaaaattatgcaggcagccaatatcagccagcctgacgccgataagttgct

SEQ ID NO: 259601 - DNA, 75 bp, synthetic construct
  source 1..75: mol_type = other DNA
agcgaacacgttagcgtatctgaatttgaagggcaggagattttgaaagtcgcgccagaagcgttaactttgttg

SEQ ID NO: 259602 - DNA, 75 bp, synthetic construct
  source 1..75: mol_type = other DNA
ttgttgatcttgcccgcgccagagtcaaccgacagcacactgaaaactcagcagaaaaaatcaaccctgtcacta

SEQ ID NO: 259603 - DNA, 75 bp, synthetic construct
  source 1..75: mol_type = other DNA
agacaacttcgacaacgtgattttacgccgctcatacgaacgacaggggatcccctgcccgtggcgctactgcaa

SEQ ID NO: 259604 - DNA, 75 bp, synthetic construct
  source 1..75: mol_type = other DNA
atgagtaaagtctttatttgcgccgccattcctgacgaactgtcaataagggaagaaggtgctgtggctgtagcc

SEQ ID NO: 259605 - DNA, 75 bp, synthetic construct
  source 1..75: mol_type = other DNA
ctatgatgcagtggtgggctgattttgtgatggctgcagatcacggtagtatgattgaaggagggataaaggcaa

SEQ ID NO: 259606 - DNA, 75 bp, synthetic construct
  source 1..75: mol_type = other DNA
tcgtggctgaacgttggtggaatgtgaagaaaaccagtgtgaccgaagactacgcagaggatatctggcgctctc

SEQ ID NO: 259607 - DNA, 75 bp, synthetic construct
  source 1..75: mol_type = other DNA
cgatgatgcagtggtgggctgattttattataacagcagatagagaaaacttagttaaaagtgggttaagaggaa

SEQ ID NO: 259608 - DNA, 75 bp, synthetic construct
  source 1..75: mol_type = other DNA
caacaaccggtattcgtgatgaaggtaatgactccaacttattgatagtgttttatgttcagataatgcccgatg

SEQ ID NO: 259609 - DNA, 75 bp, synthetic construct
  source 1..75: mol_type = other DNA
gtagcttaccttatcgtattccgttaatggctggcagttcgcaacgtacattaccgactgtttctgaaggagcat

SEQ ID NO: 259610 - DNA, 75 bp, synthetic construct
  source 1..75: mol_type = other DNA
gttctcttggcccaacgaccgctggccggatggattcttatgtcgatcaattgcaagcgcagggcggaagtatga

SEQ ID NO: 259611 - DNA, 75 bp, synthetic construct
  source 1..75: mol_type = other DNA
gatgccccgattatctcaataggtgcaatatttttcgatccgcaaaccggagatatgggaccggaatttagtaag

SEQ ID NO: 259612 - DNA, 75 bp, synthetic construct
  source 1..75: mol_type = other DNA
tgaagttcaggaagatgatccggaggaaatggaaggcgctgaacatccacacaaggagaacactggcggcaatca

SEQ ID NO: 259613 - DNA, 75 bp, synthetic construct
  source 1..75: mol_type = other DNA
gcagccaatatcagccagcctgacgccgatgaactgcttgcagtatcacgtggtgaatttgttgaagggattagc

SEQ ID NO: 259614 - DNA, 75 bp, synthetic construct
  source 1..75: mol_type = other DNA
caccaccgatctggaaaagagctatcgtattaacctcaatatgatcggtctggatgggcgtccggcggtgaaaaa

SEQ ID NO: 259615 - DNA, 75 bp, synthetic construct
  source 1..75: mol_type = other DNA
tacccctacaacatctttgtcatggtataatgcatataataaaactaaacatgatagatcaggagcattccactt

SEQ ID NO: 259616 - DNA, 75 bp, synthetic construct
  source 1..75: mol_type = other DNA
taagtctgcgcacaatgcggtactacgagagctgcattgaagcattccatgaagctgaaaccagcctgaatcata

SEQ ID NO: 259617 - DNA, 75 bp, synthetic construct
  source 1..75: mol_type = other DNA
gctggagcgagtaaaaaaacgagcagctgttgtgcgtttaattatgctgatatttcttgtcatgtcactcctgtt

SEQ ID NO: 259618 - DNA, 75 bp, synthetic construct
  source 1..75: mol_type = other DNA
agccaaaatgacgacgctcaactcactaaacattcttcaggagtttgcatcaccatggttaagcacacgtcttga

SEQ ID NO: 259619 - DNA, 75 bp, synthetic construct
  source 1..75: mol_type = other DNA
atgcgtgaaatgaatttcagtcaacggctgagacgtttcattgtcagaaaaacgttcagcgccccctacagggtg

SEQ ID NO: 259620 - DNA, 75 bp, synthetic construct
  source 1..75: mol_type = other DNA
atgttaaggcagcgcgagctgaagctgtaccaatggatggcatcttatttgcccgtattgttgattcgtcttggc

SEQ ID NO: 259621 - DNA, 75 bp, synthetic construct
  source 1..75: mol_type = other DNA
caaaacagaatctgcgtattgccagcaccttgagctgcgtaaacgtgcaggggaaatcgcctggtatcgattcga

SEQ ID NO: 259622 - DNA, 75 bp, synthetic construct
  source 1..75: mol_type = other DNA
ggactgataaatgcgaatgggagcgcatgggcctatttgacacatatgctgcggcgcgtgatgaaggttgtgaat

SEQ ID NO: 259623 - DNA, 75 bp, synthetic construct
  source 1..75: mol_type = other DNA
aatatgtctatcccggatacttgggcggtcgataaaaacggtgcaccaacaaccgatcccttcgcggttaacgcc

SEQ ID NO: 259624 - DNA, 75 bp, synthetic construct
  source 1..75: mol_type = other DNA
gcggcaccaaccgtgaaccggaatttcgtcttgaagaaaccgggccgtgttcggcaattttacatgccgacaatg

SEQ ID NO: 259625 - DNA, 75 bp, synthetic construct
  source 1..75: mol_type = other DNA
gcggcaccaaccgcgaaccggagtttcgtcttgaggaaaccggaccgtgctcggcaattttacatgccgacaatg

SEQ ID NO: 259626 - DNA, 75 bp, synthetic construct
  source 1..75: mol_type = other DNA
cattatttaccgcgtccgccagggggatcatcttggactggctttgcgtcagtgcggttatcagttcccatccag

SEQ ID NO: 259627 - DNA, 75 bp, synthetic construct
  source 1..75: mol_type = other DNA
acaaagcgatggtttactggcgaaagtgggtatgggcatggggtctgccgttgctgtgctgttccagtctggccg

SEQ ID NO: 259628 - DNA, 75 bp, synthetic construct
  source 1..75: mol_type = other DNA
cgtttatgcagccggaaatggcgatggggctactgcaaaccagccacgaagccggtattcatactgcggtagaaa

SEQ ID NO: 259629 - DNA, 75 bp, synthetic construct
  source 1..75: mol_type = other DNA
cttgatccgcaatcttcagcgacgatgtttttaagccataaacactctattggtatcgtaaacgcaacatctgca

SEQ ID NO: 259630 - DNA, 75 bp, synthetic construct
  source 1..75: mol_type = other DNA
gtctatttctggttaattctctcgaatttcattctttatatttctccagagaaatgtaagcgtcaacggagcacc

SEQ ID NO: 259631 - DNA, 75 bp, synthetic construct
  source 1..75: mol_type = other DNA
gaactcaatctgaattgaaaagcaggctccattgttggttggtattcgcaccggtctatttatggttgatcctct

SEQ ID NO: 259632 - DNA, 75 bp, synthetic construct
  source 1..75: mol_type = other DNA
atgacacgtattcggatcgaaaaagggacgggtggctggggcggcccgctggagctggaagccactccggggaaa

SEQ ID NO: 259633 - DNA, 75 bp, synthetic construct
  source 1..75: mol_type = other DNA
atcttgctggatatattactcatctccattatgaggaagagacttctgtgcgtcctgactggatggctctgatat

SEQ ID NO: 259634 - DNA, 75 bp, synthetic construct
  source 1..75: mol_type = other DNA
aactaatcagcacatatcaaccctacaatacaaccgaatctttcatgggtgggcaggaaagcttggtctcgaaga

SEQ ID NO: 259635 - DNA, 75 bp, synthetic construct
  source 1..75: mol_type = other DNA
ttcgctttacagcacacattccatgagaagaacaaaaccttacctgatctacaagaaaaccaagaatctccgggt

SEQ ID NO: 259636 - DNA, 75 bp, synthetic construct
  source 1..75: mol_type = other DNA
atggacaatattgagcagttacggaaagtcgccacacgtgcaggtaagcttctgacatctttgagcgaaaatata

SEQ ID NO: 259637 - DNA, 75 bp, synthetic construct
  source 1..75: mol_type = other DNA
aaaaaagctcgtaccgaagcggaacgatttactaaagccgtttttgaccgcattgaatacattcggggagcatct

SEQ ID NO: 259638 - DNA, 75 bp, synthetic construct
  source 1..75: mol_type = other DNA
gcccaggcaatgctaaataatctcgatgctgaaacactgcgagaagcggttatccgacccactatgattcctggc

SEQ ID NO: 259639 - DNA, 75 bp, synthetic construct
  source 1..75: mol_type = other DNA
gcatcaaaccaacccagccaatgaacagccaaacagttaatgccgcacttaagcgtgctggcttaggaggcgtac

SEQ ID NO: 259640 - DNA, 75 bp, synthetic construct
  source 1..75: mol_type = other DNA
ttcagccggttcaggccagaggtgcattagagactgttcgccgcctttgtcagcgtattaacgaagtcatgattt

SEQ ID NO: 259641 - DNA, 75 bp, synthetic construct
  source 1..75: mol_type = other DNA
caacggatcaatgaagtcatgatttatgcccaaaacacgggcctgattgatgcagttcccagtgttaatattggc

SEQ ID NO: 259642 - DNA, 75 bp, synthetic construct
  source 1..75: mol_type = other DNA
tgaggtacgtcgcgcttacaaccgcagtgattaccttgagcaacgtcgtccgatgatgcagtggtgggcttactt

SEQ ID NO: 259643 - DNA, 75 bp, synthetic construct
  source 1..75: mol_type = other DNA
cagccagacagtgaatgcagcccttaagcgtgctggtttagggggagtactcgtttcacacggcttacgttctat

SEQ ID NO: 259644 - DNA, 75 bp, synthetic construct
  source 1..75: mol_type = other DNA
cgatgatgcagtggtgggctgattttgttaaagcagcagatagcggcagcatcgtgaatagtgggattaggggaa

SEQ ID NO: 259645 - DNA, 75 bp, synthetic construct
  source 1..75: mol_type = other DNA
cagcggattaacgagattatgatttatgccgtaaatactggtctgctcgatgcaaatcctgcatcaggcgtcggg

SEQ ID NO: 259646 - DNA, 75 bp, synthetic construct
  source 1..75: mol_type = other DNA
ccaatacagaagttctgcgcgctaaagcattagaaaaggatctgacgttgcatgatggcgaaggcctctttctga

SEQ ID NO: 259647 - DNA, 75 bp, synthetic construct
  source 1..75: mol_type = other DNA
cagcgaattaacgagataatgatttacgctgtaaacactggtctgattgatgccaatccagcatctggggttggg

SEQ ID NO: 259648 - DNA, 75 bp, synthetic construct
  source 1..75: mol_type = other DNA
atggcaagaaaaaccaagccgttaactgatacggaaatcaaagccgccaaacctaaagatgccgattaccagctt

SEQ ID NO: 259649 - DNA, 75 bp, synthetic construct
  source 1..75: mol_type = other DNA
agagcaagcatcagagcaacgtcagattgagctggatagcattttctcaactgtggcctccaactggttcaaaat

SEQ ID NO: 259650 - DNA, 75 bp, synthetic construct
  source 1..75: mol_type = other DNA
tgaggttaggaaagcgtacaatcggtccatttatttgaaacaaagagttgagctaatggactggtggggtaattt

SEQ ID NO: 259651 - DNA, 75 bp, synthetic construct
  source 1..75: mol_type = other DNA
atagcggcctctgttatcggtattattattagtctggtccaggctataacgcagttacaggatcaaacattgcct

SEQ ID NO: 259652 - DNA, 75 bp, synthetic construct
  source 1..75: mol_type = other DNA
aaaattatgcaggcagccaatatcagccagcctgacgccgataagttgcttgctgcatcacgtggtgaatttgtt

SEQ ID NO: 259653 - DNA, 75 bp, synthetic construct
  source 1..75: mol_type = other DNA
tgaaccagaaccagcaagaaacggaacagaacgaccagaaagcggaacaaaacagcccaaatgcgttacaaaacg

SEQ ID NO: 259654 - DNA, 75 bp, synthetic construct
  source 1..75: mol_type = other DNA
taaactgcatgccatcgggtgggttaagcataaatgtaagcctggtgccaaatggccagaaattcaggcagagat

SEQ ID NO: 259655 - DNA, 75 bp, synthetic construct
  source 1..75: mol_type = other DNA
gatcagtcttgccctggtgaaatacacgcaaaaggtttcccggcagacgatccagaagcaaaacgcgaatacgaa

SEQ ID NO: 259656 - DNA, 75 bp, synthetic construct
  source 1..75: mol_type = other DNA
tacttctctgttggtctaacgctcgtgattttgatattactccggtccaagtaccggataaggtggaagagatga

SEQ ID NO: 259657 - DNA, 75 bp, synthetic construct
  source 1..75: mol_type = other DNA
cttggcggtacacgtattatctatccttcaaatcaaaatgaagttcaaatcacattaaaaaataaagatgcatat

SEQ ID NO: 259658 - DNA, 75 bp, synthetic construct
  source 1..75: mol_type = other DNA
ttgaagttcaggaacccggcatttatagcaaaccagatgggccatgcagatgcgcaaatggtatttcaggtatac

SEQ ID NO: 259659 - DNA, 75 bp, synthetic construct
  source 1..75: mol_type = other DNA
aagtcaatcagcgatacaaagacgatcatggtgcgcttgtcaccgtgaccagtgttgaggaaacccgggtggtgt

SEQ ID NO: 259660 - DNA, 75 bp, synthetic construct
  source 1..75: mol_type = other DNA
atggaaactggatattttgttcaattatgtgtgcaaacactttggataatatttatcctctcactgcctacagtc

SEQ ID NO: 259661 - DNA, 75 bp, synthetic construct
  source 1..75: mol_type = other DNA
cgatccgcaaaccggagatatgggaccggaatttagtaagactatcgatctggaaactgctggcggagtcattga

SEQ ID NO: 259662 - DNA, 75 bp, synthetic construct
  source 1..75: mol_type = other DNA
agtagcgcaacaggaaccggaaaaagtctgcaccgcctgcggtcagaccggcggcggcaactgccctgattgtgg

SEQ ID NO: 259663 - DNA, 75 bp, synthetic construct
  source 1..75: mol_type = other DNA
taccagaaactgatgcagtggaaacggcaatgccggacaacgaaaaaaccgaatgcgaagtggaagacgaaccat

SEQ ID NO: 259664 - DNA, 75 bp, synthetic construct
  source 1..75: mol_type = other DNA
aacattcgatgaagaaaatcaggctgaatctcagaaaaaagatccggaggaaatgaaaggcactgaccatcctca

SEQ ID NO: 259665 - DNA, 75 bp, synthetic construct
  source 1..75: mol_type = other DNA
agcgcaacaggaaccggaaaaagtctgcaccgcctgcggtcagagcggtggcggcaactgccctgattgtggcgc

SEQ ID NO: 259666 - DNA, 75 bp, synthetic construct
  source 1..75: mol_type = other DNA
ggaacagttcagggacagttatttaatgcaagagctaaattaagttgtgcttcagcttcatctttaagaccgatg

SEQ ID NO: 259667 - DNA, 75 bp, synthetic construct
  source 1..75: mol_type = other DNA
tttctcaacttcatcaaatcttttacgatgacgagggattaattgattcagaaaagaacgtgaccattttataca

SEQ ID NO: 259668 - DNA, 75 bp, synthetic construct
  source 1..75: mol_type = other DNA
ggcgctggctgccggggctactgaaatcacgaaagaagaatatcttgcccgcaaaaacggaacatacacggactt

SEQ ID NO: 259669 - DNA, 75 bp, synthetic construct
  source 1..75: mol_type = other DNA
ttcatatgaacggcaggggatcccctgcccgtggcgttacaccaatgatcgcgatgtaagaacgatggttgctct

SEQ ID NO: 259670 - DNA, 75 bp, synthetic construct
  source 1..75: mol_type = other DNA
tttgttgaggggattagcgaccctaatgatccgaaatgggtcaaagggatccagactcgcgattctgtgaaccag

SEQ ID NO: 259671 - DNA, 75 bp, synthetic construct
  source 1..75: mol_type = other DNA
tactgagcgtgaaacagaagaagaaaaaccacaaccatctgacgcaatggcaggtgaacaggcaacaactgaaac

SEQ ID NO: 259672 - DNA, 75 bp, synthetic construct
  source 1..75: mol_type = other DNA
cgatgtacgcacaatcgttgagctggggaaagccatagacttcgatgccagaacggctattccattcgaaggtga

SEQ ID NO: 259673 - DNA, 75 bp, synthetic construct
  source 1..75: mol_type = other DNA
accagaaccagcatgaatcggaacggaactaccaaaaagcggaacaaaacagcacaaatgcgttacaaaacgagc

SEQ ID NO: 259674 - DNA, 75 bp, synthetic construct
  source 1..75: mol_type = other DNA
ttgaagaatgaaggaacaaatcagagcgctgttgatactctctcgtcgccagtaccagaaactgatgcagtggaa

SEQ ID NO: 259675 - DNA, 75 bp, synthetic construct
  source 1..75: mol_type = other DNA
cgacaacacgattttgcgccgttcatacgaacggcaggggatcccctgcccgtggcgttactacaacgatcgcga

SEQ ID NO: 259676 - DNA, 75 bp, synthetic construct
  source 1..75: mol_type = other DNA
ccgatgaacgtcacttttgacaagctgtcccctgaagtacagaacgcagtcatggttaattcgacacatgtgaaa

SEQ ID NO: 259677 - DNA, 75 bp, synthetic construct
  source 1..75: mol_type = other DNA
cgccataatgcacttgatgacgcccgttaccaggcaaaatacgtttcagttatctggcaaaaactgatcccgagt

SEQ ID NO: 259678 - DNA, 75 bp, synthetic construct
  source 1..75: mol_type = other DNA
atatggggccggaatttagtaagaccatcgatatggatactgctggcggagtcattgatcgtggcaccattaaat

SEQ ID NO: 259679 - DNA, 75 bp, synthetic construct
  source 1..75: mol_type = other DNA
aatgatccggaggaaatggaaggtgttgaatatccgcacaaagagaacgctggcggtaatcagcatcacaccagc

SEQ ID NO: 259680 - DNA, 75 bp, synthetic construct
  source 1..75: mol_type = other DNA
ctgacgcaatgaatacaggggctgttcctgacggtggaaccatcgaatggtggctgaagcagtccagtgaagcca

SEQ ID NO: 259681 - DNA, 75 bp, synthetic construct
  source 1..75: mol_type = other DNA
tgttccggtcgaaccagaatccgatccgatgaacgtcaattttgacaagctgtcccttgaagtacagaacgcggt

SEQ ID NO: 259682 - DNA, 75 bp, synthetic construct
  source 1..75: mol_type = other DNA
atgggaaaaaatcccgatgccccgattatctcaataggtgcaatatttttcgatccgcaaaccggagatatggga

SEQ ID NO: 259683 - DNA, 75 bp, synthetic construct
  source 1..75: mol_type = other DNA
gaacgatgcacgttaccaggcgaaatacgtttcagccatctggcaaaaactgctcccgagtcaggctgatttttg

SEQ ID NO: 259684 - DNA, 75 bp, synthetic construct
  source 1..75: mol_type = other DNA
cgttcgccacaatgcactggatgacgcccgtcaccaggcaaaatacgtttcagcaatctggcaaaaactgatccc

SEQ ID NO: 259685 - DNA, 75 bp, synthetic construct
  source 1..75: mol_type = other DNA
ttgtctgcgaggataaacccggcataccccgccctgccctcgattcctgggatgctgaatatatgcaggaaaacc

SEQ ID NO: 259686 - DNA, 75 bp, synthetic construct
  source 1..75: mol_type = other DNA
ttatttgcccgtcagccagcaaaaatccacaaaccctatccaactaataaaatgcaaacaacttccggcaaataa

SEQ ID NO: 259687 - DNA, 75 bp, synthetic construct
  source 1..75: mol_type = other DNA
tgacgctctactgcaattacgggaatttatcaacgaaaactccggcgaaagctttgtccagatctggggaaatgg

SEQ ID NO: 259688 - DNA, 75 bp, synthetic construct
  source 1..75: mol_type = other DNA
cgatgatgatggattaattgattcagaaaagaacgtgactattttatacagtataggatttacagttgatgaaat

SEQ ID NO: 259689 - DNA, 75 bp, synthetic construct
  source 1..75: mol_type = other DNA
caagaggaaagttgctggatgagggggctttacttcaggtgattgaagaacgaaatgtttttgcggcgctggatg

SEQ ID NO: 259690 - DNA, 75 bp, synthetic construct
  source 1..75: mol_type = other DNA
atgggcggatggcaaaatatgcaggggaatacccctgtgacgccactggtggatgccggatgcaatatggtgatt

SEQ ID NO: 259691 - DNA, 75 bp, synthetic construct
  source 1..75: mol_type = other DNA
gtgacgccactggtggatgccggatgcaatatggtgattgtgtcgcatctgagtgacggttctttatgggatcgc

SEQ ID NO: 259692 - DNA, 75 bp, synthetic construct
  source 1..75: mol_type = other DNA
aaccgacgtgttcatgactcaacgtgcaactggtgttgcaacctatcgtaacaacgacttctttggtctggttga

SEQ ID NO: 259693 - DNA, 75 bp, synthetic construct
  source 1..75: mol_type = other DNA
ccgataaacgtcacttttgacaagctggcccctgaagtacagaacgctgtcatggttaagttcgacacatgtgaa

SEQ ID NO: 259694 - DNA, 75 bp, synthetic construct
  source 1..75: mol_type = other DNA
gtacgaacgcctgaacatcccctacccgtggcgttactacaacgatcgcgatgtacgtacaatcgttgaactggg

SEQ ID NO: 259695 - DNA, 75 bp, synthetic construct
  source 1..75: mol_type = other DNA
gcgaaaattaaccgcgaaggtatctggatagaaaaactggaacacaacccaggtcagtatattcctgaagagctg

SEQ ID NO: 259696 - DNA, 75 bp, synthetic construct
  source 1..75: mol_type = other DNA
cagcctgcccgccgtaccatatcgcgtttgtgattggcggtacgtctgcggaaaccaacctgaaaaccgtcaagt

SEQ ID NO: 259697 - DNA, 75 bp, synthetic construct
  source 1..75: mol_type = other DNA
cccggacgtgcaggagcactgcttacgacgctttttcgccatatatcgatactcaacgggtttgacaatctgatg

SEQ ID NO: 259698 - DNA, 75 bp, synthetic construct
  source 1..75: mol_type = other DNA
cggatgcaatatggtgattgtgtcgcatctgagtgacggttctttatgggatcgccgggcttttccggacaccac

SEQ ID NO: 259699 - DNA, 75 bp, synthetic construct
  source 1..75: mol_type = other DNA
ggtgatgaagaagcactgtcgaaaggtgtctataacacctatatcgaagataacctgcgctattcacagaacgcg

SEQ ID NO: 259700 - DNA, 75 bp, synthetic construct
  source 1..75: mol_type = other DNA
gaaaaccgttaagttagcaagtgctcactattacgatgaactgccgacggaagggaacgaacacggtcaggcatt

SEQ ID NO: 259701 - DNA, 75 bp, synthetic construct
  source 1..75: mol_type = other DNA
tgatggcttcggtttctctgctacctatgaatacgaaggattcggtatcggtgcaacttatgcgaaatctgatcg

SEQ ID NO: 259702 - DNA, 75 bp, synthetic construct
  source 1..75: mol_type = other DNA
gttgcttcgcggcgttattgcttcgggtaatcgcaactttggtgaggcgtatggccgtgccggagatgtgattgc

SEQ ID NO: 259703 - DNA, 75 bp, synthetic construct
  source 1..75: mol_type = other DNA
cactgtattacgaagcaaaaaatgacaaagtaagaaaacgtctcggtattaagggcggtttttactgggctgaag

SEQ ID NO: 259704 - DNA, 75 bp, synthetic construct
  source 1..75: mol_type = other DNA
gaggagaatatgctactcccgatttctggccaggaactgtccattcgctggcttgctcaacacggcagcaaaaaa

SEQ ID NO: 259705 - DNA, 75 bp, synthetic construct
  source 1..75: mol_type = other DNA
tccgcagcacttcgcgcaaccccgggtattctggattattcccgcgccgctatttttgcacttatccggagcgca

SEQ ID NO: 259706 - DNA, 75 bp, synthetic construct
  source 1..75: mol_type = other DNA
gttcaggaagatgatccggaggaaatggaaggcgctgaacatccacacaaggagaacactggcggcaatcagcat

SEQ ID NO: 259707 - DNA, 75 bp, synthetic construct
  source 1..75: mol_type = other DNA
tggaaggcactgcgcatcagcacaaggagaacactggcggcaatcagcatcatgccagcgatagtgaaactggcg

SEQ ID NO: 259708 - DNA, 75 bp, synthetic construct
  source 1..75: mol_type = other DNA
cccggacgtgcgggcgcactgcttacgacgcttcttcaccatatatcgacaatcaacaggtttgacaatctgatg

SEQ ID NO: 259709 - DNA, 75 bp, synthetic construct
  source 1..75: mol_type = other DNA
acgcaagaacgactattccattcgaaggtgaacgccataacgccctgcacgatgcgcgttaccaggcaaaatacg

SEQ ID NO: 259710 - DNA, 75 bp, synthetic construct
  source 1..75: mol_type = other DNA
gaaaattcaacaggaaaaatcagcctggtcattgctgccattcatcgcgaatacaagcagacatggaaaacactg

SEQ ID NO: 259711 - DNA, 75 bp, synthetic construct
  source 1..75: mol_type = other DNA
cactggtggatgccggatgcaatatagtgattgtgtcgcatctgagtgacggttctttatgggatcgtcgggctt

SEQ ID NO: 259712 - DNA, 75 bp, synthetic construct
  source 1..75: mol_type = other DNA
atgcaatatggtgattgtgacgcatctgagtgacggttctttatgggatcgccaggcttttccggacaccacaat

SEQ ID NO: 259713 - DNA, 75 bp, synthetic construct
  source 1..75: mol_type = other DNA
cgacgctttttcgccatatatcgacaatcaacgggttcgacaatccgatgattcagccgctgttgtcagatgagc

SEQ ID NO: 259714 - DNA, 75 bp, synthetic construct
  source 1..75: mol_type = other DNA
gccccgcgggcagcagaaagaagccttactggcgtcagcagcactgcccctgctgttccgtccccgtgaggtaca

SEQ ID NO: 259715 - DNA, 75 bp, synthetic construct
  source 1..75: mol_type = other DNA
agtacagaaatgaaaacggggctggtgctgtccggtggcggggcggtgggcgcttatcaggcgggagtggttaag

SEQ ID NO: 259716 - DNA, 75 bp, synthetic construct
  source 1..75: mol_type = other DNA
ctgcacgatgcacgttaccaggcgaaatacgtttcagccatctggcaaaaactgctcccgagtcaggctgatttt

SEQ ID NO: 259717 - DNA, 75 bp, synthetic construct
  source 1..75: mol_type = other DNA
cagcagagtgcggcaccacctgatgatcgaccttgaaaccatgggaaaaaatcccgacgccccgattatctcatt

SEQ ID NO: 259718 - DNA, 75 bp, synthetic construct
  source 1..75: mol_type = other DNA
gtctgctcgactcgctggagattcgcgacctccacaaactggttcgtgacactgacaaagttttccctaatcctg

SEQ ID NO: 259719 - DNA, 75 bp, synthetic construct
  source 1..75: mol_type = other DNA
atccttgagatccgtccccggaaaaggctgaaatatgcaggtgatggtggcaacagcggcggtctgctcagtttt

SEQ ID NO: 259720 - DNA, 75 bp, synthetic construct
  source 1..75: mol_type = other DNA
gtgtttgagaatgaagaaacagacctgggcactgttgatgttctccagtcatcagaaacacaaactgatgcagtg

SEQ ID NO: 259721 - DNA, 75 bp, synthetic construct
  source 1..75: mol_type = other DNA
atgcccttcgctacgaccgccagactattttttggccttgtccgtgaacgtccgatcgacattcacaaagaccct

SEQ ID NO: 259722 - DNA, 75 bp, synthetic construct
  source 1..75: mol_type = other DNA
gaaaattcaacagggaaaaatcagcctggtcattgctgccattcatcgcgaatacaagcagacatggaaaacact

SEQ ID NO: 259723 - DNA, 75 bp, synthetic construct
  source 1..75: mol_type = other DNA
ggaatttagtaagactatcgatctggaaactgctggcggagtcattgatcgggacaccattaaatggtggcttaa

SEQ ID NO: 259724 - DNA, 75 bp, synthetic construct
  source 1..75: mol_type = other DNA
ggtggcttaagcaatcacgcgaagcgcaatctgccattatgaccgatgaaatcccgttagatgatgcactgttac

SEQ ID NO: 259725 - DNA, 75 bp, synthetic construct
  source 1..75: mol_type = other DNA
catggttaagttcgacacatgtgaaaacatcaccgttgatatggtgattagcgcgcaggaactgttgcaggaaga

SEQ ID NO: 259726 - DNA, 75 bp, synthetic construct
  source 1..75: mol_type = other DNA
acaatgggcaaaaatcctgatgcgccaataaacgctctggccggtaagttttttgatccggcaaccggagagatg

SEQ ID NO: 259727 - DNA, 75 bp, synthetic construct
  source 1..75: mol_type = other DNA
acacgtctgttgttgatctcgcccgcgccaaagccaatcaacagtacactgaaaattcaacaggaaaaatcagcc

SEQ ID NO: 259728 - DNA, 75 bp, synthetic construct
  source 1..75: mol_type = other DNA
ccattcctgacgaacaggcaataaaaaacgagggcgctgttgctgtggccactgccattaaagccggtgatgaac

SEQ ID NO: 259729 - DNA, 75 bp, synthetic construct
  source 1..75: mol_type = other DNA
ccagcagaatgtggcaccacatgatgatcgaccttgaaaccatgggaaaaaatcccgatgccccgcttatctcaa

SEQ ID NO: 259730 - DNA, 75 bp, synthetic construct
  source 1..75: mol_type = other DNA
ggttgaagttcaggaagatgatccggaggaaatggaaggcgctgaacatccacacaaggagaacactggcggcaa

SEQ ID NO: 259731 - DNA, 75 bp, synthetic construct
  source 1..75: mol_type = other DNA
aggggatccagacccgcgattctgtgaaccagaaccagcatgaatcggaacggaactaccaaaaagcggaacaaa

SEQ ID NO: 259732 - DNA, 75 bp, synthetic construct
  source 1..75: mol_type = other DNA
tgcgccgttcatacgaacggcaggggatcccctgcccgtggcgttactacaacgatcgcgatgtacgcacaatcg

SEQ ID NO: 259733 - DNA, 75 bp, synthetic construct
  source 1..75: mol_type = other DNA
cgcatcagcacaaggagaacactggcggcaatcagcatcatgccagcgatagtgaaactggcgaggcgtcagatc

SEQ ID NO: 259734 - DNA, 75 bp, synthetic construct
  source 1..75: mol_type = other DNA
agcggtggtggcaactgccctgattgtggtgcggtgatgggcgacgcaacataccaggaaacattcgatgacaag

SEQ ID NO: 259735 - DNA, 75 bp, synthetic construct
  source 1..75: mol_type = other DNA
cctgacgccgataagttgcttgctgcctctcgcggagaatttgttgcagggattagcgacccgaatgatccgaaa

SEQ ID NO: 259736 - DNA, 75 bp, synthetic construct
  source 1..75: mol_type = other DNA
ctgacgaagtaaacaaaattatgcaggcagccaatatcagccagcctgacgccgataagttgcttgctgcctctc

SEQ ID NO: 259737 - DNA, 75 bp, synthetic construct
  source 1..75: mol_type = other DNA
agtaagactatcgatctggaaactgctggcggagtcattgatcgggacaccattaaatggtggcttaagcaatca

SEQ ID NO: 259738 - DNA, 75 bp, synthetic construct
  source 1..75: mol_type = other DNA
ggcgaattttttgttcaggtctggggaaatggagccaacttcgacaacacgattttgcgccgttcatacgaacgg

SEQ ID NO: 259739 - DNA, 75 bp, synthetic construct
  source 1..75: mol_type = other DNA
atcgttgagctggggaaagccatagacttcgatgccagaactgctatcccattcgaaggtgagcgccataatgca

SEQ ID NO: 259740 - DNA, 75 bp, synthetic construct
  source 1..75: mol_type = other DNA
agtatctgatacccaaaaaaatgaaagcacgctggaaactgaaccatctgtagagcgtgaggggccgttctactt

SEQ ID NO: 259741 - DNA, 75 bp, synthetic construct
  source 1..75: mol_type = other DNA
gcggcaactgccctgattgtggtgcggtgatgggcgacgcaacataccaggaaacattcgatgacaagaaccagg

SEQ ID NO: 259742 - DNA, 75 bp, synthetic construct
  source 1..75: mol_type = other DNA
atgtttgctcttgcccgtgaacatgctgacaaaaccggacgtgaagcggtgatgttcagctcttttttacgcgcc

SEQ ID NO: 259743 - DNA, 75 bp, synthetic construct
  source 1..75: mol_type = other DNA
tgccattatgaccgatgaaatcccgttagatgatgcactgttacaattgcgggaatttatcgacgaaaactccgg

SEQ ID NO: 259744 - DNA, 75 bp, synthetic construct
  source 1..75: mol_type = other DNA
ccctgcccgtggcgttactacaacgatcgcgatgtacgcacaatcgttgagctggggaaagccatagacttcgat

SEQ ID NO: 259745 - DNA, 75 bp, synthetic construct
  source 1..75: mol_type = other DNA
gatgaagaactggcctacgctctgtggcctggcgatattaataccggaaacattgacggcagcatccatcgctgg

SEQ ID NO: 259746 - DNA, 75 bp, synthetic construct
  source 1..75: mol_type = other DNA
gagacattctgcgaggaagattcagatgaatctcaggaaaaagctccggaggagatggaaagccctggacatccg

SEQ ID NO: 259747 - DNA, 75 bp, synthetic construct
  source 1..75: mol_type = other DNA
aatggcccgaaattcaggctgaattacgtaactggaaaaaacggcaggacgcggagcgcaaagagactggaaaat

SEQ ID NO: 259748 - DNA, 75 bp, synthetic construct
  source 1..75: mol_type = other DNA
gatcaggtaaaactggttgacgctcttattcaatttcgggaattcatcaatgagtactcggatgaaaaattcgtt

SEQ ID NO: 259749 - DNA, 75 bp, synthetic construct
  source 1..75: mol_type = other DNA
acaaactgatgcagtggaaactgaagtacctgatacccaaaaaaatgaaagcgcgctggaagatgaatcatctgt

SEQ ID NO: 259750 - DNA, 75 bp, synthetic construct
  source 1..75: mol_type = other DNA
caaaaaatgaagttatcgacaaggatcgcgaagactggaaacgcatctccgcatcaatgcgcaaacagcctgatg

SEQ ID NO: 259751 - DNA, 75 bp, synthetic construct
  source 1..75: mol_type = other DNA
gagaaactggcgggagtgatgatggggacggccgccgggctggaaatcccaacaatgctgattgccggttatttt

SEQ ID NO: 259752 - DNA, 75 bp, synthetic construct
  source 1..75: mol_type = other DNA
gtcatcgatcgggacaccattaagtggtggctgaaacagtcacgcgaagcacaatccgccattctgaccgatgaa

SEQ ID NO: 259753 - DNA, 75 bp, synthetic construct
  source 1..75: mol_type = other DNA
atgatccggaggaaatggaaggtactgcacatcagcacaaggagaacactggcggcaatcagcatcatgccagcg

SEQ ID NO: 259754 - DNA, 75 bp, synthetic construct
  source 1..75: mol_type = other DNA
tgattgtcctttgctgcctgttaggtgtgctggcctgtgctcttttcgcctggaaccgcaactacttcattctgc

SEQ ID NO: 259755 - DNA, 75 bp, synthetic construct
  source 1..75: mol_type = other DNA
aggaaacattcgatgaagagaatcaggttgaagctcaggagaatgatccggaggaaatggaaggcgctgaacatc

SEQ ID NO: 259756 - DNA, 75 bp, synthetic construct
  source 1..75: mol_type = other DNA
gcctgacgccgataagttgcttgctgcctctcgcggagaatttgttgcagggattagcgacccgaatgatccgaa

SEQ ID NO: 259757 - DNA, 75 bp, synthetic construct
  source 1..75: mol_type = other DNA
ggtgatgggtgacgcaacataccaggaaatattcgatggagagaatcagcctgaagttcaggaaaatgatccgga

SEQ ID NO: 259758 - DNA, 75 bp, synthetic construct
  source 1..75: mol_type = other DNA
caggtttcattggcatgggtcattggtccgccgctggcttatgctctggcgatggggttcagctttacggtaatg

SEQ ID NO: 259759 - DNA, 75 bp, synthetic construct
  source 1..75: mol_type = other DNA
gaattatcacgcggtgttctggtttgcgatggtgatgattttagctaccctgttttgcctgctacgtattaaaga

SEQ ID NO: 259760 - DNA, 75 bp, synthetic construct
  source 1..75: mol_type = other DNA
gttccgctggcgaccggcacggttgaagcgccgcgccgtaatcgtcgcgatacgctactgctgtttgtcatttgt

SEQ ID NO: 259761 - DNA, 75 bp, synthetic construct
  source 1..75: mol_type = other DNA
gcaatggtgggattcttctttaccggtagtgcagtcatcggaattctggtcagtcagtttctcgccggacgctct

SEQ ID NO: 259762 - DNA, 75 bp, synthetic construct
  source 1..75: mol_type = other DNA
ctttggctctaccgccaacccgcaaatgtttgctcttgcccgtgagcacgctgacaaaaccgggcgtgaagcggt

SEQ ID NO: 259763 - DNA, 75 bp, synthetic construct
  source 1..75: mol_type = other DNA
atgctgatggcgcattcacctgtcattctgttgggcttgcagctgctaaatgctatttttattggcattctgggc

SEQ ID NO: 259764 - DNA, 75 bp, synthetic construct
  source 1..75: mol_type = other DNA
cctgtcggtcgaccttgaaacgatgggaacaaatcctgatgcaccaatcaactctattggcggtaaattctttga

SEQ ID NO: 259765 - DNA, 75 bp, synthetic construct
  source 1..75: mol_type = other DNA
gaatattttgcccgaaaaaatggcacatacacaggcttaccgcaaaatgcaaataccgcacaaaattctgaacaa

SEQ ID NO: 259766 - DNA, 75 bp, synthetic construct
  source 1..75: mol_type = other DNA
caaagagactggaaaatacacgtctgttgttgatctcgccagcgccagagtcaatcaacagcacactgaaaactc

SEQ ID NO: 259767 - DNA, 75 bp, synthetic construct
  source 1..75: mol_type = other DNA
cggagtcattgatcgggacaccattaaatggtggcttaagcaatcacgcgaagcgcaatctgccattatgaccga

SEQ ID NO: 259768 - DNA, 75 bp, synthetic construct
  source 1..75: mol_type = other DNA
cctctttaccgataaggacagcgaaaaatacggtcgcgcaaacaaactgtctggtctgaataaggctctggctgc

SEQ ID NO: 259769 - DNA, 75 bp, synthetic construct
  source 1..75: mol_type = other DNA
acacgtctgctgttgatctcgcccgcgccagagtcaaccgacagcacactgaaaactcagcagaaaatatccccc

SEQ ID NO: 259770 - DNA, 75 bp, synthetic construct
  source 1..75: mol_type = other DNA
gcggctcatgcgccgtttatttcgcatccagacgagttttgtcagcagctggtagcgttgaagcagagggtgtag

SEQ ID NO: 259771 - DNA, 75 bp, synthetic construct
  source 1..75: mol_type = other DNA
aagattttcagcgtacagtggaacggttccttgcactacaaacgatgggcacggaaacggcgcgtcaggatgcgc

SEQ ID NO: 259772 - DNA, 75 bp, synthetic construct
  source 1..75: mol_type = other DNA
ctcaatggcggactggaaattctgaaaatggtcgatctccgtcaaccgctgaaaaatgtacaaatgccgtttttg

SEQ ID NO: 259773 - DNA, 75 bp, synthetic construct
  source 1..75: mol_type = other DNA
agcggaacaaaacagcccaaatgcgttacaaaacgagccagaaacgaaacaacctgaaccagtagtgcaacagga

SEQ ID NO: 259774 - DNA, 75 bp, synthetic construct
  source 1..75: mol_type = other DNA
acatccaccagcagagtgtggtaccacctgatgatcgaccttgaaacaatgggaaccaacaccaatgcgcccatc

SEQ ID NO: 259775 - DNA, 75 bp, synthetic construct
  source 1..75: mol_type = other DNA
ggcattccgtgcttagctttatacgcaacagcttatacatcatatttattagatgataaactaacgcattcaaca

SEQ ID NO: 259776 - DNA, 75 bp, synthetic construct
  source 1..75: mol_type = other DNA
ggtgacgctcagcatggcaatagcagtgatgaaactggcgagacggcaaatcccctaattacggtgaacagtcat

SEQ ID NO: 259777 - DNA, 75 bp, synthetic construct
  source 1..75: mol_type = other DNA
cgtattgagctgatttccagcagcgaagctgactggaatgccttgcagagcgcgctgttgaagcttcgtttagcg

SEQ ID NO: 259778 - DNA, 75 bp, synthetic construct
  source 1..75: mol_type = other DNA
cgaaaaaagcgccagcaatgaaaacttccgtgaccagctggctgccgcagacatcattgtcgccaataaatccga

SEQ ID NO: 259779 - DNA, 75 bp, synthetic construct
  source 1..75: mol_type = other DNA
tacagggctgggccatccaaaacagatcctcgatctgttaaccgctccggtttatgaaccgtggatcgatctgcg

SEQ ID NO: 259780 - DNA, 75 bp, synthetic construct
  source 1..75: mol_type = other DNA
cggtcattgtgcatcatggctacttctggaaaggcgaatctccggtcattcgcggaatgaagcgtaaccgtttaa

SEQ ID NO: 259781 - DNA, 75 bp, synthetic construct
  source 1..75: mol_type = other DNA
atgaaaaacaccgaactggaacaactgattaacgaaaaactgaacagcgcggcgattagtgattacgcgccgaat

SEQ ID NO: 259782 - DNA, 75 bp, synthetic construct
  source 1..75: mol_type = other DNA
gaatcaaccgtcagggcgatgacctgcacattgaaacgcaaaacgttgcgccaccggacagccgtattgagctga

SEQ ID NO: 259783 - DNA, 75 bp, synthetic construct
  source 1..75: mol_type = other DNA
aaaaccgctgggatgaggagtctgcttcttttgtcccggttgagactgaatccgatccgatgaacgtcacttttg

SEQ ID NO: 259784 - DNA, 75 bp, synthetic construct
  source 1..75: mol_type = other DNA
atgagtaaagtctttatttgcgccgccattccggacgaacagacaacaaaggaagaaggcgcagtcgctgtagcc

SEQ ID NO: 259785 - DNA, 75 bp, synthetic construct
  source 1..75: mol_type = other DNA
tcagaccggcggcggcaactgccctgattgtggcgcggtgatgggcgacgcaacataccaggaaacattcgatga

SEQ ID NO: 259786 - DNA, 75 bp, synthetic construct
  source 1..75: mol_type = other DNA
gtgaccaggaccaacctcatcaccggttttctcggcagcgggaaaaccacgtcgattcttcatctgttagcccat

SEQ ID NO: 259787 - DNA, 75 bp, synthetic construct
  source 1..75: mol_type = other DNA
aattcaacaggaaaaatcagcccggtcattgctgccattcatcgcgaatacaagcagacatggaaaacactggat

SEQ ID NO: 259788 - DNA, 75 bp, synthetic construct
  source 1..75: mol_type = other DNA
cgccgttcatatgaacggcaggggatcccctgcccgtggcgttactacaacgatcgcgatgtacgcacaatcgtt

SEQ ID NO: 259789 - DNA, 75 bp, synthetic construct
  source 1..75: mol_type = other DNA
gtggaaataaaatacgatcccacgcctgagaaaaacttaagaaaagttttttatgagactgaccctgattttctt

SEQ ID NO: 259790 - DNA, 75 bp, synthetic construct
  source 1..75: mol_type = other DNA
tcttaacagtttctctgaagatgattatttaaagtggatattatcccgcaatcaggatgctttggatttagtgag

SEQ ID NO: 259791 - DNA, 75 bp, synthetic construct
  source 1..75: mol_type = other DNA
tgaggttaacaatgtttgggatatttttagtgactcattcaaggacaatgaatctgagtttatttctaagataaa

SEQ ID NO: 259792 - DNA, 75 bp, synthetic construct
  source 1..75: mol_type = other DNA
tatgctggcgcagaacattgcagaagcggcgagcggcattgataagctggtttcccgcgtgctggtcctggcgga

SEQ ID NO: 259793 - DNA, 75 bp, synthetic construct
  source 1..75: mol_type = other DNA
gaaaattttcgatttcccgctgcgtttgaccatcggtactgatatcgataccgcagaagtgctggaagagatggg

SEQ ID NO: 259794 - DNA, 75 bp, synthetic construct
  source 1..75: mol_type = other DNA
gacagttcgtaggtttaataaatgtcctaatcaaattggatagagattgtaataatattatagaggcatatgcag

SEQ ID NO: 259795 - DNA, 75 bp, synthetic construct
  source 1..75: mol_type = other DNA
cgcgatgtccaaaggttcttctgaccgttacttccagagcgacaacgctgccgacaaactggtgccggaaggtat

SEQ ID NO: 259796 - DNA, 75 bp, synthetic construct
  source 1..75: mol_type = other DNA
tggtgaccgtgcgcgaaggtgaagcccgtgaagtggtactggctaaaatgcacgaaaaacgcgttgagaaggcgc

SEQ ID NO: 259797 - DNA, 75 bp, synthetic construct
  source 1..75: mol_type = other DNA
cgtggtgactgatccgcagactgttctgccaaccacgacgctgcgcgaagtgaaagaactgaccgagcgtaacgg

SEQ ID NO: 259798 - DNA, 75 bp, synthetic construct
  source 1..75: mol_type = other DNA
ggggctttcccgtttcagcgtcccgctgaaatcgtcggcttacctcctttcgccctgcatgcagtctatcgctaa

SEQ ID NO: 259799 - DNA, 75 bp, synthetic construct
  source 1..75: mol_type = other DNA
gtaaattattagagattccgtttaaccccgtgtatcggaattttgacaaggcgcttcaggaaatcactaactgga

SEQ ID NO: 259800 - DNA, 75 bp, synthetic construct
  source 1..75: mol_type = other DNA
tcatcatgaccctttccttatttatggccccttcctcgggaggggctttcccgtttcagcgtcccgctgaaatcg

SEQ ID NO: 259801 - DNA, 75 bp, synthetic construct
  source 1..75: mol_type = other DNA
aggtggttttggtgcggcgaaaaatttaagcaattttgccagccttggcggtgaatgcaccgttgaccgtgaatt

SEQ ID NO: 259802 - DNA, 75 bp, synthetic construct
  source 1..75: mol_type = other DNA
cttttttcggaacactaattgttcatgattcagccttatctcaaacaatggattttgtttttgcatatggatgct

SEQ ID NO: 259803 - DNA, 75 bp, synthetic construct
  source 1..75: mol_type = other DNA
agtgactatattgtttcctatggctgtttatctttaatcatcctcccattactctggttatatctgagaaccaga

SEQ ID NO: 259804 - DNA, 75 bp, synthetic construct
  source 1..75: mol_type = other DNA
actgactcttgctctgaataaagtgaatgaccgtctaaaaacacttgcgagcgatatcatcgcctctggagttga

SEQ ID NO: 259805 - DNA, 75 bp, synthetic construct
  source 1..75: mol_type = other DNA
gcgctggtcaccgtggcgtcgtcaccttgttttagtgctcgtgacgagtggccggggataaaaccggacgtgctg

SEQ ID NO: 259806 - DNA, 75 bp, synthetic construct
  source 1..75: mol_type = other DNA
gcattgctgacctttgccccgccagttgtggggggctgttgttcccgaacggattcctgtacgccattggttatg

SEQ ID NO: 259807 - DNA, 75 bp, synthetic construct
  source 1..75: mol_type = other DNA
agcccgaaattccgtgtctggggcggcaagccgatgattacgctgattctggtgtttggcgttggcaacgcactg

SEQ ID NO: 259808 - DNA, 75 bp, synthetic construct
  source 1..75: mol_type = other DNA
acgccgccaaacgcccggtgctttatctgggcggcggtgtgatcaatgcgcctgcgcgggtgcgtgaactggcgg

SEQ ID NO: 259809 - DNA, 75 bp, synthetic construct
  source 1..75: mol_type = other DNA
atggcaagttcgggcacaacatcgacgcgtaagcgctttaccggcgcagaatttatcgttcatttcctggaacag

SEQ ID NO: 259810 - DNA, 75 bp, synthetic construct
  source 1..75: mol_type = other DNA
ttgaccattggcacagatatcgataccgcagaagtgctggaagagatgggcgcagagcatgtgccgtgcccggtc

SEQ ID NO: 259811 - DNA, 75 bp, synthetic construct
  source 1..75: mol_type = other DNA
actgcatgagtcagaccaagtggaggcgcgtgcccgagcagcgcgcgtgctcaatgaagccatgcatacctcgct

SEQ ID NO: 259812 - DNA, 75 bp, synthetic construct
  source 1..75: mol_type = other DNA
acgccgccaaacgcccggtgctttatctgggtggtggtgtgatcaatgcgcctgcgcgggtgcgtgaactggcgg

SEQ ID NO: 259813 - DNA, 75 bp, synthetic construct
  source 1..75: mol_type = other DNA
atgcagattgccgccggattcggcctcgaaacgtgtgatttgaataatgaagccgatccgcaggccgcgttgcaa

SEQ ID NO: 259814 - DNA, 75 bp, synthetic construct
  source 1..75: mol_type = other DNA
attctggtgtttggcgtcggcaacgcactggtgcatattttatcgagctttaatttactgccggtgtatcagtaa

SEQ ID NO: 259815 - DNA, 75 bp, synthetic construct
  source 1..75: mol_type = other DNA
gtgaaatgtctggtgtacggtacgttaatggcgctggcgctgtataccatctggttgctggcaacaatggggaat

SEQ ID NO: 259816 - DNA, 75 bp, synthetic construct
  source 1..75: mol_type = other DNA
ccggccagagcggcaggttttggttttgcactgttggtggcgtttgtggtgtggttgagcaccaaagcagtcagc

SEQ ID NO: 259817 - DNA, 75 bp, synthetic construct
  source 1..75: mol_type = other DNA
atgcagcagcgccagcgagatgtcgctgcgcttgatgccagatacacgaaggaattagccgatgcgagagctgaa

SEQ ID NO: 259818 - DNA, 75 bp, synthetic construct
  source 1..75: mol_type = other DNA
gcattgctgacctttgccccgccagttgtgggggggctgttgttcccgaacggattcctgtacgccattggttat

SEQ ID NO: 259819 - DNA, 75 bp, synthetic construct
  source 1..75: mol_type = other DNA
tatttcaccctcagagagcgaatcgtcacagtgacgaagcaggtcggttatctgcaggaatatataaaaaagcaa

SEQ ID NO: 259820 - DNA, 75 bp, synthetic construct
  source 1..75: mol_type = other DNA
cgcatgacggcgattgtgctgggggcgaaagtcattaccttcttcctcacctttggtagcctgctggggcatgtg

SEQ ID NO: 259821 - DNA, 75 bp, synthetic construct
  source 1..75: mol_type = other DNA
tggcagatctgtttggtttcgatgactcggctatgggccgcttgaaaacagcattgttgacctttgccccgcctg

SEQ ID NO: 259822 - DNA, 75 bp, synthetic construct
  source 1..75: mol_type = other DNA
ggattatttcaccctcagagagcgtatcgtcacagtgacgaagcaggttggctatttgcaggactacatcaacac

SEQ ID NO: 259823 - DNA, 75 bp, synthetic construct
  source 1..75: mol_type = other DNA
caacgtgatgtcactgcactggatgctaaatacactggagaactggctgatgccaaagccactattgatcagctt

SEQ ID NO: 259824 - DNA, 75 bp, synthetic construct
  source 1..75: mol_type = other DNA
attactgacatgcagcggcgccagcgcgatgttgctgcactggatgaaaaatactcaagggagttagctgatgca

SEQ ID NO: 259825 - DNA, 75 bp, synthetic construct
  source 1..75: mol_type = other DNA
tcattgccctgctggtggcctgtggtgtgctgtgggtggcaacagactattaccgcgataatgccatcacctaca

SEQ ID NO: 259826 - DNA, 75 bp, synthetic construct
  source 1..75: mol_type = other DNA
ttgcactgctggtagcgtttgtggtgtggttgagtactaaggccgtcagccgcatgacggcgattgtgctggggg

SEQ ID NO: 259827 - DNA, 75 bp, synthetic construct
  source 1..75: mol_type = other DNA
ctgcctgtcatgggctgctaatcattaccgtgataacgcaatcgcctacaaagagcagcgcgataacaaggccag

SEQ ID NO: 259828 - DNA, 75 bp, synthetic construct
  source 1..75: mol_type = other DNA
atacacaaaggagcttgctgatgctaacgcgactatcgaaagtctccgtgctgatgtttctgctggtcgtaagcg

SEQ ID NO: 259829 - DNA, 75 bp, synthetic construct
  source 1..75: mol_type = other DNA
ttcaccctcagagagcggttgatgacaatgcagaagcaactggaaggggcgcaggaatatatccgcactcagtgt

SEQ ID NO: 259830 - DNA, 75 bp, synthetic construct
  source 1..75: mol_type = other DNA
atgctttccgcgtttaccgttattctgctggtggtctgtggtgcgctgtggctggtaacagaccattaccgtgat

SEQ ID NO: 259831 - DNA, 75 bp, synthetic construct
  source 1..75: mol_type = other DNA
tgcgctcgatgcaaaatactcgagggaattagccgatgcgagagctgaaaatgaaactcttcgcgctgacgttgc

SEQ ID NO: 259832 - DNA, 75 bp, synthetic construct
  source 1..75: mol_type = other DNA
cagcctgcgacattgttcaacgttgcagaaagcaatgcatcttatgcgccgtatctgctgatgacattgccgttc

SEQ ID NO: 259833 - DNA, 75 bp, synthetic construct
  source 1..75: mol_type = other DNA
ggtgattatcggcggcaccattattggcgcagggatgttttctctgcctgtggtcatgtccggggcgtggttctt

SEQ ID NO: 259834 - DNA, 75 bp, synthetic construct
  source 1..75: mol_type = other DNA
gatgccagatactcgagggaattagccgatgcgagagctgaaaatgaaactcttcgcgctgacgttgccgctggt

SEQ ID NO: 259835 - DNA, 75 bp, synthetic construct
  source 1..75: mol_type = other DNA
aactctgcgcgctgatgttgccgctggtcgtaagcgcctgcggatcaacgccacctgctccggtaccgtgcgtga

SEQ ID NO: 259836 - DNA, 75 bp, synthetic construct
  source 1..75: mol_type = other DNA
atacacgaaggagttggctgatgcgaaagctgaaaatgatgctcttcggcgcaagcttgataatggtggtcgggt

SEQ ID NO: 259837 - DNA, 75 bp, synthetic construct
  source 1..75: mol_type = other DNA
tattgttgaggtcgatagcggtcaacttggcgtggacagcgcaatggcggagttacagcaactgcaaaacgcgct

SEQ ID NO: 259838 - DNA, 75 bp, synthetic construct
  source 1..75: mol_type = other DNA
atctggaagcaaaagggctgtaccgacgcgccgccgcgcgatggatggaagtcatgctgttatgcaccgaggacg

SEQ ID NO: 259839 - DNA, 75 bp, synthetic construct
  source 1..75: mol_type = other DNA
cgctgcaatatccgctggctcctgctgacattccattattagaggcgtttatggctttacgcgccgccagaccag

SEQ ID NO: 259840 - DNA, 75 bp, synthetic construct
  source 1..75: mol_type = other DNA
gccctctggcccggctaaaagcaatggataataacggcttgttgcggcggacattggcagcatggtttcgtcata

SEQ ID NO: 259841 - DNA, 75 bp, synthetic construct
  source 1..75: mol_type = other DNA
aaatggcgcaggatatcgtggcacgtaccatgcgcatcatcgatatcaatatcaacgtaatggatgcccgtgggc

SEQ ID NO: 259842 - DNA, 75 bp, synthetic construct
  source 1..75: mol_type = other DNA
aactggtgatgaacctgattcaggccgaggagaatacacccgcactcactgaatgggcgcaacggctggggatag

SEQ ID NO: 259843 - DNA, 75 bp, synthetic construct
  source 1..75: mol_type = other DNA
atggccagtcatctgatcgcaaggacagagcgccactggatttacgtattttatgttgtcccggacgaacagaaa

SEQ ID NO: 259844 - DNA, 75 bp, synthetic construct
  source 1..75: mol_type = other DNA
ctggatgcacatccagaattgggtaataacgcacaactggcggcattgctgggcatgacggtaatgggtgaaatc

SEQ ID NO: 259845 - DNA, 75 bp, synthetic construct
  source 1..75: mol_type = other DNA
cgcggcgattagcgattacgcgccgaatggtttgcaggtggaaggcaaagagacggtgcaaaaaatcgtcaccgg

SEQ ID NO: 259846 - DNA, 75 bp, synthetic construct
  source 1..75: mol_type = other DNA
taaagctacactgctgctggcaaaccctgattcgaaagtcaaaattcttgactggagagctctaactgaacatgg

SEQ ID NO: 259847 - DNA, 75 bp, synthetic construct
  source 1..75: mol_type = other DNA
aaaacaactgctgaacttcctgaaagaagaaacttacagtgattttaaaactctgatgctgttatttggtttccg

SEQ ID NO: 259848 - DNA, 75 bp, synthetic construct
  source 1..75: mol_type = other DNA
gaagaaacttacagtgattttaaaactctgatgctgttatttggtttccgggatcataagtcgctttattcgcta

SEQ ID NO: 259849 - DNA, 75 bp, synthetic construct
  source 1..75: mol_type = other DNA
cgacagtttgcgtggcgactggcaggccaacgaactggcgcgaccgctggcgcggctgaaagcgatggacaataa

SEQ ID NO: 259850 - DNA, 75 bp, synthetic construct
  source 1..75: mol_type = other DNA
agcctctcccggtttatccgtaataaccccggggctgagggatttctgaatcgtctgggggtacagacacgggat

SEQ ID NO: 259851 - DNA, 75 bp, synthetic construct
  source 1..75: mol_type = other DNA
ttactttaccgggaaaacaaccggacgggcattacagactattcaggatattgtcagtacctgggccccggcagg

SEQ ID NO: 259852 - DNA, 75 bp, synthetic construct
  source 1..75: mol_type = other DNA
gatatcatcgagtggtgggggaaactggatgccgaaacgaaaaccctgatagaggttatcggcggcctggttgtc

SEQ ID NO: 259853 - DNA, 75 bp, synthetic construct
  source 1..75: mol_type = other DNA
ggagcagttcatcaatccattccagaaaacatcgctgcgggaatctcgtaagaaaaagaaaaccctgacccgcga

SEQ ID NO: 259854 - DNA, 75 bp, synthetic construct
  source 1..75: mol_type = other DNA
tgcagaactgaatattatgaagataaaaatcatacgtcagttaaatgccaaaggaatatataacattcaagttcc

SEQ ID NO: 259855 - DNA, 75 bp, synthetic construct
  source 1..75: mol_type = other DNA
caataatacaatccttatgcaaaatgaagcacgtgtttattatttttattttatatgcatttggcgtaacacttg

SEQ ID NO: 259856 - DNA, 75 bp, synthetic construct
  source 1..75: mol_type = other DNA
gctatttccatatggcgataataatataaattctttgctgtcagcaaatgttcgcacagaaaatatcataaaaat

SEQ ID NO: 259857 - DNA, 75 bp, synthetic construct
  source 1..75: mol_type = other DNA
cgtttctgatcctgacttttatgatgaaaaaacaataacggacaatttaacaaaaacatttaatgatctaaacca

SEQ ID NO: 259858 - DNA, 75 bp, synthetic construct
  source 1..75: mol_type = other DNA
agccacttttaaggattctacaattttattaaatagtggaggttatgttcatttaggaaattcaaaatataataa

SEQ ID NO: 259859 - DNA, 75 bp, synthetic construct
  source 1..75: mol_type = other DNA
caaatgtcatcaaaatggggctggccgtcgaaggagctgcgctgtccgtggtggccttcacggctaagatcgcct

SEQ ID NO: 259860 - DNA, 75 bp, synthetic construct
  source 1..75: mol_type = other DNA
agtttctgatcctgacttttatgatgaaaaaacaataacagataatttaacaaaaacacttaacgatctaaatca

SEQ ID NO: 259861 - DNA, 75 bp, synthetic construct
  source 1..75: mol_type = other DNA
tctaatcagattatatccggggcaccggcaaacatcatatcttctggagtaacctgggcaatgtcatcacccgaa

SEQ ID NO: 259862 - DNA, 75 bp, synthetic construct
  source 1..75: mol_type = other DNA
gcattcgctactttacgccaaccgtcgaagtaccgatttgcggtcacgcgacggtggcagcgcactatgtacgtt

SEQ ID NO: 259863 - DNA, 75 bp, synthetic construct
  source 1..75: mol_type = other DNA
gcttaaccggtggccttatcccctgcccggcagcaattaccgtgctgttgatatgcattcagttgaaagccctga

SEQ ID NO: 259864 - DNA, 75 bp, synthetic construct
  source 1..75: mol_type = other DNA
tttccaggtgagctggcgctatccgggcgaagaacgggccaaagccagccgggaggcgatggccagacagcgcga

SEQ ID NO: 259865 - DNA, 75 bp, synthetic construct
  source 1..75: mol_type = other DNA
cggacgatccgaaatcgttcgcggcaatgcgttacaccgaatcccggttgtcgaaatattccgagctgctattga

SEQ ID NO: 259866 - DNA, 75 bp, synthetic construct
  source 1..75: mol_type = other DNA
ctgagcttcggaagcgcagagctgcaaaaaatcaaaaaaattctgtgcatggtacagataatggtatcgataaag

SEQ ID NO: 259867 - DNA, 75 bp, synthetic construct
  source 1..75: mol_type = other DNA
gctgtagaattaacctattcacctgcggcaagtcgttttgaaaattataaaatcgcaactaaagttcatacaaat

SEQ ID NO: 259868 - DNA, 75 bp, synthetic construct
  source 1..75: mol_type = other DNA
aactatgggagcatctgcggtcgagaagaccattagcgttacggcgagtgttgacccgactgttgaccttctgca

SEQ ID NO: 259869 - DNA, 75 bp, synthetic construct
  source 1..75: mol_type = other DNA
gtcgttctgcgctttgatggcgtggatgttcgtgtggtgtatctgaacggcgatccgtggtttgttgcaaaagat

SEQ ID NO: 259870 - DNA, 75 bp, synthetic construct
  source 1..75: mol_type = other DNA
ccgcagtcgtaaagcttccacaccaggcacatttgcgcaccgtttcagtaactgggtattccgcgaggttatccc

SEQ ID NO: 259871 - DNA, 75 bp, synthetic construct
  source 1..75: mol_type = other DNA
ggatgatgatgaaagtaataccgtaactttaacttacggtattcgcggaaatccaaatcatagcgtcgtttctga

SEQ ID NO: 259872 - DNA, 75 bp, synthetic construct
  source 1..75: mol_type = other DNA
gtcgttctgcgctttgatggcgtggatgttcgtgtggtgtatctaaacggcgatccgtggtttgttgcaaaggat

SEQ ID NO: 259873 - DNA, 75 bp, synthetic construct
  source 1..75: mol_type = other DNA
acgttaccgatgctgtttcagttctggatagcgatgaggtaatgaccctagctttaaccgagggtcattcaggta

SEQ ID NO: 259874 - DNA, 75 bp, synthetic construct
  source 1..75: mol_type = other DNA
ggtattcagaaatgtgataccgggtatcagaaaaacgggggcttatggtatcccgtggggtgcattacaggattt

SEQ ID NO: 259875 - DNA, 75 bp, synthetic construct
  source 1..75: mol_type = other DNA
gaagtatttcattagatgagaatgtcattacgaagttagtaatctttgaaagatgtgcaggagagactgctgcca

SEQ ID NO: 259876 - DNA, 75 bp, synthetic construct
  source 1..75: mol_type = other DNA
accaaaaaagtcggccatgcggcgtctatcgtcgggatgacggtaatcggcgcgctggttgcaacctatgtccgt

SEQ ID NO: 259877 - DNA, 75 bp, synthetic construct
  source 1..75: mol_type = other DNA
tggctggtacgtcgcggctggagtccgctgcgtctgattgccgtcaccgtggtcctcggcatcgtcggtaaattc

SEQ ID NO: 259878 - DNA, 75 bp, synthetic construct
  source 1..75: mol_type = other DNA
ctggtgcatcagcaacagagtctgttctacaagcagggcgtttttgccgctacctatccgggcaaaatcaacttt

SEQ ID NO: 259879 - DNA, 75 bp, synthetic construct
  source 1..75: mol_type = other DNA
cgtgaacagtattcagagcaccaagattgccgttggtgcgccgctcggcgggattggcgatgcgatgttctggct

SEQ ID NO: 259880 - DNA, 75 bp, synthetic construct
  source 1..75: mol_type = other DNA
ccgcggctggagtccgctgcgtctgattgcagttaccgtggttctcggcatcgttggtaaattctgccatttcct

SEQ ID NO: 259881 - DNA, 75 bp, synthetic construct
  source 1..75: mol_type = other DNA
cgcgctggtggcaacctatgttcgtttaagcaccacgctggaaatcacggcgggcgacgcagtggttaagttaca

SEQ ID NO: 259882 - DNA, 75 bp, synthetic construct
  source 1..75: mol_type = other DNA
aaacttgccagcggtaaagtaaaacgaggtgagttacttgcttttgtcagtattgatcagacaacaaatgttgtc

SEQ ID NO: 259883 - DNA, 75 bp, synthetic construct
  source 1..75: mol_type = other DNA
cttaaacagcttgacgataatggcggtcaaatacctactgatgcaccaaagacatggactgatagtccaacgact

SEQ ID NO: 259884 - DNA, 75 bp, synthetic construct
  source 1..75: mol_type = other DNA
ggcgaaaaaataactatgctccgtgagggcttagagaaggcgttacagcaatcctggaaagatgaaccaatctca

SEQ ID NO: 259885 - DNA, 75 bp, synthetic construct
  source 1..75: mol_type = other DNA
cgcatgacgctcacctgccgggacaatcatctgatgttgaactacagcgggtctgataagaaacccctgggtgta

SEQ ID NO: 259886 - DNA, 75 bp, synthetic construct
  source 1..75: mol_type = other DNA
attcgtgacgcagcggcaatgattaatgctgccaaacgcccggtgctttatctgggcggcggtgtgatcaatgcg

SEQ ID NO: 259887 - DNA, 75 bp, synthetic construct
  source 1..75: mol_type = other DNA
gctggcctcgttaaataacttaccacaggacagagaaacgctattctactataacgtgcgggaaattccgccgcg

SEQ ID NO: 259888 - DNA, 75 bp, synthetic construct
  source 1..75: mol_type = other DNA
aataccatggccgggttgttaatcagcctgttctttgccggatatgcgttttttcagatccctgccgggtacttg

SEQ ID NO: 259889 - DNA, 75 bp, synthetic construct
  source 1..75: mol_type = other DNA
gttttcgcgcattatctcgtgaatatgcgcagttaagtgatgtttcgcgctgttttaccgactggcaacaggttc

SEQ ID NO: 259890 - DNA, 75 bp, synthetic construct
  source 1..75: mol_type = other DNA
gcgtcctcactttattttacctgcatggcaaacggtaacagccgtttctatagtgcagagaaattttacgactat

SEQ ID NO: 259891 - DNA, 75 bp, synthetic construct
  source 1..75: mol_type = other DNA
cccgactatcggccacagccaccatacccgcgaagtagtgcctgtgctggtttatcagcgtggattggctgccac

SEQ ID NO: 259892 - DNA, 75 bp, synthetic construct
  source 1..75: mol_type = other DNA
gacgacccaggaagccgccgcacccgtcgcgcctgagttcaattactgctggctcgacaagctgattcgcacaaa

SEQ ID NO: 259893 - DNA, 75 bp, synthetic construct
  source 1..75: mol_type = other DNA
acccgatcgcttacagcgtgatcaacatgggtggtcagttgggcggaatgtgtatgccactgattgtgggaatta

SEQ ID NO: 259894 - DNA, 75 bp, synthetic construct
  source 1..75: mol_type = other DNA
cgttggccagtttacttccctgctattaaccgttcagtctgttctttctacctctttagctggagtgaatcttaa

SEQ ID NO: 259895 - DNA, 75 bp, synthetic construct
  source 1..75: mol_type = other DNA
cgtgataatagcgtccatgatataaccttgacggccgatatgggtaatggtgatgacaccatttatattggtcag

SEQ ID NO: 259896 - DNA, 75 bp, synthetic construct
  source 1..75: mol_type = other DNA
tgacgctaatcaagtagctgtcgacgctgaaaagggaagcatcacattagactccaattcatcttcgcaggctct

SEQ ID NO: 259897 - DNA, 75 bp, synthetic construct
  source 1..75: mol_type = other DNA
acatgctaatggaaagcgacgataagaaactgttgatggcttccgatgctggctacggattcgtctgcaccttta

SEQ ID NO: 259898 - DNA, 75 bp, synthetic construct
  source 1..75: mol_type = other DNA
ttgcaggagccgaaaatgctgcctgcccgcctgccgaatattttgcttaacggcaccaccggtattgctgtcggg

SEQ ID NO: 259899 - DNA, 75 bp, synthetic construct
  source 1..75: mol_type = other DNA
acgatctggtggcgcgtaatcgtgcgggtaaagcattgatcaccttaccggaaaatgcgcatgtcatgccgccgg

SEQ ID NO: 259900 - DNA, 75 bp, synthetic construct
  source 1..75: mol_type = other DNA
atggggcatcaggaaattttaggcacgcgcccgttaccgccgctgcggatgccctttcgcgatgtgattgaccgt

SEQ ID NO: 259901 - DNA, 75 bp, synthetic construct
  source 1..75: mol_type = other DNA
caaaagcttgggacgaggcaagtccacactgggaggaatggcaaagcgcaatcaagatcagcgaattattggata

SEQ ID NO: 259902 - DNA, 75 bp, synthetic construct
  source 1..75: mol_type = other DNA
agtgggcgtaccaaccgtgctggtggggaaagtggcggatattgccagtaatccttatggcgtgagctggcaaaa

SEQ ID NO: 259903 - DNA, 75 bp, synthetic construct
  source 1..75: mol_type = other DNA
tctgatgtaggcgccacggtatgtgaatttttccgtgcgccgccgccacaaaacggcagctcttttttatcttct

SEQ ID NO: 259904 - DNA, 75 bp, synthetic construct
  source 1..75: mol_type = other DNA
atgaataaaaatattgccatgatgggcaaggggaatgcacgtccagtgaaaaaattctgcgatattcgtgatcag

SEQ ID NO: 259905 - DNA, 75 bp, synthetic construct
  source 1..75: mol_type = other DNA
ctgggtattcaggaatgtgataccaggtatcagaaaaacgggggcttatggtatcccgtggggtgcattacagga

SEQ ID NO: 259906 - DNA, 75 bp, synthetic construct
  source 1..75: mol_type = other DNA
gggagctacaggcatgtaagcgcaaaaagcgtgaactggaggaagaagaaaaaaggctgatacgtgaatatcagc

SEQ ID NO: 259907 - DNA, 75 bp, synthetic construct
  source 1..75: mol_type = other DNA
caatctcgaagcggatttaggccaggtctataacgttaccgccaatctctccgtaataccgttcgatgaagtcat

SEQ ID NO: 259908 - DNA, 75 bp, synthetic construct
  source 1..75: mol_type = other DNA
tcgtgatggcggatcacggtaacgatccgaccattggtcacagccaccatacccgcgaagtggtgccagtgctgg

SEQ ID NO: 259909 - DNA, 75 bp, synthetic construct
  source 1..75: mol_type = other DNA
ggcacgcgcccgttaccgccgctgcggatgccttttcgcgatgtgattgaccgtgttgagcaggcattagtttcc

SEQ ID NO: 259910 - DNA, 75 bp, synthetic construct
  source 1..75: mol_type = other DNA
cttgggttaatcaatgcactggggtatgcaccgggtgatatgcagtcatcggatttcgctgtctggggtgtggcg

SEQ ID NO: 259911 - DNA, 75 bp, synthetic construct
  source 1..75: mol_type = other DNA
agtttttccgtgcgccaccgccacaaaatggtcgctcttttctttcttccctccggtttgcaggagacaccctat

SEQ ID NO: 259912 - DNA, 75 bp, synthetic construct
  source 1..75: mol_type = other DNA
catttggtggcctgttaaccgacagccagtgcatcctcgatgccgcagaaagcaaagaagggcgctttattggca

SEQ ID NO: 259913 - DNA, 75 bp, synthetic construct
  source 1..75: mol_type = other DNA
ctgtctattggcgtttaccccgatgtaacgcttgccgacgctcgtgagaaacgcagtgaagccaggaaaatactt

SEQ ID NO: 259914 - DNA, 75 bp, synthetic construct
  source 1..75: mol_type = other DNA
acctttgagaaagatatcttcccctatatcggtaaacgtcctatagccgaaatcaaaccaatggagctactggaa

SEQ ID NO: 259915 - DNA, 75 bp, synthetic construct
  source 1..75: mol_type = other DNA
ataatcactaaaaatgcaactaaaattgtgatgcttactggagtcaggacacaggaaatgcgttttgccacttgg

SEQ ID NO: 259916 - DNA, 75 bp, synthetic construct
  source 1..75: mol_type = other DNA
ctgaatacaatcctgcgcctgatttagccatcgctctggccgttcctaagcaaaaacatcatccatttctatctg

SEQ ID NO: 259917 - DNA, 75 bp, synthetic construct
  source 1..75: mol_type = other DNA
acaccatgagtaccattctacacgaacagggctttaattccgcttggattgaaacgcagttagctcatgtagata

SEQ ID NO: 259918 - DNA, 75 bp, synthetic construct
  source 1..75: mol_type = other DNA
aggctgacggggcacggtttccgccacacgatgagtactattctgcatgaaaaaggctttaactcagcgtggatt

SEQ ID NO: 259919 - DNA, 75 bp, synthetic construct
  source 1..75: mol_type = other DNA
gaaaatgcgtaggcctcatattgttcctttatccgctcaggtagttgatctctttaaacagctcaagcctatcac

SEQ ID NO: 259920 - DNA, 75 bp, synthetic construct
  source 1..75: mol_type = other DNA
ctaaaggtgtgcgaacagacgtctacatcatgaagaaaaagcaggtagaggcgctttatcccgtcacgatacggg

SEQ ID NO: 259921 - DNA, 75 bp, synthetic construct
  source 1..75: mol_type = other DNA
acccggaaagccgcgcccgcacgcaggatctgctgtatgacgcacgtctgtgcctggaaggctgcgagctgtgcg

SEQ ID NO: 259922 - DNA, 75 bp, synthetic construct
  source 1..75: mol_type = other DNA
gaagatgcgtaggccacacatagtcccgctttcaaggcaggttataaggctatttcaacaactaaaaccgatcac

SEQ ID NO: 259923 - DNA, 75 bp, synthetic construct
  source 1..75: mol_type = other DNA
gcaaacggcattgatccagtagcagagcgtaaggctcagaaaattgctcagaaattatcaactgaaaactctttt

SEQ ID NO: 259924 - DNA, 75 bp, synthetic construct
  source 1..75: mol_type = other DNA
aaaataatattcgaggtacctataatcatgctcagtatatagaaaaaagaagatatatgttgcagtggtatgctg

SEQ ID NO: 259925 - DNA, 75 bp, synthetic construct
  source 1..75: mol_type = other DNA
agatctggaggcttacactggcagcataatcactaaaaatgcaaccaagattgtgatgcttaccggagtaagaac

SEQ ID NO: 259926 - DNA, 75 bp, synthetic construct
  source 1..75: mol_type = other DNA
tgatgatctggcagaacaggcgcagacgttatcaaaccgcgcttatgaagaagcggcgcaacgtctgccaggaac

SEQ ID NO: 259927 - DNA, 75 bp, synthetic construct
  source 1..75: mol_type = other DNA
actattacagcctgtatgaacgttattttgcgccgcgcggcattgctatgctgactattgatatgccgtcggtgg

SEQ ID NO: 259928 - DNA, 75 bp, synthetic construct
  source 1..75: mol_type = other DNA
ctgcatgcggctacgttgtacaacattgctgcctatcctcatctgaaaggagatgacctggccgagcaagcgcag

SEQ ID NO: 259929 - DNA, 75 bp, synthetic construct
  source 1..75: mol_type = other DNA
tcaggggcgcgcattggggcgtgacggcgtgattgaagtgacggtgacaattcgtgataaccaaccggaaaaagt

SEQ ID NO: 259930 - DNA, 75 bp, synthetic construct
  source 1..75: mol_type = other DNA
ggcaatgccaatggcccgatgggcgcatggttggtacatcacaacgtattgcctcacgatggcaacgagttgcgt

SEQ ID NO: 259931 - DNA, 75 bp, synthetic construct
  source 1..75: mol_type = other DNA
atgaaaccgcaggtgtaccacgtcgatgcttttacctctcaaccatttcgcggcaattctgccggtgttgttttc

SEQ ID NO: 259932 - DNA, 75 bp, synthetic construct
  source 1..75: mol_type = other DNA
ctttgcgggctacccggtcgttactgaagaaaacgaactggtcggcatcatcaccggtcgtgacgtgcgttttgt

SEQ ID NO: 259933 - DNA, 75 bp, synthetic construct
  source 1..75: mol_type = other DNA
gaggctcgctgaatatcatggcagtcctgttacccgcatggcgacaaatctgcttcttctgacaggcctcagaac

SEQ ID NO: 259934 - DNA, 75 bp, synthetic construct
  source 1..75: mol_type = other DNA
taacgctagccgatgctcgcgagaaacgcagtgaagccaggaaactcctcgctgctggaggcgatccaggggagg

SEQ ID NO: 259935 - DNA, 75 bp, synthetic construct
  source 1..75: mol_type = other DNA
ccgcggcggcaactggatttatgagtgggctacccaggcgatggtgtggcaacaaaaagcctgtgcggaagaaga

SEQ ID NO: 259936 - DNA, 75 bp, synthetic construct
  source 1..75: mol_type = other DNA
actgccgcacggtactggccgttccgttcgcgtagccgtatttacccaaggtgcaaacgctgaagctgctaaagc

SEQ ID NO: 259937 - DNA, 75 bp, synthetic construct
  source 1..75: mol_type = other DNA
ctgaagctgctaaagctgcaggcgcagaactggtaggtatggaagatctggctgaccagatcaagaaaggcgaaa

SEQ ID NO: 259938 - DNA, 75 bp, synthetic construct
  source 1..75: mol_type = other DNA
tctcactgaggacgatattctgccaggcttgccaattcaggtagcaacaacaggacactcaaaagtgatgatccc

SEQ ID NO: 259939 - DNA, 75 bp, synthetic construct
  source 1..75: mol_type = other DNA
aacggtgacaattcgcgataaccagccggagaaagttaccatttccggcacggcggtgattttgtttcatgccga

SEQ ID NO: 259940 - DNA, 75 bp, synthetic construct
  source 1..75: mol_type = other DNA
accataaagccactgccgccgcgctggaagggcgtccactgaaaacgctggttatcagcactgcgacccgtttta

SEQ ID NO: 259941 - DNA, 75 bp, synthetic construct
  source 1..75: mol_type = other DNA
ttgtttggaagtctatcaagagatgatattctcggacagattcaaagagtaaacgcaaatattacttctcttgtt

SEQ ID NO: 259942 - DNA, 75 bp, synthetic construct
  source 1..75: mol_type = other DNA
catctccagagaaaaaacagtatcccctgaaacgccgggaattggttaagcgcttcctgtccagcgtttctctgc

SEQ ID NO: 259943 - DNA, 75 bp, synthetic construct
  source 1..75: mol_type = other DNA
gttggggtgattggatctggtgagttccaggtatcgcgccatatcaacgttgccacggttcagacccttgctagt

SEQ ID NO: 259944 - DNA, 75 bp, synthetic construct
  source 1..75: mol_type = other DNA
ccgcaagcagatgctttttttctggattttgccatcaatgatgacggggaacgtccggagctgacgaaaataatg

SEQ ID NO: 259945 - DNA, 75 bp, synthetic construct
  source 1..75: mol_type = other DNA
tattgtgctgttcaacgtggtgcatctcggtttgcgttttggtcttgcacattatgcttaccgcatgggcgtggc

SEQ ID NO: 259946 - DNA, 75 bp, synthetic construct
  source 1..75: mol_type = other DNA
atgttctggctgacgctgctgccgatttgtggcgggataggcgcaagcctcgcgctacaaggctctattcttggc

SEQ ID NO: 259947 - DNA, 75 bp, synthetic construct
  source 1..75: mol_type = other DNA
ttatttgctggaagatcgtgaactttacccgacggatggcaacgggcatttcttttgggcggcaacggaccatag

SEQ ID NO: 259948 - DNA, 75 bp, synthetic construct
  source 1..75: mol_type = other DNA
attaccgcccagcgcatgggagagtttcggccctgataagcacatcagcccatccgaaacctggtcagaagagtt

SEQ ID NO: 259949 - DNA, 75 bp, synthetic construct
  source 1..75: mol_type = other DNA
ggtttttgtctgctctcgaaaactggaatcgcccgtggtctggcatgacggacgcttttgccgcgctgacaccgc

SEQ ID NO: 259950 - DNA, 75 bp, synthetic construct
  source 1..75: mol_type = other DNA
tgagttatatcagcagataaaagctgtctatccttcgttgccaagttatgaacacggtacgagaaaatattatga

SEQ ID NO: 259951 - DNA, 75 bp, synthetic construct
  source 1..75: mol_type = other DNA
atcagcagtttatccagacgctggaaaaagccattactcagcatcgccagcaacttaatcagtggacgcagaaag

SEQ ID NO: 259952 - DNA, 75 bp, synthetic construct
  source 1..75: mol_type = other DNA
ccgggatgaccagcaaccgctggatcaactatcagcagtttatccagacgctggaaaaagccattactcagcatc

SEQ ID NO: 259953 - DNA, 75 bp, synthetic construct
  source 1..75: mol_type = other DNA
agccattcaatgtcgggattttcgatgaaacgtgtttctcaaatgaccgcgctggcaatggctttagggctggct

SEQ ID NO: 259954 - DNA, 75 bp, synthetic construct
  source 1..75: mol_type = other DNA
ggtagaaacctgtctgcatgtgccgtggaaatatatcgccccttctctgccctatatcgatctgtttcttgccga

SEQ ID NO: 259955 - DNA, 75 bp, synthetic construct
  source 1..75: mol_type = other DNA
acccggaaagccgcgcccgcacgcaggatctgctgtatgacccacgactgtgtctggaaggctgcgagctgtgcg

SEQ ID NO: 259956 - DNA, 75 bp, synthetic construct
  source 1..75: mol_type = other DNA
ccctgaaagatctggcagaaaaagaggtagaggatgccgcgcgcctgctgggtgaaatgcgtcgcggatgtcagc

SEQ ID NO: 259957 - DNA, 75 bp, synthetic construct
  source 1..75: mol_type = other DNA
acagaaattcaggtgtcatttgacaaaatgtcgttgtacgaagtggacggatataaaaacgcgaagacaacaacg

SEQ ID NO: 259958 - DNA, 75 bp, synthetic construct
  source 1..75: mol_type = other DNA
aaaatgttccgtcagcttttcaggtgggttatatcaatgactttggtggattaagtttttatgaaataaactgcc

SEQ ID NO: 259959 - DNA, 75 bp, synthetic construct
  source 1..75: mol_type = other DNA
gccgacagcaggtggctggggtggcatccctcagattgcatttaccgactataaaggagcaccggtagagctcaa

SEQ ID NO: 259960 - DNA, 75 bp, synthetic construct
  source 1..75: mol_type = other DNA
atgctctgcgtgaaagatgtttcgctacgtttgcctgaaaggcctttgctgacaaacgttaactttacggtcaat

SEQ ID NO: 259961 - DNA, 75 bp, synthetic construct
  source 1..75: mol_type = other DNA
ttacaggatgttcccgctggtggcctggttctggatatgatgcagtggtcagaaaattacaacaaactgcgataa

SEQ ID NO: 259962 - DNA, 75 bp, synthetic construct
  source 1..75: mol_type = other DNA
tacgtttgccaggaaccagcttactaaagaacgtcaactttacggccaccaaaggtgacattgtcacgttaatgg

SEQ ID NO: 259963 - DNA, 75 bp, synthetic construct
  source 1..75: mol_type = other DNA
gcgtaaaggtctgggtatcggtggcactaaagatggcaccgaagaaccgtggtacgtcgtcgataaagaggtcga

SEQ ID NO: 259964 - DNA, 75 bp, synthetic construct
  source 1..75: mol_type = other DNA
taatggaaaagacatcagatgcagttgtagtacctatgaatgctgaatggagcgatgttggttcttgggctgcat

SEQ ID NO: 259965 - DNA, 75 bp, synthetic construct
  source 1..75: mol_type = other DNA
ttgaaaaggacgcaatgcgctcagtcgcgctccacgctatcgttgattttttcaacaggcataactcacccagcg

SEQ ID NO: 259966 - DNA, 75 bp, synthetic construct
  source 1..75: mol_type = other DNA
gcggaaggtaaacttatttacacctgtggtcaggcggtcgccatcgacggcggcttaagtatgccgcgcttctga

SEQ ID NO: 259967 - DNA, 75 bp, synthetic construct
  source 1..75: mol_type = other DNA
cggcgaatatgacctttttgatttaatggcgcaggttactgaagagaacctgcacgccccggtggattttgggcc

SEQ ID NO: 259968 - DNA, 75 bp, synthetic construct
  source 1..75: mol_type = other DNA
atgccatctgaatatgatgaacaacggggttcgactgatacgcagcttcccggcgaatatgacctttttgattta

SEQ ID NO: 259969 - DNA, 75 bp, synthetic construct
  source 1..75: mol_type = other DNA
gtcctacggttaacagcggcatttatcgcgagcttgaagctattttcgacgaaccactgctttggctggaaagcg

SEQ ID NO: 259970 - DNA, 75 bp, synthetic construct
  source 1..75: mol_type = other DNA
tgcgatatatgtcacaaatattttattctggttttgtcggtaatgaataatctgacaattaattatggctcgcaa

SEQ ID NO: 259971 - DNA, 75 bp, synthetic construct
  source 1..75: mol_type = other DNA
actgaagagatgctggcgatcgcagttgagacgaagccgcacttttgctgtctggtaccggaaaagcgccaggaa

SEQ ID NO: 259972 - DNA, 75 bp, synthetic construct
  source 1..75: mol_type = other DNA
atggctgaattactgttaggcgtcaacattgaccatatcgcaacgctgcgtaatgcgcgtggtactgcttacccg

SEQ ID NO: 259973 - DNA, 75 bp, synthetic construct
  source 1..75: mol_type = other DNA
acccgcaccaccagcggtaacgtctctgcccccgcgcagtctactcaggatggcgcgcctgccgaaccgcagtaa

SEQ ID NO: 259974 - DNA, 75 bp, synthetic construct
  source 1..75: mol_type = other DNA
atgaaactctcaacttgctgtgccgcgcttctgctcgcactcacctcacccgcggtactcgccgcgccgggatcc

SEQ ID NO: 259975 - DNA, 75 bp, synthetic construct
  source 1..75: mol_type = other DNA
atgaaactttcattaaaagaatatattgaattgtattacagcactcagcgggatttcgctaccgcccttaaagtt

SEQ ID NO: 259976 - DNA, 75 bp, synthetic construct
  source 1..75: mol_type = other DNA
gctttttcgccggcgctgcgcgctgcctgaatggtctggcggcgggtgaatatcttgaaggtcatacatcaatga

SEQ ID NO: 259977 - DNA, 75 bp, synthetic construct
  source 1..75: mol_type = other DNA
tctgaatggtctggcggcgggtgaatatctcgaaggacatacttcgatgatccgccgcgatccgatcggcgtcgt

SEQ ID NO: 259978 - DNA, 75 bp, synthetic construct
  source 1..75: mol_type = other DNA
atgaaatccactcgtcctgttgccgttatcactggagccgcacgtggcattggtaaggggtgtgcgctggagctt

SEQ ID NO: 259979 - DNA, 75 bp, synthetic construct
  source 1..75: mol_type = other DNA
tgcgttacaagaagatgccatcgttcaaagagaggtatttggcccggtagtgagcgtgacggccttcgacaacga

SEQ ID NO: 259980 - DNA, 75 bp, synthetic construct
  source 1..75: mol_type = other DNA
gtcgtatctacgcgcaaaaaggtatttacgacgcgctggtggaaaaactcggtgccgcagtggcaacgttaaaat

SEQ ID NO: 259981 - DNA, 75 bp, synthetic construct
  source 1..75: mol_type = other DNA
tggctccggcgctggcggcagggaactgcgtagtgcttaaaccatcagaaattacgccgctgacagcgttgaagc

SEQ ID NO: 259982 - DNA, 75 bp, synthetic construct
  source 1..75: mol_type = other DNA
tgtaatgcagcgtaaaaataaggtagttatggcagtcgccggggcaacagtcgcatcaccggcctttgcggatgg

SEQ ID NO: 259983 - DNA, 75 bp, synthetic construct
  source 1..75: mol_type = other DNA
gcctttcactggtcacggtgactattgcctgtctgtgggtcggctacaaggttctgtttggtggaagcacgattc

SEQ ID NO: 259984 - DNA, 75 bp, synthetic construct
  source 1..75: mol_type = other DNA
ctaaagctttcaagaaagcggaggcgagtttatatttatcaaacaaagatccgcgagggttaccatactatgaac

SEQ ID NO: 259985 - DNA, 75 bp, synthetic construct
  source 1..75: mol_type = other DNA
cgtagaaaaactgcatatcacacaacaagaatgtttggcagaaggcgtggaagtcatttgcttccctgccgatgt

SEQ ID NO: 259986 - DNA, 75 bp, synthetic construct
  source 1..75: mol_type = other DNA
aagatgccgacttcgtcttcattcagccgaatagcagctatgttcttaccaatgacgatctggaatatcgccaca

SEQ ID NO: 259987 - DNA, 75 bp, synthetic construct
  source 1..75: mol_type = other DNA
gaagtgactcgtgcacgtcaggaaggtcaggatgttacctgtgaatcctgcccgcattactttgtactggatacc

SEQ ID NO: 259988 - DNA, 75 bp, synthetic construct
  source 1..75: mol_type = other DNA
ccagacggaccaacgaatctttccgcatggatgaggcttaagaataaagaattgccgccttctgttcatctgtat

SEQ ID NO: 259989 - DNA, 75 bp, synthetic construct
  source 1..75: mol_type = other DNA
actgattgataaaccttctctgcatactgcaatagatcgttaccgaaatattgtacgagaggcagggatgaatgg

SEQ ID NO: 259990 - DNA, 75 bp, synthetic construct
  source 1..75: mol_type = other DNA
aaacatattaaaacttcccatattgaaaagtatattgagagcaggaaggcagacaatttgtctctaaggacgtta

SEQ ID NO: 259991 - DNA, 75 bp, synthetic construct
  source 1..75: mol_type = other DNA
gatattaatgagccagacggaccaacgaatctttccgcatggataaggcttaagaataaagaattgccgccttct

SEQ ID NO: 259992 - DNA, 75 bp, synthetic construct
  source 1..75: mol_type = other DNA
gcgaggagcagtttaccgaagctctgtcacttgcagctcgcgttccgcttgaaggcgagttaatcggcaaacaag

SEQ ID NO: 259993 - DNA, 75 bp, synthetic construct
  source 1..75: mol_type = other DNA
gagagacgttttaatcaaccacacacgagatgttgatatcaatgagccagacggaccaacgaatctttccgcatg

SEQ ID NO: 259994 - DNA, 75 bp, synthetic construct
  source 1..75: mol_type = other DNA
aaattgctgaccagccaggggccgggtacagctatcgactttggtctgaaaattatcgacctgctggttgggcgc

SEQ ID NO: 259995 - DNA, 75 bp, synthetic construct
  source 1..75: mol_type = other DNA
aatccgtgaatgcccgaaatgggatggtcgcccacttacgcttgatgtcagtgccaccttcccggaaggtgcgcc

SEQ ID NO: 259996 - DNA, 75 bp, synthetic construct
  source 1..75: mol_type = other DNA
tacgacctggcagcaaatggcagagaaattgcaggatttcaacgtgttgagctatctttcgtcgcatgatactcg

SEQ ID NO: 259997 - DNA, 75 bp, synthetic construct
  source 1..75: mol_type = other DNA
gatgatggcagatccaaaacatgagcgtctgagtaataaagcactcggtattgccggtggcagccgcaaaggtac

SEQ ID NO: 259998 - DNA, 75 bp, synthetic construct
  source 1..75: mol_type = other DNA
aggcaaattaaagtcaggcacgttgaactttatatggatagccgtaaaaatgatggagtggctaacagaacatta

SEQ ID NO: 259999 - DNA, 75 bp, synthetic construct
  source 1..75: mol_type = other DNA
aagcatataaagacggtacatattcaaaaatatattcatagccgacagagtgaaaatatatcaagtcgcacgctt

SEQ ID NO: 260000 - DNA, 75 bp, synthetic construct
  source 1..75: mol_type = other DNA
ctctgggaactacgcttctggtggggtgtgcgagttccggtacagatcagcaagggcgttctgacccgttagaag

SEQ ID NO: 260001 - DNA, 75 bp, synthetic construct
  source 1..75: mol_type = other DNA
acaggcgcaagagctggcgcgcattacgaaagccgcgacctttgcggcaagcctcggtctgaaagttaacgctgg

SEQ ID NO: 260002 - DNA, 75 bp, synthetic construct
  source 1..75: mol_type = other DNA
acattgaccatattgcaacgctgcgtaacgcacgcggtactgcttacccggatccggtgcaggcggcgtttattg

SEQ ID NO: 260003 - DNA, 75 bp, synthetic construct
  source 1..75: mol_type = other DNA
caccgctacgcgatgcagtaaacatgctggtaggaaagaaaggacttcgctatgacgatgcatacaatatggttc

SEQ ID NO: 260004 - DNA, 75 bp, synthetic construct
  source 1..75: mol_type = other DNA
gtaacaaccgaaggcggcctggacgtcgctggacagcgtgaaaaaatgcgcgatgcctgcaaacgtctggcggag

SEQ ID NO: 260005 - DNA, 75 bp, synthetic construct
  source 1..75: mol_type = other DNA
tgcacgaactgaatataggtcatgccattattggtcgcgcagtaatgaccggactgaaagatgccgtggcagaaa

SEQ ID NO: 260006 - DNA, 75 bp, synthetic construct
  source 1..75: mol_type = other DNA
gtctcggtctgaaagttaacgctggtcacggtctgacctatcacaacgtgaaagctattgccgccatccctgaga

SEQ ID NO: 260007 - DNA, 75 bp, synthetic construct
  source 1..75: mol_type = other DNA
ccaaccgctcacaggcattattccgcgaactgtatccggcgctaaagcaaattcaatcaaactattttggcaggt

SEQ ID NO: 260008 - DNA, 75 bp, synthetic construct
  source 1..75: mol_type = other DNA
cttccagcgtcatgacttcattgccaatggcggtgaacttaaaccgcaggaaaacccgaacgcgcaagcaattca

SEQ ID NO: 260009 - DNA, 75 bp, synthetic construct
  source 1..75: mol_type = other DNA
atggtccactttacccgctttttcctgaacaccattttggggatgggcggttttattgatgttgcagggatggcg

SEQ ID NO: 260010 - DNA, 75 bp, synthetic construct
  source 1..75: mol_type = other DNA
ggaagccattaaacaactcgtcatgagtcgcggtcagtctctgccaaaagaaaaacaggcgaaggcgatgatcac

SEQ ID NO: 260011 - DNA, 75 bp, synthetic construct
  source 1..75: mol_type = other DNA
ttgatattaatgagccagacggaccaacgaatctttccgcatggatgagacttaagaataaagaattacctcctt

SEQ ID NO: 260012 - DNA, 75 bp, synthetic construct
  source 1..75: mol_type = other DNA
ctactatcaacgtgccatttcacggcgcagagctttatgtcgtcaatcacaacggcgaaccgtacaccccaatga

SEQ ID NO: 260013 - DNA, 75 bp, synthetic construct
  source 1..75: mol_type = other DNA
cgctcgtctaatcgactgccgcaaacaactggtggccgaaggcattgctgctattcagtgtggtgctttccataa

SEQ ID NO: 260014 - DNA, 75 bp, synthetic construct
  source 1..75: mol_type = other DNA
cgaagctccggggatggcgctactgcatatcgcttatgaacgtctgctgacaggtattcacaacgaagacaccat

SEQ ID NO: 260015 - DNA, 75 bp, synthetic construct
  source 1..75: mol_type = other DNA
gaacgattactccatccttaataccgtctctgacaatctgacctacaagccagagcgtctgacgatggaaaaagg

SEQ ID NO: 260016 - DNA, 75 bp, synthetic construct
  source 1..75: mol_type = other DNA
ttcagaatatagttggcacttttgggcgtactcagctttttaaagatgcgcttaattcaggaccatttagtcaaa

SEQ ID NO: 260017 - DNA, 75 bp, synthetic construct
  source 1..75: mol_type = other DNA
aaagttgatacaggacgtaagttgctgtccgcacaaggggcaacgctgttaagaacagcaatgctggattattat

SEQ ID NO: 260018 - DNA, 75 bp, synthetic construct
  source 1..75: mol_type = other DNA
gaaacttttcggttatgccaaaacgggtctgctctcatcttctgccgcttcaggcgtaccgcaggttgagaatct

SEQ ID NO: 260019 - DNA, 75 bp, synthetic construct
  source 1..75: mol_type = other DNA
aggtgtttctggttctaaacaagagcagacacaaagggcaaaaaactttgaatcgcctaaagaggaagaatacag

SEQ ID NO: 260020 - DNA, 75 bp, synthetic construct
  source 1..75: mol_type = other DNA
ccgaactttatattgtgcgggataaattatttaaagagcgtcagactcgtgttactacgcgcccaagcctgatta

SEQ ID NO: 260021 - DNA, 75 bp, synthetic construct
  source 1..75: mol_type = other DNA
ctcagagcagtccccatgtaatttcaatatgtacgccaagttaggtcaaagactggtgggatctcgggaattgat

SEQ ID NO: 260022 - DNA, 75 bp, synthetic construct
  source 1..75: mol_type = other DNA
ggtggtgaacggcttgccgattattaccggtattggcgaagaaaaagtactggcgcaaattgtttctatccttaa

SEQ ID NO: 260023 - DNA, 75 bp, synthetic construct
  source 1..75: mol_type = other DNA
ggtggttaacggcttgccaattattactggtattggcgaagagaaagtattggcgcaaattgtttctatcctaaa

SEQ ID NO: 260024 - DNA, 75 bp, synthetic construct
  source 1..75: mol_type = other DNA
tacatttttatcagacactggttctgattttgctgaaccagtaacaaccaccacagccacaggaaagattcaatc

SEQ ID NO: 260025 - DNA, 75 bp, synthetic construct
  source 1..75: mol_type = other DNA
ctgcactgcccgttggtgtgcccgttccgtggtcctcagcaacaccaccaacgggctggctgaaatgtaacggtg

SEQ ID NO: 260026 - DNA, 75 bp, synthetic construct
  source 1..75: mol_type = other DNA
aaacaagagaaaacgcgtttgctgcttttaccatgggaccgctgactgatttctggcgtcagcgtgatgaagcag

SEQ ID NO: 260027 - DNA, 75 bp, synthetic construct
  source 1..75: mol_type = other DNA
ccggaacgccaacaacaccaacagcggcacaggggactaatagtacccagatcgcaagcacggctttcgttatgg

SEQ ID NO: 260028 - DNA, 75 bp, synthetic construct
  source 1..75: mol_type = other DNA
tatgaccttgctaacgggaaatacactgcacaggatgccaccaccgcgcgaaaaggtcttgtccagctcagtagc

SEQ ID NO: 260029 - DNA, 75 bp, synthetic construct
  source 1..75: mol_type = other DNA
gatccgcatctcgggcatgttaatcgctttaatgattatgttgatgatctggcggcattctggcaacaggaggtt

SEQ ID NO: 260030 - DNA, 75 bp, synthetic construct
  source 1..75: mol_type = other DNA
gggacgttccggtcgcctgttagccgatccgcatcttgggcatgttaatcgctttaatgattatgttgatgatct

SEQ ID NO: 260031 - DNA, 75 bp, synthetic construct
  source 1..75: mol_type = other DNA
ttgaaaaggacgctatgcgctcagtcgcgctccacgccatcgttgaatttttcaacaggcataacttacccagcg

SEQ ID NO: 260032 - DNA, 75 bp, synthetic construct
  source 1..75: mol_type = other DNA
acttctttaagcgaagattactggcagcgccactatgtaggtgctcgtcgggtaatgaccccaaaaacacttcgc

SEQ ID NO: 260033 - DNA, 75 bp, synthetic construct
  source 1..75: mol_type = other DNA
tacgaccaaaagcaaaaccgcttcttccgttaaaaaatcttccattaccgcttctaaaaacgccaaaactcgcag

SEQ ID NO: 260034 - DNA, 75 bp, synthetic construct
  source 1..75: mol_type = other DNA
gaggaacactccctcgatgaagagccggttgaggttgtcctgccagaatcagttatgagcgatgcagagctattc

SEQ ID NO: 260035 - DNA, 75 bp, synthetic construct
  source 1..75: mol_type = other DNA
tggcctcagtggagctgactattgacaccacaacggtgatggcaacgcaggattacgttgatgacaagattgcag

SEQ ID NO: 260036 - DNA, 75 bp, synthetic construct
  source 1..75: mol_type = other DNA
gcaaccaccaaaaagaccaataaagccagccagaaaacagcgaaaaaagccgccagtaaaagtactactaaaaat

SEQ ID NO: 260037 - DNA, 75 bp, synthetic construct
  source 1..75: mol_type = other DNA
gtgaaagtcaaaaatgctacacagggaaccatcgccgacgcgcataaagccaaaatacagaaagccacaaaagtg

SEQ ID NO: 260038 - DNA, 75 bp, synthetic construct
  source 1..75: mol_type = other DNA
ccggagaaccgcaggacgctgacactccctgataacctgcctgaaacgaaacaggcgcttgctgagggcgtcacg

SEQ ID NO: 260039 - DNA, 75 bp, synthetic construct
  source 1..75: mol_type = other DNA
cagcgagctggtgaatgcgattaacgactctgacgataaccccggcgtttcagcggcactggtaaaaaccgatgg

SEQ ID NO: 260040 - DNA, 75 bp, synthetic construct
  source 1..75: mol_type = other DNA
cactcaggcggcaaacttgcaggaaaagcaaacggagctggatgctgaaagcagcggcctggactcgctcagctc

SEQ ID NO: 260041 - DNA, 75 bp, synthetic construct
  source 1..75: mol_type = other DNA
attattttttattatatgcttcaaatggagtcatgaaaaaaataacacattcactattaaggagaaaggagacta

SEQ ID NO: 260042 - DNA, 75 bp, synthetic construct
  source 1..75: mol_type = other DNA
atcaacagtcgatacaaaaacaatcagaaaataagaatattgcgtaacaagacaaatttaggtgttgcagaaagt

SEQ ID NO: 260043 - DNA, 75 bp, synthetic construct
  source 1..75: mol_type = other DNA
gtctgtcggagtttctctatctgcatccgggaattgagctggagctgagtagccatgaccgtccggtagatattc

SEQ ID NO: 260044 - DNA, 75 bp, synthetic construct
  source 1..75: mol_type = other DNA
tttggcagaggcaaaacggtgggagatccgctgaccggacatcccaaagtacggatggtgtcgctgacgggctct

SEQ ID NO: 260045 - DNA, 75 bp, synthetic construct
  source 1..75: mol_type = other DNA
tgagtgttacgctctttgacaatgaagaacaggtggtaaactgggcaaatgacagccagtacggacttgcatcct

SEQ ID NO: 260046 - DNA, 75 bp, synthetic construct
  source 1..75: mol_type = other DNA
ctgacgttgaagcggttgtcgaaggtgtccgtacatttggctattacaatgccgggcaagattgtactgctgcct

SEQ ID NO: 260047 - DNA, 75 bp, synthetic construct
  source 1..75: mol_type = other DNA
cgcattacaggacgatgccatcgtgcaaaaagaggtatttggtccagtagtgagtgttacgctcttcgacaacga

SEQ ID NO: 260048 - DNA, 75 bp, synthetic construct
  source 1..75: mol_type = other DNA
cggtatggacgaaagatgtgggcagggcgcatcgcgtcagcgcacggctgcttgggtcaatacccatttcatgct

SEQ ID NO: 260049 - DNA, 75 bp, synthetic construct
  source 1..75: mol_type = other DNA
tactcatatggaacttggtggcaaagcgccagtgattgtttttgatgatgcggatattgaagcggtggtcgaagg

SEQ ID NO: 260050 - DNA, 75 bp, synthetic construct
  source 1..75: mol_type = other DNA
gaatcttttaacgacccgcgaataatcattatttcgaatgctatcaatgttggagttgctcgaactcgtaataaa

SEQ ID NO: 260051 - DNA, 75 bp, synthetic construct
  source 1..75: mol_type = other DNA
aaccacgtatcagtatgctgcgtatcatcgccagcaatgagcatcatgcacgtctttcactggtccatgagtatg

SEQ ID NO: 260052 - DNA, 75 bp, synthetic construct
  source 1..75: mol_type = other DNA
tacgtcgttgctcaggcacacccatttttcgggctgcggtgcttataccttagtccctgtcagataatggtggtc

SEQ ID NO: 260053 - DNA, 75 bp, synthetic construct
  source 1..75: mol_type = other DNA
cgcgagcaaggagtccatgcgtgaatctggctttgcagtctcatctctttttttgtggcttgcgtcctggcaacc

SEQ ID NO: 260054 - DNA, 75 bp, synthetic construct
  source 1..75: mol_type = other DNA
ggtgtgaaaaatgcgataattaaagacactggcactacgactgagaccgtacaagcaacaaaaccgacaactgct

SEQ ID NO: 260055 - DNA, 75 bp, synthetic construct
  source 1..75: mol_type = other DNA
aaagcctcacagaacgatgcctctcttcccttgctggcgcagtacctgcgcgatgacggacgcatcaaccagttt

SEQ ID NO: 260056 - DNA, 75 bp, synthetic construct
  source 1..75: mol_type = other DNA
ctggtgattgacgggcaggagctggaatatttcaaccagaaagaacgctggcagcgttttaactggccggatgaa

SEQ ID NO: 260057 - DNA, 75 bp, synthetic construct
  source 1..75: mol_type = other DNA
aggtcgccgtacctgacaaaattttgcaaggacttcagcgactggcaaccataagtcatggtgcattggcattga

SEQ ID NO: 260058 - DNA, 75 bp, synthetic construct
  source 1..75: mol_type = other DNA
ggtgaggcgattgctgcctttatgcaggaagctccctttatcgggcgaacgcccgtatttctgggcgatgattta

SEQ ID NO: 260059 - DNA, 75 bp, synthetic construct
  source 1..75: mol_type = other DNA
atctggccacaaatggcgttacagcagggaaagtgtgttgtcgagatcaaaccgagaggtaccagtaaaggtgag

SEQ ID NO: 260060 - DNA, 75 bp, synthetic construct
  source 1..75: mol_type = other DNA
gcaataaccgctattcacaggaggttgccatcatggctacgaccctcaccccgtcacacccgcagtttgtctttg

SEQ ID NO: 260061 - DNA, 75 bp, synthetic construct
  source 1..75: mol_type = other DNA
ttttacgtcgttgcttcggcacacctgtttttctggctgtggtttttaaaccgtagcctctgtcagataatggtg

SEQ ID NO: 260062 - DNA, 75 bp, synthetic construct
  source 1..75: mol_type = other DNA
tggtgatccgggcggggcagccttcgggctggccggtattcattgaggccggtattcctacccccgttcgggtca

SEQ ID NO: 260063 - DNA, 75 bp, synthetic construct
  source 1..75: mol_type = other DNA
cactcattcccggctttgccgttgccgctggctggacttctcagggatttcccacctttactgaagagagcacag

SEQ ID NO: 260064 - DNA, 75 bp, synthetic construct
  source 1..75: mol_type = other DNA
ggctgggataagcgtaaagcgtatgagcgtggctatcgtgaaggctggcgcgatcgtgatgatcatcgcggaaaa

SEQ ID NO: 260065 - DNA, 75 bp, synthetic construct
  source 1..75: mol_type = other DNA
tgaaacggataccactaccctgagtcaggaaatcgacagtcgtctggatctgcgcattccccggcagggacctgc

SEQ ID NO: 260066 - DNA, 75 bp, synthetic construct
  source 1..75: mol_type = other DNA
atgagcaccttaggtcatcaatacgataactcactggtttccaatgcctttggttttttccgcctgccgatgaac

SEQ ID NO: 260067 - DNA, 75 bp, synthetic construct
  source 1..75: mol_type = other DNA
aaactaaataccgaataaaactcatatgggatgacaattataaaaaaaggaatgaagaggagtttttcatttcta

SEQ ID NO: 260068 - DNA, 75 bp, synthetic construct
  source 1..75: mol_type = other DNA
tgaaggctgagcttggtgcccgcctcgtaaaaatagccaaaaacaactatagactcaagatatttaatagaggga

SEQ ID NO: 260069 - DNA, 75 bp, synthetic construct
  source 1..75: mol_type = other DNA
atgacaacaagtgatgccatcgctttagctgcgcttgtagtatcgatttacactatcatatcatcagaagtgaag

SEQ ID NO: 260070 - DNA, 75 bp, synthetic construct
  source 1..75: mol_type = other DNA
ggcagggaagctcggtgagctaatgcaaatcacgctgctgattaaaacggaggggctgacgcaactggtccagcc

SEQ ID NO: 260071 - DNA, 75 bp, synthetic construct
  source 1..75: mol_type = other DNA
atcagggatcaacgcggatgcagcaaagtatcgatccggcgatgcgttcgccgctgcgctggtcgatttttggct

SEQ ID NO: 260072 - DNA, 75 bp, synthetic construct
  source 1..75: mol_type = other DNA
gatgcacgtctgacttctgaactggtgctgctgtttttgtatgtgggtgtgattgccctgtggcacgccttcgac

SEQ ID NO: 260073 - DNA, 75 bp, synthetic construct
  source 1..75: mol_type = other DNA
aaacggcggtgggatgtgacaccggcaatcatccgcgcagtggaatacctttcccgggtcccggtatcacactga

SEQ ID NO: 260074 - DNA, 75 bp, synthetic construct
  source 1..75: mol_type = other DNA
actgcagcgggtgctgcaaaaattgtctttgtcgtcgggattattctgttcctggtgagtttgttcatgggccga

SEQ ID NO: 260075 - DNA, 75 bp, synthetic construct
  source 1..75: mol_type = other DNA
atggaaaaagagcagctgattgaaatagccaatacgataatgccgtttggcaagtacaaagggcgtcgcttaatc

SEQ ID NO: 260076 - DNA, 75 bp, synthetic construct
  source 1..75: mol_type = other DNA
acacccgcaacatgggattgaaattttagcgggactaagctttggaagtaaaactaaataccgaataaaacttat

SEQ ID NO: 260077 - DNA, 75 bp, synthetic construct
  source 1..75: mol_type = other DNA
ttgaactgcccttcccggcttcttttttaagatcgcagcgatcaacccgtgaaatccgcgtgacactggcttact

SEQ ID NO: 260078 - DNA, 75 bp, synthetic construct
  source 1..75: mol_type = other DNA
ttttcagcattgatacatcacggcgtggagttcatcagtcaggaaggtaaacaggtctgtatcgttttcactaat

SEQ ID NO: 260079 - DNA, 75 bp, synthetic construct
  source 1..75: mol_type = other DNA
agtattgcgctgtatggtgatgttgaggcttgtaaccagagcaatttctggcagcctcaactatggctgtataat

SEQ ID NO: 260080 - DNA, 75 bp, synthetic construct
  source 1..75: mol_type = other DNA
ttacatggcggtgctgaaatgggaaccccgcgtcaccctgtcatccgtcaccactgagcgcagttttgacgggcg

SEQ ID NO: 260081 - DNA, 75 bp, synthetic construct
  source 1..75: mol_type = other DNA
cttcgcaacgcagggtgatatcaacactctgtctggtaagtgccgtattgctgtgtggtattcagcatgtgctgt

SEQ ID NO: 260082 - DNA, 75 bp, synthetic construct
  source 1..75: mol_type = other DNA
atggcattaaatgaaggtcaactggtcacgtatgctctggatgaaatcatcgaaaccgtccagaacctgacgcca

SEQ ID NO: 260083 - DNA, 75 bp, synthetic construct
  source 1..75: mol_type = other DNA
atgacgaggaataagcaacaagcaccggaaataacagcggagatgttgattaaagacagcgccgaatgcctggca

SEQ ID NO: 260084 - DNA, 75 bp, synthetic construct
  source 1..75: mol_type = other DNA
gcaatgccaagatggaaatggtttactgcctaccagctgaactgggcgtaccaaccacctccagtccgctgaaaa

SEQ ID NO: 260085 - DNA, 75 bp, synthetic construct
  source 1..75: mol_type = other DNA
gaccgtgactactggcatcgcaattatgagtggcgcaaaaaccgttggtggcgtcatgataatggctaccaccgt

SEQ ID NO: 260086 - DNA, 75 bp, synthetic construct
  source 1..75: mol_type = other DNA
atgacggcgaattatcagcatctaacgattaccaaagcaccacttcaaaacgaccgacggacccgcagagtcaat

SEQ ID NO: 260087 - DNA, 75 bp, synthetic construct
  source 1..75: mol_type = other DNA
tgtgatgaatttgttaatgatgcaaaaattgctgagacaaatgaaaattttttcaaaaaaggtagtattactact

SEQ ID NO: 260088 - DNA, 75 bp, synthetic construct
  source 1..75: mol_type = other DNA
tcagtacctgcattgattcaacaggcgaatgcaaaaaatctccgtcgtgcagcttcgtttattcgtgcaggcatt

SEQ ID NO: 260089 - DNA, 75 bp, synthetic construct
  source 1..75: mol_type = other DNA
acgctggcggtttttggtggcagcgaagctaacctgcgcgtcgggctggaaacattgctcggcgtgctcaacgcc

SEQ ID NO: 260090 - DNA, 75 bp, synthetic construct
  source 1..75: mol_type = other DNA
tcgcgcaacaaggcgaagcaagcaaaagcgagaagaaatccattattgacatggtgaacgagctacgcagtaaag

SEQ ID NO: 260091 - DNA, 75 bp, synthetic construct
  source 1..75: mol_type = other DNA
gttactaattcatttaaaagtgaattagtggcaagaggtattgatggagataagatagagattgttctaaatgga

SEQ ID NO: 260092 - DNA, 75 bp, synthetic construct
  source 1..75: mol_type = other DNA
tgaagttcctgaggctgttaaagagttagatcaattcccggaacgccatctgaaaattaacgtgaaattcattta

SEQ ID NO: 260093 - DNA, 75 bp, synthetic construct
  source 1..75: mol_type = other DNA
aggtggataaacattcacgtttagcggcgtcaatgatgattgttatcgcccaggcgaccagtatctggaacgttg

SEQ ID NO: 260094 - DNA, 75 bp, synthetic construct
  source 1..75: mol_type = other DNA
tcagtctatacatgggcagggtgttggtcgggcgctggtacgtgacgccgggctgcgggtgattcaggtggctga

SEQ ID NO: 260095 - DNA, 75 bp, synthetic construct
  source 1..75: mol_type = other DNA
ctgcgttcctggaacgagtggtaccaagctaatgcaggaaaggagggaaacgaagcctggcctgccagttctctc

SEQ ID NO: 260096 - DNA, 75 bp, synthetic construct
  source 1..75: mol_type = other DNA
catcctgttattacagcacggcacgttctcgcaggagtttcactcgccggtcaatgtggatgagctgatgtccgc

SEQ ID NO: 260097 - DNA, 75 bp, synthetic construct
  source 1..75: mol_type = other DNA
gctccggcatacgatcagtcggaaatcaccgctctggctgcggcgacgctggcgctggagatgctgtatattcag

SEQ ID NO: 260098 - DNA, 75 bp, synthetic construct
  source 1..75: mol_type = other DNA
cggcggcctggacccgaccagtgttgatggcgcgatggaaaaatccctcgacaccatgttccagattgcgctgga

SEQ ID NO: 260099 - DNA, 75 bp, synthetic construct
  source 1..75: mol_type = other DNA
tatgcgctacattcgtaatattgaagctggtaaaaaagcaatgatcaagcttatgcgaaatgcctttgatgaata

SEQ ID NO: 260100 - DNA, 75 bp, synthetic construct
  source 1..75: mol_type = other DNA
ggactggtcacagcgttagggttggcggcgccatcgaacttgctgatgccgggtacacgcacttgcagatcatgg

SEQ ID NO: 260101 - DNA, 75 bp, synthetic construct
  source 1..75: mol_type = other DNA
cagcagcgggtaataatgtaccggtaaaatatcgtctgacggaccttatgcagaatggtacacaatatatggcta

SEQ ID NO: 260102 - DNA, 75 bp, synthetic construct
  source 1..75: mol_type = other DNA
gatggtaatcgtattctccgctgggacagaagttatgtttctcatgcaaaaaatcactggcggaaagttgctcct

SEQ ID NO: 260103 - DNA, 75 bp, synthetic construct
  source 1..75: mol_type = other DNA
atggtaatactgcgatgattatccagaaaggttctggtaataaagcaaatattacacagtatggtactcaaaaaa

SEQ ID NO: 260104 - DNA, 75 bp, synthetic construct
  source 1..75: mol_type = other DNA
agtattagtgatatcaaatctaaatttaagcagaggcaagagaagcttgatgcctatcaacgttctgttacaggt

SEQ ID NO: 260105 - DNA, 75 bp, synthetic construct
  source 1..75: mol_type = other DNA
ggcagatgaaaatggccaacctggcggtggcggcgatggcccccattggtgccgtgtttacctttattgccctgg

SEQ ID NO: 260106 - DNA, 75 bp, synthetic construct
  source 1..75: mol_type = other DNA
aggcggctaattcagatattcgcgtatctgatgttacgcccctgacaaaatcccttcaagcaccaaagcgcacgc

SEQ ID NO: 260107 - DNA, 75 bp, synthetic construct
  source 1..75: mol_type = other DNA
gtgcaaaaaatcactggcgaaaggtagctcctgaccgttttgagattttaggaacagttgaacatattcattatg

SEQ ID NO: 260108 - DNA, 75 bp, synthetic construct
  source 1..75: mol_type = other DNA
gagcgagcggagatcatccgcgaaaaaggtactaaccgcagccagttcttccgtgggcaggttgataaatatacc

SEQ ID NO: 260109 - DNA, 75 bp, synthetic construct
  source 1..75: mol_type = other DNA
ccgcgggtggtgaaggcggcgctacgttgattaatgataaaaaattgattgagcgcgccgagatcatccgtgaaa

SEQ ID NO: 260110 - DNA, 75 bp, synthetic construct
  source 1..75: mol_type = other DNA
aacatcagggagaagagtattgagggttaccagactggtaactgggggccattaatgctggaagtcgagtcctgg

SEQ ID NO: 260111 - DNA, 75 bp, synthetic construct
  source 1..75: mol_type = other DNA
tgttgactctttaatcaattcttcggcagagagcttttcgaggacaacgcaaaaagtaattgataatgtagaccg

SEQ ID NO: 260112 - DNA, 75 bp, synthetic construct
  source 1..75: mol_type = other DNA
gatggtaaagttgacccttctactgttgatggcagaataagggctatgggagcagcggttaatcactttttagaa

SEQ ID NO: 260113 - DNA, 75 bp, synthetic construct
  source 1..75: mol_type = other DNA
atgtagacgatttaactgagcgtgtttttctcattaagcaacaactggaagcgggaaaactaaaaatagctcatc

SEQ ID NO: 260114 - DNA, 75 bp, synthetic construct
  source 1..75: mol_type = other DNA
tacctggcgaggtcgtactgattgtagtgaacttcatcttgatattgacgcggaacctggtatgtttccggagct

SEQ ID NO: 260115 - DNA, 75 bp, synthetic construct
  source 1..75: mol_type = other DNA
gcggtcaacgtcggcggtgcgtttaacctgttccagcagaccatgaaccagtttcgccgtcagcggggcggggcg

SEQ ID NO: 260116 - DNA, 75 bp, synthetic construct
  source 1..75: mol_type = other DNA
tgcttatggcgcatcgaaagcggcgctgaaaagcctggcgttgagcgtcgggctggaactggcgggtagcggcgt

SEQ ID NO: 260117 - DNA, 75 bp, synthetic construct
  source 1..75: mol_type = other DNA
gaccagcataccgtccagaactggttgcaggtcggtaaatatatggcgattgctgtgggcggcattatcgccatc

SEQ ID NO: 260118 - DNA, 75 bp, synthetic construct
  source 1..75: mol_type = other DNA
taatcagcatgcagacaatacaaaatatttaaaagtctggggtaacggggccaccttcgacaacgtaattttacg

SEQ ID NO: 260119 - DNA, 75 bp, synthetic construct
  source 1..75: mol_type = other DNA
taaatggtggtgttgccgatggtgataccattttatggtggttgcggcagagcaaggaagccagagccgcaattt

SEQ ID NO: 260120 - DNA, 75 bp, synthetic construct
  source 1..75: mol_type = other DNA
tgtcggataacagcggtcacgtctgcggcgtttgtccggcctgtgaacaaggtgattttctgtgttgtacagaaa

SEQ ID NO: 260121 - DNA, 75 bp, synthetic construct
  source 1..75: mol_type = other DNA
attgtcactgtggcgtccgacgccgcacacacgccgcgtattggtatgagtgcttatggcgcatcgaaagcggcg

SEQ ID NO: 260122 - DNA, 75 bp, synthetic construct
  source 1..75: mol_type = other DNA
tggcgcaggtatgtcagcgactgttagcgcaaacggagcgactggacgtgctggtcaatgcggcgggaattttgc

SEQ ID NO: 260123 - DNA, 75 bp, synthetic construct
  source 1..75: mol_type = other DNA
atggatttcagcggtaaaaatgtctgggtaacaggcgcggggaaaggtatcggctacgccacggcgctggcattt

SEQ ID NO: 260124 - DNA, 75 bp, synthetic construct
  source 1..75: mol_type = other DNA
caccatggctggtgttttcagtggtgtctgacatcgcgtctgatgtgcttgatggtcaggctgaatccagaatta

SEQ ID NO: 260125 - DNA, 75 bp, synthetic construct
  source 1..75: mol_type = other DNA
atttctcgattaatgacattaccgcctggaacaaagcatcattgggcatatggcctatgactccacctcatggcg

SEQ ID NO: 260126 - DNA, 75 bp, synthetic construct
  source 1..75: mol_type = other DNA
ctgggaaaaaggcgtccggggcgctgatgcggtcagcaacactatggacaggttgtatgcacagttcgcggtggg

SEQ ID NO: 260127 - DNA, 75 bp, synthetic construct
  source 1..75: mol_type = other DNA
gtgactactatcgccacggcttcgatgcgatgatcaatttcgattatcaggagcaggcggcgaaagcagtcgatt

SEQ ID NO: 260128 - DNA, 75 bp, synthetic construct
  source 1..75: mol_type = other DNA
ctggcctttttgccggatatcaaaaccgaatcaactaccgcttctggtctgccggtgttctataaaaacaaaacg

SEQ ID NO: 260129 - DNA, 75 bp, synthetic construct
  source 1..75: mol_type = other DNA
ccttatttttgtattgaggggaaacaatcggcaggctcctccataagtgcctgctcgatgaagaattcgtcagtc

SEQ ID NO: 260130 - DNA, 75 bp, synthetic construct
  source 1..75: mol_type = other DNA
tcagatgctttccctgcaaccttgtagcaacacgccgcctcaatggcgattgttcagggacggcgaatatacgct

SEQ ID NO: 260131 - DNA, 75 bp, synthetic construct
  source 1..75: mol_type = other DNA
aactggattatctccagcagttgggcgtcaatgctttatggataagcgccccatttgagcaaattcacggctggg

SEQ ID NO: 260132 - DNA, 75 bp, synthetic construct
  source 1..75: mol_type = other DNA
attagatgacaaacctttctggatgaccggtgaagcctggggccacggcgtgatgcaaagtgactactatcgcca

SEQ ID NO: 260133 - DNA, 75 bp, synthetic construct
  source 1..75: mol_type = other DNA
aataccggtggtttgccggatgcgccggattcatcgcgcaatccccgtaactccagcaatccacaaggtccgggg

SEQ ID NO: 260134 - DNA, 75 bp, synthetic construct
  source 1..75: mol_type = other DNA
gaaacttcaggatgtgtttgatcagacagggatgcaggggattaaagcgttactcagcccagaaaaccggcaatt

SEQ ID NO: 260135 - DNA, 75 bp, synthetic construct
  source 1..75: mol_type = other DNA
ggtaacggactggttcagttcgctgggtgacaagaacattgctgacccgcgaccgtgggcaggtatgcagggcac

SEQ ID NO: 260136 - DNA, 75 bp, synthetic construct
  source 1..75: mol_type = other DNA
gtgcaggtattatgggatgtctatcccttaatccagctatggctgagtggactggtgatgcccgggatggcatgt

SEQ ID NO: 260137 - DNA, 75 bp, synthetic construct
  source 1..75: mol_type = other DNA
ggtgtgcctctgaccgtagcactgcgcgaaacaacggcgggagcaggacgcaccggtgcgtttcaggcaaaagcc

SEQ ID NO: 260138 - DNA, 75 bp, synthetic construct
  source 1..75: mol_type = other DNA
ggccgtgcaagcggaaaatattgatgttgattttattgcgacggtcacagaaaccacctgcacaatgaaaattgc

SEQ ID NO: 260139 - DNA, 75 bp, synthetic construct
  source 1..75: mol_type = other DNA
aaaatggattcaaataataatgagattgacaatctaaccaacctccgcgacaccctgctcccgaaactcatctcc

SEQ ID NO: 260140 - DNA, 75 bp, synthetic construct
  source 1..75: mol_type = other DNA
taatccatataaacatattagaatcaactcaggaatgattatcattcgagctgataataaattatggaaccctaa

SEQ ID NO: 260141 - DNA, 75 bp, synthetic construct
  source 1..75: mol_type = other DNA
ttctggaaggtgtaccggaacaaccgctgacgccgccgccgggtattgtgacggtgaatatcgatcgcagcaccg

SEQ ID NO: 260142 - DNA, 75 bp, synthetic construct
  source 1..75: mol_type = other DNA
ccacgattattatggggagcagtactgcacacactgccagaccggaggattcagtattccccggacaactcagga

SEQ ID NO: 260143 - DNA, 75 bp, synthetic construct
  source 1..75: mol_type = other DNA
gataaagcgcgccagcttttcgatacagcttctcaggtctgtgaaattgtcgacagtgttcggcaatgcctgcag

SEQ ID NO: 260144 - DNA, 75 bp, synthetic construct
  source 1..75: mol_type = other DNA
ttgcatctctccgagataccctgctcccgaaactcatctccggtgagctatccctggaagatcttccggatctca

SEQ ID NO: 260145 - DNA, 75 bp, synthetic construct
  source 1..75: mol_type = other DNA
gactggcagccgaaaaactcaccaccgcagtatgccggtccaatccgcttacgtcaggggctgggtcagtcgaaa

SEQ ID NO: 260146 - DNA, 75 bp, synthetic construct
  source 1..75: mol_type = other DNA
aggtatatggaaaaagttgatgttttgatattaatatttggatatatactcaataaacctcaagatgcgggtgtg

SEQ ID NO: 260147 - DNA, 75 bp, synthetic construct
  source 1..75: mol_type = other DNA
gttcacggcaacggtccacagatcgggctgctggcgctgcagaacagcgcctacgacaaagtgaccccttatcca

SEQ ID NO: 260148 - DNA, 75 bp, synthetic construct
  source 1..75: mol_type = other DNA
accgacgccgcgtaaagtgaccgatgttgtgcaaacaggtcagcaaatctgggttcgccaggtgggcgatgcctg

SEQ ID NO: 260149 - DNA, 75 bp, synthetic construct
  source 1..75: mol_type = other DNA
aaaagattaccgatacgctgaaggcgctgccaacctatggtccgctgctacctgccgcagtcacccgcgccaacc

SEQ ID NO: 260150 - DNA, 75 bp, synthetic construct
  source 1..75: mol_type = other DNA
cacaaaacggcgcggttatggcgctggtcggtggctttgacttcaaccagagcaaatttaaccgcgccacccagg

SEQ ID NO: 260151 - DNA, 75 bp, synthetic construct
  source 1..75: mol_type = other DNA
tacggaattacttctatttattgaagatgttgatgtggataatgatgcggcatatcctgctcacttcaataagat

SEQ ID NO: 260152 - DNA, 75 bp, synthetic construct
  source 1..75: mol_type = other DNA
aaatcgtcgccggagagagcatgctgggcggtgcgcggatggaggtgatttttggtcgccagcattctgcgccga

SEQ ID NO: 260153 - DNA, 75 bp, synthetic construct
  source 1..75: mol_type = other DNA
aaatgcatatcctgcttactttttagatacgaaaacttttttaaattatctcagtaggtatgtttttataaaata

SEQ ID NO: 260154 - DNA, 75 bp, synthetic construct
  source 1..75: mol_type = other DNA
gatcatcgatgaggttggtgtgcagttcggcacgcctacagagataaccatcctgcaggaaatcataaatgcgcg

SEQ ID NO: 260155 - DNA, 75 bp, synthetic construct
  source 1..75: mol_type = other DNA
taaaggcataccccgaactttattttgcgcgatttgtaatcctgggtgagggagactcagagcgagtagttattc

SEQ ID NO: 260156 - DNA, 75 bp, synthetic construct
  source 1..75: mol_type = other DNA
actcacgttggcgtgacagcttcttctgataccttctacccaggtcaggaacgttacgatacttactctggtcgc

SEQ ID NO: 260157 - DNA, 75 bp, synthetic construct
  source 1..75: mol_type = other DNA
tcgaatgtactaccgcgctggttgaagcagcgaagtctattggtgcaaccactcacgtgggtgtgactgcctctt

SEQ ID NO: 260158 - DNA, 75 bp, synthetic construct
  source 1..75: mol_type = other DNA
cctgcgccgccaggtgtcggcaggcggcaatatcggcgagcggctgatggcgaccggggcacgtcattacggcga

SEQ ID NO: 260159 - DNA, 75 bp, synthetic construct
  source 1..75: mol_type = other DNA
tcatcagcccccgcattgccgacaggatcacagacggggggcgcaactggttgtcgttcaactggcccagctatc

SEQ ID NO: 260160 - DNA, 75 bp, synthetic construct
  source 1..75: mol_type = other DNA
gattgtggatcgcgttactaatggtgggcgtaactgcctggtgtttggttgggaaagctaccgtgcgcatatcag

SEQ ID NO: 260161 - DNA, 75 bp, synthetic construct
  source 1..75: mol_type = other DNA
cactggatttgctgatcatcgacgaagtcggcgttcagtttggtagcgtggctgaaatggctattttgcaggaaa

SEQ ID NO: 260162 - DNA, 75 bp, synthetic construct
  source 1..75: mol_type = other DNA
ataacctgacccacctttacgcgccgggcaaaggctttagcgatgtctcttttgatttatggccgggggaagtgc

SEQ ID NO: 260163 - DNA, 75 bp, synthetic construct
  source 1..75: mol_type = other DNA
ggctgatggcgaccggggcgcgtcattacggcgacattcgcgccaccgcgcagaagtggctggaagaggtggaaa

SEQ ID NO: 260164 - DNA, 75 bp, synthetic construct
  source 1..75: mol_type = other DNA
ctgattatcgatgcttgcgtctgtcggctgcagcaggtccgtaagcctgaggaactggacgtcattatgctgtac

SEQ ID NO: 260165 - DNA, 75 bp, synthetic construct
  source 1..75: mol_type = other DNA
gggcatgaagctgtctgctcagaaatgtgtccaggtaaacgccatcgaacgcgacaaggcgctggcgtgggttga

SEQ ID NO: 260166 - DNA, 75 bp, synthetic construct
  source 1..75: mol_type = other DNA
gggcatgaagctgtcagctgagaaatgcgcccaggtaaacgccattgaacgcgacaaggcgctggcgtgggttga

SEQ ID NO: 260167 - DNA, 75 bp, synthetic construct
  source 1..75: mol_type = other DNA
aggcgctggcatgggtggagaaaaacatcaaagtgccactgaccgaaccccagaaagcggggattgcgtcattct

SEQ ID NO: 260168 - DNA, 75 bp, synthetic construct
  source 1..75: mol_type = other DNA
atggtaagcctgttattcctggcatgaagctgtcaaaggaaaaatgcgaccgggttaacgccatcgaacgtgaca

SEQ ID NO: 260169 - DNA, 75 bp, synthetic construct
  source 1..75: mol_type = other DNA
gctggacatacgctggcggtaagcaatggaaagggctgatgactcgccgtgagattgagcgtgaagtctgtttgt

SEQ ID NO: 260170 - DNA, 75 bp, synthetic construct
  source 1..75: mol_type = other DNA
ctatgcctgcattcgttgtagtgaaatcattcatatgaacgcgggggaaaaacaattatgtccgcgctgtgcaaa

SEQ ID NO: 260171 - DNA, 75 bp, synthetic construct
  source 1..75: mol_type = other DNA
gtacttatcgtctttattactctggcgttgttataccgcctggtaatgtggttgatggcgcacagtgaaaaactg

SEQ ID NO: 260172 - DNA, 75 bp, synthetic construct
  source 1..75: mol_type = other DNA
gcgggtattacggttcggtgagtcatgatgtgaaagcaacttatgtgctttatctcggttggtttgatggtaacc

SEQ ID NO: 260173 - DNA, 75 bp, synthetic construct
  source 1..75: mol_type = other DNA
atggctatgccaccaaagctgaagaataaactaagcgcagcggtcgttggtttgattcttgccggggcttccgcc

SEQ ID NO: 260174 - DNA, 75 bp, synthetic construct
  source 1..75: mol_type = other DNA
cgtattcgttcaaacaactgttacggtcaggtatcccgtcgcgaccaggagagtgcgctggcgtgctggggaatt

SEQ ID NO: 260175 - DNA, 75 bp, synthetic construct
  source 1..75: mol_type = other DNA
ttgggagcgttgcgacttgctgcgtccgtggaacgatccggaaatggacatcgagcgtaagatgaaccatgacgt

SEQ ID NO: 260176 - DNA, 75 bp, synthetic construct
  source 1..75: mol_type = other DNA
tagctcggcggagtatatgccgatggtcttgcagtttggcttatcggaagagtatgaccgcctgcaaatcagccg

SEQ ID NO: 260177 - DNA, 75 bp, synthetic construct
  source 1..75: mol_type = other DNA
ttcatcgatgatgacgaactggtagaagtgactccgacctctatccgtattcgtaaacgtcacctgacggaaaac

SEQ ID NO: 260178 - DNA, 75 bp, synthetic construct
  source 1..75: mol_type = other DNA
acgtctcgactacgtgatcccaagccgtggtctgattggcttccgttctgagttcatgaccatgacttccggtac

SEQ ID NO: 260179 - DNA, 75 bp, synthetic construct
  source 1..75: mol_type = other DNA
gcgcgcgtcctgactgggttgtggatcaggtatttgacctgttcgttaacctcgacgcgaccgacgagcagctgg

SEQ ID NO: 260180 - DNA, 75 bp, synthetic construct
  source 1..75: mol_type = other DNA
atacttgatcagtttctggacgaaaaagagggtaaccacacaacggcataccgcgatggttctggcatatggacc

SEQ ID NO: 260181 - DNA, 75 bp, synthetic construct
  source 1..75: mol_type = other DNA
gcatttgacggcccaatgccgcaaacgcgcttcgtaaccaaaaaagcgtttgcttacggcctgaagccgattgtg

SEQ ID NO: 260182 - DNA, 75 bp, synthetic construct
  source 1..75: mol_type = other DNA
cgcgcttcgtgaccaaaaaagcgtttgcctacggcttgaaacccattgtggttattaacaaagttgaccgtcctg

SEQ ID NO: 260183 - DNA, 75 bp, synthetic construct
  source 1..75: mol_type = other DNA
gctggaaacccgtgccactcgtatcttaaacggtgagcgcggcacgaatgtgctgggcaccatctatgaatggcc

SEQ ID NO: 260184 - DNA, 75 bp, synthetic construct
  source 1..75: mol_type = other DNA
agcgatctgtttcgtgaactgagcgttccgttgataaagcatccggggatgtcgctgcgtctggtttatcaggat

SEQ ID NO: 260185 - DNA, 75 bp, synthetic construct
  source 1..75: mol_type = other DNA
aaagttggcacccacggtatcgtgatgatgatccgtctgccggatttcaatatgttgagcgacacctgggggcat

SEQ ID NO: 260186 - DNA, 75 bp, synthetic construct
  source 1..75: mol_type = other DNA
atgaacgcaaaaatcagatacggcctgtcggctgccgttctggcgctgattgccgctggtgcgcctgacattctc

SEQ ID NO: 260187 - DNA, 75 bp, synthetic construct
  source 1..75: mol_type = other DNA
cgggttaacgccattgagcgtgataaggcgctggcatgggtggagaaaaacatcagagtgccactgaccgaaccc

SEQ ID NO: 260188 - DNA, 75 bp, synthetic construct
  source 1..75: mol_type = other DNA
cggaatcgctcaaataactgttacgggcaggtatcgcggcgtgaccaggagagcgcgctggcgtgctggagtatc

SEQ ID NO: 260189 - DNA, 75 bp, synthetic construct
  source 1..75: mol_type = other DNA
tcttctttgaaaaattcccacgactgaaggcggcaatcactgatgatgttccccgctggcgtgaggcgctgcgca

SEQ ID NO: 260190 - DNA, 75 bp, synthetic construct
  source 1..75: mol_type = other DNA
attgaaaaactggagcgctatatcgctgaattgaaaaaaagcgccccaacaaaaaatgaggtgcttgcagcagat

SEQ ID NO: 260191 - DNA, 75 bp, synthetic construct
  source 1..75: mol_type = other DNA
accgccgctgccgccacctctgtcgccacggatgacgtacatcctgaagtgacggatattccacctgcacagtaa

SEQ ID NO: 260192 - DNA, 75 bp, synthetic construct
  source 1..75: mol_type = other DNA
taaacctgatcgtgcaagcaacggccttaaatcagcagttgttagaagaagagcgcgaacaactgttgagcgaag

SEQ ID NO: 260193 - DNA, 75 bp, synthetic construct
  source 1..75: mol_type = other DNA
acgcggcgactatcagttaattgtaaaatacggtgaatttcttaacgaacagccggaactgaagcgcctggcgga

SEQ ID NO: 260194 - DNA, 75 bp, synthetic construct
  source 1..75: mol_type = other DNA
gggatatgagcgccggtcagcttaaacgtggcgactatcagttgattgtgaaatacggtgaatttcttaacgaac

SEQ ID NO: 260195 - DNA, 75 bp, synthetic construct
  source 1..75: mol_type = other DNA
taccggcgttatcgttaacaaactgaacgctccggttgatgagcagggtcgtacccgtccggatctgtccgagat

SEQ ID NO: 260196 - DNA, 75 bp, synthetic construct
  source 1..75: mol_type = other DNA
cagctgatcaaaactgcaccgggcagctccctggtatcttccgtgttcttcatgctgctgccagaacaggtttac

SEQ ID NO: 260197 - DNA, 75 bp, synthetic construct
  source 1..75: mol_type = other DNA
cgtatcgaactgacccgcaacagcttcggcggtgcaaaaaacaccaatatcaccggcgttatcgttaacaaactg

SEQ ID NO: 260198 - DNA, 75 bp, synthetic construct
  source 1..75: mol_type = other DNA
agtggcgcaaaagaaactggagctgcagaaactgtttgccgcctatgcgcgggctgataccgatattctgatggg

SEQ ID NO: 260199 - DNA, 75 bp, synthetic construct
  source 1..75: mol_type = other DNA
agccgattcgtgaatctgccgcactgctgcgctactggcgcgcggatctggctcgtgaggcgctgttctggcatg

SEQ ID NO: 260200 - DNA, 75 bp, synthetic construct
  source 1..75: mol_type = other DNA
ggatcaaatcatggccccatcgactgctgctgtcgccacggatgacgtacatcctgaagtgacggatattccacc

SEQ ID NO: 260201 - DNA, 75 bp, synthetic construct
  source 1..75: mol_type = other DNA
ttttaagccagcagtttcgtggcggcacagatcttgccagttgttttcgcgccattatggaacgcttgcaaagca

SEQ ID NO: 260202 - DNA, 75 bp, synthetic construct
  source 1..75: mol_type = other DNA
ggtgtcagctacataccatacaaagatatcgttggcgtatggactgtatgtcacggacacaccggaaaagacatc

SEQ ID NO: 260203 - DNA, 75 bp, synthetic construct
  source 1..75: mol_type = other DNA
acatacgctggcggtaagcaatggaaaggcctgatgactcgtcgtgagattgagcgtgaagtctgtttgtggggg

SEQ ID NO: 260204 - DNA, 75 bp, synthetic construct
  source 1..75: mol_type = other DNA
ttattcttgcccagcatcactggccaacctggggtaacgataacgttgtcaaactgctaaaaagccaacgcgatt

SEQ ID NO: 260205 - DNA, 75 bp, synthetic construct
  source 1..75: mol_type = other DNA
cccctaccaactacatcaccaaaaccgggcaaaaagagacgatcgatgggttgacctacgattttctgatggcgc

SEQ ID NO: 260206 - DNA, 75 bp, synthetic construct
  source 1..75: mol_type = other DNA
tcaggcgcaactgataaatatcagcggcttatttgaagtgactgaaggcgtctatcagattcgcaatctcgattt

SEQ ID NO: 260207 - DNA, 75 bp, synthetic construct
  source 1..75: mol_type = other DNA
atgaagaaaaaatacgaactgggtgttaaagggataaataattacccggataagattgctgttactgtggcactt

SEQ ID NO: 260208 - DNA, 75 bp, synthetic construct
  source 1..75: mol_type = other DNA
atgaaagaaactattcttgatcgcgcggcgcatctaagctgcgcttcacggttgaaagagcatcttcagcggcct

SEQ ID NO: 260209 - DNA, 75 bp, synthetic construct
  source 1..75: mol_type = other DNA
ccataattttagaggcgcaggatgtgttgataacctacaaaggaaagctaccgggaagaattactgatgctctga

SEQ ID NO: 260210 - DNA, 75 bp, synthetic construct
  source 1..75: mol_type = other DNA
caccggaaaagacatcattcccggtaaaacgtataccgaagcagaatgcaaagccctcctgaataaagaccttgc

SEQ ID NO: 260211 - DNA, 75 bp, synthetic construct
  source 1..75: mol_type = other DNA
atgttacccgtgttatggcttgaaagcgcagataccgacctagatgatataactagttatattgctcgtttcgac

SEQ ID NO: 260212 - DNA, 75 bp, synthetic construct
  source 1..75: mol_type = other DNA
ctacatcatcctttaccgagtaacagcatcaagcatagaagtagtaaatattgtgcattctcgaagacagtatcc

SEQ ID NO: 260213 - DNA, 75 bp, synthetic construct
  source 1..75: mol_type = other DNA
caaaaagcgggtatcgcgtcattttgtccctataacattggccccggtaagtgttttccgtcgacgttttataag

SEQ ID NO: 260214 - DNA, 75 bp, synthetic construct
  source 1..75: mol_type = other DNA
attcgttcaaacaactgctacggtcaggtatcccgtcgtgaccaggagagcgcgctggcgtgctggggtatcgac

SEQ ID NO: 260215 - DNA, 75 bp, synthetic construct
  source 1..75: mol_type = other DNA
gattaaggacggtggcagggactgccgtattcgctcaaataactgttacggtcaggtatcccggagagatcagga

SEQ ID NO: 260216 - DNA, 75 bp, synthetic construct
  source 1..75: mol_type = other DNA
tgtcggctgccgttctggcactgattgccgtcggtgcgcctgcgcctgacattcttgaccagtttctgaatgaaa

SEQ ID NO: 260217 - DNA, 75 bp, synthetic construct
  source 1..75: mol_type = other DNA
atggtaaacctgttattcctggcatgaaactgacgaaggaaaaatgcgatcaggttaatgccattgaacgggata

SEQ ID NO: 260218 - DNA, 75 bp, synthetic construct
  source 1..75: mol_type = other DNA
atctgccgtggagccacccgggtggatggtaagcctgtgattcctggcatgaagctgtcgaagggtaagcgtaca

SEQ ID NO: 260219 - DNA, 75 bp, synthetic construct
  source 1..75: mol_type = other DNA
acattatgctcggtaaaacgtataccgaagcagaatgcaaagccctcctgaataaagaccttgccacggtcgcca

SEQ ID NO: 260220 - DNA, 75 bp, synthetic construct
  source 1..75: mol_type = other DNA
cggtaccctcatagtcgcttttccggtgcgatggtggaagaaaccgggatgttcatccatcatcactttggattg

SEQ ID NO: 260221 - DNA, 75 bp, synthetic construct
  source 1..75: mol_type = other DNA
cgtattcgttcaaacaactgttacggtcaggtatcccgtcgtgaccaggagagcgcgctggcgtgctggggaatt

SEQ ID NO: 260222 - DNA, 75 bp, synthetic construct
  source 1..75: mol_type = other DNA
gccgtattcgctcaaataactgttacggtcaggtatcccgtcgtgaccaggagagcgcgctggcgtgctggggaa

SEQ ID NO: 260223 - DNA, 75 bp, synthetic construct
  source 1..75: mol_type = other DNA
acatcatgcccggtaaaacgtataccgaagcagaatgcaaagccctcctgaataaagaccttgccacggtcgcca

SEQ ID NO: 260224 - DNA, 75 bp, synthetic construct
  source 1..75: mol_type = other DNA
gagcatgcgaagcgattcgctggtggattaaggacggtggcagagactgccgtattcgctcaaacaactgcaaca

SEQ ID NO: 260225 - DNA, 75 bp, synthetic construct
  source 1..75: mol_type = other DNA
aaccccagaaagcggggatcgcgtcattctgtccgtacaacattggccccggtaagtgcttcccgtcgacgtttt

SEQ ID NO: 260226 - DNA, 75 bp, synthetic construct
  source 1..75: mol_type = other DNA
tatcggctgccgttctggcgctgattgccgcaggggcttctgcgcctgaaatcctcgaccagtttctggatgaaa

SEQ ID NO: 260227 - DNA, 75 bp, synthetic construct
  source 1..75: mol_type = other DNA
atgaacgcaaaaatcaaatacggcctgtcagctgcagttctggcgctgattggagcaggcgcatctgctcctcag

SEQ ID NO: 260228 - DNA, 75 bp, synthetic construct
  source 1..75: mol_type = other DNA
atgtctgacgacatgtctatgggtttgccttcgtcagcgggcgaacacggtgtactacgctccatgcaggaggtt

SEQ ID NO: 260229 - DNA, 75 bp, synthetic construct
  source 1..75: mol_type = other DNA
gtggatggtaagcctgttattcctggcatgaagctgtcgaaggaaaaatgcgaccgggttaacgccattgagcgt

SEQ ID NO: 260230 - DNA, 75 bp, synthetic construct
  source 1..75: mol_type = other DNA
cgatctggaaaaccagaaaggcatgtgggaaaactgtttaacggtgaaatcgactgcctggtttccgaccactca

SEQ ID NO: 260231 - DNA, 75 bp, synthetic construct
  source 1..75: mol_type = other DNA
gcgtcattctgtccgtataacattggccccggtaagtgtttcccgtcgacgttttataaacgaattaatgcaggt

SEQ ID NO: 260232 - DNA, 75 bp, synthetic construct
  source 1..75: mol_type = other DNA
caaagatatcgttggcgtatggactgtatgtcacggacacaccggaaaagacatcatgctcggtaaaacgtatac

SEQ ID NO: 260233 - DNA, 75 bp, synthetic construct
  source 1..75: mol_type = other DNA
gtgtttcccgtcgacgttttataaacgaattaatgctggtgatcgcaggggagcatgtgaggcgattcgctggtg

SEQ ID NO: 260234 - DNA, 75 bp, synthetic construct
  source 1..75: mol_type = other DNA
aggcgctggcatgggtggagaaaaacatcagagtgccattgaccgaaccccagaaagcggggatcgcgtcattct

SEQ ID NO: 260235 - DNA, 75 bp, synthetic construct
  source 1..75: mol_type = other DNA
gtgaagcaatccgctggtggatcaaagatggtggccgtgattgtcgattaaccaaaggccagaagaatggctgct

SEQ ID NO: 260236 - DNA, 75 bp, synthetic construct
  source 1..75: mol_type = other DNA
atttgtcgtggtgccaccagggtggatggcaaacctgtcgtcccgggcatgaagttgtcgaagaaaaaatgcgac

SEQ ID NO: 260237 - DNA, 75 bp, synthetic construct
  source 1..75: mol_type = other DNA
atgaacaccaaaatcaaatacggcctgtcggctgccgttctggcactgattgccgtcggtgcgcccgcgcctgat

SEQ ID NO: 260238 - DNA, 75 bp, synthetic construct
  source 1..75: mol_type = other DNA
gataaaagatggtgggcgcgattgccgcatacgttcaaataactgctatgggcaggttattcgtcgtgaccagga

SEQ ID NO: 260239 - DNA, 75 bp, synthetic construct
  source 1..75: mol_type = other DNA
gacgcgattgccgcattcgttcaaataactgttacggtcaggttattcgtcgtgaccaggagagcgcattaacct

SEQ ID NO: 260240 - DNA, 75 bp, synthetic construct
  source 1..75: mol_type = other DNA
cgaattaatgcaggagatcgcaggggagcgtgtgaggcgcttcgctggtggattaaggacggtggcagagactgc

SEQ ID NO: 260241 - DNA, 75 bp, synthetic construct
  source 1..75: mol_type = other DNA
ccgtgatggtacgggtatctggaccatctgccgcggtgccatcctggtggatggtaaacctgtcgtcccgggcat

SEQ ID NO: 260242 - DNA, 75 bp, synthetic construct
  source 1..75: mol_type = other DNA
atctgccgtggagccacccgggtggatggtaagcctgtcctccccggcatgaagttgtcgaaggaaaaatgcgac

SEQ ID NO: 260243 - DNA, 75 bp, synthetic construct
  source 1..75: mol_type = other DNA
cccgaatgaaaacggacttgaagcggtaagcggcaccgcgtgggtacaaaccggggaatccggtaccccgctgat

SEQ ID NO: 260244 - DNA, 75 bp, synthetic construct
  source 1..75: mol_type = other DNA
tcggtatgccagtacttcaccaaaaccagcgacaacacctgggaagtgcagtacaccttcgacggtcagcagcag

SEQ ID NO: 260245 - DNA, 75 bp, synthetic construct
  source 1..75: mol_type = other DNA
atggttgcaccagtcgcgccgaaagctgttgctgataataagcctcaaccagcagtgacaaccacagatcaaaca

SEQ ID NO: 260246 - DNA, 75 bp, synthetic construct
  source 1..75: mol_type = other DNA
gccgccgcacctatcgacttaaccgtcgattacaccacttgtacgcaatacggctcggacttctcggtcaccacc

SEQ ID NO: 260247 - DNA, 75 bp, synthetic construct
  source 1..75: mol_type = other DNA
accctgcaaaccggtacggtaacggacatccagatcaaaaccggcaatatcccggcgcaggccagcagcaacctg

SEQ ID NO: 260248 - DNA, 75 bp, synthetic construct
  source 1..75: mol_type = other DNA
cagaacggtgtgcaggttgatgacgatggcaaagtttacgctacctacagcaacggcgagcgcatgttgcagggg

SEQ ID NO: 260249 - DNA, 75 bp, synthetic construct
  source 1..75: mol_type = other DNA
tgccgtcggtgcgcctgcgcctgatattctcgaccagtttctggatgaaaaagaaggtaaccacacaacggcata

SEQ ID NO: 260250 - DNA, 75 bp, synthetic construct
  source 1..75: mol_type = other DNA
taaggcgctggcatgggtggagcgcaatattaaagtaccactgaccgaaccacaaaaagcgggtatcgcgtcatt

SEQ ID NO: 260251 - DNA, 75 bp, synthetic construct
  source 1..75: mol_type = other DNA
caggtgaacgccattgaacgtgacagggcgctggcgtgggtggagaaaaacatcagagtgccactgaccgaaccc

SEQ ID NO: 260252 - DNA, 75 bp, synthetic construct
  source 1..75: mol_type = other DNA
gtccgtacaacattggccccggtaagtgtttcagctcaacgttttaccggaaactgaacgccggagaccgtaaag

SEQ ID NO: 260253 - DNA, 75 bp, synthetic construct
  source 1..75: mol_type = other DNA
gaagatatcgttggcgtatggactgtatgtcacggacacaccggaaaagacatcattcccggtaaaacgtatacc

SEQ ID NO: 260254 - DNA, 75 bp, synthetic construct
  source 1..75: mol_type = other DNA
ccatcattacgcaaggctgttgctgctgctattggtggtggggctgttgccatagcgtctgtgctcatcactggt

SEQ ID NO: 260255 - DNA, 75 bp, synthetic construct
  source 1..75: mol_type = other DNA
ttgctgctgctattggtggcggggctattgctatagcatctgtattaatcactggcccaagtggtaacgatggtc

SEQ ID NO: 260256 - DNA, 75 bp, synthetic construct
  source 1..75: mol_type = other DNA
acatactgttccgtaggttgcgggctattgatgtatagcctgggtgatggcgcgaaaaacgccagagaagcgatt

SEQ ID NO: 260257 - DNA, 75 bp, synthetic construct
  source 1..75: mol_type = other DNA
tgtcacgggcatacaggaaaagacatcatgctcggtaaaacgtataccaaagcagaatgcaaagcactcttgaat

SEQ ID NO: 260258 - DNA, 75 bp, synthetic construct
  source 1..75: mol_type = other DNA
aataaagactttgtcactgtcgccagacaaattaacccgtacatgaaagtcgatataccggaaacaacgcgcggc

SEQ ID NO: 260259 - DNA, 75 bp, synthetic construct
  source 1..75: mol_type = other DNA
atccgttccaataactgctacgggcaggtatcccgtcgtgaccaggaaagcgcgctgacgtgctgggggatagac

SEQ ID NO: 260260 - DNA, 75 bp, synthetic construct
  source 1..75: mol_type = other DNA
aaacgcgggcagaaattttacaagggatctcacctgaagaactggagcagttaattaagctcatcgcaaaacttg

SEQ ID NO: 260261 - DNA, 75 bp, synthetic construct
  source 1..75: mol_type = other DNA
ttctgataaatggcagcgtattagctgggatgaagcattctcccgtattgcgaagctgatgaaagctgaccgtga

SEQ ID NO: 260262 - DNA, 75 bp, synthetic construct
  source 1..75: mol_type = other DNA
tcggcggtgcaaaaaacaccaatattaccggcgttatcgttaacaaactgaacgctccggttgatgaacagggtc

SEQ ID NO: 260263 - DNA, 75 bp, synthetic construct
  source 1..75: mol_type = other DNA
atcaccgtcaagaccaacggcctgcgccgccgtgtgaaagccacccgtatcagcggctgcacggtttactgggaa

SEQ ID NO: 260264 - DNA, 75 bp, synthetic construct
  source 1..75: mol_type = other DNA
aaatcaccgtcaagaccaacggcctgcgccgccgtgtgaaagccacccgtatcagcggctgcacggtttactggg

SEQ ID NO: 260265 - DNA, 75 bp, synthetic construct
  source 1..75: mol_type = other DNA
ttccgctctcactgcgggtgcgttttttattggctacggcggctgtcgtattagtgctttcgcttgcttacggag

SEQ ID NO: 260266 - DNA, 75 bp, synthetic construct
  source 1..75: mol_type = other DNA
gcgcttaagcatttgatttcgctgtgcgccgcatcgccgatgattgccagccaactggcgcgttatccattattg

SEQ ID NO: 260267 - DNA, 75 bp, synthetic construct
  source 1..75: mol_type = other DNA
tccgtcgttacatcgatttcagcgtgattcagtcgctgcgcaacatgaaaggaatgattgcccgtgaagtgcgtc

SEQ ID NO: 260268 - DNA, 75 bp, synthetic construct
  source 1..75: mol_type = other DNA
actggataacgcacagttttttacccgcatggggcagcggctgattaaagtgctggatcaaccaacgcaggatgg

SEQ ID NO: 260269 - DNA, 75 bp, synthetic construct
  source 1..75: mol_type = other DNA
cgggcagcttttatgggcgcaacgtgacgtgccctggctgatgaagatgatccagcctgactggctgaaatcgaa

SEQ ID NO: 260270 - DNA, 75 bp, synthetic construct
  source 1..75: mol_type = other DNA
ccccactctcgctacgggttcgttttctgttggcaacggcagcggtagtgctggtgctttcgcttgcctacggga

SEQ ID NO: 260271 - DNA, 75 bp, synthetic construct
  source 1..75: mol_type = other DNA
atgaaaaaattactgcgtctttttttcccgctctcactgcgggtacgttttctgttggcaacggctgcggtagta

SEQ ID NO: 260272 - DNA, 75 bp, synthetic construct
  source 1..75: mol_type = other DNA
aaagtgaacgcgaacgttacgacaaatatcgtacaacgctcaccgacctgacccatagtctgaaaacgccactgg

SEQ ID NO: 260273 - DNA, 75 bp, synthetic construct
  source 1..75: mol_type = other DNA
tgcgggaaagccataccattgatgtactgatgggacgtctgcgcaaaaaaaattcaggcacaatatccgcaagaa

SEQ ID NO: 260274 - DNA, 75 bp, synthetic construct
  source 1..75: mol_type = other DNA
aaagaagtccgcgaactggaagagcacaaccgggaactactcaaccctaccaccacgagggaacttaccagcctg

SEQ ID NO: 260275 - DNA, 75 bp, synthetic construct
  source 1..75: mol_type = other DNA
ggtaggaatgaaagagacggtgagagcacttgatgaaatggcacttcttgcaactttgcatcattatcagcacca

SEQ ID NO: 260276 - DNA, 75 bp, synthetic construct
  source 1..75: mol_type = other DNA
agccatcagttgcttgcaccggtggacaatatctccattgcaaaaaatgaactggcggtactggggacgatttca

SEQ ID NO: 260277 - DNA, 75 bp, synthetic construct
  source 1..75: mol_type = other DNA
gacgcctcagggcggggctgacggggactatgtcgtctgggctaaagaagtgcccggcattacccgcgcatggac

SEQ ID NO: 260278 - DNA, 75 bp, synthetic construct
  source 1..75: mol_type = other DNA
ctgttgtggcagacgaaccgggatcggcggggaatacggatgatggtattgccatgcaactgggaacacccgtca

SEQ ID NO: 260279 - DNA, 75 bp, synthetic construct
  source 1..75: mol_type = other DNA
cgacgctggcagaaaatatcagtatgctccgtaacgatttatttgccaggctggacgtcagcgacacgctccggc

SEQ ID NO: 260280 - DNA, 75 bp, synthetic construct
  source 1..75: mol_type = other DNA
ggcaggctctgatttgtatgtgttcaggccggtggcgcatacggtggattttcatatccgcgtgacgccggacac

SEQ ID NO: 260281 - DNA, 75 bp, synthetic construct
  source 1..75: mol_type = other DNA
tttcatatccgcgtgacgccggacacactggaaatacgggctgccatcaccgccgagttgcgttcgttcctgctg

SEQ ID NO: 260282 - DNA, 75 bp, synthetic construct
  source 1..75: mol_type = other DNA
gtggaagcaacaggtatcgtttttttagtggtgctcttcgtcattatcatgaccgcagcagatatacagaagaaa

SEQ ID NO: 260283 - DNA, 75 bp, synthetic construct
  source 1..75: mol_type = other DNA
acgacaccccgggcctgtcactggcgcacattgttagcgaaagccgccgaatcaaacgcgagaagggctgcgtag

SEQ ID NO: 260284 - DNA, 75 bp, synthetic construct
  source 1..75: mol_type = other DNA
caaataaacgcgaggattttaaggagatggccggatctgcgctagctggaatgttgtctgtttctcgttccacct

SEQ ID NO: 260285 - DNA, 75 bp, synthetic construct
  source 1..75: mol_type = other DNA
agatcaggactgcaataaaagcagagctgaatgcactgatgttacgggatggtgtgccagaggggcgtatgtatc

SEQ ID NO: 260286 - DNA, 75 bp, synthetic construct
  source 1..75: mol_type = other DNA
tgccgtccacagggtacgcggacaccattacagacggtgaagatattgaaaatctggaaatatggcgtgcccgcg

SEQ ID NO: 260287 - DNA, 75 bp, synthetic construct
  source 1..75: mol_type = other DNA
acggcatgagcgccacgcagaagtacgaggccattcagggtattttcacccagctcgcagaccattcaaaaaccg

SEQ ID NO: 260288 - DNA, 75 bp, synthetic construct
  source 1..75: mol_type = other DNA
cggaactggttgcctgggccagaaaaaatgacttctccatctcgctgccggtagaccgactctcttttctgctgg

SEQ ID NO: 260289 - DNA, 75 bp, synthetic construct
  source 1..75: mol_type = other DNA
aacgtctgctgaaccgctttaccagcgaacaggcggaagggaacgccatttaccgtctgacgccgctcggcattg

SEQ ID NO: 260290 - DNA, 75 bp, synthetic construct
  source 1..75: mol_type = other DNA
gtgaattttcccagacagtccccgaactggttgcctgggccagaaaaaaatgacttctccatctcgctgccggta

SEQ ID NO: 260291 - DNA, 75 bp, synthetic construct
  source 1..75: mol_type = other DNA
ttcattcacgagggagtatcggtaatactggcgggagtgaaacccgtccacgaaatattgcatttaactatatcg

SEQ ID NO: 260292 - DNA, 75 bp, synthetic construct
  source 1..75: mol_type = other DNA
taaaaccagcactcagggagttcttgattaccttggtttgggagaaggctctgcattacctgttggtgtgcctgt

SEQ ID NO: 260293 - DNA, 75 bp, synthetic construct
  source 1..75: mol_type = other DNA
ccgcgtctcggtgtgatcggcgctggcgtgattggccttgaactggggtctgtgtggaatcgggtcggttcagac

SEQ ID NO: 260294 - DNA, 75 bp, synthetic construct
  source 1..75: mol_type = other DNA
gtaaaggcggcgccaatgccagtaatacttttagcggtacgttgaccgtaaccgtggatcaagtgctggttaacg

SEQ ID NO: 260295 - DNA, 75 bp, synthetic construct
  source 1..75: mol_type = other DNA
gattgtgattcgtatgccatcatttatggcgcggcagatccttaactgggcagaagcgcatccacgttttcgtga

SEQ ID NO: 260296 - DNA, 75 bp, synthetic construct
  source 1..75: mol_type = other DNA
ttgaaaaggacgcaatgcgctcagttgcgctccacgccatcgttgattttttcaacaggcataactcacccagcg

SEQ ID NO: 260297 - DNA, 75 bp, synthetic construct
  source 1..75: mol_type = other DNA
aggtgaaggatgatatcgcccagttgttgaacaaagactggcgtgcggcgatttccagctgtgaattgttgcttt

SEQ ID NO: 260298 - DNA, 75 bp, synthetic construct
  source 1..75: mol_type = other DNA
ctggcgggcggcgatttccagctgtgaattgttgctttcagaaacttccggaacgctgcgtgaattgcaggatac

SEQ ID NO: 260299 - DNA, 75 bp, synthetic construct
  source 1..75: mol_type = other DNA
tttcgacagtatcgacctgacgcaacgtctgatggacgaacagcagcagcaggtgaaggacgatatcgcccagtt

SEQ ID NO: 260300 - DNA, 75 bp, synthetic construct
  source 1..75: mol_type = other DNA
cggcattacctgttggtgtacctgttccatggccttcagccactccgccgacaggctggctgaaatgcaacggtg

SEQ ID NO: 260301 - DNA, 75 bp, synthetic construct
  source 1..75: mol_type = other DNA
accaaaagccgtcaaggctgcatacgaccttgcagccggcaaggcacccgtcagtcacactcacccgtggagtca

SEQ ID NO: 260302 - DNA, 75 bp, synthetic construct
  source 1..75: mol_type = other DNA
gggatagtctgttgtcgacagataatgccgtccggcaaggtgcaattaacggtagatttaccagtcaatacagaa

SEQ ID NO: 260303 - DNA, 75 bp, synthetic construct
  source 1..75: mol_type = other DNA
cggcgctgcccgttggtgtgcccgttccatggccttcagccacgccgccaacggggtggctgaaatgcaacggtg

SEQ ID NO: 260304 - DNA, 75 bp, synthetic construct
  source 1..75: mol_type = other DNA
aggagagaattcaggcaataagaaaacatgtgttatccggtcagaatctggccacggcaatgcgaaattccggtt

SEQ ID NO: 260305 - DNA, 75 bp, synthetic construct
  source 1..75: mol_type = other DNA
atgtacaacgcccatacccgtatcatccccatcgtcagtgcgtttgcttcagaagataaatggtcattccagatg

SEQ ID NO: 260306 - DNA, 75 bp, synthetic construct
  source 1..75: mol_type = other DNA
tgcaacaacgacccgtaaagggatcgtacaactgagcagtgccatcaacagcacgtctgaaacgctggccgccac

SEQ ID NO: 260307 - DNA, 75 bp, synthetic construct
  source 1..75: mol_type = other DNA
tcaacagcacgtctgaaatactggccgccacaccgaaagcggtcaaggctgcatacgatctggcaaacggaaaac

SEQ ID NO: 260308 - DNA, 75 bp, synthetic construct
  source 1..75: mol_type = other DNA
gcacctctgaaacgctggccgccacaccaaaagccgtcaaggctgcatacgaccttgcagccggcaaggcacccg

SEQ ID NO: 260309 - DNA, 75 bp, synthetic construct
  source 1..75: mol_type = other DNA
acgggctggctgaaatgcaacggcgcagcattttctcctgaagattaccccaaactggcacaggcttaccccgcg

SEQ ID NO: 260310 - DNA, 75 bp, synthetic construct
  source 1..75: mol_type = other DNA
gtcaaggctgcatacgaccttgcagccggcaaggcgcccgtcagccacactcacccgtggagtcagataacggga

SEQ ID NO: 260311 - DNA, 75 bp, synthetic construct
  source 1..75: mol_type = other DNA
gggagaaggttctgcgttgcctgttggcgtaccagttccttggccttcacctacgccgccgacaggctggctgaa

SEQ ID NO: 260312 - DNA, 75 bp, synthetic construct
  source 1..75: mol_type = other DNA
tgtaccccaaactggcaaaagcctaccccaccaataaattaccggatttacgcggagaatttatccgtggctggg

SEQ ID NO: 260313 - DNA, 75 bp, synthetic construct
  source 1..75: mol_type = other DNA
gtcatggcctaatgttgtttatttgaaaaaatcaccagaagtgatgggagttataaaatcaacaggattaaatac

SEQ ID NO: 260314 - DNA, 75 bp, synthetic construct
  source 1..75: mol_type = other DNA
tcaattttataatttaattaacgcgcaaaaaagtgcttttgatgatttctctttgatttttccatctccaagtgg

SEQ ID NO: 260315 - DNA, 75 bp, synthetic construct
  source 1..75: mol_type = other DNA
cagggggccagtctagcagattatggtgcgcagttatacaacagcagtaatgaggagtctactatttctcttgtt

SEQ ID NO: 260316 - DNA, 75 bp, synthetic construct
  source 1..75: mol_type = other DNA
ctataacgcctttgtgtcacttgagaaagtggaaggtggtagcggtgaatcattcctgaaaaacgctgcacgcca

SEQ ID NO: 260317 - DNA, 75 bp, synthetic construct
  source 1..75: mol_type = other DNA
atgctatcgctttccttgagccgtcctataacgctttcgtttcgctggagaaagtggaaggcggtagcggtgagt

SEQ ID NO: 260318 - DNA, 75 bp, synthetic construct
  source 1..75: mol_type = other DNA
ttcatatttggcgactattctgatgatgccatcgctttccttgagccttcctataacgcctttgtgtcactggag

SEQ ID NO: 260319 - DNA, 75 bp, synthetic construct
  source 1..75: mol_type = other DNA
gtgaagcagaacgccgaaaatgcgcgccaggccagccatctggcgttaagtgcttctgaaacggcgcaacgcggc

SEQ ID NO: 260320 - DNA, 75 bp, synthetic construct
  source 1..75: mol_type = other DNA
cgatatgcgcgctactgtttcgttgtgaacaacaatcggtcaaagaaatggataaaattcacgcaatgcagttgt

SEQ ID NO: 260321 - DNA, 75 bp, synthetic construct
  source 1..75: mol_type = other DNA
ggttttgaggttgccagcgttaatggcgtccagtggtttaagtctggcggcatgttgacggtaaatagtagcgaa

SEQ ID NO: 260322 - DNA, 75 bp, synthetic construct
  source 1..75: mol_type = other DNA
gggaatgaaaacgctgctgaataacggcctgtcggggatccgctggtcgggcacattatcagaaatgaacaccta

SEQ ID NO: 260323 - DNA, 75 bp, synthetic construct
  source 1..75: mol_type = other DNA
gactggctgagagcctcattcaccatcgttgaacgtcgtagcggagccagcggtggctatatcctgtttgggcac

SEQ ID NO: 260324 - DNA, 75 bp, synthetic construct
  source 1..75: mol_type = other DNA
accttcagaatgcgaccggcgcagcgccagttgttccggagcatgcacaataaaaatattatcctgaaagcacgc

SEQ ID NO: 260325 - DNA, 75 bp, synthetic construct
  source 1..75: mol_type = other DNA
ttaatgctgccttgtcacaacgccaggcggcctttgcccgctatgcagccgctaacccattctcaatgggtattg

SEQ ID NO: 260326 - DNA, 75 bp, synthetic construct
  source 1..75: mol_type = other DNA
acgaaatggacgcgcgcatttccaaactgtgcgaacgtgctttcgcgaccggcctgccggtattcatggtgaaca

SEQ ID NO: 260327 - DNA, 75 bp, synthetic construct
  source 1..75: mol_type = other DNA
gaactgggtgcaggcattgaaatcgttgatccagaagtggttcgcgaaagctatgttggtcgtctggtcgaactg

SEQ ID NO: 260328 - DNA, 75 bp, synthetic construct
  source 1..75: mol_type = other DNA
actcgccgtgtgaaatccgtcactttctgcgcacgtagcattccgcacatgctggaacacttccgtgctggctct

SEQ ID NO: 260329 - DNA, 75 bp, synthetic construct
  source 1..75: mol_type = other DNA
ctacatcaacgctgactggatcgattccctgactgcaacttccgaacgcagccgtcgtctgtctccgccagcgtt

SEQ ID NO: 260330 - DNA, 75 bp, synthetic construct
  source 1..75: mol_type = other DNA
ggcctgccggtattcatggtgaacaccaacacctggcaaacctctctgagcctgcaaagcttcaacctggaagtt

SEQ ID NO: 260331 - DNA, 75 bp, synthetic construct
  source 1..75: mol_type = other DNA
cgttaaagcagccgctatctgtgcggaacgtggtatcgcgacttgcgtactgttgggtaacccggcagagattaa

SEQ ID NO: 260332 - DNA, 75 bp, synthetic construct
  source 1..75: mol_type = other DNA
gacgctgaagtcgttctggttgaaggtctggtcccgacacgtaagcaccagtttgcccagtctctgaactacgaa

SEQ ID NO: 260333 - DNA, 75 bp, synthetic construct
  source 1..75: mol_type = other DNA
gcgcaggtctgccgtatgtacaacaacgcgtttgtggggccggagcgtaacaatcacggacatgccgttatcctg

SEQ ID NO: 260334 - DNA, 75 bp, synthetic construct
  source 1..75: mol_type = other DNA
tatcgatattccaacgcgtatcctggttgggaatcagcagggcgaacgcgcatcaaccgaagacctccgctactt

SEQ ID NO: 260335 - DNA, 75 bp, synthetic construct
  source 1..75: mol_type = other DNA
cagtacgacgctgcggtaatggctgacgttgcgaaatccaaagcgccgaactctccggttgcaggtcgcgctacc

SEQ ID NO: 260336 - DNA, 75 bp, synthetic construct
  source 1..75: mol_type = other DNA
actgtgcgaacgtgctttcgctaccggcctgccggtatttatggtgaacaccaacacctggcagacctctctgag

SEQ ID NO: 260337 - DNA, 75 bp, synthetic construct
  source 1..75: mol_type = other DNA
tttcgacgactcttccaaagctaaagtaaacaatgttgatccggcgaagctgcaagaatccagcccgctgccggt

SEQ ID NO: 260338 - DNA, 75 bp, synthetic construct
  source 1..75: mol_type = other DNA
gatcgcaacgaccttgcttacggcatgatcaccaaaggactgaagaaccttgccaaagagcttgattgcgttgtt

SEQ ID NO: 260339 - DNA, 75 bp, synthetic construct
  source 1..75: mol_type = other DNA
cagggcgatcgaaacagccaatcgcttgagtgaaatcgacatgctttacatcgacgacacgccgggattatctct

SEQ ID NO: 260340 - DNA, 75 bp, synthetic construct
  source 1..75: mol_type = other DNA
tcagcccaacaacaacggcgccactacagcacatcactacccggtaacatcagccggatcattatccatcaggat

SEQ ID NO: 260341 - DNA, 75 bp, synthetic construct
  source 1..75: mol_type = other DNA
gcaaatgtggctgatgcgacgacggcacagaagggaattgtgcagttaagcagcgcaacggacagtgatgatgaa

SEQ ID NO: 260342 - DNA, 75 bp, synthetic construct
  source 1..75: mol_type = other DNA
agttccgggctcatggatggtgtgtaatgaaattacgtcgacaaatgacaatgaaagcatcgggctgttccagcg

SEQ ID NO: 260343 - DNA, 75 bp, synthetic construct
  source 1..75: mol_type = other DNA
ggtgaccagatactggaaaaactggtagggcagaagtcaggtgttaacccgaatattttttaccttccggcgaca

SEQ ID NO: 260344 - DNA, 75 bp, synthetic construct
  source 1..75: mol_type = other DNA
caacatatcgagccactggccccggtggcaggctctgatttgtatgtattcaggccggtggcacatacggtggat

SEQ ID NO: 260345 - DNA, 75 bp, synthetic construct
  source 1..75: mol_type = other DNA
agccatcaattgcttgcaccggcggaaaatatctccattgcaaaaaatgaactggcggttctggggacgatttca

SEQ ID NO: 260346 - DNA, 75 bp, synthetic construct
  source 1..75: mol_type = other DNA
catctggatatggtggaagtgaaagaaccatcgagattatttgtaagggtttgattcaaaagcatcatgtggttg

SEQ ID NO: 260347 - DNA, 75 bp, synthetic construct
  source 1..75: mol_type = other DNA
cttcgcgtaccagcgcatttactgcgatgacggcgatccggcatgccggaggttttgtcagcttcgatcccaata

SEQ ID NO: 260348 - DNA, 75 bp, synthetic construct
  source 1..75: mol_type = other DNA
tgcagatgacgtttgatggctctcactggcgcaccgttggtgttggtgagtatgtgtcgtcaggagcgccggggc

SEQ ID NO: 260349 - DNA, 75 bp, synthetic construct
  source 1..75: mol_type = other DNA
ccgtcattagtgtctgtgactctgataacagtcaggggatgctacggcaagttttcatgggaagcgatcggatac

SEQ ID NO: 260350 - DNA, 75 bp, synthetic construct
  source 1..75: mol_type = other DNA
gtgagtttgtggcctggctgaaagaaaagggggcatttgaccagccttactggatgatgaaggcatcactgcctg

SEQ ID NO: 260351 - DNA, 75 bp, synthetic construct
  source 1..75: mol_type = other DNA
cagtgaaatatcctggcgtcaggatgctgttgatgcgggcattgcaactgatgaagagacttcaactctcaccca

SEQ ID NO: 260352 - DNA, 75 bp, synthetic construct
  source 1..75: mol_type = other DNA
ttgttgttttatcgcgttggggtattaagaatgaataaattttataaaggctctttctatccggaagcactaaaa

SEQ ID NO: 260353 - DNA, 75 bp, synthetic construct
  source 1..75: mol_type = other DNA
gctggttttccttgccacacatttcggcaagagtaacaaaaccggctggattttgtgtcgagatatatacagtgg

SEQ ID NO: 260354 - DNA, 75 bp, synthetic construct
  source 1..75: mol_type = other DNA
ttccatttctctggtttacccacagcgtcgggagctttcccgccgtgtaaacctgtttatgcagtggctggctgg

SEQ ID NO: 260355 - DNA, 75 bp, synthetic construct
  source 1..75: mol_type = other DNA
cttgtagcgcacgacgaaaaagcctgcactcttgatgagctagttgtatctcagtatgaaggcgagcttaaagag

SEQ ID NO: 260356 - DNA, 75 bp, synthetic construct
  source 1..75: mol_type = other DNA
agaaagtcgccatgccgttgccagagccatctgtcacggtcaaaaaggtgagataagaaaacgatataccgacgg

SEQ ID NO: 260357 - DNA, 75 bp, synthetic construct
  source 1..75: mol_type = other DNA
aggccagacgtatggctgagaatgcacgggggccccgggggcctcagggagaaactggtctgaagggggatgtcg

SEQ ID NO: 260358 - DNA, 75 bp, synthetic construct
  source 1..75: mol_type = other DNA
aatggcaccggacatccacggtgcttgtcgatctgaacgatcaaggggaacgttcatttacgtttatggtccgcc

SEQ ID NO: 260359 - DNA, 75 bp, synthetic construct
  source 1..75: mol_type = other DNA
ggctgggtaatgaacagacttacagagcagaagagagctctggttttctgtcaataagcctgagtataggaggtg

SEQ ID NO: 260360 - DNA, 75 bp, synthetic construct
  source 1..75: mol_type = other DNA
gtggtggtgcaactttcgccgcactgattgtgctgcctgcgatgggcctgccagtaaccctggtggcgctgttaa

SEQ ID NO: 260361 - DNA, 75 bp, synthetic construct
  source 1..75: mol_type = other DNA
ggatcatttaacgatgttcagatccgctcggataaacgcaacaagcgaaatctggtaaaactggataatgcgtta

SEQ ID NO: 260362 - DNA, 75 bp, synthetic construct
  source 1..75: mol_type = other DNA
ggatactggcgctgctggggcaaagggtgagaaaggagccaccggcgcaaccgggccacagggacctaaagggga

SEQ ID NO: 260363 - DNA, 75 bp, synthetic construct
  source 1..75: mol_type = other DNA
agacaacggctttaccgtgctggacgcctgccaggtgaacgatcgcagcgtggatgacgttatcgcccaagtgaa

SEQ ID NO: 260364 - DNA, 75 bp, synthetic construct
  source 1..75: mol_type = other DNA
acaacttctggctgagctaccgcgagctggcggatcagttggtgccgtacgccaaatggatgggctttacccacc

SEQ ID NO: 260365 - DNA, 75 bp, synthetic construct
  source 1..75: mol_type = other DNA
aactggagtgtctcgactcacggggattctttagcggtgtcattccgcgacgtaagaattttttccgctatcagt

SEQ ID NO: 260366 - DNA, 75 bp, synthetic construct
  source 1..75: mol_type = other DNA
agtatgggacaacttgtgaaattaccgacaagaagggaaagggccttcccgagagtggtaaaggagaggccctag

SEQ ID NO: 260367 - DNA, 75 bp, synthetic construct
  source 1..75: mol_type = other DNA
attctttagcggcgtcattccgcgacgtaagaattttttccgctatcagttggctgttgtctggcatggtcagca

SEQ ID NO: 260368 - DNA, 75 bp, synthetic construct
  source 1..75: mol_type = other DNA
tgcatggcagaagtttgccaacctgcgcgcctattacggctggatgtgggccttcccgggcaaaaagctgctgtt

SEQ ID NO: 260369 - DNA, 75 bp, synthetic construct
  source 1..75: mol_type = other DNA
ccattctcgaccgcatgccgggagatgcatggcagaagtttgccaacctgcgcgcctattacggctggatgtggg

SEQ ID NO: 260370 - DNA, 75 bp, synthetic construct
  source 1..75: mol_type = other DNA
gtagcctgaaaacgacttatacccgtagaaatggtaagatttatcttaatggtagtaagtgttttattaccagca

SEQ ID NO: 260371 - DNA, 75 bp, synthetic construct
  source 1..75: mol_type = other DNA
ctggacatcatgctgccgggcaatcgccccttcgttgcccccagtgccgttattcagccccgccagcgtctggga

SEQ ID NO: 260372 - DNA, 75 bp, synthetic construct
  source 1..75: mol_type = other DNA
gctgagaagtaaaaaaccggagcttgtggagcaagagctgtggggggtcttactggcttataatctggtgagata

SEQ ID NO: 260373 - DNA, 75 bp, synthetic construct
  source 1..75: mol_type = other DNA
aactacctggttcgcaaaactgcgtctaaagttaaactgggacctcgcgagcaagggtgagacgatggcgcttta

SEQ ID NO: 260374 - DNA, 75 bp, synthetic construct
  source 1..75: mol_type = other DNA
atcgacagtctgctgatcccggaagaacacggtggtctggacgcggggtttgttactctcgccgccgtgtggatg

SEQ ID NO: 260375 - DNA, 75 bp, synthetic construct
  source 1..75: mol_type = other DNA
tgtcaaagccctggcggatatgggtatcgacagtctgctgatcccggaagaacacggtggtctggacgcggggtt

SEQ ID NO: 260376 - DNA, 75 bp, synthetic construct
  source 1..75: mol_type = other DNA
gcgttgcgcgtcgatgctgtggcttcgatgatttatcgcgattacagccgcaaagagggggagtggatccccaat

SEQ ID NO: 260377 - DNA, 75 bp, synthetic construct
  source 1..75: mol_type = other DNA
acatgtcagtctcaatgagcccggatcaagctgttgcattagtaaaatcattacaggtagctctcagggataatg

SEQ ID NO: 260378 - DNA, 75 bp, synthetic construct
  source 1..75: mol_type = other DNA
ggtgtcttactggcttataatctggtgagatatcagatgattaaaatggcggaacatctgaaaggttactggccg

SEQ ID NO: 260379 - DNA, 75 bp, synthetic construct
  source 1..75: mol_type = other DNA
gtgaggctgtccgccgcgtgttcacgaaaacagcgcagctctggcataacgccacgccgcatccgcactggtgcg

SEQ ID NO: 260380 - DNA, 75 bp, synthetic construct
  source 1..75: mol_type = other DNA
cgaagagaacagagcatactatcgttctgtcgcaacgtcattatgtgtagttgaagatattagatatattgattc

SEQ ID NO: 260381 - DNA, 75 bp, synthetic construct
  source 1..75: mol_type = other DNA
atcaatcataaacatttgaaaattggaacctttaagttcaatacaaaaaaaacattacgagggcaacgtttttta

SEQ ID NO: 260382 - DNA, 75 bp, synthetic construct
  source 1..75: mol_type = other DNA
cgttgattcaacgcgctgccgaatccgagttctaccgacttacctttatccgtcatgcgcgacatgaggacaaag

SEQ ID NO: 260383 - DNA, 75 bp, synthetic construct
  source 1..75: mol_type = other DNA
gattgatgctaacggtaatctccgtctgaagtctgatccctatgctttcgaagcgcagatgcgcccggaaaccgc

SEQ ID NO: 260384 - DNA, 75 bp, synthetic construct
  source 1..75: mol_type = other DNA
caaccgtattattggtgagcaagttcctggcgctgtgacgatggcagaggagtccaccgacttccctaatgtttc

SEQ ID NO: 260385 - DNA, 75 bp, synthetic construct
  source 1..75: mol_type = other DNA
tgataaacgcgctaattgcaggccattttgcagacccattttccgtactgggaatgcataaaactacagcaggac

SEQ ID NO: 260386 - DNA, 75 bp, synthetic construct
  source 1..75: mol_type = other DNA
attcaggcccgccagcgcctgggaagtgaggctgtccgccgcgtgttcacgaaaacagcgcagctctggcataac

SEQ ID NO: 260387 - DNA, 75 bp, synthetic construct
  source 1..75: mol_type = other DNA
catggggaacgaatttgcccaaggccgcgagtggaaccatgacgccagcctcgactggcatctgttggaaggcgg

SEQ ID NO: 260388 - DNA, 75 bp, synthetic construct
  source 1..75: mol_type = other DNA
taaagagggtgagtggatccccaacgagtttggtggacgcgagaatctggaagcgattgagttcctgcgcaatac

SEQ ID NO: 260389 - DNA, 75 bp, synthetic construct
  source 1..75: mol_type = other DNA
gaagggagcctatccaagttaccggtccgttcgctgatgaggcgatgaagatcattagctcaatgaagatgaaca

SEQ ID NO: 260390 - DNA, 75 bp, synthetic construct
  source 1..75: mol_type = other DNA
ttgatacaacgcctggtaacgacgcagtatgccccttctctccccctgaggggtgggggggggactctgcggcct

SEQ ID NO: 260391 - DNA, 75 bp, synthetic construct
  source 1..75: mol_type = other DNA
ttaatctcacaatatcgggaaattcactgggttttcatggtgtcacgctcctggtattcccaggcagtagaattg

SEQ ID NO: 260392 - DNA, 75 bp, synthetic construct
  source 1..75: mol_type = other DNA
acgggctgaatcttaatgacacaccattcaacaatgaaaaggtgattcaggaacacatagacgccgggatcactc

SEQ ID NO: 260393 - DNA, 75 bp, synthetic construct
  source 1..75: mol_type = other DNA
ttgaggcagggatttcactgtgtgatgcggtgaactttctcgttgaaaaatacgcactggtacgtaccgaccagc

SEQ ID NO: 260394 - DNA, 75 bp, synthetic construct
  source 1..75: mol_type = other DNA
gaacacatcgatgccggtatcaccctagccgatgccgtgaattttctggtagaaaaatacgaactggtgcgtatc

SEQ ID NO: 260395 - DNA, 75 bp, synthetic construct
  source 1..75: mol_type = other DNA
aagggccttcccgagagtggtaaaggagaggccctggaaataccccacaggtaatgccgatcagttaaggatcag

SEQ ID NO: 260396 - DNA, 75 bp, synthetic construct
  source 1..75: mol_type = other DNA
ttggtattggtgcagacacgcaataccaacttgatcaaatcgccgtgaacctgcgcgtcgtcaatgtgagtaccg

SEQ ID NO: 260397 - DNA, 75 bp, synthetic construct
  source 1..75: mol_type = other DNA
ttgcgtgtagttaatgtcagtaccggtgaaatcctgtcctcagtgaacaccagtaagaccatactttcctatgaa

SEQ ID NO: 260398 - DNA, 75 bp, synthetic construct
  source 1..75: mol_type = other DNA
aaatggcggaacatctgaaaggttactggccgaatcaactgagtttctcagaatcatgcggaatggtgggtaatg

SEQ ID NO: 260399 - DNA, 75 bp, synthetic construct
  source 1..75: mol_type = other DNA
aagggccttcccgagagtggtaaaggagaggccctggaaatacccacagccccgaaaaagagccagtcagttgct

SEQ ID NO: 260400 - DNA, 75 bp, synthetic construct
  source 1..75: mol_type = other DNA
cttcaccagattgtgaatcgcctggacatcatgctgccgggcaatcgccccttcgttgcccccagtgccgttatt

SEQ ID NO: 260401 - DNA, 75 bp, synthetic construct
  source 1..75: mol_type = other DNA
ctgacacgcctgctggaacaacactatggcctgacactgaacgacacgccgttcagtgatgaaactgttattaag

SEQ ID NO: 260402 - DNA, 75 bp, synthetic construct
  source 1..75: mol_type = other DNA
tgggacaacttgtgaaattaccgacaagaagggaaagggccttcccgagagtggtaaaggagaggccctggaaat

SEQ ID NO: 260403 - DNA, 75 bp, synthetic construct
  source 1..75: mol_type = other DNA
ctggcttataatctggtgagatatcagatgattaaaatggcggaacatctgaaaggttactggccgaatcaactg

SEQ ID NO: 260404 - DNA, 75 bp, synthetic construct
  source 1..75: mol_type = other DNA
accgggacgtataccggagctgatgcgcgatcttgcaagtatgggacaacttgtgaaattaccgacgagaagggg

SEQ ID NO: 260405 - DNA, 75 bp, synthetic construct
  source 1..75: mol_type = other DNA
ctgactacaccatcggtttcttcactgcactgagcactgttgtagaagcgatcgaccgtctgcgtgatacatctt

SEQ ID NO: 260406 - DNA, 75 bp, synthetic construct
  source 1..75: mol_type = other DNA
acgtggcatcgatgcgctggttgttatcggcggtgacggttcctacatgggggcaatgcgtctgaccgaaatggg

SEQ ID NO: 260407 - DNA, 75 bp, synthetic construct
  source 1..75: mol_type = other DNA
cgttctgcgctgacagaaggtctggaagtaatgggtatttatgacggctatctgggtctgtatgaagaccgtatg

SEQ ID NO: 260408 - DNA, 75 bp, synthetic construct
  source 1..75: mol_type = other DNA
cccagtgccgttattcaggcccgccagcgcctgggaagtgaggctgtccgccgagtgttcacgaaaacagcgcag

SEQ ID NO: 260409 - DNA, 75 bp, synthetic construct
  source 1..75: mol_type = other DNA
agtgaggctgtccgccgcgtgttcacgaaaacagcgcagctctggcataacgccacgcgcatccgcactggtgcg

SEQ ID NO: 260410 - DNA, 75 bp, synthetic construct
  source 1..75: mol_type = other DNA
gaacatattgatgccggtatctctttagccgatgccgttaattttctggtggaaaaatacgaactggttcgcatc

SEQ ID NO: 260411 - DNA, 75 bp, synthetic construct
  source 1..75: mol_type = other DNA
tattgctttacatgtttccatttgtccttgctgtatggttctgtgttagggtcataaagacagcaagtagtttag

SEQ ID NO: 260412 - DNA, 75 bp, synthetic construct
  source 1..75: mol_type = other DNA
tatgggacaacttgtgaaattaccgacaagaagggaaagggccttcccgagagtggtaaaggagaggccctggaa

SEQ ID NO: 260413 - DNA, 75 bp, synthetic construct
  source 1..75: mol_type = other DNA
ggcgataacactctgacgttaatggacaaaggttattactcactgggactgttaaatgcctggagcctggcggga

SEQ ID NO: 260414 - DNA, 75 bp, synthetic construct
  source 1..75: mol_type = other DNA
tgaaattgcagaggaacagcagcaaatcgcacaggacagtattttctcgacggtcgccgctaattggtttcagct

SEQ ID NO: 260415 - DNA, 75 bp, synthetic construct
  source 1..75: mol_type = other DNA
agggagttgacccacaggaccacgaacgccggaaacgtgaagcagagagtcggaaaaagggcaacacgttcgaaa

SEQ ID NO: 260416 - DNA, 75 bp, synthetic construct
  source 1..75: mol_type = other DNA
ctcaccgctcgccgctttgttgagatactcacccccattaaggcgcgtggcaacctggaaaccctgaaacgcgtt

SEQ ID NO: 260417 - DNA, 75 bp, synthetic construct
  source 1..75: mol_type = other DNA
ccgttcattcgccacgagttcggaagctatggagtgaaattgccagaaatccctctggttgacactctattttcc

SEQ ID NO: 260418 - DNA, 75 bp, synthetic construct
  source 1..75: mol_type = other DNA
gtgattgctacaggggtggacatcgaatcaacaggtcttgatttcctctcaggccataaaatcattgaaatcgca

SEQ ID NO: 260419 - DNA, 75 bp, synthetic construct
  source 1..75: mol_type = other DNA
agaattaccaaagctgatgcgttctttagtcatgtcaaatctgtctatcccgactcgctgtctaattgaatggca

SEQ ID NO: 260420 - DNA, 75 bp, synthetic construct
  source 1..75: mol_type = other DNA
catcggaaacacgccaatagataccctcaccgctcgccgctttgttgagatactcacacccattaaagcacgcgg

SEQ ID NO: 260421 - DNA, 75 bp, synthetic construct
  source 1..75: mol_type = other DNA
ttgctgttggtaatattgagccaatggaaaacgagcaaccagactttgagtttgacccgtatttagttacagagg

SEQ ID NO: 260422 - DNA, 75 bp, synthetic construct
  source 1..75: mol_type = other DNA
acagcatcaaaaattatttggctaacgttgattcttacgagcaattatcacgcaagtttgaagatgtaattatcg

SEQ ID NO: 260423 - DNA, 75 bp, synthetic construct
  source 1..75: mol_type = other DNA
aagtgttaatgtgctggtggggtgattttgtggaatctgctgcaaccggaataaccatcgccagcgggcacaggg

SEQ ID NO: 260424 - DNA, 75 bp, synthetic construct
  source 1..75: mol_type = other DNA
ctattacggagatcaaaaacgcacgaccaggggaaaaggaatacaccctgcaggatggcggaggattatttcttc

SEQ ID NO: 260425 - DNA, 75 bp, synthetic construct
  source 1..75: mol_type = other DNA
gacgtaatcgaggccgcactagcacacgtggacacaaacgaggttagacgggcatataaccggagtaactacctt

SEQ ID NO: 260426 - DNA, 75 bp, synthetic construct
  source 1..75: mol_type = other DNA
atactgatctgatgatgcagtgtttcttcaaagcccgagagaaatacggcttcttcaaactcccattcgaaagcg

SEQ ID NO: 260427 - DNA, 75 bp, synthetic construct
  source 1..75: mol_type = other DNA
cgcttgtgcgttacgctgcgcgcgagcgggcttatccgttctgttactggaacgcgctgaaatccctggcagcaa

SEQ ID NO: 260428 - DNA, 75 bp, synthetic construct
  source 1..75: mol_type = other DNA
tggcgcgcaggcggcggcacaaacgctgataagcgcctgccagcaccgcgagccgcaaaatctgtttccgcttta

SEQ ID NO: 260429 - DNA, 75 bp, synthetic construct
  source 1..75: mol_type = other DNA
gctggaatacggtgcacatctggtgccggaaggcggtttacgcaatatgcccgtgcagttcgccggtaacggctg

SEQ ID NO: 260430 - DNA, 75 bp, synthetic construct
  source 1..75: mol_type = other DNA
tcagctccgcgtgtgcgacttccgcacactgtatcggtaacgcagtcgagcagatccaactgggcaaacaagata

SEQ ID NO: 260431 - DNA, 75 bp, synthetic construct
  source 1..75: mol_type = other DNA
tcaccaaagcgatggcatctggcgtttctgcctgcctcgccacaccgtttaaaattcacggtgttaactactcca

SEQ ID NO: 260432 - DNA, 75 bp, synthetic construct
  source 1..75: mol_type = other DNA
cgtaaccagcttggtgttgaagcccgagctctattaaaagcgcttgtcacacacagagatcggagtgttaagtga

SEQ ID NO: 260433 - DNA, 75 bp, synthetic construct
  source 1..75: mol_type = other DNA
tccgtctttctttttaagcgaatgtgctgaagataaattgaaagaggctgcgaaaagtagaacagaatccacttt

SEQ ID NO: 260434 - DNA, 75 bp, synthetic construct
  source 1..75: mol_type = other DNA
ttgagactggcctttctgacagatgcttacttactcgcggaacagcgcttcgatattcagcccctgcgtttgcag

SEQ ID NO: 260435 - DNA, 75 bp, synthetic construct
  source 1..75: mol_type = other DNA
cgctttgtagtcaggctatggcggtactggaggccatgaagccaatcagccaccaccgcgagcacgttttcccta

SEQ ID NO: 260436 - DNA, 75 bp, synthetic construct
  source 1..75: mol_type = other DNA
tgatattctccgcgcccgttatgttgtgctggcggaaggggccaatagtgtgctggcagaacatcacgggttagt

SEQ ID NO: 260437 - DNA, 75 bp, synthetic construct
  source 1..75: mol_type = other DNA
cgatattctccgcgcccgttatgtggtgctggcagaaggtgccaacagcgtcctggctgaacgtcacgggttagt

SEQ ID NO: 260438 - DNA, 75 bp, synthetic construct
  source 1..75: mol_type = other DNA
gatgaaaaagaaacaagcgatgtgttaagccttatggcctttttccgacaatcaaatgatcctcgcttaatgaag

SEQ ID NO: 260439 - DNA, 75 bp, synthetic construct
  source 1..75: mol_type = other DNA
ttctgctgcttgccggtaaatcagcccgtgcttttgagggcagtgagacatccggcgctggtattgttcctgtta

SEQ ID NO: 260440 - DNA, 75 bp, synthetic construct
  source 1..75: mol_type = other DNA
gatgacccccttccgccctggttgtggaaatccggcggatataccgggttcagcaacaaaatcagtgagttgaca

SEQ ID NO: 260441 - DNA, 75 bp, synthetic construct
  source 1..75: mol_type = other DNA
tcttccggcgcagctcttaatcttcatttcagtaaaccggtgacagcacagtcagtctggcgggcaggaatgacg

SEQ ID NO: 260442 - DNA, 75 bp, synthetic construct
  source 1..75: mol_type = other DNA
tatgcctcttgaggtgatggcaacctgtgatcgtattatctctctggcgcaggagcgcctgggaaagttgcagga

SEQ ID NO: 260443 - DNA, 75 bp, synthetic construct
  source 1..75: mol_type = other DNA
aatattgaggtggtgtacgattccgtcaatcaccctgatttgatcattaaggcaaaattgaagccactttattga

SEQ ID NO: 260444 - DNA, 75 bp, synthetic construct
  source 1..75: mol_type = other DNA
aggccgtgatcccgccgcacgagcgtccgtttattccggtgctgcgtcagttgggattcagtggtagcgatgagc

SEQ ID NO: 260445 - DNA, 75 bp, synthetic construct
  source 1..75: mol_type = other DNA
tcacaggagatattctttctgattacccatatataaacaataaaaataatgagagcaaatatctattatcaatat

SEQ ID NO: 260446 - DNA, 75 bp, synthetic construct
  source 1..75: mol_type = other DNA
tcagtcaagtaaattttgatgatatattctttgattcattaaaaaatgactataaacacggttttattgaatggt

SEQ ID NO: 260447 - DNA, 75 bp, synthetic construct
  source 1..75: mol_type = other DNA
ttgaagatattagacatattgattctttttatagtgaaaaagaattcatacagtattgtacacgatacagtgtat

SEQ ID NO: 260448 - DNA, 75 bp, synthetic construct
  source 1..75: mol_type = other DNA
cgagttattttcccagttatgactggacgtggcgtgaagtggctgaatttgccgggtgtgagacagaaaccgcgt

SEQ ID NO: 260449 - DNA, 75 bp, synthetic construct
  source 1..75: mol_type = other DNA
actgctggtccgcgcctgccagcaaggtgaatggtttggttatctggggttgtttggtacggagttctatcactg

SEQ ID NO: 260450 - DNA, 75 bp, synthetic construct
  source 1..75: mol_type = other DNA
tcgttacagacacttacggtcacttatggtatgcagcgcccagcaaggcgcgtggctggtggctgattcagaatg

SEQ ID NO: 260451 - DNA, 75 bp, synthetic construct
  source 1..75: mol_type = other DNA
ctgtagaagtgaaggtcacccgaaatataacaaaaaactattttatcttctaaagaatcttgatgaaattaactc

SEQ ID NO: 260452 - DNA, 75 bp, synthetic construct
  source 1..75: mol_type = other DNA
ttgtcgcagttttggaagggataactatcaccggaaagttttctatttactgcgaagtcttgatgagattagctc

SEQ ID NO: 260453 - DNA, 75 bp, synthetic construct
  source 1..75: mol_type = other DNA
cagacacaacggttacagctacacaaacaaccccaccagctacgaagtcccagcctttaccaaatccgaacgtaa

SEQ ID NO: 260454 - DNA, 75 bp, synthetic construct
  source 1..75: mol_type = other DNA
aaacctgaaaagccacgaccagggtaaaacgttccgcatcatcatgcagacgctggacgaactgggctatgacgt

SEQ ID NO: 260455 - DNA, 75 bp, synthetic construct
  source 1..75: mol_type = other DNA
ttgaagttggtaatattagcattgcagtcagtgaaccagactttgaatttgacccttacttaatcgcagaaggat

SEQ ID NO: 260456 - DNA, 75 bp, synthetic construct
  source 1..75: mol_type = other DNA
taacttagccactatttgcatgaaagttattgagacaattaatcatcatgcggaagtgggcaatatcagccttac

SEQ ID NO: 260457 - DNA, 75 bp, synthetic construct
  source 1..75: mol_type = other DNA
tttaaaaactttcttgatgagctttgattcttacgagcaactaccatcacgaattgaagatgtaattatcggtac

SEQ ID NO: 260458 - DNA, 75 bp, synthetic construct
  source 1..75: mol_type = other DNA
attacgccacgggtaagacacatgccaacacgcaaagaaaaagagaacactttaaagactttcctgatgagtttt

SEQ ID NO: 260459 - DNA, 75 bp, synthetic construct
  source 1..75: mol_type = other DNA
caaccagaaagagcacgaagaacactattaaaacctatttggctaactttgattcttacgaagaattatcaagca

SEQ ID NO: 260460 - DNA, 75 bp, synthetic construct
  source 1..75: mol_type = other DNA
acactattaaaaattatctggctaactttgacagttacgagcagttaccaagcaagcttgatgatatttttattg

SEQ ID NO: 260461 - DNA, 75 bp, synthetic construct
  source 1..75: mol_type = other DNA
attcatacagcaccgggaatgccgtacaggcaatgctggagaagctgctgcaaatttatgatgttaaaatgctgg

SEQ ID NO: 260462 - DNA, 75 bp, synthetic construct
  source 1..75: mol_type = other DNA
aacaaccccaccagctacgaagccccaacctttagcaaatccgaacgtaagaacattgaagcggtcattcgtagc

SEQ ID NO: 260463 - DNA, 75 bp, synthetic construct
  source 1..75: mol_type = other DNA
agctgccaactgatgcctattgtgcattgcttgctgtaatgtgtgcaaagctaattggtattgttgaacatcata

SEQ ID NO: 260464 - DNA, 75 bp, synthetic construct
  source 1..75: mol_type = other DNA
gtctcggtatacaatattcaggacgaaaccgggcaatttaaaccctacccggcgagtaacttctccactgccgtt

SEQ ID NO: 260465 - DNA, 75 bp, synthetic construct
  source 1..75: mol_type = other DNA
agaaatttctggtagttctgcgaaaacattaccatttgttcttgtaccgtttgccgaacaaaaagtcatagctga

SEQ ID NO: 260466 - DNA, 75 bp, synthetic construct
  source 1..75: mol_type = other DNA
ggtgggaacagattgaaataggcaacattgctgatgtcatctctggtgggacaccaaaatcgggagtcgctgaaa

SEQ ID NO: 260467 - DNA, 75 bp, synthetic construct
  source 1..75: mol_type = other DNA
atcctgaaacgttttcgacaggcggtgcttacctttgccatgaatggagaattaacaaaagaatggcgttctcaa

SEQ ID NO: 260468 - DNA, 75 bp, synthetic construct
  source 1..75: mol_type = other DNA
aaaagcgtaaaggtaacgttattgctaggcagaagtataaagcaagcgaaaagaatgttctaaatgatgcttcgt

SEQ ID NO: 260469 - DNA, 75 bp, synthetic construct
  source 1..75: mol_type = other DNA
atgaaaagtggccggaagcgacaaaacgcgccgttatccgcgatgcctatttcatccactgtcataaaggcacga

SEQ ID NO: 260470 - DNA, 75 bp, synthetic construct
  source 1..75: mol_type = other DNA
attattcaggacattcccggtcatatgtatgtcggtggtgtggtgtatgacggcgacattattacggtttatccc

SEQ ID NO: 260471 - DNA, 75 bp, synthetic construct
  source 1..75: mol_type = other DNA
atgaaaagtggccggaagcgacaaaacgcaccgttatccgcgatgcctatttcatccactgtcataagggtactg

SEQ ID NO: 260472 - DNA, 75 bp, synthetic construct
  source 1..75: mol_type = other DNA
aaccgcggataaagcattgagcagatgttcacctgaaagggatgatattttaattgtaagtagaggtgcaactgt

SEQ ID NO: 260473 - DNA, 75 bp, synthetic construct
  source 1..75: mol_type = other DNA
gaaaaaacgccggtcagtattcgtgagctgtggaacccggacacctgtccggcaaatctgctgccgtggctggcg

SEQ ID NO: 260474 - DNA, 75 bp, synthetic construct
  source 1..75: mol_type = other DNA
gctcggctatctcatcaacgtgacggagtggtgggaaaacagtgacccgcccggcaccttccggcttgatattgg

SEQ ID NO: 260475 - DNA, 75 bp, synthetic construct
  source 1..75: mol_type = other DNA
atatccagaaagctatcgtcagcaatgcttttacagaacaaaaattctgcaatcaacaaccgtctttgcacccaa

SEQ ID NO: 260476 - DNA, 75 bp, synthetic construct
  source 1..75: mol_type = other DNA
cgctggcctggatatgtttaacggcttaacccatatacaccgcccggtggttcttgggccgttggttgggctggt

SEQ ID NO: 260477 - DNA, 75 bp, synthetic construct
  source 1..75: mol_type = other DNA
ggattaccttcctgttctcggtgatgtctggcgtgatgtcccgttgcgaccggatggcggaaaatgccgatacgc

SEQ ID NO: 260478 - DNA, 75 bp, synthetic construct
  source 1..75: mol_type = other DNA
tgttttccgccgtgcagtatgtgcgattccgacgaattctcttaacaagacgtttgctactttttataaggtcat

SEQ ID NO: 260479 - DNA, 75 bp, synthetic construct
  source 1..75: mol_type = other DNA
ggtgctgaaaccgcagtcgccactatcagggtatggacacgatttcgtagcgatataactgctgcgtccagactc

SEQ ID NO: 260480 - DNA, 75 bp, synthetic construct
  source 1..75: mol_type = other DNA
caaccaaaaagtgaggagcagcaacaccatgacgcatctcaacaagtttgctccttatctcgcgaagctcttcta

SEQ ID NO: 260481 - DNA, 75 bp, synthetic construct
  source 1..75: mol_type = other DNA
gctaaccattattgcgacccggcgacgcatcactttaatgaagatatccgcgacatcactctgagccataaagag

SEQ ID NO: 260482 - DNA, 75 bp, synthetic construct
  source 1..75: mol_type = other DNA
gtcaaaaacctgaaaagccacgaccagggtaaaacgttccgcatcatcatgcagacgctggacgaactgggctat

SEQ ID NO: 260483 - DNA, 75 bp, synthetic construct
  source 1..75: mol_type = other DNA
acagacccgccgccgcatcatcgatgagaaaaccagtccgggtggcgaacgctggccggactggtctgacgggta

SEQ ID NO: 260484 - DNA, 75 bp, synthetic construct
  source 1..75: mol_type = other DNA
agtgggagcacagagcgggaagaatgctgttgagaataattaccttagcacaaaccagtctctgaccttcgataa

SEQ ID NO: 260485 - DNA, 75 bp, synthetic construct
  source 1..75: mol_type = other DNA
acctggtgctggcgcatcgcaagggcaatcacattcatattgaccacgtctggcgtcagggtaaaagggtgttct

SEQ ID NO: 260486 - DNA, 75 bp, synthetic construct
  source 1..75: mol_type = other DNA
cgcactccggcaacgtggcggccagtgaactggcacagcttggcctgctggatatcctctcttccgactactacc

SEQ ID NO: 260487 - DNA, 75 bp, synthetic construct
  source 1..75: mol_type = other DNA
ccgttctcaggcaggtttaaccgtcgtgacggcagccgttgcaatgacagaccacgacggtatgcgaattgcgct

SEQ ID NO: 260488 - DNA, 75 bp, synthetic construct
  source 1..75: mol_type = other DNA
gataactatcgccaggcaatgaaaaaactctcttcagggcgcggaaatgtgctggcgcaggcagaagcgtttcgc

SEQ ID NO: 260489 - DNA, 75 bp, synthetic construct
  source 1..75: mol_type = other DNA
gtcgccgctacgtgaacaactggacggtttccgccgtcaggttcaggacagctttggtaaagaagcacaggaacg

SEQ ID NO: 260490 - DNA, 75 bp, synthetic construct
  source 1..75: mol_type = other DNA
ttgccggtgacgagcacgccgcacgtctttccctcgttcgcgattacgtcctctcgttcgctggccgtctgccgg

SEQ ID NO: 260491 - DNA, 75 bp, synthetic construct
  source 1..75: mol_type = other DNA
cgcctgcacgacgtagaaaaacaaaacctggaaggtagcgcgctggaacacgctgtcgccaacgccatttttccc

SEQ ID NO: 260492 - DNA, 75 bp, synthetic construct
  source 1..75: mol_type = other DNA
gttaccgctgccgttgcgttaaccgagcacgatggtctacggattgcgctggacggcgtcaccagtaaaactcag

SEQ ID NO: 260493 - DNA, 75 bp, synthetic construct
  source 1..75: mol_type = other DNA
ttgattcactgctcgcgagcctactggaggaagaggggaaccggaccaataacaaaaccctggctgattatgcca

SEQ ID NO: 260494 - DNA, 75 bp, synthetic construct
  source 1..75: mol_type = other DNA
gatacagtattctcctaagcagggcggggcaaccgtatctggtgactatatttatctggccaccccacaagtaga

SEQ ID NO: 260495 - DNA, 75 bp, synthetic construct
  source 1..75: mol_type = other DNA
gtaaagggctgaaagtgctggcttactgggaaaacggctggcgcgatgtcaccaactcgcgtgcaccggttaaaa

SEQ ID NO: 260496 - DNA, 75 bp, synthetic construct
  source 1..75: mol_type = other DNA
attattcagcgcccgttattctaaatacagtgttaacacttcttctgcaggcgctcatacgcactctgtatcggg

SEQ ID NO: 260497 - DNA, 75 bp, synthetic construct
  source 1..75: mol_type = other DNA
accctgaatttgtctttgtgtttgcggctgtccgtcgcgcagaccgtcatcccagtatctgtatgcttcgcaccg

SEQ ID NO: 260498 - DNA, 75 bp, synthetic construct
  source 1..75: mol_type = other DNA
atcatgaaaacgctcgatgagcttggctacgacgtcgcaaacagcgaaagcacgggcgcggatgatcctaaagtc

SEQ ID NO: 260499 - DNA, 75 bp, synthetic construct
  source 1..75: mol_type = other DNA
cgatgcggggaaaaaacaagctgaatggatgaaaggtaaattagttaaatctgattgttctccagccatgaatcg

SEQ ID NO: 260500 - DNA, 75 bp, synthetic construct
  source 1..75: mol_type = other DNA
tgttgcacggattattaaagcaaagcgcccggcgatatttgtactggaaaatgtcaaaaacttaaaaagccatga

SEQ ID NO: 260501 - DNA, 75 bp, synthetic construct
  source 1..75: mol_type = other DNA
gcctcgttgctgatgcaaaaccggcaagccgccatctgacgggactggctatcagtttaagtacaaccggcaaca

SEQ ID NO: 260502 - DNA, 75 bp, synthetic construct
  source 1..75: mol_type = other DNA
tgtggtgccagtatttgaagccgttgccagacttctggaaccctatatcctcaaagctgtttctgctgatgctgg

SEQ ID NO: 260503 - DNA, 75 bp, synthetic construct
  source 1..75: mol_type = other DNA
ataaggaaagcattgcacgcacactttctgccagatatcacaaagacggatcagaaattcttattgatcgtggtt

SEQ ID NO: 260504 - DNA, 75 bp, synthetic construct
  source 1..75: mol_type = other DNA
acggcgttaacgtttcgccaggtattggttcatttcaggcaaaaaaatatgcctggcatgatacagtgcccctga

SEQ ID NO: 260505 - DNA, 75 bp, synthetic construct
  source 1..75: mol_type = other DNA
gtcgccgctgcgtgaacaactggacggttttcgccgtcaggttcaggacagcttcggtaaagaagcacaagaacg

SEQ ID NO: 260506 - DNA, 75 bp, synthetic construct
  source 1..75: mol_type = other DNA
aaagccgagcaattagctgaacgtgaagagatggtcgcggagttaagcgcggcaaaacaacaaattacccaaagc

SEQ ID NO: 260507 - DNA, 75 bp, synthetic construct
  source 1..75: mol_type = other DNA
ccgagctggattttgagcaatggctcgatatggaagggatcatctaccgtcgtggtggagtcagtactcgcggac

SEQ ID NO: 260508 - DNA, 75 bp, synthetic construct
  source 1..75: mol_type = other DNA
cgtaatgtgatcatgatgtgggatagtgaaaagcaagctatacgcaacactatggccgcagccaggcgactgacc

SEQ ID NO: 260509 - DNA, 75 bp, synthetic construct
  source 1..75: mol_type = other DNA
gatagtgaaaagcaagctatacgaaacacgatggccgcagccaggcgactgaccagtattggtcttaatgtcaaa

SEQ ID NO: 260510 - DNA, 75 bp, synthetic construct
  source 1..75: mol_type = other DNA
gctatcgacatgggctggcgtagacactgaacgcctgacagtgacggctctgccagctattaccacttatggaga

SEQ ID NO: 260511 - DNA, 75 bp, synthetic construct
  source 1..75: mol_type = other DNA
tcagcgtcactttccgacattgagatgcgtggtttcacctttgatcaaaaacgccagacacttcacctccagcta

SEQ ID NO: 260512 - DNA, 75 bp, synthetic construct
  source 1..75: mol_type = other DNA
gagcaggatttaccgctttcgctaaccgtagtcggcattgcaccggaagagctatcagcatgggctggcgcagat

SEQ ID NO: 260513 - DNA, 75 bp, synthetic construct
  source 1..75: mol_type = other DNA
cattcctacaaatcacactttccaacaataattacaaatcattagagcatctgcaaacacgagcagagaattatc

SEQ ID NO: 260514 - DNA, 75 bp, synthetic construct
  source 1..75: mol_type = other DNA
accaacagcatatgcgcaacattgcgcagtggttgcaggaaaacggtatcacccgcgctaccgtcgcgccggact

SEQ ID NO: 260515 - DNA, 75 bp, synthetic construct
  source 1..75: mol_type = other DNA
gtgagttccatgcttgagatttttttcccgctttgcgtcaccgaccccatccgctggcagcgccgtacacccgac

SEQ ID NO: 260516 - DNA, 75 bp, synthetic construct
  source 1..75: mol_type = other DNA
aatacctgcgagatgctgaaagccgcattcagcgagcacgagaagtctgtaaaagcggaactgagcgcaagcgcg

SEQ ID NO: 260517 - DNA, 75 bp, synthetic construct
  source 1..75: mol_type = other DNA
aaaaaatatacctccggcgtcctgtcctttgccgaacaggacttaccgcccgggcagcgtgaaaagctgatggcg

SEQ ID NO: 260518 - DNA, 75 bp, synthetic construct
  source 1..75: mol_type = other DNA
ctgaacaggtcggcaaatgggctgcgcgccatatcgtcaatcgcatcaatgcgttcaaaccgactgccgatcgcc

SEQ ID NO: 260519 - DNA, 75 bp, synthetic construct
  source 1..75: mol_type = other DNA
agcctactggcgcgtctttcgggaagtgtcgctagtttcctgattgaggaagaaagtaagctggtgggggattaa

SEQ ID NO: 260520 - DNA, 75 bp, synthetic construct
  source 1..75: mol_type = other DNA
tttgttctgccatttaacccggcagatgttcagccgaacgcgcgtattctgttgagtgcggcgattaccgtgaat

SEQ ID NO: 260521 - DNA, 75 bp, synthetic construct
  source 1..75: mol_type = other DNA
tcgttagccgatgcgccttctaaagttctggcgcagaaagcagtacgtaccgaaggtaaacagtcaccgttcagt

SEQ ID NO: 260522 - DNA, 75 bp, synthetic construct
  source 1..75: mol_type = other DNA
caataactacaaatcattacagcatctgaaaacacgagcagaaaattatctaaggcatcgcaaaacggaacacaa

SEQ ID NO: 260523 - DNA, 75 bp, synthetic construct
  source 1..75: mol_type = other DNA
tggttcagaggagccaaaacctggttcaccattttacggtagtcgtggattaaaattatccgatagtgcccgttc

SEQ ID NO: 260524 - DNA, 75 bp, synthetic construct
  source 1..75: mol_type = other DNA
cagcaaagcccgaattaagtcaaagatgtatttctggactcctcacaactgggccaaatgatgaaaacgtaaata

SEQ ID NO: 260525 - DNA, 75 bp, synthetic construct
  source 1..75: mol_type = other DNA
cgcacagtgacgtgacgaccggtaagcgacgtcacgaagcctacctggcgttctgcaaagcgcataaactgcatc

SEQ ID NO: 260526 - DNA, 75 bp, synthetic construct
  source 1..75: mol_type = other DNA
acgtataccggagctgatgcgcgatcttgcaagtatgggacaaccagtgaaattaccgacaagaagggaaaggcc

SEQ ID NO: 260527 - DNA, 75 bp, synthetic construct
  source 1..75: mol_type = other DNA
cgcttcaccgggacgtataccggagctgatgcgcgatcttgcaagtatgggacaacttgtgaaattaccgacaag

SEQ ID NO: 260528 - DNA, 75 bp, synthetic construct
  source 1..75: mol_type = other DNA
ggctggcggtaatgatgagcaggcaatgtataatgttacgcaagaagccgctcgtattctgcacgaagctgaaac

SEQ ID NO: 260529 - DNA, 75 bp, synthetic construct
  source 1..75: mol_type = other DNA
gatgaatcagcatggattttccccttcccgctctgcgcgcgctatgcgtgggcaaagcgataaagtggtcgccat

SEQ ID NO: 260530 - DNA, 75 bp, synthetic construct
  source 1..75: mol_type = other DNA
taaaccggcagcattgtccttcatcatatttgcgacgatgtataacgcctacacacagcgatattgtactttaca

SEQ ID NO: 260531 - DNA, 75 bp, synthetic construct
  source 1..75: mol_type = other DNA
gatacaggcaaggatcaaacgtgaggttgaactttttcagaaatgtgataacgggaagttaatagcaacgatacg

SEQ ID NO: 260532 - DNA, 75 bp, synthetic construct
  source 1..75: mol_type = other DNA
ccgttgccgctctgccaggccttgctatgaagcaaggctatgagaacgtagcaaaagtgattacgcctgaaacta

SEQ ID NO: 260533 - DNA, 75 bp, synthetic construct
  source 1..75: mol_type = other DNA
tcagaaaatctcgcggttcagaccatgctgccggcgttctatgaacagggttacgaccccatcatgatggaaagc

SEQ ID NO: 260534 - DNA, 75 bp, synthetic construct
  source 1..75: mol_type = other DNA
ggcaaagcgataaagtggtcgccatcattgttacccgcctggattcgttgtcagaaaatctcgccgttcaaacca

SEQ ID NO: 260535 - DNA, 75 bp, synthetic construct
  source 1..75: mol_type = other DNA
cctgctgccgctgtgcctgtgcctgatgatgtggctgaccgggtgcggcgggccgtctgtgaaattcgtccctgt

SEQ ID NO: 260536 - DNA, 75 bp, synthetic construct
  source 1..75: mol_type = other DNA
ctggatggactggagcaaaaaactgaataattacgccagcgacgacgccctgggcagtgacggttttaactcggg

SEQ ID NO: 260537 - DNA, 75 bp, synthetic construct
  source 1..75: mol_type = other DNA
aagcggatttgagtttcacggttacgcccgctccggcgtgataatgaatgattccggcgccagcaccaaatccgg

SEQ ID NO: 260538 - DNA, 75 bp, synthetic construct
  source 1..75: mol_type = other DNA
gcactttgcaattttgaggactgtaaaacaacaggcaatagttgcagtaatacatcagcaacatatgaaatatat

SEQ ID NO: 260539 - DNA, 75 bp, synthetic construct
  source 1..75: mol_type = other DNA
atcagcggcgtacgtggcggcaccatcgatatggaaatgtccggctcgaataactttgccgggttgtcacctgtg

SEQ ID NO: 260540 - DNA, 75 bp, synthetic construct
  source 1..75: mol_type = other DNA
gcagagcgttgtccgccggtcgctggcagcagtgcctgcggcctctgcccctgttcctgatgatgtggctgatcg

SEQ ID NO: 260541 - DNA, 75 bp, synthetic construct
  source 1..75: mol_type = other DNA
cagatataggccgttggggcaatggcgatgttgaagtaggtttcagcgatctttctgagcttccttatgtgatgg

SEQ ID NO: 260542 - DNA, 75 bp, synthetic construct
  source 1..75: mol_type = other DNA
tggctcatggcgagccatggcgtattcacccggtggagtcggtgatattgggactgcctgttttttagctattag

SEQ ID NO: 260543 - DNA, 75 bp, synthetic construct
  source 1..75: mol_type = other DNA
tgaagccgctgcgctggcatcgggtgtacccgtggtgctgaataaattcgttattggcgacgcaaacggaaacga

SEQ ID NO: 260544 - DNA, 75 bp, synthetic construct
  source 1..75: mol_type = other DNA
ttcggggagatggaggatatcgataacaacgtccagaactatatccttaccatgaaccactttgccgggccgttc

SEQ ID NO: 260545 - DNA, 75 bp, synthetic construct
  source 1..75: mol_type = other DNA
atgagcatgatttgctttttcatggcagcgttgctcgcattgaatggcaacgatgcgtggccgtggtttctggcc

SEQ ID NO: 260546 - DNA, 75 bp, synthetic construct
  source 1..75: mol_type = other DNA
cgtctacaaccgggattttgtgagcgataacctaaacttcttggtcaatcagaccgacggcgagatcaagacgtt

SEQ ID NO: 260547 - DNA, 75 bp, synthetic construct
  source 1..75: mol_type = other DNA
atcggtactatcgtcggcacggcgtttgccattactaccggcgtgaaacccgatgtcgcggtcggtgtcgccgta

SEQ ID NO: 260548 - DNA, 75 bp, synthetic construct
  source 1..75: mol_type = other DNA
gcaggtgacgatggcgctgaaaaaatatcgcccacaggccgacgatacccggctgctcgcagaattgtcagcgat

SEQ ID NO: 260549 - DNA, 75 bp, synthetic construct
  source 1..75: mol_type = other DNA
gagcaggcgtctccgctttcgctgaccgtagtcggaatcgcgccggaagagctatctgcatgggctggcccagac

SEQ ID NO: 260550 - DNA, 75 bp, synthetic construct
  source 1..75: mol_type = other DNA
tcagcgtcacttaccgacatcgaaatgcgtggtttcacctttgatcaaaaacgccagacgcttcacctccaactg

SEQ ID NO: 260551 - DNA, 75 bp, synthetic construct
  source 1..75: mol_type = other DNA
cgtcgcgaactctcgtttctttgataacgatgttaatcaggtgccaaaatatgccctgactgtcggtgttggtac

SEQ ID NO: 260552 - DNA, 75 bp, synthetic construct
  source 1..75: mol_type = other DNA
gtgccgccagtatgaagaaaaaatccgctcttacggtaaaattcatctgtttatgggcggcgtaggtaacgacgg

SEQ ID NO: 260553 - DNA, 75 bp, synthetic construct
  source 1..75: mol_type = other DNA
gtcagcgatagccagcaccctgaaatcagcatcactttccgacatcgaaatgcgtggtttcacctttgatcaaaa

SEQ ID NO: 260554 - DNA, 75 bp, synthetic construct
  source 1..75: mol_type = other DNA
agttcttaacgctattcctggagcagaagcggattgtgaatttacgctctcagatgacgatggcgctgaaaaaat

SEQ ID NO: 260555 - DNA, 75 bp, synthetic construct
  source 1..75: mol_type = other DNA
aacgcctgaccgttacggctctgccagccattatcacttatggcgaaccggaagggaacctgctaacagggccgt

SEQ ID NO: 260556 - DNA, 75 bp, synthetic construct
  source 1..75: mol_type = other DNA
tgccgctgcgctggcgatggcgctgatcgacctgctgcgtaaatctcctgaaccgactcaacctgcggcacagaa

SEQ ID NO: 260557 - DNA, 75 bp, synthetic construct
  source 1..75: mol_type = other DNA
acaaactgcgtaatgcactggcggcagattttgttgtgcagcaggacgcgttacagaaagagggtgatgcggttt

SEQ ID NO: 260558 - DNA, 75 bp, synthetic construct
  source 1..75: mol_type = other DNA
ccgtggtcggcattgcaccggaagaactgtctgcatgggctggtgcagacgccgaacgcctgagagtgtcggctc

SEQ ID NO: 260559 - DNA, 75 bp, synthetic construct
  source 1..75: mol_type = other DNA
tgcgtggtttcacctttgatcaaaaacgccagacgctccaccttcagttgcgggcagcaaactttgccagtttcg

SEQ ID NO: 260560 - DNA, 75 bp, synthetic construct
  source 1..75: mol_type = other DNA
aacattgcttggcgtgctcaatgccagcagtcgtcagggcctaaacgcagagttaacccgctacaccctgagtct

SEQ ID NO: 260561 - DNA, 75 bp, synthetic construct
  source 1..75: mol_type = other DNA
tatggatttgttatctccgactggaacatgcccaatatggatggcctggaattgctgaaaacaattcgtgcggat

SEQ ID NO: 260562 - DNA, 75 bp, synthetic construct
  source 1..75: mol_type = other DNA
tatttctcaactggtgattacctctattgcgttgattatcctcaccaataccggtggtggtaataacatgtcctt

SEQ ID NO: 260563 - DNA, 75 bp, synthetic construct
  source 1..75: mol_type = other DNA
atcacattcaagcgactggatctggtggataagatgaatgatatcgtggcgaagcactttcccgggatgttgcct

SEQ ID NO: 260564 - DNA, 75 bp, synthetic construct
  source 1..75: mol_type = other DNA
ctggtgaagcatgacagatggggctacagcctgaactggggctggcggcgagatcagcttgccgatctggagcgt

SEQ ID NO: 260565 - DNA, 75 bp, synthetic construct
  source 1..75: mol_type = other DNA
tcaaacgtttggatctggtggataagatgaatgacattgtggcgaagcactatccatcagcgttatcagcaaaat

SEQ ID NO: 260566 - DNA, 75 bp, synthetic construct
  source 1..75: mol_type = other DNA
ttaagtaccggaacaacgtgattgaatgcgatcatggcaaactgaaacggataatcggcgccacgctgggattta

SEQ ID NO: 260567 - DNA, 75 bp, synthetic construct
  source 1..75: mol_type = other DNA
ctgctgcgcaaactcaatgtccgctcacgcgtggcggccaccattctgttcctgcaacaacgcggggcacaataa

SEQ ID NO: 260568 - DNA, 75 bp, synthetic construct
  source 1..75: mol_type = other DNA
tcggtgttgaatatttccgaacagacggtgaaagtgcacattcgtaatctgctgcgtaaactcaatgttcgctca

SEQ ID NO: 260569 - DNA, 75 bp, synthetic construct
  source 1..75: mol_type = other DNA
gttctggcggaaatcgcttcctggattgttggcccttctcgcggtatgtacgtcaccgcacagaaaaacctgctg

SEQ ID NO: 260570 - DNA, 75 bp, synthetic construct
  source 1..75: mol_type = other DNA
tcatcaacacggataaagggcactgttgcaaagttagcgatgaggcagccttttgtcttattcaaaggccttaca

SEQ ID NO: 260571 - DNA, 75 bp, synthetic construct
  source 1..75: mol_type = other DNA
ttaacccattcaaaggccggcattttcagcgcgatattatcctgtgggcggtacgctggtactgcaaatataaca

SEQ ID NO: 260572 - DNA, 75 bp, synthetic construct
  source 1..75: mol_type = other DNA
cgatctcatgctgaagtctgggatgttgactctgatggatgccgaagcccgcagtcagtgggcaaagaacctgga

SEQ ID NO: 260573 - DNA, 75 bp, synthetic construct
  source 1..75: mol_type = other DNA
cactgcaggtggaaggacggctcatcaaactggacaaccggcagatggcaatgtttctggtgatcctgatgcagg

SEQ ID NO: 260574 - DNA, 75 bp, synthetic construct
  source 1..75: mol_type = other DNA
cattcacaagtggcgccagcgtttgcagcagcgcggtttaattgcctggccgttaaaggtagatggtaaattatc

SEQ ID NO: 260575 - DNA, 75 bp, synthetic construct
  source 1..75: mol_type = other DNA
tgaatcctgaagcgatcccaggttataaaaaatttgcacaggccattgcgaccgataacttcgttcaggctgatg

SEQ ID NO: 260576 - DNA, 75 bp, synthetic construct
  source 1..75: mol_type = other DNA
aagctggtcacgaaggcaaggtttacgaactggcgggcgacagcgcctggacgctgacacagttagcggcagagc

SEQ ID NO: 260577 - DNA, 75 bp, synthetic construct
  source 1..75: mol_type = other DNA
aatctccgctcggcctggctgctgagcatatcgagacggagaaaatgctggctaattctggcatcgcttataccc

SEQ ID NO: 260578 - DNA, 75 bp, synthetic construct
  source 1..75: mol_type = other DNA
atgacccgcgccgctgttccggcaattccgtatcggaggtgctggataaattcagaaaaaactacgatcgaataa

SEQ ID NO: 260579 - DNA, 75 bp, synthetic construct
  source 1..75: mol_type = other DNA
accctggagtttatcagtctggtgcagagcaagcgggataacacgcgctctcagtcaattcccgctggagatggc

SEQ ID NO: 260580 - DNA, 75 bp, synthetic construct
  source 1..75: mol_type = other DNA
ttcgctttataccatcaccgtatggataccgaccatatttgttaactccggcattgatgtcgataaatcaatatt

SEQ ID NO: 260581 - DNA, 75 bp, synthetic construct
  source 1..75: mol_type = other DNA
ggagggcgatctcccggcgattagcgaagccaacatcctgagtacctttgaacaactccaccacaataagcagga

SEQ ID NO: 260582 - DNA, 75 bp, synthetic construct
  source 1..75: mol_type = other DNA
caggtatcctggtgctgattggcgtggtgaatctgccgattattcattactccgtggagtggtggaacaccctgc

SEQ ID NO: 260583 - DNA, 75 bp, synthetic construct
  source 1..75: mol_type = other DNA
ctgcgagtggttagatatgacgccgatcaacacaaaactgacggcaatggatgaagtgattgtacttagaagagc

SEQ ID NO: 260584 - DNA, 75 bp, synthetic construct
  source 1..75: mol_type = other DNA
taccgtgaaggcggtccgcttggtatggccagcagacgatgtggcatgcgtggtaaccgtcagttgcctcccggg

SEQ ID NO: 260585 - DNA, 75 bp, synthetic construct
  source 1..75: mol_type = other DNA
aaggcgatcccctgcaggtggctgacttgtatcagacctgttatgacgcgggtcttccggtacatatccagatta

SEQ ID NO: 260586 - DNA, 75 bp, synthetic construct
  source 1..75: mol_type = other DNA
ggcgagccgctggacgtggcgcagtggctgcatgcctgtcacgatgccggaatagaagttcgtgtacaggttaat

SEQ ID NO: 260587 - DNA, 75 bp, synthetic construct
  source 1..75: mol_type = other DNA
cagtggagctgacggatgccgaccgggccatagcacaccctcttctgctggcagaacaggaccgcctccgggcag

SEQ ID NO: 260588 - DNA, 75 bp, synthetic construct
  source 1..75: mol_type = other DNA
tgatactgcacgttcattaagtcagcaaaaatcgctgattcgccagttgcgtcagcacgtcgggtttgtcttcca

SEQ ID NO: 260589 - DNA, 75 bp, synthetic construct
  source 1..75: mol_type = other DNA
ggtgctgcacggtatcgacctcgaggtaaagcctggcgaagtggtggcaattatcggtccgagtggttccggcaa

SEQ ID NO: 260590 - DNA, 75 bp, synthetic construct
  source 1..75: mol_type = other DNA
agaacagcgtgcggcagaagtcgtcgtactgccgctggtcccggcagcaggtctgcccgcaggcggcacttctgc

SEQ ID NO: 260591 - DNA, 75 bp, synthetic construct
  source 1..75: mol_type = other DNA
gctgcgtaaactcaacgtccgctcacgcgtggcggccaccattctgttcctgcaacaacgcattattcgaaatct

SEQ ID NO: 260592 - DNA, 75 bp, synthetic construct
  source 1..75: mol_type = other DNA
tctcatggagttcacttaagagcctttttttccggcaacaccaggggaacaatgctgccattaatatcctgcagg

SEQ ID NO: 260593 - DNA, 75 bp, synthetic construct
  source 1..75: mol_type = other DNA
agactcagacaggcccggttcagcgccattgatcgggaaagccaccatttcgtcagaagctgtggtcagacggaa

SEQ ID NO: 260594 - DNA, 75 bp, synthetic construct
  source 1..75: mol_type = other DNA
gcagaacaggaccgcctccgggcagaacagcgcacggcggaagttgttgtactgccgctgatcccgttatcagtt

SEQ ID NO: 260595 - DNA, 75 bp, synthetic construct
  source 1..75: mol_type = other DNA
cagcctctgctgcaggctgaacgggaccgcctccgggcagaacagcgcgcggcggaagtcgtcgtactgccgctg

SEQ ID NO: 260596 - DNA, 75 bp, synthetic construct
  source 1..75: mol_type = other DNA
cgaaggccagaatcatgccaaaagcaaaaaccacggcagccacaaccccgacagttaaggggagcaacggcgcag

SEQ ID NO: 260597 - DNA, 75 bp, synthetic construct
  source 1..75: mol_type = other DNA
acggtgctggaaaacattattgaagggccggtgatcgtcaaaggcgaaccgaaagaagaggccacggcgcgcgct

SEQ ID NO: 260598 - DNA, 75 bp, synthetic construct
  source 1..75: mol_type = other DNA
tgcggcgatgcatgaatcgttactgaacttactcagtgacaccaaaccgtggccccaactgactggcaaagcaac

SEQ ID NO: 260599 - DNA, 75 bp, synthetic construct
  source 1..75: mol_type = other DNA
ccgagttcagacgctatctacttgcatgacacgcctaatcacaatctgttcaagcgtgatacacgcgcgttaagc

SEQ ID NO: 260600 - DNA, 75 bp, synthetic construct
  source 1..75: mol_type = other DNA
tgccgcgatgcatgaatctttattgaccttactcagcgatacgaaaccgtggccacaactgaccggtaaagcaac

SEQ ID NO: 260601 - DNA, 75 bp, synthetic construct
  source 1..75: mol_type = other DNA
tcagtcagtatttacacgagcgtgaaatgtttggcgccgaggaagatcccttcagcgtgctgacagagcgcgagc

SEQ ID NO: 260602 - DNA, 75 bp, synthetic construct
  source 1..75: mol_type = other DNA
gtgaagaagtggcagatcccacgatcctcaacacggataaagcgcccgcctatggtcgcgcgcttgctctgctca

SEQ ID NO: 260603 - DNA, 75 bp, synthetic construct
  source 1..75: mol_type = other DNA
tcgtacagatatttacaattatgatctgcctgcgcgatccagctcgcaaatcgtatcgaaagcggaacaattaat

SEQ ID NO: 260604 - DNA, 75 bp, synthetic construct
  source 1..75: mol_type = other DNA
gcaggatgctggctggaatgacaaacgtatttccgatgcgctgaagcagggcgatacccggtacgttaatatccg

SEQ ID NO: 260605 - DNA, 75 bp, synthetic construct
  source 1..75: mol_type = other DNA
tacctgacggcctttgttggtgcagatggtcgtacccagtatcgtacagatatttacaattatgatctgcctgcg

SEQ ID NO: 260606 - DNA, 75 bp, synthetic construct
  source 1..75: mol_type = other DNA
gcaggttgactggtctacaatcacggcctcgaatttaccgttccgcttccagcaggctccaggcccacggaactc

SEQ ID NO: 260607 - DNA, 75 bp, synthetic construct
  source 1..75: mol_type = other DNA
tctggccgtaacattcgctccactgttcagtgtgcaggctgatgagcctgaagtaatccctggcgacagcccggt

SEQ ID NO: 260608 - DNA, 75 bp, synthetic construct
  source 1..75: mol_type = other DNA
ggaaagccatggctatacggtgatgcgtggctggaacagcaaagaagcaattgacccgtggcaggttgactggtc

SEQ ID NO: 260609 - DNA, 75 bp, synthetic construct
  source 1..75: mol_type = other DNA
caacgtagtggtaaacccgccgtggaacgtaccaccaactctggcacgcaaagatattctgccgaaagtgcgcaa

SEQ ID NO: 260610 - DNA, 75 bp, synthetic construct
  source 1..75: mol_type = other DNA
tcaaatcaacagctgcaggccgttatcaacttctttcacgttggtgggatgcttaccgcaagcagcttgagctga

SEQ ID NO: 260611 - DNA, 75 bp, synthetic construct
  source 1..75: mol_type = other DNA
ttaaatcaacagccgcaggccggtatcagcttctttcacgctggtgggatgcctatcgcaagcagcttggcctga

SEQ ID NO: 260612 - DNA, 75 bp, synthetic construct
  source 1..75: mol_type = other DNA
cgctgttgcgctgcagcagattaaagagcgtggcgctttgccgatgattgatcgcggtgatattcgtcaggcaat

SEQ ID NO: 260613 - DNA, 75 bp, synthetic construct
  source 1..75: mol_type = other DNA
acgacagcggcaaacgcgccaccatgtttggctcggtagcggtgatccgtgaatctggcgtaaacagtttgcgtg

SEQ ID NO: 260614 - DNA, 75 bp, synthetic construct
  source 1..75: mol_type = other DNA
tcaatcactgaatgtgaagaatgacctgtcgcacttcccgattccgttctttgacccacgcgataaccgtgctaa

SEQ ID NO: 260615 - DNA, 75 bp, synthetic construct
  source 1..75: mol_type = other DNA
acatgacgcatgcgacgcctgcaacgcaaccactgatcaatgctgagccagccgtacctactcaggcggagcaga

SEQ ID NO: 260616 - DNA, 75 bp, synthetic construct
  source 1..75: mol_type = other DNA
gagcgtggcgctttaccgatgattgatcgcggcgatatccggcaggcaatcgaccgttgcagtaatatctgggct

SEQ ID NO: 260617 - DNA, 75 bp, synthetic construct
  source 1..75: mol_type = other DNA
gctggcggtgctggcggctatcagtgtgatattgctggcgtgggtactgtggcgtctgctgcgtattattagtcg

SEQ ID NO: 260618 - DNA, 75 bp, synthetic construct
  source 1..75: mol_type = other DNA
cgtggtgttgctggcctgggtactgtggcgtctgctgcgtatcatcagccgtcgtcgtcttaacccggataatga

SEQ ID NO: 260619 - DNA, 75 bp, synthetic construct
  source 1..75: mol_type = other DNA
agtgagtgctcattatgcgtttcaaacggatactagctatagcaatcagatggattttttattagatgtaatgaa

SEQ ID NO: 260620 - DNA, 75 bp, synthetic construct
  source 1..75: mol_type = other DNA
cactgattactccgatcaccctcgcaaacttgtcacgctaaacccgaagcttaaatcaacagccgcaggccggta

SEQ ID NO: 260621 - DNA, 75 bp, synthetic construct
  source 1..75: mol_type = other DNA
cgctgtggcattgcaacagattaaagagcgtggcgctttaccgatgattgatcgcggtgatatccgtcaggctat

SEQ ID NO: 260622 - DNA, 75 bp, synthetic construct
  source 1..75: mol_type = other DNA
cactttgttacgctgccgctgctgcgtgctcatgcgaagcatttcggcaaaatggcgctggtacactttgacgcc

SEQ ID NO: 260623 - DNA, 75 bp, synthetic construct
  source 1..75: mol_type = other DNA
aattcagaagaaaacaatttagcgaaaatgtttatcgatgaagcacgcgtttcaataaatgcttcacaacctttt

SEQ ID NO: 260624 - DNA, 75 bp, synthetic construct
  source 1..75: mol_type = other DNA
gtgttacgagcctatgccaataataatattaagataattgactttgatgtagaagatcagttaaaatgttttgga

SEQ ID NO: 260625 - DNA, 75 bp, synthetic construct
  source 1..75: mol_type = other DNA
aaacttgtcacgctaaaccccaaactcaaatcaacagctgcaggccgttaccagcttctttcccgttggtgggat

SEQ ID NO: 260626 - DNA, 75 bp, synthetic construct
  source 1..75: mol_type = other DNA
agttcgagcataaggctgacaacctgattgcaaaattcaaagaagcaggcggaacggtcagagagattgaggtat

SEQ ID NO: 260627 - DNA, 75 bp, synthetic construct
  source 1..75: mol_type = other DNA
aaaaaaaatcctgattgacccgatgttatcagcaaaaggttcattccctggttttccattgacgatgaaccgcca

SEQ ID NO: 260628 - DNA, 75 bp, synthetic construct
  source 1..75: mol_type = other DNA
aagctttcctggatatggtggcatggtcagaaggaacagataacggacggcagaaaaccagaaatcacggttatg

SEQ ID NO: 260629 - DNA, 75 bp, synthetic construct
  source 1..75: mol_type = other DNA
aaacttgtcacgttaaaccccaaactcaaatcaacagccgccggacgttatcagcttctttcacgctggtgggat

SEQ ID NO: 260630 - DNA, 75 bp, synthetic construct
  source 1..75: mol_type = other DNA
ttttctgaggctgaaccacggacagtatattcttaacccggggcttaaaataaggcagggtgatgtgtggcgcgc

SEQ ID NO: 260631 - DNA, 75 bp, synthetic construct
  source 1..75: mol_type = other DNA
atccagatttgaaatttgaaaatgtatacggtacatatccaattttgcttaagaaaaaatttaatgcgcaaaaat

SEQ ID NO: 260632 - DNA, 75 bp, synthetic construct
  source 1..75: mol_type = other DNA
gagcgtggcgctttaccgatgattgatcgcggtgatattcgtcaggcaattgaccgttgcagcaatatctgggcg

SEQ ID NO: 260633 - DNA, 75 bp, synthetic construct
  source 1..75: mol_type = other DNA
agtatgagcataaaatcggtgacctgattgcccgatttaaagaggctggtggggtggtaaatgaagctgacttat

SEQ ID NO: 260634 - DNA, 75 bp, synthetic construct
  source 1..75: mol_type = other DNA
tacctatcaaaacctgagcgaagctgatttcgccgcggcgctgaaaagcgtcggtctgcctgacgggctggcgga

SEQ ID NO: 260635 - DNA, 75 bp, synthetic construct
  source 1..75: mol_type = other DNA
acgttgacacagttagcggcagagctgaccaaacagagcggaaaatccgttacctatcaaaatctgagcgaagcc

SEQ ID NO: 260636 - DNA, 75 bp, synthetic construct
  source 1..75: mol_type = other DNA
acagcaaaacgctgagtaaactgattggtcgcccgacgacaacgttagccgaaagcgtaagcaatctttttaatg

SEQ ID NO: 260637 - DNA, 75 bp, synthetic construct
  source 1..75: mol_type = other DNA
tggaaagaaaattaaatgagagacatataactccactttcttcaacctggtttcctcgtactcccctggagggga

SEQ ID NO: 260638 - DNA, 75 bp, synthetic construct
  source 1..75: mol_type = other DNA
acggaccgctgtcccgggaggcgtatctgtcgctgggggtacggcagtcgctctacagcatggatgaccgcccga

SEQ ID NO: 260639 - DNA, 75 bp, synthetic construct
  source 1..75: mol_type = other DNA
aaacttgtcacgctaaaccccaaactcaaatcaacagctgcaggccgttatcaacttctttcacgctggtgggat

SEQ ID NO: 260640 - DNA, 75 bp, synthetic construct
  source 1..75: mol_type = other DNA
cgaacggcagcattgagtttggtatgcgcagcgatgaagtggtgacgaaggcgatgctcaacctcgaatacacgc

SEQ ID NO: 260641 - DNA, 75 bp, synthetic construct
  source 1..75: mol_type = other DNA
tgcgcaaattgcgccgccgccgggcagcatggtgctacgtggcattaacccgaacggcagcattgagtttggtat

SEQ ID NO: 260642 - DNA, 75 bp, synthetic construct
  source 1..75: mol_type = other DNA
atgcaaaatcttaatcctcagcgtaaagctttcctcgatatgttggcgtggtcagaaggaacggataacggacgg

SEQ ID NO: 260643 - DNA, 75 bp, synthetic construct
  source 1..75: mol_type = other DNA
gcgggttttccgttcagtcggatggcggatttgtcacaaaccatcacagtgatgccgaaaacgccaaatgaagcg

SEQ ID NO: 260644 - DNA, 75 bp, synthetic construct
  source 1..75: mol_type = other DNA
ctgtcgcacttcccgattccgttcttcgatccacgagataaccgcacgaatacgctgccaatggtttttgctggt

SEQ ID NO: 260645 - DNA, 75 bp, synthetic construct
  source 1..75: mol_type = other DNA
gcgcagcgatgaagtggtgacgaaggcgatgctcaacctcgaatacacgccatcgccatcgttactgcctgtcca

SEQ ID NO: 260646 - DNA, 75 bp, synthetic construct
  source 1..75: mol_type = other DNA
agtcagattgtacaccccagctttttctcatggagttcgctcaaaagtctctttttccggcaacaccaggggaac

SEQ ID NO: 260647 - DNA, 75 bp, synthetic construct
  source 1..75: mol_type = other DNA
atgcaggtactaaattcccagcgtaaagctttcctggatatggtggcatggtcagagggaacggataacgggcga

SEQ ID NO: 260648 - DNA, 75 bp, synthetic construct
  source 1..75: mol_type = other DNA
tcaaatcaacagctgcaggccgttatcaacttctttcacgctggtgggttgcttaccgcaagcagcttggcctga

SEQ ID NO: 260649 - DNA, 75 bp, synthetic construct
  source 1..75: mol_type = other DNA
aagctttcctagatatggtggcctggtcagaaggaacagataacgggcgacaaccgacacgtaaccacggttatg

SEQ ID NO: 260650 - DNA, 75 bp, synthetic construct
  source 1..75: mol_type = other DNA
ccgaatctccgagcctcctgccggcgcatggaagcagcgggctggctgcgcaccctgcgcgccccgaatctgcag

SEQ ID NO: 260651 - DNA, 75 bp, synthetic construct
  source 1..75: mol_type = other DNA
acttgaggcatgtggtgaggcctttctggtgcaggttcgccagcaggcagaaaaacttgtcagggagatggcagc

SEQ ID NO: 260652 - DNA, 75 bp, synthetic construct
  source 1..75: mol_type = other DNA
cgggttgggataacgcaaacggcgtcaccggctggacgcgcaactgcaatattcaaagtgacagcgcattgcagc

SEQ ID NO: 260653 - DNA, 75 bp, synthetic construct
  source 1..75: mol_type = other DNA
atggacaagcaacgcggttttacacttatcgaactgatggtggttattggcatcattgccattttaagcgccatt

SEQ ID NO: 260654 - DNA, 75 bp, synthetic construct
  source 1..75: mol_type = other DNA
gctgccaccagcgaagtgtggtggccggaagatgcggatcatattgcttttattcgcgggcgtattggttttgaa

SEQ ID NO: 260655 - DNA, 75 bp, synthetic construct
  source 1..75: mol_type = other DNA
gaatcagcagcatatgctgccggagaggagaaacggcgacatgctgaatcagcccagcacgccgcagcctgacat

SEQ ID NO: 260656 - DNA, 75 bp, synthetic construct
  source 1..75: mol_type = other DNA
gctccgttgacgcttacgcaggtccgccattccctgttaggttatctcggagtggtcgtggatatcgacccggtt

SEQ ID NO: 260657 - DNA, 75 bp, synthetic construct
  source 1..75: mol_type = other DNA
attaactggatgcgtgattgtcattcttcagatgataaagacgtcattgcaattgatggaaaaacgctccggcat

SEQ ID NO: 260658 - DNA, 75 bp, synthetic construct
  source 1..75: mol_type = other DNA
atgcgtggcagtctcctttcggtctataatagcagaacaaaagaaagagccagaaattgacggtcagatattata

SEQ ID NO: 260659 - DNA, 75 bp, synthetic construct
  source 1..75: mol_type = other DNA
tcatattgtttgcgatgtccctgatgaacttattgatttcacgtttgaatggaaagggcagctatggttagaaac

SEQ ID NO: 260660 - DNA, 75 bp, synthetic construct
  source 1..75: mol_type = other DNA
ctgccagcctggtttatcccgaaggacgagaagcaggtgccgacaggcgctttcttcgctggtgctattgctgtt

SEQ ID NO: 260661 - DNA, 75 bp, synthetic construct
  source 1..75: mol_type = other DNA
aataaggcagaaaattcggcgtgagatagatgttttcaaacgctgtgatgatagagaagttgttgatgtactgtt

SEQ ID NO: 260662 - DNA, 75 bp, synthetic construct
  source 1..75: mol_type = other DNA
cagtggcgcacgccggacaacattttctggggaattaacaccctgtttggcccgtttgttctggatctgtttact

SEQ ID NO: 260663 - DNA, 75 bp, synthetic construct
  source 1..75: mol_type = other DNA
accggcatgcgttacatcatgaaacatgccagtgccatgcgtgataagggtgaaggaactatgtcagcattgcca

SEQ ID NO: 260664 - DNA, 75 bp, synthetic construct
  source 1..75: mol_type = other DNA
gcgccagtcagcatgaggggcaatacatcaccggcatgcgttacatcatgaaacatgccagtgccatgcgtgata

SEQ ID NO: 260665 - DNA, 75 bp, synthetic construct
  source 1..75: mol_type = other DNA
atgaccatcttccagctcagtagcatttcgccaaacgcgaccaaagaattcggtctggtgtcttccgtgtcggtc

SEQ ID NO: 260666 - DNA, 75 bp, synthetic construct
  source 1..75: mol_type = other DNA
agacaatggttttggcctgcttgcgaacaggggattaatccactcatccgggaatagtggattaatatacaaagt

SEQ ID NO: 260667 - DNA, 75 bp, synthetic construct
  source 1..75: mol_type = other DNA
ccggaagatgccgaacatattacttttattcgcgggcgtattggttttgaactgcctgactggtttatcccgaag

SEQ ID NO: 260668 - DNA, 75 bp, synthetic construct
  source 1..75: mol_type = other DNA
ccggaagatgctgagcatatttcttttattcgcgggcgtattggttttgaactgcctgactggtttatcccgaag

SEQ ID NO: 260669 - DNA, 75 bp, synthetic construct
  source 1..75: mol_type = other DNA
ccggaagatgcagatcatatttcttttattcgcgggcgtattggttttgaactgcctgactggtttatcccgaag

SEQ ID NO: 260670 - DNA, 75 bp, synthetic construct
  source 1..75: mol_type = other DNA
atggctatcaacaacagcgcgcagaagtttattgcccgcaaccgcgcgccccgcgtgcagattgagtatgacgta

SEQ ID NO: 260671 - DNA, 75 bp, synthetic construct
  source 1..75: mol_type = other DNA
tggtcactggacgcattactttacagctggatgagcacttctattctgtgcgcgcaccgctttttgtactaacac

SEQ ID NO: 260672 - DNA, 75 bp, synthetic construct
  source 1..75: mol_type = other DNA
tgcagatgataataatgcagaactcatcccatgcctgagtacagatctagactggccccctgaatctccagacaa

SEQ ID NO: 260673 - DNA, 75 bp, synthetic construct
  source 1..75: mol_type = other DNA
ttgaaaatgaaaattgtgagaatggcggatgcaaatacagaaaacattgataaggcataccagatatttaatcag

SEQ ID NO: 260674 - DNA, 75 bp, synthetic construct
  source 1..75: mol_type = other DNA
gacaggaataaaccggatacgccagaaaataaatgctcatggtattcctgtttatctctgtgaagcatgcggaaa

SEQ ID NO: 260675 - DNA, 75 bp, synthetic construct
  source 1..75: mol_type = other DNA
caagaccctacgttactgaaagctctggccagtgcgccaaaacctgtcgctcaacaggaaagtgtcttatcaggt

SEQ ID NO: 260676 - DNA, 75 bp, synthetic construct
  source 1..75: mol_type = other DNA
tcccgcaagctggcgcatggcgtacgcccgtggccgtggacaattaatgttgccgggaagggatatcgctacgcc

SEQ ID NO: 260677 - DNA, 75 bp, synthetic construct
  source 1..75: mol_type = other DNA
ccggccgcccgttacaccgccgtggtcagacgtcatctggaccggctgaatgcaaaaagtatgacgtcacagcag

SEQ ID NO: 260678 - DNA, 75 bp, synthetic construct
  source 1..75: mol_type = other DNA
gggcggcctttgacccgtacaccagtcttgagacggcggcggtcattctgcaggagtgccgtcagcgccatcccg

SEQ ID NO: 260679 - DNA, 75 bp, synthetic construct
  source 1..75: mol_type = other DNA
tggagccttggcgcgggtgtccgctatgacgtaaccccggatatcgctctggacctcagctatcgctatattgat

SEQ ID NO: 260680 - DNA, 75 bp, synthetic construct
  source 1..75: mol_type = other DNA
tgccagccgtctggaggcctggcaggcactgcaggtgtttctgaaacgttattcggccagacgcattgatgtcgg

SEQ ID NO: 260681 - DNA, 75 bp, synthetic construct
  source 1..75: mol_type = other DNA
agtgctgtatgccgtctccctgacagagaccgccatggcgcccggtgatatggccggcgtcatgcagtattcccg

SEQ ID NO: 260682 - DNA, 75 bp, synthetic construct
  source 1..75: mol_type = other DNA
gaaacgaccgatcgcgaactgactaccgttatgtctaacagcttcggcttcggcggcaccaacgccacgctggta

SEQ ID NO: 260683 - DNA, 75 bp, synthetic construct
  source 1..75: mol_type = other DNA
cggcgataagagccctgcgatttctgcaaccaaagcaatgaccggtcactcactgggcgcggcgggtgtgcagga

SEQ ID NO: 260684 - DNA, 75 bp, synthetic construct
  source 1..75: mol_type = other DNA
cgtgacggtttcgttatcgctggcggcggcggtatggtagtggttgaagagctggaacacgcgctggcgcgtggt

SEQ ID NO: 260685 - DNA, 75 bp, synthetic construct
  source 1..75: mol_type = other DNA
tatgacgtcacagcagacagccatgctgacgccttctctccgttatatctggactgaacctcaggagaaacagaa

SEQ ID NO: 260686 - DNA, 75 bp, synthetic construct
  source 1..75: mol_type = other DNA
ccctgatgctggctgtaagtggcagtgcaacggcagcaggtgagactgtaccggaagggtatatccgggtggccg

SEQ ID NO: 260687 - DNA, 75 bp, synthetic construct
  source 1..75: mol_type = other DNA
agtagagcagatccaactgggcaaacaggacatcgtgtttgctggtggcggcgaagagctgtgctgggaaatggc

SEQ ID NO: 260688 - DNA, 75 bp, synthetic construct
  source 1..75: mol_type = other DNA
aagtgaaaataacaagggcaatcttttattatggaaggaatatgttaatagtttaatgtcagtggatttatcttt

SEQ ID NO: 260689 - DNA, 75 bp, synthetic construct
  source 1..75: mol_type = other DNA
tatctcaataataggcagattaatatgttatggaaagttggtagctcagtcgtctcgcaacagtctgatggaatt

SEQ ID NO: 260690 - DNA, 75 bp, synthetic construct
  source 1..75: mol_type = other DNA
cagatgccgtcccatatcaggagttcgcaaaactcattggtaaaacaccggcagcggtgaaggggatgattgaaa

SEQ ID NO: 260691 - DNA, 75 bp, synthetic construct
  source 1..75: mol_type = other DNA
aaattcaatatcatgtacaagctgaaacttagacgtatgagcgacatcgtgactctggggatctcttcttatttc

SEQ ID NO: 260692 - DNA, 75 bp, synthetic construct
  source 1..75: mol_type = other DNA
tgccgaaaaaagcgccggaagggatgcagatttttggcgttaaaaaactctccgacgcgcttagcgtgttcgacg

SEQ ID NO: 260693 - DNA, 75 bp, synthetic construct
  source 1..75: mol_type = other DNA
tgtctgatgttgaacccattgagaatctggttaagaccgtacgttccggcaatacgcacgcagagcgtatcagcg

SEQ ID NO: 260694 - DNA, 75 bp, synthetic construct
  source 1..75: mol_type = other DNA
atgaaaaagatcatttcattaggttcattactggcagcttcattttctatgccttcttttgctgatgacccaggc

SEQ ID NO: 260695 - DNA, 75 bp, synthetic construct
  source 1..75: mol_type = other DNA
ccttgcaagctaattgaaagcccacattgtgtaaaatcattgcagagaagatgcatcaggactagtcgccggaac

SEQ ID NO: 260696 - DNA, 75 bp, synthetic construct
  source 1..75: mol_type = other DNA
ccaactcctcccgtagtagctactattattatgacaatattgatcgggcaaaaacatggggactggaaataagcg

SEQ ID NO: 260697 - DNA, 75 bp, synthetic construct
  source 1..75: mol_type = other DNA
ctgacacccatgataagcaatacactcaggcggtcacattgcagagtcacttttcgctgcctgctaataatgaac

SEQ ID NO: 260698 - DNA, 75 bp, synthetic construct
  source 1..75: mol_type = other DNA
agaaagtataaaaaaactccttgatattacttatggcaaacacttgcctcataagaactcgcaattatgtttttc

SEQ ID NO: 260699 - DNA, 75 bp, synthetic construct
  source 1..75: mol_type = other DNA
gtgaatgttgattttgggaatgttcaggaagagaagataaactctcgcacatatgataagaaaattattgtcccg

SEQ ID NO: 260700 - DNA, 75 bp, synthetic construct
  source 1..75: mol_type = other DNA
gaagtgaagctcattttcccgagtatcctctggcgtcgcccagtaataatgaaattgatttacttaatctaatcg

SEQ ID NO: 260701 - DNA, 75 bp, synthetic construct
  source 1..75: mol_type = other DNA
ggccccgacaggccagcatgtctggcaggagctgcaaagcgggaaatggggcgaaatcgccccgttcactgtcac

SEQ ID NO: 260702 - DNA, 75 bp, synthetic construct
  source 1..75: mol_type = other DNA
aacaaaaccgtctggcaatcctgctggctgtcttgcaccgtcacggtggtctgcaaatggccgatcaggatgtgt

SEQ ID NO: 260703 - DNA, 75 bp, synthetic construct
  source 1..75: mol_type = other DNA
cgatatcagccttgaagagctgccgcgtttttccaccggatttaaagaatttgaccgcgtgttaggcggcggcgt

SEQ ID NO: 260704 - DNA, 75 bp, synthetic construct
  source 1..75: mol_type = other DNA
aacgatgagatttatcgccgtcagcgggagatgaaagaggagctgagcagtctggatgatttggcttcaattcgg

SEQ ID NO: 260705 - DNA, 75 bp, synthetic construct
  source 1..75: mol_type = other DNA
acgagatttatcgtcgtcagcgggtgatgaaggatgaactgaataatctggatgatttacgctcaatcagagata

SEQ ID NO: 260706 - DNA, 75 bp, synthetic construct
  source 1..75: mol_type = other DNA
atcgcaacgatgagatttatcagcgtcagcgtgagatgaaagatgcgttaaatacactggaggatttgggatcaa

SEQ ID NO: 260707 - DNA, 75 bp, synthetic construct
  source 1..75: mol_type = other DNA
cccacaacgcgcaggcctttaccgcgcaagggttttaccgcacagcgacaatgtcaggctggatgaggtggggaa

SEQ ID NO: 260708 - DNA, 75 bp, synthetic construct
  source 1..75: mol_type = other DNA
ctcgttatcttgaaaatggcgcgattgactgtggggtgttgtttgatggcatggatgaagcggttccgtatacgg

SEQ ID NO: 260709 - DNA, 75 bp, synthetic construct
  source 1..75: mol_type = other DNA
gccggatgaaagaggaagtggcaggactgacggagttgtctgaaatccgggcatacacgccgggctggccggagg

SEQ ID NO: 260710 - DNA, 75 bp, synthetic construct
  source 1..75: mol_type = other DNA
tcgctggctggccctaaagtgctggaacactgtatcgactgttcggtgcttctggatggcgatgccgactcccgt

SEQ ID NO: 260711 - DNA, 75 bp, synthetic construct
  source 1..75: mol_type = other DNA
ggcggtgctgcaccgtcacggcggtctgcaaatggccgatcaggatgtctttgtgaacgtggtcggcggcgtgaa

SEQ ID NO: 260712 - DNA, 75 bp, synthetic construct
  source 1..75: mol_type = other DNA
gatttatcgccgtcagcgggaaatgaaagaggagctgagcggtctggatgatttggcttcaattcgggcgtttga

SEQ ID NO: 260713 - DNA, 75 bp, synthetic construct
  source 1..75: mol_type = other DNA
cagcattcgggcaacgaagggttctactggtggatacacataccaggggaataaagtcgttttcgtctctccttc

SEQ ID NO: 260714 - DNA, 75 bp, synthetic construct
  source 1..75: mol_type = other DNA
cgatccactggaagtggcgcagtggctgcaggcctgtcacgatgcaggaatggaggttcgtgtgcaggttaatga

SEQ ID NO: 260715 - DNA, 75 bp, synthetic construct
  source 1..75: mol_type = other DNA
aacgattgtttataacggaaaacacaaaaattacagatgggaaaatcagatttctgttggatatgaaagcattgt

SEQ ID NO: 260716 - DNA, 75 bp, synthetic construct
  source 1..75: mol_type = other DNA
tttggcgatgcctgccgtctgggaagcccgcaagcggtggcgttgttgctgggtgatttgcgcgtgaaagcgaca

SEQ ID NO: 260717 - DNA, 75 bp, synthetic construct
  source 1..75: mol_type = other DNA
cttcaccgctgcagcggcgggtgctgattgtgctggccgctctcgatgcgaaacatccggggccggtggcgacaa

SEQ ID NO: 260718 - DNA, 75 bp, synthetic construct
  source 1..75: mol_type = other DNA
cgatccgctggacgtagcgcagtggctgcaggcctgtcacgatgcaggaatggaggttcgtgtgcagattaatga

SEQ ID NO: 260719 - DNA, 75 bp, synthetic construct
  source 1..75: mol_type = other DNA
gatgaaatttatttcattaatgaaatatatatcacaggcaataaaataaaggatatatcacaactgtattcgttg

SEQ ID NO: 260720 - DNA, 75 bp, synthetic construct
  source 1..75: mol_type = other DNA
gaagagttacagagcggcaaatggggtgaaatcgccccgttcaccgtcacgcctgaacttatcgcagcagcaaag

SEQ ID NO: 260721 - DNA, 75 bp, synthetic construct
  source 1..75: mol_type = other DNA
atcgcaatgacgagatttatcgccgtcagcgtgaaatgaaagaggatctgaacaatctggaggatttgggttcaa

SEQ ID NO: 260722 - DNA, 75 bp, synthetic construct
  source 1..75: mol_type = other DNA
atcgcaatgacgagatttatcgccgtcagcgtgaattgaaagaggaactgagcagtctgggggatttgaattcgg

SEQ ID NO: 260723 - DNA, 75 bp, synthetic construct
  source 1..75: mol_type = other DNA
actggcgaaggcgctggacgtcgattttcctttttctgcttacgccgccattgagcatattcccgtgattggtga

SEQ ID NO: 260724 - DNA, 75 bp, synthetic construct
  source 1..75: mol_type = other DNA
accagcaggtgaaactgtcgatgcagaaactggatgagctgcttactgcaatggcgcaggctcaggtcgatcgca

SEQ ID NO: 260725 - DNA, 75 bp, synthetic construct
  source 1..75: mol_type = other DNA
gtccccgctacaccgagtccggtgcgattgactgcgacgtgctgtttgaaggaatggaagacccgcttccgtaca

SEQ ID NO: 260726 - DNA, 75 bp, synthetic construct
  source 1..75: mol_type = other DNA
atgcgtttattacggagtctgacgccgacggtcatgtgttgacggtacgggaagatctgatctggcccctgctgg

SEQ ID NO: 260727 - DNA, 75 bp, synthetic construct
  source 1..75: mol_type = other DNA
aacagtctgccgacgatattcaggccggtgtggcggtttatctgaaggacgggactgtgcagtctgccgcagacg

SEQ ID NO: 260728 - DNA, 75 bp, synthetic construct
  source 1..75: mol_type = other DNA
gtgggcaccctggttgtatttgttgccttcattttgagttatatgggcgttgaagcttccgcaacccacgtcaat

SEQ ID NO: 260729 - DNA, 75 bp, synthetic construct
  source 1..75: mol_type = other DNA
acgttgctgtttattgccattttttatggcggcgatgtttgccgtacgctggtggctaatggcgcgatccctctt

SEQ ID NO: 260730 - DNA, 75 bp, synthetic construct
  source 1..75: mol_type = other DNA
ggccattaacgacgacgacagcgcggacgtgctgtttgagctgccgttacgtgaacgcgtgcgcgtcacccgcag

SEQ ID NO: 260731 - DNA, 75 bp, synthetic construct
  source 1..75: mol_type = other DNA
ataatgcgctttgatgctcattttcgtactttttgccccgcttgcaataataagttctggatgaactcaagataa

SEQ ID NO: 260732 - DNA, 75 bp, synthetic construct
  source 1..75: mol_type = other DNA
tggtgcattccacattgcagaacagcaagttgacggcacaagtgactacatcaaggatggggaatggcctattga

SEQ ID NO: 260733 - DNA, 75 bp, synthetic construct
  source 1..75: mol_type = other DNA
cggaagatgcggaccatattgcttttattcgcgggcgtattggttatgaactgcctgcctggttttatccccgaa

SEQ ID NO: 260734 - DNA, 75 bp, synthetic construct
  source 1..75: mol_type = other DNA
ccggaagatgcggaccatattccttttattcgcgggcgtattggttttgaactgcctgactggtttatcccgaag

SEQ ID NO: 260735 - DNA, 75 bp, synthetic construct
  source 1..75: mol_type = other DNA
cgacggctgggaagaaggtggcgtcttcgcctgggtatcaaatactctggggccgagatggggatttgcagcgat

SEQ ID NO: 260736 - DNA, 75 bp, synthetic construct
  source 1..75: mol_type = other DNA
ggcgaacagctggctggaacgcctgccgcgccgccatgcttcagggtaaatcagaacaaccacaaaacgcacaac

SEQ ID NO: 260737 - DNA, 75 bp, synthetic construct
  source 1..75: mol_type = other DNA
caaatggaactggcacgaattgcactggcctcgcttgaggcagagccagttggtgcattccacattgctgaacag

SEQ ID NO: 260738 - DNA, 75 bp, synthetic construct
  source 1..75: mol_type = other DNA
catttaatttccctccatccagtaaatgaaattattctcggctgtactcactatccaattgttcagaatttattt

SEQ ID NO: 260739 - DNA, 75 bp, synthetic construct
  source 1..75: mol_type = other DNA
cgctatcggcatggtgcatctgtcgcgttttgctgaagatctgatttctttaacaccggcgaagcggggtttgtc

SEQ ID NO: 260740 - DNA, 75 bp, synthetic construct
  source 1..75: mol_type = other DNA
atgtgctggaactgctttctgctgccgctatcggcatggtgcatctgtcgcgttttgctgaagatctgattttct

SEQ ID NO: 260741 - DNA, 75 bp, synthetic construct
  source 1..75: mol_type = other DNA
cgcacaaaacaatcaggacgcggtgatgccgggttacacccacctgcaacgcgctcaaccggtgacgttcgcgca

SEQ ID NO: 260742 - DNA, 75 bp, synthetic construct
  source 1..75: mol_type = other DNA
tcagcgcgtggaaaattcctgaccaaatcgagtttctggaccactggccgctcaccgccgtcggcaagatagaca

SEQ ID NO: 260743 - DNA, 75 bp, synthetic construct
  source 1..75: mol_type = other DNA
aatgacgagatttatcgccgtcagcgggagctgaaggaagagctgaatagtctgaaggatttgaattcggttagg

SEQ ID NO: 260744 - DNA, 75 bp, synthetic construct
  source 1..75: mol_type = other DNA
tcgctgcaatcgtgcctcgacaagcgtgcggcaaaaggcggcgtctccccgcagcaggtggcgcaggcgattgct

SEQ ID NO: 260745 - DNA, 75 bp, synthetic construct
  source 1..75: mol_type = other DNA
aattcacctgaccgcgccccttgaacgacgcatcactcacgaaagtctttctctgttaacgccagatggcgcaac

SEQ ID NO: 260746 - DNA, 75 bp, synthetic construct
  source 1..75: mol_type = other DNA
ttatactaatcaacaaacgctctcgttagggattgtttgcccgctctcttcccttacgcaaagtcgtgttccggc

SEQ ID NO: 260747 - DNA, 75 bp, synthetic construct
  source 1..75: mol_type = other DNA
tatgcgcagatttatcaactggagcaacagtcgcagtcggagctggatgttcgccagttgcgggcaaagaaattt

SEQ ID NO: 260748 - DNA, 75 bp, synthetic construct
  source 1..75: mol_type = other DNA
cgctatcggcatggtgcatctgtcgcgttttgccgaagatctgattttctttaacaccggcgaagcggggtttgt

SEQ ID NO: 260749 - DNA, 75 bp, synthetic construct
  source 1..75: mol_type = other DNA
gtgaacaactggctggctggctgggttttgcctcggcaacgcgtaacagcctggacagcgtttctgaccgtgatc

SEQ ID NO: 260750 - DNA, 75 bp, synthetic construct
  source 1..75: mol_type = other DNA
gaagaacgttttcatctggagaataacgaaggcgcagcgttgctgttcagcggcgggatctgtgatgacttaccc

SEQ ID NO: 260751 - DNA, 75 bp, synthetic construct
  source 1..75: mol_type = other DNA
tcggcggcggtctgggcgtggactatgaaggcacccgttcgcagtctgactgctccgtaaactacggcctcaatg

SEQ ID NO: 260752 - DNA, 75 bp, synthetic construct
  source 1..75: mol_type = other DNA
gtcagcgatagcctctatctggtaatgcgcgtctattttgaaaaaccccgtaccactgtcggctggaaaggttaa

SEQ ID NO: 260753 - DNA, 75 bp, synthetic construct
  source 1..75: mol_type = other DNA
aaaaattacctgacttaattaaggaatgccaaattaaagtaattaactcgttgaaggtactaattaaagatcatg

SEQ ID NO: 260754 - DNA, 75 bp, synthetic construct
  source 1..75: mol_type = other DNA
aacaatatgaaatcgaaaatctaagtatagccctgtatgcaattttcgataaaataaaagaaaggatttccatcg

SEQ ID NO: 260755 - DNA, 75 bp, synthetic construct
  source 1..75: mol_type = other DNA
aagttgaccgcagttttggtgatattccgttagttcacggtatgccttttgtttctggtgtagggatcgaagcat

SEQ ID NO: 260756 - DNA, 75 bp, synthetic construct
  source 1..75: mol_type = other DNA
ttgaattaatccagtgtcgggttaatgaaatagaaacctatatggatggcgtgcatttgatatgcaccactgcca

SEQ ID NO: 260757 - DNA, 75 bp, synthetic construct
  source 1..75: mol_type = other DNA
tcttagatgccgcaaggcaaggagaagaaggccatgaaactgccgcgaaacactctgctcgggtgcgtattaata

SEQ ID NO: 260758 - DNA, 75 bp, synthetic construct
  source 1..75: mol_type = other DNA
aacgatccgagaatatcgacgcttaaacgttatgtgaaagctttgggcggcgagttaagcctggacgtgacattg

SEQ ID NO: 260759 - DNA, 75 bp, synthetic construct
  source 1..75: mol_type = other DNA
gagaatatcgacgcttaaacgttatgtaaaagctttgggcggcgagttaagcctggacgtgacattgcctacagg

SEQ ID NO: 260760 - DNA, 75 bp, synthetic construct
  source 1..75: mol_type = other DNA
gccagcattcagctcgcacttagtgctttacgtgatgagctgaacatatcccaaaccgaactggctacaatgatg

SEQ ID NO: 260761 - DNA, 75 bp, synthetic construct
  source 1..75: mol_type = other DNA
caaggcggttcaacgcttacatcgccgcgacgacacagagttgcaaagaggacagcaaggcttgtccttggccgc

SEQ ID NO: 260762 - DNA, 75 bp, synthetic construct
  source 1..75: mol_type = other DNA
cacagggtttggtcgatgggtgatctggatttgctggaagatgagccgcagtgcgaaaccgttcctcagtcacca

SEQ ID NO: 260763 - DNA, 75 bp, synthetic construct
  source 1..75: mol_type = other DNA
tgcgggcgcgttaccgcgaggatttgctcaggccgttactggctgtgccccgttcggatgagccggatacgcgca

SEQ ID NO: 260764 - DNA, 75 bp, synthetic construct
  source 1..75: mol_type = other DNA
aacgtaccgaattactctctttagatgaagtgtgtgtgttacctccgggtcatccgctggcggtaaaaaaggtat

SEQ ID NO: 260765 - DNA, 75 bp, synthetic construct
  source 1..75: mol_type = other DNA
tgttgcagcggctgccgcacgtcgcccagcgcgcagcacgtgatcatgtgcggaccgtgaaaaagaatctccacg

SEQ ID NO: 260766 - DNA, 75 bp, synthetic construct
  source 1..75: mol_type = other DNA
tgctgacagaaagggaagtcagttttatgaaaggactgttcagaattgtggatatgaagcggtggtatctgtgtc

SEQ ID NO: 260767 - DNA, 75 bp, synthetic construct
  source 1..75: mol_type = other DNA
gggcgaattattgcagcggtggagcttgatgaccgttctcatcaggtcctgaagcgccagcggcgtgacctgttg

SEQ ID NO: 260768 - DNA, 75 bp, synthetic construct
  source 1..75: mol_type = other DNA
gtgaacggttttctggacccggtggatttccgtggacaactggttacggtagtcgggccaatcaccggtacggtt

SEQ ID NO: 260769 - DNA, 75 bp, synthetic construct
  source 1..75: mol_type = other DNA
atcttttgagttattacgtctgaaaggcggaaatggaagtctgcatattccggatgagcaggtaacctggtcagt

SEQ ID NO: 260770 - DNA, 75 bp, synthetic construct
  source 1..75: mol_type = other DNA
gcaacaaatgaagcactcgttcagatatcgcatgttgataatgatattgatggtcagatttttcgctgtaaagtg

SEQ ID NO: 260771 - DNA, 75 bp, synthetic construct
  source 1..75: mol_type = other DNA
catgaagttcaacgctatcgccacaccggatcgtgccgcattcgaccaatgggtcgcaaaagcaaaacagtcgac

SEQ ID NO: 260772 - DNA, 75 bp, synthetic construct
  source 1..75: mol_type = other DNA
aattctgcgctgttagatcccaaaggacagattggtctggagcaacgttcactgatactgacggcatttggcctg

SEQ ID NO: 260773 - DNA, 75 bp, synthetic construct
  source 1..75: mol_type = other DNA
ggttaacccgctcaccgctctggattatgcggcaagcggattagtggttcggcgattcagtattgcggttccctt

SEQ ID NO: 260774 - DNA, 75 bp, synthetic construct
  source 1..75: mol_type = other DNA
tcagagtggcgcccgaccggaagtccggcagccgtgaatggtggcagttatttcgcctggtgtcacagtggcact

SEQ ID NO: 260775 - DNA, 75 bp, synthetic construct
  source 1..75: mol_type = other DNA
cggcccgggcttctcaggcatgaagttcaaagctattgcaacaccggatcgcgccgaattcgaccagtgggtcgc

SEQ ID NO: 260776 - DNA, 75 bp, synthetic construct
  source 1..75: mol_type = other DNA
atcttccttgcggtactgacctggaaacccactcacgctcttgagcctagcaagccgctggcacacgacgagaag

SEQ ID NO: 260777 - DNA, 75 bp, synthetic construct
  source 1..75: mol_type = other DNA
gtcacctcgtgcctggtgaatcctcgcgcctgccacgaaaccaaaatgccaatccttcctgccgtgcagaaaaaa

SEQ ID NO: 260778 - DNA, 75 bp, synthetic construct
  source 1..75: mol_type = other DNA
atgaatatttatctacaaatgccaggacacttactgcagccctacagtgtgctcccggtttaaaagacgtacctg

SEQ ID NO: 260779 - DNA, 75 bp, synthetic construct
  source 1..75: mol_type = other DNA
attcaatactactaattttggagaagatccttttcctgatgttaatttatataataatatgaaatcaagtttttt

SEQ ID NO: 260780 - DNA, 75 bp, synthetic construct
  source 1..75: mol_type = other DNA
ttaaatatgaactttctccgaatgttgatattgatgacatcgaggggatgattgatgattggaataaacatagcg

SEQ ID NO: 260781 - DNA, 75 bp, synthetic construct
  source 1..75: mol_type = other DNA
agtttaaccatgctttgacgggacagaaggcgatgcaatgctatctctatcattttttaaaacagtcatcaagcc

SEQ ID NO: 260782 - DNA, 75 bp, synthetic construct
  source 1..75: mol_type = other DNA
gcggtgcgcgaacgcgtcggcaacgacttcattattatctaccgactgtcgatgctcgacctggtcgaagacggc

SEQ ID NO: 260783 - DNA, 75 bp, synthetic construct
  source 1..75: mol_type = other DNA
gtgcttccgcgcactcggtggtcatcaagcggatagccgagcgtggggagaatattcaagtctggatagaacctg

SEQ ID NO: 260784 - DNA, 75 bp, synthetic construct
  source 1..75: mol_type = other DNA
gcgatgaacacccgactgaagaacgccgcgccggatattattgcagcgcgaaaatctgccacaacaacgcctgcg

SEQ ID NO: 260785 - DNA, 75 bp, synthetic construct
  source 1..75: mol_type = other DNA
tggtatttaatgatctcctggactggcttaatacgttgaatgaaaaatatgcgttgcgggtgacacaaattgatg

SEQ ID NO: 260786 - DNA, 75 bp, synthetic construct
  source 1..75: mol_type = other DNA
ggagaaagctgtcgcgacgtatcagttgccgcctgatgtcacgggagagcaggtttccgacattatcataaaaac

SEQ ID NO: 260787 - DNA, 75 bp, synthetic construct
  source 1..75: mol_type = other DNA
tcagcgcaggtgagaagcctgggatggtgaatgtgcagcggctggagtttgggcggggtaaagtatcaggagatt

SEQ ID NO: 260788 - DNA, 75 bp, synthetic construct
  source 1..75: mol_type = other DNA
ctggatgaaaaatatgcgctgcgggtgacacaaattgatgtcagtgctgctgagaagcctgggatggtgaatgtg

SEQ ID NO: 260789 - DNA, 75 bp, synthetic construct
  source 1..75: mol_type = other DNA
cccattccttaatcttatttatttgtggcgcactggcctggggcgcaacgctaaaaacaattcaggactggagcg

SEQ ID NO: 260790 - DNA, 75 bp, synthetic construct
  source 1..75: mol_type = other DNA
tagattcattagattttatgcaggtaaaaagtcagtcggtgaaatcgcttctcttctggggcgcagttatttagg

SEQ ID NO: 260791 - DNA, 75 bp, synthetic construct
  source 1..75: mol_type = other DNA
cttgtttcaaatggagttccttatagagatattgcttttattttggggcgtacttataaagccgttgctactaaa

SEQ ID NO: 260792 - DNA, 75 bp, synthetic construct
  source 1..75: mol_type = other DNA
cgttctgctttacacaaagtcctcatggtgtgcggatttgcaaaggctgtcatgcaaaggtcgcttatggtgaaa

SEQ ID NO: 260793 - DNA, 75 bp, synthetic construct
  source 1..75: mol_type = other DNA
tatcgcttgactccgtacatgagtacggaagtaaggttacgctatccaatccaaattcaaaagggccaacgtatg

SEQ ID NO: 260794 - DNA, 75 bp, synthetic construct
  source 1..75: mol_type = other DNA
gcgcgctcttcgccggtgggctggccgccattcttgcgtcggcctgctgcctggggccgctggttttgatcgcct

SEQ ID NO: 260795 - DNA, 75 bp, synthetic construct
  source 1..75: mol_type = other DNA
tttcatttaggcctgggatttaccgctggcgtaacggcgcgcgataactggaattacatccctcttccggttcta

SEQ ID NO: 260796 - DNA, 75 bp, synthetic construct
  source 1..75: mol_type = other DNA
ctggggcaaccagattcaaaccttgtgcctgttaccgctgatgtctggcgacaccatgctgggcgtactgaaact

SEQ ID NO: 260797 - DNA, 75 bp, synthetic construct
  source 1..75: mol_type = other DNA
ctggaaaacgtcattgagcgcgcggtattgctaacacgcggcaacgtgctgcagctgtcattgccagatattgct

SEQ ID NO: 260798 - DNA, 75 bp, synthetic construct
  source 1..75: mol_type = other DNA
cctggttgccattaccaacgcggtgctttcccgcctggatatggacgaactggtcagcgaagtcgccaaagaaat

SEQ ID NO: 260799 - DNA, 75 bp, synthetic construct
  source 1..75: mol_type = other DNA
atggatagtaaaacgattagctgccccttctgctttacacaaagcccgcacggcgtgcggatttgcaaaggttgc

SEQ ID NO: 260800 - DNA, 75 bp, synthetic construct
  source 1..75: mol_type = other DNA
catcgtctgaaagaacggctggttgatgaaaacctcgccctgaccgagcagctcaacaatgttgatagtgaattt

SEQ ID NO: 260801 - DNA, 75 bp, synthetic construct
  source 1..75: mol_type = other DNA
gcagcgaagccatgtacagcgtgcttaaacaagttgaaatggtggcgcaaagcgacagtaccgtgctgatcctcg

SEQ ID NO: 260802 - DNA, 75 bp, synthetic construct
  source 1..75: mol_type = other DNA
cacacaccgtctggcacgccgacgatatccgccgcggcgaacgcgaggcggcagatgcgctggggcttacactct

SEQ ID NO: 260803 - DNA, 75 bp, synthetic construct
  source 1..75: mol_type = other DNA
ttgtagcgcgtggtggtaatcagattcgaatgataggtggggagtatggtgcattatggcgtaatgatggcgcta

SEQ ID NO: 260804 - DNA, 75 bp, synthetic construct
  source 1..75: mol_type = other DNA
acgacaggaaacccggtgaaacttatgttgcagtggggaatggtggcaacacaaaagggagctgatgctggatat

SEQ ID NO: 260805 - DNA, 75 bp, synthetic construct
  source 1..75: mol_type = other DNA
ataaaggcgatcacgggcggctggtgattatcggtggcgatcacggcacggcgggggctattcgtatgacggggg

SEQ ID NO: 260806 - DNA, 75 bp, synthetic construct
  source 1..75: mol_type = other DNA
atgaagaaaaaccccgtaagtataccacacattgtctggcacgcagacgatatccgacgcggcgaacgcgaggcg

SEQ ID NO: 260807 - DNA, 75 bp, synthetic construct
  source 1..75: mol_type = other DNA
cgacaaaccgttgccggaagaggccgcgctggcacgcgaagcatggttaaacgcgggaggcgagatccatgcttc

SEQ ID NO: 260808 - DNA, 75 bp, synthetic construct
  source 1..75: mol_type = other DNA
ctttaaccgccgcgcatgtggctgcttttgccagaagggcaacggatacatatgccgatgcggatggtggcgttc

SEQ ID NO: 260809 - DNA, 75 bp, synthetic construct
  source 1..75: mol_type = other DNA
acatccggcgatacatatgatatttacgttgagattggcaattatgcgacgagtgtaaatatccattgggattgt

SEQ ID NO: 260810 - DNA, 75 bp, synthetic construct
  source 1..75: mol_type = other DNA
gtcacccgctctggcaacagctatattctggttaacttctataccggagtcggaagttgccggaccttgcagatg

SEQ ID NO: 260811 - DNA, 75 bp, synthetic construct
  source 1..75: mol_type = other DNA
aatccgaaggggattactggtgctttatggcagcgcacatcgacagggtttacaaattttgcctgggtcaataca

SEQ ID NO: 260812 - DNA, 75 bp, synthetic construct
  source 1..75: mol_type = other DNA
ttaacgccgaaagatattggtactttaaattcagtaacgatgtctttctctggcggggctgggtggttcaaactg

SEQ ID NO: 260813 - DNA, 75 bp, synthetic construct
  source 1..75: mol_type = other DNA
aacctgccagtggtcgagccgtattatctcaggaacaggacggcattaaatcgcacacccacagcgccagcgcat

SEQ ID NO: 260814 - DNA, 75 bp, synthetic construct
  source 1..75: mol_type = other DNA
gcatgggcgatgtgctctctggtattattggcgcattgcttgggcaaaaactgtcgccgtatgatgcagcctgtg

SEQ ID NO: 260815 - DNA, 75 bp, synthetic construct
  source 1..75: mol_type = other DNA
cggtgcaccaatcccgtggccatcagataccgttccgtctggttatgccctgatgcaggggcagacttttgacaa

SEQ ID NO: 260816 - DNA, 75 bp, synthetic construct
  source 1..75: mol_type = other DNA
caaatagtgccggtgcgcaccaacacaagagttccggtgcatttggtggcacgaacacgagcattttccctaatg

SEQ ID NO: 260817 - DNA, 75 bp, synthetic construct
  source 1..75: mol_type = other DNA
acagcgccagcgcatccagtacggatttggggacgaaaaccacatcgtcgtttgattacggcactaaatccacga

SEQ ID NO: 260818 - DNA, 75 bp, synthetic construct
  source 1..75: mol_type = other DNA
gccgcaacgccaaaagcagttaaagcagccaatgacaatgcgaatagcagggtgccatctaaccgaaaagttaac

SEQ ID NO: 260819 - DNA, 75 bp, synthetic construct
  source 1..75: mol_type = other DNA
acggttctgcaaatattaaccttccaggtgtaaacactacgggtaatcagaacaccactggtaatgctgcaactg

SEQ ID NO: 260820 - DNA, 75 bp, synthetic construct
  source 1..75: mol_type = other DNA
tattgaaggactggcgacgttgttctctaaccacattcctgattatcgtaatttgatgaccagttatgacacgtt

SEQ ID NO: 260821 - DNA, 75 bp, synthetic construct
  source 1..75: mol_type = other DNA
ccggcgatacatatgatatttacgttgagattggcaattatgcgacgagtgtaaatatccattgggattgtactg

SEQ ID NO: 260822 - DNA, 75 bp, synthetic construct
  source 1..75: mol_type = other DNA
catcaccgtgtatgaagattcccgacccggtacgctgaatgattttctcggtgccatgacggaggatgatgcccg

SEQ ID NO: 260823 - DNA, 75 bp, synthetic construct
  source 1..75: mol_type = other DNA
gatagtacagctcagcagtgcaaccaacagcacatctgaaacgcttgccgcgacaccgaaggcagttaaagcagc

SEQ ID NO: 260824 - DNA, 75 bp, synthetic construct
  source 1..75: mol_type = other DNA
acagcacatctgaaacgcttgccgcgacaccgaaggcagttaaagcagcgaatgacaatgcgaatggcagggtac

SEQ ID NO: 260825 - DNA, 75 bp, synthetic construct
  source 1..75: mol_type = other DNA
cttcctatagatcgtattatcaacgtattcagacacagtcagcaggtgctcatacccactcgctgtctggtactg

SEQ ID NO: 260826 - DNA, 75 bp, synthetic construct
  source 1..75: mol_type = other DNA
caaatgcgacagtttctatttatacatcgccaacatattcagcgagtaagccttccagcgttagcgatggtgttg

SEQ ID NO: 260827 - DNA, 75 bp, synthetic construct
  source 1..75: mol_type = other DNA
tcgcctcttttggcagcgacggcacgctctcggtgacgcccgatgacggcgacgtgaccgccacgatggatatcg

SEQ ID NO: 260828 - DNA, 75 bp, synthetic construct
  source 1..75: mol_type = other DNA
cgcccgctggacgtggtgattcagggggcgggttacattgcggtgcaggataaaaacggcaacgaagtctatacc

SEQ ID NO: 260829 - DNA, 75 bp, synthetic construct
  source 1..75: mol_type = other DNA
gaagggatgctgataactgccgacggcgttccggcccagcgcgatgaaaacatcaaagtcagcggcggttttctc

SEQ ID NO: 260830 - DNA, 75 bp, synthetic construct
  source 1..75: mol_type = other DNA
gaaggtaaagaagaattacccttgagactgcattcaaattattcatacaaaggtatcatatctttaacatttgat

SEQ ID NO: 260831 - DNA, 75 bp, synthetic construct
  source 1..75: mol_type = other DNA
aatagctataagtatcaggaaggaataaatgacagggtcactcgtcctaagttatttataacaacacactcacca

SEQ ID NO: 260832 - DNA, 75 bp, synthetic construct
  source 1..75: mol_type = other DNA
gaagggatgctggtgactgccgacggcgttccggcccagcgcgatgaaaacatcaaagtcagcggcggttttctc

SEQ ID NO: 260833 - DNA, 75 bp, synthetic construct
  source 1..75: mol_type = other DNA
gtgaacggttttcttgatccagttgatttccgcggacaactggtgacggttgtcgggccaatcaccggtacggtt

SEQ ID NO: 260834 - DNA, 75 bp, synthetic construct
  source 1..75: mol_type = other DNA
attgccaccgtaccactggacagcggagccagaccaactttgggagaaccttcacgcgggcgcatttatgccgat

SEQ ID NO: 260835 - DNA, 75 bp, synthetic construct
  source 1..75: mol_type = other DNA
aaggcatactggcgagtacgtttgcgctaatgctgagcggctgtgtcaccgtgccggatgctattaaaggcagta

SEQ ID NO: 260836 - DNA, 75 bp, synthetic construct
  source 1..75: mol_type = other DNA
tgcatctctattgtgattgcctccagtgtacagatggcaaatataagacgccagacttcggtgagtatataggta

SEQ ID NO: 260837 - DNA, 75 bp, synthetic construct
  source 1..75: mol_type = other DNA
atggctattgccgcaagttacaccatgcatctctactgtgattgtcgccagtgtacaaatggtaaatatcagtca

SEQ ID NO: 260838 - DNA, 75 bp, synthetic construct
  source 1..75: mol_type = other DNA
atggctatcgctgcaagttacaccatgcatctctattgtgattgcctccaatgtacagatggcaaatataagtcg

SEQ ID NO: 260839 - DNA, 75 bp, synthetic construct
  source 1..75: mol_type = other DNA
tctttcaatctttcaaaaattgaagatgaatctgttattgatttctttgatagttctatcaattccggtggcgat

SEQ ID NO: 260840 - DNA, 75 bp, synthetic construct
  source 1..75: mol_type = other DNA
ccctattcgtattggcgataattgcattctggctccgggcgttcatatttataccgctacacaccctgtcgatcc

SEQ ID NO: 260841 - DNA, 75 bp, synthetic construct
  source 1..75: mol_type = other DNA
ctcggtaataattttttcgccaacttcgattgcgtgatgcttgatgtctgccctattcgcatcggtgataactgt

SEQ ID NO: 260842 - DNA, 75 bp, synthetic construct
  source 1..75: mol_type = other DNA
ctgacagacatcacaaatccccgggtggggatttgtgtataagagacagctccccggaggggcgaggggactggc

SEQ ID NO: 260843 - DNA, 75 bp, synthetic construct
  source 1..75: mol_type = other DNA
gtacgctgaatgattttctcggcgcaatgacggaggatgatgcccgtccggaggcactgcgccgttttgaactga

SEQ ID NO: 260844 - DNA, 75 bp, synthetic construct
  source 1..75: mol_type = other DNA
ctcggtaaagggttttacgcgaacttcgattgcgtgatgcttgatgtctgccctattcgtatcggcgataattgt

SEQ ID NO: 260845 - DNA, 75 bp, synthetic construct
  source 1..75: mol_type = other DNA
gccgatttactcggtcaggttgcggatgcgtatattgagccctcctttcgctgcgactatggctataacattttt

SEQ ID NO: 260846 - DNA, 75 bp, synthetic construct
  source 1..75: mol_type = other DNA
ccgatgttttttaaccagccgttttcgctctcccgtaacgtggcagatgccagctatctgcagcaggtagcggaa

SEQ ID NO: 260847 - DNA, 75 bp, synthetic construct
  source 1..75: mol_type = other DNA
aaacctttcttaggatactaattacaatttcaagaagagaatatataacaccatttgtttttattgatgaaccag

SEQ ID NO: 260848 - DNA, 75 bp, synthetic construct
  source 1..75: mol_type = other DNA
gccaagttctcagaaagaaaaggtgttgagctatattaaggctggattaaaaggttatcggtttgagatagacga

SEQ ID NO: 260849 - DNA, 75 bp, synthetic construct
  source 1..75: mol_type = other DNA
tcagctacaacaggcgattcgtctgttgcagttgtccacgctggagcttcagcaggagctacagcaagcgctgga

SEQ ID NO: 260850 - DNA, 75 bp, synthetic construct
  source 1..75: mol_type = other DNA
tcgcggcggaaaacccagcgaaaccgttgagcgacagcaagttaacctctttgctgtcggaacaaggtatcatgg

SEQ ID NO: 260851 - DNA, 75 bp, synthetic construct
  source 1..75: mol_type = other DNA
aacctctttgctgtcggaacaaggtatcatggtggcacgccgcactgttgcgaagtaccgagagtctttatccat

SEQ ID NO: 260852 - DNA, 75 bp, synthetic construct
  source 1..75: mol_type = other DNA
aaaatccgccacaacaacgcctgcgcaggtatcgcgggtcatcagtgacagtgcttccgcgcactcggtggtcat

SEQ ID NO: 260853 - DNA, 75 bp, synthetic construct
  source 1..75: mol_type = other DNA
tagataacaaatcttttgtactaaaagcaggtgaacgcgtagtacaaccagaagctaacaaaaagctaactaact

SEQ ID NO: 260854 - DNA, 75 bp, synthetic construct
  source 1..75: mol_type = other DNA
ggtatggcggcggcatttggtgagtctagcggggcagcacaggcagcatttgcagtacagaagggtatcaccatt

SEQ ID NO: 260855 - DNA, 75 bp, synthetic construct
  source 1..75: mol_type = other DNA
agggatggcgatgaatccgtggagtaatgcactgtggctgaatgaacatggcccgcgcggtggtgatgaaattaa

SEQ ID NO: 260856 - DNA, 75 bp, synthetic construct
  source 1..75: mol_type = other DNA
aggaagactgcaaaaactttaggactatcagacgagaaactacgccagctattaaatgatcaagtggcagcaggt

SEQ ID NO: 260857 - DNA, 75 bp, synthetic construct
  source 1..75: mol_type = other DNA
actaagctaacccgttttctagatagacaggaatcaggcggtgataatacttccggtgctggtgaagttgtagtt

SEQ ID NO: 260858 - DNA, 75 bp, synthetic construct
  source 1..75: mol_type = other DNA
agaaaagaaaaaactctttgataagactcgcaaatctgaagaggatcaagcaaaggcagcacgcgataaggcagc

SEQ ID NO: 260859 - DNA, 75 bp, synthetic construct
  source 1..75: mol_type = other DNA
tgacgatggctgtccaactaaataaagcatttcacgaaatcataaataattatcctggagtggctgacaatatag

SEQ ID NO: 260860 - DNA, 75 bp, synthetic construct
  source 1..75: mol_type = other DNA
gctgatatatggtgcagaaaaaagccagatgcctgaacgtaatctcgctgtgatcgagggatttgtttcccgcat

SEQ ID NO: 260861 - DNA, 75 bp, synthetic construct
  source 1..75: mol_type = other DNA
tcccggaagggaaggtcgagatcactatcagtaagtacgagaaaacggcggggggggccgcccggtcaaaaggag

SEQ ID NO: 260862 - DNA, 75 bp, synthetic construct
  source 1..75: mol_type = other DNA
ctgccggtactggtgagtttgtaacagtaatcgaagagatgggcttaaacattaatgactttaccaaatatgtag

SEQ ID NO: 260863 - DNA, 75 bp, synthetic construct
  source 1..75: mol_type = other DNA
caaagaacatgttgcaaagaagtacaatgagcaagttctaaatgctgatggcacagctcaatggcacaaattact

SEQ ID NO: 260864 - DNA, 75 bp, synthetic construct
  source 1..75: mol_type = other DNA
ggtacttgaaggtatagaacgtgctgtaaaagaagcagatataaaagaaaaaaataaagatcttattgaaaaatt

SEQ ID NO: 260865 - DNA, 75 bp, synthetic construct
  source 1..75: mol_type = other DNA
ttacaacctgctaaaaacaacgtcaaagcagattgccgaaacagaccgttgggctaagtcgctcaatatgtctac

SEQ ID NO: 260866 - DNA, 75 bp, synthetic construct
  source 1..75: mol_type = other DNA
cgacagctcgccgctggaagaaggaagcccaggacgcaggcgatgactgggataagttacgcgccgctcacctta

SEQ ID NO: 260867 - DNA, 75 bp, synthetic construct
  source 1..75: mol_type = other DNA
aatcctgccggaaaccgaccggctcgccacggcactggaagtggtgcagcggctcggcgcgttcatcaaggagcg

SEQ ID NO: 260868 - DNA, 75 bp, synthetic construct
  source 1..75: mol_type = other DNA
ggcccgcgtcagcaaaaggcgctggagtccctggcggacgtctgggagccgttgccgcggggaacattcacgtat

SEQ ID NO: 260869 - DNA, 75 bp, synthetic construct
  source 1..75: mol_type = other DNA
ccgcactgaagaagaacgacacaggtttgccggcctgttcgagggcgcatcgttaattcaggctgttccgggtgg

SEQ ID NO: 260870 - DNA, 75 bp, synthetic construct
  source 1..75: mol_type = other DNA
tcgccaggatgatgaaaaaacgcggagaagcatctgatatccgtatcgatgacctgccgctgaagctgaattctg

SEQ ID NO: 260871 - DNA, 75 bp, synthetic construct
  source 1..75: mol_type = other DNA
gttctttctggtgtgctttatcctgaaattacaggtggcgaaatgtcgctgtcgctgctgaccacgcaggcgtat

SEQ ID NO: 260872 - DNA, 75 bp, synthetic construct
  source 1..75: mol_type = other DNA
atcctggagagtctgggtaatgacctgtcaaagatgctgccgctcctggacaatggcagtgaaaagctgcgtcag

SEQ ID NO: 260873 - DNA, 75 bp, synthetic construct
  source 1..75: mol_type = other DNA
tgacgatcgacctgattgccaaagtgggcggttttgtctcaggcctctcgcaggctgagcgagcttcacaaaaat

SEQ ID NO: 260874 - DNA, 75 bp, synthetic construct
  source 1..75: mol_type = other DNA
atggcggcgcagtggttggtatatcaggcggtgcaattgctggtaggtaaatcaacacaggcaagcgcagcggca

SEQ ID NO: 260875 - DNA, 75 bp, synthetic construct
  source 1..75: mol_type = other DNA
atctgcgggaaaattttaacggtgtcagggttcagtgtggcgacttcatggaatggcagccggtgcagtattaca

SEQ ID NO: 260876 - DNA, 75 bp, synthetic construct
  source 1..75: mol_type = other DNA
ggtaacctcgaaactttaagcgacaaacctggtaatccggtgcagcaggcgctgaaagatttccacgagaagtac

SEQ ID NO: 260877 - DNA, 75 bp, synthetic construct
  source 1..75: mol_type = other DNA
atatgggggatgtatttaaagacccggctgttattcagggtctgactgatctggttggtggggtagtggaccttg

SEQ ID NO: 260878 - DNA, 75 bp, synthetic construct
  source 1..75: mol_type = other DNA
tggtgcttaaaccgtggcgcgagagacgcagtctttcccagaatgcacttagccacatgtggtacagcgaaatca

SEQ ID NO: 260879 - DNA, 75 bp, synthetic construct
  source 1..75: mol_type = other DNA
tgggcgatgaatattggctgccacctgactattccgcagagctgcgagttccagcagctccgcgacaaacaggag

SEQ ID NO: 260880 - DNA, 75 bp, synthetic construct
  source 1..75: mol_type = other DNA
atgaaaaatcgtctttctccctggaatctgggagccacgctatacatgcctgcaacacgggaagatattgctgat

SEQ ID NO: 260881 - DNA, 75 bp, synthetic construct
  source 1..75: mol_type = other DNA
aatgctctgtatgattatattgttgagggtgcttccagaaaagttatatgtgaaagacacaatataaataacggt

SEQ ID NO: 260882 - DNA, 75 bp, synthetic construct
  source 1..75: mol_type = other DNA
ctttcccagaatgcactcagccacatgtggtacagcgaaatcagtgaatacctcatcagcaggggtaaaacgttc

SEQ ID NO: 260883 - DNA, 75 bp, synthetic construct
  source 1..75: mol_type = other DNA
agccacatgtggtacacggagatcagcgaatatctcatcgcccgcggcaagaccttcgctacgcctgagtgggtc

SEQ ID NO: 260884 - DNA, 75 bp, synthetic construct
  source 1..75: mol_type = other DNA
tgggcgatgaatatcggctgccacctgactattccgcagcgctgcgagttccagctgctgcgcgacaagcaggag

SEQ ID NO: 260885 - DNA, 75 bp, synthetic construct
  source 1..75: mol_type = other DNA
cagagctggaaaccggcgagatgtacatcttcctgtgcaaagtcgaagcctgggcgatgaatatcggctgccacc

SEQ ID NO: 260886 - DNA, 75 bp, synthetic construct
  source 1..75: mol_type = other DNA
cattaagagtaatcgttggcttggggatgttattcctgatgatagtgattgcgtgtggtatgtgcggttctcttc

SEQ ID NO: 260887 - DNA, 75 bp, synthetic construct
  source 1..75: mol_type = other DNA
atgaacctaccacaagatggcatcaaattacatcgtggcaacttcaccgctatcggccagcagatccagccttat

SEQ ID NO: 260888 - DNA, 75 bp, synthetic construct
  source 1..75: mol_type = other DNA
gtgttcattcgcccccggcatgccgaaatgggcagatggttaaaagcgcattatgatctttccgctgtcgacggg

SEQ ID NO: 260889 - DNA, 75 bp, synthetic construct
  source 1..75: mol_type = other DNA
aacgttcgctactgcagcatgggtaaaagatgctctcaaacacacatacctcggttatgaaagcaaagaactggt

SEQ ID NO: 260890 - DNA, 75 bp, synthetic construct
  source 1..75: mol_type = other DNA
tgcttattgctttccacggttaacggagctggaagtgttgacatcagcatcgttgaagtatgccattgccgagcg

SEQ ID NO: 260891 - DNA, 75 bp, synthetic construct
  source 1..75: mol_type = other DNA
atgaagctgatcttgcctttcccacccagcgtgaacacgtactggcgacaccccaacaaaggggggtttgctggt

SEQ ID NO: 260892 - DNA, 75 bp, synthetic construct
  source 1..75: mol_type = other DNA
atgaagctgatcatgcctttcccgcccagcgtgaacacgtactggcgacaccccaacaaaggggtgtttgctggt

SEQ ID NO: 260893 - DNA, 75 bp, synthetic construct
  source 1..75: mol_type = other DNA
atgaagctgatcctgcctttcccgcccagtgtgaacacgtactggcgacaccccaacaaaggggcgtttgctggt

SEQ ID NO: 260894 - DNA, 75 bp, synthetic construct
  source 1..75: mol_type = other DNA
tgggaagacgacagtcaggtgaaaagaatgctggtggagtggggaccggttatcccgaaagggaaggtcgagatc

SEQ ID NO: 260895 - DNA, 75 bp, synthetic construct
  source 1..75: mol_type = other DNA
atgaagctgatcgtgcctttcccacccagcgtgaacacgtactggcgacaccccaacaaaggggtgtttgctggt

SEQ ID NO: 260896 - DNA, 75 bp, synthetic construct
  source 1..75: mol_type = other DNA
atgaagctgatcttgcctttcccgcccagcgtgaacacgtactggcgacaccccaacaaaggggagtttgctggt

SEQ ID NO: 260897 - DNA, 75 bp, synthetic construct
  source 1..75: mol_type = other DNA
cactgttcctgcaagtgcttgatgattccagccatcgcggggaacgctcgctggaagtcatgtgccatccggcgt

SEQ ID NO: 260898 - DNA, 75 bp, synthetic construct
  source 1..75: mol_type = other DNA
agatgctttaccgctggaagaaattactcaggagcttgccagtcagtatttgcgtttcattgagctatttggacg

SEQ ID NO: 260899 - DNA, 75 bp, synthetic construct
  source 1..75: mol_type = other DNA
cagttcgcagggcttcagtagcgcattctatggtgaagagatcagcgagtccctgttcctgcaagcggtggatga

SEQ ID NO: 260900 - DNA, 75 bp, synthetic construct
  source 1..75: mol_type = other DNA
atgaagctgattctgccttttccgcccagcgtgaacacgtactggcgacaccccaacaaaggggcgtttgcaggt

SEQ ID NO: 260901 - DNA, 75 bp, synthetic construct
  source 1..75: mol_type = other DNA
tccggataaccggatccgcgatctggacaactataacaaggcgctgtttgatgccctgacccacgcgggtgtgtg

SEQ ID NO: 260902 - DNA, 75 bp, synthetic construct
  source 1..75: mol_type = other DNA
ttaccgaaaccaactaccgcaccagccgcggtagaaatcaccctgttccctccggatatgcgccgtcgggatctg

SEQ ID NO: 260903 - DNA, 75 bp, synthetic construct
  source 1..75: mol_type = other DNA
caggtattaagtatgcgtaacaaagctaaccgtctggaagagctgtttgtttcactggttaatgaaaaacaagga

SEQ ID NO: 260904 - DNA, 75 bp, synthetic construct
  source 1..75: mol_type = other DNA
aaacgtatacgaattacgcatataggtgaaaacggcgtagaaatcccccaattctctgttggggacatctttgat

SEQ ID NO: 260905 - DNA, 75 bp, synthetic construct
  source 1..75: mol_type = other DNA
aaaccagcgattggcatagcaaggcttcgaagtatttaaattccgatagggtagaaaaagttgatgatgtgaaac

SEQ ID NO: 260906 - DNA, 75 bp, synthetic construct
  source 1..75: mol_type = other DNA
ttcttgacgaaccgaccgcaggcgtggatatcgaacttcgccgctcaatgtggggatttttgaaggatttaaacg

SEQ ID NO: 260907 - DNA, 75 bp, synthetic construct
  source 1..75: mol_type = other DNA
ggatatcgaacttcgccgctcaatgtggggatttttgaaggatttaaacgacaaaggcaccaccatcattcttac

SEQ ID NO: 260908 - DNA, 75 bp, synthetic construct
  source 1..75: mol_type = other DNA
gcgccgtttaatgattgcccgtgcgttaatgcatgaacctaaactactgattctcgacgaaccgaccgcaggcgt

SEQ ID NO: 260909 - DNA, 75 bp, synthetic construct
  source 1..75: mol_type = other DNA
cggctccagtaaacagacagacgaactccgcgtagcaatagtttctgaaactctgaaaattccggcccgcggagt

SEQ ID NO: 260910 - DNA, 75 bp, synthetic construct
  source 1..75: mol_type = other DNA
cgaaaacagtgccgtgcgttggtcatcggaaatgatcaataccttgcagatccagtttcatcgccttattaagca

SEQ ID NO: 260911 - DNA, 75 bp, synthetic construct
  source 1..75: mol_type = other DNA
aagtcgtttcttgggcagcgattaaaatggatatcaaaaccgatcgcccgcgcttttgggcatcgtggttttacc

SEQ ID NO: 260912 - DNA, 75 bp, synthetic construct
  source 1..75: mol_type = other DNA
atggttcctccgatatcacattaaaagcaagtcatgttggtgcgtttgccttagggaaaacaggaagcaccgttg

SEQ ID NO: 260913 - DNA, 75 bp, synthetic construct
  source 1..75: mol_type = other DNA
cgacaaacattcagcggtggcctttctggtgaactatccggcaatgcttctacagctgcaaaattaaaaactgcc

SEQ ID NO: 260914 - DNA, 75 bp, synthetic construct
  source 1..75: mol_type = other DNA
gcggcgatcctgtcattgaatggccggcagttgagccgtcgctcgacgcagcgaaagaagctgcaccagggctca

SEQ ID NO: 260915 - DNA, 75 bp, synthetic construct
  source 1..75: mol_type = other DNA
agtgagcagggcattcaggtattaagtatgcgtaacaaagctaaccgtctggaagagctgtttgtttcactggtt

SEQ ID NO: 260916 - DNA, 75 bp, synthetic construct
  source 1..75: mol_type = other DNA
ttatctgctcgccgcccctgtagtggaaggtgccatgtcagcggtaacgtctgccgcagcggggctttcggtgac

SEQ ID NO: 260917 - DNA, 75 bp, synthetic construct
  source 1..75: mol_type = other DNA
attgctgaaaagcaaaaaaactaaccagatacaaaatgattatgctgatgaaaacaatttcatcaaaaccacgct

SEQ ID NO: 260918 - DNA, 75 bp, synthetic construct
  source 1..75: mol_type = other DNA
cattcctgatcgtgtagtcgagcaactgttggctatgcgtcagcaaagaaaaaaacattttccactgacaacgcg

SEQ ID NO: 260919 - DNA, 75 bp, synthetic construct
  source 1..75: mol_type = other DNA
gcggtgacaagccattaccttcgaaccctttacccgcagaggacaacccgttcctgggacttcgcggtatccggt

SEQ ID NO: 260920 - DNA, 75 bp, synthetic construct
  source 1..75: mol_type = other DNA
ctgggaaagaatacccaacgctgcaaattatgctgccgatggtttcaacactggaagaggtcagggccgtcaaaa

SEQ ID NO: 260921 - DNA, 75 bp, synthetic construct
  source 1..75: mol_type = other DNA
atcaggcttgtcagtacaaaatggtatcgctattggtcctgttaaatggtttacctgcgaacgaccagaaattac

SEQ ID NO: 260922 - DNA, 75 bp, synthetic construct
  source 1..75: mol_type = other DNA
cttgaacagcttttgaaaaagttcaggagcgtggtcaacgaacgtcgtgaagaatacggtaatgactccaactta

SEQ ID NO: 260923 - DNA, 75 bp, synthetic construct
  source 1..75: mol_type = other DNA
atatgtataaaaaaatccaagcagaagccgcaactactgacatcaaaacacttgaacagcttttgaaaaagttca

SEQ ID NO: 260924 - DNA, 75 bp, synthetic construct
  source 1..75: mol_type = other DNA
cgaaaagtatcttaaacagctcgatctatggggaaaacgcaacgaacgtgcgcgtatgttatctggcgggatgaa

SEQ ID NO: 260925 - DNA, 75 bp, synthetic construct
  source 1..75: mol_type = other DNA
cattcctgagcgtgtagtcgagcaactgttggctatgcgtcagcaaagaaaaaaacaatcttcatgccatcatag

SEQ ID NO: 260926 - DNA, 75 bp, synthetic construct
  source 1..75: mol_type = other DNA
cgcaactttcattatattatcgttaacgataacgcgagggtacttgataaagatgggttctatcaggacgctgaa

SEQ ID NO: 260927 - DNA, 75 bp, synthetic construct
  source 1..75: mol_type = other DNA
atatgtataaaaaaatccaagctgaagctgcgacgacagatatgaaaacactggaacagcttttgaagaagttcc

SEQ ID NO: 260928 - DNA, 75 bp, synthetic construct
  source 1..75: mol_type = other DNA
cactgttaccgtttgtctgctttgcacagcccattaatactctgaataacccgaacctgccgggatatcagatcc

SEQ ID NO: 260929 - DNA, 75 bp, synthetic construct
  source 1..75: mol_type = other DNA
tagactcttggtctggcctggcatcgagttctattcgtcagcatgggagttttgtaatcttgatgggaacgacgc

SEQ ID NO: 260930 - DNA, 75 bp, synthetic construct
  source 1..75: mol_type = other DNA
aataaatttatcgcacagagttgctacgtgtttgatggcgagcaggatgagctatctgatgcgtatatctgcgca

SEQ ID NO: 260931 - DNA, 75 bp, synthetic construct
  source 1..75: mol_type = other DNA
cgttcaggcgcttcgtggaatcgatttgcaggtcgaagcgggtgatttttatgcgcttctcgggccgaacggggc

SEQ ID NO: 260932 - DNA, 75 bp, synthetic construct
  source 1..75: mol_type = other DNA
ggagaacgcagacaccctttatttcaccgtggacgactgttaccgcgtagccttcacgccacaaggtctggccct

SEQ ID NO: 260933 - DNA, 75 bp, synthetic construct
  source 1..75: mol_type = other DNA
agcaatccaactttgcgctttgacgcacatatgtgacgagttagccgctcagcttcgcaaaggaggcaaccagtg

SEQ ID NO: 260934 - DNA, 75 bp, synthetic construct
  source 1..75: mol_type = other DNA
attcagaatctgaccaacggcattatttactggtttgttcgggtaatgtcgccttttactgaaaaaatggtcagt

SEQ ID NO: 260935 - DNA, 75 bp, synthetic construct
  source 1..75: mol_type = other DNA
gggacaaggtgcttaatgcgctggattcgcgttgtccgaactgggatttatgggaagagtgtcgctcgattgccg

SEQ ID NO: 260936 - DNA, 75 bp, synthetic construct
  source 1..75: mol_type = other DNA
tgcccgttgccctaactgggacatgtgggaggagtgccgggacatctccgaactggagaatgcggcaacaacgtt

SEQ ID NO: 260937 - DNA, 75 bp, synthetic construct
  source 1..75: mol_type = other DNA
ctgccagtaaagctgttatttctactgacatgaaaactggggaggaggtttattatgaagcagctatggatgctg

SEQ ID NO: 260938 - DNA, 75 bp, synthetic construct
  source 1..75: mol_type = other DNA
tgaatgtggggatgaatgcggaaattaaggataatatgcgttttggcttggagctggaaaaatcggcgttcggga

SEQ ID NO: 260939 - DNA, 75 bp, synthetic construct
  source 1..75: mol_type = other DNA
cagtgattgatttaccgcagcgcgaactgacagagcgagagaacattttacttggctttgaaagtcgttatgaga

SEQ ID NO: 260940 - DNA, 75 bp, synthetic construct
  source 1..75: mol_type = other DNA
accgtggacgactgttaccgcgtagccttcacgccacaaggtctggccctgtacaccctgacaccacacggcgac

SEQ ID NO: 260941 - DNA, 75 bp, synthetic construct
  source 1..75: mol_type = other DNA
aaccagccatagcctgttccggcatcgaatgttacccttatcgcctgatctttaagggggttatcgtggctgttc

SEQ ID NO: 260942 - DNA, 75 bp, synthetic construct
  source 1..75: mol_type = other DNA
tttatgacactcctatgggttatgtcataaaaatgcttgtgtcagtattcgctcctcgtgattttgcgcttaccg

SEQ ID NO: 260943 - DNA, 75 bp, synthetic construct
  source 1..75: mol_type = other DNA
ttctttgatgcatacaatgaaatcgctcaggaatatctcgattcactcaataaactggcgttgccatgctggaca

SEQ ID NO: 260944 - DNA, 75 bp, synthetic construct
  source 1..75: mol_type = other DNA
ttcgcctgccaattctggtgccacaaaagggcaatcagctggaacgttttctctgcatggcattatttgtctggt

SEQ ID NO: 260945 - DNA, 75 bp, synthetic construct
  source 1..75: mol_type = other DNA
cgtcgcgaatcagctgactttaaaacctattatactcagcaattttcttctattgagagaggtattgctgaaatt

SEQ ID NO: 260946 - DNA, 75 bp, synthetic construct
  source 1..75: mol_type = other DNA
gcgattattatgcctggtataatggggatcatcgcagacaaatggctgcgtgcagaacgtgcatacatgctgtgt

SEQ ID NO: 260947 - DNA, 75 bp, synthetic construct
  source 1..75: mol_type = other DNA
tctattttgggcaggtatgattactccagggtttgcatccagcgatgataagattttcggtgcatttaccggttt

SEQ ID NO: 260948 - DNA, 75 bp, synthetic construct
  source 1..75: mol_type = other DNA
ggctaccagcttgtgttacgtaccctctattttgggcaggtatgattactccagggtttgcatccagcgatgata

SEQ ID NO: 260949 - DNA, 75 bp, synthetic construct
  source 1..75: mol_type = other DNA
ggcgcatcgcaccgctggcgggtgtgcctcgctgagtgaatacaccactgagtttaaccgtctttctgccctctt

SEQ ID NO: 260950 - DNA, 75 bp, synthetic construct
  source 1..75: mol_type = other DNA
attgtatatacgcctctgattgcttcccctgatggttacgatattaatctggcgctgccttgctcgccggggaaa

SEQ ID NO: 260951 - DNA, 75 bp, synthetic construct
  source 1..75: mol_type = other DNA
tttgacttctatgagacgacctacagattctggggccagaatccatgtggaaacgggatgatagacatcaccgtc

SEQ ID NO: 260952 - DNA, 75 bp, synthetic construct
  source 1..75: mol_type = other DNA
gctccacagggatttcaaatgggggatgcggcagaacttaaggcagtgcttgaggatggcggtattgcccgagtg

SEQ ID NO: 260953 - DNA, 75 bp, synthetic construct
  source 1..75: mol_type = other DNA
gaaaaccctgaaggcagcagcgattgccgaagccattatcagtaccatcgcaccactggaaagcatcagacgcag

SEQ ID NO: 260954 - DNA, 75 bp, synthetic construct
  source 1..75: mol_type = other DNA
tccgtgacccgttcgccgacgaagccattcagggttctgatgatgtgttcaccaccccggacattcgctacgtgc

SEQ ID NO: 260955 - DNA, 75 bp, synthetic construct
  source 1..75: mol_type = other DNA
ctgtctgacatcatggacgccagcgcagtggaagccatccgcgcccgtctgagcaatctgggcagcaaccgtaaa

SEQ ID NO: 260956 - DNA, 75 bp, synthetic construct
  source 1..75: mol_type = other DNA
acgctggccttaacccgcctcgaatggctgggtggcgaccgcttcgtgatcggctcactgattgcgattgtggcg

SEQ ID NO: 260957 - DNA, 75 bp, synthetic construct
  source 1..75: mol_type = other DNA
cggctcactgattgcgattgtggcgctgattggcatttttatcgtctggccgagcatcgccatttttatcccgat

SEQ ID NO: 260958 - DNA, 75 bp, synthetic construct
  source 1..75: mol_type = other DNA
ccgtgaaaaagcgggatgcgattttcctttgggttttgctgggctggctggcatttgtcctgttgccgagctgga

SEQ ID NO: 260959 - DNA, 75 bp, synthetic construct
  source 1..75: mol_type = other DNA
tcgcagtacggcgccgcgacccgcaggcggccgccgtacccgcgcgcaggcgcgcggcgcccactgcgcaccccc

SEQ ID NO: 260960 - DNA, 75 bp, synthetic construct
  source 1..75: mol_type = other DNA
gaacggaataaacaagccagaactataaaacgaaaacgtgacagtgtaacgattaatagcatggttaagaagagc

SEQ ID NO: 260961 - DNA, 75 bp, synthetic construct
  source 1..75: mol_type = other DNA
atgacccgtttgccgattgggcaaagaatctgactttaatggctttaaataacgacctgagctctcgcgaggtgg

SEQ ID NO: 260962 - DNA, 75 bp, synthetic construct
  source 1..75: mol_type = other DNA
ccccagagttttatttttattcgttttatcaaagaccggtccgcgccacatcctgtggcggagagagcggtatca

SEQ ID NO: 260963 - DNA, 75 bp, synthetic construct
  source 1..75: mol_type = other DNA
tccaccatcggtgcgaatctgctggtagtcgtggatgatgttgtcgctaacgatgatattcaacagaaattaatg

SEQ ID NO: 260964 - DNA, 75 bp, synthetic construct
  source 1..75: mol_type = other DNA
gttaccagaccggaacgctgaatcatggacagggcagaatgttcgttatgtgggagcagttgcggacgcctgata

SEQ ID NO: 260965 - DNA, 75 bp, synthetic construct
  source 1..75: mol_type = other DNA
taccacgcgcatcgctaaacgcagcgccgtaatcggccgcatcttttccattctgccaattgtcacgccaccgtt

SEQ ID NO: 260966 - DNA, 75 bp, synthetic construct
  source 1..75: mol_type = other DNA
aggcggggttcagccacgttctggtgattgaggaggcccacagtctgccccttccgacactgaaacacctcaaac

SEQ ID NO: 260967 - DNA, 75 bp, synthetic construct
  source 1..75: mol_type = other DNA
aggcggggttcagccacgttctggtgattgaggacgcccacagtctgcccgttccgacactgaaacacctcaaac

SEQ ID NO: 260968 - DNA, 75 bp, synthetic construct
  source 1..75: mol_type = other DNA
tcaggacgcccgctttcgccaggtgcatcgcgtcctgaaagacagcagccaggcggggttcagccacgttctggt

SEQ ID NO: 260969 - DNA, 75 bp, synthetic construct
  source 1..75: mol_type = other DNA
ctgctccattacgttccggatctgcgccgcaagatgctgctggccacactgtggaacaccggtgcgcgcatttat

SEQ ID NO: 260970 - DNA, 75 bp, synthetic construct
  source 1..75: mol_type = other DNA
cattcttaagaacgtcctttcacaattccctctttccccttttgctaccgcctaccggccgggttgcccaatcgt

SEQ ID NO: 260971 - DNA, 75 bp, synthetic construct
  source 1..75: mol_type = other DNA
cgaaagaagcaggccaggcgaaagaatccgcatggaacgagaaattcgctgcttacgcgaaagcttatccgcagg

SEQ ID NO: 260972 - DNA, 75 bp, synthetic construct
  source 1..75: mol_type = other DNA
tatcaaccgcgagaatgcgccggttattgttatcgagccatacatcatcgccatggaagacaacgatgtgaaagg

SEQ ID NO: 260973 - DNA, 75 bp, synthetic construct
  source 1..75: mol_type = other DNA
ctgatttttgacagctggcggcatcgtcacgacccagccgtaacctttactcccgatgcgaaggatagcctatga

SEQ ID NO: 260974 - DNA, 75 bp, synthetic construct
  source 1..75: mol_type = other DNA
gtatttaccggcgcatcattaaccagaatgccgagccgcaacagctggtcaccgtcgggcgcaaatttggtttct

SEQ ID NO: 260975 - DNA, 75 bp, synthetic construct
  source 1..75: mol_type = other DNA
tcaggacgcccgctttcgccagttgcatcgcgtcctgaaagacagctgccaggcggggttcagccacgttctggt

SEQ ID NO: 260976 - DNA, 75 bp, synthetic construct
  source 1..75: mol_type = other DNA
tcaggacgcccgctttcgccagatgcatcgcgtcctgaaagacagcggccaggcggggttcagccacgttctggt

SEQ ID NO: 260977 - DNA, 75 bp, synthetic construct
  source 1..75: mol_type = other DNA
attgttatcgagccatacatcatcgccatggaagacaacgatgtgaaagggaaaaccctgaaggcagcagcgatt

SEQ ID NO: 260978 - DNA, 75 bp, synthetic construct
  source 1..75: mol_type = other DNA
atggataatgaaagtaaaaaaacaagaacagaaaaaacattaaagcaaaaggttgcttttgctcaactagaactt

SEQ ID NO: 260979 - DNA, 75 bp, synthetic construct
  source 1..75: mol_type = other DNA
gacctgaatgatattgaaagaataacgtatataaaagcaggcaggaagtttctcgcgcaaattgatagaagacaa

SEQ ID NO: 260980 - DNA, 75 bp, synthetic construct
  source 1..75: mol_type = other DNA
ctgggcgctggcctacagtgcgattctggcgacggcgctggcctggagcttatggctgtttgtgctgaaaaactt

SEQ ID NO: 260981 - DNA, 75 bp, synthetic construct
  source 1..75: mol_type = other DNA
gcgcggtgtgcaggtgtgtatttgcgatatctccatgcccgatatctccggtctggagctgctaagccagctgcc

SEQ ID NO: 260982 - DNA, 75 bp, synthetic construct
  source 1..75: mol_type = other DNA
cgcgccaatctgatggaaaaactgggtgtcagtaacgacgtagagctggcgcgccgcatgtttgatggctggtga

SEQ ID NO: 260983 - DNA, 75 bp, synthetic construct
  source 1..75: mol_type = other DNA
agcaaaaaagaaaatacgcgacaaaaaataattcttggtgcagaagttgccaaggttttaaactgtgatataagt

SEQ ID NO: 260984 - DNA, 75 bp, synthetic construct
  source 1..75: mol_type = other DNA
tcatcgaatattagtattgaagataaagcaagattaaaattacgaggaaaaaggtttcttgaggatatggttggg

SEQ ID NO: 260985 - DNA, 75 bp, synthetic construct
  source 1..75: mol_type = other DNA
cttaaggctgatgtctctatttcggttaccgagcttggttcgttgctcgaccacaccgggccacacctggaagca

SEQ ID NO: 260986 - DNA, 75 bp, synthetic construct
  source 1..75: mol_type = other DNA
aagccttgtttacctacgtcaaagagcggaagtacaccttttgtacgccgggtcatatgggcggcaccgcatatc

SEQ ID NO: 260987 - DNA, 75 bp, synthetic construct
  source 1..75: mol_type = other DNA
tactcttttcctggtggctgctcggtgagaatccgggggccgttgaaggtagcggtattgtgctgattgtgctgg

SEQ ID NO: 260988 - DNA, 75 bp, synthetic construct
  source 1..75: mol_type = other DNA
gagcggcggagcggggaaggtggctattcttagctataccatgccgttctgggtagtgattttcgcggcgttgtt

SEQ ID NO: 260989 - DNA, 75 bp, synthetic construct
  source 1..75: mol_type = other DNA
tatggttgttcgtgctgaaaaacttacccgccagtatcgccagcttaagcacactggcggttcccgtttgcgggg

SEQ ID NO: 260990 - DNA, 75 bp, synthetic construct
  source 1..75: mol_type = other DNA
tgcgcagttgctggggctggaacctgatttgcaggtagttgccgagtttggttcggggcgcgaggcgctggcggg

SEQ ID NO: 260991 - DNA, 75 bp, synthetic construct
  source 1..75: mol_type = other DNA
tccaatatcttagcgtctgtgttcagaaaaatgacggaacggaaaacaaatttggcgcaaatgtcgttcacgcca

SEQ ID NO: 260992 - DNA, 75 bp, synthetic construct
  source 1..75: mol_type = other DNA
atgtttatcttggaatgactgcaactcttggatttggtgcaatcattttttcacaacgggcaattttctttgcac

SEQ ID NO: 260993 - DNA, 75 bp, synthetic construct
  source 1..75: mol_type = other DNA
tccttattcttggcggtgggacaattttcaaattgtccagtatgaaggacgtattttatgttcctatgcaggctg

SEQ ID NO: 260994 - DNA, 75 bp, synthetic construct
  source 1..75: mol_type = other DNA
ggaaattgacctttttggaaactggcgtaatgaggagaaccgggaaattattgcttcagcgttgaacatatcaac

SEQ ID NO: 260995 - DNA, 75 bp, synthetic construct
  source 1..75: mol_type = other DNA
atcgccctgctgggggaatatgacgccctggcaggtttaagtcagcaagcaggttgcgcggcaacctgcatccgc

SEQ ID NO: 260996 - DNA, 75 bp, synthetic construct
  source 1..75: mol_type = other DNA
tgccgcctcactggtgtttcagatgatggtaaatatgccctgctgagcagccccggaggttcggcctgttatgac

SEQ ID NO: 260997 - DNA, 75 bp, synthetic construct
  source 1..75: mol_type = other DNA
tgatgggatgcacaggaattgggcagttaacgcagcatatggtttccgtcagtaaatatgttgcacctgagtttc

SEQ ID NO: 260998 - DNA, 75 bp, synthetic construct
  source 1..75: mol_type = other DNA
tcaaagacaaagacaatcgcagcaaaaacgtaaacccgaatcacacggacgacccaggttactggcagtacggca

SEQ ID NO: 260999 - DNA, 75 bp, synthetic construct
  source 1..75: mol_type = other DNA
cgcgccaatctgatggaaaaactgggcgtcagtaacgacgttgaactggcgcgccgcatgtttgatggctggtga

SEQ ID NO: 261000 - DNA, 75 bp, synthetic construct
  source 1..75: mol_type = other DNA
cgaaaagcactgcagtgtttaatatgttcaaacacctggcccatgtgctctcagaaaaatatcatctggttgatt

SEQ ID NO: 261001 - DNA, 75 bp, synthetic construct
  source 1..75: mol_type = other DNA
cgaaaagcactgcggtgtttaatatgttcaaacacctggcacacgtgctctcggaaaaatatcatctggtagatt

SEQ ID NO: 261002 - DNA, 75 bp, synthetic construct
  source 1..75: mol_type = other DNA
ccagaaagtattaaccacaaacagaaagactggcgcagacggttaccagatggaaatccgcattccattcattgc

SEQ ID NO: 261003 - DNA, 75 bp, synthetic construct
  source 1..75: mol_type = other DNA
atccgccacattctggctgtacgaaagagtacactgctgcaaatcgacacacttatccggcaactggctgaaatc

SEQ ID NO: 261004 - DNA, 75 bp, synthetic construct
  source 1..75: mol_type = other DNA
aactccccgcgatcctcgaactgtggctggaaagtacaacctgggggcatccctttataaaagcgaattactggc

SEQ ID NO: 261005 - DNA, 75 bp, synthetic construct
  source 1..75: mol_type = other DNA
tatccgtaagcgtaaactgaccgccgtatgtagccatcagacgagaattggtaacttagacgcccatctgatata

SEQ ID NO: 261006 - DNA, 75 bp, synthetic construct
  source 1..75: mol_type = other DNA
tatgtctatggaaaggactctgccattcataataccggaagcggtgttatggatgtgtccactgaaaactcaaca

SEQ ID NO: 261007 - DNA, 75 bp, synthetic construct
  source 1..75: mol_type = other DNA
aagacagtaccattgttaacgatggtacactttatgtttgggataataataataaatatgctctccaggcggagg

SEQ ID NO: 261008 - DNA, 75 bp, synthetic construct
  source 1..75: mol_type = other DNA
aatttttttaaaaatacacagcttgctgtagctgatggagaaggttcctctgttgtatggaactcggtcaatgat

SEQ ID NO: 261009 - DNA, 75 bp, synthetic construct
  source 1..75: mol_type = other DNA
aagattgacgaggggcgtaagttgctttcatggcagaaaggtacactggtcggcggtcatgacgataacgattct

SEQ ID NO: 261010 - DNA, 75 bp, synthetic construct
  source 1..75: mol_type = other DNA
gctggttacagtgcaacggagctacgttcaccaaagaacaatatcctgttctggccagagtctacccgaccctca

SEQ ID NO: 261011 - DNA, 75 bp, synthetic construct
  source 1..75: mol_type = other DNA
caagtgttggacgtgccattcttggtaaaaccagcactcagggcgttcttgattaccttggtttgggagaaggct

SEQ ID NO: 261012 - DNA, 75 bp, synthetic construct
  source 1..75: mol_type = other DNA
tttgctttaagctttgcagcagtaatgatgactgggacgcgtgcggcatttttcacattcccacttatgattatg

SEQ ID NO: 261013 - DNA, 75 bp, synthetic construct
  source 1..75: mol_type = other DNA
aaggcagcctatgaccttgctaacgggaaatataccgcacaggacgccactacagcgcgaaaaggtcttgtccag

SEQ ID NO: 261014 - DNA, 75 bp, synthetic construct
  source 1..75: mol_type = other DNA
attgcttttaaaaatattcaggccggggatggtaaaaaattcacgctatccagctccaacaactccacaaagaat

SEQ ID NO: 261015 - DNA, 75 bp, synthetic construct
  source 1..75: mol_type = other DNA
cagcgactttaattgaagggggagcgcagggcacaattgaaagtaatgccattatcaagatggataatgccagtg

SEQ ID NO: 261016 - DNA, 75 bp, synthetic construct
  source 1..75: mol_type = other DNA
tttctgatgttgccgcaatacagcgggcctgcgttaggttttgccgattgtagcgtggtgccgcaaccgacggcg

SEQ ID NO: 261017 - DNA, 75 bp, synthetic construct
  source 1..75: mol_type = other DNA
atagcgtcactggctgggatggcaaaaccctgactaaagcgggcgacggcacacttacccttaatgttgccaaca

SEQ ID NO: 261018 - DNA, 75 bp, synthetic construct
  source 1..75: mol_type = other DNA
tccttatgcatttactctgattgatgctgataacgccatcaacggcgattttgatacgttgaccgtcgccggaat

SEQ ID NO: 261019 - DNA, 75 bp, synthetic construct
  source 1..75: mol_type = other DNA
ttttttatcgccaccgggcttggtcagttaccggcgactattgtttattcctgggcgggcagcatgttaacaggc

SEQ ID NO: 261020 - DNA, 75 bp, synthetic construct
  source 1..75: mol_type = other DNA
ggttacaaaatcgcacaacgactcggcggatatcgtgccgtcgggccattgatacaaggacttgccgcgccgatg

SEQ ID NO: 261021 - DNA, 75 bp, synthetic construct
  source 1..75: mol_type = other DNA
ccagcgccgaaacctggcgcgccatcaccggagaagagccgcgcgtggcgatgttgtcgttttccagtaacggca

SEQ ID NO: 261022 - DNA, 75 bp, synthetic construct
  source 1..75: mol_type = other DNA
gcataaaggtaatgcgggtggtactgacggtaactggtatctgcgttctgaattgccgccagaaccacaaccaca

SEQ ID NO: 261023 - DNA, 75 bp, synthetic construct
  source 1..75: mol_type = other DNA
gcaattttaccgttggctcactgaccaataccggcgtcattcgtctggccggtggtaagacaggaaataccctga

SEQ ID NO: 261024 - DNA, 75 bp, synthetic construct
  source 1..75: mol_type = other DNA
ggggcgggtaatctgatcattaatcatgagctgacttataccggtgataccacggttgaaaatggcgttctgatt

SEQ ID NO: 261025 - DNA, 75 bp, synthetic construct
  source 1..75: mol_type = other DNA
ggcacactgcagatggcaaatgataatgtgcttggcgctacaggcagcctgaacgttgccagcaatgccgtcttc

SEQ ID NO: 261026 - DNA, 75 bp, synthetic construct
  source 1..75: mol_type = other DNA
atggcctgaaatcgctgaatttgcaagggacaggtgataaagcgctggtgctgaccccgagagcgaacgcacagg

SEQ ID NO: 261027 - DNA, 75 bp, synthetic construct
  source 1..75: mol_type = other DNA
tcaccctgaaggaggcactggtgctgacggacggtggcgccggggcgggctctgtcgatattgaatcgggcagtg

SEQ ID NO: 261028 - DNA, 75 bp, synthetic construct
  source 1..75: mol_type = other DNA
cagaagaaaagtggtccccaaagtcagcccgggaaaaacactggaaggtctgatgggcggcgtaatcaccaccat

SEQ ID NO: 261029 - DNA, 75 bp, synthetic construct
  source 1..75: mol_type = other DNA
ggtgatccctccggttttctgcataccgtgagcgccattttttggggctggataatgaccgttttcgccttgagt

SEQ ID NO: 261030 - DNA, 75 bp, synthetic construct
  source 1..75: mol_type = other DNA
ccgagtcaaacgatattgcacagtatttatggggaaaatcctgcggcagaagaaaagtggtccccaaagtcagcc

SEQ ID NO: 261031 - DNA, 75 bp, synthetic construct
  source 1..75: mol_type = other DNA
ttcagcatggtaaccgctggcttaactggctggagaaacagccggaaggttccgtgcgtccggtggtgattgagt

SEQ ID NO: 261032 - DNA, 75 bp, synthetic construct
  source 1..75: mol_type = other DNA
acatcaagagtaccaatgttgattttgaagatctcaaatatgcaaatatcagtgatgttgatgctttaacttatc

SEQ ID NO: 261033 - DNA, 75 bp, synthetic construct
  source 1..75: mol_type = other DNA
gttactggtgttatttcttttggcgttaaccgagtcaaacgatattgcacagtatttatggggaaaatcctgcgg

SEQ ID NO: 261034 - DNA, 75 bp, synthetic construct
  source 1..75: mol_type = other DNA
gtggaattttccgtattaagtaacaatctgaaaatgccgatgatgggatttggtgtttttcaggttaccgataaa

SEQ ID NO: 261035 - DNA, 75 bp, synthetic construct
  source 1..75: mol_type = other DNA
tgcattttctctttttttattaattgtaaataacaagcataattataataaaaatatcattatattaattcttgg

SEQ ID NO: 261036 - DNA, 75 bp, synthetic construct
  source 1..75: mol_type = other DNA
tactggatacatggatagcccgcgtcagtcgggaggaaagggaagctctggaagcccgtcaggccgccattcttg

SEQ ID NO: 261037 - DNA, 75 bp, synthetic construct
  source 1..75: mol_type = other DNA
agacctgacggtaactttgtagtgcctgcatcctcagaacgagggatctttagtggcaaacattacagtcaagcc

SEQ ID NO: 261038 - DNA, 75 bp, synthetic construct
  source 1..75: mol_type = other DNA
caactcatcaacagcgtattgaagagaacttcgccatctgggatttttcactgacagaggcagaaatggagcaaa

SEQ ID NO: 261039 - DNA, 75 bp, synthetic construct
  source 1..75: mol_type = other DNA
atgtacccgagaagagttatttataacgtctaaattgtgggtgcaggatatgttgaatcaggatacggcagcagc

SEQ ID NO: 261040 - DNA, 75 bp, synthetic construct
  source 1..75: mol_type = other DNA
ggcaatgaatgcctctacgatcagccaggatgccgtagaaagcatcattgatacgttaccgttacgtccagtgct

SEQ ID NO: 261041 - DNA, 75 bp, synthetic construct
  source 1..75: mol_type = other DNA
ggcgttgtcattatctggcggtcaattgaatggtgcactgggcatcggaacatccagtgctcttggtggtaactc

SEQ ID NO: 261042 - DNA, 75 bp, synthetic construct
  source 1..75: mol_type = other DNA
tgttgttcagaccatgcaaaaaggcgtgatgtatgaaaaatcaggccatgtaatcacggggcttggtattgtcgg

SEQ ID NO: 261043 - DNA, 75 bp, synthetic construct
  source 1..75: mol_type = other DNA
atggttcaaactggcaactgtaacaatgccacaagccagttccgtggtttacataagcctgattggtggcgcagg

SEQ ID NO: 261044 - DNA, 75 bp, synthetic construct
  source 1..75: mol_type = other DNA
tcagagaccactcacataaccagcagatctggacaggttcaaatacaacatcgtcaactattggtcaggccggga

SEQ ID NO: 261045 - DNA, 75 bp, synthetic construct
  source 1..75: mol_type = other DNA
cttgattttgatgattactatgtatcttcgaatccaaatggatattttgtcgggaatcagagaacaacagcatat

SEQ ID NO: 261046 - DNA, 75 bp, synthetic construct
  source 1..75: mol_type = other DNA
aattttgcatgggtgaatacatccggtgatacctatgacatttatgtagaaataggtaattacgccacaggtgtt

SEQ ID NO: 261047 - DNA, 75 bp, synthetic construct
  source 1..75: mol_type = other DNA
cttggtattgtcggtgaagtcgatggtgatgaccccgcagtattcagaccaatacaaaaatacatcaatggcaca

SEQ ID NO: 261048 - DNA, 75 bp, synthetic construct
  source 1..75: mol_type = other DNA
atgattcgcaagtattggtggctcgtcgttttcgctgtctccgtttttctgtttgatactttactgatgcaatgg

SEQ ID NO: 261049 - DNA, 75 bp, synthetic construct
  source 1..75: mol_type = other DNA
acaaatgccgcaatatgaactcagttaatccactaaaactggttaactgtgacgaactgaattttcaggacagaa

SEQ ID NO: 261050 - DNA, 75 bp, synthetic construct
  source 1..75: mol_type = other DNA
aaggccgcgcatgacctggctaacggaaaatataccgctcaggacgccacgacggcacgaaaagggatagtccag

SEQ ID NO: 261051 - DNA, 75 bp, synthetic construct
  source 1..75: mol_type = other DNA
atctgttcagacatggaatggccccggctggtctgacaggtcaggttatgtcgttacgggttcagttaacggaaa

SEQ ID NO: 261052 - DNA, 75 bp, synthetic construct
  source 1..75: mol_type = other DNA
caaaatggcgacggtaatctggacgtttatgctaataacgtccatgttatgcgctttgtctccggcagcattcaa

SEQ ID NO: 261053 - DNA, 75 bp, synthetic construct
  source 1..75: mol_type = other DNA
ccgcactacggtatcgtggcgtccactgaaaccgctgcggcgatgatgaaaggcaatgcaggtgtcaacgacgga

SEQ ID NO: 261054 - DNA, 75 bp, synthetic construct
  source 1..75: mol_type = other DNA
gcgctcgccagtactgaacccacgcaacaggatctgctcgcttttcttgacgacgaactgacgcctaataatcag

SEQ ID NO: 261055 - DNA, 75 bp, synthetic construct
  source 1..75: mol_type = other DNA
gaaggcgaatggctaaaaagtcttaatcgctacccgtttgaggtgcaaagcctgccgagtgcttcgtttaatctg

SEQ ID NO: 261056 - DNA, 75 bp, synthetic construct
  source 1..75: mol_type = other DNA
attccccctttaaccactgcgaacagggcaaaattgttattccccggatgcgcgttgagccttccatcgacaacg

SEQ ID NO: 261057 - DNA, 75 bp, synthetic construct
  source 1..75: mol_type = other DNA
gctggagatgaacaaggtgggaatgtgagcagagttttaccctatccccaaggcgaggggaccgcccctgcactt

SEQ ID NO: 261058 - DNA, 75 bp, synthetic construct
  source 1..75: mol_type = other DNA
aggacggtgaaaaagaatctccacgatatcgaactggaagggaatcatttgattcgatccgcggcgccactggag

SEQ ID NO: 261059 - DNA, 75 bp, synthetic construct
  source 1..75: mol_type = other DNA
cgctgttatgaaaaaatgctcgccgccagtgagaacaacaaagagatttcgctgatcgaacatgcacagttggat

SEQ ID NO: 261060 - DNA, 75 bp, synthetic construct
  source 1..75: mol_type = other DNA
actacgagcctgtgattggcatcatgggtaagagcggtgtcggtaagtcttcgctctgtaacgaactcttccggg

SEQ ID NO: 261061 - DNA, 75 bp, synthetic construct
  source 1..75: mol_type = other DNA
gaccatgaataccgtgccctgtaccggcgtatgctgccggggctggacctggtgctgtgggtcattaaagccgac

SEQ ID NO: 261062 - DNA, 75 bp, synthetic construct
  source 1..75: mol_type = other DNA
cttgaacgtattaagaacctcacccactacgagccggtgattggcatcatgggcaaaagtggtgccggtaaatcc

SEQ ID NO: 261063 - DNA, 75 bp, synthetic construct
  source 1..75: mol_type = other DNA
gatatcgccattgatgacgatctctggcgtcgtctgagtaccgacaaagccagttgcctcaaccgtaactgttat

SEQ ID NO: 261064 - DNA, 75 bp, synthetic construct
  source 1..75: mol_type = other DNA
aagcgactactggatgcattaccggtatttccgatagagcaaccggaagtccctgaaggtatagttaaaaagaaa

SEQ ID NO: 261065 - DNA, 75 bp, synthetic construct
  source 1..75: mol_type = other DNA
ccattacggcgatgtttcgtccctttcatccggtctgtgtggtgtcagcgctggccggatggggtacggaagaaa

SEQ ID NO: 261066 - DNA, 75 bp, synthetic construct
  source 1..75: mol_type = other DNA
caatgcgttccagcatgttattcatgcctgtattggtttcgaggatccatgacatctccagcgcatcgatcttcc

SEQ ID NO: 261067 - DNA, 75 bp, synthetic construct
  source 1..75: mol_type = other DNA
ctggcccaggcgtttgaattgcctctggtaaccagcgtcggttatgaaacgcctggctctttcggcagttggtgt

SEQ ID NO: 261068 - DNA, 75 bp, synthetic construct
  source 1..75: mol_type = other DNA
cgaagccagcgaaaaatacctctttgcgatggctaacttgctgcgctggcatcctaaagatgcaatgcgcccgtc

SEQ ID NO: 261069 - DNA, 75 bp, synthetic construct
  source 1..75: mol_type = other DNA
atgaataaacctgacggccttcaggcctttgaacaaccgcttgcgtcgcttccgtgcacacttcgccagcttatt

SEQ ID NO: 261070 - DNA, 75 bp, synthetic construct
  source 1..75: mol_type = other DNA
ggactgcgcattgattacgcgagtgtgttacaagcccgcggttggcctcgtgcagcagaaaatgaattaaaaaaa

SEQ ID NO: 261071 - DNA, 75 bp, synthetic construct
  source 1..75: mol_type = other DNA
tatctataaactgacggggcgtcatcaggatgaattacgggcgatgacagagtcattacctgaaaatgcatctaa

SEQ ID NO: 261072 - DNA, 75 bp, synthetic construct
  source 1..75: mol_type = other DNA
ccagctaatacaccgcattcaacctgcctgggtggtctcattccacgatccactggcctgtattgaagatcccag

SEQ ID NO: 261073 - DNA, 75 bp, synthetic construct
  source 1..75: mol_type = other DNA
gtgaggtctcccccgtcagtgatgtgaacgcctgtacccgtgaagtgctgcgcttccggctgcgcagcgggcgtc

SEQ ID NO: 261074 - DNA, 75 bp, synthetic construct
  source 1..75: mol_type = other DNA
gaatgcctgtactcgcgacgtgctgcgtttccggttacgcagtgggcgtcacagcctggtgattgttgatttacc

SEQ ID NO: 261075 - DNA, 75 bp, synthetic construct
  source 1..75: mol_type = other DNA
gcctgaccgtgccaccagcccggtagcgacgcaactgcacaggaggctctgcacagagccggtaaagtcgcaagc

SEQ ID NO: 261076 - DNA, 75 bp, synthetic construct
  source 1..75: mol_type = other DNA
gggcgtgggagaaaacgggcaacgggaccaggaataccgcgccctgtaccggcgcatgctgccggaactggacct

SEQ ID NO: 261077 - DNA, 75 bp, synthetic construct
  source 1..75: mol_type = other DNA
cttgaacgcattcagaacctcacccactacgagcctgtgattggcatcatgggtaagagcggtgtcggtaagtct

SEQ ID NO: 261078 - DNA, 75 bp, synthetic construct
  source 1..75: mol_type = other DNA
gtgacacaactgcacaggaaactctgcacagagccggtaaagtcgcaggctcgtgacagtttcggtgaagctgtg

SEQ ID NO: 261079 - DNA, 75 bp, synthetic construct
  source 1..75: mol_type = other DNA
gagtggcggttgccggaaccgggttcacgccgatgctggaagaagcggtgaaagtgaatacggagcaactggtga

SEQ ID NO: 261080 - DNA, 75 bp, synthetic construct
  source 1..75: mol_type = other DNA
atgaagcataaacctaaaccacaactgataaatgtcgtggcactggccgtcatgctggcctgcagcacaatggcc

SEQ ID NO: 261081 - DNA, 75 bp, synthetic construct
  source 1..75: mol_type = other DNA
ctgtagtaaagcagatgaatgtaccagtggcggtgaggagcaacagtctggtgcgatcgccggaaccggattcac

SEQ ID NO: 261082 - DNA, 75 bp, synthetic construct
  source 1..75: mol_type = other DNA
tactttgaatctgatctgggagaaggtaaagcgggtaatgactccaacttattgatagtgttttatgttcagata

SEQ ID NO: 261083 - DNA, 75 bp, synthetic construct
  source 1..75: mol_type = other DNA
ggaaacggcgctgctgatgcgtcgcatgatggttaccggtatgtcggagccgaatgctgccgctcagccaaaggc

SEQ ID NO: 261084 - DNA, 75 bp, synthetic construct
  source 1..75: mol_type = other DNA
caactgccagaacatggcgaaaaagatgatggacttcagcgacagcagtaactggacgcagcaggccatgatgga

SEQ ID NO: 261085 - DNA, 75 bp, synthetic construct
  source 1..75: mol_type = other DNA
gtccagtgacttttcagatgacctacattccgggtacctataacaatggcaatgtgtactttgcctggatgcgct

SEQ ID NO: 261086 - DNA, 75 bp, synthetic construct
  source 1..75: mol_type = other DNA
tgctgctggtggctctctccaagatactttgtctatgatcgggaaaaacgtcacttgtagcgacctgaacgcgcc

SEQ ID NO: 261087 - DNA, 75 bp, synthetic construct
  source 1..75: mol_type = other DNA
cgcgtatgatcttgctaacggaaaatatacagcgcaggatgccacaacagcgcgaaaaggccttgtccagcttag

SEQ ID NO: 261088 - DNA, 75 bp, synthetic construct
  source 1..75: mol_type = other DNA
ggtgagctggcgatggcggatacgatggagctggcgctgacgatgcgccgtatgctgatcaccggccagggggag

SEQ ID NO: 261089 - DNA, 75 bp, synthetic construct
  source 1..75: mol_type = other DNA
cagtctggctgtctctgcaggggtgatcaatgccctgcgtcgtgacccggacaatatgtccctgacatcgcggct

SEQ ID NO: 261090 - DNA, 75 bp, synthetic construct
  source 1..75: mol_type = other DNA
gcgtgacaatgaacgtgtgagcaataacccgatgattcagcagaccgacaacgctgacagccgtgtccgttcact

SEQ ID NO: 261091 - DNA, 75 bp, synthetic construct
  source 1..75: mol_type = other DNA
gatgatattgcaaaactggcggggcaaaagctcgtcgcccgtgctaaatccggagaatatgtgcagggaattaat

SEQ ID NO: 261092 - DNA, 75 bp, synthetic construct
  source 1..75: mol_type = other DNA
atgaataatgcgccgcagtttaatccagaaacgctttatgccagcgatacgctgattcgctttaacggtgtgaac

SEQ ID NO: 261093 - DNA, 75 bp, synthetic construct
  source 1..75: mol_type = other DNA
atgtatgaggagggtgtgacatttttcatgatagtaaaacaggtgataacctcctttcgtaagggggattcacag

SEQ ID NO: 261094 - DNA, 75 bp, synthetic construct
  source 1..75: mol_type = other DNA
atgtatgaggagggtgtgacatttttcatgaaagtaaaacaggtgataacctcctttcgtaaggggtattcacag

SEQ ID NO: 261095 - DNA, 75 bp, synthetic construct
  source 1..75: mol_type = other DNA
atgactaaacctcatggccttcaggcccttgaacaaccgctgacgtcgcttcccgatacgcttcgccagctcatt

SEQ ID NO: 261096 - DNA, 75 bp, synthetic construct
  source 1..75: mol_type = other DNA
cctgccacgaatgggatacccgaaccagcacgccttcagcacagcaatgggcaaatcttcaggaaaagcaggtag

SEQ ID NO: 261097 - DNA, 75 bp, synthetic construct
  source 1..75: mol_type = other DNA
cgctggctaagaatcataacgtcaaccacttcacgctggcgtttgtggtgagtaaagatgcgaacacctgtctgc

SEQ ID NO: 261098 - DNA, 75 bp, synthetic construct
  source 1..75: mol_type = other DNA
tacgtggttattacattccggaataatgcctcatgatatgtcagtaccttcgggcgaaggtgcaggttctgtttt

SEQ ID NO: 261099 - DNA, 75 bp, synthetic construct
  source 1..75: mol_type = other DNA
ctgcctgagctaacgccctgtggcgatgttggtctggtcagtgcgtatctccaggcactgaccaacgaaggtgtc

SEQ ID NO: 261100 - DNA, 75 bp, synthetic construct
  source 1..75: mol_type = other DNA
cgagttatgcccgggcgaaacgccgcctatgtttaccacttcagccattgcctgtgtaacgcttgatgaaagcgg

SEQ ID NO: 261101 - DNA, 75 bp, synthetic construct
  source 1..75: mol_type = other DNA
atgtatgaggagcgtgtgacatttttcatgatagtaaaacaggtgataacctcctttcgtaaggggcattcacag

SEQ ID NO: 261102 - DNA, 75 bp, synthetic construct
  source 1..75: mol_type = other DNA
atgtatgaggagagtgtgacatttttcatgagagtaaaacaggtgataacctcctttcgtaaggggtattcacag

SEQ ID NO: 261103 - DNA, 75 bp, synthetic construct
  source 1..75: mol_type = other DNA
atgtatgaggagagtgtgacatttttcatgatagtaaaacaggtgataacctcctttcgtaaggggaattcacag

SEQ ID NO: 261104 - DNA, 75 bp, synthetic construct
  source 1..75: mol_type = other DNA
ctgcctttggcttctcgataaacacgctaacgatgttcgggatggtgctcgctatcggcctgttggtggatgacg

SEQ ID NO: 261105 - DNA, 75 bp, synthetic construct
  source 1..75: mol_type = other DNA
cgatttttgcgtgggtgatcgccattctcatcatgttggcaggggggctggcgatcctcaaactgccggtggcgc

SEQ ID NO: 261106 - DNA, 75 bp, synthetic construct
  source 1..75: mol_type = other DNA
agctccttcttgccagatgaggaccagggcgtatttatgaccatggttcagctgccagcaggtgcaacgcaggaa

SEQ ID NO: 261107 - DNA, 75 bp, synthetic construct
  source 1..75: mol_type = other DNA
tcgcgagagcgcggagagtatcttcgacgaagaggcaaaagctacccgccgcgccaccaatggcatcctgctgcg

SEQ ID NO: 261108 - DNA, 75 bp, synthetic construct
  source 1..75: mol_type = other DNA
tgagagctggtcgattccgttctccgttatgctggttgttccgctgggggttatcggtgcgttgctggcagccac

SEQ ID NO: 261109 - DNA, 75 bp, synthetic construct
  source 1..75: mol_type = other DNA
caccggtgcaggttccggcgcacagaacgcggtaggtactggcgttatgggcgggatggtgaccgctacggtact

SEQ ID NO: 261110 - DNA, 75 bp, synthetic construct
  source 1..75: mol_type = other DNA
tccgcaatggcattgtcagtactggtggcgttgattctgactccggcgctttgtgcgaccatgctaaaacctatc

SEQ ID NO: 261111 - DNA, 75 bp, synthetic construct
  source 1..75: mol_type = other DNA
aattgagctgggtggtgaaaactacgacatcatcgcggaatttaacggacaaccggcttctggtctgggtatcaa

SEQ ID NO: 261112 - DNA, 75 bp, synthetic construct
  source 1..75: mol_type = other DNA
gggtctccactctggaacagacgaccgaaaatcaacgttgggaaatcgaaagtgcgggttttaacgtcagacccc

SEQ ID NO: 261113 - DNA, 75 bp, synthetic construct
  source 1..75: mol_type = other DNA
ccgcatgttcgagaagagcacgcaccactacaccgacagcgtaggcggtattctgcgcagtacggggcgttatct

SEQ ID NO: 261114 - DNA, 75 bp, synthetic construct
  source 1..75: mol_type = other DNA
ccgcctttggcttctcgataaacacgctaacaatgttcgggatggtactcgccatcggcctgttggtggatgacg

SEQ ID NO: 261115 - DNA, 75 bp, synthetic construct
  source 1..75: mol_type = other DNA
tgaacgactttatcgaccgcggtcgtgtgaagaaagtttacgtcatgtcagaagcgaaataccgtatgctgccgg

SEQ ID NO: 261116 - DNA, 75 bp, synthetic construct
  source 1..75: mol_type = other DNA
ggccgccatcggagccaacgaacgcaagcgcatcaccacagaaatcctgcaggacctctttcagatcgaagagat

SEQ ID NO: 261117 - DNA, 75 bp, synthetic construct
  source 1..75: mol_type = other DNA
ggtatattccagggggtagagacaatgcgcgcccgtggaaaagaacctgtgatcattgacgctggaccaggtaca

SEQ ID NO: 261118 - DNA, 75 bp, synthetic construct
  source 1..75: mol_type = other DNA
gcagctcattgaagatttgctccagtctcgtcgtgcactcgcagacgatattcagcagctgctcgaatacagaca

SEQ ID NO: 261119 - DNA, 75 bp, synthetic construct
  source 1..75: mol_type = other DNA
gattgccggaatgaacggacatacatttggccccacaaccggcctgcgtctgaccagcgtccgcaacctgtatac

SEQ ID NO: 261120 - DNA, 75 bp, synthetic construct
  source 1..75: mol_type = other DNA
tctgaaggggctggctacgccggtcattattaacgtgaagggggcagaaccctccgttaaatcaaaaaccgttga

SEQ ID NO: 261121 - DNA, 75 bp, synthetic construct
  source 1..75: mol_type = other DNA
ttggtcctcgccaacgcgaactgctccaagcttttagtgcgtttcctgaggaagaccaagaaaaaatgcttcaag

SEQ ID NO: 261122 - DNA, 75 bp, synthetic construct
  source 1..75: mol_type = other DNA
gacgtaagctcctgcttacctgcattgttgcaggcgtgatgattgcgatactggtgagttgccttcagtttttag

SEQ ID NO: 261123 - DNA, 75 bp, synthetic construct
  source 1..75: mol_type = other DNA
cgacgctgagtcaaccggaattttatgatccagaaattgtcttctttgcagacaaactggacgcttacacagatc

SEQ ID NO: 261124 - DNA, 75 bp, synthetic construct
  source 1..75: mol_type = other DNA
tcattcaggtttgctggctaatggctgcccatctgtggaagatactcatctgctacacggtgaaatggcctgtgc

SEQ ID NO: 261125 - DNA, 75 bp, synthetic construct
  source 1..75: mol_type = other DNA
cggggctgcgtcctaacctgatgaccatgggggccggcgtgatggcgctgctgaagttccacccggcgattcagg

SEQ ID NO: 261126 - DNA, 75 bp, synthetic construct
  source 1..75: mol_type = other DNA
gtgttagctcctattctcacactgaagatatctaagctaacaagtaaattatacactgaaataagatatttagat

SEQ ID NO: 261127 - DNA, 75 bp, synthetic construct
  source 1..75: mol_type = other DNA
aatggttttcctgcatggtctgaaattccaccaccaacacatgaggaacaaattgctgcagccgaactggaaaag

SEQ ID NO: 261128 - DNA, 75 bp, synthetic construct
  source 1..75: mol_type = other DNA
gtggctggattatctcgatgcgctggaggccgtagacacctccggcgcaccagatattaactggcctgagtcgcc

SEQ ID NO: 261129 - DNA, 75 bp, synthetic construct
  source 1..75: mol_type = other DNA
caggtgtgacggtgcgtgataactggaactatataccgatcccggttttactgccgttggcttctgtagggtatg

SEQ ID NO: 261130 - DNA, 75 bp, synthetic construct
  source 1..75: mol_type = other DNA
gggggcattgacctgaccagtccaacaggaaaaatgatgatgcacgtaatttcagcagtcgctgaatttgaacga

SEQ ID NO: 261131 - DNA, 75 bp, synthetic construct
  source 1..75: mol_type = other DNA
gttgctaggggtgataatgcagcccaaattaataatttatctgacataaaagtaaaaataaaaaatgagggtata

SEQ ID NO: 261132 - DNA, 75 bp, synthetic construct
  source 1..75: mol_type = other DNA
ttaattgccaatattgccgactggctggagctgcatccggcagaaaaacgccagccctggtgcgttgaaatcccg

SEQ ID NO: 261133 - DNA, 75 bp, synthetic construct
  source 1..75: mol_type = other DNA
acggctcctgcaatggcaggcaagctgtgaacccgaagagtactggattgttgatgacattgaagggcgacttga

SEQ ID NO: 261134 - DNA, 75 bp, synthetic construct
  source 1..75: mol_type = other DNA
tcgctgttgccaacgccgcaaagcgagcgcgagcgtttctatctgatgccgcaaaacgtccattttgagcacgcc

SEQ ID NO: 261135 - DNA, 75 bp, synthetic construct
  source 1..75: mol_type = other DNA
cactgaatatggctaaattcattcaggcgcaatccctgcttttgctggagaagctcaacgaactggatctcgata

SEQ ID NO: 261136 - DNA, 75 bp, synthetic construct
  source 1..75: mol_type = other DNA
tgccgtagatattcccgtggcgagcgataacccagtgcactatgcggatgccattcgttataatgctcgaacgcc

SEQ ID NO: 261137 - DNA, 75 bp, synthetic construct
  source 1..75: mol_type = other DNA
aactcgcgatcgttataaagacgttatttctcactatcagcgattaaaaaagacggggcaaattattccgccctg

SEQ ID NO: 261138 - DNA, 75 bp, synthetic construct
  source 1..75: mol_type = other DNA
tcaacaatctccgtcacagtttatagatgcaatttcatctgaaattactggacaccaatttcttatcccaaacgt

SEQ ID NO: 261139 - DNA, 75 bp, synthetic construct
  source 1..75: mol_type = other DNA
ctctacttttcataatgggtttaaagagctctgaaagaaaacccgttgaaaatgggctaattggaagtcgcgaaa

SEQ ID NO: 261140 - DNA, 75 bp, synthetic construct
  source 1..75: mol_type = other DNA
cgcttaatatggcgaagtttatccaggggcagaccctgcttttgttggaaaagcttaatgaactcgatctcgatg

SEQ ID NO: 261141 - DNA, 75 bp, synthetic construct
  source 1..75: mol_type = other DNA
ctgtccgtttgcagaaccgttgtatggcgagatggacgataccgggctcgcgtggcaacaacgtctgggcgactg

SEQ ID NO: 261142 - DNA, 75 bp, synthetic construct
  source 1..75: mol_type = other DNA
ttcagcagtcgctgaatttgagcgagaccttttacttgagcgtactcattcagggatattaagagcacggggcgc

SEQ ID NO: 261143 - DNA, 75 bp, synthetic construct
  source 1..75: mol_type = other DNA
gggtatccactctggaacagaccacagaaaaccagcgtcgtgaaattgaggcagctggtttcgctgttaaacctc

SEQ ID NO: 261144 - DNA, 75 bp, synthetic construct
  source 1..75: mol_type = other DNA
attatgctctctgttcatgacagtccggcgctggttgagcaggcgcttaacgcgggggcgcgcggctttctctcc

SEQ ID NO: 261145 - DNA, 75 bp, synthetic construct
  source 1..75: mol_type = other DNA
ggtggtgttgatctgaccagtccggcaggaaaaatgacaatgcaggtgatttcagcggtcgctgaatttgaacga

SEQ ID NO: 261146 - DNA, 75 bp, synthetic construct
  source 1..75: mol_type = other DNA
agtcacaaaactggatcgcctcggtcgtaatgcaatggatataaggaaaacagtggagcaactgaccgaatctgg

SEQ ID NO: 261147 - DNA, 75 bp, synthetic construct
  source 1..75: mol_type = other DNA
aggaaagcgatttggtcgcccacctgtgttaaatgatgaacaaatacagagggtactagagcaaattaagtcagg

SEQ ID NO: 261148 - DNA, 75 bp, synthetic construct
  source 1..75: mol_type = other DNA
gctgggcgcatgagtgcggaagagggcaaaaaagttgccctgtgggcgcaaactcttggctggccgctgattggc

SEQ ID NO: 261149 - DNA, 75 bp, synthetic construct
  source 1..75: mol_type = other DNA
tgaatcggctctggctggcgcatggcgcaccccgaccaccaccgtgattgaaatggtcgttaacgatactgatgg

SEQ ID NO: 261150 - DNA, 75 bp, synthetic construct
  source 1..75: mol_type = other DNA
aaaaacagcgcgactggttcttctggcggcaaaagcgcggcgtggtggttgccgggcgcatgagtgcggaagagg

SEQ ID NO: 261151 - DNA, 75 bp, synthetic construct
  source 1..75: mol_type = other DNA
agctgggttaaccggagaaaaactgatcctgctaaccgccgatcgcccgccggagctcattgactgcggcgcgaa

SEQ ID NO: 261152 - DNA, 75 bp, synthetic construct
  source 1..75: mol_type = other DNA
cgctccccgaccaccaccgtgattgagatggtggttaacgacaccgatggtgcgcagaccctccagcagttgctg

SEQ ID NO: 261153 - DNA, 75 bp, synthetic construct
  source 1..75: mol_type = other DNA
ctacgccgttaacgttagcggcggcggaaaattctgcattaatccaccacacccattttgatgagcgtgggctgg

SEQ ID NO: 261154 - DNA, 75 bp, synthetic construct
  source 1..75: mol_type = other DNA
gcccattgaatattatgataataatatttctggaactctgaccttgttgaaggtaatgaattattttggtgttaa

SEQ ID NO: 261155 - DNA, 75 bp, synthetic construct
  source 1..75: mol_type = other DNA
ccggcagaagatgccaaagcgggagatcgcccaattaatctgcgctgcgagctgcttattccaatacgtcgttaa

SEQ ID NO: 261156 - DNA, 75 bp, synthetic construct
  source 1..75: mol_type = other DNA
cgcgcccaagccaggataaagacgacgaacaagaggtgttctacaccactgcgttagcccaggatcaggctgacg

SEQ ID NO: 261157 - DNA, 75 bp, synthetic construct
  source 1..75: mol_type = other DNA
gctggagcacaacttggcagcattgttcctggtattggtactggtatcggtgccgctgttggtggcggtcttggt

SEQ ID NO: 261158 - DNA, 75 bp, synthetic construct
  source 1..75: mol_type = other DNA
gtgctgagacgacgcttacggataaataattacccggataagattactgttactgtggcactggaaattggtggg

SEQ ID NO: 261159 - DNA, 75 bp, synthetic construct
  source 1..75: mol_type = other DNA
aaccttgaaggtaaaattgttgcgctgtatgggcttggcgatcaactgggatacggcgagtggttcctcgatgcg

SEQ ID NO: 261160 - DNA, 75 bp, synthetic construct
  source 1..75: mol_type = other DNA
cgtctgggatcagctcgacgacctgaacctcgaaggtaaaattgttgcgctgtatgggcttggcgatcaactggg

SEQ ID NO: 261161 - DNA, 75 bp, synthetic construct
  source 1..75: mol_type = other DNA
cggatcggaaaaccgatcccggccctgcatttgattgggcacggtttcgtgtgctggtcagcaaggagacaacat

SEQ ID NO: 261162 - DNA, 75 bp, synthetic construct
  source 1..75: mol_type = other DNA
attgccccgactctcggtcagtcgtggttgtcgaaccagatgagcaactacaacaatctggcaaacattggcctt

SEQ ID NO: 261163 - DNA, 75 bp, synthetic construct
  source 1..75: mol_type = other DNA
acagcaggcggcagcatctgcggctaatgctaaccgaccatcaggattgcaatcagctttgggcggtgccatgag

SEQ ID NO: 261164 - DNA, 75 bp, synthetic construct
  source 1..75: mol_type = other DNA
ctacagcaacaggaaaccagttagcagcaatcgcacctacactcggtcaaaactggctgtcaggtcagatgaaca

SEQ ID NO: 261165 - DNA, 75 bp, synthetic construct
  source 1..75: mol_type = other DNA
cggcggcgttggcgcttccggcaaccatcgcgccagcgcctggtatgcggcagattattgtgcctggccgatggc

SEQ ID NO: 261166 - DNA, 75 bp, synthetic construct
  source 1..75: mol_type = other DNA
cgggatgcataccatctggcggggcttgagataccggattttgtgcgtgaggatgactggtggcgcaacggccag

SEQ ID NO: 261167 - DNA, 75 bp, synthetic construct
  source 1..75: mol_type = other DNA
gtgcccctgtcctctgcacaggcgggcgatatcctgctgtgctgctttggcgcatcggtggccaatcatgccgcc

SEQ ID NO: 261168 - DNA, 75 bp, synthetic construct
  source 1..75: mol_type = other DNA
gtacacgtaacgcgaataaagtttatttgtcgttaatcggtactgacacagcaaaagatttgctcgcgatgcgcc

SEQ ID NO: 261169 - DNA, 75 bp, synthetic construct
  source 1..75: mol_type = other DNA
gtcctctgcacaggcaggcgatgtgctgctgtgctgctttggtgcttcggtgccgaatcatgccgccgtttactg

SEQ ID NO: 261170 - DNA, 75 bp, synthetic construct
  source 1..75: mol_type = other DNA
cacaaattccgctgcgtgccgcacctgacgggacggcgctttgagcacggggtgacggattgttacaccctgttc

SEQ ID NO: 261171 - DNA, 75 bp, synthetic construct
  source 1..75: mol_type = other DNA
ggcgttacgacaccttcgatgaggcgattaagatggcgaataacactcgcttcggcctctcctgcgggctggttt

SEQ ID NO: 261172 - DNA, 75 bp, synthetic construct
  source 1..75: mol_type = other DNA
attgtgtttctggcggcgctatttccgcaattcatcatgccgcagcagccacaactgatgcagtatatcgtgctc

SEQ ID NO: 261173 - DNA, 75 bp, synthetic construct
  source 1..75: mol_type = other DNA
ccggaagactggctgcaggcacagatgcagggggagattgtggcactggtccacagtcatcccggtgggctgccc

SEQ ID NO: 261174 - DNA, 75 bp, synthetic construct
  source 1..75: mol_type = other DNA
tggcgcatgcccggcggtgtgcgcctgcggagtcgtgcggcttcgtgataaccacgacggagggcgagcggtacc

SEQ ID NO: 261175 - DNA, 75 bp, synthetic construct
  source 1..75: mol_type = other DNA
atttgtcgccgacgaggttgaccccgctatcgccgaaatgccagtgattcagaaaattttccccgactgggataa

SEQ ID NO: 261176 - DNA, 75 bp, synthetic construct
  source 1..75: mol_type = other DNA
tacgaagctgaggcgaaaaagcaggcgaagcagtttttcatggatgttgctgccgggttatgtgaaggggatggt

SEQ ID NO: 261177 - DNA, 75 bp, synthetic construct
  source 1..75: mol_type = other DNA
tattgctgggcttcagaccggactggcgattcatattgtgctggttggcgtggggttggggacgctattttcccg

SEQ ID NO: 261178 - DNA, 75 bp, synthetic construct
  source 1..75: mol_type = other DNA
ttgtcgggcagcccgtgcggcgtttccgcgctgggcgcgtctctcctttggcgatcgtcaggtaagagttgaacg

SEQ ID NO: 261179 - DNA, 75 bp, synthetic construct
  source 1..75: mol_type = other DNA
ctacaagcgggaacatcgttgctgacaccggggatcattgaaatgacgggcgttgagggcgtaccggatgaagaa

SEQ ID NO: 261180 - DNA, 75 bp, synthetic construct
  source 1..75: mol_type = other DNA
gcggtttttctgccaccacgatgctgttttcactgggtgccagcatgatactgggtggtgtggcacagatgctgg

SEQ ID NO: 261181 - DNA, 75 bp, synthetic construct
  source 1..75: mol_type = other DNA
gggacgccatgtcggtatttatatcggcaacaaccagtttgtccatgcttccaccagcagtggtgttattatttc

SEQ ID NO: 261182 - DNA, 75 bp, synthetic construct
  source 1..75: mol_type = other DNA
gactggaaaggcgtacgttatcgtctgggcggcagcactaaaaaaggtatcgattgttctggtttcgtacagcgt

SEQ ID NO: 261183 - DNA, 75 bp, synthetic construct
  source 1..75: mol_type = other DNA
ccaccagcagtggtgttattatttccagcatgaatgagccgtactggaaaaagcgttacaacgaagcacgtcggg

SEQ ID NO: 261184 - DNA, 75 bp, synthetic construct
  source 1..75: mol_type = other DNA
tgcaaagcattaacgacgaacaaacccagacgcttccttctgatgagcttaaccgtgcgcggctggcgtgggcga

SEQ ID NO: 261185 - DNA, 75 bp, synthetic construct
  source 1..75: mol_type = other DNA
gagcgatcacttaacctggctggcggaggctatgatagatgccgtcgttcagcaggcgtgggttcaaatggttgc

SEQ ID NO: 261186 - DNA, 75 bp, synthetic construct
  source 1..75: mol_type = other DNA
ctgggttaatgcgtgaactgcggctgttccggcggcgcattatggtgcgcatcgcctgggcgcaaacgctgacgc

SEQ ID NO: 261187 - DNA, 75 bp, synthetic construct
  source 1..75: mol_type = other DNA
tgtgccgcgactggccggagccggaaagggcggactgcagattgtgctgggggcggcagccatcgtgggctcttt

SEQ ID NO: 261188 - DNA, 75 bp, synthetic construct
  source 1..75: mol_type = other DNA
tggtcggctacggcaagctgggcggctgggagttaggctacagttccgatcttgaccttatcttcctccatgatt

SEQ ID NO: 261189 - DNA, 75 bp, synthetic construct
  source 1..75: mol_type = other DNA
cagtacttacttttagtgattttgtgcaggacagcgtgattgcgcatccagagtggctgacggaactggaaagcc

SEQ ID NO: 261190 - DNA, 75 bp, synthetic construct
  source 1..75: mol_type = other DNA
gtataaagaccttgcaggtcaggctcgttaccagagtcttgctgctgcggaggcgactggcggacttggttcgac

SEQ ID NO: 261191 - DNA, 75 bp, synthetic construct
  source 1..75: mol_type = other DNA
gaaaactgcgcggcgaggaaccttattgccctgaaaaaggcgggaaaggtggcagttctgataaaagcgcaaagt

SEQ ID NO: 261192 - DNA, 75 bp, synthetic construct
  source 1..75: mol_type = other DNA
ggcgctgagtgcgctggaggatctcgacggcttgctgtttaccggcagcgccaataccggctaccagctgcatcg

SEQ ID NO: 261193 - DNA, 75 bp, synthetic construct
  source 1..75: mol_type = other DNA
ttggcgcgcgccgcgttccctcaccacattacgattgccgcccggatgacgaaacacccaccctgctggtggtgc

SEQ ID NO: 261194 - DNA, 75 bp, synthetic construct
  source 1..75: mol_type = other DNA
tagcggaggagcttcaggagctatgactggtgccgctcttggttctattgttcccggtcttggtactggattagg

SEQ ID NO: 261195 - DNA, 75 bp, synthetic construct
  source 1..75: mol_type = other DNA
cgctgcacctgcgcccgccgtttattgctgaaaagtggaacgcagggcgatgcatttcttgctcgcctggttgcc

SEQ ID NO: 261196 - DNA, 75 bp, synthetic construct
  source 1..75: mol_type = other DNA
tgtcgggggagattgtggcgctggttcacagtcatcccgctggtctgccctggctgagtgaggcagacaggcggc

SEQ ID NO: 261197 - DNA, 75 bp, synthetic construct
  source 1..75: mol_type = other DNA
tgacaggacggcgctttgagcacggggtgacggactgttacacgctgttccgggatgcttaccatctggcgggga

SEQ ID NO: 261198 - DNA, 75 bp, synthetic construct
  source 1..75: mol_type = other DNA
gattcgaatggcgaataacactcgcttcggcctctcttgcggtctggtttcccccgagcgggaaaaattcgatca

SEQ ID NO: 261199 - DNA, 75 bp, synthetic construct
  source 1..75: mol_type = other DNA
cgctgcacctgcgcccgccgtttattgctgaaaagcggggcgcagggcgatgcgtttcttgctcgtctggttgcc

SEQ ID NO: 261200 - DNA, 75 bp, synthetic construct
  source 1..75: mol_type = other DNA
gtggtcggccatgcgctcggtgcgctggtgggaatgcagctggcgctggattatcccgcgtcggtaactgtgctg

SEQ ID NO: 261201 - DNA, 75 bp, synthetic construct
  source 1..75: mol_type = other DNA
gcggcggcgcgcaggcatgggtggaagctcagccattgttcctctatcccgccgactggatggcggcccgcgcac

SEQ ID NO: 261202 - DNA, 75 bp, synthetic construct
  source 1..75: mol_type = other DNA
agcggaactgcatcaggcgctggtagccgcagggattgagcattacgcggtggtcggccatgcgctcggtgcgct

SEQ ID NO: 261203 - DNA, 75 bp, synthetic construct
  source 1..75: mol_type = other DNA
cgtgggaatgcaactggcgttggatcaccccacatcagtcactgcgctggtcagcgtaaatggctggctacgact

SEQ ID NO: 261204 - DNA, 75 bp, synthetic construct
  source 1..75: mol_type = other DNA
cttatgctgatgcgcccgtagtggtattgatttcaggtcttggcggcagcggcagttactggttgccgcaactgg

SEQ ID NO: 261205 - DNA, 75 bp, synthetic construct
  source 1..75: mol_type = other DNA
gtcagcggcgcagccgggcgatgtgctgctgtgctggtttggttcatcggtgccgaatcatgccgccatttactg

SEQ ID NO: 261206 - DNA, 75 bp, synthetic construct
  source 1..75: mol_type = other DNA
attgtgcctggccgatggctagcctggagtcagacacgttaacgttgcctgcgacgcttaaccccggtctggatt

SEQ ID NO: 261207 - DNA, 75 bp, synthetic construct
  source 1..75: mol_type = other DNA
atgaaactttcactctcacctcccccttatgctgatgcgcccgtagtggtgttgatttcgggtcttggcggtagc

SEQ ID NO: 261208 - DNA, 75 bp, synthetic construct
  source 1..75: mol_type = other DNA
tcagcagaaatgctgtacttgcaaaaaatgttggggctacaaggcttaccgctgattgcagagaatggcgcagtg

SEQ ID NO: 261209 - DNA, 75 bp, synthetic construct
  source 1..75: mol_type = other DNA
accgtacaattttcctggtcatttgccgaacggacatattgttccggcattgctggcgggtaacacaatcatctt

SEQ ID NO: 261210 - DNA, 75 bp, synthetic construct
  source 1..75: mol_type = other DNA
tttggatgaccttcctttaatcaataaagaagaacaaccagataaaggcttcttagccagtatttcacggggagt

SEQ ID NO: 261211 - DNA, 75 bp, synthetic construct
  source 1..75: mol_type = other DNA
tcactgccggggcatcaatggcgttatggggttcagccctggcagccggtggtttttctgccaccacgatgctgt

SEQ ID NO: 261212 - DNA, 75 bp, synthetic construct
  source 1..75: mol_type = other DNA
tgcggagtcgtgcggcttcgtgataagcacgccggagggggagcggtatatcccttgtgtgaatatctctgcaga

SEQ ID NO: 261213 - DNA, 75 bp, synthetic construct
  source 1..75: mol_type = other DNA
gctggtccacagccatcccggtggtctgccctggctgagtgaagccgaccgtcggctgcaggtgcagagtgattt

SEQ ID NO: 261214 - DNA, 75 bp, synthetic construct
  source 1..75: mol_type = other DNA
gtgagctgcttcaccatatacctgaacaactgagtaaacgggagaggtattctgaaaaatggcaacgacgaacgc

SEQ ID NO: 261215 - DNA, 75 bp, synthetic construct
  source 1..75: mol_type = other DNA
cgttcaattcacctgcgtaaacacgccggacaggtggcgtttccaggtggcgcagtagatgacaccgacgcgtca

SEQ ID NO: 261216 - DNA, 75 bp, synthetic construct
  source 1..75: mol_type = other DNA
tgaacacggcagcggaggccatccgtgccctgtcgctgcaggtgccgggattccgcggtcagatgaacgaaggct

SEQ ID NO: 261217 - DNA, 75 bp, synthetic construct
  source 1..75: mol_type = other DNA
gggatcttcgctcattatttgatggaaaaaaagtctttgattttccaaaaccacttcaagtaatacagaatctga

SEQ ID NO: 261218 - DNA, 75 bp, synthetic construct
  source 1..75: mol_type = other DNA
tttcagaagtagaaacagctaacagcaagcagcttgctgtgttaaaggctaacttcccacagtgttttgataaaa

SEQ ID NO: 261219 - DNA, 75 bp, synthetic construct
  source 1..75: mol_type = other DNA
tgatcttaatggctacaaagcacacttgtgcgatggtcggctatatctaattgcgcctaatttcacaagtgaggc

SEQ ID NO: 261220 - DNA, 75 bp, synthetic construct
  source 1..75: mol_type = other DNA
atcatattgcaaaaagaatagatggaaagtatgcagatattaaaaaactacatgatggtagcgttatttgtggtg

SEQ ID NO: 261221 - DNA, 75 bp, synthetic construct
  source 1..75: mol_type = other DNA
tgaacgaggattataggccatggggtaaaattaatatgagctggcctaatgcagattcatttggacccacgtatg

SEQ ID NO: 261222 - DNA, 75 bp, synthetic construct
  source 1..75: mol_type = other DNA
atgaacgaaggctggtaccagatacgtattgccggtgatgacacggcaccggaggcggtgtacgcccgtcttcac

SEQ ID NO: 261223 - DNA, 75 bp, synthetic construct
  source 1..75: mol_type = other DNA
acgaaccctgcttgcgccgcgcttattacaagcagggacatcgttgctgacgccggggatcattgaaatgacagg

SEQ ID NO: 261224 - DNA, 75 bp, synthetic construct
  source 1..75: mol_type = other DNA
atgactttatggatcaacggtgactgggttacgggccagggcgcacagcgcgtgaagcgtaatccggtatcgggc

SEQ ID NO: 261225 - DNA, 75 bp, synthetic construct
  source 1..75: mol_type = other DNA
attgcccaggggaacccgatgccggtgccttacggggaaatgctggttggctcccgcgatatcccaggacatcag

SEQ ID NO: 261226 - DNA, 75 bp, synthetic construct
  source 1..75: mol_type = other DNA
ttcacggcgaatctcccaggacatcagtacccgtgatgaaggcggtgacgggaaggtggtggttatcgggcggca

SEQ ID NO: 261227 - DNA, 75 bp, synthetic construct
  source 1..75: mol_type = other DNA
tgcccgtcttcatgagccactgagcgggagggccgtgattcatattgtaccgcggctggcaggggccggaaaggg

SEQ ID NO: 261228 - DNA, 75 bp, synthetic construct
  source 1..75: mol_type = other DNA
atgacacagactgaatcagcgattctggcacacacccggcggtgtgcgcctgcggagttgtgcggcttcgtggtg

SEQ ID NO: 261229 - DNA, 75 bp, synthetic construct
  source 1..75: mol_type = other DNA
gcgatttacaagttccgctgtgtgccacatcttaccgggcggcgctttgagcacggggtgacggactgttacacg

SEQ ID NO: 261230 - DNA, 75 bp, synthetic construct
  source 1..75: mol_type = other DNA
acgaacgcattcagtctggcgtcaccgccactggcacgcatccgcctttacggggatttacaacgatttggccgc

SEQ ID NO: 261231 - DNA, 75 bp, synthetic construct
  source 1..75: mol_type = other DNA
tgctgtgctgttttggttcatctgtgccgaatcatgccgccatttactgtggtgacggcgagctgctgcaccata

SEQ ID NO: 261232 - DNA, 75 bp, synthetic construct
  source 1..75: mol_type = other DNA
actacaaatggcgtgcaatgcgcaccaatggtgtagctgaacgcctgtgtaccggtgatgcctctgaccgtgaaa

SEQ ID NO: 261233 - DNA, 75 bp, synthetic construct
  source 1..75: mol_type = other DNA
actgctgtctccgtctactgcggatgaaatctggaacgaatgtaacgaactgctggcgcaggataacttctccgc

SEQ ID NO: 261234 - DNA, 75 bp, synthetic construct
  source 1..75: mol_type = other DNA
gagcgagcacgaagtggcacagttcaaaactgcggtgctggtgttccttggtgccgaatatgcacgtcgcggctg

SEQ ID NO: 261235 - DNA, 75 bp, synthetic construct
  source 1..75: mol_type = other DNA
tgctgactgacagccgtagcttcttgtcatacacccgtcacgaatacttccgccgcattctgtgccagatgatcg

SEQ ID NO: 261236 - DNA, 75 bp, synthetic construct
  source 1..75: mol_type = other DNA
gtgaaaatggtcggcactaccgatgacccgatcgattcactggagcatcacgctgagatcgccaaagacggctct

SEQ ID NO: 261237 - DNA, 75 bp, synthetic construct
  source 1..75: mol_type = other DNA
accggtgatgcgtctgaccgtgaaaaatttgacgcctgggcggcgactgttccgcacactatcggcaacccgtta

SEQ ID NO: 261238 - DNA, 75 bp, synthetic construct
  source 1..75: mol_type = other DNA
gcaggacagcgtgattgcgcatccagagtggctgacagagctggaaagcgaaccaccgcaggccgacgaatggca

SEQ ID NO: 261239 - DNA, 75 bp, synthetic construct
  source 1..75: mol_type = other DNA
gaatcaccggttatcacccaaccggccagcaatgccttcgccgtaaaccagactcaaccacaaccggcacaagtg

SEQ ID NO: 261240 - DNA, 75 bp, synthetic construct
  source 1..75: mol_type = other DNA
atgcctcattacagacagcagcggaagtaggcagtattgaacaaatgagcaacgccacctcataccatgacacaa

SEQ ID NO: 261241 - DNA, 75 bp, synthetic construct
  source 1..75: mol_type = other DNA
ctgggtattgatgcagtacaaatgggaccatcctccaccatgaaggccatgtcagttatggcatcagcaagggaa

SEQ ID NO: 261242 - DNA, 75 bp, synthetic construct
  source 1..75: mol_type = other DNA
tgtcggctgctgttctggcgctgattgccgcaggcgcgtctgctccccagatacttgaccagtttctgaacgaaa

SEQ ID NO: 261243 - DNA, 75 bp, synthetic construct
  source 1..75: mol_type = other DNA
atgagcaggaaactccgctatggtttatcggctgccgttctggcgctgattgccgcaggtgcgccagcccctgat

SEQ ID NO: 261244 - DNA, 75 bp, synthetic construct
  source 1..75: mol_type = other DNA
taaccaattcgactacaggtagtgcgagtataggggttcctgcacttgccaaactgttcggactctctggtggtt

SEQ ID NO: 261245 - DNA, 75 bp, synthetic construct
  source 1..75: mol_type = other DNA
gcggtgcgtaatgacgacaactcgcaatttgatcgccacacaacatggcaatccagtgtgggatgggagtttatt

SEQ ID NO: 261246 - DNA, 75 bp, synthetic construct
  source 1..75: mol_type = other DNA
atgactcacaatgggcagcaatttgctccattgctccaaagactggctgtacgccggagactctgcgtgtctggg

SEQ ID NO: 261247 - DNA, 75 bp, synthetic construct
  source 1..75: mol_type = other DNA
gtgcgcggctatggctatgataaccgtaccaattatgacgcgtattattctcccggttcaccgttgctcgatacc

SEQ ID NO: 261248 - DNA, 75 bp, synthetic construct
  source 1..75: mol_type = other DNA
acagcctgcaccactggcaacgcctgccggtaatgagattcagcaacctgtctctccgttgaatgaatcaccggt

SEQ ID NO: 261249 - DNA, 75 bp, synthetic construct
  source 1..75: mol_type = other DNA
cgcaacgttgtttaaaacagtaaaagatggctataccgaactctccgcaagcaatgcagacaagtcattgggtaa

SEQ ID NO: 261250 - DNA, 75 bp, synthetic construct
  source 1..75: mol_type = other DNA
cagagcggtaactaagcggtatgcgcctttacttcagaaagtctctggtgagtgcaccgaagatattgtcaacga

SEQ ID NO: 261251 - DNA, 75 bp, synthetic construct
  source 1..75: mol_type = other DNA
caaccatgccgcagtaattggagccgttggtggtggtgttgctcttgctacctgggcttattcagtatggggagg

SEQ ID NO: 261252 - DNA, 75 bp, synthetic construct
  source 1..75: mol_type = other DNA
gagcctggagtcggactcgttaactttgcccgcaacgcttaaccccgggctggatttttcgatgaggtggtgcga

SEQ ID NO: 261253 - DNA, 75 bp, synthetic construct
  source 1..75: mol_type = other DNA
cgaaaaaaggatggctactggccaccggatgcggtggaagaaaacaccggcacccgtaatcacaagtggcagcga

SEQ ID NO: 261254 - DNA, 75 bp, synthetic construct
  source 1..75: mol_type = other DNA
cggatccggttgaggaaaatacggacacccgtaaccacaagtggcagagactgacgccctccgtctcccgctcct

SEQ ID NO: 261255 - DNA, 75 bp, synthetic construct
  source 1..75: mol_type = other DNA
agccggggcaacatgtggggaaatctctatccgcgcagcggttttgtcaaccagcaggacggggataaagcggcg

SEQ ID NO: 261256 - DNA, 75 bp, synthetic construct
  source 1..75: mol_type = other DNA
gtggtggtctcggcctaccatgctccgggacaaaatccgtggcaggaaatatcgcaggtcagcggggcggcaggc

SEQ ID NO: 261257 - DNA, 75 bp, synthetic construct
  source 1..75: mol_type = other DNA
cacgcaaaaaactggtcaaacgtttcccggatcgtcaaatcactgttggtatggacactgctctgattgtgggtc

SEQ ID NO: 261258 - DNA, 75 bp, synthetic construct
  source 1..75: mol_type = other DNA
atgcagagcatggacgaatggctagtcaatcaaatgccgcgaaaattatgcgttttaatgttttagcatttcttc

SEQ ID NO: 261259 - DNA, 75 bp, synthetic construct
  source 1..75: mol_type = other DNA
ctaagcagcatttatcgtgcagggttaaattatgaacagcatcgatttggtatggattcgctctgtaaggacatt

SEQ ID NO: 261260 - DNA, 75 bp, synthetic construct
  source 1..75: mol_type = other DNA
gactttaaaacgatgattattatcgttggggggatcgcagctgtcgcttcgatggtgtatatcggcgtgtgctgg

SEQ ID NO: 261261 - DNA, 75 bp, synthetic construct
  source 1..75: mol_type = other DNA
gctgaagaaaacctgtggggcagtgtttatccccgttcaggttttgtgatgcagacagatgatgacaaggcggcg

SEQ ID NO: 261262 - DNA, 75 bp, synthetic construct
  source 1..75: mol_type = other DNA
aaattcgtgcggaagcacgcaacgaggggattaactataccgccagccgtcttgctgctgcgttcaatcacggat

SEQ ID NO: 261263 - DNA, 75 bp, synthetic construct
  source 1..75: mol_type = other DNA
ttctgtaatgcatggcagtttttactgaaaactggcttgtgtaatggcgtcgatgcggtgatcaaagcctaccgt

SEQ ID NO: 261264 - DNA, 75 bp, synthetic construct
  source 1..75: mol_type = other DNA
cgctggaagggctgaatcaagttccggagcggcgcgccgtgctgctggatattacctgtgactctgacggtgcca

SEQ ID NO: 261265 - DNA, 75 bp, synthetic construct
  source 1..75: mol_type = other DNA
cgctggaagggctgaatcaagtcccggaacgccgcgcggttctgttggatatcacctgtgactctgacggcgcta

SEQ ID NO: 261266 - DNA, 75 bp, synthetic construct
  source 1..75: mol_type = other DNA
ggtctatctggtcatcgagaaaatgtcggaaatcgccattgtgctggatgaagcagaacgcctgaacgtcgttcc

SEQ ID NO: 261267 - DNA, 75 bp, synthetic construct
  source 1..75: mol_type = other DNA
cagaaagcgggtatcgcgtcattttgtccctataacattggccccggtaagtgtttcccgtcgacgttttacaga

SEQ ID NO: 261268 - DNA, 75 bp, synthetic construct
  source 1..75: mol_type = other DNA
cagaaagcgggtatagcgtcattatgtccctataacattggccccggtaagtgtttcccgtcgacgttttataag

SEQ ID NO: 261269 - DNA, 75 bp, synthetic construct
  source 1..75: mol_type = other DNA
cgaaccccagaaagcggggatcgcgtcattctgtccgtacaacattggtcccggtaagtgtttcccgtcgacgtt

SEQ ID NO: 261270 - DNA, 75 bp, synthetic construct
  source 1..75: mol_type = other DNA
cccgcagatcctccagcaccgtttgcgttccattaatgctgcgtttaaacgtgcgcgggaatcctacggttataa

SEQ ID NO: 261271 - DNA, 75 bp, synthetic construct
  source 1..75: mol_type = other DNA
tcgaccactatattgatggtgacggtattgccacgacaatgcctatgccggagtacgatccggagaatccgccga

SEQ ID NO: 261272 - DNA, 75 bp, synthetic construct
  source 1..75: mol_type = other DNA
cagatggcgaatattcgcgatatcgccaccggcgttcgggaatccgcgcgtttctacgttgagttgcacaagctg

SEQ ID NO: 261273 - DNA, 75 bp, synthetic construct
  source 1..75: mol_type = other DNA
atgtctgacgacatgtttatgagtttgccttcgtcagcgggcgaacatggtgtactacgctccatgcaggaggtt

SEQ ID NO: 261274 - DNA, 75 bp, synthetic construct
  source 1..75: mol_type = other DNA
cggttgacgtgttcgtcttccctgacggcagcgtagaagtagaactgtctgacgaaggcgataccgtggcggaca

SEQ ID NO: 261275 - DNA, 75 bp, synthetic construct
  source 1..75: mol_type = other DNA
tgaaggcactcgttcacagtccgattgttcggtgaactatggcctcaatgaatacgccaacaacatcatctgggc

SEQ ID NO: 261276 - DNA, 75 bp, synthetic construct
  source 1..75: mol_type = other DNA
gcgtaatccagtggttgccgcattgctcgacgacggcctggcgcgtggttatgcggatgcggaaatcggcggctg

SEQ ID NO: 261277 - DNA, 75 bp, synthetic construct
  source 1..75: mol_type = other DNA
ccagaagccgatccccgaaacaatgcgcggggctctgtactcattcgcgtataacgtcggcgctggaaacttcca

SEQ ID NO: 261278 - DNA, 75 bp, synthetic construct
  source 1..75: mol_type = other DNA
tcgcgtcattctgtccgtacaacattggtcccggtaagtgtttcccgtcgacgttttataaacgaattaatgcag

SEQ ID NO: 261279 - DNA, 75 bp, synthetic construct
  source 1..75: mol_type = other DNA
tcgaaggaaaaatgcgaccaggttaacgccattgaacgtgataaggcgctggagtgggtggagcgcaatattaaa

SEQ ID NO: 261280 - DNA, 75 bp, synthetic construct
  source 1..75: mol_type = other DNA
tttaagtaaaacattctatggcaaacttgaacataacttatctgatacgtggagcggatttgttcgtggctacgg

SEQ ID NO: 261281 - DNA, 75 bp, synthetic construct
  source 1..75: mol_type = other DNA
gtgggcgaagtcaaacatcagaatggaaggcatccagggatcagcaaagaaacagcgatggcgctttatattgat

SEQ ID NO: 261282 - DNA, 75 bp, synthetic construct
  source 1..75: mol_type = other DNA
gagtttcgtggagtgggcaaggacgtcgcccggatgctttcaaggggttgggagctgtcgagctggagcgctacc

SEQ ID NO: 261283 - DNA, 75 bp, synthetic construct
  source 1..75: mol_type = other DNA
ggagacggcgccttatctgttctggcggcccgctgggggctggagcacgatgaagacaacctgatggcgctggtg

SEQ ID NO: 261284 - DNA, 75 bp, synthetic construct
  source 1..75: mol_type = other DNA
gaacacgatgaagacaacctgatggcgctggtgttaacgccggatcatctggaactgcgcaagcgcgatgaaccg

SEQ ID NO: 261285 - DNA, 75 bp, synthetic construct
  source 1..75: mol_type = other DNA
aaagcgcccggactacgcgccaccgctggcgaatgtcgccacgccaaacgcggtagtcactaaagggcataggtt

SEQ ID NO: 261286 - DNA, 75 bp, synthetic construct
  source 1..75: mol_type = other DNA
gccgaagctgggcggcatctttgttgattttgttggcggggcgatggcgcaccgacgcaaattcggcggtggtcg

SEQ ID NO: 261287 - DNA, 75 bp, synthetic construct
  source 1..75: mol_type = other DNA
tcggctgccgcgtgcggatgctggagcgtaatccagtcgttgctgcattgctcgacgacggcctggcgcgtggtt

SEQ ID NO: 261288 - DNA, 75 bp, synthetic construct
  source 1..75: mol_type = other DNA
aaacttggcggtatttttgttgattttgttggcggagcgatggcacaccgacgcagattcggcggcggacgcggt

SEQ ID NO: 261289 - DNA, 75 bp, synthetic construct
  source 1..75: mol_type = other DNA
cgtcaccgggcatggcacgcatctgcctttacggggatttgcaacgatttggccgccgcatcgaccttcgtgtga

SEQ ID NO: 261290 - DNA, 75 bp, synthetic construct
  source 1..75: mol_type = other DNA
ctaaagaggctttagataaatttcagggatttgccaacgaagaactacgtcgtgagaaagcagcaattgatgtaa

SEQ ID NO: 261291 - DNA, 75 bp, synthetic construct
  source 1..75: mol_type = other DNA
atgagtcagatgagtcagatgagtcagatgagtcagatgagtcagatgagtcgtatgagtcagatggcgacttca

SEQ ID NO: 261292 - DNA, 75 bp, synthetic construct
  source 1..75: mol_type = other DNA
cagatacacgccattcctaatgccactgaacatggattatggcgaatcgcccacgctgccgggttactgtccacc

SEQ ID NO: 261293 - DNA, 75 bp, synthetic construct
  source 1..75: mol_type = other DNA
ctggagtctgactcgttaacgctgcccaccacgcttaaccccggacttgatttttccgatgaggtggcgcgatga

SEQ ID NO: 261294 - DNA, 75 bp, synthetic construct
  source 1..75: mol_type = other DNA
ccagattagcgcgaggccttacacaaaaggcgcttggggatttggtcggggttagccaggctgctattcagaaaa

SEQ ID NO: 261295 - DNA, 75 bp, synthetic construct
  source 1..75: mol_type = other DNA
gcggatatcgacgcggctgtccatctgaccattcagtcggcgtttgtcacagccgggcaacgctgcacctgcgcc

SEQ ID NO: 261296 - DNA, 75 bp, synthetic construct
  source 1..75: mol_type = other DNA
ggaatccgtggaaactctggatgagagcaaaagtgtatttgtgaccttaccggaaaccattgtcacgctgcatga

SEQ ID NO: 261297 - DNA, 75 bp, synthetic construct
  source 1..75: mol_type = other DNA
gcccaatcctgatcccattctcaaggctcagggacgggatatccgtatctaccgcgaactgcgcaccgacccgct

SEQ ID NO: 261298 - DNA, 75 bp, synthetic construct
  source 1..75: mol_type = other DNA
tttgcttgaaaataaaggtatagttatagcaaatctattctctggtgataaggttgatgcattttcattttggga

SEQ ID NO: 261299 - DNA, 75 bp, synthetic construct
  source 1..75: mol_type = other DNA
ttaccagggtgagcgaagaagaaatgatcagtcaggaatcggtggtttcccttttttctgacaataagtgtaaat

SEQ ID NO: 261300 - DNA, 75 bp, synthetic construct
  source 1..75: mol_type = other DNA
tgatcaattctggactgagtgcgagcagccaggacgaacctgcaagccttgagtggcgctggatgcgagagattt

SEQ ID NO: 261301 - DNA, 75 bp, synthetic construct
  source 1..75: mol_type = other DNA
aggctcatggttgccttcactgctgctgggcggcacccaggttggctggtttggcgttggcgtggcgatgtttgc

SEQ ID NO: 261302 - DNA, 75 bp, synthetic construct
  source 1..75: mol_type = other DNA
tttctacaatagggctgcatcttagaggtgtcgcaagtcgagtgggctctgcgggggtatctggattttctgtag

SEQ ID NO: 261303 - DNA, 75 bp, synthetic construct
  source 1..75: mol_type = other DNA
ccggcaccgccgccaccgacaagtggacaggcatcgggggcatcccgacctttaccgcccattgcacaggcatta

SEQ ID NO: 261304 - DNA, 75 bp, synthetic construct
  source 1..75: mol_type = other DNA
cggtggtcggctacggcaagttgggcggctgggagttaggctacagttccgatcttgacctgatcttcctccatg

SEQ ID NO: 261305 - DNA, 75 bp, synthetic construct
  source 1..75: mol_type = other DNA
tggttactgaagagagcatattgcagcagctcagccatctggcggagacgctgattgtcgccgcgcgtgactggc

SEQ ID NO: 261306 - DNA, 75 bp, synthetic construct
  source 1..75: mol_type = other DNA
gtgaacacggcagcggatgccatccgtgctctgtcgtttcagttgccgggattccgccgtcagatgaacgaaggc

SEQ ID NO: 261307 - DNA, 75 bp, synthetic construct
  source 1..75: mol_type = other DNA
taacgctgccggattttgtgcgtgaggatgactggtggcgcaacggtcagaacctttacctggacaatatggcgg

SEQ ID NO: 261308 - DNA, 75 bp, synthetic construct
  source 1..75: mol_type = other DNA
aagcgcagcctgataacgatggtttcttaagtaaaacgctttatggtgcgctggaacataattttaccgatgcct

SEQ ID NO: 261309 - DNA, 75 bp, synthetic construct
  source 1..75: mol_type = other DNA
tgatcacaccctgaaatattacaacgaagggaaagcgcggattaagggcgtcgaggcgaccgccaattttgatac

SEQ ID NO: 261310 - DNA, 75 bp, synthetic construct
  source 1..75: mol_type = other DNA
cttctgatacgtcaccccttaaaccagcccgcccggcaccaccgccaccgacaagtggtcgggcatctggttcat

SEQ ID NO: 261311 - DNA, 75 bp, synthetic construct
  source 1..75: mol_type = other DNA
ccggccccaccgccgccgacaagtggacaggcttccggggcatcccgccctttaccgcccattgctcaggcatta

SEQ ID NO: 261312 - DNA, 75 bp, synthetic construct
  source 1..75: mol_type = other DNA
acaagtggtcgggcatctggttcatcccagcctttaccgccaattgcgcaggcattaaaagatcatttaaccgcc

SEQ ID NO: 261313 - DNA, 75 bp, synthetic construct
  source 1..75: mol_type = other DNA
cccttatctttggtgcaaatgtactaaaaaatacgcttaaggctactttcaagatcgatcttaatggcgataata

SEQ ID NO: 261314 - DNA, 75 bp, synthetic construct
  source 1..75: mol_type = other DNA
atctagaatattaccttagccttaaaactgaacctcaatacgccattatgcttaaaggtgcttggggatcaggta

SEQ ID NO: 261315 - DNA, 75 bp, synthetic construct
  source 1..75: mol_type = other DNA
gcgtctggataaactggacgggatcaaggtaccggcggtgacggatgcgaacgacgatggcgtggctgatgacaa

SEQ ID NO: 261316 - DNA, 75 bp, synthetic construct
  source 1..75: mol_type = other DNA
taccaaaactaagtatgacatgatcgtcgagaaatattcatcacctgtattaaccgagacgttactggatggtgc

SEQ ID NO: 261317 - DNA, 75 bp, synthetic construct
  source 1..75: mol_type = other DNA
aagtaaacggatacaaagcgatcctggttgccaatgaagaagaaataatcaacagagaaaagcgaataaataatg

SEQ ID NO: 261318 - DNA, 75 bp, synthetic construct
  source 1..75: mol_type = other DNA
gtcagcgaattataataatctaagacacttgaggcagttctttctcgatgtacaacgaattatttcccttttggg

SEQ ID NO: 261319 - DNA, 75 bp, synthetic construct
  source 1..75: mol_type = other DNA
gtggagaacgccatcagcagcgggattgccgggctgtctgccggcgggggaaacccggcagatatgaaatcgccg

SEQ ID NO: 261320 - DNA, 75 bp, synthetic construct
  source 1..75: mol_type = other DNA
gtacccggattcagctgtgattcaccggtgacaccggccatgccctatttcctcagtaccctggacagcatcgtc

SEQ ID NO: 261321 - DNA, 75 bp, synthetic construct
  source 1..75: mol_type = other DNA
agcggtcgttgcacagcgtgcggcagatgttgtcacccgaaccgggcaaattcacgtctatcaaccgatgacggc

SEQ ID NO: 261322 - DNA, 75 bp, synthetic construct
  source 1..75: mol_type = other DNA
gaagcaaaagtggctgccgcagagtctgcagagaaagccgcggaagatgaactggtgaaagtgaaccaggacggc

SEQ ID NO: 261323 - DNA, 75 bp, synthetic construct
  source 1..75: mol_type = other DNA
tagattctattctggatgaacatcaacagatatatcgcagacataaccgaatagataacattctggcgttttttg

SEQ ID NO: 261324 - DNA, 75 bp, synthetic construct
  source 1..75: mol_type = other DNA
ttttctcagcacgctggacagtcttgcctggcgcaccggcatgcctgaatccctgtatcccgaagccatgatacc

SEQ ID NO: 261325 - DNA, 75 bp, synthetic construct
  source 1..75: mol_type = other DNA
tggcagcgaaacccgggccaggctgcggtgaacaacctgccggaaggacagaaggaggcgccagaggctcaactg

SEQ ID NO: 261326 - DNA, 75 bp, synthetic construct
  source 1..75: mol_type = other DNA
tggaggctgttttgaaaaagattcttgcattacctcttatgttcttttccttctcgtccttctctgaaggcgttc

SEQ ID NO: 261327 - DNA, 75 bp, synthetic construct
  source 1..75: mol_type = other DNA
gcgtttaattctcattcgcagagacattcatagccagttacacagcgtgggaatcgatattaatgatgggacggg

SEQ ID NO: 261328 - DNA, 75 bp, synthetic construct
  source 1..75: mol_type = other DNA
aggctaagaagagagagtccagcagcgatagctgattatctttttcaacatgccagtgagttctggcctaagacc

SEQ ID NO: 261329 - DNA, 75 bp, synthetic construct
  source 1..75: mol_type = other DNA
cgttgctggcgtgccggatgaagaagtgtttgggccactcttgcgcgtctggcgttatgacaatttcgatgaggc

SEQ ID NO: 261330 - DNA, 75 bp, synthetic construct
  source 1..75: mol_type = other DNA
accatcgccccagcgcctggtatgccgcagattactgcgcatggcctatggcgagcctggagtcggactcgttaa

SEQ ID NO: 261331 - DNA, 75 bp, synthetic construct
  source 1..75: mol_type = other DNA
attcagccatatcctgattacctgtctgcttatgtcaaaacgcttgttgcagccagttgcgaccacgtactttca

SEQ ID NO: 261332 - DNA, 75 bp, synthetic construct
  source 1..75: mol_type = other DNA
aacggcaacggcaagccggatgcagaggaagcagcagaggcggtgaatgcagcgacagccaaggtagcagaagcg

SEQ ID NO: 261333 - DNA, 75 bp, synthetic construct
  source 1..75: mol_type = other DNA
aaagcagatgcggcgaaagcggtggaaggtctgccggccggagatgcgaaggacggtctgaacgggcgtctggct

SEQ ID NO: 261334 - DNA, 75 bp, synthetic construct
  source 1..75: mol_type = other DNA
gattgagggattctgggaagaatgccagccgggtgaaacacagtgtacagcagtatttaatgttgtgggtgaaaa

SEQ ID NO: 261335 - DNA, 75 bp, synthetic construct
  source 1..75: mol_type = other DNA
gttctgagcggttcgcatatcgataccgtggttaacggcggtaacctcgacgggcaattcggcgcgctggcggcg

SEQ ID NO: 261336 - DNA, 75 bp, synthetic construct
  source 1..75: mol_type = other DNA
ggagagctgcccacgtatggttatcgtcgggtatgggcgctgcttcgcagacaggccgaacttgatggtatgcct

SEQ ID NO: 261337 - DNA, 75 bp, synthetic construct
  source 1..75: mol_type = other DNA
aggcggtcaggaggctggaaaaacagatgtatcatccacagcctcaactgaggcgggaagtggaagctcttccga

SEQ ID NO: 261338 - DNA, 75 bp, synthetic construct
  source 1..75: mol_type = other DNA
gccctgatatcctgcgcgccgttgccgagcagggttaccgtgaacccacccctattcagcagcaggcgatccctg

SEQ ID NO: 261339 - DNA, 75 bp, synthetic construct
  source 1..75: mol_type = other DNA
acgtctgcagatcagcagacagaacaaacttacctcacctgaaaacaacgtaccgcactggaacagtccagaggc

SEQ ID NO: 261340 - DNA, 75 bp, synthetic construct
  source 1..75: mol_type = other DNA
caactttgtccctcctggtggacttgggcaattcgggaaatttgtcatgcatgagctctggtcaccatcggatga

SEQ ID NO: 261341 - DNA, 75 bp, synthetic construct
  source 1..75: mol_type = other DNA
tccctggacagtcgaatcgctggccagcatcgttcacatgtccagggcaagttttgcccaactttttcgtgatgt

SEQ ID NO: 261342 - DNA, 75 bp, synthetic construct
  source 1..75: mol_type = other DNA
ttacattgcgccctgggaatgtggttctgctaccacaaaactcagctcatcgcctgagtcacattgaaaatgaat

SEQ ID NO: 261343 - DNA, 75 bp, synthetic construct
  source 1..75: mol_type = other DNA
cggcccagatgttttcccgggaaacgctccctgttgtggtgatcgctgagtcagtaggctatgccagtgaatcat

SEQ ID NO: 261344 - DNA, 75 bp, synthetic construct
  source 1..75: mol_type = other DNA
acggggtcaaagtctgcagtgtaatgaacttgaaaagggttactttaattcaggtgtcctgttaattaatacact

SEQ ID NO: 261345 - DNA, 75 bp, synthetic construct
  source 1..75: mol_type = other DNA
gttattgcgccaagcataattttaaacaaaacaaaccaattaacgggataatgaattatatttattatttttatt

SEQ ID NO: 261346 - DNA, 75 bp, synthetic construct
  source 1..75: mol_type = other DNA
tcgcccgagctatcatgccgaatctgcgaaagatggctggcagcgtatgctggagtggtttaagcagtatggtgg

SEQ ID NO: 261347 - DNA, 75 bp, synthetic construct
  source 1..75: mol_type = other DNA
atgagcgtgataaaaactcatacaggaattgttatcacgcaagacggtgacaagcggatgaaattacattctact

SEQ ID NO: 261348 - DNA, 75 bp, synthetic construct
  source 1..75: mol_type = other DNA
tggtactatatttgatacaaaagatagtgctgctaaaggtgaaatatcagtcattacagaagaaatacttggact

SEQ ID NO: 261349 - DNA, 75 bp, synthetic construct
  source 1..75: mol_type = other DNA
aagaaggccgacagcattgacagcaccattgatgagctgtggcgggatatgcgctgggcagtggcgcgcatccag

SEQ ID NO: 261350 - DNA, 75 bp, synthetic construct
  source 1..75: mol_type = other DNA
acgtcgcggcattcctcgacacgctggcgttttcagagggtacagcgacgcacccactgacgaaaaacaacgggt

SEQ ID NO: 261351 - DNA, 75 bp, synthetic construct
  source 1..75: mol_type = other DNA
cggggggcggtcccatcgggctggatgaaattatcgactgggaaaacatcaccgtcgaattccaggctgataccg

SEQ ID NO: 261352 - DNA, 75 bp, synthetic construct
  source 1..75: mol_type = other DNA
atacgttacagcaacccgaagatattcgtgggcgcgtagcgttcggcgcgttgccctggttgatgcacgaccagc

SEQ ID NO: 261353 - DNA, 75 bp, synthetic construct
  source 1..75: mol_type = other DNA
ttcccccacatgaccgtgttcgaaaatgtggcctttgggttgcgcatgcaaaaaaccccgctgctgaaattacgc

SEQ ID NO: 261354 - DNA, 75 bp, synthetic construct
  source 1..75: mol_type = other DNA
tacctgtggcatgtggtgcgcttctccttctggcaggcgtttctctcggcgctgctctctgtcgtgcccgcgata

SEQ ID NO: 261355 - DNA, 75 bp, synthetic construct
  source 1..75: mol_type = other DNA
gtctgcatagccgcatttgcgacacggtgttaattgtgctggcgctgctgctgttgctgccaccgttactggcgg

SEQ ID NO: 261356 - DNA, 75 bp, synthetic construct
  source 1..75: mol_type = other DNA
ttgttgctaccaccgttactggcggtgatcgttgatggcgtgaattaccagttgccagaagtgctggcacaaccg

SEQ ID NO: 261357 - DNA, 75 bp, synthetic construct
  source 1..75: mol_type = other DNA
tagccgccagaccattaataaatgggtacgcaaggaaggctggacaacgtcaccaaaaccaggcgtccagggtgg

SEQ ID NO: 261358 - DNA, 75 bp, synthetic construct
  source 1..75: mol_type = other DNA
agaagcaaataagtattataatggactaaaagacaagcgcaaagcaaccaaatatcttaatgttttcttttttgg

SEQ ID NO: 261359 - DNA, 75 bp, synthetic construct
  source 1..75: mol_type = other DNA
tattaccttacttttttagccagaaagaaaggtaccaaacaagcatataaacttgaaattgatgcttcagaatgg

SEQ ID NO: 261360 - DNA, 75 bp, synthetic construct
  source 1..75: mol_type = other DNA
atgaacttgccagactgaccggttatagccgccagaccattaataaatgggtacgcaaggaaggctggacgacat

SEQ ID NO: 261361 - DNA, 75 bp, synthetic construct
  source 1..75: mol_type = other DNA
aaatcgcttccggcaaatgtggtttgccgggggaatccagcagtggtgatacgcgaacgcgttgaaactgaataa

SEQ ID NO: 261362 - DNA, 75 bp, synthetic construct
  source 1..75: mol_type = other DNA
atgcaggatttaagtggattctcggtgccgaaagggttccggggtggcaacgctattaaagtgcaattgtggtgg

SEQ ID NO: 261363 - DNA, 75 bp, synthetic construct
  source 1..75: mol_type = other DNA
atttcgccattggacgcaccaccgcactggcgctacataccgtaagcggacagaagattctctacccgcaggatc

SEQ ID NO: 261364 - DNA, 75 bp, synthetic construct
  source 1..75: mol_type = other DNA
ccgtctgcgcacactggggcaggtggcctggcattttccgctgattgagttttctccgggtcgacaattaccaca

SEQ ID NO: 261365 - DNA, 75 bp, synthetic construct
  source 1..75: mol_type = other DNA
tggcctggaaaatatgaattctccagaaatggtcgctgccaagcgtggtaaatccgttgaagaaattctggggaa

SEQ ID NO: 261366 - DNA, 75 bp, synthetic construct
  source 1..75: mol_type = other DNA
gccaaatgggcggctcagcaggtttctgcacgagccattgcaatgctaaatgagccaggaataatcaaaaaataa

SEQ ID NO: 261367 - DNA, 75 bp, synthetic construct
  source 1..75: mol_type = other DNA
gctattgaaatgttgcgtgacccagattgggtaagtaaaatcacccaccttgatcaagatgtactgaatgtatta

SEQ ID NO: 261368 - DNA, 75 bp, synthetic construct
  source 1..75: mol_type = other DNA
gcaacggcggtcgtgagctgatcggggacaccctgacggcacgcggtgctgaagtcattttttgcgaatgttatc

SEQ ID NO: 261369 - DNA, 75 bp, synthetic construct
  source 1..75: mol_type = other DNA
gtatacgaactgactgcggaatccttagctgatagcctggaatgggccgatgtggtggtgattggccctggtctg

SEQ ID NO: 261370 - DNA, 75 bp, synthetic construct
  source 1..75: mol_type = other DNA
ccggttgctggggagtatatgcaccgcgatatctatgatattgcagagaaatacagcaaagataccttcctgatg

SEQ ID NO: 261371 - DNA, 75 bp, synthetic construct
  source 1..75: mol_type = other DNA
gaacgttactcctcttcttcaggttgcggagcatcgtgaagctggtcgcttcacttctatcgagcaagaatatcc

SEQ ID NO: 261372 - DNA, 75 bp, synthetic construct
  source 1..75: mol_type = other DNA
ccaccaacccgatcaacgtggttcgtgcaactattgatggcctggaaaatatgaattctccagaaatggtcgctg

SEQ ID NO: 261373 - DNA, 75 bp, synthetic construct
  source 1..75: mol_type = other DNA
attaacgtcgcgctgaataacggcactctgcaacaccctgttaaaggtgttcacacgggttctcgcgtattcatg

SEQ ID NO: 261374 - DNA, 75 bp, synthetic construct
  source 1..75: mol_type = other DNA
agtatttttctgtgcagttttctgaggggatccgtcgggcatatcgtcatacactggcgacaagcccgtactctt

SEQ ID NO: 261375 - DNA, 75 bp, synthetic construct
  source 1..75: mol_type = other DNA
taagatacagtgctaaacatatgttgaaaaaaagcaatatatcaaaggatttggcaactatcttttgtattttat

SEQ ID NO: 261376 - DNA, 75 bp, synthetic construct
  source 1..75: mol_type = other DNA
cattacaggtgaatattaatattgccgcgcttggggggtattatttgatcaaccaacatacgcttggccaggttt

SEQ ID NO: 261377 - DNA, 75 bp, synthetic construct
  source 1..75: mol_type = other DNA
tggtttcaccgcaagcgctggaagccagacgtaaggtcattaaagaaacgatccttagctggcttctgcttgaac

SEQ ID NO: 261378 - DNA, 75 bp, synthetic construct
  source 1..75: mol_type = other DNA
aaaaagccattgagaaaattattgattttacatgggattattatattgctaacccctggtttttaaaaattgtgc

SEQ ID NO: 261379 - DNA, 75 bp, synthetic construct
  source 1..75: mol_type = other DNA
tcgcccgagctatcatgccgaatctgcaaaagatggctggcagcgtatgctggaatggtttaagcagtatggtgg

SEQ ID NO: 261380 - DNA, 75 bp, synthetic construct
  source 1..75: mol_type = other DNA
atattatttgatcaaccagcatacgcttggcctggtttatcacatcagtatggtttcaccgcaggcgctggaagc

SEQ ID NO: 261381 - DNA, 75 bp, synthetic construct
  source 1..75: mol_type = other DNA
tggtttcacctgaggctttggaagccagacgcagagtgatcaaagagaccatcctgagctggcttttggtgaacc

SEQ ID NO: 261382 - DNA, 75 bp, synthetic construct
  source 1..75: mol_type = other DNA
gtccattgaagttcatccacgccttattgaacgccgctccgtagctgacggcccgttccgcgactaccgtcgcta

SEQ ID NO: 261383 - DNA, 75 bp, synthetic construct
  source 1..75: mol_type = other DNA
ttaaagtataatgaaggaagtcgattgtgtttccatatttttactgattattttggtgatgatgatcgtaagtat

SEQ ID NO: 261384 - DNA, 75 bp, synthetic construct
  source 1..75: mol_type = other DNA
tttgatgccctggcgttgcagtataaaaccagaattaaaatatatctgattaatggtgatcgactgcgctcattg

SEQ ID NO: 261385 - DNA, 75 bp, synthetic construct
  source 1..75: mol_type = other DNA
ttagaaattaaccatgcgcacttgcagttaatggaatccttattggatgaagggaagaaacacaatatttttaag

SEQ ID NO: 261386 - DNA, 75 bp, synthetic construct
  source 1..75: mol_type = other DNA
ttaccgacgaccaaaaattggtctattgccatgtatttccgttttgtaattgcagattactttattgatcaacaa

SEQ ID NO: 261387 - DNA, 75 bp, synthetic construct
  source 1..75: mol_type = other DNA
ggggttgaggccaccggcaagggtgacaaaaaagccgacagcgtcgaaaccaccattgatgacctgtggcgggat

SEQ ID NO: 261388 - DNA, 75 bp, synthetic construct
  source 1..75: mol_type = other DNA
gttggactgacctggacaccgcgtccaaatctggaacgctggtatcagcaactcaccgagcgccctgcggtgcgt

SEQ ID NO: 261389 - DNA, 75 bp, synthetic construct
  source 1..75: mol_type = other DNA
actcgactaacgtgaaaaaggtattgttaacgctcgaagaactggaactgccttatgaacaaattctggccggtc

SEQ ID NO: 261390 - DNA, 75 bp, synthetic construct
  source 1..75: mol_type = other DNA
tattttaatccagtaggggctcatccttcaggcttaattggtgagtctcctgtcggtgttcctaacaatttgatg

SEQ ID NO: 261391 - DNA, 75 bp, synthetic construct
  source 1..75: mol_type = other DNA
caaactcgatggcgtgaaaccaccgaagaaagagaccatggagcgcgtgaaaggcattcttgagcagtatggtca

SEQ ID NO: 261392 - DNA, 75 bp, synthetic construct
  source 1..75: mol_type = other DNA
acaaaaatgtgaaggtgtggatccgctacgttgttgtcccaggctggtctgacgatgacgattcagcgcatcgcc

SEQ ID NO: 261393 - DNA, 75 bp, synthetic construct
  source 1..75: mol_type = other DNA
gcctattaggtattacgcaaataacttagaaggcacactatgtgttattaaaaactcaataaaatataatgtcaa

SEQ ID NO: 261394 - DNA, 75 bp, synthetic construct
  source 1..75: mol_type = other DNA
acgcgttgcgtggaatgacgtaatagatgcaggtgcaacggtacgttggggaaagcggccttatgacggcaacag

SEQ ID NO: 261395 - DNA, 75 bp, synthetic construct
  source 1..75: mol_type = other DNA
cagtatcagcgtattcagattgaccatcttggcgcgttattaacccgcgatctttataaagacgtaatctcgcac

SEQ ID NO: 261396 - DNA, 75 bp, synthetic construct
  source 1..75: mol_type = other DNA
atatagcgtgaatttccgtaccgcagaacgttttgggttgcttcatattgtagaaaaaccggtcgtcttctggtt

SEQ ID NO: 261397 - DNA, 75 bp, synthetic construct
  source 1..75: mol_type = other DNA
tacttttttgggaggcgaagaaaactttggtcgacatggttcgtgatgcttggaattggcaacaaaagaacccaa

SEQ ID NO: 261398 - DNA, 75 bp, synthetic construct
  source 1..75: mol_type = other DNA
gtacggtaatgattaccccactccggacggtacgggcgtacgcgactatattcatgtaatggatctcgcccatgg

SEQ ID NO: 261399 - DNA, 75 bp, synthetic construct
  source 1..75: mol_type = other DNA
gaactttttcctcacccgttgatcttctcttatatttcattttcttcgggtctgttatggtactttctgattgtt

SEQ ID NO: 261400 - DNA, 75 bp, synthetic construct
  source 1..75: mol_type = other DNA
attcactcctttgaatcctgtggaaccgtagacggcccaggtattcgctttatcacctttttccagggctgcctg

SEQ ID NO: 261401 - DNA, 75 bp, synthetic construct
  source 1..75: mol_type = other DNA
aaagcacagggaaaacttgttttatcacagcaacctgcggcggaaagagttgttgttgagaataacctgctgggt

SEQ ID NO: 261402 - DNA, 75 bp, synthetic construct
  source 1..75: mol_type = other DNA
atgttgctgccggtgcagcaggcgcagcaacgggagagctggcagccagagcgattgccggaatgttgtatcctg

SEQ ID NO: 261403 - DNA, 75 bp, synthetic construct
  source 1..75: mol_type = other DNA
tacaaatggagcgggggccgggtttggatatggggttggcaattatgtggtgaagcctgttgcaaatacagcagg

SEQ ID NO: 261404 - DNA, 75 bp, synthetic construct
  source 1..75: mol_type = other DNA
tcctcaccagagttagctcaaaaagaacttcattgggaagctaagcgtagtcttgaggatatggttattgatgct

SEQ ID NO: 261405 - DNA, 75 bp, synthetic construct
  source 1..75: mol_type = other DNA
ttgaagcaatgattgaacctgcgcttgagcaggttctggctgcgctgcgcgaatcaggcgtggaagccatcccac

SEQ ID NO: 261406 - DNA, 75 bp, synthetic construct
  source 1..75: mol_type = other DNA
tcgaagcgatgattgaacctgcgcttgagcaggttctggctgcgctgcgcgaatcaggcgtggaagctatcccac

SEQ ID NO: 261407 - DNA, 75 bp, synthetic construct
  source 1..75: mol_type = other DNA
atatggcgatgattatgatacagacgatggaacaggtgtacgcgattatattcatgtcacggatttagcacttgg

SEQ ID NO: 261408 - DNA, 75 bp, synthetic construct
  source 1..75: mol_type = other DNA
ataatttaggtacaggtaaaggatattcagtattagagttggttgatactttcgagagaattatagctagaaaaa

SEQ ID NO: 261409 - DNA, 75 bp, synthetic construct
  source 1..75: mol_type = other DNA
ttggtaagcgaaaggaattatttatttatggtaatgattataaaacaaaagatgggacagggattcgtgatttca

SEQ ID NO: 261410 - DNA, 75 bp, synthetic construct
  source 1..75: mol_type = other DNA
ttgcgatattttaaccctgttggagcgcatccttctggacacttaggagaaaaccctgttggtatacctaataat

SEQ ID NO: 261411 - DNA, 75 bp, synthetic construct
  source 1..75: mol_type = other DNA
tcctataaaatattataaaaataatgttgtaggaagtttaactttggtaagtgaaatggttaaacataaagttac

SEQ ID NO: 261412 - DNA, 75 bp, synthetic construct
  source 1..75: mol_type = other DNA
gattttgtgttttttaatgctgatgttttgaatttatcttttttaaaagatataatttctagatacaaaatagac

SEQ ID NO: 261413 - DNA, 75 bp, synthetic construct
  source 1..75: mol_type = other DNA
ttccggtaatgctgggggcagtgttaatgtctcagcatgtacatgcagttgataatctgactttcagaggaaaac

SEQ ID NO: 261414 - DNA, 75 bp, synthetic construct
  source 1..75: mol_type = other DNA
ggcgcaaaaataggaaaaaacgtagttattcgcccgtcagtaaaaattacttatccatggaaattaactttaggt

SEQ ID NO: 261415 - DNA, 75 bp, synthetic construct
  source 1..75: mol_type = other DNA
gtgattggcgagaaatgctggctggcgacagatgtttttgttgcccctggcgtcacgatcggcgacggcaccgtc

SEQ ID NO: 261416 - DNA, 75 bp, synthetic construct
  source 1..75: mol_type = other DNA
aaataccgagttcagctatttggcactccctgaaaattataaccgtttgtttttaccaaattcaaaaaaaaccaa

SEQ ID NO: 261417 - DNA, 75 bp, synthetic construct
  source 1..75: mol_type = other DNA
gactacgccgccggttgtctggtggaaaaaattaaggtcggtgatttctccacacaggccagggcaaccgcagag

SEQ ID NO: 261418 - DNA, 75 bp, synthetic construct
  source 1..75: mol_type = other DNA
tctcaggtcagcttccggcccgtaacatatctctttatgcaaaactcggatataaagggaatatgcagagtctga

SEQ ID NO: 261419 - DNA, 75 bp, synthetic construct
  source 1..75: mol_type = other DNA
aggcgcaggaaaatatcaaccagtccccgtgggcagagcggattaacgtccatacggcggatattcagcagtggg

SEQ ID NO: 261420 - DNA, 75 bp, synthetic construct
  source 1..75: mol_type = other DNA
gataatctgacctttaaaggaaaactgattattcctgcctgtactgtaacaaaggcagaggttgactggggaaat

SEQ ID NO: 261421 - DNA, 75 bp, synthetic construct
  source 1..75: mol_type = other DNA
aacgcccactggcgcaggcgctggcctttgcctgcgtgctgtcgattggtgattttggcgtggtggcgttgttcg

SEQ ID NO: 261422 - DNA, 75 bp, synthetic construct
  source 1..75: mol_type = other DNA
tgggctggcatttacgtttacggacggatgtggcggaaaacgaagcgcgactgccgcatcgggtgctgctggcat

SEQ ID NO: 261423 - DNA, 75 bp, synthetic construct
  source 1..75: mol_type = other DNA
gtcgtaatggatttacttttaaacagttttttgtcggccacgaacgatgtgcgatgaaagtgggaacggatggaa

SEQ ID NO: 261424 - DNA, 75 bp, synthetic construct
  source 1..75: mol_type = other DNA
cttaattatcagtaacccgccgtattatcagcagggggttgagtgcgcgacgccgcaacgggaacaggcgcgcta

SEQ ID NO: 261425 - DNA, 75 bp, synthetic construct
  source 1..75: mol_type = other DNA
aattgattttaactggtcaaacaatgctatgtttgttatgtatggttgtcgcactagttatgcaagtgatgattc

SEQ ID NO: 261426 - DNA, 75 bp, synthetic construct
  source 1..75: mol_type = other DNA
aagaacaataacgagtttttattatttcaggttctagactcatattttaaaaactccgacttaatttcagaatat

SEQ ID NO: 261427 - DNA, 75 bp, synthetic construct
  source 1..75: mol_type = other DNA
gagatatgaaagatattatgaacaattcatataaaaacgttcatggctcggaggataacacatacatcacttcta

SEQ ID NO: 261428 - DNA, 75 bp, synthetic construct
  source 1..75: mol_type = other DNA
aaaaaacaaagtcatttaaaattgataatgccaaaatcccttttatgtttaagaacaataacgagtttttattat

SEQ ID NO: 261429 - DNA, 75 bp, synthetic construct
  source 1..75: mol_type = other DNA
ctcagcaaagttatccaaagctgaatcacctgatggtaggttctcaaaacctaaaaataagatctctaaaataca

SEQ ID NO: 261430 - DNA, 75 bp, synthetic construct
  source 1..75: mol_type = other DNA
cccggcaggctaactttttgcataacccggatcgggtattacatatgctgcgtagccagtcggcgctggaagtga

SEQ ID NO: 261431 - DNA, 75 bp, synthetic construct
  source 1..75: mol_type = other DNA
gagcagcataaagccgcgctgtggggctttgtccagcaggcgctggcaacattttgcgagaatcccgagaatttg

SEQ ID NO: 261432 - DNA, 75 bp, synthetic construct
  source 1..75: mol_type = other DNA
atatagaagttgattgtatttgccaggaagtgatggctatatatgaacatactcagcgatgctgcaacgaaaaga

SEQ ID NO: 261433 - DNA, 75 bp, synthetic construct
  source 1..75: mol_type = other DNA
ataaatcctgatttgctctctcattatcgtatatttaatcgttttttgcgttatgagagaaaagttatggatata

SEQ ID NO: 261434 - DNA, 75 bp, synthetic construct
  source 1..75: mol_type = other DNA
gctatgtttgttatgtatggttgtcgcactagttatgcaagtgatgattcaggacaaggttttgccagtaaatta

SEQ ID NO: 261435 - DNA, 75 bp, synthetic construct
  source 1..75: mol_type = other DNA
ggcttaccgccgacagcaggtctggggattggcatcgaccgtatggtaatgctgttcaccaacagccataccatc

SEQ ID NO: 261436 - DNA, 75 bp, synthetic construct
  source 1..75: mol_type = other DNA
gtctgtaaaatctgttgaaccagacattgccgaccgggctaacagctggctcaaatcttatggacttgattacaa

SEQ ID NO: 261437 - DNA, 75 bp, synthetic construct
  source 1..75: mol_type = other DNA
tttgctacaggttctgcgggattgcttgtggctgcaatgaatgaaatgctcattgacgccagagaaaatattcac

SEQ ID NO: 261438 - DNA, 75 bp, synthetic construct
  source 1..75: mol_type = other DNA
agggaagaaacacaatatttttaagccagatatcgacccattgcaggtgaatattaatattgctgcgcttggggg

SEQ ID NO: 261439 - DNA, 75 bp, synthetic construct
  source 1..75: mol_type = other DNA
acgatgctgttctcactgggtgccagcatgatactgggcggtgtggcccagatgctggcaccgaaggcaaaaaca

SEQ ID NO: 261440 - DNA, 75 bp, synthetic construct
  source 1..75: mol_type = other DNA
gatgtgctgctgtgctgctttggtgcatcggtgccgaatcatgccgccatttactgcggcaacggtgagctgctt

SEQ ID NO: 261441 - DNA, 75 bp, synthetic construct
  source 1..75: mol_type = other DNA
acacgctgttccgggacgcttaccatctggcgggaattgagatgccggattttcatcgcggggatgactggtggc

SEQ ID NO: 261442 - DNA, 75 bp, synthetic construct
  source 1..75: mol_type = other DNA
attccgcggtcagatgaacgaaggctggtaccagatacgtattgccggtgaggataccgcgccggaggcggtgta

SEQ ID NO: 261443 - DNA, 75 bp, synthetic construct
  source 1..75: mol_type = other DNA
gccaccacgatgctgttctcactgggtgccagcatgatactgggcggtgtggcccagatgctggcaccgaaggca

SEQ ID NO: 261444 - DNA, 75 bp, synthetic construct
  source 1..75: mol_type = other DNA
ggatgactggtggcgcaacggtcagaacctttacctggacaatatggaggcgactggtttttacaggatttccct

SEQ ID NO: 261445 - DNA, 75 bp, synthetic construct
  source 1..75: mol_type = other DNA
gccggaggggtattttcgtatcgcgccggaagactggctgcgggcagagatgcagggggagattgtggctctggt

SEQ ID NO: 261446 - DNA, 75 bp, synthetic construct
  source 1..75: mol_type = other DNA
gccggaggggtattttcgtatcgctccggaagactggctgcgggcagagatgcagggggagattgtggcactggt

SEQ ID NO: 261447 - DNA, 75 bp, synthetic construct
  source 1..75: mol_type = other DNA
gccggaggtgtattttcgtatcgcgccggaagactggctgcgggcagagatgcagggggagattgtggcactggt

SEQ ID NO: 261448 - DNA, 75 bp, synthetic construct
  source 1..75: mol_type = other DNA
tggtgtttttcaggtggtgctgggggcagcagccatcgtgggctctttcttcaccgccggtgcaacgatggcgtt

SEQ ID NO: 261449 - DNA, 75 bp, synthetic construct
  source 1..75: mol_type = other DNA
attccgccgtcagatgaacgaagggtggtaccagatacgtattcgcggtgaggacacggcaccggaggtggtgta

SEQ ID NO: 261450 - DNA, 75 bp, synthetic construct
  source 1..75: mol_type = other DNA
agggaacggtcatccacattgtgccgcgactggccggggccggaaagggcggactgcagattgtgctgggggctg

SEQ ID NO: 261451 - DNA, 75 bp, synthetic construct
  source 1..75: mol_type = other DNA
agggaacggtcatccacattgtgccgcgactggccggggccggaaagggtggactgcagattgtgctgggggccg

SEQ ID NO: 261452 - DNA, 75 bp, synthetic construct
  source 1..75: mol_type = other DNA
gtgagagcgccggatggggaaagtgatgtacccggggtgaatgtctccggtgagccggaggcgtattcgcggatg

SEQ ID NO: 261453 - DNA, 75 bp, synthetic construct
  source 1..75: mol_type = other DNA
ggatgactggtggcgcaacggtcagaacctgtacctggataatctggaggccacagggctgtatcaggtgccgtt

SEQ ID NO: 261454 - DNA, 75 bp, synthetic construct
  source 1..75: mol_type = other DNA
atcatgccgccatttactgcggcaacggtgaactgcttcaccatctgcctgaacaactgagtaaacgggagaggt

SEQ ID NO: 261455 - DNA, 75 bp, synthetic construct
  source 1..75: mol_type = other DNA
agggaacggtcatccacattgtgccgcgactggccggtgccggaaagggcggactgcagattgtgctgggggcgg

SEQ ID NO: 261456 - DNA, 75 bp, synthetic construct
  source 1..75: mol_type = other DNA
tttggccgccgcctcagcctgtatgtgaacacggcagcggaagccattcgcgccctgtcgatgcagatgccgggc

SEQ ID NO: 261457 - DNA, 75 bp, synthetic construct
  source 1..75: mol_type = other DNA
tggtaccagatacgtattgccggttatgacacggcaccggaggcggtgtacgcccgtcttcacgaacagctgggt

SEQ ID NO: 261458 - DNA, 75 bp, synthetic construct
  source 1..75: mol_type = other DNA
agggaacggtcatccacattgtgccgcgactggccggcgccggaaaggggggactgcagattgtgctgggggctg

SEQ ID NO: 261459 - DNA, 75 bp, synthetic construct
  source 1..75: mol_type = other DNA
agggaacggtcatccacattgtgccgcgactggccggcgccggaaagggtggactgcagattgtgctgggggcgg

SEQ ID NO: 261460 - DNA, 75 bp, synthetic construct
  source 1..75: mol_type = other DNA
agggaacggtcatccacattgtgccgcgactggccggtgccggaaaggggggactgcagattgtgctgggggccg

SEQ ID NO: 261461 - DNA, 75 bp, synthetic construct
  source 1..75: mol_type = other DNA
gcacacactccctctggcgtcaccgggaatggcacgcatctgcctttacggggatttgcaacgatttggccgccg

SEQ ID NO: 261462 - DNA, 75 bp, synthetic construct
  source 1..75: mol_type = other DNA
ttatggggttcagccctggcagccggtggtttttctgccaccacgatgctgttttctctgggggccagcatgatt

SEQ ID NO: 261463 - DNA, 75 bp, synthetic construct
  source 1..75: mol_type = other DNA
ggtgacggactgttacaccctgttccgggatgcataccatctggcggggactgagatgccggattttcatcgcga

SEQ ID NO: 261464 - DNA, 75 bp, synthetic construct
  source 1..75: mol_type = other DNA
gcaacggccagaacctgtacctggacaacctggcggaaaacggcttttgccgggtgtctccgtcctctgcacagg

SEQ ID NO: 261465 - DNA, 75 bp, synthetic construct
  source 1..75: mol_type = other DNA
ccctgcgtgaatatctccggtgagccagaggattatttccggatgtcgccggaggactggctgcaggcagaaatg

SEQ ID NO: 261466 - DNA, 75 bp, synthetic construct
  source 1..75: mol_type = other DNA
ccggaggactggctgcaggcagagatgcagggtgagattgtggcactggtccacagtcatcccggtggtctgccc

SEQ ID NO: 261467 - DNA, 75 bp, synthetic construct
  source 1..75: mol_type = other DNA
ggaagactggctgcgggcagagatgcagggggagattgtggcactggtccacagtcatcccggtggtctgccctg

SEQ ID NO: 261468 - DNA, 75 bp, synthetic construct
  source 1..75: mol_type = other DNA
cacttggagccagcatgattctgggcggtgtggcccagatgctggccccgaaggcaaaaacaccggattaccgcg

SEQ ID NO: 261469 - DNA, 75 bp, synthetic construct
  source 1..75: mol_type = other DNA
cacgaacagctgggtgagggaacggtcatccacattgtgccgcgactggccggggccggaaagggtggactgcag

SEQ ID NO: 261470 - DNA, 75 bp, synthetic construct
  source 1..75: mol_type = other DNA
ttccgccgccagatgaacgaaggctggtaccagatacgtattgctggtgaggacacggcaccggaggcggtgtat

SEQ ID NO: 261471 - DNA, 75 bp, synthetic construct
  source 1..75: mol_type = other DNA
tgcagataaaaagcgcactgccctggtggctggtctgccagggtgacattcacaaattccgctgtgtgccgcacc

SEQ ID NO: 261472 - DNA, 75 bp, synthetic construct
  source 1..75: mol_type = other DNA
cgcggctggcaggggccgggggaaatggtgtttttcaggttgtgctgggggttgcagcgattgtcgggtcatttt

SEQ ID NO: 261473 - DNA, 75 bp, synthetic construct
  source 1..75: mol_type = other DNA
atctgatccttaacccgattttgaatcgtaaaacgacagcagcaatgacgcatgtggaggctaacagtgtcgaat

SEQ ID NO: 261474 - DNA, 75 bp, synthetic construct
  source 1..75: mol_type = other DNA
tgcggagtcgtgcggcttcgtgataagcacgccggagggggagtggtatatcccttgtgtgaatatttctgcaga

SEQ ID NO: 261475 - DNA, 75 bp, synthetic construct
  source 1..75: mol_type = other DNA
gccgttgtcagcggcgcagccgggcgatgtgctgctgtgctgctttggttcatcggtgccgaatcatgccgctat

SEQ ID NO: 261476 - DNA, 75 bp, synthetic construct
  source 1..75: mol_type = other DNA
tggcgcacgcccggcgatgtgcgccggcggagtcgtgcggcttcgtggtgagcacgccggagggagaaaggtatt

SEQ ID NO: 261477 - DNA, 75 bp, synthetic construct
  source 1..75: mol_type = other DNA
accatctggcggggataacgctgccggattttgagcgtgaggatgactggtggcgcaacggtcagaacctttacc

SEQ ID NO: 261478 - DNA, 75 bp, synthetic construct
  source 1..75: mol_type = other DNA
ttgatatgccggattttgagcgtgaggatgactggtggcgtaacggtcagaacctttacctggacaatatggcgg

SEQ ID NO: 261479 - DNA, 75 bp, synthetic construct
  source 1..75: mol_type = other DNA
tgtgtgaatatttctgcagagccggaggcgtattttcgtatcgcaccggaagactggctgcgggcagagatgcag

SEQ ID NO: 261480 - DNA, 75 bp, synthetic construct
  source 1..75: mol_type = other DNA
ataccctaccggatattcgtcatcacagtgtgacgataatgcttacagaaaatctacctattgaaacacgtcaac

SEQ ID NO: 261481 - DNA, 75 bp, synthetic construct
  source 1..75: mol_type = other DNA
aaatcattttatgagcaacctgtcactgaatgatgggcgtattcgttttcgctcaactttaacgtaccacggtat

SEQ ID NO: 261482 - DNA, 75 bp, synthetic construct
  source 1..75: mol_type = other DNA
caggaaaatggcgagattgaaaaacggcacctgaataaaacgatcagggcgttgggtgatccagccgttaaccga

SEQ ID NO: 261483 - DNA, 75 bp, synthetic construct
  source 1..75: mol_type = other DNA
aggctgaaaaagaattcgttgctctgcctgctgcaattcgagccaagatgtcgcgcatactcgcaaagctggagg

SEQ ID NO: 261484 - DNA, 75 bp, synthetic construct
  source 1..75: mol_type = other DNA
ctttttgagatccgcacgatggggacagacatagccagaggcatctgggtatatcacaaaggcaataccatcatc

SEQ ID NO: 261485 - DNA, 75 bp, synthetic construct
  source 1..75: mol_type = other DNA
acaatggcatatgcgcattttgcaccggattacctgcaggatgcggtggcccttaatccgctgaaaggtggcgta

SEQ ID NO: 261486 - DNA, 75 bp, synthetic construct
  source 1..75: mol_type = other DNA
cgtctgcatcggttgattttgcagatgaaccgcgcgttggggatgttcgaggcgcaaagcaaactctggcggctg

SEQ ID NO: 261487 - DNA, 75 bp, synthetic construct
  source 1..75: mol_type = other DNA
aaactggtcgctacctgcatggagcagtttcgcccgaagaccatcccaccgctggcgatccctgaacgtttgaat

SEQ ID NO: 261488 - DNA, 75 bp, synthetic construct
  source 1..75: mol_type = other DNA
atgcataagataaattatagcgatgatatagatctatccaaaacttcccgccgtggtagttttaataaaagtaaa

SEQ ID NO: 261489 - DNA, 75 bp, synthetic construct
  source 1..75: mol_type = other DNA
gttgccggaagtgctggcacaaccggtgctgtggcaggcgctgtggacctcgttgcgtattgcgctggcggcagg

SEQ ID NO: 261490 - DNA, 75 bp, synthetic construct
  source 1..75: mol_type = other DNA
tacctgtggcatgtggtgcgcttctccttctggcaggcgtttctctcggcgctgctctctgtcgtacccgcaata

SEQ ID NO: 261491 - DNA, 75 bp, synthetic construct
  source 1..75: mol_type = other DNA
accacggcagccaccggcaaagtgaccgcgtccacgacaggaacaggcagcacgtctgccaccacagcgaaaggg

SEQ ID NO: 261492 - DNA, 75 bp, synthetic construct
  source 1..75: mol_type = other DNA
ttgttgagaattttcattaaaaaatcgtccaaaactccaccgacagagatagagctggcatttcgcagacttgag

SEQ ID NO: 261493 - DNA, 75 bp, synthetic construct
  source 1..75: mol_type = other DNA
cgctggcggaagtggaaattttcgtaggcaagcaggttaaagtacaaatcgaaccgctctacaaccaggagcagt

SEQ ID NO: 261494 - DNA, 75 bp, synthetic construct
  source 1..75: mol_type = other DNA
cgtgaacgcctgaaaaaagtggtcacggagtattgcgacgagcagggcggatttatcatccgtactgcagcggaa

SEQ ID NO: 261495 - DNA, 75 bp, synthetic construct
  source 1..75: mol_type = other DNA
aagatccgttggggaccaaaggcgcgcgcctgaccaccgatatcacgctaccttctcgctatctggtatttatgc

SEQ ID NO: 261496 - DNA, 75 bp, synthetic construct
  source 1..75: mol_type = other DNA
atggtttccccccaggcactggaagccagacgtaaggtcatcaaagagacgctccttagctggcttttggttgac

SEQ ID NO: 261497 - DNA, 75 bp, synthetic construct
  source 1..75: mol_type = other DNA
ctttaagaaagatattgatcccttacaaatcaatattaatatcgccgcactgggtgcatattatttaataaacca

SEQ ID NO: 261498 - DNA, 75 bp, synthetic construct
  source 1..75: mol_type = other DNA
gcgtgttctgcgtgattttgccgacgccgaactggaccgcattcgcgttgactcacgcctgacttacgaagcatt

SEQ ID NO: 261499 - DNA, 75 bp, synthetic construct
  source 1..75: mol_type = other DNA
gtttgatagcacaaagattagttaaaaaattatgtaataaatgttgtgttacgttagataaatatatagctaaac

SEQ ID NO: 261500 - DNA, 75 bp, synthetic construct
  source 1..75: mol_type = other DNA
ggtgatatcacggctgcagacgcaatggaccgaatagcaggaatgactgatataactcaggaaaggaaaagattt

SEQ ID NO: 261501 - DNA, 75 bp, synthetic construct
  source 1..75: mol_type = other DNA
ttgaaaaacattcttgaactactttatattgaaaaaaaggctaaagtaaatattattagtatcgaggacccacca

SEQ ID NO: 261502 - DNA, 75 bp, synthetic construct
  source 1..75: mol_type = other DNA
cgccgtaaaaaccccgtccttcagggcggggatatacggcgcggttttccacctaaccaggtgtttgctgttgtt

SEQ ID NO: 261503 - DNA, 75 bp, synthetic construct
  source 1..75: mol_type = other DNA
taagccaggtatcgacccattgcaggtgaatattaatattgctgcgcttgggggatattatttgatcaaccagca

SEQ ID NO: 261504 - DNA, 75 bp, synthetic construct
  source 1..75: mol_type = other DNA
ttacatgattgctcgtttcttatatacagaaaaggggaacaggaatacagttgatccggtttcattaggttttca

SEQ ID NO: 261505 - DNA, 75 bp, synthetic construct
  source 1..75: mol_type = other DNA
acggaatcattaaccaaacacaagatctggcgtatgaaatcagcataacggcacagaaattactcgaaattagag

SEQ ID NO: 261506 - DNA, 75 bp, synthetic construct
  source 1..75: mol_type = other DNA
catcggtgaagcgaacactagccgaacgcgtaggctggaagtgctcttatcctggctgcaaccagacaactgtag

SEQ ID NO: 261507 - DNA, 75 bp, synthetic construct
  source 1..75: mol_type = other DNA
cggtgccttacggtgaaatgctggttggttcacgacggatatcccaggacatcagcacccgtgatgagggcggtg

SEQ ID NO: 261508 - DNA, 75 bp, synthetic construct
  source 1..75: mol_type = other DNA
gttatgcagtgaaagtggtcagtgaccagctgattttttctcatctggccacactgcgcagtcaggagccggtca

SEQ ID NO: 261509 - DNA, 75 bp, synthetic construct
  source 1..75: mol_type = other DNA
aggcaacaaaattgaactggtgggttttgggcagttatccgggccatggctcataaccactgcccgccatgcgtt

SEQ ID NO: 261510 - DNA, 75 bp, synthetic construct
  source 1..75: mol_type = other DNA
atggctgagataagcgtaactggcggcgtctttgcaacactcacgcccatttttaccctctggtatgggcataaa

SEQ ID NO: 261511 - DNA, 75 bp, synthetic construct
  source 1..75: mol_type = other DNA
gtacttttcgtcactggacaatatgattgcccagggtaacccgatgccggtgccttacggggaaatgctggttgg

SEQ ID NO: 261512 - DNA, 75 bp, synthetic construct
  source 1..75: mol_type = other DNA
cgggatgcataccatctggcggggattgagatgccggattttcaccgcgaggatgactggtggcgcaacggccag

SEQ ID NO: 261513 - DNA, 75 bp, synthetic construct
  source 1..75: mol_type = other DNA
tacctggacaatatggaggcaacgggcttttaccgggtgcccctgtcctctgcacaggcgggcgatattctgctg

SEQ ID NO: 261514 - DNA, 75 bp, synthetic construct
  source 1..75: mol_type = other DNA
gcgccctgtcgatgcaggtgccgggctttcgccgtcagatgaacgaaggctggtaccagatacgtattgccggtg

SEQ ID NO: 261515 - DNA, 75 bp, synthetic construct
  source 1..75: mol_type = other DNA
cactgggggccagcatgatactgggcggtgtggcacagatgctggccccgaaggcaaaaacaccggattaccgcg

SEQ ID NO: 261516 - DNA, 75 bp, synthetic construct
  source 1..75: mol_type = other DNA
ccgggggatgtcattcatctggtaccccggactgaaggagccaaaagtggcggtgtgtttcaggcggttcttggc

SEQ ID NO: 261517 - DNA, 75 bp, synthetic construct
  source 1..75: mol_type = other DNA
aaagaagaacaaccagataaaggcttcttagccaggatttcacggggaattatgccttctttaccatttctgtaa

SEQ ID NO: 261518 - DNA, 75 bp, synthetic construct
  source 1..75: mol_type = other DNA
actactcgtagagcttcgcaataaccttctaagaactgatgttgggagtatatatcgtgaagggtatgcggaaga

SEQ ID NO: 261519 - DNA, 75 bp, synthetic construct
  source 1..75: mol_type = other DNA
attgcgtcagtgtcagatttaatgatgaagagctaactcttctcaataagagacgtggccgtcatcgtaaaggcg

SEQ ID NO: 261520 - DNA, 75 bp, synthetic construct
  source 1..75: mol_type = other DNA
atgacaaataaaaaaacgcagtttttgaacactaaggatgcaaaacattcaacctcaaagtgtaatttactacca

SEQ ID NO: 261521 - DNA, 75 bp, synthetic construct
  source 1..75: mol_type = other DNA
attgaagaactcaggggtcgttaccgtaggggagaatggctgcgtatggtgtcgttaagcaaacttcctccattg

SEQ ID NO: 261522 - DNA, 75 bp, synthetic construct
  source 1..75: mol_type = other DNA
atgcgatcccctgcgctgcgtgcgtggcagtccgcgccggacccgaaaatctgtatctcctacggtgcctgcggt

SEQ ID NO: 261523 - DNA, 75 bp, synthetic construct
  source 1..75: mol_type = other DNA
gatgtcaaaaagcaccgtttatcgctttttacagacgatgaaaactctgggctatgtggcgcaggaaggggagtc

SEQ ID NO: 261524 - DNA, 75 bp, synthetic construct
  source 1..75: mol_type = other DNA
ggagaaagcccctatctggccgggaaagggtttgccggatactgctggttaacgggctgtcctatatcagcacca

SEQ ID NO: 261525 - DNA, 75 bp, synthetic construct
  source 1..75: mol_type = other DNA
ctccccccaaaagagagtattttcttgatctgtgacacgcttttgtcattccataacaaaaacgcagcaacaaat

SEQ ID NO: 261526 - DNA, 75 bp, synthetic construct
  source 1..75: mol_type = other DNA
catgcgtttcagggtccgcttcctcccccctatctgcttcgcgggtatcaggatattttacctgatgcccccgaa

SEQ ID NO: 261527 - DNA, 75 bp, synthetic construct
  source 1..75: mol_type = other DNA
aaagcatggatagctttaaccgacatatcgcaaaaactaaatcgcattgcggcccacatagatggtaagagcaaa

SEQ ID NO: 261528 - DNA, 75 bp, synthetic construct
  source 1..75: mol_type = other DNA
cagggcgtttattctgcatttccataagcttaaaacgtcagatgttatttgtgttaacgatattagaacattttt

SEQ ID NO: 261529 - DNA, 75 bp, synthetic construct
  source 1..75: mol_type = other DNA
cgaaaatatattaaatctgattgaagattatgatgtttttttattttcttcgttgcgcgaaggattgcctcgttc

SEQ ID NO: 261530 - DNA, 75 bp, synthetic construct
  source 1..75: mol_type = other DNA
acgatcaggaagtgggtgaacatcgcgaaattacggcggaagagacggcggaactgctgaaaaattcgcattcag

SEQ ID NO: 261531 - DNA, 75 bp, synthetic construct
  source 1..75: mol_type = other DNA
cacccagatgaactccaaagccgatgaggatgtccgtaaagagcttaatgccattgctgacgtatcagccggccg

SEQ ID NO: 261532 - DNA, 75 bp, synthetic construct
  source 1..75: mol_type = other DNA
cacccagatgaactccaaagccgatgatgaagtccgtaaagagcttaatgccattgctgacgtatcagccggccg

SEQ ID NO: 261533 - DNA, 75 bp, synthetic construct
  source 1..75: mol_type = other DNA
cacccagatgaactctaaagccgatgacgaagtccgtaaagagcttaatgccattgctgacgtatcagccggccg

SEQ ID NO: 261534 - DNA, 75 bp, synthetic construct
  source 1..75: mol_type = other DNA
atggacactccatacattgagttatttgctggcagtcagcaggtatcaacgacgctggtacattttgccgctgat

SEQ ID NO: 261535 - DNA, 75 bp, synthetic construct
  source 1..75: mol_type = other DNA
gacgctggtacattttgccgctgatgctggcgttattcaggaatttaccccgctgatgctggcagacaatggcga

SEQ ID NO: 261536 - DNA, 75 bp, synthetic construct
  source 1..75: mol_type = other DNA
cacccagatgaactcgaaagccgatgacgatgtccgtaaagagcttaatgccattgctgacgtatcagccggccg

SEQ ID NO: 261537 - DNA, 75 bp, synthetic construct
  source 1..75: mol_type = other DNA
ttccgcatgggagccggaacgaccagagggtgatgggtggtttattggctccattcatgacacggaagacggtcc

SEQ ID NO: 261538 - DNA, 75 bp, synthetic construct
  source 1..75: mol_type = other DNA
tgcgcaggtcgtgaatatatttccaccgaggaatttgacgcctggatgaaggtaaataatcttcagtggactatt

SEQ ID NO: 261539 - DNA, 75 bp, synthetic construct
  source 1..75: mol_type = other DNA
tagaacgtgatgaatatggctgctggacacatccggagtatgaaaagttttgcgcaggccgtgaatatatttcca

SEQ ID NO: 261540 - DNA, 75 bp, synthetic construct
  source 1..75: mol_type = other DNA
gattacgtctgtaaagacagcgaactggcaactgaaggggcgacagacctgtgggaaggctcacttatcgatcaa

SEQ ID NO: 261541 - DNA, 75 bp, synthetic construct
  source 1..75: mol_type = other DNA
caggcgcatatcaccagcctgcttgcggatatccgggaaatcgcggactgtcaggagcaggtgaccgctgatgtc

SEQ ID NO: 261542 - DNA, 75 bp, synthetic construct
  source 1..75: mol_type = other DNA
gaaagttgaacaactgcgtaacacgctgattcagagctctgaagatcataaacgcgatcagcaggcacaggaacg

SEQ ID NO: 261543 - DNA, 75 bp, synthetic construct
  source 1..75: mol_type = other DNA
ttgcagacgccgcatatgaaagcgtacagcgaagccgtaaaaggcgatgtgctggagatgaatattcgtatcctg

SEQ ID NO: 261544 - DNA, 75 bp, synthetic construct
  source 1..75: mol_type = other DNA
aaaaacggatcacggaacccaaaggaacccaaagatctaaaccccacacataacgcacgcgagagtgctccgacc

SEQ ID NO: 261545 - DNA, 75 bp, synthetic construct
  source 1..75: mol_type = other DNA
cacgacgtgtcacgacgtggtcacattgatgtcacgacagaagatttggcaagtgcgctcgacgtgacagaagag

SEQ ID NO: 261546 - DNA, 75 bp, synthetic construct
  source 1..75: mol_type = other DNA
cggcctgagcgaaccgatcgggaaatttccgatgactggagtctggcaaccgtcgccggattttcgacagcgggc

SEQ ID NO: 261547 - DNA, 75 bp, synthetic construct
  source 1..75: mol_type = other DNA
ctgtatatatttttagtgctttttcagcatttgtttttctgggaggtgtttttattatattagagttggaattta

SEQ ID NO: 261548 - DNA, 75 bp, synthetic construct
  source 1..75: mol_type = other DNA
aatgagttgaagtgtaagaaaggttctgacaggagagatgcatattccattgagaatgtctcagaatataacgtg

SEQ ID NO: 261549 - DNA, 75 bp, synthetic construct
  source 1..75: mol_type = other DNA
caggagatgccgatatccgcttcccgggtacgtcaactgctggcgaaaaacgatctcacggctatcgcgccgctg

SEQ ID NO: 261550 - DNA, 75 bp, synthetic construct
  source 1..75: mol_type = other DNA
aaagtcacgcgcccggaggatttggcgctggccgaattttacctcacccgaaccatccatcaggagaatacataa

SEQ ID NO: 261551 - DNA, 75 bp, synthetic construct
  source 1..75: mol_type = other DNA
tgcacggctgttaactctgagcgaaaccagccgcacgggggggattcttgccgctccggtgcgcgataccatgaa

SEQ ID NO: 261552 - DNA, 75 bp, synthetic construct
  source 1..75: mol_type = other DNA
ctacaaaccccgcacatgaaagcatacagcgaagccgtaaaaggcgacgtgctggagatgaatattcgcatcctg

SEQ ID NO: 261553 - DNA, 75 bp, synthetic construct
  source 1..75: mol_type = other DNA
cgctgttattttgacgccgtcgttgctgccgatcacgtcaaacatcataaacctgcgccagacacatttttgttg

SEQ ID NO: 261554 - DNA, 75 bp, synthetic construct
  source 1..75: mol_type = other DNA
gttcgctgtcggtagcaaatttaacgattcgtgaagaattgggattaagtgctgatgaatcccctaatgattttt

SEQ ID NO: 261555 - DNA, 75 bp, synthetic construct
  source 1..75: mol_type = other DNA
agttgcgtctggcgcgtcagcagacggcgctggagagacttcagcaacgaatgaatctggcgattgacagtcaga

SEQ ID NO: 261556 - DNA, 75 bp, synthetic construct
  source 1..75: mol_type = other DNA
attcagccatctggtggggatggatgcatgccagggaacactccactgctggatccccccggccctaatgaggcc

SEQ ID NO: 261557 - DNA, 75 bp, synthetic construct
  source 1..75: mol_type = other DNA
gtgcaggcgattatcggcgtctggctggtcaccgcgctggcactacatctggcagaagtcggtttgattggtttg

SEQ ID NO: 261558 - DNA, 75 bp, synthetic construct
  source 1..75: mol_type = other DNA
tttgtgatgaagcagaccggcttttgcaactgaatatcaatctgctccggcaaatggttgatgagccggatgtgt

SEQ ID NO: 261559 - DNA, 75 bp, synthetic construct
  source 1..75: mol_type = other DNA
ggggaaatgtggtggagaaagttattgaaggggcttacgatgtggtgggcgtgtttgagcggattgaggaaaagc

SEQ ID NO: 261560 - DNA, 75 bp, synthetic construct
  source 1..75: mol_type = other DNA
ctgcccgcctcccgcgtttatcccggatcatcacgtcaggcgtacctggctaaccgtgcgcttcatgagttacgg

SEQ ID NO: 261561 - DNA, 75 bp, synthetic construct
  source 1..75: mol_type = other DNA
acgatcaaagtcgccaccagcgtacccgtcaggataaaattcgtctgattgtccaggcgattatcggcgtctggc

SEQ ID NO: 261562 - DNA, 75 bp, synthetic construct
  source 1..75: mol_type = other DNA
gttcccgtcatcatttccggtactctccgttgccgcacctgtcggctggaaccttccggcgtttgtgtcgctgat

SEQ ID NO: 261563 - DNA, 75 bp, synthetic construct
  source 1..75: mol_type = other DNA
caacatgatcaggaataccgggcgctttaccgtcagttactgccggaagtggatttgattatctggatcctgcgg

SEQ ID NO: 261564 - DNA, 75 bp, synthetic construct
  source 1..75: mol_type = other DNA
ggatctgattatctggatcctgcgggctgatgaacgtgcgtatgctgctgatattgccatgcatcagtttttact

SEQ ID NO: 261565 - DNA, 75 bp, synthetic construct
  source 1..75: mol_type = other DNA
cagatatccgggaaatcgcggactgtcagaataaggtgaccggtgatgtcagaatggccatggaggagatcgatg

SEQ ID NO: 261566 - DNA, 75 bp, synthetic construct
  source 1..75: mol_type = other DNA
gctcctcgcgccaggcgtacctggctaaccgtgcgcttcatgagttacaaaaaaacggcacacttcctgatgatg

SEQ ID NO: 261567 - DNA, 75 bp, synthetic construct
  source 1..75: mol_type = other DNA
ccccgactggtacaaactcgccctcattattttcttaattcttaatccgttaattttcatcatcagcccctttgt

SEQ ID NO: 261568 - DNA, 75 bp, synthetic construct
  source 1..75: mol_type = other DNA
cacattccagagctgcggcactggcggttgactctgccgccgcaaaactgatgcagaatgcagaaaatatcagtg

SEQ ID NO: 261569 - DNA, 75 bp, synthetic construct
  source 1..75: mol_type = other DNA
actgcgtaacacgctgattcagagctctgaagatcataaacgcgatcagcaggcgcaggaacggcttaccgggcg

SEQ ID NO: 261570 - DNA, 75 bp, synthetic construct
  source 1..75: mol_type = other DNA
gctacagcaaagcattcagtcactgctgtcgcatatcaccagcctgcttgcggatatccgggaaatcgcggactg

SEQ ID NO: 261571 - DNA, 75 bp, synthetic construct
  source 1..75: mol_type = other DNA
tcagccagttacagacccggctcgcggtaaaaacaaatctgagtgcgcttatggaggaaagaacggagacagtca

SEQ ID NO: 261572 - DNA, 75 bp, synthetic construct
  source 1..75: mol_type = other DNA
tgtgacggtcgggaatatatttcaacggaagagtttaacgcctggatggaggaaaataatcttcaatacgtcctc

SEQ ID NO: 261573 - DNA, 75 bp, synthetic construct
  source 1..75: mol_type = other DNA
ctgcaaaccccgcacatgaaggcgtacagcgaagccgtaaaaggcgacgtgctggagatgaatattcgtattctg

SEQ ID NO: 261574 - DNA, 75 bp, synthetic construct
  source 1..75: mol_type = other DNA
agaaacgcattcgctttctttcacgatattttcggaaccagaaatcagcatgacaggatgcgggactttgatccg

SEQ ID NO: 261575 - DNA, 75 bp, synthetic construct
  source 1..75: mol_type = other DNA
agagctcagaagatcataaacgcgatcagcaggcacaggagcatcttacggagcgccttcaggcattaaatgaaa

SEQ ID NO: 261576 - DNA, 75 bp, synthetic construct
  source 1..75: mol_type = other DNA
ggcagcctgagttcacagataaaacactctccaggaaaaccggggcggttcaaagactgacacctcagtccggat

SEQ ID NO: 261577 - DNA, 75 bp, synthetic construct
  source 1..75: mol_type = other DNA
aacaaggtcagagaggaagtgatgtcactgacccgggcatatttcggggagctgcaggcatccattgagcaggat

SEQ ID NO: 261578 - DNA, 75 bp, synthetic construct
  source 1..75: mol_type = other DNA
tgctgcagcaatggggactgaattcccttttgacgaatacgcagaagtgcagaaactgccggtgatcgacgtgga

SEQ ID NO: 261579 - DNA, 75 bp, synthetic construct
  source 1..75: mol_type = other DNA
gtccgccaggaaatcgatgcctttttctgcgcattcagggagaaagttgaacaactgcgtaacacgctgattcag

SEQ ID NO: 261580 - DNA, 75 bp, synthetic construct
  source 1..75: mol_type = other DNA
ggaagcccttgaactgatgacgcaaatcgaatcgaccgtgaccagcctgcaccgtgaggctgaagcacagttccg

SEQ ID NO: 261581 - DNA, 75 bp, synthetic construct
  source 1..75: mol_type = other DNA
ctgataacggaagtcatacagagctcacattccagagctgcggcactggcggttgactctgccgccgcaaaactg

SEQ ID NO: 261582 - DNA, 75 bp, synthetic construct
  source 1..75: mol_type = other DNA
aagctgaagcacagttccggcctgagctggagaaaatcgtcagcgggattgaaacaagctttcgtggtacggccc

SEQ ID NO: 261583 - DNA, 75 bp, synthetic construct
  source 1..75: mol_type = other DNA
ttatctcacatggtatgccttttcctcagaatgctcagacagctattgaagtcgaagaaactattcgtaaacacg

SEQ ID NO: 261584 - DNA, 75 bp, synthetic construct
  source 1..75: mol_type = other DNA
cggacagccccgaaataaaattcagtgatcgcagggaagcccttgaactgatgacgcaaatcgaatcgaccgtga

SEQ ID NO: 261585 - DNA, 75 bp, synthetic construct
  source 1..75: mol_type = other DNA
gcgccttcaggcattaaatgaaagggttcccgagttgattactgacagtaaggcgttaaaggaagaactggagac

SEQ ID NO: 261586 - DNA, 75 bp, synthetic construct
  source 1..75: mol_type = other DNA
atgattttttctgtacattcagggaaaaagtcgaacagctacgtaacacactcattcagagctcagaagatcata

SEQ ID NO: 261587 - DNA, 75 bp, synthetic construct
  source 1..75: mol_type = other DNA
atgtctgaattaaaaatttcccctgaattattacaaatttccccggaagtgcaggacgctttaaaaaacaaaatt

SEQ ID NO: 261588 - DNA, 75 bp, synthetic construct
  source 1..75: mol_type = other DNA
gaccggtggtgacagcctgaaatccaatatccagctggtgttcaacaacgccattctggcgagtgaaattgccaa

SEQ ID NO: 261589 - DNA, 75 bp, synthetic construct
  source 1..75: mol_type = other DNA
ggagcggaacataccttcgatatttctgccgatttacaggaactggcaaataccaatgtcactgttgtttgtgcg

SEQ ID NO: 261590 - DNA, 75 bp, synthetic construct
  source 1..75: mol_type = other DNA
tggttggtggggctggagctttgttctttgcgtttgtcagtgggtttgcttgtattgtgttgtggggacttgcac

SEQ ID NO: 261591 - DNA, 75 bp, synthetic construct
  source 1..75: mol_type = other DNA
ggtattggtggtgtgcatcgcggagcggaacataccttcgatatttctgccgatttacaggaactggcaaatacc

SEQ ID NO: 261592 - DNA, 75 bp, synthetic construct
  source 1..75: mol_type = other DNA
tttgtcgttgctgcagggaaaaatggcgcaaccaccgttgcatcaaccatgattattgcagcactggctgggatt

SEQ ID NO: 261593 - DNA, 75 bp, synthetic construct
  source 1..75: mol_type = other DNA
cctaatgaggccggacaaccgcagatggaagtgatgatgcgggatcaactgcagaaagcctctgcggtgctggcg

SEQ ID NO: 261594 - DNA, 75 bp, synthetic construct
  source 1..75: mol_type = other DNA
acgaatccctggtgtgtggcgtgttccccaaccagaatggaacgttcaccgccatgacatataccaaaagcaaaa

SEQ ID NO: 261595 - DNA, 75 bp, synthetic construct
  source 1..75: mol_type = other DNA
cggggagtgaaagcgccatcgctgaggcattgctggcgcacctgggattacgccgttattttgacgccgtcgtcg

SEQ ID NO: 261596 - DNA, 75 bp, synthetic construct
  source 1..75: mol_type = other DNA
gggatcaaccgattgggtttatgttgctaagcgggcagcatatggatgcgctatttgttgattctgatgcgcgcg

SEQ ID NO: 261597 - DNA, 75 bp, synthetic construct
  source 1..75: mol_type = other DNA
acgaatatctggtgtacggcgtgtttcccaaccaggacggcacgttcaccgcgatgacatataccaaaagcaaaa

SEQ ID NO: 261598 - DNA, 75 bp, synthetic construct
  source 1..75: mol_type = other DNA
cagcgcagcaggtttttagttccgctaccccggcgttaaggggaaatgaggtcaacatggatactatcgagcttg

SEQ ID NO: 261599 - DNA, 75 bp, synthetic construct
  source 1..75: mol_type = other DNA
tttgtgatgaagccgaccgacttttgcaactgaacattaatctgctccggcaaatggttgatgagccggatgtgt

SEQ ID NO: 261600 - DNA, 75 bp, synthetic construct
  source 1..75: mol_type = other DNA
gaaggggcgacagacctgtgggaaggctcacttatcgatcaactgataacggaagtcatagagctcacattccag

SEQ ID NO: 261601 - DNA, 75 bp, synthetic construct
  source 1..75: mol_type = other DNA
gatgaaaaagaccgtaatggcgatggggctgatgcagtctgtcagaaggtaccggcaatgctgaacagcgatgtg

SEQ ID NO: 261602 - DNA, 75 bp, synthetic construct
  source 1..75: mol_type = other DNA
ccctaaccaggacggcacgtttaccgcgatgacgtataccagaagcaaaacgtttaaaactgaagctggcgcgcg

SEQ ID NO: 261603 - DNA, 75 bp, synthetic construct
  source 1..75: mol_type = other DNA
catttttgttgtgcgcgcagcgtatgggcgtgcaaccgacgcagtgtgtggtctttgaagatgccgatttcggta

SEQ ID NO: 261604 - DNA, 75 bp, synthetic construct
  source 1..75: mol_type = other DNA
gcatgccagggaacactcacactgctggatacccccggccctaatgaagccggacaaccacagatggaagtgatg

SEQ ID NO: 261605 - DNA, 75 bp, synthetic construct
  source 1..75: mol_type = other DNA
ataacgaatcatcgcaggatatgcattatcaggtgataccagagtgcattaaactgccgtcacggataagaatat

SEQ ID NO: 261606 - DNA, 75 bp, synthetic construct
  source 1..75: mol_type = other DNA
atggtaagcgcgctgtatgccgttttaagtgcgttgttattaatgaagttctcttttgatgtcgttcgcctgcgt

SEQ ID NO: 261607 - DNA, 75 bp, synthetic construct
  source 1..75: mol_type = other DNA
acggcggttttagcgaactgcaaagcgctattcgcattcatggtaacgcggtggaatatattcccatcgcgattg

SEQ ID NO: 261608 - DNA, 75 bp, synthetic construct
  source 1..75: mol_type = other DNA
aaaacaggttaagcaggtgaaagtgggtgagacactgaccactcgcctgggcgatggcgtagtgatcagtgaagt

SEQ ID NO: 261609 - DNA, 75 bp, synthetic construct
  source 1..75: mol_type = other DNA
gtgcgcaaacgcggatccaacagctggaatatcgtctcgctgaaacacttcgcgcacagcttagcgccacgcgcg

SEQ ID NO: 261610 - DNA, 75 bp, synthetic construct
  source 1..75: mol_type = other DNA
acaggagttactgcgtcaggtgcagtctgcgcagcagcgcctcgaaatggcaatggattattatctcgccaaccg

SEQ ID NO: 261611 - DNA, 75 bp, synthetic construct
  source 1..75: mol_type = other DNA
ggttaaaccagtcagcaaaggggtaaaccatgcagcagcaccaggtggcaccgcatcacgggcagttcaggaaat

SEQ ID NO: 261612 - DNA, 75 bp, synthetic construct
  source 1..75: mol_type = other DNA
actggcagaagtaacggaactgaacaaaaagactgtgcaggacagcttacgacacctgatggagattgggttaat

SEQ ID NO: 261613 - DNA, 75 bp, synthetic construct
  source 1..75: mol_type = other DNA
tttgaatggcgtaatcagattaaatgtggccagttgaatatttcacgttcgaatgaaaagtattttgggtttaat

SEQ ID NO: 261614 - DNA, 75 bp, synthetic construct
  source 1..75: mol_type = other DNA
aaattgctattgctcgtgaacagcaactgtttaatggcaagaatttccatgtgtttatctacaataaaactgaaa

SEQ ID NO: 261615 - DNA, 75 bp, synthetic construct
  source 1..75: mol_type = other DNA
gagtttgttgagatggttactttttatgtcattaaccgtttacgtcattaccgcgaagaacaggtgattgatgat

SEQ ID NO: 261616 - DNA, 75 bp, synthetic construct
  source 1..75: mol_type = other DNA
gatgcagattattaacgagatccgcattaactttgctaaaaaacaactggagatgactaactactccgtaacaga

SEQ ID NO: 261617 - DNA, 75 bp, synthetic construct
  source 1..75: mol_type = other DNA
tttgccagccgcattccggtagtgagtgccgtcgggcatgaaaccgatgtgacaattgctgactttgttgctgat

SEQ ID NO: 261618 - DNA, 75 bp, synthetic construct
  source 1..75: mol_type = other DNA
tggacggtacgttattgatgcctgaccatcatttaggtgagaaaacgctttcgactctggcgcgtttgcgtgacc

SEQ ID NO: 261619 - DNA, 75 bp, synthetic construct
  source 1..75: mol_type = other DNA
gcaaaattgaggacgcagcagctgaaaaactcagcaaaacagcgcaggcaactccgctcccaaaagacccgaccc

SEQ ID NO: 261620 - DNA, 75 bp, synthetic construct
  source 1..75: mol_type = other DNA
caggttcacaagccccataacgtttctgcgatcattcgtaccgcagatgccgttggcgtacacgaagttcacgct

SEQ ID NO: 261621 - DNA, 75 bp, synthetic construct
  source 1..75: mol_type = other DNA
gattctggcaacccatctttctgataacgctgtcgatttccgcgaaattgattacacccgcccgacctgtatttt

SEQ ID NO: 261622 - DNA, 75 bp, synthetic construct
  source 1..75: mol_type = other DNA
gcaccagaaatgggatacccaggcaagtatgcatattttcaatgacgatggttggtttactggacaagagatgcc

SEQ ID NO: 261623 - DNA, 75 bp, synthetic construct
  source 1..75: mol_type = other DNA
gcaagaattgctacgtcaggtgcaatcgacccatcaacggctggaaatggcgatggattattatctcgccaaccg

SEQ ID NO: 261624 - DNA, 75 bp, synthetic construct
  source 1..75: mol_type = other DNA
acgctggcgcgcggttatagcgtcaccagcgccgctgatggcgcggtgttaaaacaggttaagcaagtgaaagtg

SEQ ID NO: 261625 - DNA, 75 bp, synthetic construct
  source 1..75: mol_type = other DNA
gagatgggacaggtgtggatcagcggcgaaatctctaatttcacacaaccggcttccggtcactggtactttacg

SEQ ID NO: 261626 - DNA, 75 bp, synthetic construct
  source 1..75: mol_type = other DNA
taccggttcgtgttcagagtcatgtgaaatctggggtgatcaattggaattggaattcgaagaggtaggggtatg

SEQ ID NO: 261627 - DNA, 75 bp, synthetic construct
  source 1..75: mol_type = other DNA
acatattcatggatacgggatgtgaacacccgctgacataccgatttattcgggaagtcgtgaagttctgggata

SEQ ID NO: 261628 - DNA, 75 bp, synthetic construct
  source 1..75: mol_type = other DNA
ggttacaggcaaacacgtcagggatggtcatcgcagaacaggtaaagacgttatgtaccgtggccacctgacgct

SEQ ID NO: 261629 - DNA, 75 bp, synthetic construct
  source 1..75: mol_type = other DNA
gatccacgcactgccaccacaggcaaccagtgcggtttattcacatatccggggggaaaaccgctctgaacaggc

SEQ ID NO: 261630 - DNA, 75 bp, synthetic construct
  source 1..75: mol_type = other DNA
ggacaagttaatcaaaagcgttcctgaagtggcctctgtatttggcaagaccggtaaagcagagaccgccacgga

SEQ ID NO: 261631 - DNA, 75 bp, synthetic construct
  source 1..75: mol_type = other DNA
gatcgcagccagttaatcgatcgtgcgattgacaacctcagttacaagcttcttgaagagtttatcgttgttgct

SEQ ID NO: 261632 - DNA, 75 bp, synthetic construct
  source 1..75: mol_type = other DNA
agggactgaacgccaatatcatgtcgctgggagggatagcgattgccgtcggtgcgatggtggatgccgccattg

SEQ ID NO: 261633 - DNA, 75 bp, synthetic construct
  source 1..75: mol_type = other DNA
gaaagtgaaactgagaccggggaccagtgtggcattctcaggacagtttgaattactcgagcacgccaataagaa

SEQ ID NO: 261634 - DNA, 75 bp, synthetic construct
  source 1..75: mol_type = other DNA
tggcccggtaccctattaacattcgctatccgcaggattaccgtaacagtccgcaggcgttgagagagatgccaa

SEQ ID NO: 261635 - DNA, 75 bp, synthetic construct
  source 1..75: mol_type = other DNA
aagctgctgcgctcttacagaccacggacaaactaatcaaaacggtgcctgaagtggcctcagtttttggcaaga

SEQ ID NO: 261636 - DNA, 75 bp, synthetic construct
  source 1..75: mol_type = other DNA
ttcgtcataatttctgctgaaatcgacctctcggtcggctccatgatggggctattaggcggggtcgccgctatc

SEQ ID NO: 261637 - DNA, 75 bp, synthetic construct
  source 1..75: mol_type = other DNA
ttcgctttacctccagagggcgcgaatacgaggtcgacgaacgactgattaccactatcgacaaacatcgttcgg

SEQ ID NO: 261638 - DNA, 75 bp, synthetic construct
  source 1..75: mol_type = other DNA
cactgacggtacttacttctgcgccactaatgtggcgcgggtgaatcttatccgacaggtacaggatcctcgcaa

SEQ ID NO: 261639 - DNA, 75 bp, synthetic construct
  source 1..75: mol_type = other DNA
gacgccagtgagaacccggaaccggaaacggaatcaaatccgtgggtcgaacagtggggccgctgttgtcctgat

SEQ ID NO: 261640 - DNA, 75 bp, synthetic construct
  source 1..75: mol_type = other DNA
ttatcgcagtggctttaattgtcgttttatccatttttaaacgactctcatcaatatgggagggaagaaagcaat

SEQ ID NO: 261641 - DNA, 75 bp, synthetic construct
  source 1..75: mol_type = other DNA
ctcgacttggcgctggttcaccttctgcgggaaatatcgccgagctggacgcaattgcagcatgcgtgattggcg

SEQ ID NO: 261642 - DNA, 75 bp, synthetic construct
  source 1..75: mol_type = other DNA
caatgcagatggcttcatcagtattgatgatgacttgaaggctgattttcaaaacctaaaacaaaagcaaaaagc

SEQ ID NO: 261643 - DNA, 75 bp, synthetic construct
  source 1..75: mol_type = other DNA
gatggctgctgccatcgctgtcaggctggcggatatggggtttgatgtgcatctcacgacttctgatcctgctgc

SEQ ID NO: 261644 - DNA, 75 bp, synthetic construct
  source 1..75: mol_type = other DNA
accacaccggtgctggaagcggcaaacctgcaggctgacctcgagagagcggggattcatccgtggggctggatt

SEQ ID NO: 261645 - DNA, 75 bp, synthetic construct
  source 1..75: mol_type = other DNA
gcgtaatccgtgaagcaggcaaacggtttgtggtcatggatacggcacctaccgggcatacgctattactgcttg

SEQ ID NO: 261646 - DNA, 75 bp, synthetic construct
  source 1..75: mol_type = other DNA
cttatctgttttttaccggtaagggaggtgtaggtaaaacgtcaatttcctgcgcaactgctatccatctggcgg

SEQ ID NO: 261647 - DNA, 75 bp, synthetic construct
  source 1..75: mol_type = other DNA
atgctaccggggcttatcaccgtgagattgctaagaagatggggaataaagttcattttaccactccgatgatgc

SEQ ID NO: 261648 - DNA, 75 bp, synthetic construct
  source 1..75: mol_type = other DNA
ctgagcgtatatcgcttgttccggtgctggcgtcagagcccgccggtattgaaaagctcagaaagttgatgagtt

SEQ ID NO: 261649 - DNA, 75 bp, synthetic construct
  source 1..75: mol_type = other DNA
ccaaacggcgattatagcgatgatgactttgtcagtctgattgaaggttttacctgtcatgaagctggtcatggt

SEQ ID NO: 261650 - DNA, 75 bp, synthetic construct
  source 1..75: mol_type = other DNA
cactcttggatgtaagggttattatacccctacgggatctgctttaatggcagctgttgatctgttacttgacag

SEQ ID NO: 261651 - DNA, 75 bp, synthetic construct
  source 1..75: mol_type = other DNA
atgattttttaaacagtgatgaggaaagcgaggattttcatgaggttcttgcaaaagagatctccgtaattgctg

SEQ ID NO: 261652 - DNA, 75 bp, synthetic construct
  source 1..75: mol_type = other DNA
atccgggctgctgacagataccttattactacagccagtcaacatggttggcgtgtctgcattgaagggactgct

SEQ ID NO: 261653 - DNA, 75 bp, synthetic construct
  source 1..75: mol_type = other DNA
cagtaccgatcctgcctcgaatgtcggtcaggtattcgatcaggctatcggtaacaccattcgccctgtgacggc

SEQ ID NO: 261654 - DNA, 75 bp, synthetic construct
  source 1..75: mol_type = other DNA
cccagtttgaccatatcatctttgataccgcgccaaccggccatactattcgccttctccagttgccaggcgcct

SEQ ID NO: 261655 - DNA, 75 bp, synthetic construct
  source 1..75: mol_type = other DNA
caacattgatacgtcaacccctatggggcgcttcttttttcacataatgggtgcgctggcagaaatggagcgtga

SEQ ID NO: 261656 - DNA, 75 bp, synthetic construct
  source 1..75: mol_type = other DNA
caagctggacggggtaaaagtggtctacgtttgcagccccaacaacccaaccgggcaactgatcaacccgcagga

SEQ ID NO: 261657 - DNA, 75 bp, synthetic construct
  source 1..75: mol_type = other DNA
cgcgaatacctgattgccgcactgaaagagatcccctgcgtggagcaggtttttgactctgaaaccaactacatt

SEQ ID NO: 261658 - DNA, 75 bp, synthetic construct
  source 1..75: mol_type = other DNA
ggtcttgcagctgcccgtgaaagggggcgaaccggcggcagaccgcgtcgtctcactcaggaacaatacgagcag

SEQ ID NO: 261659 - DNA, 75 bp, synthetic construct
  source 1..75: mol_type = other DNA
caacaaatgaccagaacaccggtttacaaagaaatgcgctggaatgtgcaggatgtgagcagatttttgaagata

SEQ ID NO: 261660 - DNA, 75 bp, synthetic construct
  source 1..75: mol_type = other DNA
tgtatttctgctcggtaaggtgctggctctgcctgctgagccatttatgacgaaacttttgccgataagtctata

SEQ ID NO: 261661 - DNA, 75 bp, synthetic construct
  source 1..75: mol_type = other DNA
gacattgcggcccaggcgttaagcccgcagggaatcgtcgccatgcgcgaacgggtggcgcaaattattgcagaa

SEQ ID NO: 261662 - DNA, 75 bp, synthetic construct
  source 1..75: mol_type = other DNA
gtctttatccttgccccgctgaatgaggaaatcctgttccgtggtgtcatgctgaacgctgaaggatcccctcat

SEQ ID NO: 261663 - DNA, 75 bp, synthetic construct
  source 1..75: mol_type = other DNA
cgatgtgatcctgacgttgctggccgtctttatccttgccccgctgaatgaggaaatcctgttccgtggtgtcat

SEQ ID NO: 261664 - DNA, 75 bp, synthetic construct
  source 1..75: mol_type = other DNA
gacgccatcctctactgtccgccaacgtatggcatgtacagcgttagcgccgaaaccattggtgtcgaatgccgc

SEQ ID NO: 261665 - DNA, 75 bp, synthetic construct
  source 1..75: mol_type = other DNA
acctgctgatgaaagtgatcgccccctacccgctctcgacacctgtcgccgacattgcagctcaggcgttaagtc

SEQ ID NO: 261666 - DNA, 75 bp, synthetic construct
  source 1..75: mol_type = other DNA
ttttcgcaccctgctggagttaacgcgcggtaaggcgattgtggttgccgatgaagcctatatcgagttttgccc

SEQ ID NO: 261667 - DNA, 75 bp, synthetic construct
  source 1..75: mol_type = other DNA
ttgacagaagaactcaggcaacgcggcgttaacttccgcagcatgacggacaatattgatacatccacccccatg

SEQ ID NO: 261668 - DNA, 75 bp, synthetic construct
  source 1..75: mol_type = other DNA
ccacgctcagctgtccggtcgttttatgaggcgcggaactcctggacgaacgcgctctggatcggcgctggtcgc

SEQ ID NO: 261669 - DNA, 75 bp, synthetic construct
  source 1..75: mol_type = other DNA
ggccggatcgtccgccgccgcgcaagcgctggcgaacaatcagaccacctccaccgtggaagatggttccatcac

SEQ ID NO: 261670 - DNA, 75 bp, synthetic construct
  source 1..75: mol_type = other DNA
ccaccagaaatgctgttacgccagcatcttgagattttctctgccctgcaaaaacgtgatggcgatgcggtagaa

SEQ ID NO: 261671 - DNA, 75 bp, synthetic construct
  source 1..75: mol_type = other DNA
tcccgtacgtgcctgtggcgatatctccttttcgtcaacaacgctatatgaatatatagccccactttgtgagca

SEQ ID NO: 261672 - DNA, 75 bp, synthetic construct
  source 1..75: mol_type = other DNA
atggcaattaagcgtttttccgtcattcgtttcacctccagagggcgtgaatacgaaattgacgaacggctgatt

SEQ ID NO: 261673 - DNA, 75 bp, synthetic construct
  source 1..75: mol_type = other DNA
ttcgttttacctccagagggcgtgaatacgaagtcgacgaacgcctgattaccacaatcgacaaacaccgttcgg

SEQ ID NO: 261674 - DNA, 75 bp, synthetic construct
  source 1..75: mol_type = other DNA
aaagcaatgacactgcatttgcaggaaataagtgaatccgtgcagcaaatccgccaggaaaacagcgactggttt

SEQ ID NO: 261675 - DNA, 75 bp, synthetic construct
  source 1..75: mol_type = other DNA
tctgacgcagattgccgactgtcagcttgcgtgggacaccattgaaaacctgaaagcaactgttgaccgcgtgcg

SEQ ID NO: 261676 - DNA, 75 bp, synthetic construct
  source 1..75: mol_type = other DNA
aatgaagatgaaccgagaccatacggttccactatcggatgaggctatctcaattctggaaatgatgaagtccct

SEQ ID NO: 261677 - DNA, 75 bp, synthetic construct
  source 1..75: mol_type = other DNA
gggaatataccgtctaaatatttgctcaatgtgcgtatttatcggttgctgtcttccggtttaaccaaactggaa

SEQ ID NO: 261678 - DNA, 75 bp, synthetic construct
  source 1..75: mol_type = other DNA
tgaacagggcggtgatgcgcaaaccattatgcaggatctggcatggaaactgactaaccgcctgatccatgcgcc

SEQ ID NO: 261679 - DNA, 75 bp, synthetic construct
  source 1..75: mol_type = other DNA
cgtggctacgcgcacaaagcgccagcgaaaccattcgcgattatcgcagccaggctgaacaagttcgcgatgagt

SEQ ID NO: 261680 - DNA, 75 bp, synthetic construct
  source 1..75: mol_type = other DNA
atgtcattcagccattcttccctctccgcacaagtgaaatcacatctgacgtttcttcctgaagaaattcgccag

SEQ ID NO: 261681 - DNA, 75 bp, synthetic construct
  source 1..75: mol_type = other DNA
atgtcagcgatacaggggattgaaggggttatcagccagttacaggctacggcgatgagtgcgcgtgcacaggaa

SEQ ID NO: 261682 - DNA, 75 bp, synthetic construct
  source 1..75: mol_type = other DNA
acatttgtgcctgaggaaagggggtgtagtatctgaggcaacagaagtttgtgtggggggggcggtttattacca

SEQ ID NO: 261683 - DNA, 75 bp, synthetic construct
  source 1..75: mol_type = other DNA
atgacgctggtcgatctgcccggcattggtgaaacaccgcagcatgatcaggaataccgggcactttatcgtcag

SEQ ID NO: 261684 - DNA, 75 bp, synthetic construct
  source 1..75: mol_type = other DNA
agtctgtgtaatgccatttttcagtcccgtatctgcgccacacatcctctgaacggctgcacccgccaggctcat

SEQ ID NO: 261685 - DNA, 75 bp, synthetic construct
  source 1..75: mol_type = other DNA
ttcagtcccgtatctgcgccacacatcctctgaacggctgcacccgccaggctcatcgtcttaccctgcagttcg

SEQ ID NO: 261686 - DNA, 75 bp, synthetic construct
  source 1..75: mol_type = other DNA
actgccctgtactttcaccaggcatttttaccgcctcaacattgttcataacttcatgcggaacccttgccgcaa

SEQ ID NO: 261687 - DNA, 75 bp, synthetic construct
  source 1..75: mol_type = other DNA
gctatggcgtaaatatcagcctgattttctggagggtgaaagcaatgtgtaacgatccgaacgttacagaaagaa

SEQ ID NO: 261688 - DNA, 75 bp, synthetic construct
  source 1..75: mol_type = other DNA
tcgtccacagcgtggcagctacgtcaacaaaatttccatggcccaggtgcgaaacggcagttttatccgtcaggc

SEQ ID NO: 261689 - DNA, 75 bp, synthetic construct
  source 1..75: mol_type = other DNA
atgaaaacttatgccgttatcacactcgttaccgctgcatcgttgctgagtggctgtaacagcgaaccttccgaa

SEQ ID NO: 261690 - DNA, 75 bp, synthetic construct
  source 1..75: mol_type = other DNA
aggtcgtggagcagacgaatgccatcgttaaatccatagcgagaaacgatatcacgcctgacatgctgcggaagt

SEQ ID NO: 261691 - DNA, 75 bp, synthetic construct
  source 1..75: mol_type = other DNA
aattgctcaagggcaaaagcacatggtgcgaatctttctgattcatgctctatctttctgcgccgtcttttccgt

SEQ ID NO: 261692 - DNA, 75 bp, synthetic construct
  source 1..75: mol_type = other DNA
acccgggataagaatcatgcacagcaggcttttggtgacgccatcggccagagttttgacgctgccgttgccagg

SEQ ID NO: 261693 - DNA, 75 bp, synthetic construct
  source 1..75: mol_type = other DNA
gtgaacgcagaatgacgctggtcgatctgcccggcattggtgaaacaccgcagcatgatcaggaataccgggagc

SEQ ID NO: 261694 - DNA, 75 bp, synthetic construct
  source 1..75: mol_type = other DNA
gttcccttcatcatttccggtactccccgttgctgcgcctgcaggctggaaccttccggcactggtgtcactgat

SEQ ID NO: 261695 - DNA, 75 bp, synthetic construct
  source 1..75: mol_type = other DNA
tccggtctggatgttacatcttctgcgtaaagcccgtgatcgcattatccgcctgctggtcacactgtgggatcg

SEQ ID NO: 261696 - DNA, 75 bp, synthetic construct
  source 1..75: mol_type = other DNA
gttcccttcatcatttccagtactctccgttgctgcacctgtcggctggaaccttccggcgtttgtgtcgctgat

SEQ ID NO: 261697 - DNA, 75 bp, synthetic construct
  source 1..75: mol_type = other DNA
tttaccgtcagttactgccggaactggatctgattatctggatcctgcgggctgatgaacgtgcgtatgctgccg

SEQ ID NO: 261698 - DNA, 75 bp, synthetic construct
  source 1..75: mol_type = other DNA
gtggcgaaaaccggtcaacccgggacaagaatcatgcacagcaggcttttggtgacgccatcggccagagttttg

SEQ ID NO: 261699 - DNA, 75 bp, synthetic construct
  source 1..75: mol_type = other DNA
atgtcattcagccattcttccctctcctctcaagtcaaatcaaatctgacgtttcttcctgaagaaattcgccag

SEQ ID NO: 261700 - DNA, 75 bp, synthetic construct
  source 1..75: mol_type = other DNA
atcctgcacattacgaccgtttgcgtaacgaggggatgacgttggcgctaagcccggtgcggctggggcgcaatc

SEQ ID NO: 261701 - DNA, 75 bp, synthetic construct
  source 1..75: mol_type = other DNA
ttattcattacgagcccgtgattggcattatgggtaaatccggcaccggcaaaagcagcctgtgtaatgctattt

SEQ ID NO: 261702 - DNA, 75 bp, synthetic construct
  source 1..75: mol_type = other DNA
atgtcattcagccattcttccctctcctcgcaagttaaatcagatctgacgtttcttcctgaagaaattcgccag

SEQ ID NO: 261703 - DNA, 75 bp, synthetic construct
  source 1..75: mol_type = other DNA
atgtcattcagccattcttccctctcctcgcaagtaaaatcatatctgacgtttcttcctgaagaaattcgccag

SEQ ID NO: 261704 - DNA, 75 bp, synthetic construct
  source 1..75: mol_type = other DNA
cgttgtatcacggcgcggtactgcgcgtgcgcccgaaagcgatgacggtggcggtgattatcgccggtctgctgc

SEQ ID NO: 261705 - DNA, 75 bp, synthetic construct
  source 1..75: mol_type = other DNA
tatcgccctcgccggggtcgccgccgaatttggcgtggtgatgctgatgtatttacgtcacgccatagaggccga

SEQ ID NO: 261706 - DNA, 75 bp, synthetic construct
  source 1..75: mol_type = other DNA
tgcggccttgtccattttcaccgttatatggccattgagtcaggtggggggggagtttctgccgaagatcaatga

SEQ ID NO: 261707 - DNA, 75 bp, synthetic construct
  source 1..75: mol_type = other DNA
aggcgttgaaatcgtgaccacctacgatcgcagccagttgatcgaccgggcgattgataacctcagttccaaact

SEQ ID NO: 261708 - DNA, 75 bp, synthetic construct
  source 1..75: mol_type = other DNA
ttccgccggaaagcagtaacccgctcaatcgctttttgattcgtgtttatcatccgctgttgctgaaagtactgc

SEQ ID NO: 261709 - DNA, 75 bp, synthetic construct
  source 1..75: mol_type = other DNA
cttatctgttttttactggtaaaggtggtgtaggtaaaacctctatttcctgcgccacagcgatccgtcttgcag

SEQ ID NO: 261710 - DNA, 75 bp, synthetic construct
  source 1..75: mol_type = other DNA
ccctggtaaatttacccgccggtttatcgaccattccagcagataccctctttcttcaaccggtgaacatggttg

SEQ ID NO: 261711 - DNA, 75 bp, synthetic construct
  source 1..75: mol_type = other DNA
ctggcagatatgggattcgatgtgcatcttacaacctccgatcctgctgcccacattaacactaccctaaacggc

SEQ ID NO: 261712 - DNA, 75 bp, synthetic construct
  source 1..75: mol_type = other DNA
ctgcaaaaaaccgacaagctaattatgagcgtacctgaagtggcgcgggtatttggcaaaaccgggaaagcggaa

SEQ ID NO: 261713 - DNA, 75 bp, synthetic construct
  source 1..75: mol_type = other DNA
cccagcatgtttaattcccgcgttgaggaagaggaaaggctttttcgcgactgggatgcaatggttgataaccct

SEQ ID NO: 261714 - DNA, 75 bp, synthetic construct
  source 1..75: mol_type = other DNA
aactcatctggaacttgccgccatcggtcttaaaaatcagtatctggtcattaatggcgttcttccaaaaactga

SEQ ID NO: 261715 - DNA, 75 bp, synthetic construct
  source 1..75: mol_type = other DNA
accctgccgggtgtctctccggcagaagctgcagcgctcctgcagacaacagacaagttaatcaaaagcgttcct

SEQ ID NO: 261716 - DNA, 75 bp, synthetic construct
  source 1..75: mol_type = other DNA
tgctgcctcttcattgtggaagaaaaacattggtgtaaacgtcaaactggttaaccaggagtggaaaacgttcct

SEQ ID NO: 261717 - DNA, 75 bp, synthetic construct
  source 1..75: mol_type = other DNA
tgatgtacccgcaggcgtcacactggcggaaaaacaaacactggtacgtaacaatggttcagaagttcagtcatt

SEQ ID NO: 261718 - DNA, 75 bp, synthetic construct
  source 1..75: mol_type = other DNA
ctacatcaccaagagaagtttagtagcagctggcgttctggctgcgctaatggcagggaatgtcgcgctggcagc

SEQ ID NO: 261719 - DNA, 75 bp, synthetic construct
  source 1..75: mol_type = other DNA
cggttctagtataaccagtgcatgtcagcactcaactgctattgccaacgatgctgcaaatagcagtattatcga

SEQ ID NO: 261720 - DNA, 75 bp, synthetic construct
  source 1..75: mol_type = other DNA
agatgctttactggcaacttccgcattaactgacgatctggccgtcttctttattgctgatggcgtttttcagct

SEQ ID NO: 261721 - DNA, 75 bp, synthetic construct
  source 1..75: mol_type = other DNA
atgaaacgaattgcgtttgttttttctactgcacctcatggtacagctgctggccgtgaaggattagatgcttta

SEQ ID NO: 261722 - DNA, 75 bp, synthetic construct
  source 1..75: mol_type = other DNA
aagccatgaccgtggcggtgatcatcgcgggtctgctgccgatactctggggaaccggcgcaggttcagaagtca

SEQ ID NO: 261723 - DNA, 75 bp, synthetic construct
  source 1..75: mol_type = other DNA
atcagtggcgtcccggcatgacaattgacaagattattgatgaactcgacaggacagtccgtttaccgggtctgg

SEQ ID NO: 261724 - DNA, 75 bp, synthetic construct
  source 1..75: mol_type = other DNA
atcagtggcgtccaggcatgacgattgacaagattattgaagaactcgacaggaccgtccgtttaccggggctgg

SEQ ID NO: 261725 - DNA, 75 bp, synthetic construct
  source 1..75: mol_type = other DNA
atgctggttaataccagtaattataatgagggagtccaaaaaacaatgacctacatcaccaagagaagtttagta

SEQ ID NO: 261726 - DNA, 75 bp, synthetic construct
  source 1..75: mol_type = other DNA
tacccgctgagaccagtaatcccctcaaccggtggctgattaaggcgtatcaccccttactgctcagggtacttc

SEQ ID NO: 261727 - DNA, 75 bp, synthetic construct
  source 1..75: mol_type = other DNA
ttcgggcaaaaatgcacgcgaagtcattacggcggtgagggataaactggacacgctgaaggcaagcctgcctga

SEQ ID NO: 261728 - DNA, 75 bp, synthetic construct
  source 1..75: mol_type = other DNA
gcgccagtggctatatcggtcaacatctggtgcaaacgctcagccagcaagggcatcagatcctggcagcggcac

SEQ ID NO: 261729 - DNA, 75 bp, synthetic construct
  source 1..75: mol_type = other DNA
cgttcacgcaccacgcccattgcgctggaaaacttgttgcattatctggtggcgctgttagaccatccggccagc

SEQ ID NO: 261730 - DNA, 75 bp, synthetic construct
  source 1..75: mol_type = other DNA
aaagctgggactatcaaatttcgctcattttcaaaaatacaatgtgattttagcaatcatcttaatcgcaggatc

SEQ ID NO: 261731 - DNA, 75 bp, synthetic construct
  source 1..75: mol_type = other DNA
tgatcgctttcgatgacgcggtacgtcgcaccctgaaagaagaagaaaagctggtcaactccagcgactggggat

SEQ ID NO: 261732 - DNA, 75 bp, synthetic construct
  source 1..75: mol_type = other DNA
ttcggtgtggtttctcaatgtgattacttccgtaccgcccaccaccgccagggcgttgattcaggggctgaaaca

SEQ ID NO: 261733 - DNA, 75 bp, synthetic construct
  source 1..75: mol_type = other DNA
gtccccgttaagcaattaatctttctcagttcgttgcaggccccacctcatgagcagtctgatcatctgcgtgcc

SEQ ID NO: 261734 - DNA, 75 bp, synthetic construct
  source 1..75: mol_type = other DNA
acttttgataataattatttttctgatcgttttcaaggtattcctattggcggttatactaagatggttgaatgt

SEQ ID NO: 261735 - DNA, 75 bp, synthetic construct
  source 1..75: mol_type = other DNA
aggctaattatcaaggcaatgccgtaattaattatactgaaaaagatattccttttactaggataattgagcata

SEQ ID NO: 261736 - DNA, 75 bp, synthetic construct
  source 1..75: mol_type = other DNA
ttgatgaaactggtgcgaatgaagatataacgattataacaaaagaaataccagattcttggtctagagaaaaaa

SEQ ID NO: 261737 - DNA, 75 bp, synthetic construct
  source 1..75: mol_type = other DNA
catgtgcaccagtatggagcgcatatattccatacgaatgataaaaaaatttgggattatgtaaattcattcgtt

SEQ ID NO: 261738 - DNA, 75 bp, synthetic construct
  source 1..75: mol_type = other DNA
cgatatccagaccgcagcgttttgccttgtgtgcctgttatggccaacagcggcggtgacggttaaacggctgca

SEQ ID NO: 261739 - DNA, 75 bp, synthetic construct
  source 1..75: mol_type = other DNA
gcatttctgatgattgtagcgtggatgcttctggcgggtaactgggcgattttaccgggcgtgtggcaatgggcg

SEQ ID NO: 261740 - DNA, 75 bp, synthetic construct
  source 1..75: mol_type = other DNA
ggatcgcgcgataggtcacaaactggcgaaaggtcgccccgcacgggaatatctgcaaacaggcgatgcggtgga

SEQ ID NO: 261741 - DNA, 75 bp, synthetic construct
  source 1..75: mol_type = other DNA
atggacgaaaaacagttgcaggctctggctaacgaactggccaaaaatctcaaaacccctgaagatctcagccag

SEQ ID NO: 261742 - DNA, 75 bp, synthetic construct
  source 1..75: mol_type = other DNA
tttacatacgataataactattttaatgaccagtatcaaggaataccagtcggtggttacaataaattaatcgat

SEQ ID NO: 261743 - DNA, 75 bp, synthetic construct
  source 1..75: mol_type = other DNA
ttgataatttccaaggaaatgctgtagtaaattatacagaatataaaataccatacacgaggattattgagcata

SEQ ID NO: 261744 - DNA, 75 bp, synthetic construct
  source 1..75: mol_type = other DNA
cgttgtatgccaaagggatgaccacccgtgagatagccgctgtgttcaaagaactgtatgacgcagatgtttcac

SEQ ID NO: 261745 - DNA, 75 bp, synthetic construct
  source 1..75: mol_type = other DNA
ggcaatccgctggcgcagcaacacggtccgcgttacttcatgctcaacaaacctcagggctatgtttgttctacg

SEQ ID NO: 261746 - DNA, 75 bp, synthetic construct
  source 1..75: mol_type = other DNA
ggcaacccgctggcgcagcaacacggtccacgttacttcatgctcaataagcctcagggctatgtttgctccacg

SEQ ID NO: 261747 - DNA, 75 bp, synthetic construct
  source 1..75: mol_type = other DNA
aacggtgcagatatgaaacgctggctggcgaagctgaccaataataatgcacagggcgagtactacattaccgat

SEQ ID NO: 261748 - DNA, 75 bp, synthetic construct
  source 1..75: mol_type = other DNA
gcagcgtttaagcgaagtcgaaggtgtaaataaccgtctgcaactctcccgtctggagcgcgtttatcagtccga

SEQ ID NO: 261749 - DNA, 75 bp, synthetic construct
  source 1..75: mol_type = other DNA
acctatgacaataattattttaatgatcgatatcaaggaataccgatcggtggatataatagaataattgagaag

SEQ ID NO: 261750 - DNA, 75 bp, synthetic construct
  source 1..75: mol_type = other DNA
ccatctgattggtgtaaaggtgatgaaccttattatccaatcaacgataataagaataatgacttatatcagaaa

SEQ ID NO: 261751 - DNA, 75 bp, synthetic construct
  source 1..75: mol_type = other DNA
cgaaagccggtcatctgacttacctgggggatgcggaaattggcgataacgtcaacatcggcgcaggaaccatta

SEQ ID NO: 261752 - DNA, 75 bp, synthetic construct
  source 1..75: mol_type = other DNA
aaaaaagcgcgtctgggtaaaggctcgaaagccggtcatctgacttacctgggcgatgcggaaattggcgataac

SEQ ID NO: 261753 - DNA, 75 bp, synthetic construct
  source 1..75: mol_type = other DNA
tgcaatggcggtgaaatggcaaagcgggctgaacggtggcctggtggtggcaaatccgatcccggaacagtttgc

SEQ ID NO: 261754 - DNA, 75 bp, synthetic construct
  source 1..75: mol_type = other DNA
cagaagaacaaggggttatcgggaaagagagtacaccgttcctgttagctcgtgttgcgaaactgaccggcggcg

SEQ ID NO: 261755 - DNA, 75 bp, synthetic construct
  source 1..75: mol_type = other DNA
tttgcaagaactggcaaatactaatgtcaccgttgtttgtgccggggcgaaatctattctcgatttaggattaac

SEQ ID NO: 261756 - DNA, 75 bp, synthetic construct
  source 1..75: mol_type = other DNA
ggcaacgttatttcccgcagatcaaacacacccacaactgtcaacgacggatgaaaagtgatccacttatatctc

SEQ ID NO: 261757 - DNA, 75 bp, synthetic construct
  source 1..75: mol_type = other DNA
aaaatggctcgcccgcctggcagtaagctgtctcgttctcgccattctttcttttgttggcagccggggcatcgc

SEQ ID NO: 261758 - DNA, 75 bp, synthetic construct
  source 1..75: mol_type = other DNA
tcatttacaaacacttctgctggaacaccctgaactgcagttaatggaggcgaactatagccagaagcaaaagtc

SEQ ID NO: 261759 - DNA, 75 bp, synthetic construct
  source 1..75: mol_type = other DNA
cgttcttgaacgcagcccgacctactggaacaacgcgaaaaccgttattaaccaggtaacctatttgcctattgc

SEQ ID NO: 261760 - DNA, 75 bp, synthetic construct
  source 1..75: mol_type = other DNA
cctcgtggtgacgctgttttgtttcaactttatcggcgatggcttgcgtgatgccctcgacccgaaagatcgtta

SEQ ID NO: 261761 - DNA, 75 bp, synthetic construct
  source 1..75: mol_type = other DNA
attactatgtgaacgcgcgtctggtgaaaccgtgggttggggggtataccggcaaagatccgctggataatacct

SEQ ID NO: 261762 - DNA, 75 bp, synthetic construct
  source 1..75: mol_type = other DNA
cgtgttgcggagctaacaggcggtgatagcctgaaatccaatattcaactggtctttaataacgccattctggcg

SEQ ID NO: 261763 - DNA, 75 bp, synthetic construct
  source 1..75: mol_type = other DNA
atggttattagtattcgccgctcacggcatgaggaaggggaagaactcgttgcgatttggtgtcgttctgtcgat

SEQ ID NO: 261764 - DNA, 75 bp, synthetic construct
  source 1..75: mol_type = other DNA
gcgctttgcgatgtgcagcaccagtaaagtgatggccgtggccgcggtgctgaagaaaagtgaaagcgaaccgaa

SEQ ID NO: 261765 - DNA, 75 bp, synthetic construct
  source 1..75: mol_type = other DNA
ccactacagattgcactaaacaaggataaacagattcagcaagagatggaatcagcagatcaaggagagattgca

SEQ ID NO: 261766 - DNA, 75 bp, synthetic construct
  source 1..75: mol_type = other DNA
caagccagggtgagcgaactgaaatccgtttcttcacgaaatatggcgaaacagctcggtattagccagtcgagt

SEQ ID NO: 261767 - DNA, 75 bp, synthetic construct
  source 1..75: mol_type = other DNA
cgagcaaaaaattgctgactttctgcgggccaacgtgagtgagctgaaatccgtctcttcgcgcaagatggcgaa

SEQ ID NO: 261768 - DNA, 75 bp, synthetic construct
  source 1..75: mol_type = other DNA
atgcggaaagtgaatttaccgagaacgagcaaaaaattgctgactttctgcgggccaacgtgagtgagctgaaat

SEQ ID NO: 261769 - DNA, 75 bp, synthetic construct
  source 1..75: mol_type = other DNA
gaaaacccgcactctgttcaacgtgctggggccattgattaacccggcgcatccgccgctggcgttaattggtgt

SEQ ID NO: 261770 - DNA, 75 bp, synthetic construct
  source 1..75: mol_type = other DNA
atatcatttttggtggacggcttggggagtataaatattacgatatgcatcaagtaattaaatcggcattaaatt

SEQ ID NO: 261771 - DNA, 75 bp, synthetic construct
  source 1..75: mol_type = other DNA
cataaatatggggcgcatatattccatacaaatgataaagatatatggaattatgttaatagttttgttgagttt

SEQ ID NO: 261772 - DNA, 75 bp, synthetic construct
  source 1..75: mol_type = other DNA
accgtaccgattgcgctgtttatgggtatctacatgcgctttatccgtccggggcgtgtgggtgaagtctctgtc

SEQ ID NO: 261773 - DNA, 75 bp, synthetic construct
  source 1..75: mol_type = other DNA
gcattatgacgcaatggtgtagcaggagcgtttattccgttgagggtattagcccggacggtcaatatttagcgt

SEQ ID NO: 261774 - DNA, 75 bp, synthetic construct
  source 1..75: mol_type = other DNA
cgaatgcgttatcggtcattaacgtggcgacaggggagattattcagtcgattaccaccggtgcacatcctgaca

SEQ ID NO: 261775 - DNA, 75 bp, synthetic construct
  source 1..75: mol_type = other DNA
aatggcatggtgatggcggtgcgccatgatgcggatcgcgtttgtggattccagttccatccggaatccattctt

SEQ ID NO: 261776 - DNA, 75 bp, synthetic construct
  source 1..75: mol_type = other DNA
cctgttcctgatgatcgttctgccgctgtggtgtggtttacaccgtatgcaccacgcgatgcacgatctgaaaat

SEQ ID NO: 261777 - DNA, 75 bp, synthetic construct
  source 1..75: mol_type = other DNA
attgccaacatgaaccacatcgttgtaaacaactacaccaacgcaggcctgagtattctgttcctgattgtggtg

SEQ ID NO: 261778 - DNA, 75 bp, synthetic construct
  source 1..75: mol_type = other DNA
tgcgtaacagcttgaaatacgtatcatggaaagattacaaggcggtcactcaggatttaaaagccgtttatcagt

SEQ ID NO: 261779 - DNA, 75 bp, synthetic construct
  source 1..75: mol_type = other DNA
ggatagccatgagtcgctttattatcgagttcggtgactgttgtggtcaactaaaactggccaccgcgttagagt

SEQ ID NO: 261780 - DNA, 75 bp, synthetic construct
  source 1..75: mol_type = other DNA
acggacatccgaaaagtggtctatacgacgaattccatcgagtcgctaaacagcgtgatccgccatgcgatcaaa

SEQ ID NO: 261781 - DNA, 75 bp, synthetic construct
  source 1..75: mol_type = other DNA
gtgttacagacggcattggctttacgcttacgcatccagttatgcatcgtgcatatggtgcgcaacagcctgcgc

SEQ ID NO: 261782 - DNA, 75 bp, synthetic construct
  source 1..75: mol_type = other DNA
cgtgtcatggaaggactacaaagccgtcactcgcgacctgaaagcgatttatcaggctcccacggaagaggcagg

SEQ ID NO: 261783 - DNA, 75 bp, synthetic construct
  source 1..75: mol_type = other DNA
cggcactgatatcaaaggtcaccgatgccgtgatggagcaggttgtagaatggcaaaaccgaccgtcggatgctg

SEQ ID NO: 261784 - DNA, 75 bp, synthetic construct
  source 1..75: mol_type = other DNA
gaaagaactgctgggtatgtggctggccgaaaatgaaggggcgaagttctggctcaatgtgctgactgaactgaa

SEQ ID NO: 261785 - DNA, 75 bp, synthetic construct
  source 1..75: mol_type = other DNA
tacccgcaaatcagcaagagctggcgcacacactgggaaaatctcaacaccttcttcggttacccaccggatatc

SEQ ID NO: 261786 - DNA, 75 bp, synthetic construct
  source 1..75: mol_type = other DNA
atacgacgaatgccatcgagtcgctaaacagcgtgatccgccatgcgatcaaaaagcgtaaagtgttcccgatag

SEQ ID NO: 261787 - DNA, 75 bp, synthetic construct
  source 1..75: mol_type = other DNA
gctgtgcatcgtgcatatggtgcgcaacagcctgcggttcgtttcctggaaggactacaaagccgtcacccgcga

SEQ ID NO: 261788 - DNA, 75 bp, synthetic construct
  source 1..75: mol_type = other DNA
ttatcgataaagaatttggcgttcaaccgcagcagttgcccgattactgggggcttgcggggatcagcagttcaa

SEQ ID NO: 261789 - DNA, 75 bp, synthetic construct
  source 1..75: mol_type = other DNA
tggcaaaaccgaccactggatgctgtttaccccattgtttattttgactgtattgtcctgaaagttcggcagaac

SEQ ID NO: 261790 - DNA, 75 bp, synthetic construct
  source 1..75: mol_type = other DNA
attcagctctgcatcatccatatggtgcgcaacagcctgaaattcgtgtcgtggaaggattacaaagccgtcacc

SEQ ID NO: 261791 - DNA, 75 bp, synthetic construct
  source 1..75: mol_type = other DNA
ttattatatttttgcttttcgttattcctggttttataagtatgaaagtttatagtgttattcatcctaataccg

SEQ ID NO: 261792 - DNA, 75 bp, synthetic construct
  source 1..75: mol_type = other DNA
taatgctcgtggcggttggctctcaccccgtctttgctgcccaatgccagttcgggtcctgcaacgctgacactg

SEQ ID NO: 261793 - DNA, 75 bp, synthetic construct
  source 1..75: mol_type = other DNA
gcgccggtaaggcagctgaaagccattcgccccgagctggtacaaaaccccataatcctgcccgtcgtcgcgttt

SEQ ID NO: 261794 - DNA, 75 bp, synthetic construct
  source 1..75: mol_type = other DNA
agaagtggaactggccacactcacgtgggtgggctggtataacaatcgacgattgctggaaaggctgggccatac

SEQ ID NO: 261795 - DNA, 75 bp, synthetic construct
  source 1..75: mol_type = other DNA
tttcaccaactctacgcattcgcgattactttcagaaacgctggctggacgcaccgtttattgataaagaatttg

SEQ ID NO: 261796 - DNA, 75 bp, synthetic construct
  source 1..75: mol_type = other DNA
gatatggccaaaaacgtggcgggagatgctgcagaagtctcatccataaccaagcctggtgcagaaattcatgag

SEQ ID NO: 261797 - DNA, 75 bp, synthetic construct
  source 1..75: mol_type = other DNA
tctcaacaccttcttcggttacccaccggatatccgcaaggccatctacacgacgaatgccatcgaatcgctgaa

SEQ ID NO: 261798 - DNA, 75 bp, synthetic construct
  source 1..75: mol_type = other DNA
cgaaaaaatggcgtatgccgatccagaactggcggctggcaatgagtcgttttattatcgagttcggtgaccgcc

SEQ ID NO: 261799 - DNA, 75 bp, synthetic construct
  source 1..75: mol_type = other DNA
actaaaaaaccgcggcctgaacgatattctcatagcctgtgtcgatgggctgaaaggcttcccggacgctatcaa

SEQ ID NO: 261800 - DNA, 75 bp, synthetic construct
  source 1..75: mol_type = other DNA
cacctacggttctgcaaatcgggtaaatttccacgacgatatgttcctgtacggttttggctacaacttcaccgg

SEQ ID NO: 261801 - DNA, 75 bp, synthetic construct
  source 1..75: mol_type = other DNA
atgcgtggactgattgcgcccgccagcaaagaaagtcgtattccaaaatcgatatatgaaggtattcagaccatt

SEQ ID NO: 261802 - DNA, 75 bp, synthetic construct
  source 1..75: mol_type = other DNA
actcggtgcgaaaagtgatttatctggcgatacagtcggcgtcaaaaaatggagtatgccaatccagaactggcg

SEQ ID NO: 261803 - DNA, 75 bp, synthetic construct
  source 1..75: mol_type = other DNA
tacggtcagcaaaatcgaccagttgcgtaaagatattgatgcgattgtggctgaaattgaaggctgcgaggtgca

SEQ ID NO: 261804 - DNA, 75 bp, synthetic construct
  source 1..75: mol_type = other DNA
cggcgagttctttacaccgcagcacgtctctaagctgattgcacaactggctatgcacgggcagacccacgttaa

SEQ ID NO: 261805 - DNA, 75 bp, synthetic construct
  source 1..75: mol_type = other DNA
aattacaccgtcagatatgggctattgcgaacgaggttcgcggtgccgttgacggatgggactttaaacaatacg

SEQ ID NO: 261806 - DNA, 75 bp, synthetic construct
  source 1..75: mol_type = other DNA
agctacaccgtcaaatctgggccattgccaatgatgtcagaggttcagtagatggatgggattttaaacagtatg

SEQ ID NO: 261807 - DNA, 75 bp, synthetic construct
  source 1..75: mol_type = other DNA
cagcaaggaagatgttgctcatctggcaaaatctgtcgcgtttgaagccgttgtcgcgaatgactataacctgtc

SEQ ID NO: 261808 - DNA, 75 bp, synthetic construct
  source 1..75: mol_type = other DNA
atcagccggttgggtttatgttgttaagtgggcagcatatggatgcgctgtttatcgatcctgatgtgcgcggct

SEQ ID NO: 261809 - DNA, 75 bp, synthetic construct
  source 1..75: mol_type = other DNA
aacaatatcctgaccgatgcccatatcgaacagattatgcaggtatttgccagcaaggaagatgttgcccatctg

SEQ ID NO: 261810 - DNA, 75 bp, synthetic construct
  source 1..75: mol_type = other DNA
gccttggtctggttcccatggcttttccgcaaatgtcttatgccgagtttaaagggggctttgctgacattggtc

SEQ ID NO: 261811 - DNA, 75 bp, synthetic construct
  source 1..75: mol_type = other DNA
atgaccgcgcaagtgcatattcagctcaccgatgtgaaaaatgtgctgacgatccctctgtcggcgttaggcgat

SEQ ID NO: 261812 - DNA, 75 bp, synthetic construct
  source 1..75: mol_type = other DNA
aggcgcaacgattgccgctggcaccacagtcacgcgcaatgtcggtgaaaatgccctggcaatcagccgtgtgcc

SEQ ID NO: 261813 - DNA, 75 bp, synthetic construct
  source 1..75: mol_type = other DNA
tcgaacagattatgcaggtatttgccagcaaggaagatgttgctcatctggcgaaatctgtcgcgtttgaagccg

SEQ ID NO: 261814 - DNA, 75 bp, synthetic construct
  source 1..75: mol_type = other DNA
tgccaatgatgtcagaggctccgtagatggatgggattttaagcaatacgttctgggcgcacttttctaccgttt

SEQ ID NO: 261815 - DNA, 75 bp, synthetic construct
  source 1..75: mol_type = other DNA
gccatcaggactaaaggctatttcatttacccgagccagctgttctgcaacgttgccgctaaagcgaacaccaac

SEQ ID NO: 261816 - DNA, 75 bp, synthetic construct
  source 1..75: mol_type = other DNA
ctatgacccggcaagcaataatgaattggcacaggtgatttatcaggcaatggaaagctaccagagcccgtggca

SEQ ID NO: 261817 - DNA, 75 bp, synthetic construct
  source 1..75: mol_type = other DNA
ggcttatgtcgcctcgacgcttccggccgttcgtgcggcagtgaaagccggtcttggcgtgacggcaaggccggt

SEQ ID NO: 261818 - DNA, 75 bp, synthetic construct
  source 1..75: mol_type = other DNA
atggtgctggcgacgcttaataaagcagatattccctggcgactggcttatgtcgcctcgacgcttccggccgtt

SEQ ID NO: 261819 - DNA, 75 bp, synthetic construct
  source 1..75: mol_type = other DNA
tggtccgccagcggcaacgaagccgatgacttagccgccacgctggcggtcaaagtgacacaaggccgggcatca

SEQ ID NO: 261820 - DNA, 75 bp, synthetic construct
  source 1..75: mol_type = other DNA
atggttattagtattcgccgctcacggcatgaggaaggggaagagctggttgcaatttggtgtcgttctgtcgat

SEQ ID NO: 261821 - DNA, 75 bp, synthetic construct
  source 1..75: mol_type = other DNA
cgtgctgcagtaaaagcgggtcttggcgtgacggcaagaccggttgagatgatgagtccggatctgcgcgttttg

SEQ ID NO: 261822 - DNA, 75 bp, synthetic construct
  source 1..75: mol_type = other DNA
cacagtcagcaacatagaccagttacgcaaagatattgatgcgattgtggctgaaattgaaagctgcgaggtgca

SEQ ID NO: 261823 - DNA, 75 bp, synthetic construct
  source 1..75: mol_type = other DNA
gacatcaaaggcctctttgccgatttcgatacaaccagcaatcgactgggtaacacagttaaagacaaaaacagc

SEQ ID NO: 261824 - DNA, 75 bp, synthetic construct
  source 1..75: mol_type = other DNA
gaaattatcgatattgctgagctgaatgcggaactgaaaaccacggtcagcaaaatcaaccagttgcgtaaagat

SEQ ID NO: 261825 - DNA, 75 bp, synthetic construct
  source 1..75: mol_type = other DNA
ccactgttctgggtgagctgatagatctgattggcaacattgcactaggagatgccaaagcacgctctgctgacg

SEQ ID NO: 261826 - DNA, 75 bp, synthetic construct
  source 1..75: mol_type = other DNA
aaacagacccgttagaggtcatcctgtggaaagcggcagacaaactgcgtaaaaacattgatgcagccgagtaca

SEQ ID NO: 261827 - DNA, 75 bp, synthetic construct
  source 1..75: mol_type = other DNA
tcgataccaccagtaaccgcctgggtaacaccgttaaagataaaaatgcccgcctggctgcggttctgaaagggg

SEQ ID NO: 261828 - DNA, 75 bp, synthetic construct
  source 1..75: mol_type = other DNA
atgtacccgcaggtgtcacactggcggaaaaaacaaacgctggtacgtaacaatggttcagaagttcagtcatta

SEQ ID NO: 261829 - DNA, 75 bp, synthetic construct
  source 1..75: mol_type = other DNA
taacggttggtaggaagcttcacggcgctggtgctaatgcgttctacgaaggaatagacaacgagggcaatatga

SEQ ID NO: 261830 - DNA, 75 bp, synthetic construct
  source 1..75: mol_type = other DNA
cgattgattacttcaatgttcaggacaagatggctggtcgtgaaattgatcgaggcaggctggcagagacaatcc

SEQ ID NO: 261831 - DNA, 75 bp, synthetic construct
  source 1..75: mol_type = other DNA
cgaggcgctaacagcgcgtggtcagaatatcacgatgcgcggtcaggatttatcgatgcagagagcatcaatgaa

SEQ ID NO: 261832 - DNA, 75 bp, synthetic construct
  source 1..75: mol_type = other DNA
gttaacgtcagcatatgcaccaacagccgcaatgcagaattacaatcaatacgcgcaaatgttaaaggcggatcc

SEQ ID NO: 261833 - DNA, 75 bp, synthetic construct
  source 1..75: mol_type = other DNA
aaatctcagcggcagcaatctcaacctgcacaggtatcacagccagcagccagcagtaacttttcttcactatgg

SEQ ID NO: 261834 - DNA, 75 bp, synthetic construct
  source 1..75: mol_type = other DNA
gcgcagaattacgaaatgaagaaagatcttgatgcaatttctggcgcatcaattgacgatcttggcttcatgaca

SEQ ID NO: 261835 - DNA, 75 bp, synthetic construct
  source 1..75: mol_type = other DNA
gcgatgacgtataccaaaagcaaaacgtttaaaaccgaatctggcgcgcatcgctggctggaaagaaattcaggt

SEQ ID NO: 261836 - DNA, 75 bp, synthetic construct
  source 1..75: mol_type = other DNA
taccccggcgttaaggggaaatgaggtcaacatggatacgctcaatcttggcaacaacgaatctctggtgtacgg

SEQ ID NO: 261837 - DNA, 75 bp, synthetic construct
  source 1..75: mol_type = other DNA
acaaatccctggtgtgcggtgtgttccccaaccaggatggaacgttcaccgcgatgacgtatacaaaaagcaaaa

SEQ ID NO: 261838 - DNA, 75 bp, synthetic construct
  source 1..75: mol_type = other DNA
acgaatctctggtgtgcggcgtgttccctaaccaggatggaacgtttaccgccatgacgtataccaaaagcaaaa

SEQ ID NO: 261839 - DNA, 75 bp, synthetic construct
  source 1..75: mol_type = other DNA
accgcgatgacgtataccaaaagcaaaacgtttaaaaccgaagctagcgcgcgtcgctggttatccagaaatact

SEQ ID NO: 261840 - DNA, 75 bp, synthetic construct
  source 1..75: mol_type = other DNA
actatgcagcaggttcttgttccgctaccccggcgttaaggggaaatgaggtcaacatggatactatcgatcttg

SEQ ID NO: 261841 - DNA, 75 bp, synthetic construct
  source 1..75: mol_type = other DNA
gagacaatccgcagcaataaagctggggaaggtttacaggcgcaaagcattgctgttagccgtgaaaactccctg

SEQ ID NO: 261842 - DNA, 75 bp, synthetic construct
  source 1..75: mol_type = other DNA
atgaatacaaaccagtgggatatcagcgtctggtcgacgagttaaccatgctggtaaagcagttaacctggcaac

SEQ ID NO: 261843 - DNA, 75 bp, synthetic construct
  source 1..75: mol_type = other DNA
attttggttgttctggtgataagggagatcaacttacacagatgctttcattccttacgaaagacgaacgagaac

SEQ ID NO: 261844 - DNA, 75 bp, synthetic construct
  source 1..75: mol_type = other DNA
gaaaacactgatgtggttgaagtcgggagcaccgaaaacacggcggatgataccgacgctgcgctgaaaaaaacg

SEQ ID NO: 261845 - DNA, 75 bp, synthetic construct
  source 1..75: mol_type = other DNA
ggttactggatttcctggatggcgtgatgttcagaaaaaactggagagacaattgcaggataagaagaatgaata

SEQ ID NO: 261846 - DNA, 75 bp, synthetic construct
  source 1..75: mol_type = other DNA
gctgctgcggctgaggcagcattggcaaaagcgaaatctcagcgtgatgccctgactcaacgtctcaaggatatt

SEQ ID NO: 261847 - DNA, 75 bp, synthetic construct
  source 1..75: mol_type = other DNA
aaccaagtcgctacgttcattgaaaatatatcgattataaaagagtatgactcatcaattcttcgtcgtgacgca

SEQ ID NO: 261848 - DNA, 75 bp, synthetic construct
  source 1..75: mol_type = other DNA
cgcagcctcaagtacaaccaagcgcattatgcgcctcgcgctacaccgttccgcatcaatacgacagctcagggg

SEQ ID NO: 261849 - DNA, 75 bp, synthetic construct
  source 1..75: mol_type = other DNA
aacaatttcagaagtgaatcgtacgattacctgcaaacggtgtggattggctttagatccgttcgagcttgttct

SEQ ID NO: 261850 - DNA, 75 bp, synthetic construct
  source 1..75: mol_type = other DNA
ttaccgccgggagcacgcccaaaggcatgtacgaatatctcatcactctggttaaaggtaagccctggtacgata

SEQ ID NO: 261851 - DNA, 75 bp, synthetic construct
  source 1..75: mol_type = other DNA
acgagatatcaaatagctgcgcattattatttttacaggcctcaggtaagaaaatattgcaagacttaatgaata

SEQ ID NO: 261852 - DNA, 75 bp, synthetic construct
  source 1..75: mol_type = other DNA
acgagctaccaaatagctgcgcattattatttttacaggcttcaggtaaaagaatattacaggacttaatgagta

SEQ ID NO: 261853 - DNA, 75 bp, synthetic construct
  source 1..75: mol_type = other DNA
actatccatttcctggaaaacagcatatgttactcttagatattccggttgatgttgttgaggaaggttggtgga

SEQ ID NO: 261854 - DNA, 75 bp, synthetic construct
  source 1..75: mol_type = other DNA
gcaacagcgaatctctggtgtacggcgtgtttcccaaccaggacggcacgttcaccgcgatgacgtataccaaaa

SEQ ID NO: 261855 - DNA, 75 bp, synthetic construct
  source 1..75: mol_type = other DNA
gggatcggccggttgggtttatgttgctaagtgggcagcatatggatgcgctgtttatcgatcctgatgtgcgcg

SEQ ID NO: 261856 - DNA, 75 bp, synthetic construct
  source 1..75: mol_type = other DNA
aaaccaaaagtagaaaaggcggtgacggtaaaagaatgcattggcggacttcctccattaaaggcaggtcaaacg

SEQ ID NO: 261857 - DNA, 75 bp, synthetic construct
  source 1..75: mol_type = other DNA
ttatcacctcacacaaaccaaaaacacgcaagattccaaagtggtgtattgaccgtatcccttctgatgctcaaa

SEQ ID NO: 261858 - DNA, 75 bp, synthetic construct
  source 1..75: mol_type = other DNA
caagattccaaagtggtgtattgaccgtattccttctgatgctcaaattataggtgaaacggaactacattatct

SEQ ID NO: 261859 - DNA, 75 bp, synthetic construct
  source 1..75: mol_type = other DNA
ttaagaattaaaaacaaacgtcaagttatcacctcacacaaaccaaaaacacgcaagattccaaagtggtgtatt

SEQ ID NO: 261860 - DNA, 75 bp, synthetic construct
  source 1..75: mol_type = other DNA
tcggcctaccgcttgggctcagtagtgtttcatcagcctgagagtaataaagaacatagactggatatcgtcgat

SEQ ID NO: 261861 - DNA, 75 bp, synthetic construct
  source 1..75: mol_type = other DNA
agggggaggtggatctcttcaagggggtcaacctagatcgggtagggcatcatccttacgtggagtcgctgcgca

SEQ ID NO: 261862 - DNA, 75 bp, synthetic construct
  source 1..75: mol_type = other DNA
cgtgttccccaaccaggacggcacgtttaccgcgatgacgtataccagaagcaaaacgtttaaaactgaagctgg

SEQ ID NO: 261863 - DNA, 75 bp, synthetic construct
  source 1..75: mol_type = other DNA
atactcaaaagccgttaatgattcagggtgtggtccttgatgaaatggcagctaagatactcataacgttaaatt

SEQ ID NO: 261864 - DNA, 75 bp, synthetic construct
  source 1..75: mol_type = other DNA
atcttgaccagattggtcagttcccttacgtggaatctttgcgtatggctcaccattttgtggatgactataaca

SEQ ID NO: 261865 - DNA, 75 bp, synthetic construct
  source 1..75: mol_type = other DNA
ggataagtacgtgctggaaaataatctgctccgagtaatcaaagaagccagagtaccttgtgatgtgctatctat

SEQ ID NO: 261866 - DNA, 75 bp, synthetic construct
  source 1..75: mol_type = other DNA
atgattgatttaacagaacgctatgaaactattcggtctgtttgtgaaagcttaaagttacaaaataagccaacc

SEQ ID NO: 261867 - DNA, 75 bp, synthetic construct
  source 1..75: mol_type = other DNA
atggatacgctcaatcttggcaacaatgaatctctggttttcggcgtgttcccaaaccaggacggtacgttcacc

SEQ ID NO: 261868 - DNA, 75 bp, synthetic construct
  source 1..75: mol_type = other DNA
caaaacccacaaccgaagattcatcgcgcacaaacgcgcattcagcaattggaatatcgtctggcagaaaccctg

SEQ ID NO: 261869 - DNA, 75 bp, synthetic construct
  source 1..75: mol_type = other DNA
catcgtttacagcagcaacatccgcagttacgtctggcgcgccagcaaaccatgctggagcggctgcaaaagcgg

SEQ ID NO: 261870 - DNA, 75 bp, synthetic construct
  source 1..75: mol_type = other DNA
atgcaaaaaatcgacctcggcaacaacgaatccctggtgtgtggcgtgttccccaaccaggatggaacgttcacc

SEQ ID NO: 261871 - DNA, 75 bp, synthetic construct
  source 1..75: mol_type = other DNA
acgaatctctggtatgtggtgtgttccccaaccaggacggcacattcaccgcgatgacgtataccaaaagtaaaa

SEQ ID NO: 261872 - DNA, 75 bp, synthetic construct
  source 1..75: mol_type = other DNA
gcaacaacgaatctctggtgtgcggcgtgtttcccaaccaggacggcacgttcaccgcgatgacgtataccaaaa

SEQ ID NO: 261873 - DNA, 75 bp, synthetic construct
  source 1..75: mol_type = other DNA
aagagatattcggctccttccgtgttattctgcagatacacaaaaaataacgtcaatctctccatttagtggcaa

SEQ ID NO: 261874 - DNA, 75 bp, synthetic construct
  source 1..75: mol_type = other DNA
aatgctcaaaaagtcaaataaataatactgtattaaaagaactattggtagtcaaaccaagcgcatctcttaact

SEQ ID NO: 261875 - DNA, 75 bp, synthetic construct
  source 1..75: mol_type = other DNA
tttctatcctgataatttttgctgcccgaattctggcgcgtagcctgcgtgatgtgccagtcgtactaatggtaa

SEQ ID NO: 261876 - DNA, 75 bp, synthetic construct
  source 1..75: mol_type = other DNA
tttttaccgttagccgcctgaatcaaacggttcgtctgctgcttgagcaggagatgggacaggtgtggatcagcg

SEQ ID NO: 261877 - DNA, 75 bp, synthetic construct
  source 1..75: mol_type = other DNA
acgaatctctggtatgtggtgtgttccccaaccaggacggtacgttcaccgcgatgacgtataccaaaagcaaaa

SEQ ID NO: 261878 - DNA, 75 bp, synthetic construct
  source 1..75: mol_type = other DNA
atgaatctctggtgtgcggcgtcttccccaaccaggacggcacgtttaccgcgatgacgtataccaaaagtaaaa

SEQ ID NO: 261879 - DNA, 75 bp, synthetic construct
  source 1..75: mol_type = other DNA
tcagacagaccggggaagagagttttttgccgttaaggtgcaggaaagactgaaagaatacggcatcaagtttcg

SEQ ID NO: 261880 - DNA, 75 bp, synthetic construct
  source 1..75: mol_type = other DNA
atgccgatggagcgctactttgaacttgctgagaaaacgccatactcggatgccgttcacgcaaactatcagccc

SEQ ID NO: 261881 - DNA, 75 bp, synthetic construct
  source 1..75: mol_type = other DNA
tcaattacacattactaaacactgatttcggtgatgcagagatctgtattctcacgtctggaagcaacaatgcct

SEQ ID NO: 261882 - DNA, 75 bp, synthetic construct
  source 1..75: mol_type = other DNA
atctaccggtgcgcagtgagcaaggaacgatggcgatgacacatatggcgagtgcactgatgcgtatcgccgtgg

SEQ ID NO: 261883 - DNA, 75 bp, synthetic construct
  source 1..75: mol_type = other DNA
acgacttcattcaatctcactggcaatagcaacaatccacaaagtcctttgccagaatcaggttaaacctgttgt

SEQ ID NO: 261884 - DNA, 75 bp, synthetic construct
  source 1..75: mol_type = other DNA
gatcagactaatgaagagcggatgcaggaaaactcgccgctttatacaatggcgaactccctcgaagatgccctc

SEQ ID NO: 261885 - DNA, 75 bp, synthetic construct
  source 1..75: mol_type = other DNA
tttgaggaaaccattttatcaatccatgaatatgtttttggaaatagaaagtgttctttcgaaattaaggcgaca

SEQ ID NO: 261886 - DNA, 75 bp, synthetic construct
  source 1..75: mol_type = other DNA
catcatttagagcgatgctggggcctctgatacgcgatgaacgatctgaatttaaatctattgttgagtgcttcg

SEQ ID NO: 261887 - DNA, 75 bp, synthetic construct
  source 1..75: mol_type = other DNA
agcagaatggtcatcttagaaacattaaaacattgttccttgcatacgaaaaaaagctggaagaactttcacagc

SEQ ID NO: 261888 - DNA, 75 bp, synthetic construct
  source 1..75: mol_type = other DNA
atggctattcagatcacgcagttacatcaggcagatattttcgggtatatcgcggacatgctggaaacagcgaga

SEQ ID NO: 261889 - DNA, 75 bp, synthetic construct
  source 1..75: mol_type = other DNA
gagtttgaacaggttgctgacctctacaaaatgcaatttgatgacggtcgcacttgtgcctttcacactgatgcg

SEQ ID NO: 261890 - DNA, 75 bp, synthetic construct
  source 1..75: mol_type = other DNA
gtccataatggtcgtcagcacgttccggtatttgtaaccgacgaaatggttggtcacaaactgggtgaattcgca

SEQ ID NO: 261891 - DNA, 75 bp, synthetic construct
  source 1..75: mol_type = other DNA
tctgaaagcttataacaaagaggcgctgaaggcatggtcagccacaaccggtgactctgaggatgacatattact

SEQ ID NO: 261892 - DNA, 75 bp, synthetic construct
  source 1..75: mol_type = other DNA
gcgtaacaatggttctgaagttcagtcattagatccgcacaaaattgaaggggttccggagtctaatatcagtcg

SEQ ID NO: 261893 - DNA, 75 bp, synthetic construct
  source 1..75: mol_type = other DNA
gcgtaaagatgcgaaatggtctgatggcacgccagtcactgcgcaagactttgtatatagttggcaacgttctgt

SEQ ID NO: 261894 - DNA, 75 bp, synthetic construct
  source 1..75: mol_type = other DNA
tgtttctcgcgcagctcgattatgctgatattgaacaatatggcgaaggaatgctttatgcgtttatctgcctgg

SEQ ID NO: 261895 - DNA, 75 bp, synthetic construct
  source 1..75: mol_type = other DNA
gcatatcgccggtattgatgaaattctcgaagggaaaaaaccgattaccgatctcggcgtgaaagccgtcgatga

SEQ ID NO: 261896 - DNA, 75 bp, synthetic construct
  source 1..75: mol_type = other DNA
tctgttgatccgaacaccgcttctccctatgccagttatctacaatatgggcatatcgccggtattgatgaaatt

SEQ ID NO: 261897 - DNA, 75 bp, synthetic construct
  source 1..75: mol_type = other DNA
gcggaaacgctgaaagtgactgacgaggcgcagcgtacagctctgtacactaaagcagaacaacagctggataag

SEQ ID NO: 261898 - DNA, 75 bp, synthetic construct
  source 1..75: mol_type = other DNA
aggcgttgtcgatcgaaatagacctgaatctgccagcccagcgagtggtttgtgtactcgacaggatcgcggcca

SEQ ID NO: 261899 - DNA, 75 bp, synthetic construct
  source 1..75: mol_type = other DNA
aaatagaccttaatttaccagctcagcgagtggttcgtgtcctcgacaggatcgcagcaaaccggggatatcccg

SEQ ID NO: 261900 - DNA, 75 bp, synthetic construct
  source 1..75: mol_type = other DNA
accgcgcagtttgccatgagcttacgccaggcctgcaggacattgtcgctgagcaggacggtatttcgttatcag

SEQ ID NO: 261901 - DNA, 75 bp, synthetic construct
  source 1..75: mol_type = other DNA
cgatattgaacaatatggcgaagggataatttacgcgtttatctgcccggagtgccggacaacggcaacgtctta

SEQ ID NO: 261902 - DNA, 75 bp, synthetic construct
  source 1..75: mol_type = other DNA
acatcgcgccagaagaatatgcgcatgaggccggttgggagttaaccgctgaagatcaaaggcgtaatctctatt

SEQ ID NO: 261903 - DNA, 75 bp, synthetic construct
  source 1..75: mol_type = other DNA
cgcccgtatgaatcactaaacaatatgacgccagaggaatatcgtcagcaccattatttggccgggatctcaaaa

SEQ ID NO: 261904 - DNA, 75 bp, synthetic construct
  source 1..75: mol_type = other DNA
tggatgttttaccgccgcaggtactgcgtctgcgtaaagtgcagcatcttcgccgctgtatctggacttcactca

SEQ ID NO: 261905 - DNA, 75 bp, synthetic construct
  source 1..75: mol_type = other DNA
tcaatgacgcttttgatgccttaagctggctggccagtcagcaaacgtatccgcaattttactggcaacaacgta

SEQ ID NO: 261906 - DNA, 75 bp, synthetic construct
  source 1..75: mol_type = other DNA
ggagcaggtattgtccgtggctcagatcccgagcaagagtggcaggaaatcgacaacaaagcggcaggactgcgg

SEQ ID NO: 261907 - DNA, 75 bp, synthetic construct
  source 1..75: mol_type = other DNA
aaaatctactgcgccttttgtcgcaagagattccagcgacacccggcattcgggttattgatactcctttccctc

SEQ ID NO: 261908 - DNA, 75 bp, synthetic construct
  source 1..75: mol_type = other DNA
atggcggatgataaaaaccagcgcgagaacatgttggtggtggaagatatctgccaacgattacaggccgatacc

SEQ ID NO: 261909 - DNA, 75 bp, synthetic construct
  source 1..75: mol_type = other DNA
tccgaccccgagcaagagtggcaggaaatcgacaacaaagcggcagggctgcgtactttattacaaatggaatag

SEQ ID NO: 261910 - DNA, 75 bp, synthetic construct
  source 1..75: mol_type = other DNA
attcatgcaactgctaaatggtctactgctcaattaaagaaaacacaggcagaacaggctgcccgggcaaaagct

SEQ ID NO: 261911 - DNA, 75 bp, synthetic construct
  source 1..75: mol_type = other DNA
tccaaaatcgcccgcaaaaaccgattgttgcggttatttatacccacagccataccgaccactatggcggcgtga

SEQ ID NO: 261912 - DNA, 75 bp, synthetic construct
  source 1..75: mol_type = other DNA
cgctccgctgctggatgaaggtattctgcgcgatgctaatggcaaaccatattatcgcggggaagattataaatt

SEQ ID NO: 261913 - DNA, 75 bp, synthetic construct
  source 1..75: mol_type = other DNA
gattattttctgccgatgcaattttaactattggcagaaataaaactactacgaaaaagctgatgggagttgatt

SEQ ID NO: 261914 - DNA, 75 bp, synthetic construct
  source 1..75: mol_type = other DNA
ctaagcatttagatcagtttgccaagtacttgaagattacgggacatgtttcttttggatatgatgtggtatctg

SEQ ID NO: 261915 - DNA, 75 bp, synthetic construct
  source 1..75: mol_type = other DNA
gtgagttatattgttgctttactttttagcttgcttgctggaactacattaggtatttggggtattgctattgtt

SEQ ID NO: 261916 - DNA, 75 bp, synthetic construct
  source 1..75: mol_type = other DNA
caggcgctggatgtgttaccgccgcaggtgcttcgtctgcgtaaagtgcagcatctgcgtcgctgtatctggact

SEQ ID NO: 261917 - DNA, 75 bp, synthetic construct
  source 1..75: mol_type = other DNA
cgagcagattcgactgctgacgcccgggcaggtgcagatttaccgcaaggccactggtgccgacggccaggcgaa

SEQ ID NO: 261918 - DNA, 75 bp, synthetic construct
  source 1..75: mol_type = other DNA
atgcctgatatttcaacccccaatctggactatgggaacatggtgcaggcgtgggacatcaacgacgccctgatg

SEQ ID NO: 261919 - DNA, 75 bp, synthetic construct
  source 1..75: mol_type = other DNA
catcggtgctggtaaagagtcgctggcagaacttgtggagcagatgcgccaggcgggcgcgaagttgctgcgtac

SEQ ID NO: 261920 - DNA, 75 bp, synthetic construct
  source 1..75: mol_type = other DNA
ggatgagttaaaactagacattaaggaatacagaagggcaactttaactaaatctcatagatttttaggccgtca

SEQ ID NO: 261921 - DNA, 75 bp, synthetic construct
  source 1..75: mol_type = other DNA
caggacggcgtttttcacagaggcgatgaggctcgcggcagacgggcacgttgtgctgaaccctgccacgttgcc

SEQ ID NO: 261922 - DNA, 75 bp, synthetic construct
  source 1..75: mol_type = other DNA
aggagcagtcaccgctctacaccatggcaaccagcctagaggatgcgatcgacaatatcctgcagattatggctg

SEQ ID NO: 261923 - DNA, 75 bp, synthetic construct
  source 1..75: mol_type = other DNA
agtagtctgcgataacggctgctggattgatgatgaagggacgtacaccattcacaccattcatgcgtcttatca

SEQ ID NO: 261924 - DNA, 75 bp, synthetic construct
  source 1..75: mol_type = other DNA
tattgctcgggcgactgacctgcatttcgcaagtccggtcaatgcggcagcaatgatggctgccagtcgtcggct

SEQ ID NO: 261925 - DNA, 75 bp, synthetic construct
  source 1..75: mol_type = other DNA
cgcactgaagcccttgccggaacggtggcaaatcaccccgacgataaacaggcgcagcggttggccgagtggctg

SEQ ID NO: 261926 - DNA, 75 bp, synthetic construct
  source 1..75: mol_type = other DNA
aactttaatatttacctcggggcttattactcaattctggatagtaactgtagatatagtaattgtgacattacc

SEQ ID NO: 261927 - DNA, 75 bp, synthetic construct
  source 1..75: mol_type = other DNA
attactccattctggatagcgacaagatgtatattaatgatagcagtactgaaagtcgttacggtgttcgggttc

SEQ ID NO: 261928 - DNA, 75 bp, synthetic construct
  source 1..75: mol_type = other DNA
cgtggtttgtgataacgattgctggattgatgatgagcggtcatacactattcataccattcatgcgtcttatcg

SEQ ID NO: 261929 - DNA, 75 bp, synthetic construct
  source 1..75: mol_type = other DNA
atgaggaaatcctgttccgtggtgtcatgctgaacgtcttccgttcgaggtacaactggacgatgtggctgggcg

SEQ ID NO: 261930 - DNA, 75 bp, synthetic construct
  source 1..75: mol_type = other DNA
gttttgggcagatcaccggacgtttactgctctccagtggggtaaaaatggtggtgctcgatcacgatcctgacc

SEQ ID NO: 261931 - DNA, 75 bp, synthetic construct
  source 1..75: mol_type = other DNA
cgctgatttatctcggttcggcggcgctgattgtgccgattgcagtacgtctcggtcttggttcggtacttggct

SEQ ID NO: 261932 - DNA, 75 bp, synthetic construct
  source 1..75: mol_type = other DNA
cgatgagtgagaacgataccaaagcccgggctgcggtttataaacgtaccaacgcgatgttaagtgagataatta

SEQ ID NO: 261933 - DNA, 75 bp, synthetic construct
  source 1..75: mol_type = other DNA
ttctaatgttttccataataattttgtttttaggtttactacttgagccatttcaagattggaaggttacagacc

SEQ ID NO: 261934 - DNA, 75 bp, synthetic construct
  source 1..75: mol_type = other DNA
atgagcgtaactataaaagacgatcgactccgtaccatcgctacctttgacggtaaaaccctgaaagacgaccga

SEQ ID NO: 261935 - DNA, 75 bp, synthetic construct
  source 1..75: mol_type = other DNA
agggtagtgagtttgcttttgtggtgtttggcgcggcgcaaatggcgaatgtgctggagccggagtgggcgaaat

SEQ ID NO: 261936 - DNA, 75 bp, synthetic construct
  source 1..75: mol_type = other DNA
gccgaccggcggtatcaggcatgtcatcaccaggtatcgcaacaagagactcaccttagccagaattttacaggc

SEQ ID NO: 261937 - DNA, 75 bp, synthetic construct
  source 1..75: mol_type = other DNA
ctcaggagctggaagatatggccagcgcactgtttgcctctgatttctcgtccgtcagcagcgataaagcgccgt

SEQ ID NO: 261938 - DNA, 75 bp, synthetic construct
  source 1..75: mol_type = other DNA
gcgaacaacgtcaatattgcccggtttgtggctctatgccggtgtccagcatggtgcaaattggcaccactcagg

SEQ ID NO: 261939 - DNA, 75 bp, synthetic construct
  source 1..75: mol_type = other DNA
aatattcagatggtggaagagatggcaatggttgagaacgacaccaaagcccgcgcggcggtctataaacgcacc

SEQ ID NO: 261940 - DNA, 75 bp, synthetic construct
  source 1..75: mol_type = other DNA
gatgggcgcgtttctggcgggcgtactgctggcaagttcggaataccgtcatgcgctggagagcgatatcgaacc

SEQ ID NO: 261941 - DNA, 75 bp, synthetic construct
  source 1..75: mol_type = other DNA
aacaagtagaacgtatccatgctgaaactttaccccagagcggaaatgccaatgacgggctacttgaaggtgctt

SEQ ID NO: 261942 - DNA, 75 bp, synthetic construct
  source 1..75: mol_type = other DNA
tactactgctcaccgtcattttttgggattgggttgttttaaatggtcaaactgttggaacattggctacagcat

SEQ ID NO: 261943 - DNA, 75 bp, synthetic construct
  source 1..75: mol_type = other DNA
tggaagaaggatttgaggaaagaatacacacgccggtaggcgttagatccctggtggaggaatcgcacctgatga

SEQ ID NO: 261944 - DNA, 75 bp, synthetic construct
  source 1..75: mol_type = other DNA
gtggagggatcgcacttgatgaaattactccgggatctcgataaggatggatttaatgtcgatggcccacttgcc

SEQ ID NO: 261945 - DNA, 75 bp, synthetic construct
  source 1..75: mol_type = other DNA
tatcgttttaataatgtcacgaacggtgcaatagtgatccacacccaacgcctgaaatcagatccagggggtaat

SEQ ID NO: 261946 - DNA, 75 bp, synthetic construct
  source 1..75: mol_type = other DNA
gtcactgcattggtgacaaaaagtgtcaccaaaacggtgacagcgctgtcaccaaaacagggacacacaaaagaa

SEQ ID NO: 261947 - DNA, 75 bp, synthetic construct
  source 1..75: mol_type = other DNA
tcaggtctgggtggcggacctgacgtatgttgccacacaggagggatggttgtacctcgctggcatcaaagatgt

SEQ ID NO: 261948 - DNA, 75 bp, synthetic construct
  source 1..75: mol_type = other DNA
agattttctacaatcgtcagcgtcgtcactctcgtctggggaatatctccccgacagccttcaggataaaatatt

SEQ ID NO: 261949 - DNA, 75 bp, synthetic construct
  source 1..75: mol_type = other DNA
aatataattgatatgcaagatgaaccagatggttatggttttgattgcctgacatttcagatcgctgatcgtatg

SEQ ID NO: 261950 - DNA, 75 bp, synthetic construct
  source 1..75: mol_type = other DNA
gtattgccattctgccctcggttggtgaagtgcgttctccggttgcgggtcgaattgcttcgttgttcgccacat

SEQ ID NO: 261951 - DNA, 75 bp, synthetic construct
  source 1..75: mol_type = other DNA
tcttttaaatcgaatttatactgaatccagtagcatggttaatgaatataagcgcgaaatattaaaattgggcga

SEQ ID NO: 261952 - DNA, 75 bp, synthetic construct
  source 1..75: mol_type = other DNA
acaggtaaagccctgtttatggcgctcaggagccagcgcccacctgccgggctaatccaccactctgatcgaggt

SEQ ID NO: 261953 - DNA, 75 bp, synthetic construct
  source 1..75: mol_type = other DNA
aaatctttagaactaaaggtaaaacaggtaaaaaaaacaattgatcgattaaactttatttttctgcccgcatta

SEQ ID NO: 261954 - DNA, 75 bp, synthetic construct
  source 1..75: mol_type = other DNA
atacgattaccggatcatacaggagcagtttggtctgaaaacatcaatgtcgcgtaaaggtaactgttacgacaa

SEQ ID NO: 261955 - DNA, 75 bp, synthetic construct
  source 1..75: mol_type = other DNA
cgccaacgcgtagttgttttgctttctcaccccgccaaccgacgtgaccacaccaatgttttgatgcacgttcag

SEQ ID NO: 261956 - DNA, 75 bp, synthetic construct
  source 1..75: mol_type = other DNA
atgaatcagcaacgatttgatgacagcactctaatccgtatcttcgcgcttcatgagttacatcgactgaaagaa

SEQ ID NO: 261957 - DNA, 75 bp, synthetic construct
  source 1..75: mol_type = other DNA
ttcatgagcatattcacggatggctacatcgaaaaaatatagcatcctcagtgcgtcgtgtctcaaccttaccag

SEQ ID NO: 261958 - DNA, 75 bp, synthetic construct
  source 1..75: mol_type = other DNA
tcctccgatacgtctgcgggcgatgcaaacgcaatggggcaactgttctgcaaaaggctgtctgaccctgaatcc

SEQ ID NO: 261959 - DNA, 75 bp, synthetic construct
  source 1..75: mol_type = other DNA
tgcctatctatgcggcagcttactacaaacagacacagggattatccagcgttgaggcgatggtcgcaggaggta

SEQ ID NO: 261960 - DNA, 75 bp, synthetic construct
  source 1..75: mol_type = other DNA
atttgcagttctggtttttgtgattggtgccgcgataaatatgttccctctggttaatgcagtcgtcgcagaaat

SEQ ID NO: 261961 - DNA, 75 bp, synthetic construct
  source 1..75: mol_type = other DNA
tcaggcactgatactgcggggcagtaactccttcagcaccatggaagaatatcaggccttcatcactcagcaggt

SEQ ID NO: 261962 - DNA, 75 bp, synthetic construct
  source 1..75: mol_type = other DNA
cattgtgatggtgctgaaaaatctcgatgccgcagaagctaaaaaaaaacgcctggatcaacacggcggctttat

SEQ ID NO: 261963 - DNA, 75 bp, synthetic construct
  source 1..75: mol_type = other DNA
gccagtctaacctgtgcctggaaatcgccctgccgaccaaaccgctgaacgacgtcaacgacgaaaacggtgaaa

SEQ ID NO: 261964 - DNA, 75 bp, synthetic construct
  source 1..75: mol_type = other DNA
ttgcttttctctttcggtcagctaaaatgccgctttgctaccacgggattgttttcgatgtctgtttccaccctc

SEQ ID NO: 261965 - DNA, 75 bp, synthetic construct
  source 1..75: mol_type = other DNA
ggcggcgaatatgccattcagcacgcggtggaaggcgcggaagatagccgggaaggcggcattaacgatctgaaa

SEQ ID NO: 261966 - DNA, 75 bp, synthetic construct
  source 1..75: mol_type = other DNA
atgtgccggattatcaacgatgaagataaaaccgtaccgcttgccgttgagcgcgtactgccggatatcgccgcg

SEQ ID NO: 261967 - DNA, 75 bp, synthetic construct
  source 1..75: mol_type = other DNA
tcacagcgagaaattttaccggctgatggggcaggttatgccgggttgggaaaaggtaaaaaaacgcctggacgg

SEQ ID NO: 261968 - DNA, 75 bp, synthetic construct
  source 1..75: mol_type = other DNA
attattattaggtgctaataattacgcagaccaactattaaaatttccttttattgaattgcggattaatgaaaa

SEQ ID NO: 261969 - DNA, 75 bp, synthetic construct
  source 1..75: mol_type = other DNA
attcaacataaactctttgcctggcttaatttaacgccacaagtggctacattattattagacagggataattac

SEQ ID NO: 261970 - DNA, 75 bp, synthetic construct
  source 1..75: mol_type = other DNA
ttgttccctcgactcaagaatttatacaaccgccgcgccgagcgtctgcgcgaactggccgaaaataatccgctg

SEQ ID NO: 261971 - DNA, 75 bp, synthetic construct
  source 1..75: mol_type = other DNA
cacattagcccgaacagcttcaaacgcgagtgggcagtttcttttggtgataaaaaggtctttaactacacactg

SEQ ID NO: 261972 - DNA, 75 bp, synthetic construct
  source 1..75: mol_type = other DNA
atgaaattgttgtcgatagcagtagcggtgggcgtacgacttacaaaaatgccggaaagacccgtcgtcaaggcg

SEQ ID NO: 261973 - DNA, 75 bp, synthetic construct
  source 1..75: mol_type = other DNA
ttgcaattgcatcatcgcggggggcattgatacgccagaaatattggcacagattacccccttcgatttccatgc

SEQ ID NO: 261974 - DNA, 75 bp, synthetic construct
  source 1..75: mol_type = other DNA
gacattgctgatgaactgcgcggggccgactatctggtatggcgcaatgggaggggagcagtccggttgctcggt

SEQ ID NO: 261975 - DNA, 75 bp, synthetic construct
  source 1..75: mol_type = other DNA
atcgaaactcgccgtgtgagcctggtattacggaaaaaagatctggccttattagaagtggaagcggtttcctgt

SEQ ID NO: 261976 - DNA, 75 bp, synthetic construct
  source 1..75: mol_type = other DNA
cgctttaggctggcaaatgggatatatctatatgagcatcccgattagtggtgtacttattattatatacaccat

SEQ ID NO: 261977 - DNA, 75 bp, synthetic construct
  source 1..75: mol_type = other DNA
aactggatgagttagattctttattaattatagacctcgggggcaccacattagatatttctcaggtaatgggga

SEQ ID NO: 261978 - DNA, 75 bp, synthetic construct
  source 1..75: mol_type = other DNA
aatctggacagccagggcgtgatttatctctgcgagtcagccagccagggccggagccgtgctgatcttctggca

SEQ ID NO: 261979 - DNA, 75 bp, synthetic construct
  source 1..75: mol_type = other DNA
ccgttttgcccgcactgcttgtcctttcccccgttgtttttgccgctgatgaacagaccatgattgtcagtgccg

SEQ ID NO: 261980 - DNA, 75 bp, synthetic construct
  source 1..75: mol_type = other DNA
cgttatgagattgagcctacacaacggcgtaatacgcgcgcagcgggcgacaagacctatcaccttatcgtttcc

SEQ ID NO: 261981 - DNA, 75 bp, synthetic construct
  source 1..75: mol_type = other DNA
gtacatcacgacacagataatctgcatatccatgtggctatcaacaaaattaacccggatacgctaaccattcat

SEQ ID NO: 261982 - DNA, 75 bp, synthetic construct
  source 1..75: mol_type = other DNA
acggatatggaaccagcagcagcggaagacgaactggctcaggcgatggcgttactacagcaggaagccagccag

SEQ ID NO: 261983 - DNA, 75 bp, synthetic construct
  source 1..75: mol_type = other DNA
aacgttgcgcgacctggacgccagccgccgcccacagcaaaaaaccgtctgcgagcaatgtccgaactcggtatg

SEQ ID NO: 261984 - DNA, 75 bp, synthetic construct
  source 1..75: mol_type = other DNA
aacattctgcatggcgataaagtcaaaaaagatggccgtatccctggactcaaaccggacagcgtaacgaaggaa

SEQ ID NO: 261985 - DNA, 75 bp, synthetic construct
  source 1..75: mol_type = other DNA
gccagttctgtagatcgctctctttcccgcgcagcgcttgaaaagaagttaggctcgtttgaatcctccattccc

SEQ ID NO: 261986 - DNA, 75 bp, synthetic construct
  source 1..75: mol_type = other DNA
acaccggggcgattctggaagccaacctgctgccaccgcctgagccgaaagagagctggcgtcgcattatggatg

SEQ ID NO: 261987 - DNA, 75 bp, synthetic construct
  source 1..75: mol_type = other DNA
cgcgtgaaatgtttcggccgtaccgctggtccgtattgatatccgtcaggagagcacccgccataccgaagcgct

SEQ ID NO: 261988 - DNA, 75 bp, synthetic construct
  source 1..75: mol_type = other DNA
ggaatatttacaccgacccgctgaacgtattgcaggccgagttgctgcaccgctcccgccaggcagaaaaagaag

SEQ ID NO: 261989 - DNA, 75 bp, synthetic construct
  source 1..75: mol_type = other DNA
aggtataattcaacggataaaggtcagtacgaatatgcaggacagcgtaaaagtggggatgaaactttagccctg

SEQ ID NO: 261990 - DNA, 75 bp, synthetic construct
  source 1..75: mol_type = other DNA
cgccttaatacgcggtctgagagcgacaaaacgtatcatctggtgatttcattccggcccggagaaaagccgtca

SEQ ID NO: 261991 - DNA, 75 bp, synthetic construct
  source 1..75: mol_type = other DNA
agaaatcctggtttgttggtccttactcgaccagagatcggatcgaaaactttatccgtatgaatgaggaaaaag

SEQ ID NO: 261992 - DNA, 75 bp, synthetic construct
  source 1..75: mol_type = other DNA
tacatgggctgactggctgcagttcaaagccgcaggtggtgatgatgaagcgctgaaaattttacgccagcggaa

SEQ ID NO: 261993 - DNA, 75 bp, synthetic construct
  source 1..75: mol_type = other DNA
tatataaaaataaccgggcgcaagaaagatattattgtccgcggcggggaaaatattagcagtcgtgaagtggaa

SEQ ID NO: 261994 - DNA, 75 bp, synthetic construct
  source 1..75: mol_type = other DNA
ttgtcgcgctttatgaacaccgatggttacgctgccgcaggcgtagagattaaagtggtcgatgatgcacgcaag

SEQ ID NO: 261995 - DNA, 75 bp, synthetic construct
  source 1..75: mol_type = other DNA
aaacacgtccggtagatttaatcctgccgctgcaaaatcagctaccacaactgcaacaaattgtcgctgtagaca

SEQ ID NO: 261996 - DNA, 75 bp, synthetic construct
  source 1..75: mol_type = other DNA
ggagcggttattacaactgggtacagcatgacccctcagacagaaaacaaagtgatgagcggctaaaactggaga

SEQ ID NO: 261997 - DNA, 75 bp, synthetic construct
  source 1..75: mol_type = other DNA
actggcagcagaccgctcgtgcgatgccagacaaaattgccgtggtcgataatcatggtgcatcgtacacctata

SEQ ID NO: 261998 - DNA, 75 bp, synthetic construct
  source 1..75: mol_type = other DNA
atggttccacagaaagttcgccgcatgcagtggtgaatctcgacgatcctttgtcgcgctttatgcacaccgatg

SEQ ID NO: 261999 - DNA, 75 bp, synthetic construct
  source 1..75: mol_type = other DNA
aacgtcacgcgaaataccccgcctatcggtaactcagcctgtgtgtcacggcatcatgaggtgttcctgaacggg

SEQ ID NO: 262000 - DNA, 75 bp, synthetic construct
  source 1..75: mol_type = other DNA
aatcttaaagtcggggagtcggtcacactgaccccttccggttcagtaaggacaacgaaaggaagaagtcgatga

SEQ ID NO: 262001 - DNA, 75 bp, synthetic construct
  source 1..75: mol_type = other DNA
ttgagtatgcaggccaacgtaaaagcgggctggaaacgttagccctgctaaaacgggatgatgaaattgttgtta

SEQ ID NO: 262002 - DNA, 75 bp, synthetic construct
  source 1..75: mol_type = other DNA
actaccgcgcacagcctcaggtaaaatacaaaagtttttgttaaggaaagatattatgcggcgattaactcagga

SEQ ID NO: 262003 - DNA, 75 bp, synthetic construct
  source 1..75: mol_type = other DNA
tatataaaaattaccggacgcaaaaaagatattattgtccgcggcggcgaaaatattagcagccgtgaagtggaa

SEQ ID NO: 262004 - DNA, 75 bp, synthetic construct
  source 1..75: mol_type = other DNA
caaaattcagacaagcacagaaaccggcaaccagcataaataccagacccgggttgtatccagtgccaaccaggt

SEQ ID NO: 262005 - DNA, 75 bp, synthetic construct
  source 1..75: mol_type = other DNA
tgttggacatgttcggggcaacaccaccgcgatgacaacctatcgtaaggatgctgatgtgggagagcaattagg

SEQ ID NO: 262006 - DNA, 75 bp, synthetic construct
  source 1..75: mol_type = other DNA
atggcacagcgtgataatctctatcgacgcccaagcggtatctatgttctgcggatcaccgttccggttcgttat

SEQ ID NO: 262007 - DNA, 75 bp, synthetic construct
  source 1..75: mol_type = other DNA
cgacgttgctcattacggcactgaggctatggttaacggctatatgcagatttacatgccgctacatgccctcaa

SEQ ID NO: 262008 - DNA, 75 bp, synthetic construct
  source 1..75: mol_type = other DNA
gccccattgttgactggcgctggcaaaatcagcctggcgttgttttgcgattcatttggggttggggttgagact

SEQ ID NO: 262009 - DNA, 75 bp, synthetic construct
  source 1..75: mol_type = other DNA
atggcgcagcgtgataatctctatcgacgttccagtgggatctatgttctgcggatcaccgttccggttcgttat

SEQ ID NO: 262010 - DNA, 75 bp, synthetic construct
  source 1..75: mol_type = other DNA
aatgcagaatatgcccggtaatctgtatttgatgcggcgaaaatacaagatttcagatacgcaaaaacttattga

SEQ ID NO: 262011 - DNA, 75 bp, synthetic construct
  source 1..75: mol_type = other DNA
ctatcagttattgccaatgtagcagcacagaaagcggcagcaaacaggctgatacaagcctttaccaaaggaagt

SEQ ID NO: 262012 - DNA, 75 bp, synthetic construct
  source 1..75: mol_type = other DNA
tcctaatggataattgggttgggatctgcacgaaagcaagccaggaaaaactatcagttattgccaatgtagcag

SEQ ID NO: 262013 - DNA, 75 bp, synthetic construct
  source 1..75: mol_type = other DNA
ccccagacgatggaatatctggattatctggagtcaaagctggggaagattatccgcgttaaagccgatttcacg

SEQ ID NO: 262014 - DNA, 75 bp, synthetic construct
  source 1..75: mol_type = other DNA
atgcataacctgtcaatttctgaccttaacagcattcagtttcgtgagaaattcaccgagcagctactggttaac

SEQ ID NO: 262015 - DNA, 75 bp, synthetic construct
  source 1..75: mol_type = other DNA
atgcataacctgtcaatttctgaccttaacagcattcagtttgatgagaaattcaccgggcagctactggttaac

SEQ ID NO: 262016 - DNA, 75 bp, synthetic construct
  source 1..75: mol_type = other DNA
cccgtttgaggtggtgtatctggatgcgcctgagcgcctgctggatgaggccctgcttcagccggggacggaact

SEQ ID NO: 262017 - DNA, 75 bp, synthetic construct
  source 1..75: mol_type = other DNA
catcactcgtgttgatggtgccgtacagctgaatgaaagcttgtgcgtaagctgcaaactgtgtggcatcgcctg

SEQ ID NO: 262018 - DNA, 75 bp, synthetic construct
  source 1..75: mol_type = other DNA
tcgtgaagtagagcagcaaattgaaagagagaagagtattcgtttacccccgctggtgatgctgccaacttactg

SEQ ID NO: 262019 - DNA, 75 bp, synthetic construct
  source 1..75: mol_type = other DNA
tatcgctttttttagttggcggataatgtttctgctgggtggtattggcatactgttagcctggtttctctcagg

SEQ ID NO: 262020 - DNA, 75 bp, synthetic construct
  source 1..75: mol_type = other DNA
cagggtttttgagttactccggtaatgtcgtcttagcaaagctggtaagcaatggatggtcaaataatttcctca

SEQ ID NO: 262021 - DNA, 75 bp, synthetic construct
  source 1..75: mol_type = other DNA
ggtgaccgcgacggcaacccgaacgtcactgccgatatcacccgccacgtcctgctgctcagccgctggaaagcc

SEQ ID NO: 262022 - DNA, 75 bp, synthetic construct
  source 1..75: mol_type = other DNA
gcctgatgctgccagcctggctgggcgcaggtacggcgctgcaaaaagtggtggaagatggcaaacagaacgagc

SEQ ID NO: 262023 - DNA, 75 bp, synthetic construct
  source 1..75: mol_type = other DNA
tatcagtccgagcgcgagcgtcttaaatttcagcatgaaactgttcagcttgtgcccgtcagtgatgtcagacgg

SEQ ID NO: 262024 - DNA, 75 bp, synthetic construct
  source 1..75: mol_type = other DNA
atgcgtatcccccgcatttatcatcctgaaccactgaccagccattctcacatcgcgctttgcgaagatgccgcc

SEQ ID NO: 262025 - DNA, 75 bp, synthetic construct
  source 1..75: mol_type = other DNA
agatggagtcatttctcaataagccaggagaaaatacccatgatgtgtggattgagtatgaatggggtgattttc

SEQ ID NO: 262026 - DNA, 75 bp, synthetic construct
  source 1..75: mol_type = other DNA
tattccctgcgcggcatgatgaaaacggactggcctgacgtggttcaggcatttttcaatcgcattaatggcccg

SEQ ID NO: 262027 - DNA, 75 bp, synthetic construct
  source 1..75: mol_type = other DNA
tgtgcgctggttctctccatttttggcatcgaaacgcggaaggtgtcgttggaagagatttctgaggtgaattaa

SEQ ID NO: 262028 - DNA, 75 bp, synthetic construct
  source 1..75: mol_type = other DNA
ctgaaacactgaccagcccttctcacatcgcgctttgcgaagatgcggccaaccataatcgggcgcgtactggcc

SEQ ID NO: 262029 - DNA, 75 bp, synthetic construct
  source 1..75: mol_type = other DNA
atgcgtatcccccgcatttatcatcctgaaccactgaccagccattctcatatcgcgctttgcgaagatgctgcc

SEQ ID NO: 262030 - DNA, 75 bp, synthetic construct
  source 1..75: mol_type = other DNA
actacggtgtacaaatcaacaagctgatgtatacccgtctgctgaaaggtgaagatattaccctgttcagtccat

SEQ ID NO: 262031 - DNA, 75 bp, synthetic construct
  source 1..75: mol_type = other DNA
acaaactttcgctggatgctggcgtgcgctacagctccgtgtggtttgattccaacgaccattacgttactccgg

SEQ ID NO: 262032 - DNA, 75 bp, synthetic construct
  source 1..75: mol_type = other DNA
ggtagtgaaacctgtcaggccggcagatgccagaccacttgttgtcatccttgataccattaaagggcagggcgt

SEQ ID NO: 262033 - DNA, 75 bp, synthetic construct
  source 1..75: mol_type = other DNA
gcctgtccctcgtgctgaaagtgctttctcatcggctggtgaacacagaggggacgtcagcgttgatccagatac

SEQ ID NO: 262034 - DNA, 75 bp, synthetic construct
  source 1..75: mol_type = other DNA
aacctcgtcaccagttatcgcaataaatataaccctgatatttttgaactttataaaagctatgaaggaaataac

SEQ ID NO: 262035 - DNA, 75 bp, synthetic construct
  source 1..75: mol_type = other DNA
tacccggctcaggaaaaagttatgaagccgtttgcaatgtcattattcctgcatttaccagcggccggagagttg

SEQ ID NO: 262036 - DNA, 75 bp, synthetic construct
  source 1..75: mol_type = other DNA
gtacaaaaccggcagaactatgcgcaagatttacagctgtcgattcgcggatttggctcccgctccacttacgga

SEQ ID NO: 262037 - DNA, 75 bp, synthetic construct
  source 1..75: mol_type = other DNA
tggaagccactggtgtttatcatgaatcactggcttacgggcttcacaaagccgggggccggatatcacttgcca

SEQ ID NO: 262038 - DNA, 75 bp, synthetic construct
  source 1..75: mol_type = other DNA
cctattacccatcgcaccgtgctggtgggcaatgcggcgcaaaccctgcacccaattgccgggcaaggatttaac

SEQ ID NO: 262039 - DNA, 75 bp, synthetic construct
  source 1..75: mol_type = other DNA
tacggcgtattgtgccgttatcagcagcgtcgacagagcgatcgcgaagcaaccatcggcgtcacggacagcctt

SEQ ID NO: 262040 - DNA, 75 bp, synthetic construct
  source 1..75: mol_type = other DNA
aacaaactcacaacgcgctatcttcaggaaaagcgatcttgaatttgttcaccaaatagtcggaacgatcaaatc

SEQ ID NO: 262041 - DNA, 75 bp, synthetic construct
  source 1..75: mol_type = other DNA
tgaaaattccggtaacctctgaaggtctggcagcaattaaaatgctgaagaaagaaggcattactacgctgggaa

SEQ ID NO: 262042 - DNA, 75 bp, synthetic construct
  source 1..75: mol_type = other DNA
ccgcagtgtacagtgctgcacaagggttactggccgcgctggcaggggcaaaatacgttgctccgtatgttaacc

SEQ ID NO: 262043 - DNA, 75 bp, synthetic construct
  source 1..75: mol_type = other DNA
atacagggggaagagaggctatccataggctaatggcagcctatgatttcaagtccagacagcaactttgcgatc

SEQ ID NO: 262044 - DNA, 75 bp, synthetic construct
  source 1..75: mol_type = other DNA
agagcacggcgaaaccagtactaccgcacaaatccgcgcccagcgctggatgcaaagcctgctggagctgcaaca

SEQ ID NO: 262045 - DNA, 75 bp, synthetic construct
  source 1..75: mol_type = other DNA
acatggaacagctttttggtaaaagcgtcgccgagctggtagagggggtgtcgaagcttgataagctcaagttcc

SEQ ID NO: 262046 - DNA, 75 bp, synthetic construct
  source 1..75: mol_type = other DNA
atgttaaacatcagaatgggttccgatacgggaggtaaggcagctattgagaggctgcttgaggcttatggattc

SEQ ID NO: 262047 - DNA, 75 bp, synthetic construct
  source 1..75: mol_type = other DNA
cctgactgcggcgatcaacacaaccaattccaatattcaaagtttgaatacggaagagaaagatggtcgcgtcta

SEQ ID NO: 262048 - DNA, 75 bp, synthetic construct
  source 1..75: mol_type = other DNA
cggtcatgcctgcgtgggtgcgcgagttgatcgccagccttacccgctgtcgcagccactctccagcggacaaac

SEQ ID NO: 262049 - DNA, 75 bp, synthetic construct
  source 1..75: mol_type = other DNA
tcggccttggtaacgcaatgagcgtggtggtcgcgaaaaatctgcaacatggggacgcctccattccaccggcaa

SEQ ID NO: 262050 - DNA, 75 bp, synthetic construct
  source 1..75: mol_type = other DNA
agccaaacacctccagttaacggtatgtggttggtagatatcgacggaataaaaagcattgttaagttaacacgg

SEQ ID NO: 262051 - DNA, 75 bp, synthetic construct
  source 1..75: mol_type = other DNA
cttgtctcccccgaaattgataaggcaactctcaacggtggtttattggtcgatgctggaaaagcaatcattgat

SEQ ID NO: 262052 - DNA, 75 bp, synthetic construct
  source 1..75: mol_type = other DNA
ataccgggggaagagaggctatccataggctaatggctgcctatgatttcaaatccagacaacagctgtgcgatc

SEQ ID NO: 262053 - DNA, 75 bp, synthetic construct
  source 1..75: mol_type = other DNA
agcatgaaaggaggatgtgagcctgagaaaagatctcataatgagaacaaacaagcaattaaaccactatccaaa

SEQ ID NO: 262054 - DNA, 75 bp, synthetic construct
  source 1..75: mol_type = other DNA
gcgccttggaaacaggagtttctttactatggctaaccaccggacagggcgagccaggttcaaacattgacccta

SEQ ID NO: 262055 - DNA, 75 bp, synthetic construct
  source 1..75: mol_type = other DNA
atcaagacgaatcatcctttgagtgcagtcttgatgatatcgaggtagtcggacgcgcattaaaaataattaaga

SEQ ID NO: 262056 - DNA, 75 bp, synthetic construct
  source 1..75: mol_type = other DNA
tattatcgccaatggcgatctgctcgacaccctgcgccgcgtgaaatgtttcggcgtaccgctggtgcgtattga

SEQ ID NO: 262057 - DNA, 75 bp, synthetic construct
  source 1..75: mol_type = other DNA
atgtttaaagaaatttttacccggctcattcgccatttaccttcccgtctgatccgtcgcgatccgctaccgggt

SEQ ID NO: 262058 - DNA, 75 bp, synthetic construct
  source 1..75: mol_type = other DNA
ccggtggtgctgctcatcaacggttacaccaaaggtgactggtgggaagcagcgctgttcgcgctttcggttgcg

SEQ ID NO: 262059 - DNA, 75 bp, synthetic construct
  source 1..75: mol_type = other DNA
gccgttaggtaaagagttacgcaatctgcaagaagaagacatcaaagtggtgctggcgattgccaacgattctca

SEQ ID NO: 262060 - DNA, 75 bp, synthetic construct
  source 1..75: mol_type = other DNA
gggcgattctggaagccaacctgctgccaccgcctgagccgaaagagagctggcgtcgcattatggatgaactgt

SEQ ID NO: 262061 - DNA, 75 bp, synthetic construct
  source 1..75: mol_type = other DNA
ctgcgaaaaagcgggtattgagctgacgttgttccacggtcgcggcggttccattggtcgcggcggcgcacctgc

SEQ ID NO: 262062 - DNA, 75 bp, synthetic construct
  source 1..75: mol_type = other DNA
gatgatcgcattgaagtaattttcgatgagccggttgccgccgttaccccgggacagtctgccgtcttctacaac

SEQ ID NO: 262063 - DNA, 75 bp, synthetic construct
  source 1..75: mol_type = other DNA
atcggcgagcgtaaattccgcgagttcctgggccgttatctcccggcgcaaccaggtaaaatcattaccgttgat

SEQ ID NO: 262064 - DNA, 75 bp, synthetic construct
  source 1..75: mol_type = other DNA
ctgtcgggttgattgcccagcagttgcactgggtcgatcgcgaaccattcaccggcactatgcgttgcacggtaa

SEQ ID NO: 262065 - DNA, 75 bp, synthetic construct
  source 1..75: mol_type = other DNA
atacgctgaatcgtcaggggctgcgcgtggttgcggtggcgacgaaatacctgccagcgcgtgaaggagattacc

SEQ ID NO: 262066 - DNA, 75 bp, synthetic construct
  source 1..75: mol_type = other DNA
ctgacgccgatgcataaagaacgcattgtgaccttactgaagcgcgaagggcatgtggttggctttatgggcgat

SEQ ID NO: 262067 - DNA, 75 bp, synthetic construct
  source 1..75: mol_type = other DNA
tgtgcatatgatccgtacccgtcgtgtaccgtttattcagagctgtgcatcgtggccgttaatgatcatgaccgt

SEQ ID NO: 262068 - DNA, 75 bp, synthetic construct
  source 1..75: mol_type = other DNA
ctgtggctggcggaatactatgaccaacgcctggtcgacaaagcactgtggccgttaggtaaagagttacgcaat

SEQ ID NO: 262069 - DNA, 75 bp, synthetic construct
  source 1..75: mol_type = other DNA
agaaatttctgatggaggaatcgagttattagtagatccagcgaaagtacgccgaactctatccgatgcacaata

SEQ ID NO: 262070 - DNA, 75 bp, synthetic construct
  source 1..75: mol_type = other DNA
caatcgtacatcacttatgctaccaccctggcttatcgtggtgaaaaaacgcgcctccaacattatctgtctgaa

SEQ ID NO: 262071 - DNA, 75 bp, synthetic construct
  source 1..75: mol_type = other DNA
ttgccggacgatccggcactgatccgacaactggcctacgtgaaccagcgtctggatgatatgcctgcaacacaa

SEQ ID NO: 262072 - DNA, 75 bp, synthetic construct
  source 1..75: mol_type = other DNA
ttgcgttccggcgcgatgagtaccgctaacaataatgtcggcggcgcagcgccagggaaaagctatcgtagctac

SEQ ID NO: 262073 - DNA, 75 bp, synthetic construct
  source 1..75: mol_type = other DNA
tacgatgctgccgcctggaaccgtctggcaaagtgttatcgggacacgctacccggtgtggcgttgtatgcatgg

SEQ ID NO: 262074 - DNA, 75 bp, synthetic construct
  source 1..75: mol_type = other DNA
caactagtaccagcgcacaggcacgagtgatgctataccaggccagccagcgcccgagactgctagaggcaaatt

SEQ ID NO: 262075 - DNA, 75 bp, synthetic construct
  source 1..75: mol_type = other DNA
gcgagctggaagccatgtgccgcgattggccattcttctcgacgcgtctcggcatgctggagatggtcttcgcca

SEQ ID NO: 262076 - DNA, 75 bp, synthetic construct
  source 1..75: mol_type = other DNA
aaccggatccccgcgtagaacaagcgttaatggtcactattgccgggattgcggcaggtatgcgtaataccggct

SEQ ID NO: 262077 - DNA, 75 bp, synthetic construct
  source 1..75: mol_type = other DNA
tcactgccgatatcacccgccacgtcctgctgctcagtcgctggaaagccaccgatctgttcctgaaagatattc

SEQ ID NO: 262078 - DNA, 75 bp, synthetic construct
  source 1..75: mol_type = other DNA
ctaacaataatgtcggcggcgcagcgccagggaaaagctatcgtagctacgggcaactggaagccgagtaccgca

SEQ ID NO: 262079 - DNA, 75 bp, synthetic construct
  source 1..75: mol_type = other DNA
gcttcagcaggcagaacaacgcgggctgggcaacaatgctcagtattggtggctacatgcacaacgttatattcc

SEQ ID NO: 262080 - DNA, 75 bp, synthetic construct
  source 1..75: mol_type = other DNA
ctggaacatctggaccggagcgacgcactatgatgcctggccgcacaaaatcagtttcggcgtcgaatatcaaca

SEQ ID NO: 262081 - DNA, 75 bp, synthetic construct
  source 1..75: mol_type = other DNA
gccatctatctgtcagcagtacacgacacccggccgccaaagccggtggtgtacatgtgttgtcttctggccatc

SEQ ID NO: 262082 - DNA, 75 bp, synthetic construct
  source 1..75: mol_type = other DNA
cggaatttaatcgtcactacatgcgtaataacgggattgtggtttatctgtgtgcgccagtagcggtactggtta

SEQ ID NO: 262083 - DNA, 75 bp, synthetic construct
  source 1..75: mol_type = other DNA
cgaactgctaccaccgttccgccagctcgaccgtaacagctacgccctgacagaagccgagcgcaatgccagtga

SEQ ID NO: 262084 - DNA, 75 bp, synthetic construct
  source 1..75: mol_type = other DNA
atagcgccgacaaccagctacaggcgtgctttagggtagcggaagataacagctacagcaccgctgacgatgatc

SEQ ID NO: 262085 - DNA, 75 bp, synthetic construct
  source 1..75: mol_type = other DNA
atgtgcctgcgtcgccgctggtcgccagaaaactttaagctcttcctggttgagcatccgttggttcgccactta

SEQ ID NO: 262086 - DNA, 75 bp, synthetic construct
  source 1..75: mol_type = other DNA
catggcttaacgcgcggggcgcttctcgattatcacagccgctataaactcgtctttctggcgcattctcagccg

SEQ ID NO: 262087 - DNA, 75 bp, synthetic construct
  source 1..75: mol_type = other DNA
ctctgctgcgcgagatcgacattgctgaagtcagcaaccctgatctggaccgcgagttaggctttctccatccca

SEQ ID NO: 262088 - DNA, 75 bp, synthetic construct
  source 1..75: mol_type = other DNA
cacaactcgactatgccgtcgctcagggcattaatcttattgacgttgccgagatgtaccctgtaccgccgcgcc

SEQ ID NO: 262089 - DNA, 75 bp, synthetic construct
  source 1..75: mol_type = other DNA
cgtgcctgggtttcggcacgctgaccggtaaatatctcaatggtgcaaaaccggctggtgcgcgtaatacgctct

SEQ ID NO: 262090 - DNA, 75 bp, synthetic construct
  source 1..75: mol_type = other DNA
ttgagtcctttgctgagagcaagggcgcgcagatgcaacgtggcgcgaatggagcagtgttccagatcaaggggc

SEQ ID NO: 262091 - DNA, 75 bp, synthetic construct
  source 1..75: mol_type = other DNA
gcgaagcagctgagggcttagcgcatctccataaacatggtatttatcatcaggacgttaaaccctctaatttgc

SEQ ID NO: 262092 - DNA, 75 bp, synthetic construct
  source 1..75: mol_type = other DNA
caaccacgccaaggtgatgagcaccttattggctgacagcaataaaggaataatcgagttacgtaaagtgcatgt

SEQ ID NO: 262093 - DNA, 75 bp, synthetic construct
  source 1..75: mol_type = other DNA
catcacagtcggtattggttttattggtttaggtctggttgttggtttattaaatagttcattacagccagctat

SEQ ID NO: 262094 - DNA, 75 bp, synthetic construct
  source 1..75: mol_type = other DNA
ctggaatacgcacgccagctcggctgccgcacagtgggaatttcctgtaatccggggagcgccgtttcaaccacc

SEQ ID NO: 262095 - DNA, 75 bp, synthetic construct
  source 1..75: mol_type = other DNA
cattgtgatggtactgaaaaatctcgatgccgatgaagctaaaaaatgcctggatcaacacggcggttttattcg

SEQ ID NO: 262096 - DNA, 75 bp, synthetic construct
  source 1..75: mol_type = other DNA
tccagggagcgcggtttccaccaccgctgagtttgctattacgccgatcgttggtcccgaggtggttaccggttc

SEQ ID NO: 262097 - DNA, 75 bp, synthetic construct
  source 1..75: mol_type = other DNA
gaagagttcaagcagatggacacgtttatcgatcacgaccgtgatatgaccttctcttatgctgccgttaaacag

SEQ ID NO: 262098 - DNA, 75 bp, synthetic construct
  source 1..75: mol_type = other DNA
ccgtcacgcttcccgtcaggaaaagtgccgatgcagcagttactgaaagacctgctcaccgcctacaaattcggg

SEQ ID NO: 262099 - DNA, 75 bp, synthetic construct
  source 1..75: mol_type = other DNA
gcgctgtacgaccacgtggtgaaaatggtcgagatgggcaaatacgataatcatctgctggaagactacacggaa

SEQ ID NO: 262100 - DNA, 75 bp, synthetic construct
  source 1..75: mol_type = other DNA
acagggcactgaaggaatggcagaagctgggccacaccatccgcgaacaattcaaaaagaaactgtctgaacgct

SEQ ID NO: 262101 - DNA, 75 bp, synthetic construct
  source 1..75: mol_type = other DNA
ctgcatgcggcactactggcagcagcgcaacgcggggtaaaagcggaagtcttacttgatggctacggttcgccg

SEQ ID NO: 262102 - DNA, 75 bp, synthetic construct
  source 1..75: mol_type = other DNA
attcacgctttctcttattattctgggcgcagcgttcagatacagccaggactcactggctcatgccctgctcaa

SEQ ID NO: 262103 - DNA, 75 bp, synthetic construct
  source 1..75: mol_type = other DNA
ggcggcgaatatgccattcagcacgcggtggaaggcgcggaagatagccgggaaggtggtgttaacgatctgaaa

SEQ ID NO: 262104 - DNA, 75 bp, synthetic construct
  source 1..75: mol_type = other DNA
ggacgacattgtcacagtcactgttatcggcgtaggcaaacgcgaaaacgacgacatttataatgcaacccttaa

SEQ ID NO: 262105 - DNA, 75 bp, synthetic construct
  source 1..75: mol_type = other DNA
cctgaactcgtttgtctcggcggtgtttaacaccttccctaactcctgcttcggacagaacaacggagtgatcca

SEQ ID NO: 262106 - DNA, 75 bp, synthetic construct
  source 1..75: mol_type = other DNA
cagattgttgacaaagagcgctttgtttatgccggatgcggcgcaaacgccttatccgacctacaaaatcgtgca

SEQ ID NO: 262107 - DNA, 75 bp, synthetic construct
  source 1..75: mol_type = other DNA
ggcaacttatccaccgctgtgggtaatgctctgtattcaggtcgcctttgcgataacgacgattttaatgctgtg

SEQ ID NO: 262108 - DNA, 75 bp, synthetic construct
  source 1..75: mol_type = other DNA
tacagaccaggcgctcctaagcagcatagcaatccgaagatggcccggtatttcacacgagcgcacggcagacag

SEQ ID NO: 262109 - DNA, 75 bp, synthetic construct
  source 1..75: mol_type = other DNA
tacaacaaccgacgaaaagtgacgcaacggcagaccaacatcaactgcgtgctttacgcgaacgagtcatgtcat

SEQ ID NO: 262110 - DNA, 75 bp, synthetic construct
  source 1..75: mol_type = other DNA
tctggtgatattattgataatattaaagttttcccgacactagctgaatcgttacacgatgtcgatttcactgtc

SEQ ID NO: 262111 - DNA, 75 bp, synthetic construct
  source 1..75: mol_type = other DNA
atgggttttagcgaactgcggattgtcgatagtcaggcacatctggagccagccacccgctgggtcgcacatgga

SEQ ID NO: 262112 - DNA, 75 bp, synthetic construct
  source 1..75: mol_type = other DNA
ctaatatcgctcgtttcctgaaagacaaaatagaaacaacttaccggatgcgtaagttgaaagcgttgggcctga

SEQ ID NO: 262113 - DNA, 75 bp, synthetic construct
  source 1..75: mol_type = other DNA
tacccacaacatgcgcacgctgggctcacttcgcccggacaaacgtcgccgcatcgcccgtgaaactctcgaaat

SEQ ID NO: 262114 - DNA, 75 bp, synthetic construct
  source 1..75: mol_type = other DNA
tgaaactcgactatgaaacgctgatggcggcgctgctgcatgacgtgattgaagatacacccgccacctaccagg

SEQ ID NO: 262115 - DNA, 75 bp, synthetic construct
  source 1..75: mol_type = other DNA
tttcacgcgatcacacggcagacagttactttggggaacctatcttcctttaaaagatggcccaatatggataac

SEQ ID NO: 262116 - DNA, 75 bp, synthetic construct
  source 1..75: mol_type = other DNA
tcacccgagttatgttggataaaggctttgttcagcaacaaatagctaatacatccttcgcgccatttattcgtg

SEQ ID NO: 262117 - DNA, 75 bp, synthetic construct
  source 1..75: mol_type = other DNA
atccccggcaatcgcttaattgtccagcagggtgagtcatcttttgagtgcagccttgatgatatcgaggtagta

SEQ ID NO: 262118 - DNA, 75 bp, synthetic construct
  source 1..75: mol_type = other DNA
tcctgggccgttatctcccggcacaaccgggcaaaatcattactgttgacggcgatgaaattggtgagcaccagg

SEQ ID NO: 262119 - DNA, 75 bp, synthetic construct
  source 1..75: mol_type = other DNA
atacaaccagatgaacacggcgctggacatgaacggcaagaacgtaaaccgtgccggaaacctcctggtgacatc

SEQ ID NO: 262120 - DNA, 75 bp, synthetic construct
  source 1..75: mol_type = other DNA
tgtgatgacgggcacccggatgtacggcataggtgatggagttgatgaggagcatgtggatgcctactgttgccc

SEQ ID NO: 262121 - DNA, 75 bp, synthetic construct
  source 1..75: mol_type = other DNA
cgctgcgctacattgcggcggccattgacggttacggcggttttgtctacagcggcagcatgccgtcaggctgta

SEQ ID NO: 262122 - DNA, 75 bp, synthetic construct
  source 1..75: mol_type = other DNA
tcgcctccaaagtgagcggaccgtcgcgcaataatgacaagggcattcgcccggatcaggcgctggacagaaaaa

SEQ ID NO: 262123 - DNA, 75 bp, synthetic construct
  source 1..75: mol_type = other DNA
ataaatatgtcgaggcagcaaatgaattacgggtttataaatcgcaactggagcaaattgagagtgagatattgt

SEQ ID NO: 262124 - DNA, 75 bp, synthetic construct
  source 1..75: mol_type = other DNA
cagaagtatcaaaaagaactgaatctggataagaaaagagcagagcgattaacaatacttgcccgtataaaccgt

SEQ ID NO: 262125 - DNA, 75 bp, synthetic construct
  source 1..75: mol_type = other DNA
cggaaacctaccgctttattgacgagttaacggacaaactcaagctcaacctgaaagtgtaccgcgctaccgaaa

SEQ ID NO: 262126 - DNA, 75 bp, synthetic construct
  source 1..75: mol_type = other DNA
cctataaaaataatccagatgctctcaaacgagcactggttagcgtgagtagccaaactgtacctgttagtatta

SEQ ID NO: 262127 - DNA, 75 bp, synthetic construct
  source 1..75: mol_type = other DNA
ctcaccgataccggttatctgttcccagaaacctaccgctttatcgatgagttaacggacaaactcaagctcaac

SEQ ID NO: 262128 - DNA, 75 bp, synthetic construct
  source 1..75: mol_type = other DNA
gcaatatcccgcaggcaccttcggtattgattttcgctacggctaatcatgcatcccacaggcccgcatctcggg

SEQ ID NO: 262129 - DNA, 75 bp, synthetic construct
  source 1..75: mol_type = other DNA
gaaggcattgaaaagtacaatgagatcaacaaagtcgaaccgatgaaccgggcgctgaaagagctgaatgcgcaa

SEQ ID NO: 262130 - DNA, 75 bp, synthetic construct
  source 1..75: mol_type = other DNA
taatctgcccggtgaatatgtactttcttccagctttggcattcaggcggcggtgagtctgcatctggtgaatca

SEQ ID NO: 262131 - DNA, 75 bp, synthetic construct
  source 1..75: mol_type = other DNA
tgtttgcggttggaatactgatattcggtctgatgcatggttctttttctgtcccggcatcggaagtaggacgag

SEQ ID NO: 262132 - DNA, 75 bp, synthetic construct
  source 1..75: mol_type = other DNA
aaagcaatcagcgatggtgctctgacgggttcgagttctgctgtgataacggagagagactgcgtgtcacgttcg

SEQ ID NO: 262133 - DNA, 75 bp, synthetic construct
  source 1..75: mol_type = other DNA
agtggagtggctgacggataatggttcatgctaccgggctaatgaaacacggcagtttgcccggatggtgggtct

SEQ ID NO: 262134 - DNA, 75 bp, synthetic construct
  source 1..75: mol_type = other DNA
ggcttttttgcctttgcaactccctgcgggaatcgttatctcactgattggtggaccattctttttgctactgct

SEQ ID NO: 262135 - DNA, 75 bp, synthetic construct
  source 1..75: mol_type = other DNA
ggcttttttgcctttgcaactgcctgccggaatcattatttcattgattggtggaccattctttttgctactgct

SEQ ID NO: 262136 - DNA, 75 bp, synthetic construct
  source 1..75: mol_type = other DNA
atatttcccgcccgcgatttgttctgattggtattggtgtttcctggtttttcgccgccggtatcggtgtattta

SEQ ID NO: 262137 - DNA, 75 bp, synthetic construct
  source 1..75: mol_type = other DNA
caaacccattaatttcattagatttatttaaaacccgcactttctcgatcggtatcgtaggcaatattgcaaccc

SEQ ID NO: 262138 - DNA, 75 bp, synthetic construct
  source 1..75: mol_type = other DNA
ctgccatatgttgatgctgaacgcattggcgtgctgggtgtgtgtgtgggggggggggtggctatgccattaatg

SEQ ID NO: 262139 - DNA, 75 bp, synthetic construct
  source 1..75: mol_type = other DNA
ccgtgttatcgattatgcagtaactctgccatatgttaatgctgaacgtattggcgtgctgggagtgtgggggtg

SEQ ID NO: 262140 - DNA, 75 bp, synthetic construct
  source 1..75: mol_type = other DNA
agtggagtggctgacggataatggttcatgctaccgggctaatgaaacacgccagtttgcccggatgttgggcct

SEQ ID NO: 262141 - DNA, 75 bp, synthetic construct
  source 1..75: mol_type = other DNA
agtggagtggctgacggataatggttcatgctaccgggctaatgaaacacgtcagtttgcccggatgctgggcct

SEQ ID NO: 262142 - DNA, 75 bp, synthetic construct
  source 1..75: mol_type = other DNA
catacaggcagagtggccgtgaaagaaagcaatcagcgatggtgctctgacgggttcgagttctgctgtgataac

SEQ ID NO: 262143 - DNA, 75 bp, synthetic construct
  source 1..75: mol_type = other DNA
gcactgcactgggcagtcactacgggcggcttcaacagtgaaacagtacaggacgtaatgctgggagcggtggaa

SEQ ID NO: 262144 - DNA, 75 bp, synthetic construct
  source 1..75: mol_type = other DNA
ttccggctcgccgtggcgaagcgattaatcagttaaaacgcatcaatgcggatgcaccgggcaatacgggcctgc

SEQ ID NO: 262145 - DNA, 75 bp, synthetic construct
  source 1..75: mol_type = other DNA
actgggccgcaagcacggggggttatgacaaagcaacggtgcaggatgtcatgttaggagcaatagaaaaacgct

SEQ ID NO: 262146 - DNA, 75 bp, synthetic construct
  source 1..75: mol_type = other DNA
atgccaggagcggtggaacgccgcttcggcagcgagcttccgacatctccagtggagtggctgacggataatggt

SEQ ID NO: 262147 - DNA, 75 bp, synthetic construct
  source 1..75: mol_type = other DNA
gcggacctctatcgccagcaggatcttaacgtcacccttgagcatgattattggggttcgagcggcaccggtggt

SEQ ID NO: 262148 - DNA, 75 bp, synthetic construct
  source 1..75: mol_type = other DNA
acaaagacgccatggtcgcatccggtgtgactacgacgcgtccgcaggataacgacacctttacccgactgaccc

SEQ ID NO: 262149 - DNA, 75 bp, synthetic construct
  source 1..75: mol_type = other DNA
cttacgggctgtacctctctggtcatgaccaggacagagcggcgctggcgcatatcaacagcctgccgcgtgcgc

SEQ ID NO: 262150 - DNA, 75 bp, synthetic construct
  source 1..75: mol_type = other DNA
ctggtggatattgccgttccgcgcgatgttgagccggaagttggcaaactggcgaatgcctacctttacagcgtt

SEQ ID NO: 262151 - DNA, 75 bp, synthetic construct
  source 1..75: mol_type = other DNA
ggttcatgctaccgggctaatgaaacacgccagttcgcccggatgttgggacttgaaccgaagaacacggcggtg

SEQ ID NO: 262152 - DNA, 75 bp, synthetic construct
  source 1..75: mol_type = other DNA
tcggagagctgccaacgtatggttatcgtcgggtatgggcgctgcttcgcagacaggcagaacttgatggtatgc

SEQ ID NO: 262153 - DNA, 75 bp, synthetic construct
  source 1..75: mol_type = other DNA
aaccatcgaactggtggcgcgtcatctgcgcgaacacaaagtgcagaagatgattatcgccaatcgtactcgcga

SEQ ID NO: 262154 - DNA, 75 bp, synthetic construct
  source 1..75: mol_type = other DNA
accataaaacggcacctgtatcgctacgagaacgtgtatcgttttcgccggacaagctcgatcaggcgcttgaca

SEQ ID NO: 262155 - DNA, 75 bp, synthetic construct
  source 1..75: mol_type = other DNA
tgattatcgccaaccgtactcgcgaacgagcacaaattttggcagatgaagttggcgcggaagtgattgcattga

SEQ ID NO: 262156 - DNA, 75 bp, synthetic construct
  source 1..75: mol_type = other DNA
ctgcaatgtgttcgctggcatttattctgacatttgttgttctgattcttattggttttgatatgccatcccgtg

SEQ ID NO: 262157 - DNA, 75 bp, synthetic construct
  source 1..75: mol_type = other DNA
actcaccagaagtcgttgcaaatatttttatgctggcaggttttggctctgcagtaggcagttgtatcggcggct

SEQ ID NO: 262158 - DNA, 75 bp, synthetic construct
  source 1..75: mol_type = other DNA
cgcctgattgggatgctgtgcgtttgcagttggtcgataaaattggcgatgaaagtaccaccgttaccgtagcac

SEQ ID NO: 262159 - DNA, 75 bp, synthetic construct
  source 1..75: mol_type = other DNA
cgtctggggatagtgaaagttctcgatcaaccggatttggttaatcaaaaaccacaactcccggcatacgagcgc

SEQ ID NO: 262160 - DNA, 75 bp, synthetic construct
  source 1..75: mol_type = other DNA
ttaaagatgaatttgcaggcctgcttgaatggatagcgtatcaccgggttttaggcgtaagcggatttatgattg

SEQ ID NO: 262161 - DNA, 75 bp, synthetic construct
  source 1..75: mol_type = other DNA
cgacgaattcctggtaccactcgatcctgaacaaagcattgccgccagcctggacaaatggtttagcgatccctc

SEQ ID NO: 262162 - DNA, 75 bp, synthetic construct
  source 1..75: mol_type = other DNA
aagttgacctttgcccagccccttttgacaaagaaaatcgtataaggctcccacttgaacgcattagtacaattg

SEQ ID NO: 262163 - DNA, 75 bp, synthetic construct
  source 1..75: mol_type = other DNA
ttgaatcaggtgtgacagaaggcattgcacacgacttcacgggtcggacaacgatacacccagactatgtggaca

SEQ ID NO: 262164 - DNA, 75 bp, synthetic construct
  source 1..75: mol_type = other DNA
atgatccatgtactgaagagcaggcagagtggctaattcagaactaccgcagacgtggttacgagtttcagaaag

SEQ ID NO: 262165 - DNA, 75 bp, synthetic construct
  source 1..75: mol_type = other DNA
cccgggtaaatccttagcgttagaaatcgaaaggcaggggagtcccttgtctttgacattaatcccggagagtaa

SEQ ID NO: 262166 - DNA, 75 bp, synthetic construct
  source 1..75: mol_type = other DNA
ggatgtgcttctccgtatacaccatgttatcggagagctgcccacatatggttatcgtcgggtatgggcgctgct

SEQ ID NO: 262167 - DNA, 75 bp, synthetic construct
  source 1..75: mol_type = other DNA
atctccgtcaccatgcgggtgatcccgtccgatattccggacatcctcaccatgaatattgaaccggacctgctg

SEQ ID NO: 262168 - DNA, 75 bp, synthetic construct
  source 1..75: mol_type = other DNA
cgatgagtttttattgcccttatcgcccgacttaaatgtcgccgatttcttcgcgtcacagtttactgatgaaag

SEQ ID NO: 262169 - DNA, 75 bp, synthetic construct
  source 1..75: mol_type = other DNA
cgccgctggaaaactcgcgtaatgaagatcagaactggcgcgataacctggtgcgccaggtgcagcattcacagc

SEQ ID NO: 262170 - DNA, 75 bp, synthetic construct
  source 1..75: mol_type = other DNA
acgatgccggttatagcggaactaatatgacgggcgggaaaggtgctgctggaatttgtattatcgaggagtttg

SEQ ID NO: 262171 - DNA, 75 bp, synthetic construct
  source 1..75: mol_type = other DNA
atgccggttatagcggaactaatatgacgggcgggaaaggtgctgctggaatttgtattatcgaggagcttgcat

SEQ ID NO: 262172 - DNA, 75 bp, synthetic construct
  source 1..75: mol_type = other DNA
ccttgtcggcgatggtgttgaaatcaacttcacccggatgttctggcagggtacggaatacaaggttaatgcctg

SEQ ID NO: 262173 - DNA, 75 bp, synthetic construct
  source 1..75: mol_type = other DNA
cagcgcgtcatcaatcgcatgttaaagctggcgcttgaaggctatagcgacgcctggaaggcgattaatccgctg

SEQ ID NO: 262174 - DNA, 75 bp, synthetic construct
  source 1..75: mol_type = other DNA
ttgcaagcactggagattatcaatgagcgttttgcccgtcatttccgcatggggttgtttaacctgttacgtcgt

SEQ ID NO: 262175 - DNA, 75 bp, synthetic construct
  source 1..75: mol_type = other DNA
ggggttagtgctgaagtgacttggagcggtgtcagggtaaatcactatgcagttaaatcacttgaggaattcttg

SEQ ID NO: 262176 - DNA, 75 bp, synthetic construct
  source 1..75: mol_type = other DNA
tgaagttgactgagttatcagcagttgaatctattcctactggttcttggttcaaaaaaatgaaaaaatggatgg

SEQ ID NO: 262177 - DNA, 75 bp, synthetic construct
  source 1..75: mol_type = other DNA
tctttgccgaggaaggcctggtcacagaacgtttcactcgccatgcacctataaaatttaatgttcaccacaact

SEQ ID NO: 262178 - DNA, 75 bp, synthetic construct
  source 1..75: mol_type = other DNA
ctgctggacaggaaattggtttaggcggcgctttatatgcactgatcgcgtttctaatgggtgttttcattattg

SEQ ID NO: 262179 - DNA, 75 bp, synthetic construct
  source 1..75: mol_type = other DNA
atggaacgttctcagcgcttgagacggttatccagcaaatcaatgagaacggaaagcgtattcttaaagcaacgg

SEQ ID NO: 262180 - DNA, 75 bp, synthetic construct
  source 1..75: mol_type = other DNA
cgccgcaacaatgcttattgctaaatttatggtaggtctacttcttattgtcgggccactttatttaatgatggc

SEQ ID NO: 262181 - DNA, 75 bp, synthetic construct
  source 1..75: mol_type = other DNA
accaaactgccgcctgcgtttgaactgccaggggtaaagcatattttgtttcgtggtcattgcagcgaaagcgat

SEQ ID NO: 262182 - DNA, 75 bp, synthetic construct
  source 1..75: mol_type = other DNA
ttattgcgcttcatgatgcgaatataaaccgctacggcggcctgcctggcatgtcagatccgggcagggcagagg

SEQ ID NO: 262183 - DNA, 75 bp, synthetic construct
  source 1..75: mol_type = other DNA
atgaggcatatatcaccggaagaacttattgcgcttcatgatgcgaatataagccgctacggcggcctgccgggc

SEQ ID NO: 262184 - DNA, 75 bp, synthetic construct
  source 1..75: mol_type = other DNA
cgttttcatctgccgactacgctggcggagctggaagtggatatcaataatcaggcggagatcgacaaagtgatt

SEQ ID NO: 262185 - DNA, 75 bp, synthetic construct
  source 1..75: mol_type = other DNA
atgcctcacaatcctatccgcgtggtcgtcggcccggctaactacttttcacatcccggaagtttcaatcacctg

SEQ ID NO: 262186 - DNA, 75 bp, synthetic construct
  source 1..75: mol_type = other DNA
tgcaaagcgccttgctgggtcaggatgatgtgctggcgcaattaactggagcgtatcagcgttttcatctgccga

SEQ ID NO: 262187 - DNA, 75 bp, synthetic construct
  source 1..75: mol_type = other DNA
ggcgctgcgactggcgagatatctgtatcttctgtcgccgacacgttacgtagattgtatggttctgcggagtag

SEQ ID NO: 262188 - DNA, 75 bp, synthetic construct
  source 1..75: mol_type = other DNA
tagcaaggcggaacaaagtatcaccctgctcaaagaacgccgcgccgcctttatcaccgccgctgtcaccggcca

SEQ ID NO: 262189 - DNA, 75 bp, synthetic construct
  source 1..75: mol_type = other DNA
actgtaggcgctgcgactggtgaaatcgccgtatcttcagtagcagaaaagctacgtgaactatatggttccaag

SEQ ID NO: 262190 - DNA, 75 bp, synthetic construct
  source 1..75: mol_type = other DNA
cggttaaagatctgaatcgcttgcgcgagatggtttttgcctgtctctatcccagcatgtttaattcccgcgttg

SEQ ID NO: 262191 - DNA, 75 bp, synthetic construct
  source 1..75: mol_type = other DNA
taaacccggagatatgtactcctttacagttggggctggaggggctggaggggctggaggcacacaggtaagacc

SEQ ID NO: 262192 - DNA, 75 bp, synthetic construct
  source 1..75: mol_type = other DNA
cagtacgacggaggcggctacgccgagtgcggtgaaagcggcgtatgacctggcaaatggaaaggctgcaggtag

SEQ ID NO: 262193 - DNA, 75 bp, synthetic construct
  source 1..75: mol_type = other DNA
accaaacttccacctgcgtttgaactgccaggagtaaagcatcttttgtttcgcggtcattgcagcgaaagcgat

SEQ ID NO: 262194 - DNA, 75 bp, synthetic construct
  source 1..75: mol_type = other DNA
tcgcccacggcacgcctacagaaatcttacaagacgaacacgttaagcgtgtataccttggggaagacttcagac

SEQ ID NO: 262195 - DNA, 75 bp, synthetic construct
  source 1..75: mol_type = other DNA
gaagcctccattttccgtcgcctcagcgtttacgataacctgatggcggtactgcaaattcgtgacgacttgtct

SEQ ID NO: 262196 - DNA, 75 bp, synthetic construct
  source 1..75: mol_type = other DNA
gcgcgccgcggtatcggctatctgccacaggaagcctccattttccgtcgcctcagcgtttacgataacctgatg

SEQ ID NO: 262197 - DNA, 75 bp, synthetic construct
  source 1..75: mol_type = other DNA
tggtggggttgattacatcagtggccaggatcagaagtggtggcctgctgctgccggtattgctgcatatggaag

SEQ ID NO: 262198 - DNA, 75 bp, synthetic construct
  source 1..75: mol_type = other DNA
cattgtgccgctctttcagggaatcaaagatagtctgggcttacagccgaatctgcgttatggcgtgattgcgct

SEQ ID NO: 262199 - DNA, 75 bp, synthetic construct
  source 1..75: mol_type = other DNA
aatggctggcggcgcccgttacgacctgaaggggcagccgtgcggggaagtgactccacaggaacagaaagaggc

SEQ ID NO: 262200 - DNA, 75 bp, synthetic construct
  source 1..75: mol_type = other DNA
cggtggagtccattcattacctgccagtcgcgctgacaccagatacgttgcgggcagcgttagaaaaagtggaat

SEQ ID NO: 262201 - DNA, 75 bp, synthetic construct
  source 1..75: mol_type = other DNA
gccaaacttccgcctgcatttgaacagccaggggcaaagcatattttgtttcgcggtcattgcagcgaaagcaat

SEQ ID NO: 262202 - DNA, 75 bp, synthetic construct
  source 1..75: mol_type = other DNA
tcgtcggcccggctaactacttttctcatcccggaagtctgaatcgcctgcatgattttttcaccaatgaacagc

SEQ ID NO: 262203 - DNA, 75 bp, synthetic construct
  source 1..75: mol_type = other DNA
acgctgcaacgacatcattcatcccgggcgctgttgacgaggccaccctgaaatatgcaatccagaaggctcgtg

SEQ ID NO: 262204 - DNA, 75 bp, synthetic construct
  source 1..75: mol_type = other DNA
accaaacttccatcggcgtttgaactgccaagagcaaagcatattttgtttcgcggtcattgcagtgaaagcaat

SEQ ID NO: 262205 - DNA, 75 bp, synthetic construct
  source 1..75: mol_type = other DNA
aaagtgattgcccacaccttacgtccggtggaatccattcattacctgccagtcacgctgacaccagatacgttg

SEQ ID NO: 262206 - DNA, 75 bp, synthetic construct
  source 1..75: mol_type = other DNA
tgactacatcagtgtcatgcccaaaccagacgggttaacggcagcaaagaaccttgcagaggcgttcgagcatta

SEQ ID NO: 262207 - DNA, 75 bp, synthetic construct
  source 1..75: mol_type = other DNA
catgcccaaaccagacgggttaacggcagcaaagaaccttacagaggcgttcgagcattataacgaatggcatcc

SEQ ID NO: 262208 - DNA, 75 bp, synthetic construct
  source 1..75: mol_type = other DNA
gtaccgccatcgaaacgggcacatactggcaaagtggccgtgaaagtaaagcaatcaacgatggtgctctgacgg

SEQ ID NO: 262209 - DNA, 75 bp, synthetic construct
  source 1..75: mol_type = other DNA
tgaaccagacgttcgctcctacagcaccaaatcaggtctgggtgccggacctgacgtatgttgccacacaggagg

SEQ ID NO: 262210 - DNA, 75 bp, synthetic construct
  source 1..75: mol_type = other DNA
ggaaaatgaactccttaaagaagccgttgaatatgggcgagcaaaaaagtggatagcgcacgtcattctcagacg

SEQ ID NO: 262211 - DNA, 75 bp, synthetic construct
  source 1..75: mol_type = other DNA
gccgcagtcgtcacactgatgatacggatgtgcttctccgtatacaccatgtttatcggagagctgcccacgtat

SEQ ID NO: 262212 - DNA, 75 bp, synthetic construct
  source 1..75: mol_type = other DNA
agagcacggcggtgcggagtccggagagtaacggcatagcagagagcttcgtgaaaacgataaagcgtgactaca

SEQ ID NO: 262213 - DNA, 75 bp, synthetic construct
  source 1..75: mol_type = other DNA
aaaacgatgaaggaagactacatcgcgttcatgccgaaaccgaatgtaagaacggcattgcataaccttgcagtg

SEQ ID NO: 262214 - DNA, 75 bp, synthetic construct
  source 1..75: mol_type = other DNA
gggccaggcgtattcccagaaaggtgatcgcgccaatgcagtggcgaatctggaaaaagccctcgcgctggatcc

SEQ ID NO: 262215 - DNA, 75 bp, synthetic construct
  source 1..75: mol_type = other DNA
tcatgctaccgggctaatgaaacacggcagtttgcccggatgttggggcttgaaccgaagaacacggcgatgcgg

SEQ ID NO: 262216 - DNA, 75 bp, synthetic construct
  source 1..75: mol_type = other DNA
taacgaatggcatccgcatagtgcgctgggttatcgctcgccacgggaatatctgcggcagtgggccagtgatgg

SEQ ID NO: 262217 - DNA, 75 bp, synthetic construct
  source 1..75: mol_type = other DNA
gtgaaaacgataaagcgtgactacatcagtgtcatgcccaaaccagacgggttaacggcagcaaagaaccttgca

SEQ ID NO: 262218 - DNA, 75 bp, synthetic construct
  source 1..75: mol_type = other DNA
gaagccctgtacaacggcagtcagtagccctcagagtaatggaatggcagaacggttcgtgaaaacgatgaagga

SEQ ID NO: 262219 - DNA, 75 bp, synthetic construct
  source 1..75: mol_type = other DNA
cactcagtcatttaatcatgggataaaaacaacaaatacagcaggcgcgcatagccatgatagtggttctggcga

SEQ ID NO: 262220 - DNA, 75 bp, synthetic construct
  source 1..75: mol_type = other DNA
tgaatcaattgagtcagagatgtgatgcctggcaatgccaaatttggggcgctggtggaaggctacgtttgatgc

SEQ ID NO: 262221 - DNA, 75 bp, synthetic construct
  source 1..75: mol_type = other DNA
cgtcaattggttgccgcggacaaacccggcctggtgcttgatattgccgcactttcggaaaacgatctggcattt

SEQ ID NO: 262222 - DNA, 75 bp, synthetic construct
  source 1..75: mol_type = other DNA
agggagtgattctatcttaggtaaaggtggaatccctgggaatgtcacattagaacgttcagagataatagctgg

SEQ ID NO: 262223 - DNA, 75 bp, synthetic construct
  source 1..75: mol_type = other DNA
aggcgtcagaactgttgaaggggactctacagcaggtggcaatggtgcttcaggttttgtcagaatatggtggta

SEQ ID NO: 262224 - DNA, 75 bp, synthetic construct
  source 1..75: mol_type = other DNA
tcatgacaattacaaatttaacacatccacggatggagagcatgcacattcagttaatgttggctcacactctca

SEQ ID NO: 262225 - DNA, 75 bp, synthetic construct
  source 1..75: mol_type = other DNA
gctgtgatcgtgaggcactgcactgggcggtcactaccggcggcttcaacagtgaaacagtacaggacgtcatgc

SEQ ID NO: 262226 - DNA, 75 bp, synthetic construct
  source 1..75: mol_type = other DNA
cgacagtgaaacagtacaggacgtaatgctgggagcggtggaacgccgcttcggcaacaagcttccggcgtctcc

SEQ ID NO: 262227 - DNA, 75 bp, synthetic construct
  source 1..75: mol_type = other DNA
gatgttgggacttgaaccgaagaacacggcggtgcggagtccggagagtaacggcatagcagagagcttcgtgaa

SEQ ID NO: 262228 - DNA, 75 bp, synthetic construct
  source 1..75: mol_type = other DNA
gttatcgctcgccacgggaatatctacggcagcaagccagtaatgggttaagtgataacaggtgtctggaaatat

SEQ ID NO: 262229 - DNA, 75 bp, synthetic construct
  source 1..75: mol_type = other DNA
ttccgctgtgataacggagaaaaactgcgagtcacgttcgcgctggactgctgtgaccgtgaggcactgcactgg

SEQ ID NO: 262230 - DNA, 75 bp, synthetic construct
  source 1..75: mol_type = other DNA
atggcgcacaagaccaaattacacaattctgataattcagccgtctttgccagcaggcacgggcggcgttctcac

SEQ ID NO: 262231 - DNA, 75 bp, synthetic construct
  source 1..75: mol_type = other DNA
atgaagcttatatcgagttttgcccgcaggcatcgctggctggctggctggcggaatatccgcacctggcgattt

SEQ ID NO: 262232 - DNA, 75 bp, synthetic construct
  source 1..75: mol_type = other DNA
acgctcaaccgctacccggaatgtcagccaaaagcagtgattgaaaattacgcgcagtatgcaggcgtaaaaccg

SEQ ID NO: 262233 - DNA, 75 bp, synthetic construct
  source 1..75: mol_type = other DNA
cgataaagcgtgactacatcagtgtcatgcccaaaccagacgggttaacggcagcaaagaaccttacagaggcgt

SEQ ID NO: 262234 - DNA, 75 bp, synthetic construct
  source 1..75: mol_type = other DNA
tcgatatccgcggtaacgccaaattcgctttggatccgagctgccagcgcgtggataagctgcccgcgacgtgct

SEQ ID NO: 262235 - DNA, 75 bp, synthetic construct
  source 1..75: mol_type = other DNA
agctggtgggatccgaacgtcatctatccggatgcgattaacgcggcgcgggaagtcattcgccacaaaatgaaa

SEQ ID NO: 262236 - DNA, 75 bp, synthetic construct
  source 1..75: mol_type = other DNA
agcgaacatgattttgtgggcgatgcctttttcgctcacgttcgcgaaatcacgcagcgtagtccggtgccgttt

SEQ ID NO: 262237 - DNA, 75 bp, synthetic construct
  source 1..75: mol_type = other DNA
ccggtagctcctgatgccaatgaaccagtgaaactggcgcagaccattgccgatatggcgctgcgttatgtggtt

SEQ ID NO: 262238 - DNA, 75 bp, synthetic construct
  source 1..75: mol_type = other DNA
tgaagaaattattgaagtgatgcgcgatctgcgtcgtcatggtgtgaccatgttaacgctggggcaatatttgca

SEQ ID NO: 262239 - DNA, 75 bp, synthetic construct
  source 1..75: mol_type = other DNA
tgctgcgcaagccggaatggatgaaaatcaagcttccagcggactctacacgtatccagggcatcaaagccgcaa

SEQ ID NO: 262240 - DNA, 75 bp, synthetic construct
  source 1..75: mol_type = other DNA
taccgggctaatgaaacacgccagttcgcccggatgttgggacttgaaccgaagaacacggcggtgcggagtccg

SEQ ID NO: 262241 - DNA, 75 bp, synthetic construct
  source 1..75: mol_type = other DNA
tccgcactggtggaagcgtcaaccgcttattcccaaccttctgtcacaggaactgaaaaactatctgaagcttaa

SEQ ID NO: 262242 - DNA, 75 bp, synthetic construct
  source 1..75: mol_type = other DNA
tagccgcttcggtatcttcagtatatttcctatgctgttggttgtgctttatggcgttgggatttatctcactac

SEQ ID NO: 262243 - DNA, 75 bp, synthetic construct
  source 1..75: mol_type = other DNA
tgttcccgcttatctgggtcggcgtagtttgtgttattggtgcatttagcgcctggtttcatcgttgctggttgt

SEQ ID NO: 262244 - DNA, 75 bp, synthetic construct
  source 1..75: mol_type = other DNA
gctttagcgcccacgtcatcgatgaaacattgcgtcagcggaccagctccctgtttcgcggtattatccccaaac

SEQ ID NO: 262245 - DNA, 75 bp, synthetic construct
  source 1..75: mol_type = other DNA
gtgccacctgtattaatgggcgatccgcggcgcattcgtcaagtgatgaccaatctgttgagcaatgccctgcgc

SEQ ID NO: 262246 - DNA, 75 bp, synthetic construct
  source 1..75: mol_type = other DNA
tttctgaactggttgattcaggccgatacgcagaaagcacttagtcatgcgtttggctccacgccgatgaataaa

SEQ ID NO: 262247 - DNA, 75 bp, synthetic construct
  source 1..75: mol_type = other DNA
catggcgcgatcctcaaagagctgattgccggggtggaagaagaggggcttcacgcccgggtggtgcgcattctg

SEQ ID NO: 262248 - DNA, 75 bp, synthetic construct
  source 1..75: mol_type = other DNA
ccgatgtcgcattcgtagcagtcgaaggagatcgtcttagtggttcaggtattgctatcggtattcagtcgaaag

SEQ ID NO: 262249 - DNA, 75 bp, synthetic construct
  source 1..75: mol_type = other DNA
gccaaatcatcgaagaagtactggcagaaatgcaacccagtgataaacctgtctcatttcgcgcgtctgctccag

SEQ ID NO: 262250 - DNA, 75 bp, synthetic construct
  source 1..75: mol_type = other DNA
gacggataatggttcatgctaccgggcaaatgaaacacgacagttggcctggatgttgggccttgaaccgaagat

SEQ ID NO: 262251 - DNA, 75 bp, synthetic construct
  source 1..75: mol_type = other DNA
gggagcgaaaatgcctcgtgcagattgggggcatatcggttcaattgaagttgtatacccagatcagcctgagca

SEQ ID NO: 262252 - DNA, 75 bp, synthetic construct
  source 1..75: mol_type = other DNA
cctttatccagcgcatcgtcactactcagggcgacacgtttaacagcgaagcggagagcgttgacccggcagtgg

SEQ ID NO: 262253 - DNA, 75 bp, synthetic construct
  source 1..75: mol_type = other DNA
gacggataatggttcatgctaccgggcgaatgaaacacgacagttggcccggatgttgggccttgaaccgaagac

SEQ ID NO: 262254 - DNA, 75 bp, synthetic construct
  source 1..75: mol_type = other DNA
gacggataatggttcatgctaccgggccaatgaaacacgacagttggccaggatgttgggccttgaaccgaagaa

SEQ ID NO: 262255 - DNA, 75 bp, synthetic construct
  source 1..75: mol_type = other DNA
gacggataatggttcatgctaccgggctaatgaaacacgacagttggcctggatgttgggccttgaaccgaagag

SEQ ID NO: 262256 - DNA, 75 bp, synthetic construct
  source 1..75: mol_type = other DNA
ccagcgattaccgcaggcaatttaaaaactgttttgcggaacaagaaatcttatctgaatttcctcaaccggtaa

SEQ ID NO: 262257 - DNA, 75 bp, synthetic construct
  source 1..75: mol_type = other DNA
tcatcagatggctgtgcttaaaaaaagaacaaatggtagtgtccgctattgccagtacacctcagttctgataaa

SEQ ID NO: 262258 - DNA, 75 bp, synthetic construct
  source 1..75: mol_type = other DNA
ccccggcagccttcagggaaaatatcatcagatggctgcttaagaaaagaacaaatggtagtgtccgctattgcc

SEQ ID NO: 262259 - DNA, 75 bp, synthetic construct
  source 1..75: mol_type = other DNA
cgaataacccggacgtcgttgccgcccgtttccgttctctgttacgtcagggcgatattgatggcgcgcaaaaac

SEQ ID NO: 262260 - DNA, 75 bp, synthetic construct
  source 1..75: mol_type = other DNA
gattacttaccgactttcgcaggatctctggcaggccggacaacgcagccaggccgatacgttaatgcgcaatct

SEQ ID NO: 262261 - DNA, 75 bp, synthetic construct
  source 1..75: mol_type = other DNA
ttcgtaaggagctaaggctacgctgtaagcagaaacgcaagttcagagcgactacgaacccgaaccacaatctgc

SEQ ID NO: 262262 - DNA, 75 bp, synthetic construct
  source 1..75: mol_type = other DNA
ccattttcgttgccagcgtattgtggataagttcgttagccgccagtcgcattacctcattgttcctcgggctga

SEQ ID NO: 262263 - DNA, 75 bp, synthetic construct
  source 1..75: mol_type = other DNA
ctgccgccaggcagatgtgcgactacgaactcgaaccacaatctgccagttgcgccaaatctgctgaaccagacg

SEQ ID NO: 262264 - DNA, 75 bp, synthetic construct
  source 1..75: mol_type = other DNA
tcagcatcatgaagaaagtgtctggtaattcgccggtgattttcgacgtgacccacgcactgcaatgccgcgatc

SEQ ID NO: 262265 - DNA, 75 bp, synthetic construct
  source 1..75: mol_type = other DNA
acgctgaaaaatgagagcctgagccactatcgttttaataaccgggatgaagccatctcagtaatacgagaatac

SEQ ID NO: 262266 - DNA, 75 bp, synthetic construct
  source 1..75: mol_type = other DNA
gcgttaatcgaacaatggcgacaacaatttcccattgaagcgatgtgtcaggtatttggtgtatccaagagcggt

SEQ ID NO: 262267 - DNA, 75 bp, synthetic construct
  source 1..75: mol_type = other DNA
aaagagctgacaggtaaagctctgtttatggcgctcaggagccagcgcccacctgccgggctaatccaccactct

SEQ ID NO: 262268 - DNA, 75 bp, synthetic construct
  source 1..75: mol_type = other DNA
cgcgtggcgctggcacaggcgcagcttggcgataccgcagcggcgcagcagacgtttaataagttgatcccgcag

SEQ ID NO: 262269 - DNA, 75 bp, synthetic construct
  source 1..75: mol_type = other DNA
gtaaagctctgtttatggcgctcaggagccagcgcccacctgccgggctaatccaccactctgatcgaggttcac

SEQ ID NO: 262270 - DNA, 75 bp, synthetic construct
  source 1..75: mol_type = other DNA
atgatctggcagcctgagttcacagataaaacactctccaggaaacccggggcggttcaggagattaaggtggca

SEQ ID NO: 262271 - DNA, 75 bp, synthetic construct
  source 1..75: mol_type = other DNA
tggcggtcgggatgacgctggtgatcctgacgtcgggcatcgacttgtcggtaggttctctgttggcgctgaccg

SEQ ID NO: 262272 - DNA, 75 bp, synthetic construct
  source 1..75: mol_type = other DNA
gcctggtttcatcgttgctggttgttggtgcctttagcgccactttccgttgtgtatgtattattagcttatgcc

SEQ ID NO: 262273 - DNA, 75 bp, synthetic construct
  source 1..75: mol_type = other DNA
gcgctggttgtcgccgatgaggcctatattgagttctgcccgcaggccacgctggccggctggctggccgagtac

SEQ ID NO: 262274 - DNA, 75 bp, synthetic construct
  source 1..75: mol_type = other DNA
gctgaaaaatgagagcctgaggcactatcgttttaagagccggaatgaagccatctcagtaatacgggaatacat

SEQ ID NO: 262275 - DNA, 75 bp, synthetic construct
  source 1..75: mol_type = other DNA
cgatgtggcgatggcgcgaaaagattattccgccgccgaacgctattaccagcagacgctgcgcatggacagcgg

SEQ ID NO: 262276 - DNA, 75 bp, synthetic construct
  source 1..75: mol_type = other DNA
tgatgtggcgatggcacgtaaagattaccccgctgccgaacgttattatcagcagactttgcgtatggacagcgg

SEQ ID NO: 262277 - DNA, 75 bp, synthetic construct
  source 1..75: mol_type = other DNA
acaggcacgattgcaggccaccaccggtcatgcggaagaagccgtggcgggttacaacaaactattcaacggagc

SEQ ID NO: 262278 - DNA, 75 bp, synthetic construct
  source 1..75: mol_type = other DNA
gtaactgttacgacaacgctccgatggaaagcttctggggaacgctgaaaaatgagagcctgagccactatcgtt

SEQ ID NO: 262279 - DNA, 75 bp, synthetic construct
  source 1..75: mol_type = other DNA
ggaagcgatgctgcgccagcagccaccgtccacgcgcattgacctcaccctggcagactgggcacagcagcgacg

SEQ ID NO: 262280 - DNA, 75 bp, synthetic construct
  source 1..75: mol_type = other DNA
cggaaaaagccgaagcgtttattgcctcgctttctgccagccagcggcgcagcgttgatgacatcgaacgcagcc

SEQ ID NO: 262281 - DNA, 75 bp, synthetic construct
  source 1..75: mol_type = other DNA
ccgcacattaccgatgcgcatagcccgtaaataccgcacctatttcgggaaaggtgcagatcgcgagacgttacg

SEQ ID NO: 262282 - DNA, 75 bp, synthetic construct
  source 1..75: mol_type = other DNA
gcattcaaatatgactggtaccagcatgacccatgcactgaagaacaggccgaatggctgattcagaactaccgc

SEQ ID NO: 262283 - DNA, 75 bp, synthetic construct
  source 1..75: mol_type = other DNA
tcgccacctctgatgtgtcaggcatcctcaatgcacccgcacttaacccgcttcggcgggttttgttttttcctg

SEQ ID NO: 262284 - DNA, 75 bp, synthetic construct
  source 1..75: mol_type = other DNA
attctgataattcagccgtctttgccagcaggcacgggcggcgttctcacacattcaaatatgactggttccagc

SEQ ID NO: 262285 - DNA, 75 bp, synthetic construct
  source 1..75: mol_type = other DNA
tgagcctgatgaagaatacgagcgtaatttccagcggggattgcagttgctcgaagcgaaattaaaagaaaatga

SEQ ID NO: 262286 - DNA, 75 bp, synthetic construct
  source 1..75: mol_type = other DNA
gccgcgactggggattaatcacccgaccgggattgccggtaacccgcagggacggggcattatcgaacggcttaa

SEQ ID NO: 262287 - DNA, 75 bp, synthetic construct
  source 1..75: mol_type = other DNA
ggatgttgggacttgaaccgaagatcacggcggtgcggagtccggagagtaacggtatagcagagagcttcgtga

SEQ ID NO: 262288 - DNA, 75 bp, synthetic construct
  source 1..75: mol_type = other DNA
cgtatacaccatgttatcggagagctacccacatatggttatcgtcgggtatgggcgctgcttcgcagacaaaca

SEQ ID NO: 262289 - DNA, 75 bp, synthetic construct
  source 1..75: mol_type = other DNA
tcaaagcattgactgcccccagaagtcaactcttttacaacaattccttccgtaagaaagttatatccctactat

SEQ ID NO: 262290 - DNA, 75 bp, synthetic construct
  source 1..75: mol_type = other DNA
ggatgttggggcttgaaccgaagaccacggcggtgcggagtccggagagtaacggcatagcagagagcttcgtga

SEQ ID NO: 262291 - DNA, 75 bp, synthetic construct
  source 1..75: mol_type = other DNA
ggatgttgggccttgaaccgaagaacacggcggtgcggagtccggagagtaacggaatagcagagagcttcgtga

SEQ ID NO: 262292 - DNA, 75 bp, synthetic construct
  source 1..75: mol_type = other DNA
ggatgttgggtcttgaaccgaagatcacggcggtgcggagtccggagagtaacgggatagcagagagcttcgtga

SEQ ID NO: 262293 - DNA, 75 bp, synthetic construct
  source 1..75: mol_type = other DNA
atgcttagtgctggtttaggattgtttttttatgttaatcagaattcatttgcaaatggtgaaaattattttaaa

SEQ ID NO: 262294 - DNA, 75 bp, synthetic construct
  source 1..75: mol_type = other DNA
tgatgaaggggggaacccctgtgtcaggtcaaaaagtgaccttctctaaggattttgggacactggataagactg

SEQ ID NO: 262295 - DNA, 75 bp, synthetic construct
  source 1..75: mol_type = other DNA
tgaaaatggtaaagctacggtaaaactgacatctggcgctgaggggagtgctgtcgttagtgcaaaagtcagcga

SEQ ID NO: 262296 - DNA, 75 bp, synthetic construct
  source 1..75: mol_type = other DNA
agttaaggctactaccgttgagttttttgccccgttgagtattgatggtgataaagtgaccgtaattggtactgg

SEQ ID NO: 262297 - DNA, 75 bp, synthetic construct
  source 1..75: mol_type = other DNA
atggcgcacaataccaaatatcacaattctgataccgaccttgccagcaggtgcgggctgtgttctcacgcattc

SEQ ID NO: 262298 - DNA, 75 bp, synthetic construct
  source 1..75: mol_type = other DNA
gcattcaaatctgactggtatcagcacgacccctgcaccgaagaacaggctgaatggctgattcagtattaccgc

SEQ ID NO: 262299 - DNA, 75 bp, synthetic construct
  source 1..75: mol_type = other DNA
agttatgcaaatgctatgtccttttgtggaaatttattaccatcctcacagacggtattatcaaacgtttataat

SEQ ID NO: 262300 - DNA, 75 bp, synthetic construct
  source 1..75: mol_type = other DNA
aacggatggtaacggtaaggcaaccgtaacgttgaagtcgggtacgccagggcaggtcgtcgtgtctgctaaaac

SEQ ID NO: 262301 - DNA, 75 bp, synthetic construct
  source 1..75: mol_type = other DNA
ataccgcgacggttaaaaagaatggtgtagctcaggctaatgcccctgtaacatttagtattgtatccgggactg

SEQ ID NO: 262302 - DNA, 75 bp, synthetic construct
  source 1..75: mol_type = other DNA
tctatgattccgaaaaaatgctggcatttggtcaggtcggagcgcgttacattgactcccgctttacggcaaatt

SEQ ID NO: 262303 - DNA, 75 bp, synthetic construct
  source 1..75: mol_type = other DNA
agcagagatgacttcagcgcttaatgccaatgcagttatatttgttgatcaaaccaaggccagcattactgagat

SEQ ID NO: 262304 - DNA, 75 bp, synthetic construct
  source 1..75: mol_type = other DNA
aattaatacacctacaaaatttatatctgtggagacacaaaataaagtagtctatagtgatgctgaggcaacatg

SEQ ID NO: 262305 - DNA, 75 bp, synthetic construct
  source 1..75: mol_type = other DNA
tatgctgatgctatgtccatttgcaaaaatttattaccatccacacagacggtattgtcagatatttatgactca

SEQ ID NO: 262306 - DNA, 75 bp, synthetic construct
  source 1..75: mol_type = other DNA
acaaatgcggcaaacaaaggacgggagctgactgaaaaacaacggcaggctttaaaaaacctgccgtcatggaat

SEQ ID NO: 262307 - DNA, 75 bp, synthetic construct
  source 1..75: mol_type = other DNA
tgtttgcctgatgtggcgcgtaaggcgttacaggctcgccagattaaggcgttaatgaatcagccagcaactgag

SEQ ID NO: 262308 - DNA, 75 bp, synthetic construct
  source 1..75: mol_type = other DNA
tcggtgtaccaggattaccaaaaacaattaaaggaattcgggaagcattgcgccgttattgcggcgaatcagaag

SEQ ID NO: 262309 - DNA, 75 bp, synthetic construct
  source 1..75: mol_type = other DNA
tgaaagtcgaggaaatcagctggctgcctgagtttctggcgcagtatcgccaggctaacggcagacctatgtcag

SEQ ID NO: 262310 - DNA, 75 bp, synthetic construct
  source 1..75: mol_type = other DNA
gcgcagggtaacctggaagaacgtctggaatctttggccattactgctaatgcccgtaaagggaaagagcgaaca

SEQ ID NO: 262311 - DNA, 75 bp, synthetic construct
  source 1..75: mol_type = other DNA
tgtctccgggtgtcgcgtgcgcagttgcacgtcattctcagacgagccgatgactggaaggacggccgccgcagc

SEQ ID NO: 262312 - DNA, 75 bp, synthetic construct
  source 1..75: mol_type = other DNA
atggaaattaacgaaaaattactgcgtcagattatcgaagacgtgctggcagaaatgcaacccagcgacaagtcc

SEQ ID NO: 262313 - DNA, 75 bp, synthetic construct
  source 1..75: mol_type = other DNA
agaaatgcaaaccagcgacaagtccgtttcatttcgcgcacctgtcgccgcaactgccacttccgcgccggatgg

SEQ ID NO: 262314 - DNA, 75 bp, synthetic construct
  source 1..75: mol_type = other DNA
agaaatgcaaaccagcgacaagtccgtgtcatttcgcacacctgtcgccgctactgccacttccacaccggatgc

SEQ ID NO: 262315 - DNA, 75 bp, synthetic construct
  source 1..75: mol_type = other DNA
gcgggtcattggtaaaggcaacaaagaacgccttgtgccgttaggtgaagaggcagtttactggctggaaaccta

SEQ ID NO: 262316 - DNA, 75 bp, synthetic construct
  source 1..75: mol_type = other DNA
gcttcaccgaaattgccccagcgtttgccaaaagatttaagcgaagcgcaggtcgaacgtttattacaggcacca

SEQ ID NO: 262317 - DNA, 75 bp, synthetic construct
  source 1..75: mol_type = other DNA
tgggccacagcgatctctccaccacgcaaatttatacgcatgtcgctaccgagcgtctgcggcaacttcatcaac

SEQ ID NO: 262318 - DNA, 75 bp, synthetic construct
  source 1..75: mol_type = other DNA
ttgggctacctggtatgccaggaactgcgcaaggggtgcggtattccataaagaaaatggcctcatctgagcatt

SEQ ID NO: 262319 - DNA, 75 bp, synthetic construct
  source 1..75: mol_type = other DNA
gtgaaaaccccgtcgtgtacccggaagtcagtgcaaccgtggtggcagagattgtctccgactggaccggtattc

SEQ ID NO: 262320 - DNA, 75 bp, synthetic construct
  source 1..75: mol_type = other DNA
ttgttctaccaggtattcgataaaggcgcgatggaggatggcgaaggtgtccacatcgatttcaaaaataccacg

SEQ ID NO: 262321 - DNA, 75 bp, synthetic construct
  source 1..75: mol_type = other DNA
gagctggttcacagattacaggagctgcgtgctgcagaaaccggcgagcgtgatgaaaccacactgcaacagtcg

SEQ ID NO: 262322 - DNA, 75 bp, synthetic construct
  source 1..75: mol_type = other DNA
ggatacgaggttaagaaagctcttagtctcgactatcgtcactggataatctcagtcagactcccttactccgaa

SEQ ID NO: 262323 - DNA, 75 bp, synthetic construct
  source 1..75: mol_type = other DNA
attctgataccgcccctgccagcaggcacgggcggcgttctcacacattcaaatatgactggtatcagcatgacc

SEQ ID NO: 262324 - DNA, 75 bp, synthetic construct
  source 1..75: mol_type = other DNA
agcccggcagagttcagaaaaaaacgcttagcggaagaagacactgaaattgagtggctgagtgatattgagctg

SEQ ID NO: 262325 - DNA, 75 bp, synthetic construct
  source 1..75: mol_type = other DNA
cactatatggaaagctaacaaaacctttattcaggtctttggagtctgcgacaacgttctgtaaattacgcgcta

SEQ ID NO: 262326 - DNA, 75 bp, synthetic construct
  source 1..75: mol_type = other DNA
tatcgcccggttggtaatacggtaaccatccagcaacaggattatgaggaggattacgacgaagattatgaacgc

SEQ ID NO: 262327 - DNA, 75 bp, synthetic construct
  source 1..75: mol_type = other DNA
agaagacaccgaaattgagtggctgagtgatcttgagctgcgcgacatgttccgcccgatggtggagcgtccggt

SEQ ID NO: 262328 - DNA, 75 bp, synthetic construct
  source 1..75: mol_type = other DNA
atccggcgctgactcggcgttttcaggtattgcaggttgctgagccggaagaggttgcggctgttgagatggtac

SEQ ID NO: 262329 - DNA, 75 bp, synthetic construct
  source 1..75: mol_type = other DNA
tgcgctggcgaaatactgtcaggacatgactacactggcgcgtgaaggcaatattgatccggtcaccggccgcga

SEQ ID NO: 262330 - DNA, 75 bp, synthetic construct
  source 1..75: mol_type = other DNA
accgcgctggcgctggcagaagcaatctacggcggtgagcagaatctgattactatcaatatgagcgagtttcag

SEQ ID NO: 262331 - DNA, 75 bp, synthetic construct
  source 1..75: mol_type = other DNA
cgtcccgtgctggtcagccagcggcaacgaagccgatgacttagccgccacactggcagtcaaagtgactcaggc

SEQ ID NO: 262332 - DNA, 75 bp, synthetic construct
  source 1..75: mol_type = other DNA
gcagacgtattatgccaagctcgtaaacagattcaaaatggatggaatgacaaaatatgggttagtattgaagaa

SEQ ID NO: 262333 - DNA, 75 bp, synthetic construct
  source 1..75: mol_type = other DNA
ttggtcttgggtatattgggctaccaaccgcggcgatgtttgcatcccgtaaggttaacgttatcggtgtcgatg

SEQ ID NO: 262334 - DNA, 75 bp, synthetic construct
  source 1..75: mol_type = other DNA
taatcaaccttctggaagaggaattcggacatggaatggacaaggtcacattcgactacgttctgcaaaagaaaa

SEQ ID NO: 262335 - DNA, 75 bp, synthetic construct
  source 1..75: mol_type = other DNA
gaaatacaggctgatgtcgcgcaagcaattgaaaatctcaagcagaagttagtggaatgcaatcgctataactac

SEQ ID NO: 262336 - DNA, 75 bp, synthetic construct
  source 1..75: mol_type = other DNA
atggaacgcctgccgcgccgccatgcttcagtccggaaactttcgggaaaacaagaattcgtcaaccaataattt

SEQ ID NO: 262337 - DNA, 75 bp, synthetic construct
  source 1..75: mol_type = other DNA
aaaaatcctattgtggtaataattgatgatattgatcgattgactcctgcagaaacttttcaagttttacgattg

SEQ ID NO: 262338 - DNA, 75 bp, synthetic construct
  source 1..75: mol_type = other DNA
ataccgctccccctccggcgttctcaccacgaagccgcacgactccgcaggcacacaccgccgggcatgcgccag

SEQ ID NO: 262339 - DNA, 75 bp, synthetic construct
  source 1..75: mol_type = other DNA
cagaccaccgggatgactgtggaccagtgccacaatctccccctgccatctctgcccgcacgccagtcttccggt

SEQ ID NO: 262340 - DNA, 75 bp, synthetic construct
  source 1..75: mol_type = other DNA
cagtaaatggcggcatgattcggcaccgatgcgccaaaacagcacagcaggatatcgcccgcctgtgcacgggac

SEQ ID NO: 262341 - DNA, 75 bp, synthetic construct
  source 1..75: mol_type = other DNA
cgaaatccggttgtggaagaaacatggtgggaaaatttactggcagcactgaccgaactccgcgaacgccggaac

SEQ ID NO: 262342 - DNA, 75 bp, synthetic construct
  source 1..75: mol_type = other DNA
gtcggcgcagcagctgctttcacgacgaaatccggttgtggaagaaacatggtgggaaaatttactggcagcact

SEQ ID NO: 262343 - DNA, 75 bp, synthetic construct
  source 1..75: mol_type = other DNA
caaaacccggtcgtggaagaaacatggtgggagaatttactggcagcactgaccgaactccgggaacgccggaac

SEQ ID NO: 262344 - DNA, 75 bp, synthetic construct
  source 1..75: mol_type = other DNA
tcatgctcgatcgcatagatacgctggaaaattgcgatgatgaccgtattgaggctgttaaggccgttttgcgta

SEQ ID NO: 262345 - DNA, 75 bp, synthetic construct
  source 1..75: mol_type = other DNA
caacccttttgatcttttacttcctgcagcaatggccaaagtggccgaagaagcgggtgtctataaagcaacgaa

SEQ ID NO: 262346 - DNA, 75 bp, synthetic construct
  source 1..75: mol_type = other DNA
taaaaagttttctaacgttaggctaaaattacatcataatcgaaaagaatacagcgaaaaactttcaacactgat

SEQ ID NO: 262347 - DNA, 75 bp, synthetic construct
  source 1..75: mol_type = other DNA
gggcagttaagaaaggaaaagtgtctgctgctgtgttggctgaggtcaggtctaaattaaaagtattgattggat

SEQ ID NO: 262348 - DNA, 75 bp, synthetic construct
  source 1..75: mol_type = other DNA
gtcagtgcctgtggtgcgaatactgtgctgtgtgcaaatgaagttagtatctgggttgcggaaatggtcgctggc

SEQ ID NO: 262349 - DNA, 75 bp, synthetic construct
  source 1..75: mol_type = other DNA
gtcaggtggcggatattgcccggacgcagggagagctgaatgcgctgaaagtagcgcaggataaatacggacctc

SEQ ID NO: 262350 - DNA, 75 bp, synthetic construct
  source 1..75: mol_type = other DNA
ataaatacgatcgatattgttactttattcgcctggtgctcccttttaattaactgttttagcggaggatgcgga

SEQ ID NO: 262351 - DNA, 75 bp, synthetic construct
  source 1..75: mol_type = other DNA
caggcgctacgttgcgcgatgaagtgtttttcaatcaaacagttgaaaacgtgcagcggattattattgaaggga

SEQ ID NO: 262352 - DNA, 75 bp, synthetic construct
  source 1..75: mol_type = other DNA
atgacgcaaggcgcagtgaaaacaacgggtaaacgttcgcgcgcagtgagcgcgaagaaaaaagcgattcttagc

SEQ ID NO: 262353 - DNA, 75 bp, synthetic construct
  source 1..75: mol_type = other DNA
ggcaatatttggtgatgatgccgaaacccttcaggtggtcaatgcactaatcgataaaggaaaggatggctacga

SEQ ID NO: 262354 - DNA, 75 bp, synthetic construct
  source 1..75: mol_type = other DNA
aatacgctgaaggaaacgcgtcctgatgaagcagagatgttaatggccgatgatgcattcatggaaggcatttat

SEQ ID NO: 262355 - DNA, 75 bp, synthetic construct
  source 1..75: mol_type = other DNA
ttcagaccgtaacgggatcgctggcgtgcggcgttcttgccatggccgtggccgggtcgttgcgcttcttcgggt

SEQ ID NO: 262356 - DNA, 75 bp, synthetic construct
  source 1..75: mol_type = other DNA
tttatgggcgcagagaaagcacgcgacaaggttattgcagcctttaatcgcagggtgaaggagaaggacgaatga

SEQ ID NO: 262357 - DNA, 75 bp, synthetic construct
  source 1..75: mol_type = other DNA
aaatgacagcattgcgcatggcgtggaaaggtttcgcgcaacgtgatgatgaacagatggccgcgtttcgccagt

SEQ ID NO: 262358 - DNA, 75 bp, synthetic construct
  source 1..75: mol_type = other DNA
ggtgattggcgaagatctcggcacagtgccagtagagatagtcggtaagctgcgaagtagcggtgtttactccta

SEQ ID NO: 262359 - DNA, 75 bp, synthetic construct
  source 1..75: mol_type = other DNA
gcgccgccggatatcctcggcccgttggggcagaactggggattgccgccaatggacccgcatatcatcaccgcg

SEQ ID NO: 262360 - DNA, 75 bp, synthetic construct
  source 1..75: mol_type = other DNA
aaactggggtattggggattttggcgatctcaaagcgatgctggtggatgtggcaaaacgtggcgggtcgttcat

SEQ ID NO: 262361 - DNA, 75 bp, synthetic construct
  source 1..75: mol_type = other DNA
gttacgaaccgcaggcgttgctgaataaacaaaagctgtggggtgcctgcgttcagctttatacgctgcgatcgg

SEQ ID NO: 262362 - DNA, 75 bp, synthetic construct
  source 1..75: mol_type = other DNA
aagcgtatccggagcagtcgatggcggttgcggcgacacatgacctgccaacgctgcgcggttactgggagagcg

SEQ ID NO: 262363 - DNA, 75 bp, synthetic construct
  source 1..75: mol_type = other DNA
tgagtcgatgtttgccgatgatggtgtgaacaagttgctgaaggatttggacagacggcgcagagcggcagcgaa

SEQ ID NO: 262364 - DNA, 75 bp, synthetic construct
  source 1..75: mol_type = other DNA
ggcgtggaaaggtttcgcgcaacgtgatgatgagcagatggccgcgtttcgccagtttgttgcagagcagggcga

SEQ ID NO: 262365 - DNA, 75 bp, synthetic construct
  source 1..75: mol_type = other DNA
gcagcgcgctttgaggtgaatcgccacaccctgcgccgcgccatcgaccaactggtggaaaaaggctgggtatag

SEQ ID NO: 262366 - DNA, 75 bp, synthetic construct
  source 1..75: mol_type = other DNA
ttgtcgcagaacagggagacagcctgttctggcaagccgcatttgatgcgttacacgcccagcaggtgaaagaag

SEQ ID NO: 262367 - DNA, 75 bp, synthetic construct
  source 1..75: mol_type = other DNA
ggggaataggtgactttggcgatctcaaatccatgttggtggatgtggcgaaacgcggtggatcgtttatcggcc

SEQ ID NO: 262368 - DNA, 75 bp, synthetic construct
  source 1..75: mol_type = other DNA
acaggcgcgggatgccgactgggtcgattactccacggttaccgccctaaaaatgacagcattacgaatggcgtg

SEQ ID NO: 262369 - DNA, 75 bp, synthetic construct
  source 1..75: mol_type = other DNA
gagtggtggcaaagccttcaatcttccggcgaagctgccggaaggttatcacacgctgacgcttacccaggacga

SEQ ID NO: 262370 - DNA, 75 bp, synthetic construct
  source 1..75: mol_type = other DNA
ctgaaaatccttattgctaagggagcgaatcagtgcgcgcgtgcgggggataaattaccggatttactcgatgaa

SEQ ID NO: 262371 - DNA, 75 bp, synthetic construct
  source 1..75: mol_type = other DNA
gcatcagatgcgttcattttgttacaccatatgcagtagcgaacagcaagaaagcattgcagatcatcactcact

SEQ ID NO: 262372 - DNA, 75 bp, synthetic construct
  source 1..75: mol_type = other DNA
tgagtcgatgtttgctgatgatgaggtgaacaagttgattaaggatctggacaggcggcgcagagcggcagcgaa

SEQ ID NO: 262373 - DNA, 75 bp, synthetic construct
  source 1..75: mol_type = other DNA
attatccagatagagattctgaccgtgacgccaccagtcatcctcgcgatgaaaatccggcatctcagtccccgc

SEQ ID NO: 262374 - DNA, 75 bp, synthetic construct
  source 1..75: mol_type = other DNA
gccgccggtcggcctcgctcagccagggcagaccaccgggatgactgtggaccagtgccacaatctccccctgca

SEQ ID NO: 262375 - DNA, 75 bp, synthetic construct
  source 1..75: mol_type = other DNA
gaaagtcttcgcacaacgtgatgatggacaaatggtagcgtttcgccagtttgttgctgaacagggcgacagcct

SEQ ID NO: 262376 - DNA, 75 bp, synthetic construct
  source 1..75: mol_type = other DNA
ggctacagccagaagactggctggatatggcggaaccggtaaatattcccggcaccagttaccagtataaaaact

SEQ ID NO: 262377 - DNA, 75 bp, synthetic construct
  source 1..75: mol_type = other DNA
cgcaggcattgttgaataaacaaaaactgtggggagcttgcgttcagctttataccctgcgatcggaaaaaaact

SEQ ID NO: 262378 - DNA, 75 bp, synthetic construct
  source 1..75: mol_type = other DNA
gtacaaaggccatgtaacggggggcaaagcgttcaatctaccgacgaagctgccggaaggttatcacacgctgac

SEQ ID NO: 262379 - DNA, 75 bp, synthetic construct
  source 1..75: mol_type = other DNA
aaggtactcagtacaaagggcacgtgagcggtggtaaagcgttcaatctaccgacgaagctgccggaaggttatc

SEQ ID NO: 262380 - DNA, 75 bp, synthetic construct
  source 1..75: mol_type = other DNA
aactggcgaagcaagggctgctggatgctctgcataaatatggttgtctgccaaaacgtgccgggcataaggcat

SEQ ID NO: 262381 - DNA, 75 bp, synthetic construct
  source 1..75: mol_type = other DNA
tggcgtactgcggtggtggatggctggaataatgcattttccgggcgttatccgtttaaaatgtcagcagcgatg

SEQ ID NO: 262382 - DNA, 75 bp, synthetic construct
  source 1..75: mol_type = other DNA
tctgatgctggcgcaaccgcaacatatggagcccgcctggttcagtcgtacgctcatgcgggaatggccacagcg

SEQ ID NO: 262383 - DNA, 75 bp, synthetic construct
  source 1..75: mol_type = other DNA
tgaagagctggtcagccagagcaggactctgctgcttcgccatctgggaacacagaacagcgatgccatgctgta

SEQ ID NO: 262384 - DNA, 75 bp, synthetic construct
  source 1..75: mol_type = other DNA
cagtgtaatgcccccggattaaagccagacactattttatggtgggctggtacgactctggggctggcagattta

SEQ ID NO: 262385 - DNA, 75 bp, synthetic construct
  source 1..75: mol_type = other DNA
ccaatgctgccgcaaatgcgcttggcgccgcaggagggtttgcagtatccaaaatccccggagtagacccaatgt

SEQ ID NO: 262386 - DNA, 75 bp, synthetic construct
  source 1..75: mol_type = other DNA
tgatacggaagcacctggcgccagtttaagctgggtaagcactcaggccggtacccgtcagtatgcagacctgcc

SEQ ID NO: 262387 - DNA, 75 bp, synthetic construct
  source 1..75: mol_type = other DNA
cagaggatgtggtaatcgatatcgaaagcaatggcttaccacatcataatccatcaaatcatgttgatatctttg

SEQ ID NO: 262388 - DNA, 75 bp, synthetic construct
  source 1..75: mol_type = other DNA
atgggccaaaagcaaattacacggaggagtgggttatcagaccgggagaagcagattttaaatatggtacatctc

SEQ ID NO: 262389 - DNA, 75 bp, synthetic construct
  source 1..75: mol_type = other DNA
gtggcacgcaagagaaggtgccatcttccctaataaagaagatattgcccgtgcaacaggggctgatatacgagc

SEQ ID NO: 262390 - DNA, 75 bp, synthetic construct
  source 1..75: mol_type = other DNA
gtatttaaaaaatgcaccggggccagcccgagcgagtttcgtgccggttgtgaagaaaaagtgaatgatgtagcc

SEQ ID NO: 262391 - DNA, 75 bp, synthetic construct
  source 1..75: mol_type = other DNA
tgatgatcaactctatttctcgcgagtatttaaaaaatgcaccggggcgagtccgagcgagtttagggcaggttg

SEQ ID NO: 262392 - DNA, 75 bp, synthetic construct
  source 1..75: mol_type = other DNA
tagtcatcgatatcgaaagcaatgactcaccacatcataacccatcaaattatgttgatacctttaatataatcc

SEQ ID NO: 262393 - DNA, 75 bp, synthetic construct
  source 1..75: mol_type = other DNA
cttcttcccggcagtgttgtcggtcattatggtgttctggattggcgcgaagatgcgtaaccgtaagcaggaagt

SEQ ID NO: 262394 - DNA, 75 bp, synthetic construct
  source 1..75: mol_type = other DNA
aagttcatcgcgaaattgtcgcccgcttcgaactggctgaagacatggcggataatctgctgcgtttctacatgc

SEQ ID NO: 262395 - DNA, 75 bp, synthetic construct
  source 1..75: mol_type = other DNA
tggctgactccagtacagtgttacaacaaaatcccatgggatgtgatgaagctcaacaaagccggattcaacgtg

SEQ ID NO: 262396 - DNA, 75 bp, synthetic construct
  source 1..75: mol_type = other DNA
aagaagagtgggtaattaccgcagcgaacgcgaaaccgcaatgcgatattattcatgaagcctggcagagcaggg

SEQ ID NO: 262397 - DNA, 75 bp, synthetic construct
  source 1..75: mol_type = other DNA
tactgcgtctgggtactgaagtggtcagtgaccagcaaggaaccattgccgcgctcctgggggcatcgccagggg

SEQ ID NO: 262398 - DNA, 75 bp, synthetic construct
  source 1..75: mol_type = other DNA
cccgcaaaacgccgatggcagcatcagtattgaaaaagcagtcgccattaacgaagcatttcagatttcccgcca

SEQ ID NO: 262399 - DNA, 75 bp, synthetic construct
  source 1..75: mol_type = other DNA
aaggactattgatcgccgcgattgtggcggtggatggttgggcgctgtttcatgtggtcagctataccctgcata

SEQ ID NO: 262400 - DNA, 75 bp, synthetic construct
  source 1..75: mol_type = other DNA
cgatcgcgcagaagcgttgaaacgagcacatgaagcagctgcttatgatgtctggttccgtgaacaaatccagtc

SEQ ID NO: 262401 - DNA, 75 bp, synthetic construct
  source 1..75: mol_type = other DNA
caaccttacataaactggttgaatctggcgtagtggatgcagcacacgttattggcacccagggaggctggtcgt

SEQ ID NO: 262402 - DNA, 75 bp, synthetic construct
  source 1..75: mol_type = other DNA
cccgtgccgttaatgcacgcggctataccgttggtatctcgcagaacgtgaaggccgaaaacgtccaggctgcaa

SEQ ID NO: 262403 - DNA, 75 bp, synthetic construct
  source 1..75: mol_type = other DNA
gttcggagcgccacggtactgataaaaccgagtttttgtggcaaagcagtgacggtagcgaagtgacggcgcagg

SEQ ID NO: 262404 - DNA, 75 bp, synthetic construct
  source 1..75: mol_type = other DNA
tttgaagaggtatttgagaagatcgaagcgcagcgtgaaagtctggccaccctgaaaggtgaatttatcgatggc

SEQ ID NO: 262405 - DNA, 75 bp, synthetic construct
  source 1..75: mol_type = other DNA
ggctactgcctgagtcacacaatccgaagcctgggctacccaagccgcgaggccttgcgtgcctggatccgtgat

SEQ ID NO: 262406 - DNA, 75 bp, synthetic construct
  source 1..75: mol_type = other DNA
gccgctgtatgtctggtcactgcaggaggggccggatgagcgtgggcgtattactcagcccgtgggatgccttct

SEQ ID NO: 262407 - DNA, 75 bp, synthetic construct
  source 1..75: mol_type = other DNA
gttaacgtgatttctgatattttgggtgccatggctaaccctctgaaacataaggaatggtatgccttacgatag

SEQ ID NO: 262408 - DNA, 75 bp, synthetic construct
  source 1..75: mol_type = other DNA
gttgatcatgactatctgacttatggtggttatgtatacgaccacgcagctgatggatactttgatacaaccttt

SEQ ID NO: 262409 - DNA, 75 bp, synthetic construct
  source 1..75: mol_type = other DNA
actgatgaatacgctggcggttcaggggcgtactggtcagccccgggaagcggttacggattccttggttaaatc

SEQ ID NO: 262410 - DNA, 75 bp, synthetic construct
  source 1..75: mol_type = other DNA
caccggtatcgccggaagcactcagacagcgcctgacaacgcgctattttgctgattttggtaatgcctggctga

SEQ ID NO: 262411 - DNA, 75 bp, synthetic construct
  source 1..75: mol_type = other DNA
actgatgaatacgctggcggttcaggggcgtactggtcagccccgggaagcggttactgattcactggttaaatc

SEQ ID NO: 262412 - DNA, 75 bp, synthetic construct
  source 1..75: mol_type = other DNA
gtgataacaggtgtctggaaatataggggcaaatccactctggctatcacctctcaggctaatgcaactacttat

SEQ ID NO: 262413 - DNA, 75 bp, synthetic construct
  source 1..75: mol_type = other DNA
tgatggttattttgatactgtatttagtggcgataccgttaatggtgtaatttctacttattatctgaatcacga

SEQ ID NO: 262414 - DNA, 75 bp, synthetic construct
  source 1..75: mol_type = other DNA
cagtagaggatcctgttgaatatgaactggacggtatcagtcagacccaggtcaacccgaaggtggacatgactt

SEQ ID NO: 262415 - DNA, 75 bp, synthetic construct
  source 1..75: mol_type = other DNA
ttcatagtaatgactacatcctgaatgcagacctcgtcaacgatcgtaccaacgacaccagcaaagctaactatg

SEQ ID NO: 262416 - DNA, 75 bp, synthetic construct
  source 1..75: mol_type = other DNA
ccactgtaacttcaggttcgctctcagaagacgaacaatcagatcgtggtcattttggcaactctgttgagccaa

SEQ ID NO: 262417 - DNA, 75 bp, synthetic construct
  source 1..75: mol_type = other DNA
gacgatgattttgatgcattctacttcaatgatacttatctggatgcagacggtaaaacgtctaaaacagattat

SEQ ID NO: 262418 - DNA, 75 bp, synthetic construct
  source 1..75: mol_type = other DNA
cttgagatggcccgacggaaagccgcaccgggcgttgccagtggctggagcctgagctggcaggcgcaggacggt

SEQ ID NO: 262419 - DNA, 75 bp, synthetic construct
  source 1..75: mol_type = other DNA
agacacgcctgaaaggcgtactgcacaagaatgggaataactgggtgccggacagtatcaattcgcaagggctga

SEQ ID NO: 262420 - DNA, 75 bp, synthetic construct
  source 1..75: mol_type = other DNA
agcatggtgtgccctggtatgaaaaggcgggattaagtcagaacaatgcgttgctgacgacactctggcctcgtt

SEQ ID NO: 262421 - DNA, 75 bp, synthetic construct
  source 1..75: mol_type = other DNA
cttgtcctgctgattattcgttacacgccgtttgtgttccgatttatgcgagaaaaatatcaccgctggcaggaa

SEQ ID NO: 262422 - DNA, 75 bp, synthetic construct
  source 1..75: mol_type = other DNA
cactccagaagtttctctctcaaaatcccaatccatggtttggagtaacagctcaagttgttcgtaaccacggca

SEQ ID NO: 262423 - DNA, 75 bp, synthetic construct
  source 1..75: mol_type = other DNA
atacaataccatgcccccggattaaaacctgatactgttttatggtgggctggtgcaaccctgggggctgtcgat

SEQ ID NO: 262424 - DNA, 75 bp, synthetic construct
  source 1..75: mol_type = other DNA
tcgttgatgtaatggaaggatttgataacatcatgtataaatatgagagggaatttaaaaattacatagaattaa

SEQ ID NO: 262425 - DNA, 75 bp, synthetic construct
  source 1..75: mol_type = other DNA
ataccgctctgggtgttgcagtaaatcttgatgttgaaagcaatatcaatattaccaacaactcccgtgtagctg

SEQ ID NO: 262426 - DNA, 75 bp, synthetic construct
  source 1..75: mol_type = other DNA
ctggataacagctctgttgacaacgttgttgctgcaaccggtaactacaaagttcgtggatttgcccctatattt

SEQ ID NO: 262427 - DNA, 75 bp, synthetic construct
  source 1..75: mol_type = other DNA
accagcatgcagcaccggctgaagtaagagcaaaatacccctggctggtccctgttcatgccgatggtgtggttg

SEQ ID NO: 262428 - DNA, 75 bp, synthetic construct
  source 1..75: mol_type = other DNA
tgctgcaaccggtaactacaaagttcgtatcgacaacgcaactggcgctggcactattgaaccgccccgggtttc

SEQ ID NO: 262429 - DNA, 75 bp, synthetic construct
  source 1..75: mol_type = other DNA
gctgaagtaattgctccggcagatatgtatgacgttgcgccgaacagcctgacccctggtgccaccatcgaagct

SEQ ID NO: 262430 - DNA, 75 bp, synthetic construct
  source 1..75: mol_type = other DNA
tacagataaactggaactgactagcggcaacatcgctgaccacaacggcaacgtagttgctggtgtgttcgacat

SEQ ID NO: 262431 - DNA, 75 bp, synthetic construct
  source 1..75: mol_type = other DNA
taaaccgtgagcaggagctggcgcgccagctggcgacaaaacaggcccgttttgacagtgagcacccctcccgcc

SEQ ID NO: 262432 - DNA, 75 bp, synthetic construct
  source 1..75: mol_type = other DNA
gaaaagaaaaacggctattttgaacatggctctgatgtcgttacctggtgttatggtcatatgctggagctttac

SEQ ID NO: 262433 - DNA, 75 bp, synthetic construct
  source 1..75: mol_type = other DNA
cgccgcacagggcacaaataatacgcagattgctacgaccgcttatgtaagagctgccatatccgcattggttgg

SEQ ID NO: 262434 - DNA, 75 bp, synthetic construct
  source 1..75: mol_type = other DNA
agcgaaatacagataactcagtgatatttgctgtaaacggtcagatacaaccaagcaactggggtaacattgatt

SEQ ID NO: 262435 - DNA, 75 bp, synthetic construct
  source 1..75: mol_type = other DNA
tcacaagcttctgacctatccacgttctgacaatcgctatctttcagatgaacattattaccaggccggagatat

SEQ ID NO: 262436 - DNA, 75 bp, synthetic construct
  source 1..75: mol_type = other DNA
ttcatgtggcaaacaaattgttatcagaccaaaaggttatttctgtacaggatgtgaatttaaaatctggagtga

SEQ ID NO: 262437 - DNA, 75 bp, synthetic construct
  source 1..75: mol_type = other DNA
atattgcagagcgggttacgggtaaggacgctattgttactatcgcaacgaccaggccggaaaacaccaaacctc

SEQ ID NO: 262438 - DNA, 75 bp, synthetic construct
  source 1..75: mol_type = other DNA
gttgactcctaaagatctggacgtttacagcaaaagcgaaatagacaataaaaaagggatgcgaaaatacacttt

SEQ ID NO: 262439 - DNA, 75 bp, synthetic construct
  source 1..75: mol_type = other DNA
caatggcggctacccctaaagctgttaagtctataaaagatctggctgataccaaagcgccaatagaaagcccga

SEQ ID NO: 262440 - DNA, 75 bp, synthetic construct
  source 1..75: mol_type = other DNA
ttcttacctaagcctggcggtgggatgaacctgttaattacctcagtggatggtgataaaaccgcaggcgcggcg

SEQ ID NO: 262441 - DNA, 75 bp, synthetic construct
  source 1..75: mol_type = other DNA
atgtaatttacagttcgcacattaaacctactgctgctgatgtaggtgcattaccaacaaccggaggcacactta

SEQ ID NO: 262442 - DNA, 75 bp, synthetic construct
  source 1..75: mol_type = other DNA
aataggtaattacgccacaggtgttaatatccagtgggattatacaaaggatgcaactgtacaaattcatacatc

SEQ ID NO: 262443 - DNA, 75 bp, synthetic construct
  source 1..75: mol_type = other DNA
caacaatgtcttttagtggtggtgctggatggttcaagctggcaactgtaacaatgccacaagccagttccgtgg

SEQ ID NO: 262444 - DNA, 75 bp, synthetic construct
  source 1..75: mol_type = other DNA
aacttttgaagcgaaattcccggacgcgcatcttggtgcggtggttgcctttggtaacaacacctggcgcgctct

SEQ ID NO: 262445 - DNA, 75 bp, synthetic construct
  source 1..75: mol_type = other DNA
aagaaatcgctcttgtaaattccgtcaatgcaaaaaatggtttttctcttaaagagatttttgataatggaggat

SEQ ID NO: 262446 - DNA, 75 bp, synthetic construct
  source 1..75: mol_type = other DNA
taaatggtattgctgatgctttttcaatatttctgttatggctacagaacagccctgtcatattgtcattactgg

SEQ ID NO: 262447 - DNA, 75 bp, synthetic construct
  source 1..75: mol_type = other DNA
cggcaacaatccgtgatgtttataacggtgattacgttcagggagttgccgaaaaaatcaaagcattctttggga

SEQ ID NO: 262448 - DNA, 75 bp, synthetic construct
  source 1..75: mol_type = other DNA
tccgccgctgcttacctggacaatggcgctactgtttaccgtcgccggttttattctgcacgtggttttacggcg

SEQ ID NO: 262449 - DNA, 75 bp, synthetic construct
  source 1..75: mol_type = other DNA
cgccggtgcaacctgacgaggagtggctgatggcatcacagcccgctccaaatgacgaaatacattcgttgctgg

SEQ ID NO: 262450 - DNA, 75 bp, synthetic construct
  source 1..75: mol_type = other DNA
ggtgtgcatattataatggcacatcaatcaatagcagatttaaaagactgcccggcagatttaaacggtgatgct

SEQ ID NO: 262451 - DNA, 75 bp, synthetic construct
  source 1..75: mol_type = other DNA
atcgaacaacaactgacgatgcgcgtatttactggcctgacgctgctcgacacgttgcaaaacgttatcggcgcg

SEQ ID NO: 262452 - DNA, 75 bp, synthetic construct
  source 1..75: mol_type = other DNA
aagcacagattattcagcaacattatcgcggtgataatccgctgaaaaagaaaatcgccagtgtctttcttgaat

SEQ ID NO: 262453 - DNA, 75 bp, synthetic construct
  source 1..75: mol_type = other DNA
ggtttcagcctggcggaaaaagggcaggaatcggatttttatcgcattgatgaccgaaaagccgcacgtatggcc

SEQ ID NO: 262454 - DNA, 75 bp, synthetic construct
  source 1..75: mol_type = other DNA
tttcccctgatattgccgcagcggcggcaccggtgaagatcgcactggattttggcgacaatgataaaccaaccg

SEQ ID NO: 262455 - DNA, 75 bp, synthetic construct
  source 1..75: mol_type = other DNA
tgtcgatgccgcctacgcctggagtgaagaaaacgcaccgttgcagcgaaaagcacagattattcagcaacatta

SEQ ID NO: 262456 - DNA, 75 bp, synthetic construct
  source 1..75: mol_type = other DNA
agttgccacgcgtggcggaatccattccattatttggtcagagcggcgacgatcgatatatcgccgtcgataaga

SEQ ID NO: 262457 - DNA, 75 bp, synthetic construct
  source 1..75: mol_type = other DNA
tggcagaagacatggcggataatctaattcggttctatatgcgcaaaatagcagacaacatgccgcagagcgacg

SEQ ID NO: 262458 - DNA, 75 bp, synthetic construct
  source 1..75: mol_type = other DNA
gcgcatctcggcgcggtggttgcctttggcaacaacacctggcgtgctctgagcggcggcgtgggtgccgaagag

SEQ ID NO: 262459 - DNA, 75 bp, synthetic construct
  source 1..75: mol_type = other DNA
ggcaaacgcaccagcgcacgctatcgccctaccctgcacattgatgtttacggcactatcggtctgatcttcgat

SEQ ID NO: 262460 - DNA, 75 bp, synthetic construct
  source 1..75: mol_type = other DNA
ataaaatgatccttaaaggcgtcgatgtcctgccacatgcattgattaataacgttgaagagaagctgggctata

SEQ ID NO: 262461 - DNA, 75 bp, synthetic construct
  source 1..75: mol_type = other DNA
gtcgatgccggtaacaagcccgatcaaattcgcctgctgaccgcgattaccaaagagctgacgcgcctcggttcc

SEQ ID NO: 262462 - DNA, 75 bp, synthetic construct
  source 1..75: mol_type = other DNA
ttcgttttcctggtaatgggcttcaccggcaaaaaagccgccgcattcaaagaggcctacatcgctgagttcgac

SEQ ID NO: 262463 - DNA, 75 bp, synthetic construct
  source 1..75: mol_type = other DNA
tactgaatgctcacctgaatttaacgccctcaattttgaggacgtcacctacactgacgccaaaggcgaaaaacg

SEQ ID NO: 262464 - DNA, 75 bp, synthetic construct
  source 1..75: mol_type = other DNA
agccgcaaggctggccgggttccgtgatgaccggtatttccacccctgtacgtctcaccacccttatggtcgtgg

SEQ ID NO: 262465 - DNA, 75 bp, synthetic construct
  source 1..75: mol_type = other DNA
aacaaggctggactcttgtaaaccggagcgcaattaaaaatatgactgtggagcaattactaaaaattcattgtt

SEQ ID NO: 262466 - DNA, 75 bp, synthetic construct
  source 1..75: mol_type = other DNA
cgtctcaccacccatgagattgctacctccggtggtgagttaatgaaattcatcatggaggctgccatcatggct

SEQ ID NO: 262467 - DNA, 75 bp, synthetic construct
  source 1..75: mol_type = other DNA
gtatgctggtcaagccagggatgggtttcgacgaaggcctcaccatcgtcttcaacgaaatgaatcgtactatcg

SEQ ID NO: 262468 - DNA, 75 bp, synthetic construct
  source 1..75: mol_type = other DNA
gatctggaactggacgacgccgacggaaaaatcgcgctgccgcgccgtggtgcggtcattacgctggcgctgggc

SEQ ID NO: 262469 - DNA, 75 bp, synthetic construct
  source 1..75: mol_type = other DNA
ggaatggaccattacgactctgacgcataccgtaagcccggataatggttttacgaccagtctggagcttgaagt

SEQ ID NO: 262470 - DNA, 75 bp, synthetic construct
  source 1..75: mol_type = other DNA
ttccggcacgggacgctccgcttcaatggcaatgtcagcgaaaagctcctgactccgctgatacaggaactgaag

SEQ ID NO: 262471 - DNA, 75 bp, synthetic construct
  source 1..75: mol_type = other DNA
tgatgagtctgacgctgacggataaccggggctttgaagcagaccagcttgatctggaactggacgacgccgacg

SEQ ID NO: 262472 - DNA, 75 bp, synthetic construct
  source 1..75: mol_type = other DNA
gggcaaaagtgccagcggtaaaccactgccggtgataactatcacacgtaaggacggcgacagtcaccgctttac

SEQ ID NO: 262473 - DNA, 75 bp, synthetic construct
  source 1..75: mol_type = other DNA
cgccgtgaaaagtcgtggcacaagaccaccgtcggggaagtggtgaaggaaatagctgtgcggcacaaactgaag

SEQ ID NO: 262474 - DNA, 75 bp, synthetic construct
  source 1..75: mol_type = other DNA
gcaatgcagagcgcgcagcaaaaatgcagtgggaacgcctgcagcgcggggttgcttcattttccctgcagctcg

SEQ ID NO: 262475 - DNA, 75 bp, synthetic construct
  source 1..75: mol_type = other DNA
aaccagtgttaagcgtcgtcgaaagaaaaccaccacacccaaagagccggaagcaaaacagggcgattatctggt

SEQ ID NO: 262476 - DNA, 75 bp, synthetic construct
  source 1..75: mol_type = other DNA
cattgccgaccgtggggcttataccggcgtcactgctaaatggttgcacaccaaagacccgaagccacaaaagca

SEQ ID NO: 262477 - DNA, 75 bp, synthetic construct
  source 1..75: mol_type = other DNA
tgtagctgctgcggcacctgaatcactcaatatcagctgtgaagtgacgttccggcacggatcactccgtctgaa

SEQ ID NO: 262478 - DNA, 75 bp, synthetic construct
  source 1..75: mol_type = other DNA
tacggtcagtccggatagcggttttactaccagcctcgatcttgaagtaaagattgatggtcttgaaatggaata

SEQ ID NO: 262479 - DNA, 75 bp, synthetic construct
  source 1..75: mol_type = other DNA
tcgccgcccggcataacctcaaaatggcgctgggtaaagacctgacggacaaagcgctggatcacatggaccaga

SEQ ID NO: 262480 - DNA, 75 bp, synthetic construct
  source 1..75: mol_type = other DNA
tgcaatggcttccatcagtctgattcaactgaaattacaggccgtgcggaagctgacgcagccagaaaacacccg

SEQ ID NO: 262481 - DNA, 75 bp, synthetic construct
  source 1..75: mol_type = other DNA
gcagtggcagttacgtaacctgcccgcgcctgatgccgggacgcactggacctatatgggtggcgcgtacgtgtt

SEQ ID NO: 262482 - DNA, 75 bp, synthetic construct
  source 1..75: mol_type = other DNA
acttaacgctgtgcttgattacattgacgcggtgacggcaacagataccagcaccgcaccggatgtcatctggcc

SEQ ID NO: 262483 - DNA, 75 bp, synthetic construct
  source 1..75: mol_type = other DNA
ttgcaatacgcccttgattcattgagaaatggaaaaggcaaagtcaacctgattaaacattactcctccgttgaa

SEQ ID NO: 262484 - DNA, 75 bp, synthetic construct
  source 1..75: mol_type = other DNA
gttcggggattcgatgctctctccgaaaaaattgagccattctcgctctatgacatcgttgatgacattttaaac

SEQ ID NO: 262485 - DNA, 75 bp, synthetic construct
  source 1..75: mol_type = other DNA
tatgcccgcctgttccactggtattgacccgggcgaatacattccggggaaagtggcagtatttacgggtaaggg

SEQ ID NO: 262486 - DNA, 75 bp, synthetic construct
  source 1..75: mol_type = other DNA
ttatatcggtgccatcaaagacggttatgtcacgctttcaccgttaacgccatacgataaatgggatggtgagaa

SEQ ID NO: 262487 - DNA, 75 bp, synthetic construct
  source 1..75: mol_type = other DNA
ggaattctggaccgctgtcggttctgcaccggaaaatttttctcacctgaccgtgatgaacttcatcactgataa

SEQ ID NO: 262488 - DNA, 75 bp, synthetic construct
  source 1..75: mol_type = other DNA
gggcaggagcagccgggagcggatgcagtccggtgcggaaatggcgcaggcggaaatccgcatctgggtgcgcgg

SEQ ID NO: 262489 - DNA, 75 bp, synthetic construct
  source 1..75: mol_type = other DNA
gaccctggcgaaaacattccgggaagagtggcagtatttacaggtaagggatggagccatgaagaagaccatcgc

SEQ ID NO: 262490 - DNA, 75 bp, synthetic construct
  source 1..75: mol_type = other DNA
agctgacgcaggcagaaaccacccggcttaacgccgtgctggattacattgacgcggtggcggtaacagatacca

SEQ ID NO: 262491 - DNA, 75 bp, synthetic construct
  source 1..75: mol_type = other DNA
tatgcccgcctgttcaactggtattgacccgggcgaaaacattctgggaagagtgacggtatttacaggtaaggg

SEQ ID NO: 262492 - DNA, 75 bp, synthetic construct
  source 1..75: mol_type = other DNA
ccaatctcacgcagggcaacatagcccgcattcgcgatctgtttccaggttgtgtcaccgaagccaagggcgagg

SEQ ID NO: 262493 - DNA, 75 bp, synthetic construct
  source 1..75: mol_type = other DNA
ggacttcgatacgacgaagaacctgttcattgagggagacaaccttgatgcactgaagctgttgcaggagacgta

SEQ ID NO: 262494 - DNA, 75 bp, synthetic construct
  source 1..75: mol_type = other DNA
aaaattatgtgatgagatatttggaagacaaaattttgtagctaacgttgtttggcagcgtgcattttctccaaa

SEQ ID NO: 262495 - DNA, 75 bp, synthetic construct
  source 1..75: mol_type = other DNA
aagttaaagctctctttgatgatcgaggctactttgatggacctaagccggtcagacttataaatcgaattttac

SEQ ID NO: 262496 - DNA, 75 bp, synthetic construct
  source 1..75: mol_type = other DNA
ccgggctggaactacaatcccggcataaaccgtgagcaggagctggcgcgccagctggcgacaaaacaggcccgt

SEQ ID NO: 262497 - DNA, 75 bp, synthetic construct
  source 1..75: mol_type = other DNA
ccgacatgacgcagcaaaacatagagaaaattcaggcgttgtttccgaactgtgtgacggaatcaagaggagcta

SEQ ID NO: 262498 - DNA, 75 bp, synthetic construct
  source 1..75: mol_type = other DNA
ttcgtctcgaagattcgtcatgattcaacttccagaggagattaatgagaaatcagaagcgttcaaggctggcta

SEQ ID NO: 262499 - DNA, 75 bp, synthetic construct
  source 1..75: mol_type = other DNA
tgattattttcggtccagacgagaagacgcagccaacaagaaaatatcggctgaatgacaatttattcgaaaata

SEQ ID NO: 262500 - DNA, 75 bp, synthetic construct
  source 1..75: mol_type = other DNA
gcctatcgccaagcagtccatccaaggtaaagacgtgttctttgtcgatggcaatgtgcttaccgcctgcttcga

SEQ ID NO: 262501 - DNA, 75 bp, synthetic construct
  source 1..75: mol_type = other DNA
tatgcattcattgtcagcaggagaaagatttacaaaaaccagcttatacaggatataatcgcagaggttcgaaag

SEQ ID NO: 262502 - DNA, 75 bp, synthetic construct
  source 1..75: mol_type = other DNA
aaaagaacctcttcgcgtagtgttccgtgatgacggctttgaatctgatgcagtaaaaatcaatgctgagcagat

SEQ ID NO: 262503 - DNA, 75 bp, synthetic construct
  source 1..75: mol_type = other DNA
ttaacgattctgcgtcgtcacgtcctgcacaacgcccttccgccggtgatcccgcgtctgggtttacagttttcc

SEQ ID NO: 262504 - DNA, 75 bp, synthetic construct
  source 1..75: mol_type = other DNA
cttaaaattccttttgatacaccgaaaccggttcaggtagcaaagagactaattcaatcaatttgcaagaatgac

SEQ ID NO: 262505 - DNA, 75 bp, synthetic construct
  source 1..75: mol_type = other DNA
gcgtgcgtgatatggcggcgatccgccagctgaaagcgacgcacactgattctgtttcctccgaacaggtcgata

SEQ ID NO: 262506 - DNA, 75 bp, synthetic construct
  source 1..75: mol_type = other DNA
atccgtctcaatcagatggtgaacttcctgcaatcgcaatttaataagccgagtgccgaagagcaggatgccgcc

SEQ ID NO: 262507 - DNA, 75 bp, synthetic construct
  source 1..75: mol_type = other DNA
atgagcatggagctgatggttaaagcgatgaaaattcgtgtggggaatccattgcgaaaactggttctggttaag

SEQ ID NO: 262508 - DNA, 75 bp, synthetic construct
  source 1..75: mol_type = other DNA
actatacgccgcaaaatcgcagtaaagataacggtcgcgtggtagtagaaggtgtcggcaacctgatgcaccata

SEQ ID NO: 262509 - DNA, 75 bp, synthetic construct
  source 1..75: mol_type = other DNA
acaactgaaatgggaactggaagattactgcttccgttacctccatccaaccgaatacaaacgaattgccaaact

SEQ ID NO: 262510 - DNA, 75 bp, synthetic construct
  source 1..75: mol_type = other DNA
gagaaggtgaacgtgcttggcgttgccagccgtagcgacaccaaacagcaactggcgaccatcgacatgaccatt

SEQ ID NO: 262511 - DNA, 75 bp, synthetic construct
  source 1..75: mol_type = other DNA
atggcgagtaagcaactctggcgctggcatggcataaccggcgacggcaatgcgcaagatgggatgctatgggca

SEQ ID NO: 262512 - DNA, 75 bp, synthetic construct
  source 1..75: mol_type = other DNA
catcattttagcgatggcaatcatggtggttgtggcaatgctgcattttgtgctgccggagtttgccgctatcta

SEQ ID NO: 262513 - DNA, 75 bp, synthetic construct
  source 1..75: mol_type = other DNA
gactgatttatcattaacggaaaaagtggatacagaccgaatgataagacaggcagaaagttactacgttgacag

SEQ ID NO: 262514 - DNA, 75 bp, synthetic construct
  source 1..75: mol_type = other DNA
gccaatgatcagtggacccgttctctgaaccggttgctggaagaacaacacctctggggccatctggactgggat

SEQ ID NO: 262515 - DNA, 75 bp, synthetic construct
  source 1..75: mol_type = other DNA
acaaaataatcagaatgatttgcaacaggcggagcaggtgttgtgcgaaaacctggaaatgctacgtcgtgattt

SEQ ID NO: 262516 - DNA, 75 bp, synthetic construct
  source 1..75: mol_type = other DNA
aaatatcatcatgaccggcacaccgggaagcgccccggtcacggcgctgcccctgacacgcaaccgcacggtcag

SEQ ID NO: 262517 - DNA, 75 bp, synthetic construct
  source 1..75: mol_type = other DNA
aaaggtaactcaagtaatatctatctccttcatcttgatggtgcaggagattcactagggggtagtgcaaataat

SEQ ID NO: 262518 - DNA, 75 bp, synthetic construct
  source 1..75: mol_type = other DNA
gccgcgaaatcatgggcatcgcccgtgagctggaagaagcgggcgaaattcagctacagctctttgcggaacaga

SEQ ID NO: 262519 - DNA, 75 bp, synthetic construct
  source 1..75: mol_type = other DNA
atcaaacaggcggcggatatcgtcaaccgcttccagggcaaccagcaggtgatcctcgaccagatgcgcgagcgc

SEQ ID NO: 262520 - DNA, 75 bp, synthetic construct
  source 1..75: mol_type = other DNA
ttggttatctcgccaccaatggcctaaataatttagttcctgaattcgataatgcagatcactatggagactttt

SEQ ID NO: 262521 - DNA, 75 bp, synthetic construct
  source 1..75: mol_type = other DNA
tcagtccggtcgggaaatcacggcagcgtcacgacttcatgtgctgagtggtccctggcgtgaccggatcctgaa

SEQ ID NO: 262522 - DNA, 75 bp, synthetic construct
  source 1..75: mol_type = other DNA
atggcaatatctgcaggtcgtctgacacagatgataagtgttctgaacccggtgttaacccgtaacgctgccgga

SEQ ID NO: 262523 - DNA, 75 bp, synthetic construct
  source 1..75: mol_type = other DNA
gttatgcgcctgaaatggaaaaacggctgcgctggtactggcgtaacccttccgatctttgcccgtggcacatgg

SEQ ID NO: 262524 - DNA, 75 bp, synthetic construct
  source 1..75: mol_type = other DNA
cacttaccgcctgggtcaaccgaaacggcgcggttgaggagaattcctggcttcagggactccttgagcggaagc

SEQ ID NO: 262525 - DNA, 75 bp, synthetic construct
  source 1..75: mol_type = other DNA
attgctgatcgaaactgatgcgccgtatctgctcccgcgcgatctcacgccaaagccatcatcccggcgcaacga

SEQ ID NO: 262526 - DNA, 75 bp, synthetic construct
  source 1..75: mol_type = other DNA
tgcaacgcattgcgcactggcgtggggaagatgctgcgtggctggcggcaaccacagataacaacgttaaaacgc

SEQ ID NO: 262527 - DNA, 75 bp, synthetic construct
  source 1..75: mol_type = other DNA
aagcgtttcagaattatgagtatttaaccacacataaatacctaccaaaatcaccaattataactctaaagtttg

SEQ ID NO: 262528 - DNA, 75 bp, synthetic construct
  source 1..75: mol_type = other DNA
tgcctggcgctgtggatgagttattgcgggcgttcgttatgcgacaaaatcgtcgccatgattttgcccatcacc

SEQ ID NO: 262529 - DNA, 75 bp, synthetic construct
  source 1..75: mol_type = other DNA
gcagttcgcttcatggctggggctgacaccaaaggaatattccagcggcgggaaacagcaactgggagggatcag

SEQ ID NO: 262530 - DNA, 75 bp, synthetic construct
  source 1..75: mol_type = other DNA
gtgataacaggtgtctggaaatataggggcaaatccagtgatgttgcgtttaccagcacctggaatgctaatttt

SEQ ID NO: 262531 - DNA, 75 bp, synthetic construct
  source 1..75: mol_type = other DNA
aaagtggttatgttgataccgatcatctgactattaactcctatagttctgttgatttgaccgaatcaacaggct

SEQ ID NO: 262532 - DNA, 75 bp, synthetic construct
  source 1..75: mol_type = other DNA
taacagctctgttgacaacgttgttgctgcaaccggtaactacaaagttcgtatcgacaacgcaactggcgctgg

SEQ ID NO: 262533 - DNA, 75 bp, synthetic construct
  source 1..75: mol_type = other DNA
actctactgtatcgactgactggtatgatgttacaggtaatagcctgtatccaggcgttgtagcagaagataatg

SEQ ID NO: 262534 - DNA, 75 bp, synthetic construct
  source 1..75: mol_type = other DNA
ggacaccaatggtggctgggctgacgactcacttaatgttgatgaactgaatatcactctggataatggttccaa

SEQ ID NO: 262535 - DNA, 75 bp, synthetic construct
  source 1..75: mol_type = other DNA
ggaatagtaattttgatccgaatggtcatgattccaacggtgacggggtgaaagataccaacgggggttggactg

SEQ ID NO: 262536 - DNA, 75 bp, synthetic construct
  source 1..75: mol_type = other DNA
tgaattatagtggctttgtctactataacaacaccaatggtgacttcgatcagtcttttaacggcgatactgtta

SEQ ID NO: 262537 - DNA, 75 bp, synthetic construct
  source 1..75: mol_type = other DNA
taagctgggtgtaaccagagagccgcttttgctacttgagaatgtacaggggcttgagctactgccgtttcacgc

SEQ ID NO: 262538 - DNA, 75 bp, synthetic construct
  source 1..75: mol_type = other DNA
agagaatgactggccggtagtatctcctgccgggtcatgcacttacacgataaaaaattacgctcgctatctcag

SEQ ID NO: 262539 - DNA, 75 bp, synthetic construct
  source 1..75: mol_type = other DNA
tcaccgagtcgtctgtcgggaacactttacgctttttgatcgcatggcggatcacgctgtttagcgactcgatgg

SEQ ID NO: 262540 - DNA, 75 bp, synthetic construct
  source 1..75: mol_type = other DNA
ttttgatccaagtggtcatgattctaatggtgacggcgtaaaagataccaatgctggttgggttgatgatagcct

SEQ ID NO: 262541 - DNA, 75 bp, synthetic construct
  source 1..75: mol_type = other DNA
aacccattactggcttgctgccgtagatattcccgtggcgagcgataacccagtgcactatgcggatgccattcg

SEQ ID NO: 262542 - DNA, 75 bp, synthetic construct
  source 1..75: mol_type = other DNA
ctattgatacacactggcgtgatggtgatgttttcactttgaacattgctaacactactattgatgatgattatg

SEQ ID NO: 262543 - DNA, 75 bp, synthetic construct
  source 1..75: mol_type = other DNA
gtgactgactggcgtgaacaaaagcgccgcactcgtgaatttctcaaaggtctggatctcgaagacgaagacggc

SEQ ID NO: 262544 - DNA, 75 bp, synthetic construct
  source 1..75: mol_type = other DNA
tggtgagctggcgacgctgcatggttggtatatgcgagcagggttaattacgctgcagtttggcattactcctcc

SEQ ID NO: 262545 - DNA, 75 bp, synthetic construct
  source 1..75: mol_type = other DNA
gcgcttcagctcagacgggcacaccaaaattgacgatctggcgcggccgttctacgtgctggacgggcgtaacgt

SEQ ID NO: 262546 - DNA, 75 bp, synthetic construct
  source 1..75: mol_type = other DNA
agacggcaaccgtatcagcctaattgaaaaatatgatggctcagttgctaaccctgcgattcgccgctgtgagct

SEQ ID NO: 262547 - DNA, 75 bp, synthetic construct
  source 1..75: mol_type = other DNA
taactgtacgggaagcgaaagcgatccaccggaactcgatttatcaaaacccctgaatcgacgtgaaaagcgaga

SEQ ID NO: 262548 - DNA, 75 bp, synthetic construct
  source 1..75: mol_type = other DNA
cgatgatttacaggtgcgcacactgtatgaaccgcgtaccgagcttaatcagtacggtgaggaaacggtatgtat

SEQ ID NO: 262549 - DNA, 75 bp, synthetic construct
  source 1..75: mol_type = other DNA
ctcaacaatggtgggctgtatggggccgacttcggtcgggctggtttcctctaacgccagttgtgagaaccctgt

SEQ ID NO: 262550 - DNA, 75 bp, synthetic construct
  source 1..75: mol_type = other DNA
agatcgatttacgccagagcggcggttcgctgcaaagcgtacgttccagcgccagcctcaataacgtggtgcgcg

SEQ ID NO: 262551 - DNA, 75 bp, synthetic construct
  source 1..75: mol_type = other DNA
ttgcggcaaacttgccataccgaccttatcacgcgaatgaattgctctatgggcttcgtatcgataaggcagcta

SEQ ID NO: 262552 - DNA, 75 bp, synthetic construct
  source 1..75: mol_type = other DNA
gctatttttgcgccgttccgttatgtggtggaatttttctactggacgggcggcaactcaatggacattcacagc

SEQ ID NO: 262553 - DNA, 75 bp, synthetic construct
  source 1..75: mol_type = other DNA
gtttcagggattacagtacattatggctgcggataaagtagaggcggtaagcaacacctttgatgatgattttga

SEQ ID NO: 262554 - DNA, 75 bp, synthetic construct
  source 1..75: mol_type = other DNA
tacatgcgttctgtgccctttatatgaattaatattcgggaatatcatgatattactgctgaaatgtcgtatgcg

SEQ ID NO: 262555 - DNA, 75 bp, synthetic construct
  source 1..75: mol_type = other DNA
gctcgcgctggcattcaaccgatcccgggacgcctggcgttcttcccgaatcgtcgcgcggcgatggcggattta

SEQ ID NO: 262556 - DNA, 75 bp, synthetic construct
  source 1..75: mol_type = other DNA
tcacggacctggagtcacgtcttgaaggcaaacggattgtgattctgaagtgggatgcggttccggtacttgatg

SEQ ID NO: 262557 - DNA, 75 bp, synthetic construct
  source 1..75: mol_type = other DNA
gcgctcaaggctgacagctaatgagtatgtcgcgattcaccatgcagccgaacctctcccaatctggctgaggct

SEQ ID NO: 262558 - DNA, 75 bp, synthetic construct
  source 1..75: mol_type = other DNA
gtttgtttaatgtgactctgaatggcggttccgaatgggataccaccaaatcttctctgattgatactttaagca

SEQ ID NO: 262559 - DNA, 75 bp, synthetic construct
  source 1..75: mol_type = other DNA
cattcgataattctacactgatgggcgatgtattcttctcaagtaactttgatgagaacttcttcccgcatggtc

SEQ ID NO: 262560 - DNA, 75 bp, synthetic construct
  source 1..75: mol_type = other DNA
gatgctgccattggcattgtgacgctaggtattcttgttttctggccgcgtctgggcattcgtttacccggtcac

SEQ ID NO: 262561 - DNA, 75 bp, synthetic construct
  source 1..75: mol_type = other DNA
aagcaactaaccaggttatctaccgcatcctgattttctatattggttcgttagccgttctgctctcactgatgc

SEQ ID NO: 262562 - DNA, 75 bp, synthetic construct
  source 1..75: mol_type = other DNA
aacggcgttgtgcgtactgattaactaccttgccccagagtccgctttcggactgttaatggcgcttggtaatca

SEQ ID NO: 262563 - DNA, 75 bp, synthetic construct
  source 1..75: mol_type = other DNA
tacagcattgtgcgtattgattaactatcttgctccggaatccgcatttggcctgttaatggcgctggtggtatc

SEQ ID NO: 262564 - DNA, 75 bp, synthetic construct
  source 1..75: mol_type = other DNA
atctcattggctgatacactacagaaatgcagggaggccagcggcagtgaaacaataattgcatcaacgcatcac

SEQ ID NO: 262565 - DNA, 75 bp, synthetic construct
  source 1..75: mol_type = other DNA
gactgttaatggcgctggtggtttccgctctggtaatcaactgggcgatgataagtcttgcgcacatgaaattcc

SEQ ID NO: 262566 - DNA, 75 bp, synthetic construct
  source 1..75: mol_type = other DNA
agctgcgtatattgcaacagccgtatgctgtttggtctggcacagcagggcaacgcgccaaaagcgctggcgtct

SEQ ID NO: 262567 - DNA, 75 bp, synthetic construct
  source 1..75: mol_type = other DNA
gactccgtacttcaaactggcttacgtctacgacgactctaacaacgataacgatgtgaacggtgattccatcga

SEQ ID NO: 262568 - DNA, 75 bp, synthetic construct
  source 1..75: mol_type = other DNA
acggtgcatgagtcgtttgtggccaccattccgctggtattctgcgaagcggagaaaatgaaccctgacacccag

SEQ ID NO: 262569 - DNA, 75 bp, synthetic construct
  source 1..75: mol_type = other DNA
atggctatcaaactcattgctatcgatatggatggcccccttctgctccccgaccccccctttccccccgccgtt

SEQ ID NO: 262570 - DNA, 75 bp, synthetic construct
  source 1..75: mol_type = other DNA
tggtacaaatcatccgtagcaatgaatcactttatcggcggtaagagtggtggttcgatctattacaagccgatt

SEQ ID NO: 262571 - DNA, 75 bp, synthetic construct
  source 1..75: mol_type = other DNA
ctcgcgtgactgacattatgggcgagattgcatcggcatcggatgaacagagccgtggcatcgatcaagtcgcat

SEQ ID NO: 262572 - DNA, 75 bp, synthetic construct
  source 1..75: mol_type = other DNA
tgttctgcgaagcggagaaaatggaccccaatacccagttcctgaaagtgatgatgattgatgaacccgccatcc

SEQ ID NO: 262573 - DNA, 75 bp, synthetic construct
  source 1..75: mol_type = other DNA
atatggatggcactcttctgctacccgatcacaccatttctcctggcgttaaaaacgcgattgccgcggctcgtg

SEQ ID NO: 262574 - DNA, 75 bp, synthetic construct
  source 1..75: mol_type = other DNA
tctttgttgatggtagcttgagctactctcacttcaacaacgacctgtctgcaaccatgagcaacggtacttacg

SEQ ID NO: 262575 - DNA, 75 bp, synthetic construct
  source 1..75: mol_type = other DNA
agttgatctgtccatcactaataactctcacgtagcgggtattacgctgactcagggttatgagtgggaagatat

SEQ ID NO: 262576 - DNA, 75 bp, synthetic construct
  source 1..75: mol_type = other DNA
tgggtgatgctggttacgtgactccttacggcagcgtttctggtctgttccagtctggtgatgactaccagctga

SEQ ID NO: 262577 - DNA, 75 bp, synthetic construct
  source 1..75: mol_type = other DNA
acgcccaaaacccggaattactacaggcaatggttgtatccagtggtggcacaccttatccagtgaaagcactta

SEQ ID NO: 262578 - DNA, 75 bp, synthetic construct
  source 1..75: mol_type = other DNA
ggggcaatactttcgtgccaatccggtacgtggaagacttctggttcgctcaatggttcttacacaaacttaggt

SEQ ID NO: 262579 - DNA, 75 bp, synthetic construct
  source 1..75: mol_type = other DNA
tcaatgaaactcacggtggcggattttatatgtccgatggatcatgggttcgaagtgtaaacaacaagggcatct

SEQ ID NO: 262580 - DNA, 75 bp, synthetic construct
  source 1..75: mol_type = other DNA
gtgctggcggcatcccgcaaggatgcaactgcacaaccgacccttgaagaactggcagcgaagctgtccggagga

SEQ ID NO: 262581 - DNA, 75 bp, synthetic construct
  source 1..75: mol_type = other DNA
tcacactgaagcgtttttcctctggtgtggggttctggtgtttgggtggtgctgctgccaaaaactaccgtgaaa

SEQ ID NO: 262582 - DNA, 75 bp, synthetic construct
  source 1..75: mol_type = other DNA
gtggatctgcgaaaacacggggatgtggacccgcgacggtctgacgtttttcagcgccgcggataatgaaattcc

SEQ ID NO: 262583 - DNA, 75 bp, synthetic construct
  source 1..75: mol_type = other DNA
ggcggtgcctgcccgggtggtttatctgacggcgggcattgactcgcagcgaaaccgttttgagatgtatgtctg

SEQ ID NO: 262584 - DNA, 75 bp, synthetic construct
  source 1..75: mol_type = other DNA
gctataaagagactgaaaaaacatcagcgatgacgcacacactctacaaaacttcagccatcacaggcgattttg

SEQ ID NO: 262585 - DNA, 75 bp, synthetic construct
  source 1..75: mol_type = other DNA
ggattgactgtatcgcttaaagcctatgcggatcaggagaatgcggctactgggctgaaggtcgcgatgatgcag

SEQ ID NO: 262586 - DNA, 75 bp, synthetic construct
  source 1..75: mol_type = other DNA
cagcgatccagaaaacacggcactttttttgtgctccccatcaaaggggcgtcggtgtacggcaagccggtgatc

SEQ ID NO: 262587 - DNA, 75 bp, synthetic construct
  source 1..75: mol_type = other DNA
gtgacaataccgggatgtggacgtgtgacggtctgacgtttttcagtgcttcgggtaatgaaattccgccgccgc

SEQ ID NO: 262588 - DNA, 75 bp, synthetic construct
  source 1..75: mol_type = other DNA
aactaacagctgaagagcaggtggaaaaatgggtagacggaaagaaaaagatcgtctgggacagcaaaaaacgac

SEQ ID NO: 262589 - DNA, 75 bp, synthetic construct
  source 1..75: mol_type = other DNA
aacagacaccgcaaaagagcagatttataaccgtttcacgctggtggcgcaaagagacgagccgctggcgggagc

SEQ ID NO: 262590 - DNA, 75 bp, synthetic construct
  source 1..75: mol_type = other DNA
tggggcgtcccgatgaggaagagacgctgttacgtgtggatgcggcgatcaacaaaaaataccgccatgcagacg

SEQ ID NO: 262591 - DNA, 75 bp, synthetic construct
  source 1..75: mol_type = other DNA
ggtgtcgatgctgaactcttattctggttgggcagcggcagcggcgggctttatgctcagtaatgacctgctgat

SEQ ID NO: 262592 - DNA, 75 bp, synthetic construct
  source 1..75: mol_type = other DNA
tgactttcacgggttcggtggtggcgttcggtaagctgtgcggcaaaatttcgtctaaaccgctaatgttgccaa

SEQ ID NO: 262593 - DNA, 75 bp, synthetic construct
  source 1..75: mol_type = other DNA
tgggaaacactgccctttcagcgtgcaattatgaatgcgatgggcaatgactatatccgcgaagtgaatgtcgtt

SEQ ID NO: 262594 - DNA, 75 bp, synthetic construct
  source 1..75: mol_type = other DNA
tgtgaccggtgcgctggtcggttcttcgggggcaatcctttcttacatcatgtgtaaggcgatgaaccgttcctt

SEQ ID NO: 262595 - DNA, 75 bp, synthetic construct
  source 1..75: mol_type = other DNA
attgtgtttgtccgcaccgaaagcgttggcctgcaagttctggcattgctgataatgaccgccattgcactggtc

SEQ ID NO: 262596 - DNA, 75 bp, synthetic construct
  source 1..75: mol_type = other DNA
ggaccggatacgggtaatgttggctggatcttgttggcgatggtcatcggtggggcaattggtatccgcctggcg

SEQ ID NO: 262597 - DNA, 75 bp, synthetic construct
  source 1..75: mol_type = other DNA
actggcaaaatcccgggaagaagagacgacccggccaacccttaaagaactggcagcgaagctgtccggaggagt

SEQ ID NO: 262598 - DNA, 75 bp, synthetic construct
  source 1..75: mol_type = other DNA
tgcgtttctatgtgccctgcccgcactgtggggaggcgcagtatctgaaatttggcgatgaatccacgccttttg

SEQ ID NO: 262599 - DNA, 75 bp, synthetic construct
  source 1..75: mol_type = other DNA
agtcactggttaaagcattaggctgtagattcaatctgtcaatgcaacacccctttcaattatctctttcggtgt

SEQ ID NO: 262600 - DNA, 75 bp, synthetic construct
  source 1..75: mol_type = other DNA
ccagtaccgcaggatcttgagctgaattacgcgctgttgatgcgtaatttctccggggaaaccacgcgtaatccg

SEQ ID NO: 262601 - DNA, 75 bp, synthetic construct
  source 1..75: mol_type = other DNA
ctgcactaacgcctgccgctgggagtacaacgtacaggaaggcaaagaagatgaggtcggcaacatcgtacacaa

SEQ ID NO: 262602 - DNA, 75 bp, synthetic construct
  source 1..75: mol_type = other DNA
gtggcagaaggtttcggcttcgtcattccgaaaggctacctgtacgctgccattggtttctcggtgatgatcgag

SEQ ID NO: 262603 - DNA, 75 bp, synthetic construct
  source 1..75: mol_type = other DNA
caggagatataacaactaactcctgggtgtatgcaaacaggtttgctattaatagtggttcaacctcatggattg

SEQ ID NO: 262604 - DNA, 75 bp, synthetic construct
  source 1..75: mol_type = other DNA
tgccagatttgataacaaaaaaagcatcagagaaaaatgatgttatttatgattatgtcctaatagatttacctc

SEQ ID NO: 262605 - DNA, 75 bp, synthetic construct
  source 1..75: mol_type = other DNA
cgtttcagcatgggcggcgcgctggcatattcgtcagtttcagtttatcggtggtgcaccagtgactgtttatcg

SEQ ID NO: 262606 - DNA, 75 bp, synthetic construct
  source 1..75: mol_type = other DNA
aaatatcgacggttatgctctcgatggtgaaaccgatgatgaaagcggtgagctgctgaaagagacagcccccgc

SEQ ID NO: 262607 - DNA, 75 bp, synthetic construct
  source 1..75: mol_type = other DNA
tgctaaatacatttcgaaaaatatcgacggctatgctctcgatggtgaaaccgatgacgaaagcggtgagctgct

SEQ ID NO: 262608 - DNA, 75 bp, synthetic construct
  source 1..75: mol_type = other DNA
acggtaaaattctggcagcagatgggcctgacccgcgtgatcctctcccgtgaactatcactggaagagattgaa

SEQ ID NO: 262609 - DNA, 75 bp, synthetic construct
  source 1..75: mol_type = other DNA
ccggtcccgcaggatcttgagctcaattacgcgctgctgatgcgtaatttctccggggaaaccacgcgtaaccca

SEQ ID NO: 262610 - DNA, 75 bp, synthetic construct
  source 1..75: mol_type = other DNA
cgagctgtcgctggaagagattgaagagatccgcaatcaggtgccggatatggaggtagagatcttcgttcacgg

SEQ ID NO: 262611 - DNA, 75 bp, synthetic construct
  source 1..75: mol_type = other DNA
tgaaggctctgcacttctgggataaacacgatatttctgcagcgtctgaagcctttggcgtatcctgccgcacgc

SEQ ID NO: 262612 - DNA, 75 bp, synthetic construct
  source 1..75: mol_type = other DNA
gccgttgtgagcatgattactgcggtcggcgtcattatccgttttgcgcagccgttaccggcatacctcaccacg

SEQ ID NO: 262613 - DNA, 75 bp, synthetic construct
  source 1..75: mol_type = other DNA
caacgaaagccgtaaagggcttgaagttgatctgatggatgaagtgctgaagtcccggcgtaccgcctggatggt

SEQ ID NO: 262614 - DNA, 75 bp, synthetic construct
  source 1..75: mol_type = other DNA
atgggaacacgttttattttttctctgttgttgggttttatgttgttttattcaccatttgttgcagcgtgggaa

SEQ ID NO: 262615 - DNA, 75 bp, synthetic construct
  source 1..75: mol_type = other DNA
ggtggtttacctgaccgcagggatcgactctcagaaaaaccgttatgagatttatgtctgggggtgggctcctgg

SEQ ID NO: 262616 - DNA, 75 bp, synthetic construct
  source 1..75: mol_type = other DNA
ttttattgagcataaatcccgtaacagtctgctttttcagccaacagattctgccgccgaggatttcatgaaatc

SEQ ID NO: 262617 - DNA, 75 bp, synthetic construct
  source 1..75: mol_type = other DNA
tgggaaacactgccgtttcaggttgccattatgaacagcatgggaaatgaccggattcgcaccattaatctgatt

SEQ ID NO: 262618 - DNA, 75 bp, synthetic construct
  source 1..75: mol_type = other DNA
ctcggtgattaccgccgtcgggatggtcgaccatttactggtcatgatggccgccgttgttatcgctatcagcct

SEQ ID NO: 262619 - DNA, 75 bp, synthetic construct
  source 1..75: mol_type = other DNA
gtcgcggaaggtttcggattcgccattccgaaggggtatttgtacgctgctattggtttctcagtgatgatcgag

SEQ ID NO: 262620 - DNA, 75 bp, synthetic construct
  source 1..75: mol_type = other DNA
gttcacattatcgacctgctacaacagtcattgcgcggcgagccgctcaacctgcgggtgctgattcgccagcca

SEQ ID NO: 262621 - DNA, 75 bp, synthetic construct
  source 1..75: mol_type = other DNA
ttcacaatttgttgcagcgtgggaagtcagttgccccatgtttatcaatataaaatcctcaacaacagtactgga

SEQ ID NO: 262622 - DNA, 75 bp, synthetic construct
  source 1..75: mol_type = other DNA
aaaagacctgatgactcttaaatgggatgctttgtctgtccttgttaaagcccttttcagcagtgaagtaaaaat

SEQ ID NO: 262623 - DNA, 75 bp, synthetic construct
  source 1..75: mol_type = other DNA
tcgccgaaaaactaccgcctaagcagcgcgaccgcgcacgggttaccgggctcctgctggcgatgttaatgcgcc

SEQ ID NO: 262624 - DNA, 75 bp, synthetic construct
  source 1..75: mol_type = other DNA
gacggcagccctttcggtttacaacagttgcgtctactgcaacagccgtatgctgttcggtctggcacaacaagg

SEQ ID NO: 262625 - DNA, 75 bp, synthetic construct
  source 1..75: mol_type = other DNA
cagatgatgttgccgtccagtcactgactgtccatgcaggtacatcaggacaagttcgcgcggaagtcaaactgg

SEQ ID NO: 262626 - DNA, 75 bp, synthetic construct
  source 1..75: mol_type = other DNA
cttctcaaactctggtgttacaggtgttaccgggaatatgacggtgactactgttattgataaaaatacttttac

SEQ ID NO: 262627 - DNA, 75 bp, synthetic construct
  source 1..75: mol_type = other DNA
tattgaatactttattgatgagttaaatcccatcagcagttcaaaagctaacacatcagcgaaatcaactggcaa

SEQ ID NO: 262628 - DNA, 75 bp, synthetic construct
  source 1..75: mol_type = other DNA
tggctgaatcctggattcaggatagatagttcagcatcatggacatatgatatgccggaggaatacaaatcaaaa

SEQ ID NO: 262629 - DNA, 75 bp, synthetic construct
  source 1..75: mol_type = other DNA
gcagcaggctgaccgcgcgatgcgtagtgtttccagtaaaatactcaacaatcagggcgatatctctcgttcgat

SEQ ID NO: 262630 - DNA, 75 bp, synthetic construct
  source 1..75: mol_type = other DNA
ccgaatccgaaggacaaaaatctggcgctcagcactgcgggcaacgacctcactaccgataccatcagcactcgc

SEQ ID NO: 262631 - DNA, 75 bp, synthetic construct
  source 1..75: mol_type = other DNA
cttcttgataatcgtgctggaaactgggacagcattgaacctgcttggggagggcgtgaggtagactttgtggag

SEQ ID NO: 262632 - DNA, 75 bp, synthetic construct
  source 1..75: mol_type = other DNA
ggcgcatttggtgcctaccgtgacggctgcgaaattattggccgcgctgccctgatgaatcccctaatgattttt

SEQ ID NO: 262633 - DNA, 75 bp, synthetic construct
  source 1..75: mol_type = other DNA
tgtacataaaaacaaaatatagattatttagaaatacaaaaccgtggtatgagttcaatcgagaatgtgtagatt

SEQ ID NO: 262634 - DNA, 75 bp, synthetic construct
  source 1..75: mol_type = other DNA
gcgttagcaacctgtgggatcagggtggtttcctgccacacggcttcaccggtctggtgatgatgatggcgatta

SEQ ID NO: 262635 - DNA, 75 bp, synthetic construct
  source 1..75: mol_type = other DNA
agctgcgtatattgcaacagccgtatgctgtttggtctggcacaacagggtaatgcgccaaaagcgctggcgtct

SEQ ID NO: 262636 - DNA, 75 bp, synthetic construct
  source 1..75: mol_type = other DNA
gaccaacgtaaaagtgtttggtgagatggagttctggtttgccattatcaaagttattgcggtagtagcgatgat

SEQ ID NO: 262637 - DNA, 75 bp, synthetic construct
  source 1..75: mol_type = other DNA
attaaacagcggcttggtgggcttcactctgcgcaagtgctgctacatagcgtcgattttcatgaaatagaagag

SEQ ID NO: 262638 - DNA, 75 bp, synthetic construct
  source 1..75: mol_type = other DNA
tgtagattgtaatgatgagataaaaagtcttgaaaatggtgcgatagttgtcaatcgtagtaatcatccagcatt

SEQ ID NO: 262639 - DNA, 75 bp, synthetic construct
  source 1..75: mol_type = other DNA
tgaaaaattacgaacaaaccaaagcgctcattgacgtcgatcatcagcgtctcagaaaactcatctggccggaga

SEQ ID NO: 262640 - DNA, 75 bp, synthetic construct
  source 1..75: mol_type = other DNA
atgggttaaggcgcagtgatgggggattctgtgcacgctgttcatgctaccaggtagaaataaacggctttatca

SEQ ID NO: 262641 - DNA, 75 bp, synthetic construct
  source 1..75: mol_type = other DNA
ccgttcgttttattactgaagtggcctggcaggcgcatttcgtcaaaaacatgtttattcgcccgagcgatgaag

SEQ ID NO: 262642 - DNA, 75 bp, synthetic construct
  source 1..75: mol_type = other DNA
cgacaacaaacctctctcccctgaaacctggcagcatctgaaaggcctggtgaccaaacagctttccggcaaacg

SEQ ID NO: 262643 - DNA, 75 bp, synthetic construct
  source 1..75: mol_type = other DNA
aatccagcttcagaggaaagacagccttatcaaatagtacacttctccagaaagtttcttttgctggaaaagaat

SEQ ID NO: 262644 - DNA, 75 bp, synthetic construct
  source 1..75: mol_type = other DNA
ggtgcttatgatgcttatgggacgggattcccggcgcggggatacacaccttatccggcgatggatccggctcag

SEQ ID NO: 262645 - DNA, 75 bp, synthetic construct
  source 1..75: mol_type = other DNA
gagcgcagtgttttgcctgtgtttgataccgcggcgatccatgccgaggatgctgtcgcttttatgctgtcgtag

SEQ ID NO: 262646 - DNA, 75 bp, synthetic construct
  source 1..75: mol_type = other DNA
agattatttttgaagaactgtgtctggggcaatttaccgaagcgtcacgcgcttattatgcgcaagtgattgctc

SEQ ID NO: 262647 - DNA, 75 bp, synthetic construct
  source 1..75: mol_type = other DNA
caggagtattgcgaatacctgcatcacgggctttcggcgattaaacgtcggctgggactacaacgctataacgaa

SEQ ID NO: 262648 - DNA, 75 bp, synthetic construct
  source 1..75: mol_type = other DNA
tcgttgcgactgcacttacgcttgcaggatgcagtaatacttcctggcgtaaaagtgaagtcctcgcggtaccat

SEQ ID NO: 262649 - DNA, 75 bp, synthetic construct
  source 1..75: mol_type = other DNA
tattcttcaatgaatgccataaagagacaggagctcattgacgccgactttcagcgcctcagaaacctcatctgg

SEQ ID NO: 262650 - DNA, 75 bp, synthetic construct
  source 1..75: mol_type = other DNA
ggtgattttaatgattgtttattccctgacccaaagttagagcggattgatttaattggtaatagacaacgtggg

SEQ ID NO: 262651 - DNA, 75 bp, synthetic construct
  source 1..75: mol_type = other DNA
agcgtagaagcgcatataacatactgaaagaacaatattcgattgataagaccacgtatgaatccttagtgttat

SEQ ID NO: 262652 - DNA, 75 bp, synthetic construct
  source 1..75: mol_type = other DNA
catcagtgtgggtatcgtactggcatcgctgctgtttatgcgccgtatcgcccgtatgactcgtctggcacccgt

SEQ ID NO: 262653 - DNA, 75 bp, synthetic construct
  source 1..75: mol_type = other DNA
tctgttccagcatcctgttctcacggcaattggcgagaagtatggcaaaagcgtaggccaggttgttctgcgctg

SEQ ID NO: 262654 - DNA, 75 bp, synthetic construct
  source 1..75: mol_type = other DNA
ccgctaccagcgccttcttctcccaccgtgacccggcgatggtggaatggctgactggccgcaaacttgatgttt

SEQ ID NO: 262655 - DNA, 75 bp, synthetic construct
  source 1..75: mol_type = other DNA
atggcgacaataagccagattatttatcacaagaagaatataataaagctgtaaaatcagcagagtccggtattg

SEQ ID NO: 262656 - DNA, 75 bp, synthetic construct
  source 1..75: mol_type = other DNA
ttatcaatactgttccgcacatgagctttgtctggggcgaagataatgttaacttcctgcgtgcccgttataccg

SEQ ID NO: 262657 - DNA, 75 bp, synthetic construct
  source 1..75: mol_type = other DNA
gctgaaatacgacaagccgcaggtggcggacagtacgccaaaaccgcagttgaagccgcaaaccgttcaaaaaga

SEQ ID NO: 262658 - DNA, 75 bp, synthetic construct
  source 1..75: mol_type = other DNA
aaaaagaggactggcgtttgtggcaagcggggcagcgcgtgcagattatcaagcgtgatgccggagaaaggtggc

SEQ ID NO: 262659 - DNA, 75 bp, synthetic construct
  source 1..75: mol_type = other DNA
gatgtgaactacgcgtttgtaatgtagaattccagccgctgcgtacaatggctcgcgccggtattcaaccgattc

SEQ ID NO: 262660 - DNA, 75 bp, synthetic construct
  source 1..75: mol_type = other DNA
ttgaaatgcggttcatccgccaggataacgaatggtatttcgattatgtcacagactttagttacatgggacgag

SEQ ID NO: 262661 - DNA, 75 bp, synthetic construct
  source 1..75: mol_type = other DNA
cattgcaacaaagttcgctgtttcgcggtatgcgttactctgaagatcacgcgcagatcaaagagtgggcaccgt

SEQ ID NO: 262662 - DNA, 75 bp, synthetic construct
  source 1..75: mol_type = other DNA
aagttaaccctttcaatcagcagctacaggccgttccctggatgcaaagtcgtggcattcagccagaagcctggg

SEQ ID NO: 262663 - DNA, 75 bp, synthetic construct
  source 1..75: mol_type = other DNA
gaagatgcgctacgcgggctgggacataccgtcgaatacagtccatcattcatcagtgaaaatcctgagaaagtt

SEQ ID NO: 262664 - DNA, 75 bp, synthetic construct
  source 1..75: mol_type = other DNA
tggatggctggcgtgattgccgcaggcgtggtctttttgattatcatgggggtttatcatctgctgaaccgccac

SEQ ID NO: 262665 - DNA, 75 bp, synthetic construct
  source 1..75: mol_type = other DNA
atggacaagcagaccattaacgccgtccgttcccgtgcccgtgtggccatccacaccactggcggtcgtgtaacg

SEQ ID NO: 262666 - DNA, 75 bp, synthetic construct
  source 1..75: mol_type = other DNA
tcaggtatcagcggcccatcatttgccaccctaaaaaaattcgcccgcgctactggaaaaaaactccagatccgc

SEQ ID NO: 262667 - DNA, 75 bp, synthetic construct
  source 1..75: mol_type = other DNA
atggcggttaaaatcacgcctgaagagttcagtctgttaatccggcgactgaacacacaatggcgcgtcctggcg

SEQ ID NO: 262668 - DNA, 75 bp, synthetic construct
  source 1..75: mol_type = other DNA
gtatgggaacaaaagcgactgcgataaccagaatggaaagcaatcttgcatcaggtacaagcggcccatcatttg

SEQ ID NO: 262669 - DNA, 75 bp, synthetic construct
  source 1..75: mol_type = other DNA
caggataacagcctgattcttatctcgaccctgccgttaaaagatctcacctccggatttaaagaatcgactgtc

SEQ ID NO: 262670 - DNA, 75 bp, synthetic construct
  source 1..75: mol_type = other DNA
ttctgctgccactgctgctgaacatcggtttgctggcgctggcgttatttggctataccacattccgccatttct

SEQ ID NO: 262671 - DNA, 75 bp, synthetic construct
  source 1..75: mol_type = other DNA
gccggtaaaattcgcgctattggcgtcagtaacttccatcctgaccgactggctgaccttatcgcttttaataac

SEQ ID NO: 262672 - DNA, 75 bp, synthetic construct
  source 1..75: mol_type = other DNA
acgctgcgtcgcaaactcgtttccgttgcgctcgactggaatattcagccgggcactcagctacagctcgacgcc

SEQ ID NO: 262673 - DNA, 75 bp, synthetic construct
  source 1..75: mol_type = other DNA
ttacagctttataggattttcacagcaaagtattcagacgttgatgatgctagatgcattacctgaagaaaaacg

SEQ ID NO: 262674 - DNA, 75 bp, synthetic construct
  source 1..75: mol_type = other DNA
gtggtcgatgtattacctgaatggtcaggataacagtctggtactgatctcgaccctgcccctcaaagatctcac

SEQ ID NO: 262675 - DNA, 75 bp, synthetic construct
  source 1..75: mol_type = other DNA
tgtctccctcagcaatccgggaaaaatcatcgctgacacgctgaacgtcagggcgaccacgctggatggtgatgg

SEQ ID NO: 262676 - DNA, 75 bp, synthetic construct
  source 1..75: mol_type = other DNA
aaaacactgaataccgcagggaccacgcagggacagaatctcaccgtgcaggcggacagatgggcgaacagtggt

SEQ ID NO: 262677 - DNA, 75 bp, synthetic construct
  source 1..75: mol_type = other DNA
agccagggtgacaccacgctgaaagcagccaccatggacaaccggggcagtctgctttcggccggcacgctctcc

SEQ ID NO: 262678 - DNA, 75 bp, synthetic construct
  source 1..75: mol_type = other DNA
agtgcaggtgtgctgacgctgaaggcagacagtgccacaaacgacgggcaattacagggaaatgccaccaccatc

SEQ ID NO: 262679 - DNA, 75 bp, synthetic construct
  source 1..75: mol_type = other DNA
cgctcacggtgaatcagacgctgcacaatcagacgaacggaaaactgctcagtgcaggtgtgctgacgctgaagg

SEQ ID NO: 262680 - DNA, 75 bp, synthetic construct
  source 1..75: mol_type = other DNA
cagtaccggcgatatcatgagccagggtgacaccacgctgaaagcagccaccatggacaaccggggcagtctgct

SEQ ID NO: 262681 - DNA, 75 bp, synthetic construct
  source 1..75: mol_type = other DNA
acgtcagggcgaccacgctggatggtgatggtctgttgcagggcgccggtgcacttgcgcttgcaggcgacaccc

SEQ ID NO: 262682 - DNA, 75 bp, synthetic construct
  source 1..75: mol_type = other DNA
ggcacgctgtacagtgctgcagacctgacgctggatataccggacatccgcaacagcgggcttatcaccggtgat

SEQ ID NO: 262683 - DNA, 75 bp, synthetic construct
  source 1..75: mol_type = other DNA
aaaggtcagggcgtcaccttaaccggcgaccataaagcgggaggtaacctgagcgtcagcagccggagcgatatc

SEQ ID NO: 262684 - DNA, 75 bp, synthetic construct
  source 1..75: mol_type = other DNA
agtcacagaccctgaccaacagcggtctgttgcagggggaggcctcactcaccgttaacacacagaggtttgata

SEQ ID NO: 262685 - DNA, 75 bp, synthetic construct
  source 1..75: mol_type = other DNA
agtaataccggtaccgtccaggggaatggcctgaaagtcaccgccactgacctgaccagcaccggcagtattaaa

SEQ ID NO: 262686 - DNA, 75 bp, synthetic construct
  source 1..75: mol_type = other DNA
atcaacgctgacacgctgaacgtcagggcgaccacgctggatggagatggactgttgcagggcgccgatgcactg

SEQ ID NO: 262687 - DNA, 75 bp, synthetic construct
  source 1..75: mol_type = other DNA
gtcattggtgaactgcgacactactactaatagtattacctacaacatcgcggatgcaaactctactggtgctgc

SEQ ID NO: 262688 - DNA, 75 bp, synthetic construct
  source 1..75: mol_type = other DNA
atgtcattcacaaatacccctgaacgctatgatgttatatctgcggctttccattggctaagcgcaattattttc

SEQ ID NO: 262689 - DNA, 75 bp, synthetic construct
  source 1..75: mol_type = other DNA
ccaggtccgttgcaaaattattcgcttatgactcgtcttggtgcaaagactggacatcttgcgctgtacctcttg

SEQ ID NO: 262690 - DNA, 75 bp, synthetic construct
  source 1..75: mol_type = other DNA
ccattggctaagcgcaattattgtctacggcatgtttgctttaggtctgtggatggtcacgctcagttattacga

SEQ ID NO: 262691 - DNA, 75 bp, synthetic construct
  source 1..75: mol_type = other DNA
gggctggtgatgatgatggcgattatcatgttctctttcggcggtctggaactggtggggatcaccgcagcagaa

SEQ ID NO: 262692 - DNA, 75 bp, synthetic construct
  source 1..75: mol_type = other DNA
agctgaaccgggcgctgacggatgcgtcggcccttatcaacagttacctgtctgcccgttacacgctgccgctgg

SEQ ID NO: 262693 - DNA, 75 bp, synthetic construct
  source 1..75: mol_type = other DNA
gcgtggagcgtcgtagtactgtccgttatgcacggatttatggccctgaagcatcatttcatcgataaagacgac

SEQ ID NO: 262694 - DNA, 75 bp, synthetic construct
  source 1..75: mol_type = other DNA
tgacccgacgttgatcccggacagccagggagatacagccacaattgcaccagacactgttaaagataacagtga

SEQ ID NO: 262695 - DNA, 75 bp, synthetic construct
  source 1..75: mol_type = other DNA
aaaaggaagaagatactgaggtccggatagagggattctgggaagaatgccagcccggggaaacacagtgtacgg

SEQ ID NO: 262696 - DNA, 75 bp, synthetic construct
  source 1..75: mol_type = other DNA
ccagaagtggctgacggttatgccaatgccgatgaactgaaggacggtttgcaggcagaagtcacgttgccggca

SEQ ID NO: 262697 - DNA, 75 bp, synthetic construct
  source 1..75: mol_type = other DNA
atgtcattcacaaatacccctgaacgctatggtgttatatctgcggccttccattggctaagcgcaattattgtc

SEQ ID NO: 262698 - DNA, 75 bp, synthetic construct
  source 1..75: mol_type = other DNA
tcagcggagaaaaaacagagctggcaaccggcgcacgtcataccgtccgggcacgggcaggcgagcagtatggtc

SEQ ID NO: 262699 - DNA, 75 bp, synthetic construct
  source 1..75: mol_type = other DNA
tctgtttctgttgtcttgccgggtgatgccaataaaggtgataccgttgaaatcacctttgaagatgaaaaaggt

SEQ ID NO: 262700 - DNA, 75 bp, synthetic construct
  source 1..75: mol_type = other DNA
cccggcgaaagagctggcgaacgtgcaggacttaaccgttcgcggcaccaaaattctgctgattaacccgaccga

SEQ ID NO: 262701 - DNA, 75 bp, synthetic construct
  source 1..75: mol_type = other DNA
aatctaacttcagaggagagactgctgtatcagatagtacccctctccagactgcctcttttgctggaaaagaat

SEQ ID NO: 262702 - DNA, 75 bp, synthetic construct
  source 1..75: mol_type = other DNA
gtaatcatcctgctctacttgagggactttcttttatgcatagtggatttgcccctatatttccagacatctgtt

SEQ ID NO: 262703 - DNA, 75 bp, synthetic construct
  source 1..75: mol_type = other DNA
gtacctccgcagctcgtgagcgtggcgaaggtttccagcaggccgttgctgctcacaagtttaatgttcttgcca

SEQ ID NO: 262704 - DNA, 75 bp, synthetic construct
  source 1..75: mol_type = other DNA
gaaaggcgtcgaaaccgcagataaagtgctgaaaggcgagaaagttcaggctaagtatccggttgatctgaaact

SEQ ID NO: 262705 - DNA, 75 bp, synthetic construct
  source 1..75: mol_type = other DNA
gtacatccgcagcccgtgaacgtggcgaaggcttccagcaggccgttgctgctcacaagtttaatgttcttgcca

SEQ ID NO: 262706 - DNA, 75 bp, synthetic construct
  source 1..75: mol_type = other DNA
atgatgaactacctgctgccgctgaaaggtatcgcttctatgcactgctccgccaacgttggtgagaaaggcgat

SEQ ID NO: 262707 - DNA, 75 bp, synthetic construct
  source 1..75: mol_type = other DNA
ggcaccggtaaaaccaccctttccaccgacccgaaacgtcgcctgattggtgatgacgagcacggctgggacgat

SEQ ID NO: 262708 - DNA, 75 bp, synthetic construct
  source 1..75: mol_type = other DNA
aagccgaaacgctggcgaaactgtttatcgacaacttcgataaatacaccgacaccccagcgggtgccgcgctgg

SEQ ID NO: 262709 - DNA, 75 bp, synthetic construct
  source 1..75: mol_type = other DNA
tatcgttatgaacggcgcaaaatgcactaacccccagtggaaagagcaggggctgaactctgaaaacttcgtggc

SEQ ID NO: 262710 - DNA, 75 bp, synthetic construct
  source 1..75: mol_type = other DNA
cccaactcagtacgcagaagtgctggtaaaacgtatgcaagcggctggtgcgcaggcgtatctggttaacaccgg

SEQ ID NO: 262711 - DNA, 75 bp, synthetic construct
  source 1..75: mol_type = other DNA
tggaacggcactggcaaacgtatctcgattaaagatacccgcgccattatcgacgccatcctcaacggttcgctg

SEQ ID NO: 262712 - DNA, 75 bp, synthetic construct
  source 1..75: mol_type = other DNA
tacgttcatgcagatcggtgaaatgatgacaagggagtacggaaaaccggtagcaacgaaagacagaattttcga

SEQ ID NO: 262713 - DNA, 75 bp, synthetic construct
  source 1..75: mol_type = other DNA
ggtcagacgcggcgctggcgctggggcataaactggtggcgggtgaaattcgtcagcagcgcatggacgcctggc

SEQ ID NO: 262714 - DNA, 75 bp, synthetic construct
  source 1..75: mol_type = other DNA
tgacaacgcaactcgcaaccggcagcaccgacggtcatatggcctggctggtgccgctgcttgaagagtattacg

SEQ ID NO: 262715 - DNA, 75 bp, synthetic construct
  source 1..75: mol_type = other DNA
tattgcgagtacctgcatcacggactttcggcgattaagcgtcggctggggctacaacgatataacgaactggct

SEQ ID NO: 262716 - DNA, 75 bp, synthetic construct
  source 1..75: mol_type = other DNA
cctgtgaataaagctgatgcagatcggattgaaccgtcccgggaatcctggagactaaactccctgagaaagagg

SEQ ID NO: 262717 - DNA, 75 bp, synthetic construct
  source 1..75: mol_type = other DNA
tcgccagaacagtgtcaccaacagtggcacgttcaccgggatcgccgcgctgacgcttgccgcccgtatggtatc

SEQ ID NO: 262718 - DNA, 75 bp, synthetic construct
  source 1..75: mol_type = other DNA
tgctgacaacttcgcatggagccttggtgctggtgtccggtatgatgtaacccccgatattactctggatctcag

SEQ ID NO: 262719 - DNA, 75 bp, synthetic construct
  source 1..75: mol_type = other DNA
atgagtgataacctgttaaacaaactgacccaactgaaactcccggcgatggccgggagcctgatacggcagcgg

SEQ ID NO: 262720 - DNA, 75 bp, synthetic construct
  source 1..75: mol_type = other DNA
aactcacaccgggtggtccttcagggagagtcactgaggaaaaatcccccggtagtggaaagcagcgaaaaaacg

SEQ ID NO: 262721 - DNA, 75 bp, synthetic construct
  source 1..75: mol_type = other DNA
gctggttgatgacgagcttctgagcagggaaaacagccgtgtggcacggttgagaaaaaatgccggcctgaaata

SEQ ID NO: 262722 - DNA, 75 bp, synthetic construct
  source 1..75: mol_type = other DNA
ctgccggaatgtctgcgcgagcgaatgacccaggcggcgattgcggtggtagaagacccgtttgagatccgtctt

SEQ ID NO: 262723 - DNA, 75 bp, synthetic construct
  source 1..75: mol_type = other DNA
ggagttgatgaaaacagtctttggttggacaccactaggattgatcatcaataactggggaccagttgttaagtg

SEQ ID NO: 262724 - DNA, 75 bp, synthetic construct
  source 1..75: mol_type = other DNA
cggtcactacataatccacaggaaaaacctgctgataaccggtccgacaggatgcggtaagagctggatagccaa

SEQ ID NO: 262725 - DNA, 75 bp, synthetic construct
  source 1..75: mol_type = other DNA
catgatgatggcagaaggtattgttattatgaaatatgaactgtggcatatccctcctgtcctgctgggtctggc

SEQ ID NO: 262726 - DNA, 75 bp, synthetic construct
  source 1..75: mol_type = other DNA
actttgcagacgtacgcaccgtaatgtctgaaatgggctacgcaatgatgggttctggtgtggcgagcggtgaag

SEQ ID NO: 262727 - DNA, 75 bp, synthetic construct
  source 1..75: mol_type = other DNA
cttcgacctgcgtctggatgagttcgaaacggtagggaacaccatccgtgcatttgcttccgacaacgcgactgt

SEQ ID NO: 262728 - DNA, 75 bp, synthetic construct
  source 1..75: mol_type = other DNA
gttggccgcaatgcggctgatgaggatcgcgatgcactgcgtgcggcgctggaaggtgcagacatggtctttatt

SEQ ID NO: 262729 - DNA, 75 bp, synthetic construct
  source 1..75: mol_type = other DNA
agccgtcaggtgacagtcccggcggtgatgctggaaaaagtgatggcgctggcaggcagtgaaatgaagcgcctg

SEQ ID NO: 262730 - DNA, 75 bp, synthetic construct
  source 1..75: mol_type = other DNA
tatatggcgcatgtgacagagttgtttccgatattgtcaatgaactgatggaggaaaagcgcgtaaaccgccttg

SEQ ID NO: 262731 - DNA, 75 bp, synthetic construct
  source 1..75: mol_type = other DNA
ggtggcagagcatttcgactggtgtcataccatcgaccgtttgcgtatcgctacccgcctgaacgaccagcgacc

SEQ ID NO: 262732 - DNA, 75 bp, synthetic construct
  source 1..75: mol_type = other DNA
gaaatttatcgcctccatgctgtagggagcgagaacgggggcgacggtgacgcatttgtcagggaagaacgtgag

SEQ ID NO: 262733 - DNA, 75 bp, synthetic construct
  source 1..75: mol_type = other DNA
gacagacgatgagctggaaaccgtcatgcagcggctggacgatgcttttgtatatggcgcatgtgacagagttgt

SEQ ID NO: 262734 - DNA, 75 bp, synthetic construct
  source 1..75: mol_type = other DNA
ggtgctgacccgtggggatgtgcgtcacatagcccaggactggaacctgtcagacaatgagctggaaaccgtcat

SEQ ID NO: 262735 - DNA, 75 bp, synthetic construct
  source 1..75: mol_type = other DNA
cagaaaccggtagctaaagtggtgaacgacaatacgccgcaaactgcgaaagagccggattatctggatatccca

SEQ ID NO: 262736 - DNA, 75 bp, synthetic construct
  source 1..75: mol_type = other DNA
ggagtgagaacgggggcgacggtgatgcgttcgtcagggaggaacgcgaagcaatgaacgttgtgttacaggcgc

SEQ ID NO: 262737 - DNA, 75 bp, synthetic construct
  source 1..75: mol_type = other DNA
cggtgatgcgttcgtcagggaagaacgcgaagcaatggacgttgtgttacaggcgctggacggggagcacatgtc

SEQ ID NO: 262738 - DNA, 75 bp, synthetic construct
  source 1..75: mol_type = other DNA
catcacggtctgaaactgaacagtctggctgaacgggcggcgcaggatctgtcattcatggagccgcctcccgcg

SEQ ID NO: 262739 - DNA, 75 bp, synthetic construct
  source 1..75: mol_type = other DNA
aaaaatcagtccagaccgggaaccaactcccgcaacggttattccacaaagaccgttatcacgggcgatgatcca

SEQ ID NO: 262740 - DNA, 75 bp, synthetic construct
  source 1..75: mol_type = other DNA
caatgcccgcttgctggctggtccggctggtggagcaacagcattaatccattatctggatgaggcgtgtcaacg

SEQ ID NO: 262741 - DNA, 75 bp, synthetic construct
  source 1..75: mol_type = other DNA
tagcacttttttgcctctccactggcgatattgaattggctaaacatctggctgaaatgttgccaatgacctgtt

SEQ ID NO: 262742 - DNA, 75 bp, synthetic construct
  source 1..75: mol_type = other DNA
aatgggtaggtatttgcggtgaactgggcggtgaaagtcgttatctgccgctactgctagggctgggcctggatg

SEQ ID NO: 262743 - DNA, 75 bp, synthetic construct
  source 1..75: mol_type = other DNA
atcagatcttatgggtgaagggcgagatccaaaaagcgatcgttgagcttaagcgcgatggcctgcgtcatgcag

SEQ ID NO: 262744 - DNA, 75 bp, synthetic construct
  source 1..75: mol_type = other DNA
gacttacgtccgcacttcaattaatcgagcaagcagcggctgtcctggttgctgtcagtctttcggctgaagaaa

SEQ ID NO: 262745 - DNA, 75 bp, synthetic construct
  source 1..75: mol_type = other DNA
gggaacctgaggcgcgatggggattacttcaacctgtccagccttgtggaacgtatcgcacctggaaagctggtg

SEQ ID NO: 262746 - DNA, 75 bp, synthetic construct
  source 1..75: mol_type = other DNA
cggatggaggtaagcgcatagcagaactggaaaaacaatgcgctgaatcggagcgaaaagcattaagcaactttg

SEQ ID NO: 262747 - DNA, 75 bp, synthetic construct
  source 1..75: mol_type = other DNA
ttcaaatttctgaccggaccagaaaccgtgctggcgccgctggatgaacgggaaagaaaccagcaatacatcaaa

SEQ ID NO: 262748 - DNA, 75 bp, synthetic construct
  source 1..75: mol_type = other DNA
tgatgatttaatgcctaaccccacttgtctggaagagttgatcagaagtaagtgtgatggcattgttcagcctct

SEQ ID NO: 262749 - DNA, 75 bp, synthetic construct
  source 1..75: mol_type = other DNA
catgttatgatctaaagtctgtatttaccctaaggcccaagcgtgaaactgtcattaatttttttaattctaaaa

SEQ ID NO: 262750 - DNA, 75 bp, synthetic construct
  source 1..75: mol_type = other DNA
ttccgggaagctggtgcgtatcgcccatgaaaagctgttggtgtttcgtcgtaacgacgttgcctcatcgctctg

SEQ ID NO: 262751 - DNA, 75 bp, synthetic construct
  source 1..75: mol_type = other DNA
taccgtgactgatacggctgctctggtcacggtcgtggcactggtgacgctgcatactgatgcacttcacgccac

SEQ ID NO: 262752 - DNA, 75 bp, synthetic construct
  source 1..75: mol_type = other DNA
attatggcgctggtttccgcctgtatcatcgatccgggcgtgtattttgccatgaacagcccaatggcggtgctg

SEQ ID NO: 262753 - DNA, 75 bp, synthetic construct
  source 1..75: mol_type = other DNA
ccgggaacggcgttccgtgtctctgccggtgtggcagctgaaatgacagaacgtggcctggccagaatgcaataa

SEQ ID NO: 262754 - DNA, 75 bp, synthetic construct
  source 1..75: mol_type = other DNA
cgcaaatgggttacctgccagggatgatctggctgctcgccggggtggttctcgccggtgcggtgcaggatttca

SEQ ID NO: 262755 - DNA, 75 bp, synthetic construct
  source 1..75: mol_type = other DNA
cattatcagttgcataaaacctacgataacctggcggataaaatcgcgattcatctcaatgatacccatccggta

SEQ ID NO: 262756 - DNA, 75 bp, synthetic construct
  source 1..75: mol_type = other DNA
attctgtttgaagcactgtttattttgacggcggtagatgcgggtacgcgtgctgcgcgctttatgttgcaggat

SEQ ID NO: 262757 - DNA, 75 bp, synthetic construct
  source 1..75: mol_type = other DNA
atcagggcgtggtcgatccgctgggcggcattaataccctgtggccgctgtttggtattgctaaccagatgctgg

SEQ ID NO: 262758 - DNA, 75 bp, synthetic construct
  source 1..75: mol_type = other DNA
ctgctgggcgtggtgtctccgggcctgaaacggaccgattcactgcctgctaacctgctggcaacggcgctgtgc

SEQ ID NO: 262759 - DNA, 75 bp, synthetic construct
  source 1..75: mol_type = other DNA
tgacactaccgatcaggatacccctatcagcccggaaaatgcgctgaccggacatgaaaatgaggttgtatcagc

SEQ ID NO: 262760 - DNA, 75 bp, synthetic construct
  source 1..75: mol_type = other DNA
gcggtgcgtcttgacggtttacgtttgctgttaattgaagataacccgctaacccagcgaattaccgttgagatg

SEQ ID NO: 262761 - DNA, 75 bp, synthetic construct
  source 1..75: mol_type = other DNA
gcagcagccattatctgccccccttccacacgaagaaattacacgcagtgttgccgctctggaagcatggttgaa

SEQ ID NO: 262762 - DNA, 75 bp, synthetic construct
  source 1..75: mol_type = other DNA
gcagcagccattatctgccccccttccacacgaagaaattacacgcagtgttgccgctctgaaagcatggttaaa

SEQ ID NO: 262763 - DNA, 75 bp, synthetic construct
  source 1..75: mol_type = other DNA
aaaaaaactggatttgctctcgtcacgctgaaaaaaccgctgacgttcaaccacgatgataacgaccccgtggac

SEQ ID NO: 262764 - DNA, 75 bp, synthetic construct
  source 1..75: mol_type = other DNA
tgccgcgcaccagctaaaaagcagctgcgcgagtctgggaatgcgtagcgccagccagctatgcgcgcaactgga

SEQ ID NO: 262765 - DNA, 75 bp, synthetic construct
  source 1..75: mol_type = other DNA
attagtttctctttgcgcactgattctgatcctctggcgcgtggtttatcgctcagtcacgcgccctcttgcaga

SEQ ID NO: 262766 - DNA, 75 bp, synthetic construct
  source 1..75: mol_type = other DNA
gcacgcgggcaatacagcctgttattgctggggatggtttcactttgcgcactgattctgatcctctggcgcgtg

SEQ ID NO: 262767 - DNA, 75 bp, synthetic construct
  source 1..75: mol_type = other DNA
ctggagaaaacgggcggcaacaaaaccgaagccgcccgccagttagggatcacgcgcaaaacgctattggcaaaa

SEQ ID NO: 262768 - DNA, 75 bp, synthetic construct
  source 1..75: mol_type = other DNA
ggtacgctgtccaacctgtgggaggcaatgacggggaccgcaactaacggccttgcggctattggcggcgcattt

SEQ ID NO: 262769 - DNA, 75 bp, synthetic construct
  source 1..75: mol_type = other DNA
caaaataacatcgcccagttcgcgcagtttagtagcgaagtcagtcagctggtcgacaccattgagctgcgcaat

SEQ ID NO: 262770 - DNA, 75 bp, synthetic construct
  source 1..75: mol_type = other DNA
atcgggcggctgatggatgcgtttcgcagcagtgttcatgcactgaatcgccaccgcgaacagctggcggcgcag

SEQ ID NO: 262771 - DNA, 75 bp, synthetic construct
  source 1..75: mol_type = other DNA
atcggtcgactgatggatgcgtttcgcagcagtgttcacgcgctgaatcgccaccgcgaacagctggcggcgcag

SEQ ID NO: 262772 - DNA, 75 bp, synthetic construct
  source 1..75: mol_type = other DNA
cctggaccctgtacgccggacgacgcagggatctcccttgacgttattcgccactacgccgggagtttgccgatt

SEQ ID NO: 262773 - DNA, 75 bp, synthetic construct
  source 1..75: mol_type = other DNA
gataagccagaaactgcagtttaccagaactaatattacccgcattacagattttttagaaaaagccgggtatgt

SEQ ID NO: 262774 - DNA, 75 bp, synthetic construct
  source 1..75: mol_type = other DNA
cattggcggtgatatctggtatcaatggcaaaccgataaattgcccttaaagccggatgactcgcaaaaagttcc

SEQ ID NO: 262775 - DNA, 75 bp, synthetic construct
  source 1..75: mol_type = other DNA
agctgaaacagaatctggaaaaccagcgtcgtcaggcgcaagcgttggccattcagacagcagaaacgctgacac

SEQ ID NO: 262776 - DNA, 75 bp, synthetic construct
  source 1..75: mol_type = other DNA
aacagacgcaacgtaacgccgcacttaacgaaatgcgccagcgttataaagaaaagacgcagcaacttgccgatg

SEQ ID NO: 262777 - DNA, 75 bp, synthetic construct
  source 1..75: mol_type = other DNA
cgaggcgtatcaggcgctggaaccgggcgttaatcaggcccggctattaacgctggaaaacgaagtgaaaaagct

SEQ ID NO: 262778 - DNA, 75 bp, synthetic construct
  source 1..75: mol_type = other DNA
agatgccagcatcgacaccatgttcgctgaactggggaaagtttggccgaaatttgacggtttcgtacactctat

SEQ ID NO: 262779 - DNA, 75 bp, synthetic construct
  source 1..75: mol_type = other DNA
tcgtaccgttaccattgaagatgtgggtaactccgccgcattcctgtgctccgatctctctgcaggtatctccgg

SEQ ID NO: 262780 - DNA, 75 bp, synthetic construct
  source 1..75: mol_type = other DNA
tcgtccggcgattttatggaacgatacccgcagtgctcttgagtgtacggaactggaagagattgcaccagagct

SEQ ID NO: 262781 - DNA, 75 bp, synthetic construct
  source 1..75: mol_type = other DNA
atacgttattaacgagtggcacacgcattggcggtgatatctggtatcaatggcaaaccgataaattgcccttaa

SEQ ID NO: 262782 - DNA, 75 bp, synthetic construct
  source 1..75: mol_type = other DNA
atgaataataaatttaaaatcattctctggatgatgctctctgctctgcctgctttatcttacgcacaggtaaaa

SEQ ID NO: 262783 - DNA, 75 bp, synthetic construct
  source 1..75: mol_type = other DNA
tccgaccacttaatcaaaaaacggttttatacttgttgcccccctcaggggttaaatgtgagacatgtcgcgctt

SEQ ID NO: 262784 - DNA, 75 bp, synthetic construct
  source 1..75: mol_type = other DNA
agcagaatctggaaaaccagcgccgtcaggcgcaaacgctggtcactcagacagcagaaacgctggcacagcatc

SEQ ID NO: 262785 - DNA, 75 bp, synthetic construct
  source 1..75: mol_type = other DNA
gcacttcaacaaagtggtttttggtgaagttggtaaagaaattatggattcaacaaaagataaaggcttttttgc

SEQ ID NO: 262786 - DNA, 75 bp, synthetic construct
  source 1..75: mol_type = other DNA
tgtacatcagagttttgaagagctggcgaaagaggtaaaacagctgtcaaaaggtaatatggtgatccgtattta

SEQ ID NO: 262787 - DNA, 75 bp, synthetic construct
  source 1..75: mol_type = other DNA
gccgcagttcagcctctgtttgacgacttcaaaaaagatccaaaacaagctgctttgttagagaaattcgacaac

SEQ ID NO: 262788 - DNA, 75 bp, synthetic construct
  source 1..75: mol_type = other DNA
ttctggcatgggctggagtggcgacattaattaagaccaccccgatattattcaacattgtacgttatcttggtg

SEQ ID NO: 262789 - DNA, 75 bp, synthetic construct
  source 1..75: mol_type = other DNA
cccgtgaaggcttcaaaattgcccacgacatcagctcttacagcttcgttgcaatggcaaaagcttgccgttcca

SEQ ID NO: 262790 - DNA, 75 bp, synthetic construct
  source 1..75: mol_type = other DNA
aatgtatcacaaaaggtaacggccttcgccgtggcgactatagcggcataggatgttgtggggtggtttatgact

SEQ ID NO: 262791 - DNA, 75 bp, synthetic construct
  source 1..75: mol_type = other DNA
gcgcgtaaccagcccgacggtaatttgcaggtgccacgcgtagagctggcgcgctgcgccgacggcaaaattctc

SEQ ID NO: 262792 - DNA, 75 bp, synthetic construct
  source 1..75: mol_type = other DNA
tgtctggcgctgtatcacgagactccgcgcctctcaaccatttcacaatcgcaaaatgatctgatgacccgcgat

SEQ ID NO: 262793 - DNA, 75 bp, synthetic construct
  source 1..75: mol_type = other DNA
agcatcagcaacaccgacctggcgggttgtctctcactgtgacggtggagcagattcagcaagagttagcgcaaa

SEQ ID NO: 262794 - DNA, 75 bp, synthetic construct
  source 1..75: mol_type = other DNA
gttgaagactggggttatctcaattcgctgattggctccaaagagggcgataaattccgtaagtttgcccaaggg

SEQ ID NO: 262795 - DNA, 75 bp, synthetic construct
  source 1..75: mol_type = other DNA
gaacaaacactaacgcaactggaacagctcaagcagaatctggaaaaccagcgccgtcaggcgcaaacgctggtc

SEQ ID NO: 262796 - DNA, 75 bp, synthetic construct
  source 1..75: mol_type = other DNA
cttcgcgcaaatattcgtcaccacgcggcgaagcagtcggcagaattacaacagcagcaacaaaatctgaatgcg

SEQ ID NO: 262797 - DNA, 75 bp, synthetic construct
  source 1..75: mol_type = other DNA
atggaatttaaagatttaccagtaccattccaggaaatggcatcgaatgtggttcgctctcaactggcgactctt

SEQ ID NO: 262798 - DNA, 75 bp, synthetic construct
  source 1..75: mol_type = other DNA
caaaacgtctacagcaactggaaccaaatgcaggcacagtggcccgcatttggattgccatgaaatcactcaaat

SEQ ID NO: 262799 - DNA, 75 bp, synthetic construct
  source 1..75: mol_type = other DNA
gattcaggggctgaaacacgatctgctggcggatgataccgcgctacgtgcactcatcccacaacggctgatcgc

SEQ ID NO: 262800 - DNA, 75 bp, synthetic construct
  source 1..75: mol_type = other DNA
gcacaaacatgcgtttggtgtttcggaagatctgaaatatgccctgcgcgaaagcattgagttgctgggcaacga

SEQ ID NO: 262801 - DNA, 75 bp, synthetic construct
  source 1..75: mol_type = other DNA
aagtggaagaactaatttacatcagatattagatggatatccaattcttaatatctcaactaatgctaaagttag

SEQ ID NO: 262802 - DNA, 75 bp, synthetic construct
  source 1..75: mol_type = other DNA
gccaacggtgaatatcgcagctggcaggatttgctctctacggcggtcttcacccaaaatgaaccgccgcgtttt

SEQ ID NO: 262803 - DNA, 75 bp, synthetic construct
  source 1..75: mol_type = other DNA
catgtgggaacagcatgccgttcctttgagctatgaggattgctacaactttgcccggtgcctggcaaagcacca

SEQ ID NO: 262804 - DNA, 75 bp, synthetic construct
  source 1..75: mol_type = other DNA
gataccctggttgatgacgttattggttttactaagacgggtaagaaagtgccaggtcgtgaatatgctctgaca

SEQ ID NO: 262805 - DNA, 75 bp, synthetic construct
  source 1..75: mol_type = other DNA
atccggttcaggtagctgtggctcaggctaatcgatatacatctcaggaacgggcagatgaaataaattctcgac

SEQ ID NO: 262806 - DNA, 75 bp, synthetic construct
  source 1..75: mol_type = other DNA
gctcaggcctttgcccgctggcgaccggagtacggttattttgccaaacaggcggggtttaccgttaaaacgtcc

SEQ ID NO: 262807 - DNA, 75 bp, synthetic construct
  source 1..75: mol_type = other DNA
agacgcacgacgaggaattaattgcattgtacaatacaaaaaatattcctctgtttatggagaaatgcgtcgagt

SEQ ID NO: 262808 - DNA, 75 bp, synthetic construct
  source 1..75: mol_type = other DNA
tgattgccgacggcacaggctacatcctgcttgccttcgcgacacggggatggatggcgttcccgatcatggtcc

SEQ ID NO: 262809 - DNA, 75 bp, synthetic construct
  source 1..75: mol_type = other DNA
cctttaacgacattccggcgctggaagcggcctggcgcagcgagtatgaaggctgtgaagggatgcagaacttcc

SEQ ID NO: 262810 - DNA, 75 bp, synthetic construct
  source 1..75: mol_type = other DNA
aatgaaacggaaattaaatgcagaatattagctcttaactcgttaagcgtattatatcgtgagctttgggataat

SEQ ID NO: 262811 - DNA, 75 bp, synthetic construct
  source 1..75: mol_type = other DNA
acaattttgcgaaaaacacagtttccaaaaaatccttcacaatgggttgtatctggtccacatttctttgtcggc

SEQ ID NO: 262812 - DNA, 75 bp, synthetic construct
  source 1..75: mol_type = other DNA
aaagtggaatggcaggaagcgggcgtgctgggtgattacgagccggaatttgtgctgcgtaagctgagtgcatcg

SEQ ID NO: 262813 - DNA, 75 bp, synthetic construct
  source 1..75: mol_type = other DNA
gccacataacgatcctcatgcccggggattgttctgggggctgacacactccagtcagcgtgcgctaatgggata

SEQ ID NO: 262814 - DNA, 75 bp, synthetic construct
  source 1..75: mol_type = other DNA
gcagcactttgcgcgtattgcgacggtgttactgccgaaagactacttgcgtttcaaaatgaccggcaaaaaaat

SEQ ID NO: 262815 - DNA, 75 bp, synthetic construct
  source 1..75: mol_type = other DNA
gtacgaagcggacacctggtacgaccaaaacggccgcatcatctttaccccaagcaaagggctggtgggcgttgg

SEQ ID NO: 262816 - DNA, 75 bp, synthetic construct
  source 1..75: mol_type = other DNA
accgatgtgctgttccgccatttgccgcgtctggcgattgttgatgcgctgaagaagcaacatcgtttcttccac

SEQ ID NO: 262817 - DNA, 75 bp, synthetic construct
  source 1..75: mol_type = other DNA
acaccccggaagtgctgacccgctcactggttaaatatgccctgaaagaactgtttaaggagcagattgatccca

SEQ ID NO: 262818 - DNA, 75 bp, synthetic construct
  source 1..75: mol_type = other DNA
aatatgcaaagcgtaccccacgggtttcgtggaaagagcaggatgaagacgagccgaggaaggtgacggactatt

SEQ ID NO: 262819 - DNA, 75 bp, synthetic construct
  source 1..75: mol_type = other DNA
aaaactgtacgttaaacagcgattatgactgcctggacttgctaacattgcccgacgattacctgccgcgcacta

SEQ ID NO: 262820 - DNA, 75 bp, synthetic construct
  source 1..75: mol_type = other DNA
gtataacagagcattataaaaaattgtggtgttccatttattcctcagaatttaaaatacaatattggagccgcg

SEQ ID NO: 262821 - DNA, 75 bp, synthetic construct
  source 1..75: mol_type = other DNA
ttgccagtctttatgatgaagagggtacgccggctcttgaggctcgacttcctgcgcttcatgctgaaccgcttg

SEQ ID NO: 262822 - DNA, 75 bp, synthetic construct
  source 1..75: mol_type = other DNA
tcaggacacatctgtcagcccggaaaatgcgctgaccggacatgaaaatgaggtggtatcagcgcagccggatac

SEQ ID NO: 262823 - DNA, 75 bp, synthetic construct
  source 1..75: mol_type = other DNA
gcaaaagaatgcgcgctggaaggtatggcgagaacgcaggttatctggctgaaagagggggttattaaggcgtga

SEQ ID NO: 262824 - DNA, 75 bp, synthetic construct
  source 1..75: mol_type = other DNA
ggctggctggattgtgcggcaccggtattaaaccgccagaccttattgccaccattgcatgttctgactgtcacg

SEQ ID NO: 262825 - DNA, 75 bp, synthetic construct
  source 1..75: mol_type = other DNA
ccagttccatccggaatccattcttactacccagggcgctcgcctgctggaacaaacgctggcctgggcgcagca

SEQ ID NO: 262826 - DNA, 75 bp, synthetic construct
  source 1..75: mol_type = other DNA
gcggccgcgattgtcaggtgcggatccccggcgtatgcaacggcaatcctgaaacctcagtactggctcacatac

SEQ ID NO: 262827 - DNA, 75 bp, synthetic construct
  source 1..75: mol_type = other DNA
agaatccctggctactgcaatcacaatcccgaaacctctgtgctggcgcattacaggctggcggggacgtgcgga

SEQ ID NO: 262828 - DNA, 75 bp, synthetic construct
  source 1..75: mol_type = other DNA
atggctgatttgagaaaagcagcgcgtagtcgggaatgccaggtaagaatccctggcgtatgtaatggcaaccct

SEQ ID NO: 262829 - DNA, 75 bp, synthetic construct
  source 1..75: mol_type = other DNA
aacaaacattggcctgggcgcagcagaaactggaaccgactaacacgctgcaaccgattctggaaaaactgtatc

SEQ ID NO: 262830 - DNA, 75 bp, synthetic construct
  source 1..75: mol_type = other DNA
cctcgacaacaaagacgccagactttaccacctcgaaggcgtaatcaggacgcaggcgatactgctgaaggaggg

SEQ ID NO: 262831 - DNA, 75 bp, synthetic construct
  source 1..75: mol_type = other DNA
caaagctttgccggaagcgaagagttgcacgcatttctgagccaatgccgcgtattgattaatcttctaccgaat

SEQ ID NO: 262832 - DNA, 75 bp, synthetic construct
  source 1..75: mol_type = other DNA
caaccgattctggaaaaactgtatcaggcacagacgcttagccaacaagaaagccaccagctgttttcagcggtg

SEQ ID NO: 262833 - DNA, 75 bp, synthetic construct
  source 1..75: mol_type = other DNA
tactggaaaacgccgcgccgttcccgcgtccggattatctgtttgccgatatcgtcggcaccggcggtgacggca

SEQ ID NO: 262834 - DNA, 75 bp, synthetic construct
  source 1..75: mol_type = other DNA
gaaaattcgcggcgagcacccgaacgaaatcgccggggcagcaaccgcgctactggaaaatgccgcgccgttccc

SEQ ID NO: 262835 - DNA, 75 bp, synthetic construct
  source 1..75: mol_type = other DNA
atacacttgcttatttttgcctgaccaatactctgagtgcgattaatatctggacgccgcaaatcctacagagtt

SEQ ID NO: 262836 - DNA, 75 bp, synthetic construct
  source 1..75: mol_type = other DNA
ctaccaatggcaacgcacgagccaaacaagtggcgcactatcttggagtgcatatcagcaccgtatggcgctatg

SEQ ID NO: 262837 - DNA, 75 bp, synthetic construct
  source 1..75: mol_type = other DNA
gaaaaaaactatccttgagatcgcattaaaatatcaatttgattcccaacaatcttttacacgtcgggtaatgac

SEQ ID NO: 262838 - DNA, 75 bp, synthetic construct
  source 1..75: mol_type = other DNA
catctgatgtatgtctccgtcaaccgccgacagaaaatgaaagtaagaaaacaaaaaaaccgccagtgtcaccca

SEQ ID NO: 262839 - DNA, 75 bp, synthetic construct
  source 1..75: mol_type = other DNA
tcacctcaacgacacccacccggtgttgtcgattcctgagatgatgcgtctgctgattgatgagcatcaatttag

SEQ ID NO: 262840 - DNA, 75 bp, synthetic construct
  source 1..75: mol_type = other DNA
atgggcgatgagtgccataaccgcaataacgccgggacgacactgctgattcaggcgctgacgccggggattatt

SEQ ID NO: 262841 - DNA, 75 bp, synthetic construct
  source 1..75: mol_type = other DNA
ccgtttgctcaatcgctggggcgagtgggggactggggaaaataccgcaggatactctttctggcatacgaacac

SEQ ID NO: 262842 - DNA, 75 bp, synthetic construct
  source 1..75: mol_type = other DNA
tttcctatgcggcaaaggttcatttcaaagaagcaggcaacgccatgaatgaattaattgcgaatcatgacttcg

SEQ ID NO: 262843 - DNA, 75 bp, synthetic construct
  source 1..75: mol_type = other DNA
tagggcatcagtttggtggtggtcgcggtaaagatgtcgccactgttgtaggggcgctgggcggcggatatgccg

SEQ ID NO: 262844 - DNA, 75 bp, synthetic construct
  source 1..75: mol_type = other DNA
acaaatcagaaaaaatgctcggttatgacgtaacctacaagattggcgatcagcaaggcaaaatccgcatggatc

SEQ ID NO: 262845 - DNA, 75 bp, synthetic construct
  source 1..75: mol_type = other DNA
cagcagggcaaaatccgcatggaccgcgatccgggtacgcagatcccgctagatagtaatgggcaactgattttg

SEQ ID NO: 262846 - DNA, 75 bp, synthetic construct
  source 1..75: mol_type = other DNA
gcgtgctgtggggagaggtttacgcaacggataatgtctggatcgataatagtgaaatcagccagggtgcatata

SEQ ID NO: 262847 - DNA, 75 bp, synthetic construct
  source 1..75: mol_type = other DNA
cggacagcaattgcgcaaggcgctggatcgctgcgaatggcgacgtccgtgctgcccagtgatctccaatgtcaa

SEQ ID NO: 262848 - DNA, 75 bp, synthetic construct
  source 1..75: mol_type = other DNA
atgttatccggacaaaactcggccattatcgccgccgagcaatacctgctggatcatgatcgccaagtcgaagta

SEQ ID NO: 262849 - DNA, 75 bp, synthetic construct
  source 1..75: mol_type = other DNA
tgccgggacaggagaagatgccattcccacccttcactacagttcccaggtagcggaacatgccacggtagaagg

SEQ ID NO: 262850 - DNA, 75 bp, synthetic construct
  source 1..75: mol_type = other DNA
gagagccgtattacaggtgcggtgataattgaaaaccatgtggagttaaccgaccacgccgtcgttgaagccttt

SEQ ID NO: 262851 - DNA, 75 bp, synthetic construct
  source 1..75: mol_type = other DNA
tagcggaatatgccattgtggaaggtaattgtgtgttaaaacatcatgtcttgattggcggaaaggcagtggtac

SEQ ID NO: 262852 - DNA, 75 bp, synthetic construct
  source 1..75: mol_type = other DNA
gacgacgattaccacggtaaacatattgcgtatttcatgcgacaagcattggcctggctggaagggcattcatgc

SEQ ID NO: 262853 - DNA, 75 bp, synthetic construct
  source 1..75: mol_type = other DNA
tgataaatgatgacgatgtgcattataattgtcgcgcatattttaacaataaaacaaatgatgcgattggcttag

SEQ ID NO: 262854 - DNA, 75 bp, synthetic construct
  source 1..75: mol_type = other DNA
agggtgttgaaagatgaaaaattgcagacagcctttgaacgattgacagaaattgaactaggaattcgtttgcct

SEQ ID NO: 262855 - DNA, 75 bp, synthetic construct
  source 1..75: mol_type = other DNA
aggacattgcttttttgcatgagcttcttgaacagggatttcaactcaaaggcagtagtcaggcagaaatcgacg

SEQ ID NO: 262856 - DNA, 75 bp, synthetic construct
  source 1..75: mol_type = other DNA
cgccctgacagccacacgccatcaccgcgccgccgatgtggctgccagtgcgcaattgaaagaattgctcagtcg

SEQ ID NO: 262857 - DNA, 75 bp, synthetic construct
  source 1..75: mol_type = other DNA
cgtctccacgatacagcgatcaagtgtgctggcacccagcaattacgagaaagaattagccgtgttttgggcgac

SEQ ID NO: 262858 - DNA, 75 bp, synthetic construct
  source 1..75: mol_type = other DNA
aagtctacggtcacgcacgtgtgattgccggaactgaagaagatgcgattccaacaattcattacagctcacagg

SEQ ID NO: 262859 - DNA, 75 bp, synthetic construct
  source 1..75: mol_type = other DNA
cgtttgatacccaatggtgggttgatgcgctgggcaaagctattccacaggcaaaagtcagagcatggaaaagtg

SEQ ID NO: 262860 - DNA, 75 bp, synthetic construct
  source 1..75: mol_type = other DNA
ctgttccactttttcgcctggaagataccggtatgggcgagcaaatgcaggaatatgctgtcagtcaggtgctgc

SEQ ID NO: 262861 - DNA, 75 bp, synthetic construct
  source 1..75: mol_type = other DNA
taccggtatgggcgagcaaatgcaggagtacgcagtgagccaggtgttgcactggtttcggcgctttgacgatta

SEQ ID NO: 262862 - DNA, 75 bp, synthetic construct
  source 1..75: mol_type = other DNA
atgctggcagggcgtgaccttaaggcggtgttcgcgttgggtgctggtgttgattcgattttgagtaaattacag

SEQ ID NO: 262863 - DNA, 75 bp, synthetic construct
  source 1..75: mol_type = other DNA
gtcgccgcgattacccgtcccgctgaagctgtggagtacatttcgcgcaccattgcccagctcgaaaaaggggag

SEQ ID NO: 262864 - DNA, 75 bp, synthetic construct
  source 1..75: mol_type = other DNA
aagagagtttatagaaattaatactcttcgaaaaggcgtaatgcctaagaactattacattgcagaaagtgattt

SEQ ID NO: 262865 - DNA, 75 bp, synthetic construct
  source 1..75: mol_type = other DNA
gatactgtttatttgcgtggcccaaaagtcattaacggtgaggaacacattacgcgaacgccgctggcggggtta

SEQ ID NO: 262866 - DNA, 75 bp, synthetic construct
  source 1..75: mol_type = other DNA
gcggtggcccggtgttactcgacgagcacatcatcattcagggtaacagtcgcattacgggagcggtcatcatgg

SEQ ID NO: 262867 - DNA, 75 bp, synthetic construct
  source 1..75: mol_type = other DNA
gctactgtcagttactttcaccgacattacgtattcgtgattacttccagaaacgttggctggatgcgccattta

SEQ ID NO: 262868 - DNA, 75 bp, synthetic construct
  source 1..75: mol_type = other DNA
gagcagaaaggtgcgcttgaaaaagccctggccattgcgcgtcagcttcagaaaatggggatgacacctgagcag

SEQ ID NO: 262869 - DNA, 75 bp, synthetic construct
  source 1..75: mol_type = other DNA
ccagaagaaattacgctgcttgcagtcagtaaaacaaaacctgcgagcgccatcgcagaagccattgatgccggg

SEQ ID NO: 262870 - DNA, 75 bp, synthetic construct
  source 1..75: mol_type = other DNA
ctggctattgcgtgccagcttcagaaaatggggatgacgccggagcagattaagcaggctaccggactttccgat

SEQ ID NO: 262871 - DNA, 75 bp, synthetic construct
  source 1..75: mol_type = other DNA
ttacctggagcgcggctttaatatggatgatagtcggaacaacggtgagtttgcgacgcaggaaattcgcgccta

SEQ ID NO: 262872 - DNA, 75 bp, synthetic construct
  source 1..75: mol_type = other DNA
atgaaaaagttattaccctgtaccgcactggtgatgtgtgcgggaatggcctgcgcacaggccgaggaaaagaac

SEQ ID NO: 262873 - DNA, 75 bp, synthetic construct
  source 1..75: mol_type = other DNA
ctggcaggatgatattgaacgtgaaggccatgattttaaccgtgtaggtttattttacggttatgatttccagaa

SEQ ID NO: 262874 - DNA, 75 bp, synthetic construct
  source 1..75: mol_type = other DNA
cgctgactgccggacaacaggcggttattaagaagctgtttcgccgcctgatcgtctttctgttcgtgctgttta

SEQ ID NO: 262875 - DNA, 75 bp, synthetic construct
  source 1..75: mol_type = other DNA
tcatcttcggcattcccagcaacattatgctgagtattgtcggtgcgcgacgctggatcgccaccatcatggtgc

SEQ ID NO: 262876 - DNA, 75 bp, synthetic construct
  source 1..75: mol_type = other DNA
atgaatgccaacccgtcatcagccaccactggctttatctacctgtcaccggaattcccgcaagggcagtttatg

SEQ ID NO: 262877 - DNA, 75 bp, synthetic construct
  source 1..75: mol_type = other DNA
tcatcgagcaccagagcaccgaaaatctgtacatgccttttcgcatgttacgttacagtgtggcggcgatgcaga

SEQ ID NO: 262878 - DNA, 75 bp, synthetic construct
  source 1..75: mol_type = other DNA
gtgcgacctgtccacgctgaagctggaacccgccacctttgtagagccggacctgcatcagtacgccagcgatat

SEQ ID NO: 262879 - DNA, 75 bp, synthetic construct
  source 1..75: mol_type = other DNA
gtgccagcttcagaaaatggggatgacgccggagcagattaagcaggcaaccggactttccggtgaagaactgaa

SEQ ID NO: 262880 - DNA, 75 bp, synthetic construct
  source 1..75: mol_type = other DNA
cgtctgaaactggcacaactgacggcgaagacgctgaagctgggtctggatacgctgggtattgagacagtagag

SEQ ID NO: 262881 - DNA, 75 bp, synthetic construct
  source 1..75: mol_type = other DNA
agatggcggctatctctacaccaccactgatatcgcctgtgcgaaatatcgttatgaaacactgcatgccgatcg

SEQ ID NO: 262882 - DNA, 75 bp, synthetic construct
  source 1..75: mol_type = other DNA
tggcagaactggaagaagagcttgatgacacgggcgacactgccggtcaggatatccctctcagcccggaaaatg

SEQ ID NO: 262883 - DNA, 75 bp, synthetic construct
  source 1..75: mol_type = other DNA
cgatgctgaacattgccaatatggctacttctcttctgaccgtactatcaaagagtacgccgatcatatctggca

SEQ ID NO: 262884 - DNA, 75 bp, synthetic construct
  source 1..75: mol_type = other DNA
tatcggagtatggaaacgttaaccactggctggaaaacggcggcgtgtggttcttcagtcttgattatgaaaaag

SEQ ID NO: 262885 - DNA, 75 bp, synthetic construct
  source 1..75: mol_type = other DNA
gagcaactggctgcagctccggtaatcatccgtgaagatcgtgaagcgcaactggcagctcgcctgctgcagttt

SEQ ID NO: 262886 - DNA, 75 bp, synthetic construct
  source 1..75: mol_type = other DNA
gcctctataacccgatgctgccgggtatcgtggcagatctcaaagccaaaggtctggcagtagaaagtgaaggcg

SEQ ID NO: 262887 - DNA, 75 bp, synthetic construct
  source 1..75: mol_type = other DNA
actttgatcaactggcggaagaaaaagtgcgtgacgcgctaaaaccgccatctatgtataaagtgatattagtca

SEQ ID NO: 262888 - DNA, 75 bp, synthetic construct
  source 1..75: mol_type = other DNA
tgtgggccgggctggatgagtcgttactggcgcgaacgcagtggacaggtgacggcattagatatttcttcgccg

SEQ ID NO: 262889 - DNA, 75 bp, synthetic construct
  source 1..75: mol_type = other DNA
atggcaacggttaataaacaagccattgcagcggcatttggtcgggcagccgcgcactatgagcaacacgcagag

SEQ ID NO: 262890 - DNA, 75 bp, synthetic construct
  source 1..75: mol_type = other DNA
attaacgcgttcgcagttgcagcgattgcaactggcctggccgcaacaacaggggcgatatcctctgacgtatca

SEQ ID NO: 262891 - DNA, 75 bp, synthetic construct
  source 1..75: mol_type = other DNA
ttgcggtggcatttggtcgggcagcctcacagtatgagcaacacgcagagttgcagcgccagagtgccgacgcct

SEQ ID NO: 262892 - DNA, 75 bp, synthetic construct
  source 1..75: mol_type = other DNA
gcgtagtggcgtttactactctggtgcaaggctcgttacccgagttacatcaggcatggcaggcggtagatgagc

SEQ ID NO: 262893 - DNA, 75 bp, synthetic construct
  source 1..75: mol_type = other DNA
gacggcgttagatctctcgccgccaatgcttgcgcaagcccgccagaaagatgctgcagaccattatctggcggg

SEQ ID NO: 262894 - DNA, 75 bp, synthetic construct
  source 1..75: mol_type = other DNA
acctgtatcagaacatgcgggctaatgcgttgactgactcggaattacggcgcaaggctgccgatgaacttgccc

SEQ ID NO: 262895 - DNA, 75 bp, synthetic construct
  source 1..75: mol_type = other DNA
tttccggcaagcctggttaatcgcagccaagaagacgtgaacgagatccgccgccagtgggtgctggccttcaaa

SEQ ID NO: 262896 - DNA, 75 bp, synthetic construct
  source 1..75: mol_type = other DNA
ctggctagcggtagcgaacccatcgctttcagccgtgctggacgaacacctgggccgtaactggcgcaccgacct

SEQ ID NO: 262897 - DNA, 75 bp, synthetic construct
  source 1..75: mol_type = other DNA
atgccgcagaccattatctggcgggagatatcgaatccctgccgttagcgactgcaaccttcgatcttgcatgga

SEQ ID NO: 262898 - DNA, 75 bp, synthetic construct
  source 1..75: mol_type = other DNA
tatcagaacatgcgggccaatgcgcttactgatgcggaattacggcgcaaggctgccgatgaactgacctgtatg

SEQ ID NO: 262899 - DNA, 75 bp, synthetic construct
  source 1..75: mol_type = other DNA
atcttccggcggagtaccggcagttgtgcgacctgtccacgctgaagctggaacccgccacctttgttgagccgg

SEQ ID NO: 262900 - DNA, 75 bp, synthetic construct
  source 1..75: mol_type = other DNA
gtgcaactcctgagcttgccgcttgtcctttgtgccaagagattccttaattcgtttcccgcccgggagcgaata

SEQ ID NO: 262901 - DNA, 75 bp, synthetic construct
  source 1..75: mol_type = other DNA
gccggaagcgtggcctgtatccggatgcagagtcttatccgtggaaatcgaacgcgcattactggttggttacca

SEQ ID NO: 262902 - DNA, 75 bp, synthetic construct
  source 1..75: mol_type = other DNA
cccaaagggccatggatttccataaacacttgcctgcaatccactacttgtaaagatcttgacgcttcattggag

SEQ ID NO: 262903 - DNA, 75 bp, synthetic construct
  source 1..75: mol_type = other DNA
atgaggtatatgatggtaacaattacagctaaagtaattgtggttctgcaggtttttaaaatggataagataaag

SEQ ID NO: 262904 - DNA, 75 bp, synthetic construct
  source 1..75: mol_type = other DNA
atttcaggctttttagccaatccaattggatattttatttacaatacccatgtatatttgcgcagaaaaatatcc

SEQ ID NO: 262905 - DNA, 75 bp, synthetic construct
  source 1..75: mol_type = other DNA
gcctgtaccagaatatgcgggccaatgcgcttactgatacggaattacggcgcaaggctgccgatgaactggctt

SEQ ID NO: 262906 - DNA, 75 bp, synthetic construct
  source 1..75: mol_type = other DNA
gcgcttgaaaaagccctggctattgcgtgccagcttcagaaaatggggatgacgccggagcagattaagcaggct

SEQ ID NO: 262907 - DNA, 75 bp, synthetic construct
  source 1..75: mol_type = other DNA
ttcccggcgagcctggctaaccgcgaccagaatgagctgaacgaaatccgccgtcagtgggttatggctttccgt

SEQ ID NO: 262908 - DNA, 75 bp, synthetic construct
  source 1..75: mol_type = other DNA
gcgcattttttatcgaagcgccccactctctttggctctcgttgcctaactattttgaagatgaatgcagcccgc

SEQ ID NO: 262909 - DNA, 75 bp, synthetic construct
  source 1..75: mol_type = other DNA
agatgcgcctgaagagcaggtccgggaacgttgcagggtattcaccacactgctgaatgagggatttactgccct

SEQ ID NO: 262910 - DNA, 75 bp, synthetic construct
  source 1..75: mol_type = other DNA
caacgcagtacgacaccgacgcggtttacgcgctgatttgtgagctaaaacaagcggagtttgaccaccaggcgt

SEQ ID NO: 262911 - DNA, 75 bp, synthetic construct
  source 1..75: mol_type = other DNA
aaatcagtaacgcgctgaacaacatagggataacgcctgttccggcagaaatatcgctttcagcggcgtatatgg

SEQ ID NO: 262912 - DNA, 75 bp, synthetic construct
  source 1..75: mol_type = other DNA
ccgcgctgtcgcgctatggtgcgcggcctctcggtacgtttaccgaaggaagcgcggtgttttcgtcgcaactgg

SEQ ID NO: 262913 - DNA, 75 bp, synthetic construct
  source 1..75: mol_type = other DNA
aataccggcgtcctgagtcgtttgcgccgggggcgacgaaaaagcgcttcacctcggtggtctttgataaagacc

SEQ ID NO: 262914 - DNA, 75 bp, synthetic construct
  source 1..75: mol_type = other DNA
gaccattattatgtggattttgttggtgatggcccactaagatcagacttagaaagtcaaatagcaaaacgtggt

SEQ ID NO: 262915 - DNA, 75 bp, synthetic construct
  source 1..75: mol_type = other DNA
gatatattggaatcgaatcaaaaagtgaaataaatgagcaaaagaaatttaagatggtcatgattggacgcttat

SEQ ID NO: 262916 - DNA, 75 bp, synthetic construct
  source 1..75: mol_type = other DNA
aaagcgattgaaaccggtgaagtggtctacgctgatggcaacgaagtgccttaccgttgctctttgcatccgcaa

SEQ ID NO: 262917 - DNA, 75 bp, synthetic construct
  source 1..75: mol_type = other DNA
cgtaatcactgtgatttaaataccgtgcttgcgctgaatcaggttatccgctcgccacgggtgattctgacccat

SEQ ID NO: 262918 - DNA, 75 bp, synthetic construct
  source 1..75: mol_type = other DNA
atgagcctgaccctcacgctcaccggcaccggcggcgcacagggcgttccggcatggggctgcgagtgcgtggcc

SEQ ID NO: 262919 - DNA, 75 bp, synthetic construct
  source 1..75: mol_type = other DNA
tgagtggtgacattagtggtgctcaacgtgtttcacttgatgagatgcatacattaagtcaagaatttcaacaat

SEQ ID NO: 262920 - DNA, 75 bp, synthetic construct
  source 1..75: mol_type = other DNA
ttcttggtggagtggatgtattttttaatcatgataccggacagatatgccgcattgatggaaataaattctttc

SEQ ID NO: 262921 - DNA, 75 bp, synthetic construct
  source 1..75: mol_type = other DNA
agtatcgccgccagccatgcagcggcgtcgtgaagtttaacgacgcaatcaccctgatcgacgccgggctgcacg

SEQ ID NO: 262922 - DNA, 75 bp, synthetic construct
  source 1..75: mol_type = other DNA
cgtgattctgacccatatcagccaccagtttgatgcgtggctgatggaaaacgcactgccgtcggggtttgaggc

SEQ ID NO: 262923 - DNA, 75 bp, synthetic construct
  source 1..75: mol_type = other DNA
ccattcgaaactcactttcggctatctactggaaacggcacatagccgggtggcgtggctgtctgacaccgcagg

SEQ ID NO: 262924 - DNA, 75 bp, synthetic construct
  source 1..75: mol_type = other DNA
tgttgctgattcaaccatctactctgatgtcctggccctttctgaaagcgagaattcagccagtaccacaacaaa

SEQ ID NO: 262925 - DNA, 75 bp, synthetic construct
  source 1..75: mol_type = other DNA
agaattcagccggtaccacaacaaatgtaaacatgaacgttgcccgctcttactgggaaggtaatgcttatacct

SEQ ID NO: 262926 - DNA, 75 bp, synthetic construct
  source 1..75: mol_type = other DNA
cagtttgatgcgtggctgatggagaacgcgctgccgccggggtttgaagccgggtttgatgggatggagattggg

SEQ ID NO: 262927 - DNA, 75 bp, synthetic construct
  source 1..75: mol_type = other DNA
gggccctgcagtctttaactccgagtcttgtgctgctcatttgccacaaaatcctggtacgccagctcaatcatt

SEQ ID NO: 262928 - DNA, 75 bp, synthetic construct
  source 1..75: mol_type = other DNA
cgaagtgctgccccgctcgcttatcgcctcgcaggtgtgggacatgaatttcgacagcgacactaacgccattga

SEQ ID NO: 262929 - DNA, 75 bp, synthetic construct
  source 1..75: mol_type = other DNA
ggcgggttcaggtaagacaatgtttctgtcatatcttgcctgttcattacagaaatacaataaccctgaaacttt

SEQ ID NO: 262930 - DNA, 75 bp, synthetic construct
  source 1..75: mol_type = other DNA
cagtttgatgcgtggctgatggagaacgtactgccgtcagggtttgaggcggggtttgatgggatggagattggg

SEQ ID NO: 262931 - DNA, 75 bp, synthetic construct
  source 1..75: mol_type = other DNA
cgctcacttcacgctgccagccgtcgtcgcgcgaatcttcatagtctcgcccacggtcagggttataagcgtcat

SEQ ID NO: 262932 - DNA, 75 bp, synthetic construct
  source 1..75: mol_type = other DNA
agctaaagtcggttggacacctgttcttggtgacaacctcacccatgaataccagggttttctgctaatacagca

SEQ ID NO: 262933 - DNA, 75 bp, synthetic construct
  source 1..75: mol_type = other DNA
cggacgacgctggcagcagaaggttgcgaattaaagattatttttcatcatgcgaaaaactgggatgacacaacc

SEQ ID NO: 262934 - DNA, 75 bp, synthetic construct
  source 1..75: mol_type = other DNA
aaacgatacacccacgttgcgtattccctactatcgcccgctcgaaccgctacaaccaggctttttgcccggccg

SEQ ID NO: 262935 - DNA, 75 bp, synthetic construct
  source 1..75: mol_type = other DNA
gtcagcgaactggccgaacgctgtttttgcagcgaacgccatgttcgtacgctgttgcgtcaggcacaggaggcg

SEQ ID NO: 262936 - DNA, 75 bp, synthetic construct
  source 1..75: mol_type = other DNA
acttcatgtaatggcagaacaattacgaacgacgctggcagcagaaggttgcgaattaacgattgtttttcataa

SEQ ID NO: 262937 - DNA, 75 bp, synthetic construct
  source 1..75: mol_type = other DNA
aaacgatacgccaacgttgcgtattccctattatcgcccgctcgaaccgctacaaccgggctttttacccggtcg

SEQ ID NO: 262938 - DNA, 75 bp, synthetic construct
  source 1..75: mol_type = other DNA
ctgcgcaacgcgatgatggaacaggcactggaaaccggaaaacagcaagatgtgctggagctggcgcaactggct

SEQ ID NO: 262939 - DNA, 75 bp, synthetic construct
  source 1..75: mol_type = other DNA
aaaagtccttatttgtactcaggtattagagcagagcgtcgattgtgacctggacgaaatgatctccgacctggc

SEQ ID NO: 262940 - DNA, 75 bp, synthetic construct
  source 1..75: mol_type = other DNA
agcaggcagcacaatttttcgcctggttgctgtgttggcacgatactggaaaatttgcccgctcttttcagcaac

SEQ ID NO: 262941 - DNA, 75 bp, synthetic construct
  source 1..75: mol_type = other DNA
cgtcaattaggtatcgctgacacggagcaggcagcacaatttttcgcctggttgctgtgttggcacgatactgga

SEQ ID NO: 262942 - DNA, 75 bp, synthetic construct
  source 1..75: mol_type = other DNA
cagcaaaaggtgctggatctggatatcagccagcctgggccacagttatttattctggaggatgtgactggcgca

SEQ ID NO: 262943 - DNA, 75 bp, synthetic construct
  source 1..75: mol_type = other DNA
aacgtgattttagttaccgatgacgaaagttgcgggtattcggctatggaaggattgactggcaaggttggttga

SEQ ID NO: 262944 - DNA, 75 bp, synthetic construct
  source 1..75: mol_type = other DNA
aggagtctgtttccctgtggctggctacctgtattgacggtgtggtgaagccttatgccaccggtgctcacgcat

SEQ ID NO: 262945 - DNA, 75 bp, synthetic construct
  source 1..75: mol_type = other DNA
gtcatgcattgctgccaggctggactattccacagtgggaagtgccagtagaagtcaaactcccagaaacattga

SEQ ID NO: 262946 - DNA, 75 bp, synthetic construct
  source 1..75: mol_type = other DNA
actgatcgcgagaggctgctggctttcacagggattggcgatgatcaccatctgcccggtaagccaatctcatct

SEQ ID NO: 262947 - DNA, 75 bp, synthetic construct
  source 1..75: mol_type = other DNA
gctgattctggctcccgtctgggacgactctcctggcgacgaatggtttggcagtgccatgcgtaacagtgcatt

SEQ ID NO: 262948 - DNA, 75 bp, synthetic construct
  source 1..75: mol_type = other DNA
cgatcatgggcgaatctggctgacgcagcgtgtgctgcgtgagcaaggtgctattcagatgccacacgcagcccg

SEQ ID NO: 262949 - DNA, 75 bp, synthetic construct
  source 1..75: mol_type = other DNA
aggtttgctcggggggctggtacacagcatcctgatccgtcgcgggcgcaccgataaagtctttaatccgattac

SEQ ID NO: 262950 - DNA, 75 bp, synthetic construct
  source 1..75: mol_type = other DNA
gctgggtgaagggatcgcacaactcctttcggcacagatccttgccgggcagtatgagcgacaaaaagcgatgct

SEQ ID NO: 262951 - DNA, 75 bp, synthetic construct
  source 1..75: mol_type = other DNA
gctggatattggtgcagtcgcgattaccgatcgagagaaattgctggcctttaccggaattggtgacgaccacca

SEQ ID NO: 262952 - DNA, 75 bp, synthetic construct
  source 1..75: mol_type = other DNA
gcgcgtggcggaaacagcgtcattttgctttctgctacgttatcccaacagcagcgcgacaaactcgtcgccgcc

SEQ ID NO: 262953 - DNA, 75 bp, synthetic construct
  source 1..75: mol_type = other DNA
gcgttgaacttttaaaacaactttcctggtatatctctgcaacagtcgtactcgcagactggacgggttcgtcaa

SEQ ID NO: 262954 - DNA, 75 bp, synthetic construct
  source 1..75: mol_type = other DNA
gaggagctgcaacgggtcagccaggtcagtagcggcatcagtttaggtttttgctatttaacgttgcgcaaaagt

SEQ ID NO: 262955 - DNA, 75 bp, synthetic construct
  source 1..75: mol_type = other DNA
aatggtcagttatctggctactggaagtgcgtgccggtgtgtatgtcggagatacatccaaacgtattcgggaga

SEQ ID NO: 262956 - DNA, 75 bp, synthetic construct
  source 1..75: mol_type = other DNA
acacgcagcccggcttcttattgaatccgtctacggtgaggacgtggtaatgccggaaggatttgcccgcagcga

SEQ ID NO: 262957 - DNA, 75 bp, synthetic construct
  source 1..75: mol_type = other DNA
tcatttgtactcaggtcttagagcagagcgttgattgtgacctggacgaaatgatctccgacctggcccctgttg

SEQ ID NO: 262958 - DNA, 75 bp, synthetic construct
  source 1..75: mol_type = other DNA
agagtgtgctggtggatgacgcgctaactgcaattaaagcggcactggaggagaacttcggtaaagactccatgt

SEQ ID NO: 262959 - DNA, 75 bp, synthetic construct
  source 1..75: mol_type = other DNA
ggaagctctgaaaacagagatattatcagcccttgagagtatccctaatgagctgaataagaagttcgaatacgt

SEQ ID NO: 262960 - DNA, 75 bp, synthetic construct
  source 1..75: mol_type = other DNA
ctcactgagggacttatttcaacggctacgcgccgctcaagtattttagcggttgctgaagaccgtagctacgta

SEQ ID NO: 262961 - DNA, 75 bp, synthetic construct
  source 1..75: mol_type = other DNA
ttgattgttaaatacgcaattaaatataattctgtaaccagtaaaaaattaactaccgcctctccagcagataag

SEQ ID NO: 262962 - DNA, 75 bp, synthetic construct
  source 1..75: mol_type = other DNA
cgtccacacgccagtgcttcatggcgcaactggggcaaccactgaccagctggaaagacatggccccacatgaaa

SEQ ID NO: 262963 - DNA, 75 bp, synthetic construct
  source 1..75: mol_type = other DNA
atgaagcagtcagcgtaacgttcgacgtggtgcaagaaacaccattcttgacgctgttactttcccgtgagttaa

SEQ ID NO: 262964 - DNA, 75 bp, synthetic construct
  source 1..75: mol_type = other DNA
atgaagctgtgagcgtggcatttgatattgaaaaagaaaccccctttcttacgctgttgctttccagggaactga

SEQ ID NO: 262965 - DNA, 75 bp, synthetic construct
  source 1..75: mol_type = other DNA
ctgaccgagggatttatttcaactgccacacggagagcaagcattttagcgggagctgaagaccgcagttacgtc

SEQ ID NO: 262966 - DNA, 75 bp, synthetic construct
  source 1..75: mol_type = other DNA
aagtggcggccagcgaaggtttcctcaagcaacccgccggtaaagagttcgcttttgctggctcatcagtgaaag

SEQ ID NO: 262967 - DNA, 75 bp, synthetic construct
  source 1..75: mol_type = other DNA
tgattcgtcatcattcagtttattactacagagtgatgatgattctcagcaatgttatgcacaggtaaaagttaa

SEQ ID NO: 262968 - DNA, 75 bp, synthetic construct
  source 1..75: mol_type = other DNA
tattgcacgtaaaaatgttctgatagacgacgctcaaaatgctattaaagcagcgttggaagataattttggtcg

SEQ ID NO: 262969 - DNA, 75 bp, synthetic construct
  source 1..75: mol_type = other DNA
accggtggtagtggtatggaaactacagaagaaactcgaaatcgtgctcagtattatgttgcatacgatgaacaa

SEQ ID NO: 262970 - DNA, 75 bp, synthetic construct
  source 1..75: mol_type = other DNA
ccgggatccgtcagtgaaatgcaggactatattccggaaaaccgctgttaccgtgctaccctggagtttcaggtc

SEQ ID NO: 262971 - DNA, 75 bp, synthetic construct
  source 1..75: mol_type = other DNA
ggaagggcaggaagggcgtctgtttggcccgttggcgttcaccaaaacctatgcgatggcgggcgcggcgctgct

SEQ ID NO: 262972 - DNA, 75 bp, synthetic construct
  source 1..75: mol_type = other DNA
tggcgcgatagcccgcaggcgctgcgccagttgccgatcctgacgccgatgaagcagcaaatcaccctggcggac

SEQ ID NO: 262973 - DNA, 75 bp, synthetic construct
  source 1..75: mol_type = other DNA
ggcgcggtcctgcgcgtgcgcccgaaagcgatgacggtggcggtgattatcgccggtctgctgccgattctgtgg

SEQ ID NO: 262974 - DNA, 75 bp, synthetic construct
  source 1..75: mol_type = other DNA
tgcgcgcccgacgagctggatttatatcgatgcccgcgatcgtgacatggtgtcggtggttcacgatctgcaaaa

SEQ ID NO: 262975 - DNA, 75 bp, synthetic construct
  source 1..75: mol_type = other DNA
tgcgtgatgttgcgaaggtccaggttggcccggagatgcgccggggcattgccgaactgaacggcgaaggcgaag

SEQ ID NO: 262976 - DNA, 75 bp, synthetic construct
  source 1..75: mol_type = other DNA
gacagctaccgattctgacgccgatgaaacagcaaatcacccttgctgacgttgctgacgtcaaagtctctggcg

SEQ ID NO: 262977 - DNA, 75 bp, synthetic construct
  source 1..75: mol_type = other DNA
attatgaaatatgaactgtggcatatccctcctgccctgctgggtctggcaggcgtgttgtcatggttgctgctg

SEQ ID NO: 262978 - DNA, 75 bp, synthetic construct
  source 1..75: mol_type = other DNA
tattgctggcccaagtgacagtgatgtcactgacagtgatttttcttgctgctgacaggcgttttttttcatggg

SEQ ID NO: 262979 - DNA, 75 bp, synthetic construct
  source 1..75: mol_type = other DNA
tttttgtacaaactcgaaaactacaccggcagtattgtaacccgtgaagctacaaaattgttgatgctcacaggg

SEQ ID NO: 262980 - DNA, 75 bp, synthetic construct
  source 1..75: mol_type = other DNA
gtgccaacctggcataacggttacactacgctggctttcttcctgacagtattgttgagcggtccaatacttgct

SEQ ID NO: 262981 - DNA, 75 bp, synthetic construct
  source 1..75: mol_type = other DNA
ttcaggacatcaataaactggctattggcctgggtaaccagctacccggtacaacggctgatttccagaacatga

SEQ ID NO: 262982 - DNA, 75 bp, synthetic construct
  source 1..75: mol_type = other DNA
ttatgaaatatgaactgtggtatattcatcctgccctgcttggtctggcaggagtattttcatggttgctgctgc

SEQ ID NO: 262983 - DNA, 75 bp, synthetic construct
  source 1..75: mol_type = other DNA
aacagcgtaaagcagaaattaaagaaagattcagaaaggctaagctaaagaacagaattgatgaacttgatgact

SEQ ID NO: 262984 - DNA, 75 bp, synthetic construct
  source 1..75: mol_type = other DNA
gatgaagagtcagagcgtgaagaggctattaaaaaagcacaacgcaaagcagagattaaatcacgcattgaaatg

SEQ ID NO: 262985 - DNA, 75 bp, synthetic construct
  source 1..75: mol_type = other DNA
attcacgttggatgagcgtccagaggtcttatcagaacctacccttgatgagcgtcgtagagctaaattatcagg

SEQ ID NO: 262986 - DNA, 75 bp, synthetic construct
  source 1..75: mol_type = other DNA
cggatgttgaccttgatgatgaagaagaccctgaagaggaattgaaacgtgaacagcgtaaagcagaaattaaag

SEQ ID NO: 262987 - DNA, 75 bp, synthetic construct
  source 1..75: mol_type = other DNA
ctctgatgtgaatgaagttagtgaccagcaagatacaccttgccgcctcgaatcaactgatgatgaattaccgga

SEQ ID NO: 262988 - DNA, 75 bp, synthetic construct
  source 1..75: mol_type = other DNA
agaatctcttaagaagggagcttcgctctgtgattcacataaacgtgatattaaagaagatgactttctttggat

SEQ ID NO: 262989 - DNA, 75 bp, synthetic construct
  source 1..75: mol_type = other DNA
atcggcgtcaatatcgcgccattgctggcaggtgccggggcattaggtctggctatctcgtttggttcgcaaacg

SEQ ID NO: 262990 - DNA, 75 bp, synthetic construct
  source 1..75: mol_type = other DNA
attgattcaactggcgatgttgttgttaatggcggtaatttcgttgcaaaaaatgaaaaaggtagtgcgacaggg

SEQ ID NO: 262991 - DNA, 75 bp, synthetic construct
  source 1..75: mol_type = other DNA
ataatgtcacgctcaatggcacaaccataaatgctcaaggcaataagaactccagcaacggctccagggcaattt

SEQ ID NO: 262992 - DNA, 75 bp, synthetic construct
  source 1..75: mol_type = other DNA
cgtcggcgctcggcagattgtgattacggatagccagatcagcccactggcaacgttcagtgatctctgctttgt

SEQ ID NO: 262993 - DNA, 75 bp, synthetic construct
  source 1..75: mol_type = other DNA
ggataatacgaacagtgtggcgtttgatacggttgcggtcattgccgagcgtgccgatgtgccgccctcgacgct

SEQ ID NO: 262994 - DNA, 75 bp, synthetic construct
  source 1..75: mol_type = other DNA
gtgcctggtccagtcgattgttgtagcactggcatataaattgggtgaagtggtcaacaaaaactggccaccacg

SEQ ID NO: 262995 - DNA, 75 bp, synthetic construct
  source 1..75: mol_type = other DNA
agaccctgaagaggaattgaaacgtgaacagcgtaaagcagaaattaaagaaagattcagaaaggcgaagctaaa

SEQ ID NO: 262996 - DNA, 75 bp, synthetic construct
  source 1..75: mol_type = other DNA
tgaacctctcatgcagaattaaaagcaaacgggacagcgggaaattctgtacccctgtttattcactggccaaat

SEQ ID NO: 262997 - DNA, 75 bp, synthetic construct
  source 1..75: mol_type = other DNA
cgaaacaaccgaaacaaccgaaacaaccgaaacaaccgaaaaacagcatcccgccgacaaggaaaaagaacaatg

SEQ ID NO: 262998 - DNA, 75 bp, synthetic construct
  source 1..75: mol_type = other DNA
ttttacccgcaggccactgaatatccacacactgccccatattttttcagctctgtcaccggcgatcgcccccgt

SEQ ID NO: 262999 - DNA, 75 bp, synthetic construct
  source 1..75: mol_type = other DNA
gcctttgctggctcatcagtgaaagacaaaaaatacttcggtgacggtaccggtgtagggctacgtaaagatgat

SEQ ID NO: 263000 - DNA, 75 bp, synthetic construct
  source 1..75: mol_type = other DNA
gagacggtacgtatcggaaccgataccacctacgcaccgttctcgtcgaaagatgctaaaggtgattttgttggc

SEQ ID NO: 263001 - DNA, 75 bp, synthetic construct
  source 1..75: mol_type = other DNA
atgttttttgccaccaccggtggcggtaaaacagaaaccacctttgcctggctgctcaacccgctctgctgggga

SEQ ID NO: 263002 - DNA, 75 bp, synthetic construct
  source 1..75: mol_type = other DNA
agccgttttagtcatcagctcgccagaggttaacttagcaccatcggtcattcagataaaaacctggttaagaat

SEQ ID NO: 263003 - DNA, 75 bp, synthetic construct
  source 1..75: mol_type = other DNA
tcaaagaacaagacatcgaaaggttgctaagtaaaatacctggtgttatcgattgcagcgtttcattaaatgtta

SEQ ID NO: 263004 - DNA, 75 bp, synthetic construct
  source 1..75: mol_type = other DNA
ggcttcccgaaaaagaaatttgcagatatcgaggttattttcccacccagccagttagtggcatcgccatcacaa

SEQ ID NO: 263005 - DNA, 75 bp, synthetic construct
  source 1..75: mol_type = other DNA
aagaggaaatgaaaaattgtttgttgatgtttatgccaaatttatagaaccattaattattaaaacacaggaatg

SEQ ID NO: 263006 - DNA, 75 bp, synthetic construct
  source 1..75: mol_type = other DNA
tcattcagataaaaaacttagttaagaatagcgtagacgatctcaaactagaaaatattagtgtcgttatcaagt

SEQ ID NO: 263007 - DNA, 75 bp, synthetic construct
  source 1..75: mol_type = other DNA
atgaaaaaacacattaaaaatacttttttattaattgctatttgtctgacagttgcatgtaaagagcaattgtat

SEQ ID NO: 263008 - DNA, 75 bp, synthetic construct
  source 1..75: mol_type = other DNA
gggccaaagtggtgaagttaccgctaaatgcgcaacggttaccggatgtcgatttattaccggagctgatgactc

SEQ ID NO: 263009 - DNA, 75 bp, synthetic construct
  source 1..75: mol_type = other DNA
gcgtgcgcaagctggataactataccgttgagtttcgtctggcacagccggacgcttcctttttgtggcatctgg

SEQ ID NO: 263010 - DNA, 75 bp, synthetic construct
  source 1..75: mol_type = other DNA
catcattacgcttgcaggcctatcggtacgatatcaaagggctggttcttagcccatttggtaacgcctccttcg

SEQ ID NO: 263011 - DNA, 75 bp, synthetic construct
  source 1..75: mol_type = other DNA
atgcgccaggtattatcgtctcttttggtgattgctggacttgtgagtagtcaggcaatagcagcacctgagccc

SEQ ID NO: 263012 - DNA, 75 bp, synthetic construct
  source 1..75: mol_type = other DNA
ccaaaaagaaactggctaaagtgggcaactcgctgattggcctgatgtttgtgggttttgccgcacgactggcga

SEQ ID NO: 263013 - DNA, 75 bp, synthetic construct
  source 1..75: mol_type = other DNA
gtgttcgcagaatatggggttctgaattactggacctatctggttggtgccatttttatcgtgttggtgcctggg

SEQ ID NO: 263014 - DNA, 75 bp, synthetic construct
  source 1..75: mol_type = other DNA
cgatgttaatgccccacatacgggaatttcattctttattctggcgacgacgctggaactggtgagtttctgcta

SEQ ID NO: 263015 - DNA, 75 bp, synthetic construct
  source 1..75: mol_type = other DNA
acgagaatcagggcgctgggtaacacaggcacaacaggaaagcgttattaaattccgtgaactgaataatgcact

SEQ ID NO: 263016 - DNA, 75 bp, synthetic construct
  source 1..75: mol_type = other DNA
gaggccgaatatgtagttgataaaaaaactggtaaaggggaatggaagggcggcgattcaggtattaatacttta

SEQ ID NO: 263017 - DNA, 75 bp, synthetic construct
  source 1..75: mol_type = other DNA
ccaaattaggcgaggctatcggcggattgggtaaagccgtaatgaaagcaaaaaactggctgatgaaaaacgacg

SEQ ID NO: 263018 - DNA, 75 bp, synthetic construct
  source 1..75: mol_type = other DNA
tagcaatttcccctatttcgacagcctgcaatttgctgataacgtgaaaagcgtccgcaagctggataatcatac

SEQ ID NO: 263019 - DNA, 75 bp, synthetic construct
  source 1..75: mol_type = other DNA
atggatatgagccatgatctgacgttatccggttgggcgacggacagtaacgacccggacagtttcttccgtccg

SEQ ID NO: 263020 - DNA, 75 bp, synthetic construct
  source 1..75: mol_type = other DNA
tatccggttgggcgacggacagtaacgacccggacagtttcttccgcccgttactgagctgcgcggcaattcatt

SEQ ID NO: 263021 - DNA, 75 bp, synthetic construct
  source 1..75: mol_type = other DNA
ccaaaaagaaactggctaaagtgggcaactcactgattggtcttatgtttgtgggttttgccgcacgactggcga

SEQ ID NO: 263022 - DNA, 75 bp, synthetic construct
  source 1..75: mol_type = other DNA
acaaatcttatggggcgtttcttttattaccgctatcgccatgtggtattacacactgtggttgaccatcgcttt

SEQ ID NO: 263023 - DNA, 75 bp, synthetic construct
  source 1..75: mol_type = other DNA
aagtagcaacgaaggacgatttttttaatatcaaaaaagccagcgccgctgacctgctggacgcgcaccgcatcc

SEQ ID NO: 263024 - DNA, 75 bp, synthetic construct
  source 1..75: mol_type = other DNA
ttcctgctgcgcgcctaccgcaccacgctggcgaagctcgcggtaagcgagccgctcgacaccaccgggatgcgt

SEQ ID NO: 263025 - DNA, 75 bp, synthetic construct
  source 1..75: mol_type = other DNA
gcagaaccaggaagatgtgaacaacctccgcaacgcgatgaaaagcgccaaaggccctggcaacttccgcaacct

SEQ ID NO: 263026 - DNA, 75 bp, synthetic construct
  source 1..75: mol_type = other DNA
gtgttcggcatgagcgagcgcaaagcaatggcgatggcgctggttgaccgtgcgttgcaggcaccggaatacggc

SEQ ID NO: 263027 - DNA, 75 bp, synthetic construct
  source 1..75: mol_type = other DNA
ctactggtttgtgcaatacggtatgacaacccagccgtatcagttcacgaaaggcagcatctttcatctgatgga

SEQ ID NO: 263028 - DNA, 75 bp, synthetic construct
  source 1..75: mol_type = other DNA
agtgggatctggaaggcgtgcagttccatccagaaagtattctcagcgaacaagggcatcaactgctggctaatt

SEQ ID NO: 263029 - DNA, 75 bp, synthetic construct
  source 1..75: mol_type = other DNA
ttcttgccgcactggcattcatcgcttttcaggcgcaagcggtgaacgtcaccgtggcgtatcaaacctccgccg

SEQ ID NO: 263030 - DNA, 75 bp, synthetic construct
  source 1..75: mol_type = other DNA
gggcgatttggtgatcaccgcagatatacctttggctgctgaagccatcgagaaaggcgcggcggcgcttaatcc

SEQ ID NO: 263031 - DNA, 75 bp, synthetic construct
  source 1..75: mol_type = other DNA
ataacggtgagggcgtatttcgggggctggcaaatccacttaccgtgacacgctaccattcgctggtggtggaac

SEQ ID NO: 263032 - DNA, 75 bp, synthetic construct
  source 1..75: mol_type = other DNA
cgccacgctgttccgtcgcaagtattacattaacggcagccatgcgggctttatcatgtacatgaccgatgccgc

SEQ ID NO: 263033 - DNA, 75 bp, synthetic construct
  source 1..75: mol_type = other DNA
ccaggcccctgtacgcccgatgaagccgggatctcccttgaggttatccgccactacgccgggcgcttgccgatt

SEQ ID NO: 263034 - DNA, 75 bp, synthetic construct
  source 1..75: mol_type = other DNA
tctgatagtttatttcccggggcaggccttgatgcacctggtctctgatctgcatgaaccacaccaccctgtatc

SEQ ID NO: 263035 - DNA, 75 bp, synthetic construct
  source 1..75: mol_type = other DNA
atggctataaaattagtgaaggttaaacacctgaaaggcggtgaaagattaatgtcatggtggggacatgaattt

SEQ ID NO: 263036 - DNA, 75 bp, synthetic construct
  source 1..75: mol_type = other DNA
gtcggatttccgcctgagctgaaggggaaattgcgcgtacaaagtaccggcggtgcggtgtacctgcaacccggg

SEQ ID NO: 263037 - DNA, 75 bp, synthetic construct
  source 1..75: mol_type = other DNA
aaacctattaacgagtgcacgttctgatatgcagtcactgcaatatagaactatttcaggaatatcccttggtaa

SEQ ID NO: 263038 - DNA, 75 bp, synthetic construct
  source 1..75: mol_type = other DNA
ttgctagtgtgagtacttcgacacagatgacctatgatttagggaacatgtcgaaagaggaagttattgacctgt

SEQ ID NO: 263039 - DNA, 75 bp, synthetic construct
  source 1..75: mol_type = other DNA
gcagatattgtactcacaactaataactataaaggtgatattgggaaaccacatatgagcgttgcaggttttgta

SEQ ID NO: 263040 - DNA, 75 bp, synthetic construct
  source 1..75: mol_type = other DNA
gctgggagcgtattccgctgccggtttccctgcatgtgggggaagagcgcattgtgtttgtggaaaagaatgtgc

SEQ ID NO: 263041 - DNA, 75 bp, synthetic construct
  source 1..75: mol_type = other DNA
tatctggtgatgaaaggcaaaccggataaggcgtttcctgcggagccgcctgtccggaggacgggagggaaagcc

SEQ ID NO: 263042 - DNA, 75 bp, synthetic construct
  source 1..75: mol_type = other DNA
taccaccacgctctatgtggtgacggcagaacggccggaacaggcgtttatcgcggagcctgcctcccgtcgcat

SEQ ID NO: 263043 - DNA, 75 bp, synthetic construct
  source 1..75: mol_type = other DNA
gcgtcctgataccgcgtttcttcctgagccagtgaaggcgaaagcaggcaaaggagggaaggtcgatgcagatta

SEQ ID NO: 263044 - DNA, 75 bp, synthetic construct
  source 1..75: mol_type = other DNA
cccgtcgccagccggtccgttacagcgcgcccctgccggtgttactgacccgttacgctgcccagtccctgtatg

SEQ ID NO: 263045 - DNA, 75 bp, synthetic construct
  source 1..75: mol_type = other DNA
agcatcagtggctggacgcgaagggcacaccggaggataccaccacagtgtatctggtgatgaaaggcaaaccgg

SEQ ID NO: 263046 - DNA, 75 bp, synthetic construct
  source 1..75: mol_type = other DNA
tatatgtatcaggcacaaagcgatctgtcgattgcaaagtttgctgatatgaatgaggcatctaaggcgtcaacc

SEQ ID NO: 263047 - DNA, 75 bp, synthetic construct
  source 1..75: mol_type = other DNA
gattgagcgaatatatcgacttcaaatctaaagcctccgctggcgaattcagcaagctgttaaccctgggtgtta

SEQ ID NO: 263048 - DNA, 75 bp, synthetic construct
  source 1..75: mol_type = other DNA
agaagaaacggtaggtggggcgcaggctgtaaatcaatacagtctcgaaggacaaaacattgcaaatctgaaaca

SEQ ID NO: 263049 - DNA, 75 bp, synthetic construct
  source 1..75: mol_type = other DNA
caaaaacggcgttgattcaatgatgggggatcaaggtaaacgtaagtatctcgatcagatgaaagatgtacggga

SEQ ID NO: 263050 - DNA, 75 bp, synthetic construct
  source 1..75: mol_type = other DNA
aaacaggtaaatcagaatggaaaggcggggattctggtattacacagatgttaaatgaaggcttattaactaaga

SEQ ID NO: 263051 - DNA, 75 bp, synthetic construct
  source 1..75: mol_type = other DNA
tcgatcagatgaaagatgtgcgtgagcgtgcaaccaaaagctatgatgaggctgaatatgtagtcgataaaaaaa

SEQ ID NO: 263052 - DNA, 75 bp, synthetic construct
  source 1..75: mol_type = other DNA
atggttgcaatgctgccaatgtttaccaaattaggcgaggctgtaggtggtctgcttaatgcgatcatgaaaact

SEQ ID NO: 263053 - DNA, 75 bp, synthetic construct
  source 1..75: mol_type = other DNA
gaacgtgccggacaccacttcccctcacaggagatgatccttcacctgaaggcgctctctgctggtgaaggcgcg

SEQ ID NO: 263054 - DNA, 75 bp, synthetic construct
  source 1..75: mol_type = other DNA
gcaaatcaccaccgtagatgaattatcaaaattaactatcgagctaaccggttactgcgccggtgagtttaaaaa

SEQ ID NO: 263055 - DNA, 75 bp, synthetic construct
  source 1..75: mol_type = other DNA
atggatgttgagcatggtcagtacagcgtcaccctgctggttgaaggttttccgccttcacatgccgggaccatc

SEQ ID NO: 263056 - DNA, 75 bp, synthetic construct
  source 1..75: mol_type = other DNA
gaatttaggtgatgcacctcctttaagtaatgaaggaatgaagaagaatttagataatctcactcctgatcaata

SEQ ID NO: 263057 - DNA, 75 bp, synthetic construct
  source 1..75: mol_type = other DNA
tgaacaatattgagcaatgggcgtataaaaacggcgttgattcaatgatgggggatcaaggtaaacgtaagtatc

SEQ ID NO: 263058 - DNA, 75 bp, synthetic construct
  source 1..75: mol_type = other DNA
ccaaattaggcgaggctatcggcggattggttaacgccgtaatgaaaacaatcaactggctgatgaaaaacgacg

SEQ ID NO: 263059 - DNA, 75 bp, synthetic construct
  source 1..75: mol_type = other DNA
ctcaccagtaaagagttcagcttgctggaattcttcattcgccatcagggagaagttcttccccgctccctgatt

SEQ ID NO: 263060 - DNA, 75 bp, synthetic construct
  source 1..75: mol_type = other DNA
gaataccggcgcggggatacacaccttatccggcggtggatccggctcagtcaaacaacgcctccgatgccacag

SEQ ID NO: 263061 - DNA, 75 bp, synthetic construct
  source 1..75: mol_type = other DNA
taaatcatattaatgtccaacaggggccgattttcagtcacagcgcaatggtgttgcaggcagctatacacgggc

SEQ ID NO: 263062 - DNA, 75 bp, synthetic construct
  source 1..75: mol_type = other DNA
gatattatgctgccggacgtgaacggctgggatatcgtgcgcatgttgcgttctgccaataaagggatgccgatt

SEQ ID NO: 263063 - DNA, 75 bp, synthetic construct
  source 1..75: mol_type = other DNA
cactgccggaaaggggatgccggtcttactgctgacagccctcggcacgatcgaacatagggtcaaaggactgga

SEQ ID NO: 263064 - DNA, 75 bp, synthetic construct
  source 1..75: mol_type = other DNA
gctgggatatcatccgtatgctgcgcaatgccggcaaggggatgccggtattattactgaccgccctcggcacga

SEQ ID NO: 263065 - DNA, 75 bp, synthetic construct
  source 1..75: mol_type = other DNA
atgcaaccaattacataccaacagactagcggaattaccccggctgcgctgataaatcgttctcaaacaaaacag

SEQ ID NO: 263066 - DNA, 75 bp, synthetic construct
  source 1..75: mol_type = other DNA
ctgatcgtcgaagagtaccgggcgcagggtggttatgacatcactttccctgacgatctctgccgaaagcggcag

SEQ ID NO: 263067 - DNA, 75 bp, synthetic construct
  source 1..75: mol_type = other DNA
atgcaaccacttacataccaacagactagcggatttagcccgactgcggtgataaatcgttctcaaataaaacaa

SEQ ID NO: 263068 - DNA, 75 bp, synthetic construct
  source 1..75: mol_type = other DNA
acatgatgcgtcacgccgtgactggcagacatatacccgacagttggggttaaatcatatcaacgttcagcaagg

SEQ ID NO: 263069 - DNA, 75 bp, synthetic construct
  source 1..75: mol_type = other DNA
taaacagaatcgtatttactaccgcaagccacgcagtgaaatgggtgtgacttgtgttggtcgccagaaaatgaa

SEQ ID NO: 263070 - DNA, 75 bp, synthetic construct
  source 1..75: mol_type = other DNA
ctcattgtgaatgagtatcgagcacagggcggcggcaccatcgattttcctgatgatgtcagtcgtgcacgccag

SEQ ID NO: 263071 - DNA, 75 bp, synthetic construct
  source 1..75: mol_type = other DNA
aaaatcgacaacgactttgagccaaagttgattcagaccgtgcgcggcgtgggttacatgctagaggtgccggat

SEQ ID NO: 263072 - DNA, 75 bp, synthetic construct
  source 1..75: mol_type = other DNA
ctctccaggaaacccggggcggttcattatgaatctgcgactaaagggcaacaaaaattcattgaggcagcagga

SEQ ID NO: 263073 - DNA, 75 bp, synthetic construct
  source 1..75: mol_type = other DNA
cctgtgggaggcaatgacggggaccgcaactaacggtcttgcagctattggcggcgcattttctggtgacgctaa

SEQ ID NO: 263074 - DNA, 75 bp, synthetic construct
  source 1..75: mol_type = other DNA
tggcggatgccaacgtagtcagcgaagatgtgctgcgtgagagcgtcggtaagtcggtcgttaaccttattcacg

SEQ ID NO: 263075 - DNA, 75 bp, synthetic construct
  source 1..75: mol_type = other DNA
gcaaaccagaactgctggaagcgatgtcgccctggctgggtggcggtaaaatgattcacgaagtgagttttgaca

SEQ ID NO: 263076 - DNA, 75 bp, synthetic construct
  source 1..75: mol_type = other DNA
ctttcgttcattccgctgccaggattccagcctgctggcctttgattttgctggcgttcatcacagcgatatggt

SEQ ID NO: 263077 - DNA, 75 bp, synthetic construct
  source 1..75: mol_type = other DNA
tgtcagcgtggcagaacaccacgccaacctcgtcccctggctgatggtcgcccaacaaactggagccaaagtggt

SEQ ID NO: 263078 - DNA, 75 bp, synthetic construct
  source 1..75: mol_type = other DNA
gaatggtcgtattcataaatcagtgcttgataaacccggtttcggcgtcgaactcaatcgtgactgcaatttgaa

SEQ ID NO: 263079 - DNA, 75 bp, synthetic construct
  source 1..75: mol_type = other DNA
tgatattatgcagccggatgtcggctggtgtggcggcttgaccacgctggtggaaattgccgcaatcgccaaatc

SEQ ID NO: 263080 - DNA, 75 bp, synthetic construct
  source 1..75: mol_type = other DNA
gagcaccacggcacactgcaatcttttcgtacgctttcagaaaccggtatcgacattatgcagccggatgttggc

SEQ ID NO: 263081 - DNA, 75 bp, synthetic construct
  source 1..75: mol_type = other DNA
accgcgccgattgcgaacaactggcggaactgcgctcccatgcaccggaacgaattgttgacgcggtatggggcg

SEQ ID NO: 263082 - DNA, 75 bp, synthetic construct
  source 1..75: mol_type = other DNA
gcaactgaaatgggagctggaagattactgcttccgttatctccacccgaccgaatacaaacgcattgcaaaact

SEQ ID NO: 263083 - DNA, 75 bp, synthetic construct
  source 1..75: mol_type = other DNA
tctgtttcctctgaacaggtcgataacgttcgccggatgttattggcgatggtcgatgattttcgctgcgtggtc

SEQ ID NO: 263084 - DNA, 75 bp, synthetic construct
  source 1..75: mol_type = other DNA
ccggaatatctcagcgcccttaattctgcctggctgaatgagtcggccacgctgttccgccgcaagtattacgaa

SEQ ID NO: 263085 - DNA, 75 bp, synthetic construct
  source 1..75: mol_type = other DNA
taatatcaaaaaagccagcgccgcagacctgctggacgcgcaccgcatcccctttcagttgatgggcggcaagcc

SEQ ID NO: 263086 - DNA, 75 bp, synthetic construct
  source 1..75: mol_type = other DNA
ggagaacgtcgggtcgctgggagatattgagaaagtggcaaaggtctttgtccgcaatgagcttatcccgttaca

SEQ ID NO: 263087 - DNA, 75 bp, synthetic construct
  source 1..75: mol_type = other DNA
cgcgatgacatgatggctgcgcaccgcgtaccaccgcaaatgatggggattatacctaataatgttggaggattt

SEQ ID NO: 263088 - DNA, 75 bp, synthetic construct
  source 1..75: mol_type = other DNA
tacattaacggcagtcatgcaggcttcatcatgtacatgaccgatgcggcgcagaaccaggaggatgtgaacaac

SEQ ID NO: 263089 - DNA, 75 bp, synthetic construct
  source 1..75: mol_type = other DNA
agattcccgccaaccggatcgacgacctgccgaccaccttttccggcggtatgcagcagcgtttgcagattgccc

SEQ ID NO: 263090 - DNA, 75 bp, synthetic construct
  source 1..75: mol_type = other DNA
atggcctgtgctttcgtggcatataccgtggtcagggcaaaaacgttatcagcctcaccggccagatggtatgag

SEQ ID NO: 263091 - DNA, 75 bp, synthetic construct
  source 1..75: mol_type = other DNA
atttacgtcaaacgtaatattctggcctcgacatttatcccgcatccgtggctttcccagcaggatttcagccgc

SEQ ID NO: 263092 - DNA, 75 bp, synthetic construct
  source 1..75: mol_type = other DNA
aaggatgggcttcagatcattcctctgtcagaagtcgcggcgaaggatgagtttctgaatatcaagaacgtgagc

SEQ ID NO: 263093 - DNA, 75 bp, synthetic construct
  source 1..75: mol_type = other DNA
cctcaacgtttatcccacacccgtggctttctcagcaggatttcagccgctttgtgctggattttctggtattcg

SEQ ID NO: 263094 - DNA, 75 bp, synthetic construct
  source 1..75: mol_type = other DNA
accgttacaggaccggatgcgcgaggttaacgcgtgggccggtcaggaggtgatccgcttcaaaagctataacct

SEQ ID NO: 263095 - DNA, 75 bp, synthetic construct
  source 1..75: mol_type = other DNA
cgccgcgcagaatcaggaagacgtgaacaacatccgccaggccatgaaaagcgccaaagggccgggcaattttcg

SEQ ID NO: 263096 - DNA, 75 bp, synthetic construct
  source 1..75: mol_type = other DNA
ttgacggactggcgcgcacctttcgcgccgctgtgcaccacagctcaccgattgcagtgaaatgcaacattctga

SEQ ID NO: 263097 - DNA, 75 bp, synthetic construct
  source 1..75: mol_type = other DNA
cattgcacagccgaactgattccggcagatcctgaagccaccgcgcacgccgggatctggattggtaagagcggg

SEQ ID NO: 263098 - DNA, 75 bp, synthetic construct
  source 1..75: mol_type = other DNA
ctcgttgctacgctcgattgacaagcataattgcacagcagaactgattccagcagatccagaagccaccgcaca

SEQ ID NO: 263099 - DNA, 75 bp, synthetic construct
  source 1..75: mol_type = other DNA
ttccgtcagctctgctcaacgagtccgccacgctgttccaccgcaagtattacattaacggcagtcatgcaggct

SEQ ID NO: 263100 - DNA, 75 bp, synthetic construct
  source 1..75: mol_type = other DNA
ataatttctggttgggattgattcccggcgttccggcggtgctggcgtttttgctgagtggccgacgcgctaaat

SEQ ID NO: 263101 - DNA, 75 bp, synthetic construct
  source 1..75: mol_type = other DNA
gtgctattgcttcaggcgcgaacctgggtgctgtttgtcattgccggtgcgtcgcgcgagcagggtactgcgctg

SEQ ID NO: 263102 - DNA, 75 bp, synthetic construct
  source 1..75: mol_type = other DNA
tccattatgatgcgcacggacgcctgcgtttacccttgctcttctggcttgtgctattgcttcaggcgcgaacct

SEQ ID NO: 263103 - DNA, 75 bp, synthetic construct
  source 1..75: mol_type = other DNA
cagaaactcggggtacagctcgattttactgacggcaaagggagttttggcggtcttgataacatgttcaggcaa

SEQ ID NO: 263104 - DNA, 75 bp, synthetic construct
  source 1..75: mol_type = other DNA
ttatcatgtacatgaccgatgccgcgcaaaaccaggaggatgtgaacaacctccgcaatgcgatgaaaagcgcca

SEQ ID NO: 263105 - DNA, 75 bp, synthetic construct
  source 1..75: mol_type = other DNA
tttgtgcaggactatctggtttttggtaacgcctacctggagaaacgcacgaaccggctcggtgaagttatcgcc

SEQ ID NO: 263106 - DNA, 75 bp, synthetic construct
  source 1..75: mol_type = other DNA
gagccgacagccttcgcgcccggctccgtgtttcacctgctggagccggatattaatcaggagctgtacggcctg

SEQ ID NO: 263107 - DNA, 75 bp, synthetic construct
  source 1..75: mol_type = other DNA
gtaatgcgtttctggaaaagcgttacagcaccactggtaaggttatcaggctggaaccctctccggcaaaatata

SEQ ID NO: 263108 - DNA, 75 bp, synthetic construct
  source 1..75: mol_type = other DNA
tttgcaaaaacgatttatggaaataaacgcatggctcggggagaaacttatagaattttctccatatgagcttaa

SEQ ID NO: 263109 - DNA, 75 bp, synthetic construct
  source 1..75: mol_type = other DNA
gggatcatgatgacggcgctgttactgaactggcggcaggcggcgggctacaccattctggccccgaccgtggag

SEQ ID NO: 263110 - DNA, 75 bp, synthetic construct
  source 1..75: mol_type = other DNA
taggaccgataccagaggttacactcttgtgaatcatgtatctccataccaagaaaatcttattacactggatcc

SEQ ID NO: 263111 - DNA, 75 bp, synthetic construct
  source 1..75: mol_type = other DNA
tggaacagcaacaggctaatgcggaaccagaagaacaggtcgatccgcgcaaagccgccgtcgaagccgctattg

SEQ ID NO: 263112 - DNA, 75 bp, synthetic construct
  source 1..75: mol_type = other DNA
ttcgggaagcccgagtcattcgtgaccggataatgtatgagtttttcaccatccgtgatcaggagatgaaggaag

SEQ ID NO: 263113 - DNA, 75 bp, synthetic construct
  source 1..75: mol_type = other DNA
gatatgaatcccggagtttacgttgtcactgctagtgcggcatatctcggcgtgattaacgttaacccggacagt

SEQ ID NO: 263114 - DNA, 75 bp, synthetic construct
  source 1..75: mol_type = other DNA
tcagcacgggcgcaagaaacctcgcacaccgccagttacgctggaagcggcgcgtgataacgacttcgcttttga

SEQ ID NO: 263115 - DNA, 75 bp, synthetic construct
  source 1..75: mol_type = other DNA
cgtaataggcagtgataattttggagaattacttataagtgttactgaaaaagggttagcacaacttcgcaaaaa

SEQ ID NO: 263116 - DNA, 75 bp, synthetic construct
  source 1..75: mol_type = other DNA
tgagcgattactggaccggcccccggttcgaccaggtagcagctctatctacgttactggcagacgagctttgcg

SEQ ID NO: 263117 - DNA, 75 bp, synthetic construct
  source 1..75: mol_type = other DNA
tgtcgatcacccctctgataaaggcgggccaacccgctggggcatcacgcaaaccacagctcgcgcacatggcta

SEQ ID NO: 263118 - DNA, 75 bp, synthetic construct
  source 1..75: mol_type = other DNA
tgatgaagctgaatatgaatactggctgaagcagttcaggctggaaattctggaaaacaccacactgccatcgct

SEQ ID NO: 263119 - DNA, 75 bp, synthetic construct
  source 1..75: mol_type = other DNA
gaacactttagagactcattccgaaagtggccgggagtgcctgcggtagcaaaagttactctgcatgataaagct

SEQ ID NO: 263120 - DNA, 75 bp, synthetic construct
  source 1..75: mol_type = other DNA
atgatccagttaacgctaaatggatacatagcggaaaaattccacaaataaaagaaaagagtgaattatttgaaa

SEQ ID NO: 263121 - DNA, 75 bp, synthetic construct
  source 1..75: mol_type = other DNA
tgctgacccagggagccaggaggcgttagcaaatgcggaacctgactcccacggtacggtggtgctgtgggacgt

SEQ ID NO: 263122 - DNA, 75 bp, synthetic construct
  source 1..75: mol_type = other DNA
cttatggcacggtgaacggcagctataactacagccaaaattcccagaggctgaattatggtatcagagggggaa

SEQ ID NO: 263123 - DNA, 75 bp, synthetic construct
  source 1..75: mol_type = other DNA
cttatcgctttctgtattcgaaacgctttgacgatacggataccagcttgcgcctggttggctatcgttactcca

SEQ ID NO: 263124 - DNA, 75 bp, synthetic construct
  source 1..75: mol_type = other DNA
ccgcgctacgttgccggtgttctcggcccgaccaaccgcacggcgtctatttctccggacgtcaacgatccggca

SEQ ID NO: 263125 - DNA, 75 bp, synthetic construct
  source 1..75: mol_type = other DNA
aatgtttgaacggcaggaggttacatttgttcaggataaccccgatgctgatctgcacgcctgctttgttgccat

SEQ ID NO: 263126 - DNA, 75 bp, synthetic construct
  source 1..75: mol_type = other DNA
gttcacaagagacagataccagttatctcaatctgcgcaatggactgaatattgggccgtggcgattacgcaatt

SEQ ID NO: 263127 - DNA, 75 bp, synthetic construct
  source 1..75: mol_type = other DNA
ggctatacggtcaagacacagctaaacccttatgatgaaaatcgggtagcaatcagcgataactatttctcgaag

SEQ ID NO: 263128 - DNA, 75 bp, synthetic construct
  source 1..75: mol_type = other DNA
aacgaaacgttgaccagtctgccgaagaatctcgaaccggttttttataacgccgcacaaactttattaatgccg

SEQ ID NO: 263129 - DNA, 75 bp, synthetic construct
  source 1..75: mol_type = other DNA
ggaaaaattattgaaaactttctcgatgatacgaggatacgatatataaatcgtgaaaataaaggtttggtcttc

SEQ ID NO: 263130 - DNA, 75 bp, synthetic construct
  source 1..75: mol_type = other DNA
ctccacccactggcagcgaagcggcatccattagaaaacagtgaattgcgtcattatccagcggtttgtatccgc

SEQ ID NO: 263131 - DNA, 75 bp, synthetic construct
  source 1..75: mol_type = other DNA
aagatgcagtaaatgttacgcaggtaaaccggcgtgcgattaatgatgcgaaaagagtaaaagaagccgaggctg

SEQ ID NO: 263132 - DNA, 75 bp, synthetic construct
  source 1..75: mol_type = other DNA
cctttgacgaacaggggcaggccgatacccgcgcacggaaaatcgagatttgtcgtcgggcgtacaaaatcctca

SEQ ID NO: 263133 - DNA, 75 bp, synthetic construct
  source 1..75: mol_type = other DNA
ttgacaatgcaatgaaaagcaaagattcaaaaatgattgatttttttattaaaaaatggagcggtatcaggcaaa

SEQ ID NO: 263134 - DNA, 75 bp, synthetic construct
  source 1..75: mol_type = other DNA
ctaagtgtaattgataacaaacccgtcgaggctcgtcgtaagttattgaatctactcaaagagataagagactac

SEQ ID NO: 263135 - DNA, 75 bp, synthetic construct
  source 1..75: mol_type = other DNA
aacctgtactttcactactatcaacagcaaggcttgcaagcgttccagctatctttaacgtacacaccgatttgg

SEQ ID NO: 263136 - DNA, 75 bp, synthetic construct
  source 1..75: mol_type = other DNA
tggcaacaaaagactatgcgcaaccaaaagaccagacactgacagatttaagcggtaaggataaggctgaactaa

SEQ ID NO: 263137 - DNA, 75 bp, synthetic construct
  source 1..75: mol_type = other DNA
tgagacacaaagtttctttgatcttattattattgatgaaggtcattctgaaccatctcctgtatggcgagaaat

SEQ ID NO: 263138 - DNA, 75 bp, synthetic construct
  source 1..75: mol_type = other DNA
caggttttaatgttgatattggtgactggagagatatctcgatttcgacgtcattcaatacgacccactacgaag

SEQ ID NO: 263139 - DNA, 75 bp, synthetic construct
  source 1..75: mol_type = other DNA
gtgagcaaagctgcattattcatctgccagaacgtctggaagacacgaccaaacgcctgattttaccggtagtga

SEQ ID NO: 263140 - DNA, 75 bp, synthetic construct
  source 1..75: mol_type = other DNA
ataccgcaaaacgtgaggtcagcgtcgatgtcgatgccctgctggcggcgatcaatgaaataagttcatcgcagc

SEQ ID NO: 263141 - DNA, 75 bp, synthetic construct
  source 1..75: mol_type = other DNA
ggaaatccgggaataccgcgatgataaactgtacagcgtacggcacctggtgtttaacagctttgagctgataag

SEQ ID NO: 263142 - DNA, 75 bp, synthetic construct
  source 1..75: mol_type = other DNA
accgcccggaaacagagcggttccggtgggacagccgtgaccagctgaccgggtattgcagcgcacagggtgagc

SEQ ID NO: 263143 - DNA, 75 bp, synthetic construct
  source 1..75: mol_type = other DNA
ctaatgctataacgaatgtcggatttaatgccacacagatttgcgtgttaagcaacacatcagacagagtgctcc

SEQ ID NO: 263144 - DNA, 75 bp, synthetic construct
  source 1..75: mol_type = other DNA
atttggccaaaatactggctgaaaaatttaacgaaggtgactggcgggagctgtttgctgttacagattgtgaag

SEQ ID NO: 263145 - DNA, 75 bp, synthetic construct
  source 1..75: mol_type = other DNA
gagcagacttaccggtatgtgccgaatccttgtgggtgggttgatccgctgggattggctgcaagttctaaaatc

SEQ ID NO: 263146 - DNA, 75 bp, synthetic construct
  source 1..75: mol_type = other DNA
ttgatatggacggcgtcattattgattcggaaggattatggcgtcaggcgcaacaaggggcgctggcacgatggg

SEQ ID NO: 263147 - DNA, 75 bp, synthetic construct
  source 1..75: mol_type = other DNA
tgagcttaaggtgtaccggttaattcgtcagcattatctggctcagtttttacccgttcaggagctggatgtcac

SEQ ID NO: 263148 - DNA, 75 bp, synthetic construct
  source 1..75: mol_type = other DNA
agtacttggggctgccagacgtgttgatggtgcgattgaaggtaaggactttgttgtgacctgggcctttggtca

SEQ ID NO: 263149 - DNA, 75 bp, synthetic construct
  source 1..75: mol_type = other DNA
aaaagagctacttctatatacagattacttgaaaaattacgaatactaccagggcagatagacaatgaaattgat

SEQ ID NO: 263150 - DNA, 75 bp, synthetic construct
  source 1..75: mol_type = other DNA
atcagtgcaggtgaaatggttccagcgttggctgaatgtcttcaacgaccagcagaaactttacccagacttaat

SEQ ID NO: 263151 - DNA, 75 bp, synthetic construct
  source 1..75: mol_type = other DNA
ttgatatttatttacttcttcattttttgttttttgtcttttgctcaaaaaatatactcatctacaaaaagtatt

SEQ ID NO: 263152 - DNA, 75 bp, synthetic construct
  source 1..75: mol_type = other DNA
gcagctgcagtggacccgtcaccttgtcgaaaaaggccgccaggacagtgtgaaaatcaccgctcccgtcacgcc

SEQ ID NO: 263153 - DNA, 75 bp, synthetic construct
  source 1..75: mol_type = other DNA
aggtgctgccgggcgagacggacattgcgctgcccggcccgctgccgtttattctttcccgcgcctacagcagtt

SEQ ID NO: 263154 - DNA, 75 bp, synthetic construct
  source 1..75: mol_type = other DNA
tggcaacctcttcatcttaccaggtgatcgatgctgtactgacaaaactcaatattcagcattatttttcggtga

SEQ ID NO: 263155 - DNA, 75 bp, synthetic construct
  source 1..75: mol_type = other DNA
tgccaaaacagcaattggtcttggtctgccgtttagtttgttaatgcagtacgtcattctgttcttctattccgc

SEQ ID NO: 263156 - DNA, 75 bp, synthetic construct
  source 1..75: mol_type = other DNA
tactcgatgtcgataagctgctggtggacggtcagccgattgagatgccgccgtactgcgacatgattttcgcag

SEQ ID NO: 263157 - DNA, 75 bp, synthetic construct
  source 1..75: mol_type = other DNA
cgggcgcggtgacgggggtgacggacggcgcgggccgccgttttcacctggtgctgaccacacaggcgcagcggg

SEQ ID NO: 263158 - DNA, 75 bp, synthetic construct
  source 1..75: mol_type = other DNA
atgatgaggcggggaggctgaaggcacagacggatgcggcggggcggcggacggagtaccggctgcatatggcgt

SEQ ID NO: 263159 - DNA, 75 bp, synthetic construct
  source 1..75: mol_type = other DNA
ccgatctgcttaaaattgacggcagttttatccgcaatattgtgtcaaatagtctggattatcagatagtggcat

SEQ ID NO: 263160 - DNA, 75 bp, synthetic construct
  source 1..75: mol_type = other DNA
acttcaaaccgtgtgaatatatctattaataacactaccctgaatgcgtcaaatggcaacatccagttgaccggg

SEQ ID NO: 263161 - DNA, 75 bp, synthetic construct
  source 1..75: mol_type = other DNA
gcgcgaccacctcaaaagcgcacacggcggtgaaaatcgagcagaactacagtggcccgacggtgtatgtacaaa

SEQ ID NO: 263162 - DNA, 75 bp, synthetic construct
  source 1..75: mol_type = other DNA
tcccgtatctgatgatcaccccgggctttatcctgctggtgtttgtggtggtgtttcccattttgttcgggtttg

SEQ ID NO: 263163 - DNA, 75 bp, synthetic construct
  source 1..75: mol_type = other DNA
ggcgttcggcgtgatggtgtattacctgtcgatgcgtgacgcgtgggtcaatggcctgaaacgtgacgaagggtt

SEQ ID NO: 263164 - DNA, 75 bp, synthetic construct
  source 1..75: mol_type = other DNA
tcctgctgtcgatctttgtcgtcggcctggcgctgtggcagttccgcgccaccaaatccttcaaaaatgacgaca

SEQ ID NO: 263165 - DNA, 75 bp, synthetic construct
  source 1..75: mol_type = other DNA
ttggggaccagtattaccccctacctgaatattacgggcacaggcaacgtagccattaacggtaactccactgct

SEQ ID NO: 263166 - DNA, 75 bp, synthetic construct
  source 1..75: mol_type = other DNA
gcgccttattgatgagcgagacagcactgttcttacgcaaaaaaatttaattgatgagcgtgacctggtctctgc

SEQ ID NO: 263167 - DNA, 75 bp, synthetic construct
  source 1..75: mol_type = other DNA
aataaagttaatttccttttaaccaatgataaagataataattttaatgaatatgccaagattgtcagaaccgct

SEQ ID NO: 263168 - DNA, 75 bp, synthetic construct
  source 1..75: mol_type = other DNA
cacgctggaccgcatggatacaggcagtgccaatgccatgtcagtgaaggtgagcaacagcaccctgaatgccac

SEQ ID NO: 263169 - DNA, 75 bp, synthetic construct
  source 1..75: mol_type = other DNA
ttaatggtaatgccacgggtaacggtagtggcgtgaatgtcagcggcaatatcaccaacggtaccattaccggta

SEQ ID NO: 263170 - DNA, 75 bp, synthetic construct
  source 1..75: mol_type = other DNA
aaatcatgggtaacctgaaggcaaacggtcaggtgttcctggttaacccgaacggtgtgctgtttggtaagggct

SEQ ID NO: 263171 - DNA, 75 bp, synthetic construct
  source 1..75: mol_type = other DNA
tcccacaagagttgttggattactacgactattacgctcacgggaaaatttcgaaacgtgagttcctcaaccttg

SEQ ID NO: 263172 - DNA, 75 bp, synthetic construct
  source 1..75: mol_type = other DNA
actgtatgacggtatcaaaggacgcataaaaacccgtaacatccaaaataacagacattcagttgaaaatattct

SEQ ID NO: 263173 - DNA, 75 bp, synthetic construct
  source 1..75: mol_type = other DNA
gcgctgatgcggaaactggtgcactggtgttatggcgtcctgaagaccggaaccgtttttaatgacgaaggtctg

SEQ ID NO: 263174 - DNA, 75 bp, synthetic construct
  source 1..75: mol_type = other DNA
atgtttccagtcggcattgacgtaagtaaaaacaccctggatctttgcatgctttatgacggtatcaaaggacgc

SEQ ID NO: 263175 - DNA, 75 bp, synthetic construct
  source 1..75: mol_type = other DNA
atattctgattccgattgacatagcgaagaatagagaaataggaagtaagctgagactagccgttactacggcag

SEQ ID NO: 263176 - DNA, 75 bp, synthetic construct
  source 1..75: mol_type = other DNA
ggcagataaaagcacatatcaaagccagccctgcactgaggcgtgattatacactgctgacctcaattaaatcgg

SEQ ID NO: 263177 - DNA, 75 bp, synthetic construct
  source 1..75: mol_type = other DNA
acggataaggtggatgcgtatatgctggcctgttacgcattccttaagaagccacaccgctgggagccgccggca

SEQ ID NO: 263178 - DNA, 75 bp, synthetic construct
  source 1..75: mol_type = other DNA
tctgcaactcccgaacagcgccaggtgtttaaggaaaaagtacagcagcgcccactgaaccaacagcaacgtgat

SEQ ID NO: 263179 - DNA, 75 bp, synthetic construct
  source 1..75: mol_type = other DNA
gaagggaggcggcgcgccagcgtattcagtccgcctcgcctgagcagcgccaggcggttcgcgagaaaatgcaga

SEQ ID NO: 263180 - DNA, 75 bp, synthetic construct
  source 1..75: mol_type = other DNA
ccatgagtgatgcggatgacattatccttgacatgatggggacggaaatcagcatatttccgggcggtaccgaaa

SEQ ID NO: 263181 - DNA, 75 bp, synthetic construct
  source 1..75: mol_type = other DNA
agggttatgccatagaaggcgccacaccgctatttagcgatgtggatgagttatacagtttgttggaagaggcgg

SEQ ID NO: 263182 - DNA, 75 bp, synthetic construct
  source 1..75: mol_type = other DNA
gcgcgtcagggcgacatgacgcagtatggcggtagcattgtccagggttcagccggggtgcgcatcggtgccccc

SEQ ID NO: 263183 - DNA, 75 bp, synthetic construct
  source 1..75: mol_type = other DNA
cttatctggcgttagcagtccgctggtcaacaacggaccacgtttcgatttgctttcaatgctgattgccgccgt

SEQ ID NO: 263184 - DNA, 75 bp, synthetic construct
  source 1..75: mol_type = other DNA
gcaacattattaatataccagtcatggccagttactatgtatatgatgaaaaaaagttaaatctggcgcactgga

SEQ ID NO: 263185 - DNA, 75 bp, synthetic construct
  source 1..75: mol_type = other DNA
caccagcaaactggcgggggatacatttacgcttgggttaagtatttcctattatcctaaaaatacgacctgtaa

SEQ ID NO: 263186 - DNA, 75 bp, synthetic construct
  source 1..75: mol_type = other DNA
gaagtcagggaaagattacggcgaacagtaaggaaggaataattacgttgaagtgtgataatcttttcggcggca

SEQ ID NO: 263187 - DNA, 75 bp, synthetic construct
  source 1..75: mol_type = other DNA
attgtggtttttgaattgactagttttgataacaagataattttttttgcgtcgaaaaaattcttcttccggtac

SEQ ID NO: 263188 - DNA, 75 bp, synthetic construct
  source 1..75: mol_type = other DNA
taatagcagaacagcagaacagcagaacagcagaacaaaagaaagagccaaaaaatgacggtcagatattatatc

SEQ ID NO: 263189 - DNA, 75 bp, synthetic construct
  source 1..75: mol_type = other DNA
cggaaaagaataaaaacaataaaatctcggaatattacccgataaaatattttcaggtgtccattaagaaaatgt

SEQ ID NO: 263190 - DNA, 75 bp, synthetic construct
  source 1..75: mol_type = other DNA
cgatattcgccagtttaacaaagcgaatcacatacctcccggcgcctacagtgttgatatttttatcaatggcaa

SEQ ID NO: 263191 - DNA, 75 bp, synthetic construct
  source 1..75: mol_type = other DNA
tttggcaatccttaagcgtgaaggtcaaacagatgtcatccaggcgcagctccttcatggcctgccgcatgggtt

SEQ ID NO: 263192 - DNA, 75 bp, synthetic construct
  source 1..75: mol_type = other DNA
cgttacgaagccagattatgatcggcgatacgtggacggcgagcgatattttcgacagcacgcaaatccgtggcg

SEQ ID NO: 263193 - DNA, 75 bp, synthetic construct
  source 1..75: mol_type = other DNA
cctacggcacgttaaacggcagttataactacagccaaaattctcagcgactcaattatggtatccgggggggta

SEQ ID NO: 263194 - DNA, 75 bp, synthetic construct
  source 1..75: mol_type = other DNA
catatcgttttctgtattcaaaacgttttgacgatacagacaccagcttacgcctggttggctatcgttactcca

SEQ ID NO: 263195 - DNA, 75 bp, synthetic construct
  source 1..75: mol_type = other DNA
atcaaggaagaagatggtagtgaacaacgattcacccagccttatgcgtcgctggcaatcctcaaacgtgaaggt

SEQ ID NO: 263196 - DNA, 75 bp, synthetic construct
  source 1..75: mol_type = other DNA
agttattatgagagtgttttcttaagagaatattctctaagaattgctgatttccataatatgcatttagaatta

SEQ ID NO: 263197 - DNA, 75 bp, synthetic construct
  source 1..75: mol_type = other DNA
gtgtgtattactggaatattggggtttatgtactgatatatattaacaatccgtcacgtattaatactcaacatt

SEQ ID NO: 263198 - DNA, 75 bp, synthetic construct
  source 1..75: mol_type = other DNA
atattataaaatggagccaaacggaagaggaactggttgttttaacaactatgactttggctatatgattatggg

SEQ ID NO: 263199 - DNA, 75 bp, synthetic construct
  source 1..75: mol_type = other DNA
gtattttggttcagcacgttccgatctcggtgcgtcgtttctgatgcccgccatcaccgccgtggtgcttggcgg

SEQ ID NO: 263200 - DNA, 75 bp, synthetic construct
  source 1..75: mol_type = other DNA
tcatcccaggtaaaacaagatgcaataaatctttgtggtgcagaatgtcgtgatacagatgcattgagaaagaat

SEQ ID NO: 263201 - DNA, 75 bp, synthetic construct
  source 1..75: mol_type = other DNA
ctggcggcaattgttggcatcatgccgggtctgggggatacagccggaaaagcgatcaaaggtgctgagaaggca

SEQ ID NO: 263202 - DNA, 75 bp, synthetic construct
  source 1..75: mol_type = other DNA
ttatgtactgatatatattaacaatccgtcacgtattaatactcaacattcaggccagatgcggtttgatatttc

SEQ ID NO: 263203 - DNA, 75 bp, synthetic construct
  source 1..75: mol_type = other DNA
gattgtatattagggaaaagagcttcacaaaatatagaatacggaactcctatgaaaatggaatttgtatcaggt

SEQ ID NO: 263204 - DNA, 75 bp, synthetic construct
  source 1..75: mol_type = other DNA
aaattacagacatatcgtgctgatacaattactatcgattgtaactctgaagattttcaaattcatggtggccta

SEQ ID NO: 263205 - DNA, 75 bp, synthetic construct
  source 1..75: mol_type = other DNA
ctccagtccttcatcatttttttcaatatactcatctgagagatgcatatttttatagatgtaaactcatagaac

SEQ ID NO: 263206 - DNA, 75 bp, synthetic construct
  source 1..75: mol_type = other DNA
ttctatcgcattacacacacatactccctatgtcatattacaaaatggaaccgaatgggagagggactggttgtt

SEQ ID NO: 263207 - DNA, 75 bp, synthetic construct
  source 1..75: mol_type = other DNA
agcatctcatgtcagggcgatccttgaagctgaacttctgtttatgtatttgtctgaagcaccagattcagaaga

SEQ ID NO: 263208 - DNA, 75 bp, synthetic construct
  source 1..75: mol_type = other DNA
atggcataagccattatttgataaggcaaaagagttaggtattactatttttagcagtccttttgattttactgc

SEQ ID NO: 263209 - DNA, 75 bp, synthetic construct
  source 1..75: mol_type = other DNA
taccgccagggtcaacggcctggaggaaaccatcctctacagccgggacgccgcaggccgcctggcagaagtcat

SEQ ID NO: 263210 - DNA, 75 bp, synthetic construct
  source 1..75: mol_type = other DNA
atagtcattgaggatttgaaggtcagcaacatgtcaaagtcagcagcgggtacggtcagcctgccggggcgcaat

SEQ ID NO: 263211 - DNA, 75 bp, synthetic construct
  source 1..75: mol_type = other DNA
ctattgttggcggagctcataatggggccgccgatgcaatgagacattgttacttgatgtgtcgaatgactaaga

SEQ ID NO: 263212 - DNA, 75 bp, synthetic construct
  source 1..75: mol_type = other DNA
aagaaagggtaagatagttccactgttggatatcgctctaggaatggatgatgattccacaggataccaaaatat

SEQ ID NO: 263213 - DNA, 75 bp, synthetic construct
  source 1..75: mol_type = other DNA
tatcaggcacagacttcaaccgaatgtggaaacaatggaaatctatccgcgccgctggcattcgcattaaaggag

SEQ ID NO: 263214 - DNA, 75 bp, synthetic construct
  source 1..75: mol_type = other DNA
ttttgagtgtcatggctcacccgatgagggaatgtttttccctggcattaaaaagtatatatcctggagtgagat

SEQ ID NO: 263215 - DNA, 75 bp, synthetic construct
  source 1..75: mol_type = other DNA
tataggtgaaataagaaaattagcaaaatacaggttaaaacatattgataagtattatgaacgttctggtgttca

SEQ ID NO: 263216 - DNA, 75 bp, synthetic construct
  source 1..75: mol_type = other DNA
tctccctcaggaaaagaaagaattcattttaaaaaatgcgttaaagtagaatacaatgggacattggagggatat

SEQ ID NO: 263217 - DNA, 75 bp, synthetic construct
  source 1..75: mol_type = other DNA
gcagattaaatcttcattgtggcttattgccttctatgccctgattatgctgttttcctggctgggtagctttgg

SEQ ID NO: 263218 - DNA, 75 bp, synthetic construct
  source 1..75: mol_type = other DNA
tggtactgagctacgccatcgcgccggttacagctgcaggactgcgccgtaatgcacctgatatgccgcgcccgt

SEQ ID NO: 263219 - DNA, 75 bp, synthetic construct
  source 1..75: mol_type = other DNA
gggtatggatacccaccattaatggcctttgagtttggggttccagttctagcatccgggaatactagcattttt

SEQ ID NO: 263220 - DNA, 75 bp, synthetic construct
  source 1..75: mol_type = other DNA
cagaaccaggtaagccagaccctgggggaaataaacagtctctccaacagggtagcgttagccaaagattcgaaa

SEQ ID NO: 263221 - DNA, 75 bp, synthetic construct
  source 1..75: mol_type = other DNA
gtagatgaagatcaaccagcactgggctattcactttgcgcaacagccattctgtcaatggctgatgtcactgaa

SEQ ID NO: 263222 - DNA, 75 bp, synthetic construct
  source 1..75: mol_type = other DNA
tccgggattgcgcagtcacctttcagaatcaaatcgcaatccgaccttgaagagtttaaaagcgcacttagcaag

SEQ ID NO: 263223 - DNA, 75 bp, synthetic construct
  source 1..75: mol_type = other DNA
tttcacttatattaatagctattgtatggtatttttacttttctcatttcaatcattgggatagcccgttagata

SEQ ID NO: 263224 - DNA, 75 bp, synthetic construct
  source 1..75: mol_type = other DNA
ttcctttctcacccatgtggtggtgttagaaatccaggcgggcaccataacggttgctctaaggttatctctggc

SEQ ID NO: 263225 - DNA, 75 bp, synthetic construct
  source 1..75: mol_type = other DNA
gaacatatttgcgcactggacacttttatcaaaatggctcgcgaagccgggttacgtatacaggagctaactggt

SEQ ID NO: 263226 - DNA, 75 bp, synthetic construct
  source 1..75: mol_type = other DNA
cagagcgaatcctggtccaataactattgaaaatgccatggtctattcaggtaaagattatggcggacataaact

SEQ ID NO: 263227 - DNA, 75 bp, synthetic construct
  source 1..75: mol_type = other DNA
tattattttttgccaatcaatctcttcttccgtaaacctgcgccacataccgcccgcgcccgtcgccgtgcccca

SEQ ID NO: 263228 - DNA, 75 bp, synthetic construct
  source 1..75: mol_type = other DNA
acaggaaagcatacaaaaaattttgcccccaaaattttttgtatgaaaaccgattaatacccccgagattaatag

SEQ ID NO: 263229 - DNA, 75 bp, synthetic construct
  source 1..75: mol_type = other DNA
aagataatgaatacaaacggaaacgaattgttgaagttatcaaatctgatttcaatgattgcattgtgactgaat

SEQ ID NO: 263230 - DNA, 75 bp, synthetic construct
  source 1..75: mol_type = other DNA
ccagcaatacatcaaacgccgcgatcaggagaacgaggatattgcgctaacggtagggaaactgcgtgttgagct

SEQ ID NO: 263231 - DNA, 75 bp, synthetic construct
  source 1..75: mol_type = other DNA
gtgagcctgattgactatcaggcactgcgtgccaaggcagaaaaagcaacgtgtggtgtatggtcgctcgaatat

SEQ ID NO: 263232 - DNA, 75 bp, synthetic construct
  source 1..75: mol_type = other DNA
gacaaaatggcctacctgacgatatggcagggcgatgacgtacagcgccgggtgaaaggtgtggtgacctggttt

SEQ ID NO: 263233 - DNA, 75 bp, synthetic construct
  source 1..75: mol_type = other DNA
ataaatatttcacattgtttggtgaggttttttgcgctattgttgattacaggtttattttgttgaataaaaata

SEQ ID NO: 263234 - DNA, 75 bp, synthetic construct
  source 1..75: mol_type = other DNA
tttatcgtgatttaatgcaaaaaggaataattcatttcgaaaaaacagcatcaaatgataacaggttgaccaatg

SEQ ID NO: 263235 - DNA, 75 bp, synthetic construct
  source 1..75: mol_type = other DNA
acaggacgcgtttactaccctgccccgtttatgactaacgagaatctggcgctgtatcaggatgcttacgaaatc

SEQ ID NO: 263236 - DNA, 75 bp, synthetic construct
  source 1..75: mol_type = other DNA
cacggtagagactgccgtacgtggtttaacagcggtgtcagatatgagtcatatccgcagcgtgccgtccatcga

SEQ ID NO: 263237 - DNA, 75 bp, synthetic construct
  source 1..75: mol_type = other DNA
ttgcaggttaacagcgcctcagagtatgacgagaatctcgactatgcccgtacaggccatgatatttcctgcaat

SEQ ID NO: 263238 - DNA, 75 bp, synthetic construct
  source 1..75: mol_type = other DNA
ggccttggatatatattgctgggcgacgtatcgtgtgagttatttaaagcgaggcacaattatcccttggctagg

SEQ ID NO: 263239 - DNA, 75 bp, synthetic construct
  source 1..75: mol_type = other DNA
atcccatattttgtggagtgcaaaacaaccagagaaagattttctatgggagtcttgggttgagttgtcacctaa

SEQ ID NO: 263240 - DNA, 75 bp, synthetic construct
  source 1..75: mol_type = other DNA
tctgaccggcggcgtggacaacctgttcgacaaacgtttgtggcgtgcgggtaatgcccagaccacgggcgatct

SEQ ID NO: 263241 - DNA, 75 bp, synthetic construct
  source 1..75: mol_type = other DNA
aatccggatcaatatggttgcggtccaggcacaacgcctagtcgatagtgttgctttatatcaggccctgggagg

SEQ ID NO: 263242 - DNA, 75 bp, synthetic construct
  source 1..75: mol_type = other DNA
actttgactgccctcgctgccgctgatatggctgcacaggcctccttgcagtcggtcgagcggcaataccggctg

SEQ ID NO: 263243 - DNA, 75 bp, synthetic construct
  source 1..75: mol_type = other DNA
gccccatcagcctcgaaagacggcttgcggcaacttacctgatagctggtctggtcaccgccggtctggccggct

SEQ ID NO: 263244 - DNA, 75 bp, synthetic construct
  source 1..75: mol_type = other DNA
atgaaaagagttatccttttgctattgtttttgtctatgaaagtatatgcatctgatgatgcatattgtgcttta

SEQ ID NO: 263245 - DNA, 75 bp, synthetic construct
  source 1..75: mol_type = other DNA
tcatacggttattacaatttttctaattttaaaattccagtcagattattttatgaagagaataaaggtttttat

SEQ ID NO: 263246 - DNA, 75 bp, synthetic construct
  source 1..75: mol_type = other DNA
aaacgcgggcagaactgcctgcgctgcgtaaacaactgcaacaaaccgaacatctactggcggtgctagccggtc

SEQ ID NO: 263247 - DNA, 75 bp, synthetic construct
  source 1..75: mol_type = other DNA
ctgaaaccgctggtggacggcccgcagagcgccgtcgtgacgggaccggcaggcgaggaaatcttctgtgatgaa

SEQ ID NO: 263248 - DNA, 75 bp, synthetic construct
  source 1..75: mol_type = other DNA
ggtatcagcgactggtgggactctcttgataagcagtcgcagcagctgatcgaacttattggagcgctaaccgca

SEQ ID NO: 263249 - DNA, 75 bp, synthetic construct
  source 1..75: mol_type = other DNA
ttctgatctcgcttgggttcaaagttgatgaggctggcgccagaaaattcgatgccgtcgttgccggaacaacgc

SEQ ID NO: 263250 - DNA, 75 bp, synthetic construct
  source 1..75: mol_type = other DNA
ggcaatgcgccgtggtattggtgagtacatgggccagtacaacgcgatgaaaaaggccatcgggttcaatcctga

SEQ ID NO: 263251 - DNA, 75 bp, synthetic construct
  source 1..75: mol_type = other DNA
tttacctcattcaccagagcactggatcacttcgcataatggaatttattatacgccacctgcgcctggtgaaaa

SEQ ID NO: 263252 - DNA, 75 bp, synthetic construct
  source 1..75: mol_type = other DNA
aggcatccgtgacattcaggcgttcgttaatcaggccaaaagccttaaagcggacctggataaactacgtaagcc

SEQ ID NO: 263253 - DNA, 75 bp, synthetic construct
  source 1..75: mol_type = other DNA
ccacggcgtgacgcatccggtgacgatgccgctggtggacaatcaactggatctcgccactttctggcagcagtg

SEQ ID NO: 263254 - DNA, 75 bp, synthetic construct
  source 1..75: mol_type = other DNA
gtactggaagtaatacaattgcaggtgctaaaaccaatctacaattatcacgttttgatcgtagtcgtgatgatc

SEQ ID NO: 263255 - DNA, 75 bp, synthetic construct
  source 1..75: mol_type = other DNA
cagcacaaactaaccttaatgtatacagtaaagaagctggtgatcttcgttatctacgtcaatcaaataatctaa

SEQ ID NO: 263256 - DNA, 75 bp, synthetic construct
  source 1..75: mol_type = other DNA
tccctctgctgatatacgagcgaagatcagtaaagatatagaaggtggtatccctagctattggcaaggtcaggt

SEQ ID NO: 263257 - DNA, 75 bp, synthetic construct
  source 1..75: mol_type = other DNA
aagaacggcggagatctgggtaaagctctggcctcgtataactgggggatcggcaacgtgcaaaagtacggcatg

SEQ ID NO: 263258 - DNA, 75 bp, synthetic construct
  source 1..75: mol_type = other DNA
gaaatatatgataatgaatatgaagaaaaactagctggacaaattaatctcgaaccaattgatattacagtacac

SEQ ID NO: 263259 - DNA, 75 bp, synthetic construct
  source 1..75: mol_type = other DNA
atgggtagaaaactataatacaaatagtgttattggttttgcaaatgggcggtactggtgcaactacattaaatg

SEQ ID NO: 263260 - DNA, 75 bp, synthetic construct
  source 1..75: mol_type = other DNA
gagcgaaggcacctggcttacaccaccactactggcttatttgcgtgaagctgtcgtaaatttgaatcaaaaata

SEQ ID NO: 263261 - DNA, 75 bp, synthetic construct
  source 1..75: mol_type = other DNA
cttaacaaaaaagatatatctagaatattcaaaagaataggtaaagcaatcaaaccaccaagaaaagtgcgtgat

SEQ ID NO: 263262 - DNA, 75 bp, synthetic construct
  source 1..75: mol_type = other DNA
ccgcacattggcctgagcagcctcggggaaatcgtcggctgggcgcgcccagacgagtttccgccaaggaacatg

SEQ ID NO: 263263 - DNA, 75 bp, synthetic construct
  source 1..75: mol_type = other DNA
ggtcagttatggcaaccgggccagcgtattcgtgtccgaagcgagccgcatggcattgatgacatttacttcctc

SEQ ID NO: 263264 - DNA, 75 bp, synthetic construct
  source 1..75: mol_type = other DNA
aacgcttgggctgcctgatggtattttccctccggccattaaacgtggtgtgccggtgctggtcagggtgggtaa

SEQ ID NO: 263265 - DNA, 75 bp, synthetic construct
  source 1..75: mol_type = other DNA
catgctgcggtacatacccatcctggtgacgatatgtacgtggcgacagcgatcccggcactgtggaagagactc

SEQ ID NO: 263266 - DNA, 75 bp, synthetic construct
  source 1..75: mol_type = other DNA
cttggtgacattattcatgaatggcaaaaaacagacgtgtcagggacaatatatattgtcaggttatggctgaaa

SEQ ID NO: 263267 - DNA, 75 bp, synthetic construct
  source 1..75: mol_type = other DNA
ctatctttttaaaatatttgagctctgatgtattcatgtcgaagatgcgtgtagacataaatggagacgggaata

SEQ ID NO: 263268 - DNA, 75 bp, synthetic construct
  source 1..75: mol_type = other DNA
ttaagcacagctatttagtgttactactccattcgtcagtggtcaacattccgatggttaaattacaaaaggcaa

SEQ ID NO: 263269 - DNA, 75 bp, synthetic construct
  source 1..75: mol_type = other DNA
tgtactaatggtctttgcggcacactatccgctatgataggtccagataaatttgattctatagatagcaccgca

SEQ ID NO: 263270 - DNA, 75 bp, synthetic construct
  source 1..75: mol_type = other DNA
cttgatgagatagcccgaacctggtgcgaatactgtcatctgtctattacgcccacggaactggaagcggagatc

SEQ ID NO: 263271 - DNA, 75 bp, synthetic construct
  source 1..75: mol_type = other DNA
tggtgttgcttcccgtcttgatattaacgctgtccggaccgggacagactcgctggcacttgccattaccattta

SEQ ID NO: 263272 - DNA, 75 bp, synthetic construct
  source 1..75: mol_type = other DNA
gagacagcgaataacaaaaatacttaatgagtccaatacaagacgggttgcagaagagattaaattccggattca

SEQ ID NO: 263273 - DNA, 75 bp, synthetic construct
  source 1..75: mol_type = other DNA
agacgctgacgttcagccgtgatgaggcaggacgtgaagtgctccggcacagtaaccggggttttgcctgtgaac

SEQ ID NO: 263274 - DNA, 75 bp, synthetic construct
  source 1..75: mol_type = other DNA
atgatcagggaacgtattcagcaagcgataaatgaaaggttagtatctgatagcccattcaatgttgttcctgaa

SEQ ID NO: 263275 - DNA, 75 bp, synthetic construct
  source 1..75: mol_type = other DNA
atgctttggcaggaacacatagaaaatacgtttctcaatgaaatcaaaatgaacgctgaagcttcacgtgataat

SEQ ID NO: 263276 - DNA, 75 bp, synthetic construct
  source 1..75: mol_type = other DNA
aagccacatggggcggactgctcccctcactggtgcgggagtaccgttacgacagcgcgggcaatgtgtcggctg

SEQ ID NO: 263277 - DNA, 75 bp, synthetic construct
  source 1..75: mol_type = other DNA
acgagccggaaaccgggatgtacctggtgagtgatccgctggggttgctggggggtgagcagacttaccggtatg

SEQ ID NO: 263278 - DNA, 75 bp, synthetic construct
  source 1..75: mol_type = other DNA
ccggctggaccggaacggccaggtcacggcggggacagcctcaggcaccgggctgggctatggcgaaggcgatga

SEQ ID NO: 263279 - DNA, 75 bp, synthetic construct
  source 1..75: mol_type = other DNA
cgccgtcggtttatccccgctggcgcggggaacacgtggcgtccgtcgtcgtttaaagcgtcaatgccggtttat

SEQ ID NO: 263280 - DNA, 75 bp, synthetic construct
  source 1..75: mol_type = other DNA
ccgcagacatttttccaggaacgccttttcctttgttgttcgaaattgaagtgagttcatgtacagggaataata

SEQ ID NO: 263281 - DNA, 75 bp, synthetic construct
  source 1..75: mol_type = other DNA
atttattcgcccgcgtacatatggaaataatgtctcaagcgggcaaataatgagccgagtcaaaatcgtggtaat

SEQ ID NO: 263282 - DNA, 75 bp, synthetic construct
  source 1..75: mol_type = other DNA
acgcggacgaatcatgcggtgagcgacctgacgggccgcccgctgatgctctttaacagtgaaggtaaaaccgtc

SEQ ID NO: 263283 - DNA, 75 bp, synthetic construct
  source 1..75: mol_type = other DNA
ttttttctccctgtgcgaatattcgtgctgctgcggcagtgctgaaaacgtgctgggataaatacgaaacaaaag

SEQ ID NO: 263284 - DNA, 75 bp, synthetic construct
  source 1..75: mol_type = other DNA
gtttatccccgctggcgcggggaacactctaaacataacctattattaattaatgattttttaagccagtcacaa

SEQ ID NO: 263285 - DNA, 75 bp, synthetic construct
  source 1..75: mol_type = other DNA
accatctggtatctggccctgcgcttcggtcgtgaagatgatgtggagttcatcaactatatgaccggcggacgc

SEQ ID NO: 263286 - DNA, 75 bp, synthetic construct
  source 1..75: mol_type = other DNA
tggtgcgtggaattacacacgcatcaggccgggtaaagcacggggagcattcttcctcggcacacaacgtggcag

SEQ ID NO: 263287 - DNA, 75 bp, synthetic construct
  source 1..75: mol_type = other DNA
tttaatcctgctaatgggcctcttgcaaactatctaaataacggtgatagtggctctcctttatttgcgtatgac

SEQ ID NO: 263288 - DNA, 75 bp, synthetic construct
  source 1..75: mol_type = other DNA
tcgcaccagagcagaactctggtgcgatgggggagggaatgacgttttacttattcgtaggtaaaggagaaggtc

SEQ ID NO: 263289 - DNA, 75 bp, synthetic construct
  source 1..75: mol_type = other DNA
aattatcaaacagacccccggacggtgcggggcgtgtggtagcccatgccgtggtgaatgctgtactggcggtgg

SEQ ID NO: 263290 - DNA, 75 bp, synthetic construct
  source 1..75: mol_type = other DNA
ctgtaccgtcagagtgaaatagtctgtctcggaaagaaaaattatgtgttcttcggtagcgatcacggcggcgag

SEQ ID NO: 263291 - DNA, 75 bp, synthetic construct
  source 1..75: mol_type = other DNA
ctcaacggtacgcacattcatctggaaggggagtcggatgtgaacggtgatgcgccagtgattaactggaactgt

SEQ ID NO: 263292 - DNA, 75 bp, synthetic construct
  source 1..75: mol_type = other DNA
aaaaaagcaagacgtttcattgagtgtgaatattccgcagatacaattagggaaaaattggcaagggtaatgatt

SEQ ID NO: 263293 - DNA, 75 bp, synthetic construct
  source 1..75: mol_type = other DNA
gtctttccgggccgattcatggacaagccactttcagccagcgccatccttaaagccctggagcgtatcggatac

SEQ ID NO: 263294 - DNA, 75 bp, synthetic construct
  source 1..75: mol_type = other DNA
acccccccatctcttgctgcaacagttaatgcagatatatcgtatcaaacatttcgggattttgccgaaaataaa

SEQ ID NO: 263295 - DNA, 75 bp, synthetic construct
  source 1..75: mol_type = other DNA
ctactaccggtagcctgcctccgggaaaccatactctttactcccctcagtatgtggttaccgccaaacatgtca

SEQ ID NO: 263296 - DNA, 75 bp, synthetic construct
  source 1..75: mol_type = other DNA
tttgaggcccggaccggaaaatatcgcgtgtatctgaaacagggctggcgcgacgagtactgtgttggcgacatt

SEQ ID NO: 263297 - DNA, 75 bp, synthetic construct
  source 1..75: mol_type = other DNA
accggctaaacccgatcttaattgcgtaacccgttttggcggtgtcggcctgacgcctgcctgtgaaaaaggcca

SEQ ID NO: 263298 - DNA, 75 bp, synthetic construct
  source 1..75: mol_type = other DNA
cctgctgttcagaatgatcgcacggggtcgcgtctgtatctgctgcgacgcagcaagctgacaaataaaaccccg

SEQ ID NO: 263299 - DNA, 75 bp, synthetic construct
  source 1..75: mol_type = other DNA
acaacatcggtgggataaagaacctaaaaatatctttctccgaagcgatgaatataatttgcggacctaacggga

SEQ ID NO: 263300 - DNA, 75 bp, synthetic construct
  source 1..75: mol_type = other DNA
gtcctggaactggtggattatatggaaaaatattcaccaaatgcctggatgctcaactactccaacccggcagcc

SEQ ID NO: 263301 - DNA, 75 bp, synthetic construct
  source 1..75: mol_type = other DNA
atgctggtcgagtgggggaacatcgtgaagaaagggaaagtagaaatcaccatcagacgttttcgtgcagctgcc

SEQ ID NO: 263302 - DNA, 75 bp, synthetic construct
  source 1..75: mol_type = other DNA
ggaagacgacagtcaggttaagcgcatgctggtggagtgggggaacatcgtgaagaaagggaaagtagaaatcac

SEQ ID NO: 263303 - DNA, 75 bp, synthetic construct
  source 1..75: mol_type = other DNA
tctttccgtcacggatacaccggcgctgaacgtttcggcgtcgtacctggcaaaggacggcattagcctgcgtcc

SEQ ID NO: 263304 - DNA, 75 bp, synthetic construct
  source 1..75: mol_type = other DNA
tgttcatttgtgtacttaattgaatttcccgaaacgggggagtactacttcgggaagaagcagatatataaaggt

SEQ ID NO: 263305 - DNA, 75 bp, synthetic construct
  source 1..75: mol_type = other DNA
tttaaataaggcaataatgtgtaaggcacgattaccaaaaaaccgtttggatttatttaaagtactgcaatattt

SEQ ID NO: 263306 - DNA, 75 bp, synthetic construct
  source 1..75: mol_type = other DNA
gtctcgtttatctacattattcagtttccagatactggcgagtactatttcggtaagaagcaaatctataaaaaa

SEQ ID NO: 263307 - DNA, 75 bp, synthetic construct
  source 1..75: mol_type = other DNA
atcacagataaaaaattagcacgaaaaatttatgctacccatcgtcgctacgattatgttagcttcgaaaatata

SEQ ID NO: 263308 - DNA, 75 bp, synthetic construct
  source 1..75: mol_type = other DNA
atgatttccaaccctactcacattgcaatagggatatactttaagccacatctttcacctattccattgatttct

SEQ ID NO: 263309 - DNA, 75 bp, synthetic construct
  source 1..75: mol_type = other DNA
tcttaataaagccattttgtgcaaatcccgattaccaaagaatcgaatcgaattattccgggtgctacagagttt

SEQ ID NO: 263310 - DNA, 75 bp, synthetic construct
  source 1..75: mol_type = other DNA
tgaactacataatacatcacaatttattatagataatatccttcaaacggtacataaaccagaacgatctgtaag

SEQ ID NO: 263311 - DNA, 75 bp, synthetic construct
  source 1..75: mol_type = other DNA
atatcatcaaggacggtattgtatcttcgaatgataggttagcgatctttgaagcgaaagcacaattctcaggga

SEQ ID NO: 263312 - DNA, 75 bp, synthetic construct
  source 1..75: mol_type = other DNA
tcaagcaaaagctctttgaaaaaagggaaatcgaacaggctcaaaggatcgagagatttcaaagcccagtagata

SEQ ID NO: 263313 - DNA, 75 bp, synthetic construct
  source 1..75: mol_type = other DNA
gccaggcgaagaagcacctgaacgatgtcatcaacaacgttaaggggcgcaaggtaatccgcgcgttgcagtcag

SEQ ID NO: 263314 - DNA, 75 bp, synthetic construct
  source 1..75: mol_type = other DNA
ttaactttagctaggcttgaaaaattcagaacaagaccgctgttagttattgttgatgaagcccataacttcctt

SEQ ID NO: 263315 - DNA, 75 bp, synthetic construct
  source 1..75: mol_type = other DNA
accggttagatttaatgtgcaaggtcatcactagaacagatggatttcacaactacgcaaacacaaaatcgactg

SEQ ID NO: 263316 - DNA, 75 bp, synthetic construct
  source 1..75: mol_type = other DNA
atgtcagccgaaccatcgaacctgacgccattaatgtttatggctgtttttaatttcgtcgcggtgtcggcgttc

SEQ ID NO: 263317 - DNA, 75 bp, synthetic construct
  source 1..75: mol_type = other DNA
gcgcttacgaacgaaagcgtgaaaataactggtcagtgctggaagcagctgaattcatcgaggcgcatggcggaa

SEQ ID NO: 263318 - DNA, 75 bp, synthetic construct
  source 1..75: mol_type = other DNA
tcgtttattacaactctgcgatcctgtcacgtttgctgaggcgactggaaacagaaggtaatgaaaagtccattg

SEQ ID NO: 263319 - DNA, 75 bp, synthetic construct
  source 1..75: mol_type = other DNA
ccaccacccttccgctgcgccggggctcggaagggtttaacaccagtcaggattatctggtgaaaggacttattc

SEQ ID NO: 263320 - DNA, 75 bp, synthetic construct
  source 1..75: mol_type = other DNA
ttatgatttccggcaccattaccgacgcctccgggcgcacgctctccggtcagacaaccgaggcattttacaact

SEQ ID NO: 263321 - DNA, 75 bp, synthetic construct
  source 1..75: mol_type = other DNA
ctcttaaaccaaggtttaggattgaaaggatgacgccggaaacttcttataaagcgtggaaacagccacatcata

SEQ ID NO: 263322 - DNA, 75 bp, synthetic construct
  source 1..75: mol_type = other DNA
ggcctattacaccccgatcgatacctctatgctgattaacagccaatttcgggagatcgacgctggcggtgtact

SEQ ID NO: 263323 - DNA, 75 bp, synthetic construct
  source 1..75: mol_type = other DNA
ccagagattagattcaggagctaatcaatataattacaatggtcatacaggttctgatgttatctcaattaccga

SEQ ID NO: 263324 - DNA, 75 bp, synthetic construct
  source 1..75: mol_type = other DNA
cggagaaaggtggcctgcagggtcgtgtggatgcactggatggtatccaggtaccggaagtgaacgatcaggacg

SEQ ID NO: 263325 - DNA, 75 bp, synthetic construct
  source 1..75: mol_type = other DNA
ggtgatttcattcagaaaggaattgaaacggtggagggtgtaaactatttagtttattcaaatgataatacccca

SEQ ID NO: 263326 - DNA, 75 bp, synthetic construct
  source 1..75: mol_type = other DNA
gaattacttagccgtgccggtatagccattaacggttctgccccggcggatattcgtgtgaaaaaccccgatttt

SEQ ID NO: 263327 - DNA, 75 bp, synthetic construct
  source 1..75: mol_type = other DNA
caaaagcggaaagacgctatgatgtgacacgcattcagtacgaattggtcgtgatgtcatctggactgataagca

SEQ ID NO: 263328 - DNA, 75 bp, synthetic construct
  source 1..75: mol_type = other DNA
tatcgtacttcttcagcgaccagcacccggacctgaaagccgactacattctggcgaacccgccgttcaacctga

SEQ ID NO: 263329 - DNA, 75 bp, synthetic construct
  source 1..75: mol_type = other DNA
ttgccgggcgtcttgtcccgcgaaacctgattatcaacatcccgccaggcggtacaaaaacagagttcttctcca

SEQ ID NO: 263330 - DNA, 75 bp, synthetic construct
  source 1..75: mol_type = other DNA
tccaaatccactggcaacattttgtcttcttattgcaaaaaatgtcattaaagataaaaagattattgttcattg

SEQ ID NO: 263331 - DNA, 75 bp, synthetic construct
  source 1..75: mol_type = other DNA
taattacatcgactggacaccgttctttatgacttggtcgctggccgggaagtatccgcgcattctggaagatga

SEQ ID NO: 263332 - DNA, 75 bp, synthetic construct
  source 1..75: mol_type = other DNA
gattcagggggccagcctaggaacattggttacatttttagtttccaaacattttattgttcgaacttcggagca

SEQ ID NO: 263333 - DNA, 75 bp, synthetic construct
  source 1..75: mol_type = other DNA
acctggatggacgccattgacgacaatcttatttctggtcgccagccaatggttatcgacccgagccaactcagg

SEQ ID NO: 263334 - DNA, 75 bp, synthetic construct
  source 1..75: mol_type = other DNA
atttgtcattccctgagcgggtcgtacttcgttcaaagtccaccaaatcgtttcttaacttcacacgcctgtggt

SEQ ID NO: 263335 - DNA, 75 bp, synthetic construct
  source 1..75: mol_type = other DNA
cagaaacaggtgatacagggcaggcggtggaggccgcctgtcagcccgcgcgaaaacccctggcaggctggcgcc

SEQ ID NO: 263336 - DNA, 75 bp, synthetic construct
  source 1..75: mol_type = other DNA
atctcggtgaagtacgtaccggggttgaggcgaaagtaaataacaaccttagcctgtgggggaatgtaggtgtgc

SEQ ID NO: 263337 - DNA, 75 bp, synthetic construct
  source 1..75: mol_type = other DNA
atggcctgatgacgttcaacgcgacgctgggcggcgataattcgcccaccgataaaatgaacgtgaaaggcgata

SEQ ID NO: 263338 - DNA, 75 bp, synthetic construct
  source 1..75: mol_type = other DNA
tttggtcttacggtggatgccgtgatggaagagtaccggcgctggcgcaatgaatcctggcgatacgacgggagt

SEQ ID NO: 263339 - DNA, 75 bp, synthetic construct
  source 1..75: mol_type = other DNA
cgaccgtctggctgaagcctttgcggagtatctccatgagcgggtacgtaaagtttactggggttatgcgccgaa

SEQ ID NO: 263340 - DNA, 75 bp, synthetic construct
  source 1..75: mol_type = other DNA
tcttcccgatccagttgttccgccaggtactctgcaacatactgccagttgcacgcatcccgttcggatttttca

SEQ ID NO: 263341 - DNA, 75 bp, synthetic construct
  source 1..75: mol_type = other DNA
tgggtatgttctgcttcgtcatgaaactgaaataggcactggtgaggacggcaatattgtttattactctcttta

SEQ ID NO: 263342 - DNA, 75 bp, synthetic construct
  source 1..75: mol_type = other DNA
aaaataacacaatctcatattgactttgacaaaagagctaaagatgaaaaaaatgacaccattaacatttatgat

SEQ ID NO: 263343 - DNA, 75 bp, synthetic construct
  source 1..75: mol_type = other DNA
tcaccattgaacaattgtgcgatggctttgtttataatgaactggagggaaaaggcttgtttggtttatcaggaa

SEQ ID NO: 263344 - DNA, 75 bp, synthetic construct
  source 1..75: mol_type = other DNA
cgaattggatcaacaacagcaaagtctacgccgtgaagatgcgcgtaatctcggtgaagtacgtaccggggttga

SEQ ID NO: 263345 - DNA, 75 bp, synthetic construct
  source 1..75: mol_type = other DNA
ctacgccgtgaagatgaatggtcaaaccgtaggccgtgaaggtgcgcgtaatctcggtgaagtacgtaccggggt

SEQ ID NO: 263346 - DNA, 75 bp, synthetic construct
  source 1..75: mol_type = other DNA
gaagtgtgtcccgtgcaattaatggtggtgaaaatggtttgccagacaggataaccttcacacgcgcagctaaga

SEQ ID NO: 263347 - DNA, 75 bp, synthetic construct
  source 1..75: mol_type = other DNA
cgggcggcaggcataaaagcgaaaaaatcccgcagtgctcacggacaggaactgcgggagagttacgaagattga

SEQ ID NO: 263348 - DNA, 75 bp, synthetic construct
  source 1..75: mol_type = other DNA
actgaagtcgttagaagctgaaaacgatggatggagatttgaagaaaagaatacttgcggacgtatcaaaattcc

SEQ ID NO: 263349 - DNA, 75 bp, synthetic construct
  source 1..75: mol_type = other DNA
atatcactgcttgcaccctatgatgaatggtatttcaattttttttaccctaattccctaccagcagaagttacc

SEQ ID NO: 263350 - DNA, 75 bp, synthetic construct
  source 1..75: mol_type = other DNA
agcgggagattacactgcgcctgggagcccgtctggtgcaggaaggcaaccgactgcattatctggctgaccgcg

SEQ ID NO: 263351 - DNA, 75 bp, synthetic construct
  source 1..75: mol_type = other DNA
ccgtcggtctataaaaaatgcctgattcagccagccggtcggatagacctggagcttatatcccgggagaaaagc

SEQ ID NO: 263352 - DNA, 75 bp, synthetic construct
  source 1..75: mol_type = other DNA
accttgtatgagattttagtcgatgcagagaatgcaaatactagagaagatgctttacacaaaatgaatgaggca

SEQ ID NO: 263353 - DNA, 75 bp, synthetic construct
  source 1..75: mol_type = other DNA
ttggagagatgctcaatgggatgtaggtggaccatcatcaatcagtctgatgaccgcagtggtaaacatccttaa

SEQ ID NO: 263354 - DNA, 75 bp, synthetic construct
  source 1..75: mol_type = other DNA
ttcgctgtcgccaccgggattgaagagcataacaattacgcgcaggatttcatcggcgcgtgcgaagacatcaaa

SEQ ID NO: 263355 - DNA, 75 bp, synthetic construct
  source 1..75: mol_type = other DNA
ctgcggaactgcgcgacgcggtggaagatgtgatccttaaccgtcgcgacgatggtacagagcgtttactggaac

SEQ ID NO: 263356 - DNA, 75 bp, synthetic construct
  source 1..75: mol_type = other DNA
atcttcaggcaatggatattctccatgaagctgcaacatctgataatgatgatttttgccgctatgttgaagaat

SEQ ID NO: 263357 - DNA, 75 bp, synthetic construct
  source 1..75: mol_type = other DNA
gcagcccagaatggtcattttgctatttgcgaaatgttgttgtgcgagggtgtcgatgtagaacatcgaaacgac

SEQ ID NO: 263358 - DNA, 75 bp, synthetic construct
  source 1..75: mol_type = other DNA
gccgggcgtcgaaattaggcggcttcgtcgaacagtgggaaaccgcgttgagcgagatgcaggaagaagaagaat

SEQ ID NO: 263359 - DNA, 75 bp, synthetic construct
  source 1..75: mol_type = other DNA
cagatggctaaatatgaagaacagacggtgctgattggtgattttcatgaagacgctcaggaccgcgaagcagca

SEQ ID NO: 263360 - DNA, 75 bp, synthetic construct
  source 1..75: mol_type = other DNA
gctaacgaatcaacagcggatcgttatttttggtggcggcttacctgtcatgttaaacgataaattaatcggtgc

SEQ ID NO: 263361 - DNA, 75 bp, synthetic construct
  source 1..75: mol_type = other DNA
cgtcggcgttagcggcggtacggtcgagcaggatcaattattagcacagtgcgccctggattgtttttccgcatt

SEQ ID NO: 263362 - DNA, 75 bp, synthetic construct
  source 1..75: mol_type = other DNA
ccagcaaagaagatgtgcaggatatttctttaaaaaactggctaaagaataaaaaaaccattgtattacttatat

SEQ ID NO: 263363 - DNA, 75 bp, synthetic construct
  source 1..75: mol_type = other DNA
cctgaaaaaattctataccgatgacgtgttcccggcggggatcatcggcgataacggtctgaacgcgatcgattc

SEQ ID NO: 263364 - DNA, 75 bp, synthetic construct
  source 1..75: mol_type = other DNA
taatccttaccaccctggcggtggggcaactcaccagcctgcaggcgcacgccgccgggcagctcaacgtctggg

SEQ ID NO: 263365 - DNA, 75 bp, synthetic construct
  source 1..75: mol_type = other DNA
tactcgccatcgctcaaagaatgctttggaacaagctattgcaattataaatagagatattatagcacaagaaga

SEQ ID NO: 263366 - DNA, 75 bp, synthetic construct
  source 1..75: mol_type = other DNA
gaagagcctcaacgacagaatcaagctaaaaaagctgcttatgatgtgttttattctttcagtatgaaccgtgac

SEQ ID NO: 263367 - DNA, 75 bp, synthetic construct
  source 1..75: mol_type = other DNA
acctggcaacatctgaaaggcctggtgaccaaacagctttccggcaaacgtctgttcgttgtcgacgccttctgt

SEQ ID NO: 263368 - DNA, 75 bp, synthetic construct
  source 1..75: mol_type = other DNA
catgaatacagattaccaaatcacctggctgtaagtaaccacagagaactttacctgactgtggggggcgagttg

SEQ ID NO: 263369 - DNA, 75 bp, synthetic construct
  source 1..75: mol_type = other DNA
gataccactcgcgatactttctggtgggcagacaaaggcaaaggtaagaacgacaaaaacctctctctccggaaa

SEQ ID NO: 263370 - DNA, 75 bp, synthetic construct
  source 1..75: mol_type = other DNA
atgagttatttggcggatatacgccatatagctttacgccaaagtattggaattatgcgcgaaatataccattgc

SEQ ID NO: 263371 - DNA, 75 bp, synthetic construct
  source 1..75: mol_type = other DNA
actatagcaaaatggattgctttgtacgtgggtttgatagcaccggtaattctctcgcgtgggcgttgggttcat

SEQ ID NO: 263372 - DNA, 75 bp, synthetic construct
  source 1..75: mol_type = other DNA
accgaggcgttagaacttgatactgccaagaatggttacatcctcctggttcaggacgcagagccaaacttcgat

SEQ ID NO: 263373 - DNA, 75 bp, synthetic construct
  source 1..75: mol_type = other DNA
tccatttcctcagcaggtgatacggttggtgctaatatatggcccgcatcgcagtgtgaactggttatttttacg

SEQ ID NO: 263374 - DNA, 75 bp, synthetic construct
  source 1..75: mol_type = other DNA
tcatatgctatgacgcttgattatggcacaacatcatcaacgcgcagaaagatcagtatttcaggcggtactgtt

SEQ ID NO: 263375 - DNA, 75 bp, synthetic construct
  source 1..75: mol_type = other DNA
gcaggctggggaattcagcgccagcaatatggtgaacagaaacactggatgctggttgatcctacccacgtaata

SEQ ID NO: 263376 - DNA, 75 bp, synthetic construct
  source 1..75: mol_type = other DNA
gccgacctgaagatgatgtacgcaccaaaattcgccgctggcgaggtatttgggcttcaggaggcgtccggcatg

SEQ ID NO: 263377 - DNA, 75 bp, synthetic construct
  source 1..75: mol_type = other DNA
tcttatgccatgacgcttgatcatggcacaacatcaacgacgcgcagaaagatcagcatttcaggtggcaccgtt

SEQ ID NO: 263378 - DNA, 75 bp, synthetic construct
  source 1..75: mol_type = other DNA
gggacgccaacggaaacgctaataactatgggatcaaaccttccgtcgtggttggttatatttccctatcttccg

SEQ ID NO: 263379 - DNA, 75 bp, synthetic construct
  source 1..75: mol_type = other DNA
tgatgccagacctgctcccgtaactgattatattcctgaaggtattaaatgcatgagaaaacccgaaggaaatat

SEQ ID NO: 263380 - DNA, 75 bp, synthetic construct
  source 1..75: mol_type = other DNA
gggataaaggagacaagggcgataagggggataccggcccgaaaggtgagcagggcgacccgggaggtccacagg

SEQ ID NO: 263381 - DNA, 75 bp, synthetic construct
  source 1..75: mol_type = other DNA
atgaatgtattccagtgcaccggcctgaatgacaatgaccagtattttatgaaagcctgcccggcgaagaagggt

SEQ ID NO: 263382 - DNA, 75 bp, synthetic construct
  source 1..75: mol_type = other DNA
gccagccagatgaaacgggcagccaacgacaaagccattgcacagatgttggcatcaaaaaaagtccggccccct

SEQ ID NO: 263383 - DNA, 75 bp, synthetic construct
  source 1..75: mol_type = other DNA
aaaaaaacgattagcagagatttagaagaaaattcagtattaacagagtcaatacttactgaaattaaatcctac

SEQ ID NO: 263384 - DNA, 75 bp, synthetic construct
  source 1..75: mol_type = other DNA
tgatgaggataaaagagaacaagctaaaaaaacgattagcagagatttagaagaaaattcagtattaacagagtc

SEQ ID NO: 263385 - DNA, 75 bp, synthetic construct
  source 1..75: mol_type = other DNA
atgatgcttaaacgcactactgcgatagttcttttgtcgatgctacaagtacctggtgctttagcagctatgtac

SEQ ID NO: 263386 - DNA, 75 bp, synthetic construct
  source 1..75: mol_type = other DNA
gttgcttatctttactggctgtttgtgcatctccggcaacaattgcggcaacatatggtcaggggtcagcatttg

SEQ ID NO: 263387 - DNA, 75 bp, synthetic construct
  source 1..75: mol_type = other DNA
gcagagatcaactttgctgcggcgaaactggcgcgtgcctgtgccgacgagtggagcgcccgcacgccggataaa

SEQ ID NO: 263388 - DNA, 75 bp, synthetic construct
  source 1..75: mol_type = other DNA
gcagcctcaactatggctttataatggaaaagtcctgaacgagcaggctgaattcaatgccgaaactattgaagc

SEQ ID NO: 263389 - DNA, 75 bp, synthetic construct
  source 1..75: mol_type = other DNA
tcggtccactacgggtacgacgataagggccgcctgacgggcgaacggcagacggtggagaacccggagacgggg

SEQ ID NO: 263390 - DNA, 75 bp, synthetic construct
  source 1..75: mol_type = other DNA
ttcaaagattatcccgcccccgacaataaggaagtgaaaacacatgcatcttatttccatattctatttctgaat

SEQ ID NO: 263391 - DNA, 75 bp, synthetic construct
  source 1..75: mol_type = other DNA
ttatcaattattgagaacagaaattttcctgaatcatcaatactatacttagcaagtaaaggtgttttctcattt

SEQ ID NO: 263392 - DNA, 75 bp, synthetic construct
  source 1..75: mol_type = other DNA
ctctgcgccatgccgaagccctgactttcggcctcaactgtgcactggggccagacgaactgcgccagtacgttc

SEQ ID NO: 263393 - DNA, 75 bp, synthetic construct
  source 1..75: mol_type = other DNA
gtgccgtgtgggaatccgcccaccttactgggcgccggtgccgtgtggaaatccgcccaccttgccgggcgccgg

SEQ ID NO: 263394 - DNA, 75 bp, synthetic construct
  source 1..75: mol_type = other DNA
tatattttagttaatcttgatagacccatagaattatatatatactatactatgctcaaaaagcatggacttgaa

SEQ ID NO: 263395 - DNA, 75 bp, synthetic construct
  source 1..75: mol_type = other DNA
gtacattaatgatgaaagtaagaactactacaatcaattccgtgatgaagtatggcaacgtatgaaacaggccgc

SEQ ID NO: 263396 - DNA, 75 bp, synthetic construct
  source 1..75: mol_type = other DNA
cgcaggcaactgcgagtcttgcagcagccacaggctatgacagccatatcttcgatctttttccggcctcagcca

SEQ ID NO: 263397 - DNA, 75 bp, synthetic construct
  source 1..75: mol_type = other DNA
cgctggcgcggcaatataatgtactgtttgtcgtctctgcggggaatttcgcaggcagcgacgatcctccggtgc

SEQ ID NO: 263398 - DNA, 75 bp, synthetic construct
  source 1..75: mol_type = other DNA
cggacaagttgaaagatgcggctgcagttgccaaaaagaagcttggtgacgcagcggccaaaggcgcagaggcgg

SEQ ID NO: 263399 - DNA, 75 bp, synthetic construct
  source 1..75: mol_type = other DNA
ggtgaatattccgttgctggcccctacggcatcatcatacccgacacacggtttgaaggggtgctcagcatccgg

SEQ ID NO: 263400 - DNA, 75 bp, synthetic construct
  source 1..75: mol_type = other DNA
agaaccagaagaacaggttgatccgcgcaaagcggcagttgccgcggctattgcccgcgctcaggccaaaaaagc

SEQ ID NO: 263401 - DNA, 75 bp, synthetic construct
  source 1..75: mol_type = other DNA
gctgctggtgatcgatggcgagacgggtttcaccggaggcatgaacatcttcagatcgtattggcggcccgatgc

SEQ ID NO: 263402 - DNA, 75 bp, synthetic construct
  source 1..75: mol_type = other DNA
gcgaaccgcccgtaacggctgatgagccgggaaccagttgggcgcgcggcatcgaggccggacccgatgaggccc

SEQ ID NO: 263403 - DNA, 75 bp, synthetic construct
  source 1..75: mol_type = other DNA
gggcagccaccctcgtgtcgctggcggtcgctatccccacagcggggcatgcggtcatctacaagcgtgaccctc

SEQ ID NO: 263404 - DNA, 75 bp, synthetic construct
  source 1..75: mol_type = other DNA
gcatccttgatagtggaattaataccgcacatccattattgcgtagtgcaatagccgagagtgcctgcttcgtgg

SEQ ID NO: 263405 - DNA, 75 bp, synthetic construct
  source 1..75: mol_type = other DNA
atgacggaacaatatcaacatcttagtattgctaaagaatctcttcagaaccctagacgcacacgacagttcaaa

SEQ ID NO: 263406 - DNA, 75 bp, synthetic construct
  source 1..75: mol_type = other DNA
agcgtaatcatcgatccggctccggcgctgaacgtactgacagtgggcagcgtcgccagacataacgcaacgttg

SEQ ID NO: 263407 - DNA, 75 bp, synthetic construct
  source 1..75: mol_type = other DNA
tgcagcattaaactctggggccgatgtgttaaccacaccaagcgatcttatttttggtgaggagttcccttctcc

SEQ ID NO: 263408 - DNA, 75 bp, synthetic construct
  source 1..75: mol_type = other DNA
gcagcatattgaaatacttacggccataaaagagcatgattgtgataaagctgaacagctaatgtataatcacct

SEQ ID NO: 263409 - DNA, 75 bp, synthetic construct
  source 1..75: mol_type = other DNA
tatccagatatgtctgccaatatgttgcgagcgatgcttgtcaatcacgctgcgctgacaccgcagatggagaat

SEQ ID NO: 263410 - DNA, 75 bp, synthetic construct
  source 1..75: mol_type = other DNA
gcgaaaattaacaccgaagtacgtggaggcaaagccccgcgtattaagcgtttagcggaaaccctaggcgaaagc

SEQ ID NO: 263411 - DNA, 75 bp, synthetic construct
  source 1..75: mol_type = other DNA
ttgaatttgagcctgctattggcagtgaaatacgcaaaactcgtccggctgtgattgtgagtaatgatgcggcca

SEQ ID NO: 263412 - DNA, 75 bp, synthetic construct
  source 1..75: mol_type = other DNA
ttaagccgttaaaccctacagaggtggtaaaaatccacggatacgagccagaccgtcggctctaccgtgccaccc

SEQ ID NO: 263413 - DNA, 75 bp, synthetic construct
  source 1..75: mol_type = other DNA
ctgtgtggtcaggcagagagcagggtttccgttcaggtcgatgtgtattccacttcgatcgctgaatcacgatcc

SEQ ID NO: 263414 - DNA, 75 bp, synthetic construct
  source 1..75: mol_type = other DNA
tgctcattatattttatttaatcatttcggccagcacccatgctgccggagggatcgcattaggtgccacgcgta

SEQ ID NO: 263415 - DNA, 75 bp, synthetic construct
  source 1..75: mol_type = other DNA
agcgccacggcaaactggcaggccgcttacggtacgctgggggtcgggtataactacgaccgcgatcaacatgac

SEQ ID NO: 263416 - DNA, 75 bp, synthetic construct
  source 1..75: mol_type = other DNA
aaggccacaacctgagttatcacgtaagccagggcgatacctcgaataatgggtatacgggcagcgccacggcaa

SEQ ID NO: 263417 - DNA, 75 bp, synthetic construct
  source 1..75: mol_type = other DNA
tcagagaagcatatgactatatttttatagatagtcccccgacaatctcaattttcacagatgccgctttagttg

SEQ ID NO: 263418 - DNA, 75 bp, synthetic construct
  source 1..75: mol_type = other DNA
ggagcaagcagtttaaatagcgttataagaaatatgcgcacacatcatgagaaagaaatcaagcaagtcggttac

SEQ ID NO: 263419 - DNA, 75 bp, synthetic construct
  source 1..75: mol_type = other DNA
acaggtcattactaaagtttcagacaatcttgatattatcttaggtgatataaacattatctttgatactaacca

SEQ ID NO: 263420 - DNA, 75 bp, synthetic construct
  source 1..75: mol_type = other DNA
cgtttattgaagccagcaaagagcagggtaaaaccaacggcaagatggtgatcgccaccgtgaagggcgacgtcc

SEQ ID NO: 263421 - DNA, 75 bp, synthetic construct
  source 1..75: mol_type = other DNA
catccaggttccggcgaacgggcaaccggttctgtttctggccgaccacccgttaaccggtggttacccggtgat

SEQ ID NO: 263422 - DNA, 75 bp, synthetic construct
  source 1..75: mol_type = other DNA
agatattaagatatataaccgtgcagcgcatttcagaggtaattcagcgtctgatcctggagcgaatttcagtgc

SEQ ID NO: 263423 - DNA, 75 bp, synthetic construct
  source 1..75: mol_type = other DNA
actctgagcgcgataaggacacaccgcgcatcatggttgccggcatagagattgccgacgggtgtattttcgata

SEQ ID NO: 263424 - DNA, 75 bp, synthetic construct
  source 1..75: mol_type = other DNA
cccataacccgtcccttgttttcatcgactcgcaggtggtagccaatgcgccggtgcgtttcctgctctcgggta

SEQ ID NO: 263425 - DNA, 75 bp, synthetic construct
  source 1..75: mol_type = other DNA
taatgaccgacagaaaaccggagctgatagcccaggtttatacgttttaccgaagcgtcgggctgccggtgacgc

SEQ ID NO: 263426 - DNA, 75 bp, synthetic construct
  source 1..75: mol_type = other DNA
aactggttcacctcgctggatgccaattatacgcagacacgctttgatattcttgatggtcatattgatactgtc

SEQ ID NO: 263427 - DNA, 75 bp, synthetic construct
  source 1..75: mol_type = other DNA
agaacccgcatcatctgttccagccataccgcctgccggggcagcagtacgatgatgaatcggggctgtgctata

SEQ ID NO: 263428 - DNA, 75 bp, synthetic construct
  source 1..75: mol_type = other DNA
agcgattgagaacccactaaaacagcctgaaccaatgacagaatatcaagtctgggaagacgactggatgattga

SEQ ID NO: 263429 - DNA, 75 bp, synthetic construct
  source 1..75: mol_type = other DNA
acgagctggaaatttttaatcgcgaatgctgcgatgaagaaattgaacggatctgcaaatgcacgcaggcctgtg

SEQ ID NO: 263430 - DNA, 75 bp, synthetic construct
  source 1..75: mol_type = other DNA
atattgttgataacaaaactggtgaacttgtggagcgtaaaccacatattcacattgtcattccaagaacaaatc

SEQ ID NO: 263431 - DNA, 75 bp, synthetic construct
  source 1..75: mol_type = other DNA
cagagcgaacgtcatggtccctgcaaataccctttcagagctgttcgtggagtgataaatcatgaatctcactga

SEQ ID NO: 263432 - DNA, 75 bp, synthetic construct
  source 1..75: mol_type = other DNA
agtaatgttcagactgaccagagcgaacgtcatggtccctgcaaataccctttcagagctgttcgtggagtgata

SEQ ID NO: 263433 - DNA, 75 bp, synthetic construct
  source 1..75: mol_type = other DNA
ccgccatgatgtgtggcctgtttttcgcgatgtttcattttccggcagtggctgataacaaaaatacctcatcat

SEQ ID NO: 263434 - DNA, 75 bp, synthetic construct
  source 1..75: mol_type = other DNA
tgaaattagacctgattggtttggtgaggtgctaagcaaagattatcagctatatgtaataatgaacgaaatgta

SEQ ID NO: 263435 - DNA, 75 bp, synthetic construct
  source 1..75: mol_type = other DNA
agctgttcaggcacaaaagcgattgcaggaactgcaacaaacaaataccaggttgaaagatcttgtaatggataa

SEQ ID NO: 263436 - DNA, 75 bp, synthetic construct
  source 1..75: mol_type = other DNA
atttacacaggggcaggagcttccgcccggtgtgtaccgggtggatatttatctgaatgatacgtatatctcaac

SEQ ID NO: 263437 - DNA, 75 bp, synthetic construct
  source 1..75: mol_type = other DNA
ggagcagatggaaagccagatggaggcggaatacatcccggagcggaggctgcatctttaccactgtgaccaccg

SEQ ID NO: 263438 - DNA, 75 bp, synthetic construct
  source 1..75: mol_type = other DNA
gctgaacccgcgtggcgtggtgggcctgttcccggcaaaccgtgtgggcgatgacattgaaatctaccgtgacga

SEQ ID NO: 263439 - DNA, 75 bp, synthetic construct
  source 1..75: mol_type = other DNA
tgcgcaaagcagaagcaaaggcaaaggcactactggcagcagccaagctgaatagtttgaaacattcaccatttg

SEQ ID NO: 263440 - DNA, 75 bp, synthetic construct
  source 1..75: mol_type = other DNA
aacctttggggaatatatacgactttttgaaaatccagaattgtggaaaaaaaccgaacttcaaatagataagaa

SEQ ID NO: 263441 - DNA, 75 bp, synthetic construct
  source 1..75: mol_type = other DNA
acagacgattgtatgcctgggatattctgcagaaaaaacagtctgacataccgaaaaggattaaaaggttatatt

SEQ ID NO: 263442 - DNA, 75 bp, synthetic construct
  source 1..75: mol_type = other DNA
ttcaccgcattgctatatttcatgatcgtggtgaggggaaattgcttttaccgaatgaccattgtcaccctggct

SEQ ID NO: 263443 - DNA, 75 bp, synthetic construct
  source 1..75: mol_type = other DNA
ggggtatatcgacctgtctgatttggatttaacaagttgtcattttaaaggtgacgttatatcgaaggtgtcttt

SEQ ID NO: 263444 - DNA, 75 bp, synthetic construct
  source 1..75: mol_type = other DNA
tcctgcgacggcgggatgttctgctgggtgatgccctgcgtgaggagaacaggctggaaaaatacctgtcgacag

SEQ ID NO: 263445 - DNA, 75 bp, synthetic construct
  source 1..75: mol_type = other DNA
acagatactagagcaagatggctacatggtgggggatcatcgttgcgcgatccttatgctcctcgacaaggctgg

SEQ ID NO: 263446 - DNA, 75 bp, synthetic construct
  source 1..75: mol_type = other DNA
gtagccgctctctgcccttcaggatcaataactgtcttatttaccttgtcctcaattccgaacaggagttttcgc

SEQ ID NO: 263447 - DNA, 75 bp, synthetic construct
  source 1..75: mol_type = other DNA
acggggaattgcaactggctacaggaaatgtatgcttagaggcagttggtgatcaattgagctacactgaattgc

SEQ ID NO: 263448 - DNA, 75 bp, synthetic construct
  source 1..75: mol_type = other DNA
cagcctgattgcgggtgaaccggatattgcccgcgtgccgattatgatcgactcttcaaaatgggacgtcattga

SEQ ID NO: 263449 - DNA, 75 bp, synthetic construct
  source 1..75: mol_type = other DNA
tactgacggcttatgtgacaaagcatgcgcctgtattggggcaatcatccccggaagtttatgatggcgaccgct

SEQ ID NO: 263450 - DNA, 75 bp, synthetic construct
  source 1..75: mol_type = other DNA
tcacctgcacatgcgcaagataaactgcaataccgccagcttattcattcgctggggtgccgtatcatctctcag

SEQ ID NO: 263451 - DNA, 75 bp, synthetic construct
  source 1..75: mol_type = other DNA
gcaacgcacgacgtgctggctggcctgaccgcgcgtgaagcgaaagttctgcgtatgcgtttcggtatcgatatg

SEQ ID NO: 263452 - DNA, 75 bp, synthetic construct
  source 1..75: mol_type = other DNA
gcttctgtgcgcggtcggagtggtcccgacgagggtttacccgaagtcgggtcgtatctccgcgttagcgggccg

SEQ ID NO: 263453 - DNA, 75 bp, synthetic construct
  source 1..75: mol_type = other DNA
tgtgccatttatcacctcgtcattactacgtatacacagtatgtgacgattcagatatcgtcaccagggtatgcc

SEQ ID NO: 263454 - DNA, 75 bp, synthetic construct
  source 1..75: mol_type = other DNA
cgccttatccggcttaccgatcacaatacaatcagttctttttcacaaactcagatttcagtttcatcggaccaa

SEQ ID NO: 263455 - DNA, 75 bp, synthetic construct
  source 1..75: mol_type = other DNA
ggaccttatcccggcgggtgttatccggacggacgacgagcggacccaccactaccactacgacagccagcaccg

SEQ ID NO: 263456 - DNA, 75 bp, synthetic construct
  source 1..75: mol_type = other DNA
gcagtggagatctaatatcattaggtggtcatgcaggacttggcgttgcgtttgctaaaaagaaaggtgaaatgt

SEQ ID NO: 263457 - DNA, 75 bp, synthetic construct
  source 1..75: mol_type = other DNA
agcgaagacggtcacggtgtggtgttcccggctgaactggtgcggctgctggacagactggaggaagaaatccgg

SEQ ID NO: 263458 - DNA, 75 bp, synthetic construct
  source 1..75: mol_type = other DNA
ggtgcggcaggtgtcgacggcagtcagtcgaggcgtttgaggttaccaatcgaagctatacccggtaatggcgca

SEQ ID NO: 263459 - DNA, 75 bp, synthetic construct
  source 1..75: mol_type = other DNA
acgtgataggtaaaaatcatgaggcggcagggaatagacaaggtcagccagctaaagaaagaatcatggatctta

SEQ ID NO: 263460 - DNA, 75 bp, synthetic construct
  source 1..75: mol_type = other DNA
tctactacgctattcgcaatggcatggatatggggatcgtcaacgccgggcaactggcgatttacgacgacctgc

SEQ ID NO: 263461 - DNA, 75 bp, synthetic construct
  source 1..75: mol_type = other DNA
gcacggtggagatctctgtcaccagccagatggcgggcaccagtgcggtcaccgccagcattaacagcagcagtc

SEQ ID NO: 263462 - DNA, 75 bp, synthetic construct
  source 1..75: mol_type = other DNA
cggttattaaggacggctcagtggcggacggttcgacggcgaacacgctgcgtgcgagggtaaccgatgcatttg

SEQ ID NO: 263463 - DNA, 75 bp, synthetic construct
  source 1..75: mol_type = other DNA
aagcgaacttgaatgcgcaactgaagatgtctggttggagcgatgccaattattcaaatagctacatgattaaac

SEQ ID NO: 263464 - DNA, 75 bp, synthetic construct
  source 1..75: mol_type = other DNA
atggtacttcatggatgtctaatttaggcaattatatgtataagctgctagtacgtctcaagcatgcctatatta

SEQ ID NO: 263465 - DNA, 75 bp, synthetic construct
  source 1..75: mol_type = other DNA
ggcgtaaccgtgaaaatcccattgcccaaaatgggcattatcccgccgaaatttatgccagttatgcgcgccgct

SEQ ID NO: 263466 - DNA, 75 bp, synthetic construct
  source 1..75: mol_type = other DNA
gtggtcaccgccagcatcaacagcagcagccagagccgggatgtgacgtttatcgccgatgtcagaacggcgcag

SEQ ID NO: 263467 - DNA, 75 bp, synthetic construct
  source 1..75: mol_type = other DNA
cagctcatgggagtacacgagaaatttaatcctgaaactggtatatcagagcttggaacaggaaagtcctctggc

SEQ ID NO: 263468 - DNA, 75 bp, synthetic construct
  source 1..75: mol_type = other DNA
ggggatagcataacggtgaccgttgttcttaaagatgcccagggtaactttattactgatggtgttgttcagctt

SEQ ID NO: 263469 - DNA, 75 bp, synthetic construct
  source 1..75: mol_type = other DNA
aggcaacggtgcaacggttgccccgacggtgattacagagccggacggcacggtggagatctctgtcaccagcca

SEQ ID NO: 263470 - DNA, 75 bp, synthetic construct
  source 1..75: mol_type = other DNA
gccagcatcaacagcagcagccagagccgggatgtgacgtttatcgccgatgtcagaacggcgcagatcgcggat

SEQ ID NO: 263471 - DNA, 75 bp, synthetic construct
  source 1..75: mol_type = other DNA
aaaacgcatacaccgctggcgagactataaccgtcgccgtgacgctgaaagacgcgcacggtaacctggttgaag

SEQ ID NO: 263472 - DNA, 75 bp, synthetic construct
  source 1..75: mol_type = other DNA
cagtgtcaccagccagacggcggggatcagtactgtcactgcatccatcaacaacagcagcctgagccgggacgt

SEQ ID NO: 263473 - DNA, 75 bp, synthetic construct
  source 1..75: mol_type = other DNA
tacgctggttggcggttgtattgggctaattttatatttgttgtcgcagctcccggccttgttccccctcagcaa

SEQ ID NO: 263474 - DNA, 75 bp, synthetic construct
  source 1..75: mol_type = other DNA
aaacgcccgcgccggtggggagcctcggccccggctggaaagcgcccttcgatatccgcttacagatacgcgatg

SEQ ID NO: 263475 - DNA, 75 bp, synthetic construct
  source 1..75: mol_type = other DNA
atacgatgaatggggcaacctgctgaatgaagagaacccgcatcagctgcagcagcttatccgcttgccggggca

SEQ ID NO: 263476 - DNA, 75 bp, synthetic construct
  source 1..75: mol_type = other DNA
atcgataaaagaaatgtccggtcatgtcactgcaaacaaccataccttctccacggctaaattcccgagcgaagg

SEQ ID NO: 263477 - DNA, 75 bp, synthetic construct
  source 1..75: mol_type = other DNA
gcccgaccaaccgcacggcgtctatttctccagacgtcaacgatccggcattccgcaacatcacttttgacgggc

SEQ ID NO: 263478 - DNA, 75 bp, synthetic construct
  source 1..75: mol_type = other DNA
tacggtgcggcagtggtggtaatggcctttgacgaacagggccaggccgatacccgcgcacggaaaatcgagatt

SEQ ID NO: 263479 - DNA, 75 bp, synthetic construct
  source 1..75: mol_type = other DNA
cgccagcaagcagctgacctggagcgatgtcaacgcagttccggcgcgtaacgtgggcttattgctgggggccag

SEQ ID NO: 263480 - DNA, 75 bp, synthetic construct
  source 1..75: mol_type = other DNA
tcacgactgaagtctgcatcatccagctcgacgcagccctgttcgagtcggcgaagtgcgccctgattgcccaca

SEQ ID NO: 263481 - DNA, 75 bp, synthetic construct
  source 1..75: mol_type = other DNA
taatctttactggatcaccgacaaagagggaaagcctacgcggttcaggatgacgcctgagcagcgggaatactt

SEQ ID NO: 263482 - DNA, 75 bp, synthetic construct
  source 1..75: mol_type = other DNA
ccgtgaaaaggtgaagtacgcctacgacaagctgcccaaagaaatcagggctgcgaacccggcaagtaacgactc

SEQ ID NO: 263483 - DNA, 75 bp, synthetic construct
  source 1..75: mol_type = other DNA
agcgtgggtgttatggttgaaggcgaatacaccttcagcaccgctgagccggaagagatgacggtaatcagtggc

SEQ ID NO: 263484 - DNA, 75 bp, synthetic construct
  source 1..75: mol_type = other DNA
aacccattacaagcccactgccgcagatattcccgtggcgagcgataacccagcgcactatgcggatgccattcg

SEQ ID NO: 263485 - DNA, 75 bp, synthetic construct
  source 1..75: mol_type = other DNA
tccagtcacttagggaaggtgcgaataagcaggtcatttcttcccaagctgactcgctgattaaaatttctcgga

SEQ ID NO: 263486 - DNA, 75 bp, synthetic construct
  source 1..75: mol_type = other DNA
gaaagaacgtagtcgtgagggctacgaaaacgatttgcgctttacagacacgcctgaccatgccggttggataaa

SEQ ID NO: 263487 - DNA, 75 bp, synthetic construct
  source 1..75: mol_type = other DNA
aattgataccaaaattttgctgggccattcgaatcaaaaaatgaccgatatttacaacgacgcacgcggtaagga

SEQ ID NO: 263488 - DNA, 75 bp, synthetic construct
  source 1..75: mol_type = other DNA
cgtgacggcattatcgtctccacgcttggtcgcaacggctcaattcatcttggccgtccggcggacaagatcacc

SEQ ID NO: 263489 - DNA, 75 bp, synthetic construct
  source 1..75: mol_type = other DNA
tgagttgggggctataccagcgtctaccctcgttatatgcgctgttcctgatttcgttacttgggccgttggtta

SEQ ID NO: 263490 - DNA, 75 bp, synthetic construct
  source 1..75: mol_type = other DNA
attctgataggcttttattggaaaaatgcaggatttacttttccatcagaggatattggtgtcgttagtgggatt

SEQ ID NO: 263491 - DNA, 75 bp, synthetic construct
  source 1..75: mol_type = other DNA
ccagttccggaaatacaggctgatgtcgcgcaagcaattgaaaatctcaagcagaagttagtggaatgcaatcgc

SEQ ID NO: 263492 - DNA, 75 bp, synthetic construct
  source 1..75: mol_type = other DNA
aaaatgagatttgggaagtgctggggcatgtacctggagacagcgatgatatctttagtgttgccagttttgata

SEQ ID NO: 263493 - DNA, 75 bp, synthetic construct
  source 1..75: mol_type = other DNA
taaaggcacaaatggtgaatttggctatttgaaatctctggatagcgatgaaaatgagatttgggaagtgctggg

SEQ ID NO: 263494 - DNA, 75 bp, synthetic construct
  source 1..75: mol_type = other DNA
ccgattgggttaaatggggggtggaatttatataaatatccgctgaatccaataaattatgcagatcctcttggc

SEQ ID NO: 263495 - DNA, 75 bp, synthetic construct
  source 1..75: mol_type = other DNA
agcaggctacgcgcccgattgaagtgattgaaggcccgttgatggacggcatgaacgttgtcggcgatctgttcg

SEQ ID NO: 263496 - DNA, 75 bp, synthetic construct
  source 1..75: mol_type = other DNA
gagcaagcacaggccaccgagcaagcacaagtcgcggagcaagcacaggtcgcggagcaagcacaggtcgcagag

SEQ ID NO: 263497 - DNA, 75 bp, synthetic construct
  source 1..75: mol_type = other DNA
aaacattaaacccttcacagcaaatagctttcctgaatgagaggataaaagaatatgactcaagagaaaaactca

SEQ ID NO: 263498 - DNA, 75 bp, synthetic construct
  source 1..75: mol_type = other DNA
aagaagtagctgagtatttgaaggtaaatgagagaactatttaccgtctagcagcggtacataaaattcctgctt

SEQ ID NO: 263499 - DNA, 75 bp, synthetic construct
  source 1..75: mol_type = other DNA
tcacgaagtatttactctacgccgtataaaccttgccaataaagcgaaatggcgtgcggatgaacgggcaatttt

SEQ ID NO: 263500 - DNA, 75 bp, synthetic construct
  source 1..75: mol_type = other DNA
cattaccacccaaatcaatgcctgggctagaaataatcatcctttactgaaagaaagagcgcggcaagcgattga

SEQ ID NO: 263501 - DNA, 75 bp, synthetic construct
  source 1..75: mol_type = other DNA
cccggacaggctgcgtggttttctcgtgcactgctaccgtcacggtgtgtccgatatccacctgcagagcggcgg

SEQ ID NO: 263502 - DNA, 75 bp, synthetic construct
  source 1..75: mol_type = other DNA
aactgatgattgaatatgccagttgtgatggctgtggtttgtgtatcgcagcatgttcgagtgacgcgctacgcg

SEQ ID NO: 263503 - DNA, 75 bp, synthetic construct
  source 1..75: mol_type = other DNA
tgtgtgaatcctgtcagacagtgtaaacagtgcgtggatgtatgcccacgacaggcttgctttattgatgagtct

SEQ ID NO: 263504 - DNA, 75 bp, synthetic construct
  source 1..75: mol_type = other DNA
gcgcagtttcgtgtgcagtgcacgcagtgtgatttgtgtattaatgcctgtcccatgggcattctcaaccggcat

SEQ ID NO: 263505 - DNA, 75 bp, synthetic construct
  source 1..75: mol_type = other DNA
tcacagcaacctaaactcatccgcatcccgccatgccggaaacttttctctatattcccgtaacaccgccatcga

SEQ ID NO: 263506 - DNA, 75 bp, synthetic construct
  source 1..75: mol_type = other DNA
atgataaacgccgaccgctaccgctggtcatcccgatgctgttttatcacggtagccgtagtccttatccctgtc

SEQ ID NO: 263507 - DNA, 75 bp, synthetic construct
  source 1..75: mol_type = other DNA
taccttattacaatgattcccctcgtattgaaaagtgtttggatagtatatgttcacaaaccagacaagctattg

SEQ ID NO: 263508 - DNA, 75 bp, synthetic construct
  source 1..75: mol_type = other DNA
agccaccgtgcgtgccaaaacagaagctcggtttgaagtcgccgccgatctgaatacgcaacggggtgatttatg

SEQ ID NO: 263509 - DNA, 75 bp, synthetic construct
  source 1..75: mol_type = other DNA
agaagcgttattgatatatgtttgtcattgtctattttaatcatgacatctgcttatattggtagtaacctccca

SEQ ID NO: 263510 - DNA, 75 bp, synthetic construct
  source 1..75: mol_type = other DNA
ggaacataaattatcggatattctactgttgactatttgtgccgttatttctggtgcagaaggttgggaagatat

SEQ ID NO: 263511 - DNA, 75 bp, synthetic construct
  source 1..75: mol_type = other DNA
ctgttcaaatttcgcaaaccacttgagcctgaaatgatggctgacggtgatttgttccggttgaccgctatcaat

SEQ ID NO: 263512 - DNA, 75 bp, synthetic construct
  source 1..75: mol_type = other DNA
cctggcgtcgtcagcacagacctgactcatggttacactgatggccaggttatccggatcactggcgttaccggg

SEQ ID NO: 263513 - DNA, 75 bp, synthetic construct
  source 1..75: mol_type = other DNA
attaataaaattgcccgcattactgcggtgggcggtattgcagtaatgtgtctgaatttagtattgctgttataa

SEQ ID NO: 263514 - DNA, 75 bp, synthetic construct
  source 1..75: mol_type = other DNA
tttagaagtctttaatgcgctcaaacttgaactgaaccgccccgggtttcctggagagtgttttatctgtgaact

SEQ ID NO: 263515 - DNA, 75 bp, synthetic construct
  source 1..75: mol_type = other DNA
tggcatgtcgaccgagttgattgaaggacacatcagcgcaatgcgccgccgtctcgacagcagccgttttccagg

SEQ ID NO: 263516 - DNA, 75 bp, synthetic construct
  source 1..75: mol_type = other DNA
gggaggctgttggtgcctataatgcaggaacatctccgaaaaagaaaaaagaaagattaaagtacgcagaggata

SEQ ID NO: 263517 - DNA, 75 bp, synthetic construct
  source 1..75: mol_type = other DNA
tatccggatcactggcgttaccgggatgacgggtattaatgacgttcctctgaccgtgacggtactgtctcctca

SEQ ID NO: 263518 - DNA, 75 bp, synthetic construct
  source 1..75: mol_type = other DNA
ccgtttgcagttaaatatttcacaatcacttaatgactttggctcgctttatatctctggtacccatcaaaaata

SEQ ID NO: 263519 - DNA, 75 bp, synthetic construct
  source 1..75: mol_type = other DNA
ttgagtgggctgaacttaggaccgtggcgtttgcgaaatagtggagcgtggagttattcccgcggtaatggttac

SEQ ID NO: 263520 - DNA, 75 bp, synthetic construct
  source 1..75: mol_type = other DNA
agatgtattctcagcgtagggaggagttgaaaactattctgtcgacaggggcggattttgtaccagtggttggcg

SEQ ID NO: 263521 - DNA, 75 bp, synthetic construct
  source 1..75: mol_type = other DNA
actaaaatcccatcaatcgaaggcataaccgcatcttttcgtaccagttatgaagggtcgtttagacaacgtttc

SEQ ID NO: 263522 - DNA, 75 bp, synthetic construct
  source 1..75: mol_type = other DNA
tggttctcctggagcctacgggaaggctttttattaccagaatataccggagtctgtacctgtaacgattggctc

SEQ ID NO: 263523 - DNA, 75 bp, synthetic construct
  source 1..75: mol_type = other DNA
attcggcaaaatggttttattatctatcaaagctatgtttcccccggtgcttttgaaattacagatttgcacccg

SEQ ID NO: 263524 - DNA, 75 bp, synthetic construct
  source 1..75: mol_type = other DNA
ccagtcggcccgataccttgctggctgccggcttgacgcatgcgcacttggtggtgctgacgttcgcccatgccc

SEQ ID NO: 263525 - DNA, 75 bp, synthetic construct
  source 1..75: mol_type = other DNA
gtggcactaacgacatcgtcacgttctccactgagttcaaagtcggtgacgctagcaccatcgaagtgaacgaag

SEQ ID NO: 263526 - DNA, 75 bp, synthetic construct
  source 1..75: mol_type = other DNA
ataataagctgctctggtcatacgataccgtcagccagaaacacataatgaatatgacttttataaaggacggta

SEQ ID NO: 263527 - DNA, 75 bp, synthetic construct
  source 1..75: mol_type = other DNA
tagtcgaggtcctcgaggtatatttgcatttcactacgcgctacttagtgttatgaaaagcaactcttcagttga

SEQ ID NO: 263528 - DNA, 75 bp, synthetic construct
  source 1..75: mol_type = other DNA
tgagtcggtacagcgatacatcgtgaaaccgggagaagtccacgccgtaaggccgcacccgttgccgtcagggca

SEQ ID NO: 263529 - DNA, 75 bp, synthetic construct
  source 1..75: mol_type = other DNA
ttctggcacacaatctgagcagttataacgctgactattctttgtatgtcgtcgatggtgatgctgccaacttac

SEQ ID NO: 263530 - DNA, 75 bp, synthetic construct
  source 1..75: mol_type = other DNA
atgatcaaaacgcgtttttctcgctggctaacgttttttacgttcgccgctgccgtggcgctggcgctggcgcta

SEQ ID NO: 263531 - DNA, 75 bp, synthetic construct
  source 1..75: mol_type = other DNA
gctgaccttgagctcgagtcccgaaagctgtgcgttcggcgcctgaaaaacggcttcagtaccgtgcatccctta

SEQ ID NO: 263532 - DNA, 75 bp, synthetic construct
  source 1..75: mol_type = other DNA
cgctgccgtggcgctggcgctaccggcaaaagccaacacctggccgctgccgccagcgggcagtcgtctggttgg

SEQ ID NO: 263533 - DNA, 75 bp, synthetic construct
  source 1..75: mol_type = other DNA
tcgcgttttgcctacctgttaattcttaagcctgcgatggcagaattctgtcagcaatatccgggtatacagtta

SEQ ID NO: 263534 - DNA, 75 bp, synthetic construct
  source 1..75: mol_type = other DNA
gattgaggaaaatattcctaaattgaatcaaaagctagaagagtcaagggctgcttcagaggcgttgcaggcgct

SEQ ID NO: 263535 - DNA, 75 bp, synthetic construct
  source 1..75: mol_type = other DNA
attagaaacacaaattagttctttgatgttcaggctgtatgaattacaagaacaacttaatgtacaaaatgttgt

SEQ ID NO: 263536 - DNA, 75 bp, synthetic construct
  source 1..75: mol_type = other DNA
gcttacaacgtggcgtggcgcaagtccagctaccgcattcagcctacgcatattgcaatggatgccagcgacttt

SEQ ID NO: 263537 - DNA, 75 bp, synthetic construct
  source 1..75: mol_type = other DNA
cgcctgaatatctggaggacgcagtgctgcataatccattgcagagaatgccactcgagtgtccaaactttgaga

SEQ ID NO: 263538 - DNA, 75 bp, synthetic construct
  source 1..75: mol_type = other DNA
atacagttcaattttattttttaaacacaaaggcatcacattacttagattggatgtttttgatgacagaacaag

SEQ ID NO: 263539 - DNA, 75 bp, synthetic construct
  source 1..75: mol_type = other DNA
ctccagtcctccatcatttttttcaatatactcatctgagagatgcacatttttatagatgtaaactcatagaac

SEQ ID NO: 263540 - DNA, 75 bp, synthetic construct
  source 1..75: mol_type = other DNA
acgatcgatcacaaaatatccaatttaaataacgacctcgttagatatttttctgtattatctcagcagttctct

SEQ ID NO: 263541 - DNA, 75 bp, synthetic construct
  source 1..75: mol_type = other DNA
cggaaggccaattggtttagaggagctatcatcaggtgagaaacaattactaattattcttggcgaaactttatt

SEQ ID NO: 263542 - DNA, 75 bp, synthetic construct
  source 1..75: mol_type = other DNA
tgaaagcaatgactgagattggggaatatcacggcggtaatccggtgttagcacttcctcgcttaaaagaaaaag

SEQ ID NO: 263543 - DNA, 75 bp, synthetic construct
  source 1..75: mol_type = other DNA
ttaccgatgttgttcgccgtctgaagctgagggcggatggcgaagcggggataaacctcctgacccgcagcgtgg

SEQ ID NO: 263544 - DNA, 75 bp, synthetic construct
  source 1..75: mol_type = other DNA
cgctgaatgatgaaatccaaaatgttcgtgatgttgccgatgatgctggcattttaaatcatccacttctcaagg

SEQ ID NO: 263545 - DNA, 75 bp, synthetic construct
  source 1..75: mol_type = other DNA
ctcgcgccagggaagcccgacgcgaactggaagagattttccagcgtgaaatgcaacaagaacgacgccagctgg

SEQ ID NO: 263546 - DNA, 75 bp, synthetic construct
  source 1..75: mol_type = other DNA
ttgcaaacatatggcgactatgggcgaagcaagatgaaagagacttatacggtgaaggttgaaggcgtgaaagtc

SEQ ID NO: 263547 - DNA, 75 bp, synthetic construct
  source 1..75: mol_type = other DNA
gaaacgttgggtggcggatgatgccgacctgaaaattgccgaaaaaccccgccgtaccggtttaacctgggcgga

SEQ ID NO: 263548 - DNA, 75 bp, synthetic construct
  source 1..75: mol_type = other DNA
aaacagcaggagcaggtgctgttctggctttgcgatcgtctgccccgtcgtgacggtatcaaaatggatgcgcgg

SEQ ID NO: 263549 - DNA, 75 bp, synthetic construct
  source 1..75: mol_type = other DNA
aaatgacttacattctaatttagacaaaaaaattgattttgataaagaattcaacaaagaaaaagagaggcttat

SEQ ID NO: 263550 - DNA, 75 bp, synthetic construct
  source 1..75: mol_type = other DNA
cgtcagactcaggataaccaattttctacgttggggaaaaagaatgggcacatgaagtctattgacaacaaatcg

SEQ ID NO: 263551 - DNA, 75 bp, synthetic construct
  source 1..75: mol_type = other DNA
atggtcagcggtggtcacgctcaggcagaagagctgaatattgttccgcataagggaatgacaggtgagctgagg

SEQ ID NO: 263552 - DNA, 75 bp, synthetic construct
  source 1..75: mol_type = other DNA
ctgcaaacacgagcagagaattatctgagacatcgcaaagcagaagagaagattctgcgttcgaccgttgaggga

SEQ ID NO: 263553 - DNA, 75 bp, synthetic construct
  source 1..75: mol_type = other DNA
aaaaaaagaatcaatacgaaattaatatcaggtgttggtgcggtcttcgatttttatgccggtactataacacgt

SEQ ID NO: 263554 - DNA, 75 bp, synthetic construct
  source 1..75: mol_type = other DNA
cgccaatcattaattgattctgattttttaatccctgatggttcaggaatatgtttagcatcaaaattaatcaat

SEQ ID NO: 263555 - DNA, 75 bp, synthetic construct
  source 1..75: mol_type = other DNA
atccagggagtgaaaagtattcttttaacggctgggaaatatttaatagtaattttgaacggatgattaaagaaa

SEQ ID NO: 263556 - DNA, 75 bp, synthetic construct
  source 1..75: mol_type = other DNA
taatgatgggctggttattcgcgttctgtggcgtgtcatatctccaccgccgggtccgctgccgagttattcgcc

SEQ ID NO: 263557 - DNA, 75 bp, synthetic construct
  source 1..75: mol_type = other DNA
ggaagacactttcgccgaagcgattttaaggctgtatgacggtgaaactgtgcagtggaatataaaaacagagat

SEQ ID NO: 263558 - DNA, 75 bp, synthetic construct
  source 1..75: mol_type = other DNA
aaataaagttgcaatttgatattattaagagaacggatggctacatttccactactaataataaagccgctttac

SEQ ID NO: 263559 - DNA, 75 bp, synthetic construct
  source 1..75: mol_type = other DNA
ctcggttacacgctcgtctgactcaggaaaagctgggtgttcttgctggtattgaggaagaaactgcacgttctc

SEQ ID NO: 263560 - DNA, 75 bp, synthetic construct
  source 1..75: mol_type = other DNA
gcaaaggatcgacagaattcaaaagttacttgatgcaggtcgctgcgttagctatagaggacgtcctacggtgcg

SEQ ID NO: 263561 - DNA, 75 bp, synthetic construct
  source 1..75: mol_type = other DNA
cgtgaatcttttgatagagcttggcgggaatcacacgaagtaaataaaggtccatatattccaccagaaccactt

SEQ ID NO: 263562 - DNA, 75 bp, synthetic construct
  source 1..75: mol_type = other DNA
cccttaatggctcgcgcctttcgtcagcttaaatccgtacgtgatgtcgctgaacgttggttattaacttatccg

SEQ ID NO: 263563 - DNA, 75 bp, synthetic construct
  source 1..75: mol_type = other DNA
gaacaagaaagcattgaagatgttgaatactccgcgaatttacatccggaatctgcaatctatgcactgaccgca

SEQ ID NO: 263564 - DNA, 75 bp, synthetic construct
  source 1..75: mol_type = other DNA
attttcggacatgtacatacgcgcgaaggagatcggctttgaggtgttagctgatgaaatcatcgatctcgctga

SEQ ID NO: 263565 - DNA, 75 bp, synthetic construct
  source 1..75: mol_type = other DNA
ttagatcttgatttactacgtaattttaatggggtgccaggtttaaatagagataactttatttatatcagtgat

SEQ ID NO: 263566 - DNA, 75 bp, synthetic construct
  source 1..75: mol_type = other DNA
tcaatggggtgacaggtttaaacagagataactttatttatatcagtgatatatttttaaatataaaacaacgga

SEQ ID NO: 263567 - DNA, 75 bp, synthetic construct
  source 1..75: mol_type = other DNA
tgagcgcgaagacgccgctacggcaattcgctatctggctcatcatgggcatcagtcgttaatggaacaaattgc

SEQ ID NO: 263568 - DNA, 75 bp, synthetic construct
  source 1..75: mol_type = other DNA
atcacggactttattttgcggttttaggaccgttaattggtgttctgtttcttgtcctctacatattcttcgcaa

SEQ ID NO: 263569 - DNA, 75 bp, synthetic construct
  source 1..75: mol_type = other DNA
tatagagtagtgaattccgcctatttttcatggtttactatgcaaagttgtgaaatttataaaaataatgtgatc

SEQ ID NO: 263570 - DNA, 75 bp, synthetic construct
  source 1..75: mol_type = other DNA
tgacgccggacacaccgacattgcgcagtcattcatggcaatccgtcgcgcaaccaccgccagcggcaaccgccc

SEQ ID NO: 263571 - DNA, 75 bp, synthetic construct
  source 1..75: mol_type = other DNA
taatcaacccaagcatgccaggtttaattaaaataggtcgaacgctacgcgactcacgcatgcgtgcgcgtgaac

SEQ ID NO: 263572 - DNA, 75 bp, synthetic construct
  source 1..75: mol_type = other DNA
ttgtttctcttattgtcgattactacgggagttattcctgcattgttaaccggcgtgatggtcgcctgtctgccg

SEQ ID NO: 263573 - DNA, 75 bp, synthetic construct
  source 1..75: mol_type = other DNA
tggctggtggcataggtggcgtcgttatcaccgagatctattgtgcagttattgtacatattaagggcatggctt

SEQ ID NO: 263574 - DNA, 75 bp, synthetic construct
  source 1..75: mol_type = other DNA
tcctgacgccattaatatattaataaaagaagaatgtatcagtgaagtggaacacgcaacaaatttacatcctga

SEQ ID NO: 263575 - DNA, 75 bp, synthetic construct
  source 1..75: mol_type = other DNA
gccgttatcaccccggacggcaaccggagcgagacacagtacgatgcgtggggaaaggcggtcagcaccacgcag

SEQ ID NO: 263576 - DNA, 75 bp, synthetic construct
  source 1..75: mol_type = other DNA
tggagaactgtttaaaagggaagtttaaagaggtaaggccgcgttattctgtattgcctgatatattcacaccta

SEQ ID NO: 263577 - DNA, 75 bp, synthetic construct
  source 1..75: mol_type = other DNA
ttgtggtggccaagaccaacggggagaatcaaaaggagatggtctatgggggccaggtaaagcaagtaatgatac

SEQ ID NO: 263578 - DNA, 75 bp, synthetic construct
  source 1..75: mol_type = other DNA
tcgagcgtacaaccgcagcgattatcttgagcaacgacgtccaatgatgcaatggtggtctgactttgttaaagc

SEQ ID NO: 263579 - DNA, 75 bp, synthetic construct
  source 1..75: mol_type = other DNA
tcgttgataaacacaggtcgcctgtaatagaatggaaaaaacaaattgccaaacagaacgttatctatttatcag

SEQ ID NO: 263580 - DNA, 75 bp, synthetic construct
  source 1..75: mol_type = other DNA
gtcaccggtactacgatccgttgcaggggcggtatatcaccccggacccgatagggctggagggggggatggagt

SEQ ID NO: 263581 - DNA, 75 bp, synthetic construct
  source 1..75: mol_type = other DNA
gcgctttggcggcgtagacatccggaaaatgttattgttcacacggatcgtggcgggcagtattgctcagcagat

SEQ ID NO: 263582 - DNA, 75 bp, synthetic construct
  source 1..75: mol_type = other DNA
cctgtcagcctttactgtcggcgaccaactgctgtggggcgctgcagagccgctgcgccggatgcttcgtcagct

SEQ ID NO: 263583 - DNA, 75 bp, synthetic construct
  source 1..75: mol_type = other DNA
aacgcactgactcacctacatctgattaacgcatgtgaagtagtggaatattacggtcttccgacattgcccggc

SEQ ID NO: 263584 - DNA, 75 bp, synthetic construct
  source 1..75: mol_type = other DNA
gttcatcatcgtgtatgtggcagaaagagctcgtgtacgcatccttcgtgtacttcacacttcccgcaagatagc

SEQ ID NO: 263585 - DNA, 75 bp, synthetic construct
  source 1..75: mol_type = other DNA
cgcaaaccaccgacgccagtggattttatggcgcgacggtgaccagcggcggcgcgaaatggatgcacggcatgt

SEQ ID NO: 263586 - DNA, 75 bp, synthetic construct
  source 1..75: mol_type = other DNA
gtgtaccggttcagtggactaatggcgatgcggaaaagcgcatgacaggagctgactggttgacagcgattgaga

SEQ ID NO: 263587 - DNA, 75 bp, synthetic construct
  source 1..75: mol_type = other DNA
taccagagtgctatttctacacggttgatgatgattttgctcaggcagtgctggagcttcatgcccgttgggcaa

SEQ ID NO: 263588 - DNA, 75 bp, synthetic construct
  source 1..75: mol_type = other DNA
gtgacacgctgacaccgacaatggtgaccaccgtttcagacaagcgtgcaaacccaacctggacgccaacggcaa

SEQ ID NO: 263589 - DNA, 75 bp, synthetic construct
  source 1..75: mol_type = other DNA
ttggcatgcgggtaagttctggctgtattcgtctgcgggatgacgatatcaaaacactctttagccaggtcaccc

SEQ ID NO: 263590 - DNA, 75 bp, synthetic construct
  source 1..75: mol_type = other DNA
tccaaagcgcaggcgcaccagttccgccagtacattgtcgattttgctcgtgaggcggatgttgagctgaaaggc

SEQ ID NO: 263591 - DNA, 75 bp, synthetic construct
  source 1..75: mol_type = other DNA
gcgacgatgttctttgggcgggaagggtttatggatgcggtggaaagtgggcgcaaccagatctttctctctgct

SEQ ID NO: 263592 - DNA, 75 bp, synthetic construct
  source 1..75: mol_type = other DNA
atcagtcagatggagcaccacgctaacattgtcccctggcagatgctttgtgcacgcgttggcgcagagctgcgt

SEQ ID NO: 263593 - DNA, 75 bp, synthetic construct
  source 1..75: mol_type = other DNA
ataaacagtggaaactggatgatgtgtcctcagctatttttatgagtgcctccactggcactgttgcaaatagtc

SEQ ID NO: 263594 - DNA, 75 bp, synthetic construct
  source 1..75: mol_type = other DNA
atcacattgttttttcgaaggattttaatattgaaaaagatgtttttgactcgcttaaaaaattgttaacggcag

SEQ ID NO: 263595 - DNA, 75 bp, synthetic construct
  source 1..75: mol_type = other DNA
gacgtatcgtctgccatttttatgagtgcttccacgttgaaaagaaaactggcttctgagggtacgacattcagt

SEQ ID NO: 263596 - DNA, 75 bp, synthetic construct
  source 1..75: mol_type = other DNA
gactaccgtttcggacaagcgtgcaaacccaacctggacgccgactgcaaacatccgcgcccgttataaagccca

SEQ ID NO: 263597 - DNA, 75 bp, synthetic construct
  source 1..75: mol_type = other DNA
ctcagatttcacacagtgctgtcagtcgcatagcaacgccccggattgattttgaaatggcgctcgccgtgcgtc

SEQ ID NO: 263598 - DNA, 75 bp, synthetic construct
  source 1..75: mol_type = other DNA
tttaacatacctgcattatttcgggctttacctgctcctatgtggtacttttttgatttgtttaaatttagtgaa

SEQ ID NO: 263599 - DNA, 75 bp, synthetic construct
  source 1..75: mol_type = other DNA
gcgacgatgttcttcgggcgggaaggatttatggatgcggtggagagcgggcgcaaccagatctttctctcggcc

SEQ ID NO: 263600 - DNA, 75 bp, synthetic construct
  source 1..75: mol_type = other DNA
agagactttgccactcgggcaagttgtccgcggaagtattgccggacgtgaaggctggctcggttgccaacaagc

SEQ ID NO: 263601 - DNA, 75 bp, synthetic construct
  source 1..75: mol_type = other DNA
tgcgtggtggtggcaccgccagccgtgccaggcggtaagtttcgcattcttgagcgttaccagtggcgcgggatg

SEQ ID NO: 263602 - DNA, 75 bp, synthetic construct
  source 1..75: mol_type = other DNA
ggatcggttatgacccggcgaaaggtacgcagaacggcgacagcgccggatgcgtggtggtggcaccgccagccg

SEQ ID NO: 263603 - DNA, 75 bp, synthetic construct
  source 1..75: mol_type = other DNA
tgctgatgtgcgagttcgttgacgatctcgcatctgtgttcccgctcagcgaattgcaggcgtgcatggtggaca

SEQ ID NO: 263604 - DNA, 75 bp, synthetic construct
  source 1..75: mol_type = other DNA
ttttccacgccatccagcctgacccacagtgcttatccgttctggtccggcgcgttgttcaaccgtgggcgcaac

SEQ ID NO: 263605 - DNA, 75 bp, synthetic construct
  source 1..75: mol_type = other DNA
gcttctatgaacaggttaagcgtgaaaatccgccagtcgaaaccggagcatggaaagacgctgttgactgggtgc

SEQ ID NO: 263606 - DNA, 75 bp, synthetic construct
  source 1..75: mol_type = other DNA
tggccacctggcgataccgcgtgtgggtcaggaggtgattgtagacttcctcaacggcgatccggaccagccgat

SEQ ID NO: 263607 - DNA, 75 bp, synthetic construct
  source 1..75: mol_type = other DNA
tctgctattggctatggtgacaatagcatcgcaatggggacgggtagtaaaaccaatggaactggtgccattgct

SEQ ID NO: 263608 - DNA, 75 bp, synthetic construct
  source 1..75: mol_type = other DNA
cttttaccccgcgcgggactcgccaattattttgggaacacgaagtaaaagaatggttgtacagagcagaacgat

SEQ ID NO: 263609 - DNA, 75 bp, synthetic construct
  source 1..75: mol_type = other DNA
tggacatcgacctgtcccacagcaatctggctcccggcctgctgtgcgcagacgggcagtaccgccagatagtca

SEQ ID NO: 263610 - DNA, 75 bp, synthetic construct
  source 1..75: mol_type = other DNA
tgacgcagccctatttgaataaaagtgctgttaggctggtaaagcgtgagcttcgtcagcgtagcctttatcggc

SEQ ID NO: 263611 - DNA, 75 bp, synthetic construct
  source 1..75: mol_type = other DNA
gtcgcccgcattgctgaaatgctgggcgaaaaagttgcaaccgttcacagctggaagaaacgcgacaagtggggt

SEQ ID NO: 263612 - DNA, 75 bp, synthetic construct
  source 1..75: mol_type = other DNA
tgcggcagctgctgccgttggtggcacactgaatcccattcagaccaaacaaggggctttgttgaataaatcaga

SEQ ID NO: 263613 - DNA, 75 bp, synthetic construct
  source 1..75: mol_type = other DNA
ggtggacagcattgttgggctgaaactggactacgcaggaaaagacggctggagtgcgaacgccacgctggaagg

SEQ ID NO: 263614 - DNA, 75 bp, synthetic construct
  source 1..75: mol_type = other DNA
acagtgccctgaaacaggtcagcggtagccaggcgaccacggtattccgcgaagcgcgtgtgctaagcaaccgct

SEQ ID NO: 263615 - DNA, 75 bp, synthetic construct
  source 1..75: mol_type = other DNA
attcggattacctgggggatgaaaacagtctttacggcgtggttgttttgggtacaaacaacaccatcaatctcg

SEQ ID NO: 263616 - DNA, 75 bp, synthetic construct
  source 1..75: mol_type = other DNA
cagggatgatcgtaatgcgggttcatccctagactggccccctgaatctccagacaaccagtatcacttatttaa

SEQ ID NO: 263617 - DNA, 75 bp, synthetic construct
  source 1..75: mol_type = other DNA
tgtactaatagtgacacatataatgaaactgatgcaaatgttacactggcctactctggtggagatgtattggct

SEQ ID NO: 263618 - DNA, 75 bp, synthetic construct
  source 1..75: mol_type = other DNA
attcaactgactgatcatagttctctgttaaatgaagcgacaggtctcatttctataaatatcggtgagggtctg

SEQ ID NO: 263619 - DNA, 75 bp, synthetic construct
  source 1..75: mol_type = other DNA
gcattgcgtgatgtttcctttgaaatagcgaaaggagaatcagtaggtatcatcgggcaaaacggttcaggtaaa

SEQ ID NO: 263620 - DNA, 75 bp, synthetic construct
  source 1..75: mol_type = other DNA
tctatttctcataccaataatctatttcagtctattgcaaatctatctcaatacggcggaacagtggcagcagaa

SEQ ID NO: 263621 - DNA, 75 bp, synthetic construct
  source 1..75: mol_type = other DNA
ggtcttaattatgctaagaatacactacataatataaatcaaaattctgccatagcaacaaaatcatcctgtcag

SEQ ID NO: 263622 - DNA, 75 bp, synthetic construct
  source 1..75: mol_type = other DNA
actagcgacggttttatcgcagttaataacctggcaaactatggcgacgaaacgcttaacggcgacgttatagca

SEQ ID NO: 263623 - DNA, 75 bp, synthetic construct
  source 1..75: mol_type = other DNA
gccagcggttatccgcaatccgcacctttaccggcgaacaatgtgctgcaaatcgagcgtcatattcttggtact

SEQ ID NO: 263624 - DNA, 75 bp, synthetic construct
  source 1..75: mol_type = other DNA
atggcgcaagcctggacggcagatgatttcggtagcaacgaaagcaaagtgatagttgccgcaccggtgattgct

SEQ ID NO: 263625 - DNA, 75 bp, synthetic construct
  source 1..75: mol_type = other DNA
atgaagagaatattagaagaacattaaatgctaatataattgttgatataactaaagaaaaccaatctggttgga

SEQ ID NO: 263626 - DNA, 75 bp, synthetic construct
  source 1..75: mol_type = other DNA
atgaacaatttggttggaaaggcaccgtaaccaaccacaaaaaggcactcaaaaacggctttagtgtcattcagg

SEQ ID NO: 263627 - DNA, 75 bp, synthetic construct
  source 1..75: mol_type = other DNA
tgtcgatatttttgctgaacggctgtcggcagagaaaccaggctactacttgcataatggtaagtgggtgaaaat

SEQ ID NO: 263628 - DNA, 75 bp, synthetic construct
  source 1..75: mol_type = other DNA
ttgccgccgggcatgagatggcttcggaactgaaagcagaatgtggtgccgttgatatgcgcagtgtggcaaagt

SEQ ID NO: 263629 - DNA, 75 bp, synthetic construct
  source 1..75: mol_type = other DNA
acaggacgcacagaacgcaccacagcgaagcgattaaccgaccgtgaccgcgaggtcatggaatgttttcgcaat

SEQ ID NO: 263630 - DNA, 75 bp, synthetic construct
  source 1..75: mol_type = other DNA
ttttgctgcaattaaacgagtgcagattgtcaattatacagttgttctggggggcggattgcagttattgatgat

SEQ ID NO: 263631 - DNA, 75 bp, synthetic construct
  source 1..75: mol_type = other DNA
ttaatagttgcgatgaggattatttcggtgatatataaaaacaaccgtgataacaccagggttgacaactatttg

SEQ ID NO: 263632 - DNA, 75 bp, synthetic construct
  source 1..75: mol_type = other DNA
ggtactggcaaaagcccttgagcatgatgctgaatacacgaagcgaaaaggtctgctgatatacaaaatctggaa

SEQ ID NO: 263633 - DNA, 75 bp, synthetic construct
  source 1..75: mol_type = other DNA
ttactgatgaagcctattgggattttaacgcttacttcctgatggctggcggcgcgttagcgggttcgaccgatg

SEQ ID NO: 263634 - DNA, 75 bp, synthetic construct
  source 1..75: mol_type = other DNA
caatgttggttacagtaaaagtgtctcctgggggaatttcagcgtcaacttgcaacgtagctggaatgaggacgg

SEQ ID NO: 263635 - DNA, 75 bp, synthetic construct
  source 1..75: mol_type = other DNA
aatgaagatgggtatcatcttgcgggattccctgatgaattcccagcctggagagagtacccttggatagagttt

SEQ ID NO: 263636 - DNA, 75 bp, synthetic construct
  source 1..75: mol_type = other DNA
tcaccttggttttcatatcttctacgtcttatgctaatgatttttatagagcagactccagatcaccagatgaag

SEQ ID NO: 263637 - DNA, 75 bp, synthetic construct
  source 1..75: mol_type = other DNA
agcgacaaatgtgctatcgaaaaatgatttgatgaattttaaaaaactcttaaaacgcaggctggcgttaacgtt

SEQ ID NO: 263638 - DNA, 75 bp, synthetic construct
  source 1..75: mol_type = other DNA
agagtattttaaaactgacaaatttattattggatataatgaaaactcacttacttttaaaaaaagtaacgtcaa

SEQ ID NO: 263639 - DNA, 75 bp, synthetic construct
  source 1..75: mol_type = other DNA
aaagtggtaatgaaatatatatacatccatcagtactcattgacaaaagtgttaaagttaatgtgcagggtagcg

SEQ ID NO: 263640 - DNA, 75 bp, synthetic construct
  source 1..75: mol_type = other DNA
gcaggcgaatcgcttttctatgtgattgcatcagcgttgctgtcgactacggcttcttctgttctgtctctcagc

SEQ ID NO: 263641 - DNA, 75 bp, synthetic construct
  source 1..75: mol_type = other DNA
tcgcggcgtgtgggtggaaggaactgcgggcgtggcactgtttgagcgcaaactgggtaacgagctgaatgcagt

SEQ ID NO: 263642 - DNA, 75 bp, synthetic construct
  source 1..75: mol_type = other DNA
aactggcgcaaagcatcatcagggggatgtgggtggaagaagagggacgattccgtcagggggtgcatccaacac

SEQ ID NO: 263643 - DNA, 75 bp, synthetic construct
  source 1..75: mol_type = other DNA
cagcactggcgttgatggttcagcgacatgaggctgtagaaagatacgttgcgggcttgtgtgcgcttgttgatg

SEQ ID NO: 263644 - DNA, 75 bp, synthetic construct
  source 1..75: mol_type = other DNA
ttgcagattatgaattaaaaatgatccagtacttgaaaagaaagtataagataaaaaacataacaactccaaaaa

SEQ ID NO: 263645 - DNA, 75 bp, synthetic construct
  source 1..75: mol_type = other DNA
gtgattaataaaggtattaacaaacaaatattaaaaaatattaattgtcataaggttttgctgctaagaaatact

SEQ ID NO: 263646 - DNA, 75 bp, synthetic construct
  source 1..75: mol_type = other DNA
tttctaaattaccgattcgagtttcattttgcccgttctgtggtgaaagcattaaaacgtgggaaggggaggcaa

SEQ ID NO: 263647 - DNA, 75 bp, synthetic construct
  source 1..75: mol_type = other DNA
ccagcagtgtggaaattgtgttatccgtgccgtatgtcaccacatcagggcagatgatcacgtgtgtcaccatgc

SEQ ID NO: 263648 - DNA, 75 bp, synthetic construct
  source 1..75: mol_type = other DNA
gattacctggccctggagcggcagtttaatgtttttttgctgccgccggtccggcggaagaagaaagcatcctga

SEQ ID NO: 263649 - DNA, 75 bp, synthetic construct
  source 1..75: mol_type = other DNA
tagccgacgccgagcaggggtacatcatccagcaactggtggcggcgttatatcaatccgcagaaacagggacgc

SEQ ID NO: 263650 - DNA, 75 bp, synthetic construct
  source 1..75: mol_type = other DNA
gtaaccgcccctggtgatttacgtgaaggcctgtataaaggcggccttggtcgttatgtaaatggcgaatttgac

SEQ ID NO: 263651 - DNA, 75 bp, synthetic construct
  source 1..75: mol_type = other DNA
tatgtctcgcgtgctggattttacgtttcgacgctgccgaccttgtttacgcgcaatgtaccaacgcgttattac

SEQ ID NO: 263652 - DNA, 75 bp, synthetic construct
  source 1..75: mol_type = other DNA
aaaccggcgataacactctgacgttaatggataaaggttattactcactgggactgttaaatgcctggagcctgg

SEQ ID NO: 263653 - DNA, 75 bp, synthetic construct
  source 1..75: mol_type = other DNA
cactaggatgtaagttagattttaatgttgtcaaagataaaacatcatctccgacttcaaagtatttgattgaaa

SEQ ID NO: 263654 - DNA, 75 bp, synthetic construct
  source 1..75: mol_type = other DNA
tcacatttatacgggaaagttgcagtttttttgaattcttactttggggatgatcatggtattaattcaacagca

SEQ ID NO: 263655 - DNA, 75 bp, synthetic construct
  source 1..75: mol_type = other DNA
gctctaaagagtatagagcattatcgtgagatacctgttcgagacctcttctttacactcgaaaaaacaattgca

SEQ ID NO: 263656 - DNA, 75 bp, synthetic construct
  source 1..75: mol_type = other DNA
tttcgacgcagccgaccttgtttacgcgcaatgtaccaacgcgttattacggctatgtcacccaaccctggtttg

SEQ ID NO: 263657 - DNA, 75 bp, synthetic construct
  source 1..75: mol_type = other DNA
aaagggttcgctctaagtatctagctgaacttactccattttctcctcatgatctgcgtagaagtgttgcgactg

SEQ ID NO: 263658 - DNA, 75 bp, synthetic construct
  source 1..75: mol_type = other DNA
gccagcaaaccagttctcctggcacccggtatcgcgcgcggtgggtaatatcaaaaaccagggagcggagttaat

SEQ ID NO: 263659 - DNA, 75 bp, synthetic construct
  source 1..75: mol_type = other DNA
caaaactgctgcaggtggattcccggaagatattaatattaaagttgattgtgcgacaggtaatgcaacggctca

SEQ ID NO: 263660 - DNA, 75 bp, synthetic construct
  source 1..75: mol_type = other DNA
ggagacatcacgtacttacgtacagatgaaggctggctgtatctggcagtggtcattgacctgtggtcacgtgcc

SEQ ID NO: 263661 - DNA, 75 bp, synthetic construct
  source 1..75: mol_type = other DNA
aaagctgaaaagctggccgagaccgacaggcgcgatgccaagcagaacgaggagctcagcaccttgctgtcgtcc

SEQ ID NO: 263662 - DNA, 75 bp, synthetic construct
  source 1..75: mol_type = other DNA
tcgattatttccggcgtcgggcgggcggctgagtttggcgtgctggtgcgggacgccgacgcgctgcaacgcgcc

SEQ ID NO: 263663 - DNA, 75 bp, synthetic construct
  source 1..75: mol_type = other DNA
gatttctcatggctggctaaatatgatagcgattatggttattataataaaaaatcattttctacagatatttca

SEQ ID NO: 263664 - DNA, 75 bp, synthetic construct
  source 1..75: mol_type = other DNA
cacaggacgctacgacagcacaaaaaggaattgtccagctcagtagtgcaaccaacagcacatctgaaacgcttg

SEQ ID NO: 263665 - DNA, 75 bp, synthetic construct
  source 1..75: mol_type = other DNA
gttgcaatcggaaattatgcgactggtgtaaatattcaatgggattataccagtaatgccagcgtgactattcat

SEQ ID NO: 263666 - DNA, 75 bp, synthetic construct
  source 1..75: mol_type = other DNA
ttatgatggcggtgggttcacttatgtccagaattcacagtatcaagtaagcccggagacttcttcctatagatc

SEQ ID NO: 263667 - DNA, 75 bp, synthetic construct
  source 1..75: mol_type = other DNA
ctaataataaaattaatgaagattccatagaaaaaattttattagaagggaatattgacttttggaaaaaaactg

SEQ ID NO: 263668 - DNA, 75 bp, synthetic construct
  source 1..75: mol_type = other DNA
ccttttcgcatccaaacatattcccctgtcactaaaagtaaaattgaaaattttgcaataaaagatggtgcacaa

SEQ ID NO: 263669 - DNA, 75 bp, synthetic construct
  source 1..75: mol_type = other DNA
atttctatgaccgaaagaaactttattctagaaaaaggtcaaacaacttctgatttagaaacattgaagtacgaa

SEQ ID NO: 263670 - DNA, 75 bp, synthetic construct
  source 1..75: mol_type = other DNA
ctccgccgatgcgggttatcgtggcgcagagaaacgggatgagctgaaggaccgtgatgtggactggttcatcgc

SEQ ID NO: 263671 - DNA, 75 bp, synthetic construct
  source 1..75: mol_type = other DNA
acagtgagttttccagtaaacgtcgcctgacgaggaaagaaattttcttatcccggatggatactctgctgccgt

SEQ ID NO: 263672 - DNA, 75 bp, synthetic construct
  source 1..75: mol_type = other DNA
caaaggtatttcaatggttcccaaaactttagccacatcacctatgtatagagactctgtaaaaattcacaacat

SEQ ID NO: 263673 - DNA, 75 bp, synthetic construct
  source 1..75: mol_type = other DNA
gagatggctatggttttgaggaaggctgggcagaagtttatacctcgaaaaatcttccaccagaaagctacccag

SEQ ID NO: 263674 - DNA, 75 bp, synthetic construct
  source 1..75: mol_type = other DNA
attatattttgtatttaatactgattatgtaaatactgacaaaacagtactcttaattgaaatgatgtcaaagct

SEQ ID NO: 263675 - DNA, 75 bp, synthetic construct
  source 1..75: mol_type = other DNA
agcagccacctctgcatccaccgcgaccacgaaagcgtcagaagctgcctcctcagccagggatgcgtcggcttc

SEQ ID NO: 263676 - DNA, 75 bp, synthetic construct
  source 1..75: mol_type = other DNA
cctcagcaattaattcatcaccatttaagattgcaccagagaaagagcaagatcttaaaacgatagttgacgaca

SEQ ID NO: 263677 - DNA, 75 bp, synthetic construct
  source 1..75: mol_type = other DNA
tttatcacaatgcgtctgtaatactcgctaactcagagtatgttaagacaactttttcacggataaattcaaatc

SEQ ID NO: 263678 - DNA, 75 bp, synthetic construct
  source 1..75: mol_type = other DNA
tgttctggttagtacaaaaaggtaaatcgcctagcgctttgatatttggtacgttagctcttggagtcgtgggac

SEQ ID NO: 263679 - DNA, 75 bp, synthetic construct
  source 1..75: mol_type = other DNA
gctgataaacagctttgaaagtcgttataacgccgctgaacagggcgtggttgagttcaccattaatgtcacgcc

SEQ ID NO: 263680 - DNA, 75 bp, synthetic construct
  source 1..75: mol_type = other DNA
gaatttacgttcagtgtacttgtgatgggggatgatgttcagacgcagcgaaatcgtctgcgtgatgcccttcgt

SEQ ID NO: 263681 - DNA, 75 bp, synthetic construct
  source 1..75: mol_type = other DNA
gggggatcaattactggtgaagctatcgggaatgtaacaaaaggaacactagatgaagttgataaatccattaaa

SEQ ID NO: 263682 - DNA, 75 bp, synthetic construct
  source 1..75: mol_type = other DNA
tgttctggctggtacaaaaaggtaaatcgcccagtgcgctgatattttgcacgctagctcttggtgttgtgggac

SEQ ID NO: 263683 - DNA, 75 bp, synthetic construct
  source 1..75: mol_type = other DNA
tttgagcaaacattgacggggctgacgctcggtatcgatagtcgtttctcccgtgaagaaagcagcacaactcag

SEQ ID NO: 263684 - DNA, 75 bp, synthetic construct
  source 1..75: mol_type = other DNA
ggcaacaccaaaggcggtgaaagcggtgaatgataatgcaaatagccgcgttccatctgaacgtaaggtgaatgg

SEQ ID NO: 263685 - DNA, 75 bp, synthetic construct
  source 1..75: mol_type = other DNA
acgccattgaccatatgaccatgatgcctttgacgttaggtattggtgctgcgatctctctgcaaggtagcattg

SEQ ID NO: 263686 - DNA, 75 bp, synthetic construct
  source 1..75: mol_type = other DNA
tgcccatcctaagctttttacatttccacttgggttggcaattgcgatggaggagaataaagaaaaaccagaaac

SEQ ID NO: 263687 - DNA, 75 bp, synthetic construct
  source 1..75: mol_type = other DNA
acacagataccaatgaaaaactgactgtctcacctgataccgagtatcaagataaagaaatcagttctactatca

SEQ ID NO: 263688 - DNA, 75 bp, synthetic construct
  source 1..75: mol_type = other DNA
atatctcgtctgagggggacctgaatgaagaggagtttctccatttcttaatttatggaggagataccgctgtaa

SEQ ID NO: 263689 - DNA, 75 bp, synthetic construct
  source 1..75: mol_type = other DNA
gttgaacatgtgccagacgttggcacagcattgctttggcaaatccctcccttcgtttccccgcgataatatgac

SEQ ID NO: 263690 - DNA, 75 bp, synthetic construct
  source 1..75: mol_type = other DNA
tgaactgcgtcagtatattgaagagctggaaagtgcgctgggtgtatccggacggcgtcgcggcccggcaggagt

SEQ ID NO: 263691 - DNA, 75 bp, synthetic construct
  source 1..75: mol_type = other DNA
acacactgatactcagtgataacggcggcagaagcctgtattttgagcacctgtatcccggtgaggacggttaca

SEQ ID NO: 263692 - DNA, 75 bp, synthetic construct
  source 1..75: mol_type = other DNA
gcattatgtaatcatatagataaagaagcattagtagaagatgattattatatttctatatgtagaatagaaccc

SEQ ID NO: 263693 - DNA, 75 bp, synthetic construct
  source 1..75: mol_type = other DNA
agaaaacgacaatgaccgggaggttttggcattaattattcatgatattaatgcgcaaaacgcactgccggagga

SEQ ID NO: 263694 - DNA, 75 bp, synthetic construct
  source 1..75: mol_type = other DNA
tacaaatgccggtaagtttcacggttgtggtcatgacggacacactgccacgttattgtttgctgctgagtggct

SEQ ID NO: 263695 - DNA, 75 bp, synthetic construct
  source 1..75: mol_type = other DNA
caggggaacttatttttttatcggtgcaggtgaaggctgcccggtacataatccagggtatgactttaatgatga

SEQ ID NO: 263696 - DNA, 75 bp, synthetic construct
  source 1..75: mol_type = other DNA
cgactcaaaagatggtttcatcgttttacgatgggcatcgcaaagtaaaaatgtccagcaaagagctgcgtaatt

SEQ ID NO: 263697 - DNA, 75 bp, synthetic construct
  source 1..75: mol_type = other DNA
gatatcacctcacatgcgaagcgcattattttctctggctttttcaatgccggtgcccaactgcaactggaagag

SEQ ID NO: 263698 - DNA, 75 bp, synthetic construct
  source 1..75: mol_type = other DNA
cactgagtgtgatgctgtactgcagtattccggcgatggctgatcttctttccctgccgaaactgaatgacagca

SEQ ID NO: 263699 - DNA, 75 bp, synthetic construct
  source 1..75: mol_type = other DNA
cagaagagttgttgcgcggtggtcaggttatgcttaatgatggcgtgtttcgacgctacccctgtgatgccatct

SEQ ID NO: 263700 - DNA, 75 bp, synthetic construct
  source 1..75: mol_type = other DNA
gctgggtggaaatcgacaacaacatcgctgaaaatgccctgcgggcggtcagtctgggtcgtaaaaaacttcctg

SEQ ID NO: 263701 - DNA, 75 bp, synthetic construct
  source 1..75: mol_type = other DNA
cgctatgaccgccacggcaacctgctggcctggacggacggcaacggcgttgtctggacgatggaatacggcccg

SEQ ID NO: 263702 - DNA, 75 bp, synthetic construct
  source 1..75: mol_type = other DNA
tattggcgatggtcgtcgtgttagtgggcatacgggtttcctggatggggttcgtttatcacgtagtcaaataaa

SEQ ID NO: 263703 - DNA, 75 bp, synthetic construct
  source 1..75: mol_type = other DNA
cttaggattaaataaaggagcttcattatctaaaatgatgaatagctccagtgatctcatggggttgagaaggca

SEQ ID NO: 263704 - DNA, 75 bp, synthetic construct
  source 1..75: mol_type = other DNA
aaatcctacggaggaacagctgttggttggcttacgccgactcggtttcaccctcttatttgtacgatgtcggtc

SEQ ID NO: 263705 - DNA, 75 bp, synthetic construct
  source 1..75: mol_type = other DNA
tagagtataaagataaaagtaaactaaccgaaagtatttataagtttgtaaatgctctagatattgacttttcga

SEQ ID NO: 263706 - DNA, 75 bp, synthetic construct
  source 1..75: mol_type = other DNA
agcggcagacgaacagagaaacgctgcgaccggaagaaaatccgcttcacgtatctgtgggacggcgacagtatt

SEQ ID NO: 263707 - DNA, 75 bp, synthetic construct
  source 1..75: mol_type = other DNA
cccaaatgctacaaaacatatggctgaatatttgactcggaacggtctctcacattcaacttctgtagagagcca

SEQ ID NO: 263708 - DNA, 75 bp, synthetic construct
  source 1..75: mol_type = other DNA
agtgatacggcggttaacccgtatcacgcccagtacattctgcgccgccgtgatgattatctggagctgttcgac

SEQ ID NO: 263709 - DNA, 75 bp, synthetic construct
  source 1..75: mol_type = other DNA
aatacacaccgacgcgaaaagctcatctttatcactgcgaccaccggggactgccgctggcgcttatcagcgaag

SEQ ID NO: 263710 - DNA, 75 bp, synthetic construct
  source 1..75: mol_type = other DNA
atagtccaggtgtttaccatattatattggataataaagtgtacactggttcaggaaaaagtattctgaatcgat

SEQ ID NO: 263711 - DNA, 75 bp, synthetic construct
  source 1..75: mol_type = other DNA
gtgcaggttagtttttcttatacaggaggttgctatgtcaccctgggccagaccctccccctctccttcacccgt

SEQ ID NO: 263712 - DNA, 75 bp, synthetic construct
  source 1..75: mol_type = other DNA
tgtacatgctgggcgggatgagcgacaccgccagcaaccgcatcacgtttgagcgcgacagccagtaccggatca

SEQ ID NO: 263713 - DNA, 75 bp, synthetic construct
  source 1..75: mol_type = other DNA
gatattgcagaaaagtttgctccttattttcgtccggtctacgacgtgctggttcggcggttgggcgcttccttt

SEQ ID NO: 263714 - DNA, 75 bp, synthetic construct
  source 1..75: mol_type = other DNA
agtcgcgatacctcgccaatcctcgcgcgaaatgaagcgcaattgcactatctgaaggctattgagagtaagcaa

SEQ ID NO: 263715 - DNA, 75 bp, synthetic construct
  source 1..75: mol_type = other DNA
atggcattattagggtatgcaagagtatcaaccagccatcagaaactgacgagccagattactgaactcaacaca

SEQ ID NO: 263716 - DNA, 75 bp, synthetic construct
  source 1..75: mol_type = other DNA
tgtctgtacttacgacagaaattatagttttagccgtaagaatattattacttataaaaccaaatattaatactc

SEQ ID NO: 263717 - DNA, 75 bp, synthetic construct
  source 1..75: mol_type = other DNA
acattatgttttctcctcactgattttggctttaatttatctgctccatattggatagctaggaattcaaattat

SEQ ID NO: 263718 - DNA, 75 bp, synthetic construct
  source 1..75: mol_type = other DNA
cctaaaaagagcacaacccggaaatatacgttcatccttacggaaggaagcgaactggtggcccagactaaacca

SEQ ID NO: 263719 - DNA, 75 bp, synthetic construct
  source 1..75: mol_type = other DNA
gcagccgcaacaaccagttccgccacagcagcaatatcagcagccgcaacagccggttgcgccgcagccgcagta

SEQ ID NO: 263720 - DNA, 75 bp, synthetic construct
  source 1..75: mol_type = other DNA
ggaccttaagaaaattgagatttgtgcgaatgcacttaaccgttaccagtcagtaattaaaaacatgttaccaat

SEQ ID NO: 263721 - DNA, 75 bp, synthetic construct
  source 1..75: mol_type = other DNA
cagaagctatccacaataaaggggtaaaaaacacggttatcacgctcggtagcaagggctcgctcgcatttgatg

SEQ ID NO: 263722 - DNA, 75 bp, synthetic construct
  source 1..75: mol_type = other DNA
gagtcaattccgtgggatacgggaactcatccgctaagagccagaacttactcacgaggagtggctgtcgatccc

SEQ ID NO: 263723 - DNA, 75 bp, synthetic construct
  source 1..75: mol_type = other DNA
gttgactgggttgatgttggctttgttcttaaagattcatctcgcccattatggttaaaaaaatatatggcgaga

SEQ ID NO: 263724 - DNA, 75 bp, synthetic construct
  source 1..75: mol_type = other DNA
acgccattctgagttactccaccaactatctgaccgaaatgtacggcatgtcactggtggcagcgagctacatgg

SEQ ID NO: 263725 - DNA, 75 bp, synthetic construct
  source 1..75: mol_type = other DNA
tgccgatctgacgcgaggatcgctgcgtatcgccgtcactcccacctttacaagctactttatcggccctttaat

SEQ ID NO: 263726 - DNA, 75 bp, synthetic construct
  source 1..75: mol_type = other DNA
ttaaaaaatgcttgttggaaaggttaggctacctgaacacgcaaatatgcacttcatcgagtgttccgaccttac

SEQ ID NO: 263727 - DNA, 75 bp, synthetic construct
  source 1..75: mol_type = other DNA
tatcctaccaacgcagcttcgaataacgttcgttttataaatcttgatttgatgaaaggagctgaggcatttagt

SEQ ID NO: 263728 - DNA, 75 bp, synthetic construct
  source 1..75: mol_type = other DNA
ttatcagcacggaaggggcaacagaatggtgcgcagaatacgatgaatggggcaacctgctgaatgaagagaacc

SEQ ID NO: 263729 - DNA, 75 bp, synthetic construct
  source 1..75: mol_type = other DNA
cgaaaaacggcattccgtatgttgccggtattggtgcggggattgaggatgctgatggccagacgctgagcaata

SEQ ID NO: 263730 - DNA, 75 bp, synthetic construct
  source 1..75: mol_type = other DNA
tcgggcacgctgaataatgtcgtgatagcggagaactgcacgataaatggcacactgaaagcgggaaacatcatc

SEQ ID NO: 263731 - DNA, 75 bp, synthetic construct
  source 1..75: mol_type = other DNA
gttgaaacggtgggtattccaatccactggggctttgagggtgtcgcgcgtaaaggttatatcgctaacactctg

SEQ ID NO: 263732 - DNA, 75 bp, synthetic construct
  source 1..75: mol_type = other DNA
tttcggaataccagcgcggcgcactggctgcgcttaacgaagccaaaacactggcccttgcacacgcaacgttgg

SEQ ID NO: 263733 - DNA, 75 bp, synthetic construct
  source 1..75: mol_type = other DNA
aactactccgttatagagcattagatcagcaatactatgaaaaactgaacattaactatattcatcaagagtgct

SEQ ID NO: 263734 - DNA, 75 bp, synthetic construct
  source 1..75: mol_type = other DNA
ggccaaaatagagccaactttaataagttaatttcgattgcaacccaacataattatactatcaagcctacatct

SEQ ID NO: 263735 - DNA, 75 bp, synthetic construct
  source 1..75: mol_type = other DNA
gatccgattgggctgaaagggggatggaatttttatcagtatccgttgaatccgataactgatattgacccgttg

SEQ ID NO: 263736 - DNA, 75 bp, synthetic construct
  source 1..75: mol_type = other DNA
cgttgggctgggagcatatcaatcttaatggggatgatgtctggcgtaataatcttaagctgggtacagggaagt

SEQ ID NO: 263737 - DNA, 75 bp, synthetic construct
  source 1..75: mol_type = other DNA
ctgcacgtgaacatgaatcccgcagcatcgccatgctctttgaaccggatggccgcgatggagaaatcgcaggcg

SEQ ID NO: 263738 - DNA, 75 bp, synthetic construct
  source 1..75: mol_type = other DNA
atatacccgggaaggatgccctttatattctaagtgaggtagagtacatattgatatcacttaagaatattgcaa

SEQ ID NO: 263739 - DNA, 75 bp, synthetic construct
  source 1..75: mol_type = other DNA
gttgaaaaggcgttggaggatttagcaaccaatccttccgacccgaaattccttgccgaatatcagagtgcatta

SEQ ID NO: 263740 - DNA, 75 bp, synthetic construct
  source 1..75: mol_type = other DNA
cagtaactctattccgctggattattcgttactttacagcaatattttcgagttccaggtaaagtactttttccc

SEQ ID NO: 263741 - DNA, 75 bp, synthetic construct
  source 1..75: mol_type = other DNA
cgttgtgatttctgacttccctcccgtttcggtagaaaaattcaacctctgttcagtgatggcacaccatagacc

SEQ ID NO: 263742 - DNA, 75 bp, synthetic construct
  source 1..75: mol_type = other DNA
gtggcgcataaagctgccttacaggtaaatggcgtcagcattgctgtattggggaatggacttaataccattcat

SEQ ID NO: 263743 - DNA, 75 bp, synthetic construct
  source 1..75: mol_type = other DNA
atcttggagatgatgatatggatgatattgagagagaaatagaaaagataaaatgttgggagaagccgggtgatt

SEQ ID NO: 263744 - DNA, 75 bp, synthetic construct
  source 1..75: mol_type = other DNA
ggtgaacaggcgaaggcgcggcaccgtagcctggcggaggtgttgcaggaggacacgggtgtgacgctaccggcg

SEQ ID NO: 263745 - DNA, 75 bp, synthetic construct
  source 1..75: mol_type = other DNA
accagagacggggatgtctggcggggcagtggttgctacggatgggatatggaactattcagatgaacaggtgga

SEQ ID NO: 263746 - DNA, 75 bp, synthetic construct
  source 1..75: mol_type = other DNA
atgatggcaaaaattcacgaggtaaagctgcacgcaaaatattttgaccttgtgctggaaggacataaacgtgca

SEQ ID NO: 263747 - DNA, 75 bp, synthetic construct
  source 1..75: mol_type = other DNA
ttgttagctgaaatgtatctgtacggtacaaaagataccataaaagatgaaaatcatgcgctgcactggtacgaa

SEQ ID NO: 263748 - DNA, 75 bp, synthetic construct
  source 1..75: mol_type = other DNA
tacaggcgactcgtatgacaacgcgatggcggagagcatcaatggtctttacaaagcggacggaggtaatacacc

SEQ ID NO: 263749 - DNA, 75 bp, synthetic construct
  source 1..75: mol_type = other DNA
ttgatgccttggcaacactctcctttgcctatccacgccgtgctgagtacttttctggcgagctggaaaccttcc

SEQ ID NO: 263750 - DNA, 75 bp, synthetic construct
  source 1..75: mol_type = other DNA
agttgggcaggagcggcatatattgtctggctggcgtggaaaatcgctaccagtccaacaaaggaagacgggctt

SEQ ID NO: 263751 - DNA, 75 bp, synthetic construct
  source 1..75: mol_type = other DNA
cgcctttatcatgcaatccaacacattgcacagactcaacagcactatttcagccgactactgcgccgctgtatt

SEQ ID NO: 263752 - DNA, 75 bp, synthetic construct
  source 1..75: mol_type = other DNA
gttggttgtgagacaaatgaatcaggaatatcggcagcatatggcacaacgaagatctatactacagatactaga

SEQ ID NO: 263753 - DNA, 75 bp, synthetic construct
  source 1..75: mol_type = other DNA
acgccaaagagatcctgatgaagcgcaaaatcactgccgcaccggtggtggatgaaaacggcaaactcaccggcg

SEQ ID NO: 263754 - DNA, 75 bp, synthetic construct
  source 1..75: mol_type = other DNA
ccgacgtcaccgctgggcctggcggcgaaagcggtgctggatatttcggtagaacgcgaagcctgtccgatgcac

SEQ ID NO: 263755 - DNA, 75 bp, synthetic construct
  source 1..75: mol_type = other DNA
tcatgcatatcaacatgctgcatgagcacacgcacgcactatcaaaccgttactgcgctgctgtcttcagctatc

SEQ ID NO: 263756 - DNA, 75 bp, synthetic construct
  source 1..75: mol_type = other DNA
gtctcacaggctttattccaggcaaggttgatcatgcactccatcacggggctgtcactttcctcaacaaaggag

SEQ ID NO: 263757 - DNA, 75 bp, synthetic construct
  source 1..75: mol_type = other DNA
gcatttcattttcactggcagtgattgacccggcagtggtacaccttttgagttgggcgggggcggcatatattg

SEQ ID NO: 263758 - DNA, 75 bp, synthetic construct
  source 1..75: mol_type = other DNA
gctgggcgctggcggggcatctgtttcagcgattgtttcgccagtatggtcgccagttaaatatcgtgctggcgc

SEQ ID NO: 263759 - DNA, 75 bp, synthetic construct
  source 1..75: mol_type = other DNA
ttgattgtgatgttactgtgtgcaggaatttcattttcactggctgttattgacccggcagcggtgcaccttttg

SEQ ID NO: 263760 - DNA, 75 bp, synthetic construct
  source 1..75: mol_type = other DNA
gcggtgctggatatctccgtagaacgcgaagcctgcccgatgcaccttgcgccgacctccagcaccgtcaatacc

SEQ ID NO: 263761 - DNA, 75 bp, synthetic construct
  source 1..75: mol_type = other DNA
gaagccgcacttgcccttagccgcgctcagcgcctgatggaaacccacaaactgactgaggctgatgctgatttg

SEQ ID NO: 263762 - DNA, 75 bp, synthetic construct
  source 1..75: mol_type = other DNA
gctgactgaggctgatactgatttgatggatatcaatgaagcatcgacccagaaagcgccatctcacgcaaagaa

SEQ ID NO: 263763 - DNA, 75 bp, synthetic construct
  source 1..75: mol_type = other DNA
aaacccggaacgatcttcactatgttaagggatactggcggcataaaaccccatgagcataagcgggctgtagct

SEQ ID NO: 263764 - DNA, 75 bp, synthetic construct
  source 1..75: mol_type = other DNA
gtctcggcactggcgaacggcacggtgaccatcaacgccagcgtcaccgatgccggaggaaacagcggcagcgcc

SEQ ID NO: 263765 - DNA, 75 bp, synthetic construct
  source 1..75: mol_type = other DNA
gtaagcgccctgaccgccagcaactacaccgttagcgcggcggtgagcgacaaagccggaaacccggcctcggtt

SEQ ID NO: 263766 - DNA, 75 bp, synthetic construct
  source 1..75: mol_type = other DNA
atcgttacaccatcggcaaatattcaaccgataatcgatgccacgaaagtcgaatggctcagattaggaaacgtt

SEQ ID NO: 263767 - DNA, 75 bp, synthetic construct
  source 1..75: mol_type = other DNA
gttaccttttgctatctaagcagcataaagatgaacaagaagttaaagatttcattatgaaagctttgactgtta

SEQ ID NO: 263768 - DNA, 75 bp, synthetic construct
  source 1..75: mol_type = other DNA
ggatactggcggcataaaaccccatgagcgtaagcgggctgaaccgccccgggtttcctggagagtgttttatct

SEQ ID NO: 263769 - DNA, 75 bp, synthetic construct
  source 1..75: mol_type = other DNA
atttagttataaaaataaacctcattttttaaattattataatgctgctcttttttctttttttactgagctatt

SEQ ID NO: 263770 - DNA, 75 bp, synthetic construct
  source 1..75: mol_type = other DNA
tagagatatatcttccttaccgggggtttatatcatatcacctgagaaaaatgcaaaagagttggtgattgactc

SEQ ID NO: 263771 - DNA, 75 bp, synthetic construct
  source 1..75: mol_type = other DNA
ggaagaatcaccatgatcgaggctctattaagaaaacttataaatggttatgaagttggccctgcaacagcaatt

SEQ ID NO: 263772 - DNA, 75 bp, synthetic construct
  source 1..75: mol_type = other DNA
caccgccgaaaccgggcagacggtgaccgtcacccttaacggcgcaacctacaccggcaatgtgcaggcggacgg

SEQ ID NO: 263773 - DNA, 75 bp, synthetic construct
  source 1..75: mol_type = other DNA
atggagcgtcggcgttccggcggcagatgtcagcgcctggcctgcggggacggtcacaattacggcgagcggcaa

SEQ ID NO: 263774 - DNA, 75 bp, synthetic construct
  source 1..75: mol_type = other DNA
tgaaagcgggcaaaccgtcaccgtcactttgggcggcaaaacctacactgcaagcgtcgccgccaacggtagctg

SEQ ID NO: 263775 - DNA, 75 bp, synthetic construct
  source 1..75: mol_type = other DNA
ggctgccatctcaggatgtgatcgacagggtgcaggctcacattgacgatgtccggcctgttacagcaaaaaaca

SEQ ID NO: 263776 - DNA, 75 bp, synthetic construct
  source 1..75: mol_type = other DNA
acaactattctctgtagcgactggtcgtctcgataaacttctctcagtggtgagtattatcctcggttcatctgt

SEQ ID NO: 263777 - DNA, 75 bp, synthetic construct
  source 1..75: mol_type = other DNA
ctgttgcggcgattgtctctctcgcagcggcactctggccgcagacgctgcgcacaagtcctgaagcgcagctga

SEQ ID NO: 263778 - DNA, 75 bp, synthetic construct
  source 1..75: mol_type = other DNA
gtcatatatcaggaactacaattgatatgggaagtggtaatgatactgttttagccttggggcatgagaatggtg

SEQ ID NO: 263779 - DNA, 75 bp, synthetic construct
  source 1..75: mol_type = other DNA
cacccttagccgcaagcagatgaaacacgacttcgcagacgataccacgctggaagtggtcaacaccgccattga

SEQ ID NO: 263780 - DNA, 75 bp, synthetic construct
  source 1..75: mol_type = other DNA
caccctgacccgccagcaactgaaacacgaattcgctgacgatacagtgctggaagcggtcaacaccgccattga

SEQ ID NO: 263781 - DNA, 75 bp, synthetic construct
  source 1..75: mol_type = other DNA
cagatagcatttgctcattatttattgttaatagtaatgtggcatcaatctccttggggaatgaatccttttcaa

SEQ ID NO: 263782 - DNA, 75 bp, synthetic construct
  source 1..75: mol_type = other DNA
ttgcaggaatagcattggcattagcctttgctatctcaacaattgtaaaatacaactcattactttctgacaaat

SEQ ID NO: 263783 - DNA, 75 bp, synthetic construct
  source 1..75: mol_type = other DNA
tgggtaagaccaatggttgtcgatactggtgcaggtgacgataccatcgtgactggtcgtgatttggggattgga

SEQ ID NO: 263784 - DNA, 75 bp, synthetic construct
  source 1..75: mol_type = other DNA
ggatcagcgatgggcaccgggtgaaatgacgctggctgccacattcgacgggaatgcacagggtaacagcggtga

SEQ ID NO: 263785 - DNA, 75 bp, synthetic construct
  source 1..75: mol_type = other DNA
agaatgcagggggagaaacacgatacatatataacggtatttccggaagtgatgttattacagtaggcaaaagct

SEQ ID NO: 263786 - DNA, 75 bp, synthetic construct
  source 1..75: mol_type = other DNA
gaagagaacgcagaagctatcactgcgttaaatcaattagctgatgaaaccggatgtttctctgaggagtaccgg

SEQ ID NO: 263787 - DNA, 75 bp, synthetic construct
  source 1..75: mol_type = other DNA
atcaaccattcctctctataaagaaaaggactataaagaaactatcgacaatatatataaaaaactagaaattgt

SEQ ID NO: 263788 - DNA, 75 bp, synthetic construct
  source 1..75: mol_type = other DNA
agggaattaacgtcgagaagaaattttcgcgctggctggagaagctgctgcgcgagcaactgattgtgctcgatg

SEQ ID NO: 263789 - DNA, 75 bp, synthetic construct
  source 1..75: mol_type = other DNA
atgacctgcagtatgagtttacctacaaaataacacgctctccagaaattctggcgcaaaaactcgtccagttta

SEQ ID NO: 263790 - DNA, 75 bp, synthetic construct
  source 1..75: mol_type = other DNA
ggcaaattgtaaaacaattagttttgaaaagtttaaagttatttttgatggtgttgaggaaattattgcagatta

SEQ ID NO: 263791 - DNA, 75 bp, synthetic construct
  source 1..75: mol_type = other DNA
aagaactcatagttgaggcggtaaaagatattgaaagtggcaagatggaaattgacactaatcaattgaaagatc

SEQ ID NO: 263792 - DNA, 75 bp, synthetic construct
  source 1..75: mol_type = other DNA
gtttgcgttaagtaccatcgggctgtcagttgcgaatgctttaccctgcattgtattgttgtttgtcgcttcatt

SEQ ID NO: 263793 - DNA, 75 bp, synthetic construct
  source 1..75: mol_type = other DNA
ttcgcgctggctggagaagctgctgcgcgagcaactgattgtgctcgatggagaacagatccggctcccggatac

SEQ ID NO: 263794 - DNA, 75 bp, synthetic construct
  source 1..75: mol_type = other DNA
ctgcgtaaactcgcgccgctttctgccgctctggagcaaagcgatctggcaattagctggtatatgtttcacatc

SEQ ID NO: 263795 - DNA, 75 bp, synthetic construct
  source 1..75: mol_type = other DNA
agtgaagaaaccggacgccaggcggctaatctgataatccgcaaattaaaatctccggaactgcaaattcaaaga

SEQ ID NO: 263796 - DNA, 75 bp, synthetic construct
  source 1..75: mol_type = other DNA
tgaagaaagtcagcataattgatgttgccaaaagcgcaggagtctcagtctctactgtgtcgctggtcctgcgcc

SEQ ID NO: 263797 - DNA, 75 bp, synthetic construct
  source 1..75: mol_type = other DNA
ggtgttagtgctggaagatgaagccgcggtgcgccagaccatctgcgaacagttgcacctgctgggctatttgac

SEQ ID NO: 263798 - DNA, 75 bp, synthetic construct
  source 1..75: mol_type = other DNA
cctggaatcagcgcgttactcgcagcagtgggcagcgtcaggacatggtggcactggaggtcatcgatcatggct

SEQ ID NO: 263799 - DNA, 75 bp, synthetic construct
  source 1..75: mol_type = other DNA
gcggcgtgatgagttgggtgaactggcgcgcgcctttaacgtttttgcccgcaataccgcgtcactcgaacgaac

SEQ ID NO: 263800 - DNA, 75 bp, synthetic construct
  source 1..75: mol_type = other DNA
cgtctggtctggctggcatcgccaccagcagggcaaaaacagtattgagttagggatgatactgggcgcgcgtga

SEQ ID NO: 263801 - DNA, 75 bp, synthetic construct
  source 1..75: mol_type = other DNA
cggacaaaagtcaggtaacgcaatgagaaaatccgcagaatatctgcagctttttgatgatgcagaaaaatattc

SEQ ID NO: 263802 - DNA, 75 bp, synthetic construct
  source 1..75: mol_type = other DNA
ggatccggtagaaaacgcctcgtttatgccgtggctggtggggactgcgctgatgcactcactggcggtcactga

SEQ ID NO: 263803 - DNA, 75 bp, synthetic construct
  source 1..75: mol_type = other DNA
cggttgatggcttgtttttcaaaacatttaaaattgaaaattttgtgagggatttcaataaactgttaaaatcat

SEQ ID NO: 263804 - DNA, 75 bp, synthetic construct
  source 1..75: mol_type = other DNA
tggtcctccggatacataaacagaagagggctcgccagtctgcttggtaacgatagcctgcaaccggaagtcggt

SEQ ID NO: 263805 - DNA, 75 bp, synthetic construct
  source 1..75: mol_type = other DNA
cgaaaaaggggatagtacagctcagcagtgcgaccaacagcacgtcagaaacgcttgctgcaaccccaaatgcca

SEQ ID NO: 263806 - DNA, 75 bp, synthetic construct
  source 1..75: mol_type = other DNA
ctcaaaacgcgaggcggccaccagtgccggtgcggcgaaaacgtcagaaacgaatgcctcagccagtgccaccgc

SEQ ID NO: 263807 - DNA, 75 bp, synthetic construct
  source 1..75: mol_type = other DNA
attatagataatatccttcaaacggtaggtaatgactccaacttattgatagtgttttatgttcagataatgccc

SEQ ID NO: 263808 - DNA, 75 bp, synthetic construct
  source 1..75: mol_type = other DNA
cttcgagtgaaagccatcgagttataattgacaacattttgaaactaaagcaactgacgagaatttgtatgcgat

SEQ ID NO: 263809 - DNA, 75 bp, synthetic construct
  source 1..75: mol_type = other DNA
atcatacagcaggtggtgccctgccatatcgttaattcttcagaagcgttcgtacaacttgctcgccagggcacc

SEQ ID NO: 263810 - DNA, 75 bp, synthetic construct
  source 1..75: mol_type = other DNA
ataacctcagtggtgctttagatgcagcatacaaagcaaaatccgctttcggatcattaagtcgttggaatataa

SEQ ID NO: 263811 - DNA, 75 bp, synthetic construct
  source 1..75: mol_type = other DNA
cgggccatgctgatggcgatggagccgatatgggagagtgattttcatacgctctcatatgggcttccggcctga

SEQ ID NO: 263812 - DNA, 75 bp, synthetic construct
  source 1..75: mol_type = other DNA
catatcttatttgaacaggctaagatacacccaactgatatagcctctctctactactatagggcactagtccac

SEQ ID NO: 263813 - DNA, 75 bp, synthetic construct
  source 1..75: mol_type = other DNA
tatcgcccgagatatgaagccacagctgatacgctcacagacattgtcaccctgtggatttgggtgggtcaggag

SEQ ID NO: 263814 - DNA, 75 bp, synthetic construct
  source 1..75: mol_type = other DNA
tgtccgccagggggatgaactggatgtcccggcacaagttagtgaaaaaaaattaaccccgccgccgggtaatag

SEQ ID NO: 263815 - DNA, 75 bp, synthetic construct
  source 1..75: mol_type = other DNA
gccagataacctggtcttcagccagcatgcactccaccgtacggatgatcgcactcaaacgaaccacggtatcgg

SEQ ID NO: 263816 - DNA, 75 bp, synthetic construct
  source 1..75: mol_type = other DNA
tcaccacgcagccggatggcacggtggagatcagtgtcaccagccagaccgccggaaccagtgtgatcaccgcca

SEQ ID NO: 263817 - DNA, 75 bp, synthetic construct
  source 1..75: mol_type = other DNA
aacggcgcaacggttgctccgacggtcatcacagggccggacggcacggtggagatctcagtcaccagccagacc

SEQ ID NO: 263818 - DNA, 75 bp, synthetic construct
  source 1..75: mol_type = other DNA
catctgatgcgccgtgatgacgccatcccgcaggtggcgttaaccgccagcgtgatggatgcgatgctggaactc

SEQ ID NO: 263819 - DNA, 75 bp, synthetic construct
  source 1..75: mol_type = other DNA
tgggatttcccctcactggtctttgcgcggctgatgaccggtgtcgggctgggggcgcgttgccgaatcttatcg

SEQ ID NO: 263820 - DNA, 75 bp, synthetic construct
  source 1..75: mol_type = other DNA
gcaactgacgttgccgggctggaaaactaagcattctgataagttcaatatagcagcggataaaacatcggccaa

SEQ ID NO: 263821 - DNA, 75 bp, synthetic construct
  source 1..75: mol_type = other DNA
cggaacgtgacggtaaggatccacaattgcaggttgctgaagtggcgcaacgaggcgggttgttactttctcagg

SEQ ID NO: 263822 - DNA, 75 bp, synthetic construct
  source 1..75: mol_type = other DNA
tggtgagaaaattattgttaccgtaatgttccgggatgagtatggtaacccagtgcctgggctggcagcaaaatt

SEQ ID NO: 263823 - DNA, 75 bp, synthetic construct
  source 1..75: mol_type = other DNA
gcagacggtcagcgtgacggcaggcaacggtgcaacggtcgctccgacggtgattacagagccggacggcacggt

SEQ ID NO: 263824 - DNA, 75 bp, synthetic construct
  source 1..75: mol_type = other DNA
caaagcggaacacttttagcgcgcgatatggacagcgaacaggctgcgagtatggcgcgtggctgggtggcttct

SEQ ID NO: 263825 - DNA, 75 bp, synthetic construct
  source 1..75: mol_type = other DNA
gatacagatgaaaacggtattgctgcggttaatctgaccagcaatgaggcgaaactcaacaccgttgaggctgag

SEQ ID NO: 263826 - DNA, 75 bp, synthetic construct
  source 1..75: mol_type = other DNA
caggtcgcggagctggtggtgacgcaggacggctcagtggctgatggttcgacggcgaacatgctgcgggtgagg

SEQ ID NO: 263827 - DNA, 75 bp, synthetic construct
  source 1..75: mol_type = other DNA
caaaatattcactcgctgaattgtcatacaaggcgccgttgcagaagttttatcgcgagaacgatccgaccaaca

SEQ ID NO: 263828 - DNA, 75 bp, synthetic construct
  source 1..75: mol_type = other DNA
atacctacctgaaagacgagcaactgattgatgaagaaggacattgcagtccgataaaagatggcggatttattg

SEQ ID NO: 263829 - DNA, 75 bp, synthetic construct
  source 1..75: mol_type = other DNA
cagcagctcattcgcctgccgggtcagcagtatgatgaggagtccggcctgtattacaaccgccaccgctattat

SEQ ID NO: 263830 - DNA, 75 bp, synthetic construct
  source 1..75: mol_type = other DNA
gctacgggccgagccaccaggcaacggaagatgttgcgattatgcgcggtattccgggaatgacgattctcgatc

SEQ ID NO: 263831 - DNA, 75 bp, synthetic construct
  source 1..75: mol_type = other DNA
gatttgtcgaagtataccgatctgcatatttttgcgcaggctcatccggagcgttttttccagatggggatggct

SEQ ID NO: 263832 - DNA, 75 bp, synthetic construct
  source 1..75: mol_type = other DNA
ttacagcctgggtgacatttaacgaaacgcatgaagtgcttgaatttgatatggcaccgaatggcagccagcatt

SEQ ID NO: 263833 - DNA, 75 bp, synthetic construct
  source 1..75: mol_type = other DNA
gcgttcgggaatgcgctgaatggacagacggtcagcgtgatggcggacaacggcgcaacggttgccccgacggtg

SEQ ID NO: 263834 - DNA, 75 bp, synthetic construct
  source 1..75: mol_type = other DNA
gcgttcggtaatacgcttgccgggcagacggtcagcgtgacggcaggcaacggcgcaacggtcgctccgactgcc

SEQ ID NO: 263835 - DNA, 75 bp, synthetic construct
  source 1..75: mol_type = other DNA
acggtcactccgacggtcactacagagccggacggcacggtggagatcagtgtcaccagccagacggcgggagtc

SEQ ID NO: 263836 - DNA, 75 bp, synthetic construct
  source 1..75: mol_type = other DNA
aaaatccacctgtaccactgcgaccatcgcggcctgccgctggcccttatcagcaaggaagggacaacagaatgg

SEQ ID NO: 263837 - DNA, 75 bp, synthetic construct
  source 1..75: mol_type = other DNA
ccggtggtggatgaaaacggcaaactcaccggcgcaattaacctgcaggatttctatcaggccgggattatttaa

SEQ ID NO: 263838 - DNA, 75 bp, synthetic construct
  source 1..75: mol_type = other DNA
aaatcagtattttgattggcctggtcgcggtgaatttactgatttggctaatttttcttgctggtcatgacggga

SEQ ID NO: 263839 - DNA, 75 bp, synthetic construct
  source 1..75: mol_type = other DNA
tgaattggatgcgctggacatccttacgttggtttcgcttattcatcgcaagctggatggcacacagaaaaaaat

SEQ ID NO: 263840 - DNA, 75 bp, synthetic construct
  source 1..75: mol_type = other DNA
gaacctactcattggtctattcggcgctgtgcgcaatccactggcccattcgcctaagaagaattggcccatgtc

SEQ ID NO: 263841 - DNA, 75 bp, synthetic construct
  source 1..75: mol_type = other DNA
aggctgcactcgaaagccgtgctgtgcatgcggaagttttgaactattgccgtgccgaacttcttgacgaaaact

SEQ ID NO: 263842 - DNA, 75 bp, synthetic construct
  source 1..75: mol_type = other DNA
gcgccattgccggggaaatagaaatcgcgatgaaggctattggtgtaccggttaattggactaatggcgatgcag

SEQ ID NO: 263843 - DNA, 75 bp, synthetic construct
  source 1..75: mol_type = other DNA
acgggccggccggaaatccgttaccgttacgacagcgacgggcgggtgacagaacagctaaacccggcaggctta

SEQ ID NO: 263844 - DNA, 75 bp, synthetic construct
  source 1..75: mol_type = other DNA
cctatacggcgctacgcggggcggcgtatctgctggcagacggcaccacggtcatcaactccaacattaatttcg

SEQ ID NO: 263845 - DNA, 75 bp, synthetic construct
  source 1..75: mol_type = other DNA
acagtaatggtcagatatcaatcctgattccgattgaaatgctacgaagtgcttatattgagcgcggcctacatc

SEQ ID NO: 263846 - DNA, 75 bp, synthetic construct
  source 1..75: mol_type = other DNA
aaactcatttataacaagtgtatttgttttttttgtattgttgcttatcttgacaacaaatagcaattttattcg

SEQ ID NO: 263847 - DNA, 75 bp, synthetic construct
  source 1..75: mol_type = other DNA
agctgattgagtgtggttctgaagtaatgacagtaacctatgcacaaacgttactggctgccgtggatgcccagg

SEQ ID NO: 263848 - DNA, 75 bp, synthetic construct
  source 1..75: mol_type = other DNA
ttctggccgcggggatgaccttcatcattttgaccggcgggatcgatctttccgtgggatcaattctcggcacca

SEQ ID NO: 263849 - DNA, 75 bp, synthetic construct
  source 1..75: mol_type = other DNA
cgctcaacaacggcatgaccttaatgggcgtctcttacttctggcagttggtgatcaaaggggcggtgatcatca

SEQ ID NO: 263850 - DNA, 75 bp, synthetic construct
  source 1..75: mol_type = other DNA
cagccaggccgactgagttatccacggccaccggacttcaccggtatggcctttttggaacaactgttgttgtca

SEQ ID NO: 263851 - DNA, 75 bp, synthetic construct
  source 1..75: mol_type = other DNA
cccgcaatatgttctttaattgtatttccgtttgtttttcctgctataacttcttatggcgtgttggctgttacg

SEQ ID NO: 263852 - DNA, 75 bp, synthetic construct
  source 1..75: mol_type = other DNA
cgtgcggaagcctccggcgcgtgccggattattctgaggaggtcactttcagggggaagctgtggccagccggct

SEQ ID NO: 263853 - DNA, 75 bp, synthetic construct
  source 1..75: mol_type = other DNA
tcgtgagcacatgcagtcccctgaatggcagtctgtacaggctgaccttgcagaacgttaccgccaggtgaccca

SEQ ID NO: 263854 - DNA, 75 bp, synthetic construct
  source 1..75: mol_type = other DNA
gcagcagtcagagccggaacgtgacgtttgtcgcggatgtcaggacggcgaagatcgcggatctggtggtcatta

SEQ ID NO: 263855 - DNA, 75 bp, synthetic construct
  source 1..75: mol_type = other DNA
caaagcggaacacttttagctcgcgatatggacagcgaacaggcggcgagtatggcgcgtggctgggtggcttct

SEQ ID NO: 263856 - DNA, 75 bp, synthetic construct
  source 1..75: mol_type = other DNA
agccggacggcacggtggagatctctgtcaccagccagacggcgggagtcagtgcggtcaccaccagcatcaaca

SEQ ID NO: 263857 - DNA, 75 bp, synthetic construct
  source 1..75: mol_type = other DNA
cactatcaataagttggagtcattaccatgatatctatccggatgatgaaacagatacccatcacccagtttctc

SEQ ID NO: 263858 - DNA, 75 bp, synthetic construct
  source 1..75: mol_type = other DNA
gtaagagtcgtgaggtggtggttctaagaaatctgattgagcaggcgtggggaaaagtattgagtgaagataact

SEQ ID NO: 263859 - DNA, 75 bp, synthetic construct
  source 1..75: mol_type = other DNA
atgtctggtgtaagagtcgtgaggtggtggttctaagaaatctgattgagcaggcgtggggaaaagtattgagtg

SEQ ID NO: 263860 - DNA, 75 bp, synthetic construct
  source 1..75: mol_type = other DNA
tgaactggagaaaagcgaagagcaactcatcaacgagcgtgaccatgctgagtctgctttagctgatatgtattt

SEQ ID NO: 263861 - DNA, 75 bp, synthetic construct
  source 1..75: mol_type = other DNA
ctacgtgaatgtctctgatatggaggacagcgacctgaacatttcagagagtgataaagcctttacccgcagctt

SEQ ID NO: 263862 - DNA, 75 bp, synthetic construct
  source 1..75: mol_type = other DNA
gtccgctctgtttatggtgtggatattgatggcacttttatctttgattttgacaaattatgtggtcttctaaaa

SEQ ID NO: 263863 - DNA, 75 bp, synthetic construct
  source 1..75: mol_type = other DNA
tgtgaccgtatcacagttgggagaatacccggaaggaacaaccaccacagcaccatcaacgccatatgacaaatg

SEQ ID NO: 263864 - DNA, 75 bp, synthetic construct
  source 1..75: mol_type = other DNA
atgaaaacggtttcgtcacggaagacggatatatcaccgtttataattatgatggcgtgacgcgtgaatatatcg

SEQ ID NO: 263865 - DNA, 75 bp, synthetic construct
  source 1..75: mol_type = other DNA
ttatgaccttgggtttaccggtacggcatttaccggtggtgatggtgctactggcatggcgatcgtggaagaatt

SEQ ID NO: 263866 - DNA, 75 bp, synthetic construct
  source 1..75: mol_type = other DNA
gagtattaagcccttacgactacacactgtattgcaggaagtgggtaaaaccaaatctgacttgtacgccacagg

SEQ ID NO: 263867 - DNA, 75 bp, synthetic construct
  source 1..75: mol_type = other DNA
ggtggtggtaagcgggcccgatggtatggtgataaaaagcgtaaaatttatgaatgggattcccagcacggtgag

SEQ ID NO: 263868 - DNA, 75 bp, synthetic construct
  source 1..75: mol_type = other DNA
agctggataccgaagataaaaatattgcgaccttaaacggcaggattacatcgacagaaaaagccattcctggtg

SEQ ID NO: 263869 - DNA, 75 bp, synthetic construct
  source 1..75: mol_type = other DNA
catgccgatggtcgaggcagcaccaaccgctcagcaacagttgctggagcaagttcggttaggcgaagcgaccca

SEQ ID NO: 263870 - DNA, 75 bp, synthetic construct
  source 1..75: mol_type = other DNA
cgcaggttagcgcctggcctgcggggacggtgtctattgctgtatccggggaaagtagcgccggaaatccggtga

SEQ ID NO: 263871 - DNA, 75 bp, synthetic construct
  source 1..75: mol_type = other DNA
ctttattcccgtcccctgtatctgggcagagttatttcaaattaacgataaccgacgcggccacgaaaacaattt

SEQ ID NO: 263872 - DNA, 75 bp, synthetic construct
  source 1..75: mol_type = other DNA
actcattgagcagacttcttggcaaacagataaaaaatataacattgcccaatctgatctttatcagatgtttgc

SEQ ID NO: 263873 - DNA, 75 bp, synthetic construct
  source 1..75: mol_type = other DNA
attaatgatatcggttacaaaaaagcatgcgatttcgataatgttaactattgtcacgaacggtgcaatagtgat

SEQ ID NO: 263874 - DNA, 75 bp, synthetic construct
  source 1..75: mol_type = other DNA
tgaaccagactttcaaagccgggaaatggtttgcgaattgataaaagtagccagagatctggagatgccagttag

SEQ ID NO: 263875 - DNA, 75 bp, synthetic construct
  source 1..75: mol_type = other DNA
ggtgcatttactggaaacgggcaaaatcagcgcacgtagccggggtcgatctgatgaacggcatcggtggcagcg

SEQ ID NO: 263876 - DNA, 75 bp, synthetic construct
  source 1..75: mol_type = other DNA
cgttcagcagggttacaccagtaatggcgtaggctacagtggcagcgtcaacatggggtatatgggtggctctgg

SEQ ID NO: 263877 - DNA, 75 bp, synthetic construct
  source 1..75: mol_type = other DNA
atgagtctgccaaatccactttgtgttgataccggtgtgtccaaaacaacgctgggtattgccgccagcaacact

SEQ ID NO: 263878 - DNA, 75 bp, synthetic construct
  source 1..75: mol_type = other DNA
cctgaactgcgccggggaaacgctggttgcccgtggctcagtggtgattgtcagcggctggcgacaactgttttt

SEQ ID NO: 263879 - DNA, 75 bp, synthetic construct
  source 1..75: mol_type = other DNA
tcgcccgcgaaattctggaacaatgccgctggcgcggtccggttcaacggctgtggctgtcggcgctggatgagg

SEQ ID NO: 263880 - DNA, 75 bp, synthetic construct
  source 1..75: mol_type = other DNA
acagagcaagggatcgccgatcttcgcggcctgtctccacttcaacgcgcccgttctattattgataactgcgct

SEQ ID NO: 263881 - DNA, 75 bp, synthetic construct
  source 1..75: mol_type = other DNA
cttgagagttttcatacgttatatgatgtatcgcaaggggtgtttgactttcatgctcatccggataccagtctc

SEQ ID NO: 263882 - DNA, 75 bp, synthetic construct
  source 1..75: mol_type = other DNA
ggatctacaccatatggtcgctgaaatggtgaaaaaagcgcgtgatctggaaattccggaagaagaacctgacgt

SEQ ID NO: 263883 - DNA, 75 bp, synthetic construct
  source 1..75: mol_type = other DNA
tgaaccagactttcaatgcctggaaatggttcacgaaatcataagaattgctagagatttggaagcgccagttga

SEQ ID NO: 263884 - DNA, 75 bp, synthetic construct
  source 1..75: mol_type = other DNA
tgaaggtgtgcaaacagcattcacccaagaacaatatgataaattaataagatacattaatattttctttacttt

SEQ ID NO: 263885 - DNA, 75 bp, synthetic construct
  source 1..75: mol_type = other DNA
ccgatctgctgaccgcagacaagcgccgccgtgagtatctgctacagacgctgcgcagccgcttgcaggatatac

SEQ ID NO: 263886 - DNA, 75 bp, synthetic construct
  source 1..75: mol_type = other DNA
aaaagacaatggtttaattgttaaaaatcaggacggatctccatcagggatattaataaaactattatattctaa

SEQ ID NO: 263887 - DNA, 75 bp, synthetic construct
  source 1..75: mol_type = other DNA
gtcaccgttgaactgggcggtaaaacttacaccgccaccgtccaggctgatttaagctggaatgtgagcgtacct

SEQ ID NO: 263888 - DNA, 75 bp, synthetic construct
  source 1..75: mol_type = other DNA
gataacatcctgaacgccgatgaaaaaggccagccgttgaccatcagcggcggcagtacggggctggcgacgggc

SEQ ID NO: 263889 - DNA, 75 bp, synthetic construct
  source 1..75: mol_type = other DNA
acaccattaccgtcgatctcagcgccccggcgatgggtattaatatcgattccctgcaagccgacactggcctta

SEQ ID NO: 263890 - DNA, 75 bp, synthetic construct
  source 1..75: mol_type = other DNA
attatatcgaatgtgattacaatcgctggcgacggcacagttggtgtggtggtctcagtccggaacaatttgaaa

SEQ ID NO: 263891 - DNA, 75 bp, synthetic construct
  source 1..75: mol_type = other DNA
tgttcagcagattatcaggcgctgctgaagcggcataatctgcgtggcagtatgagcgcaaagggatgctgctac

SEQ ID NO: 263892 - DNA, 75 bp, synthetic construct
  source 1..75: mol_type = other DNA
ctatgatggcatatataaatatatgccatcatagtgggataaaacttacagaaatagcagacagacttaacaata

SEQ ID NO: 263893 - DNA, 75 bp, synthetic construct
  source 1..75: mol_type = other DNA
agcgatcgggcaggcaacagcgacgacgccagccgcaccgtgaccgttagcctcagcgcgccagtgattagcatc

SEQ ID NO: 263894 - DNA, 75 bp, synthetic construct
  source 1..75: mol_type = other DNA
ggttatggaaatgagaagagttccacgacatcctcgctttcgggatataaatctaaaggtgcgatcaatggatac

SEQ ID NO: 263895 - DNA, 75 bp, synthetic construct
  source 1..75: mol_type = other DNA
atgacattggctccattatgtggatttgggattccacaattttggctaaaggtatttggaagtgaaggctgggct

SEQ ID NO: 263896 - DNA, 75 bp, synthetic construct
  source 1..75: mol_type = other DNA
ccgccgaagcgggcagtgcgctgaccctgagcggcactggcactaatttcgcgacaggtacagtggtgaccgtgt

SEQ ID NO: 263897 - DNA, 75 bp, synthetic construct
  source 1..75: mol_type = other DNA
aacgctctccggcagcacgtccggcgtcgaagcggggcaaaccgtcaccgtcacttttggcggcaaaacctacac

SEQ ID NO: 263898 - DNA, 75 bp, synthetic construct
  source 1..75: mol_type = other DNA
gttaacggttaacgcctcggtaaccaacgccgttggcaacaccggtagcggcacgcgcgatatcaccatcgatgc

SEQ ID NO: 263899 - DNA, 75 bp, synthetic construct
  source 1..75: mol_type = other DNA
cgcagcggctggtatacgtggtgtcagcggcggacaaggataagccctcgtcagcagttccgtcagcactgcgac

SEQ ID NO: 263900 - DNA, 75 bp, synthetic construct
  source 1..75: mol_type = other DNA
tgattaacgccgccgaaaaaggggcagatttaaccctttccggcagcacctccggcgtagagccggggcaaacgg

SEQ ID NO: 263901 - DNA, 75 bp, synthetic construct
  source 1..75: mol_type = other DNA
cgatggcagccacaccctgacggcgacggtcaatgacaaagcgggcaacccggcgagcaccacgcataatctggc

SEQ ID NO: 263902 - DNA, 75 bp, synthetic construct
  source 1..75: mol_type = other DNA
agcaatatcaacggcaatagcgcctcggcggtgcacaactacagcgtcgacagcagcgcgccaaccatcattatc

SEQ ID NO: 263903 - DNA, 75 bp, synthetic construct
  source 1..75: mol_type = other DNA
ccgtgacgctcaacgggcaaaactatgcggcgacgaccgatgcctccggcaactggagcgtcaccgttccggcat

SEQ ID NO: 263904 - DNA, 75 bp, synthetic construct
  source 1..75: mol_type = other DNA
gctggtgatctccggttccagcactggcggcgaagcgggtgatgtcatcaccgtcacgctaaacagtaaaaccta

SEQ ID NO: 263905 - DNA, 75 bp, synthetic construct
  source 1..75: mol_type = other DNA
cttccgctgtcggtgcgctgggcgaagccagctacacggtgacggcgaacgtcaccgacagcgcgggcaacagca

SEQ ID NO: 263906 - DNA, 75 bp, synthetic construct
  source 1..75: mol_type = other DNA
attatatcgaatgtgattacaatcggtggcgacagcacagttggtgtagcggtttctgtccggaacaatctgaaa

SEQ ID NO: 263907 - DNA, 75 bp, synthetic construct
  source 1..75: mol_type = other DNA
tacgataatgcctgcgtggaaagcttctttcattcgctgaaagtggaatgtctccacggagaacactttatcagc

SEQ ID NO: 263908 - DNA, 75 bp, synthetic construct
  source 1..75: mol_type = other DNA
attatatcgaatgtgattacaatcgctggcgacggcacagttggtgtggcggcctcagtccggaacaatttgaaa

SEQ ID NO: 263909 - DNA, 75 bp, synthetic construct
  source 1..75: mol_type = other DNA
ggcacctggagcgtgactgtgcccgccgccaacgtgggcgcactggctgacggcaacgctacggtcaccgccagc

SEQ ID NO: 263910 - DNA, 75 bp, synthetic construct
  source 1..75: mol_type = other DNA
atacggtcaccggcgcgcagctactaacggtcgatacccaaccgccaacgcttgccatcaacaccatcgctcagg

SEQ ID NO: 263911 - DNA, 75 bp, synthetic construct
  source 1..75: mol_type = other DNA
ggggcagacggtaaccgtgacgctaaacggcgtcaattacagcggcaacgtgcaggcagacggaagctggagcgt

SEQ ID NO: 263912 - DNA, 75 bp, synthetic construct
  source 1..75: mol_type = other DNA
atcagtggtggcgtctccatcgccgggattaacgacatcatttcctgtgacgatttctaccgtttccagcagcgc

SEQ ID NO: 263913 - DNA, 75 bp, synthetic construct
  source 1..75: mol_type = other DNA
gtcgcgggcgatgatgtggtgaatattatcgaacacgcccaggcgcaggtgattactggcagcagttccggtttt

SEQ ID NO: 263914 - DNA, 75 bp, synthetic construct
  source 1..75: mol_type = other DNA
gcagataaagaaaatagttcctcatccggataccgccttgcatgcatactgttcaggacagagtaaaaacgtgat

SEQ ID NO: 263915 - DNA, 75 bp, synthetic construct
  source 1..75: mol_type = other DNA
gacggcaggatcgacctggttcagcacacctacaacctgaacaactattacacgctatcttcgctcatcaaccag

SEQ ID NO: 263916 - DNA, 75 bp, synthetic construct
  source 1..75: mol_type = other DNA
atgttgaagtggtgatcaatggcaaaacctacacctctgaaccgggcggtgcggtggtagtcgatccggcgcaca

SEQ ID NO: 263917 - DNA, 75 bp, synthetic construct
  source 1..75: mol_type = other DNA
ggcaaaacctacaccaccacggtggcggctaacggtagctggagcaccaccgttccggctgtggatatggcgacc

SEQ ID NO: 263918 - DNA, 75 bp, synthetic construct
  source 1..75: mol_type = other DNA
gcgggtaaccctggcagcgccagcaaaggtgtgaccgttgataccaccgcgcccgtcatcagctttaacaccgtg

SEQ ID NO: 263919 - DNA, 75 bp, synthetic construct
  source 1..75: mol_type = other DNA
cgacgcttgcggtgagcggcacgctgggggcggcgctttctgccggtgagttcgcgcaaatcagcattgatggcg

SEQ ID NO: 263920 - DNA, 75 bp, synthetic construct
  source 1..75: mol_type = other DNA
actaacgattttgtcaccagcgacacgacgcttgcggtgagcggcacgctgggggcggcgctttctgccggtgag

SEQ ID NO: 263921 - DNA, 75 bp, synthetic construct
  source 1..75: mol_type = other DNA
caaatcattaacccgcagtcggggatgggggttaacgacacctcggcgctggtcaacttctacgggctgaatgcc

SEQ ID NO: 263922 - DNA, 75 bp, synthetic construct
  source 1..75: mol_type = other DNA
acctggatcacgctcaccaccaacggcacgcagtggacctacaccgacggccgcacgctgaccgacggcagctac

SEQ ID NO: 263923 - DNA, 75 bp, synthetic construct
  source 1..75: mol_type = other DNA
tgacctacggcctcgacacgcacggaatgtggacggtgctggcaaaccagcaggtaatgcaatcgactgacccac

SEQ ID NO: 263924 - DNA, 75 bp, synthetic construct
  source 1..75: mol_type = other DNA
gacctggacctggcttgacgggcggacgctgaccgatggcaactacaactatcaggtgcgggttatcgacaccgc

SEQ ID NO: 263925 - DNA, 75 bp, synthetic construct
  source 1..75: mol_type = other DNA
atcagagcggcaacaactatgccaccagctccatcgccgattacgaccgtaacggtacgggcgatctgtttatca

SEQ ID NO: 263926 - DNA, 75 bp, synthetic construct
  source 1..75: mol_type = other DNA
acgggttagaattcacccatgaacgcgattttatcaacgggcaatgggtatattcttggtattttagacccctag

SEQ ID NO: 263927 - DNA, 75 bp, synthetic construct
  source 1..75: mol_type = other DNA
attgtgccgaatctgagcaggttaaaactgagcttgaaacttgtcgtgactatctagcaggtagatttgcagaca

SEQ ID NO: 263928 - DNA, 75 bp, synthetic construct
  source 1..75: mol_type = other DNA
ctgtcacggaaaaagaaaaacatggtcagatgagactcatcgtgtccgggggcggggaaggcgacgcgctcacta

SEQ ID NO: 263929 - DNA, 75 bp, synthetic construct
  source 1..75: mol_type = other DNA
tcggttttgctgtgagcgtgcaatcaggcggtgcagattatggtgttccgcgaagtgataaaggtgctacgacta

SEQ ID NO: 263930 - DNA, 75 bp, synthetic construct
  source 1..75: mol_type = other DNA
ctgcattcaggttacgggcaccgtacgtgcgcgtgacgaaaaaatattaaccgcgatatggcgaccggcgaaatt

SEQ ID NO: 263931 - DNA, 75 bp, synthetic construct
  source 1..75: mol_type = other DNA
gacgggctggtggcgcagatcccttccctgctgctctccaccgcggcggcgattattgtcacccgcatcagcgac

SEQ ID NO: 263932 - DNA, 75 bp, synthetic construct
  source 1..75: mol_type = other DNA
gtgcggcctgacggtggcgcagatgcaaagccagatggacccggtatacacgccggcgcgaaaaattcacctgta

SEQ ID NO: 263933 - DNA, 75 bp, synthetic construct
  source 1..75: mol_type = other DNA
taacgtggtcacgctgacgggcgtgcataccgacctcgccactttgctggcgaatcatcagttgatggtggtgta

SEQ ID NO: 263934 - DNA, 75 bp, synthetic construct
  source 1..75: mol_type = other DNA
gtacggctcgattgtggcatttgataaagagggcgacggctatctcgacttctggattggcgacgcgggcgggcc

SEQ ID NO: 263935 - DNA, 75 bp, synthetic construct
  source 1..75: mol_type = other DNA
cgtaaaccggaggagacctggtacgggtgggacggtgacaggctgaccactgtacagacccaacagacaagaatc

SEQ ID NO: 263936 - DNA, 75 bp, synthetic construct
  source 1..75: mol_type = other DNA
ggcgattgacgccgatcttaacgccgggttgatcaaccaggcgcaggcgcagacccgccgcaaagatgttgccag

SEQ ID NO: 263937 - DNA, 75 bp, synthetic construct
  source 1..75: mol_type = other DNA
ggggaatccgttctatcatcaatatctttgtgtcccagatggtaaaggggactatacttgtggtggccaagacca

SEQ ID NO: 263938 - DNA, 75 bp, synthetic construct
  source 1..75: mol_type = other DNA
ctaaaagcggtacacaactgaagtgtaaatccgccaacgcgttcccggtcaccatggtcggtggtggcgcgaccg

SEQ ID NO: 263939 - DNA, 75 bp, synthetic construct
  source 1..75: mol_type = other DNA
agtaacgagaaagttcggaatgctgcgctgggtcgctttgctatccgggccgtgctcctgctggttgtgagtatc

SEQ ID NO: 263940 - DNA, 75 bp, synthetic construct
  source 1..75: mol_type = other DNA
gttgcgaaactgcagcgtatgcagttcggtaaaagctcagaaaaacttcgcgcaaaaaccgaacggcagattcca

SEQ ID NO: 263941 - DNA, 75 bp, synthetic construct
  source 1..75: mol_type = other DNA
ccagcgcctgcgcatgttcggcatcgttgatgatgtcatcgcccgccacggtatttatggtaagaaccggcgcgg

SEQ ID NO: 263942 - DNA, 75 bp, synthetic construct
  source 1..75: mol_type = other DNA
gcttttttcgaatatttacatcctttattaaataaagaaaatattgatgagttaaacagtacaacactgtctgag

SEQ ID NO: 263943 - DNA, 75 bp, synthetic construct
  source 1..75: mol_type = other DNA
gaaaatgttgtcgggataccatggctcgccaactcgtttacctctcgtggggatttggttccagaggcgcgacgc

SEQ ID NO: 263944 - DNA, 75 bp, synthetic construct
  source 1..75: mol_type = other DNA
actcagcccaataacatcatttgattacattcattttatcactacacatccttcaggtataaaagatacactcgc

SEQ ID NO: 263945 - DNA, 75 bp, synthetic construct
  source 1..75: mol_type = other DNA
gcattcaaagaaagtggtacgctggttggtaacgtcagagcaagttattgctatccttaccgcccccattgtgtc

SEQ ID NO: 263946 - DNA, 75 bp, synthetic construct
  source 1..75: mol_type = other DNA
tttttgcttttctgcgtatattcaatgccgaatgtgatgctgacacgtcttatccttcaaagtcggatgcgacgc

SEQ ID NO: 263947 - DNA, 75 bp, synthetic construct
  source 1..75: mol_type = other DNA
ctgctgatttaaccgcagagaagttcgccacagcgattcgaaatcactggcacgtggagaataaggtgcactggc

SEQ ID NO: 263948 - DNA, 75 bp, synthetic construct
  source 1..75: mol_type = other DNA
atggcagttttattcgtatttcgctggtcaacctattaagtgttcccgtatcaaatattggctttcatgcaacat

SEQ ID NO: 263949 - DNA, 75 bp, synthetic construct
  source 1..75: mol_type = other DNA
cagaacactcatcatgttattctcttgacatttgatgttgcccaaagagtactcaactcaataacatcttttgac

SEQ ID NO: 263950 - DNA, 75 bp, synthetic construct
  source 1..75: mol_type = other DNA
ggtgctggatctggcggggaacaccggcccggtggtatcgaaaacggtggtggtcgatgccactaacccgctcgc

SEQ ID NO: 263951 - DNA, 75 bp, synthetic construct
  source 1..75: mol_type = other DNA
ggcgggcagcaacgttacgctgaccattaacgggcaaacctatgttgcggcggtactggcggatggcacctggag

SEQ ID NO: 263952 - DNA, 75 bp, synthetic construct
  source 1..75: mol_type = other DNA
cggtgcaggcgaatttaagctggagcgtcgatgttccggcctccgcgctacaggcgctgggcaacggcgaactga

SEQ ID NO: 263953 - DNA, 75 bp, synthetic construct
  source 1..75: mol_type = other DNA
atctcaccgcgccaaccattggcatcaacactatcgccagcgatgacgtgattaacgccacggaaaaaggcgcgg

SEQ ID NO: 263954 - DNA, 75 bp, synthetic construct
  source 1..75: mol_type = other DNA
gacacaatcggccctcggcggcagccagagcggtaccaccagcggcgtggcggcaatggactacgactgggacgg

SEQ ID NO: 263955 - DNA, 75 bp, synthetic construct
  source 1..75: mol_type = other DNA
tcacaccattaccgtcgacctcagcgccccggcgatgggcattaatatcgattccctgcaagccgacactggcct

SEQ ID NO: 263956 - DNA, 75 bp, synthetic construct
  source 1..75: mol_type = other DNA
ctgcgccggatctcaccattaacaccgtcgcgggcgatgacattatcaacgccatcgaacatggtcaggcgttgg

SEQ ID NO: 263957 - DNA, 75 bp, synthetic construct
  source 1..75: mol_type = other DNA
tataacgacaccttctttgccaccgcaggcaccgacacttacgacggttccggcggctgggtgtacagctccggc

SEQ ID NO: 263958 - DNA, 75 bp, synthetic construct
  source 1..75: mol_type = other DNA
gcgggcgatgtggtgagcgttgtgctcaacggcaaaacctacaccaccaccctggatgcctccggtaactggagc

SEQ ID NO: 263959 - DNA, 75 bp, synthetic construct
  source 1..75: mol_type = other DNA
acaatctggcggtagataccaccgcgccggttctcaccattaacaccgtggcgggcgatgacatcatcaacgacg

SEQ ID NO: 263960 - DNA, 75 bp, synthetic construct
  source 1..75: mol_type = other DNA
aggcactggtgataactggtagcagcagcgggctggcggcgggcgctgcgctgacggtggtgatcaataacgtca

SEQ ID NO: 263961 - DNA, 75 bp, synthetic construct
  source 1..75: mol_type = other DNA
caccatcaacacctttgcgggcgacgatgtggtgaatgcagcggaacacggctcatcgctggtaatcagcggcac

SEQ ID NO: 263962 - DNA, 75 bp, synthetic construct
  source 1..75: mol_type = other DNA
agcgcctcggcgacccatgcgtatagcgttgatgccagcgcgccgacgctcaccattaacaccatcgccagcgac

SEQ ID NO: 263963 - DNA, 75 bp, synthetic construct
  source 1..75: mol_type = other DNA
aggcagtaatgccgcatataaactgaccagcacatacacccccgcaggccagttacagagccagcacctgaacag

SEQ ID NO: 263964 - DNA, 75 bp, synthetic construct
  source 1..75: mol_type = other DNA
ccgcgtcacgccggacagtctgccgccggtggagtggctgacctacggcagcggctatcttgcgggcatgaagct

SEQ ID NO: 263965 - DNA, 75 bp, synthetic construct
  source 1..75: mol_type = other DNA
acggacgcgtttctggcggtcaaaaaccacggggttagtgtgggtagtgtgtatagcaacaggagcctggaacgc

SEQ ID NO: 263966 - DNA, 75 bp, synthetic construct
  source 1..75: mol_type = other DNA
taatggcgatatgattatcgggcagggaacaggcacaacaacgacacttaccctgaacaataagtcacaggtgaa

SEQ ID NO: 263967 - DNA, 75 bp, synthetic construct
  source 1..75: mol_type = other DNA
aatggcgtgatatcagactgaaggctggtgaatctgaagaatcactggaggagtttttcaccggcataccaaagc

SEQ ID NO: 263968 - DNA, 75 bp, synthetic construct
  source 1..75: mol_type = other DNA
ggtatcaggtgatcgacagcgccagcgtgattgccacccatgtgaacaagattgtgcgcagctatattcctgatt

SEQ ID NO: 263969 - DNA, 75 bp, synthetic construct
  source 1..75: mol_type = other DNA
cttccaatttcaaaccaaacaatacctgatgagacaatcatgtttcatatagatactgtattgaaaagatcgacg

SEQ ID NO: 263970 - DNA, 75 bp, synthetic construct
  source 1..75: mol_type = other DNA
tcgatgatattaatatacttaatcaaatgtgctctaacactggagtcgcaagccaaccctatatcaataatgaac

SEQ ID NO: 263971 - DNA, 75 bp, synthetic construct
  source 1..75: mol_type = other DNA
gaaccttacctctttccccacatttagtttctaaaattaaagagtatatatttgatcgtaggaagcaaacaccag

SEQ ID NO: 263972 - DNA, 75 bp, synthetic construct
  source 1..75: mol_type = other DNA
cggaatatcaaaagtagatgcttgcagttgcccgaattggtcaaaaggaataattgtggcatatacagacagttc

SEQ ID NO: 263973 - DNA, 75 bp, synthetic construct
  source 1..75: mol_type = other DNA
cttgagagaggaataaatatatcagtaagattgcaaaagaagaaatcaacagcaaaaccatttatcgcaatcaga

SEQ ID NO: 263974 - DNA, 75 bp, synthetic construct
  source 1..75: mol_type = other DNA
tctgatatctccgacccgcattaatctgaaagaaatagaaattcactggcgtgaagtgctacgtctggcgacctc

SEQ ID NO: 263975 - DNA, 75 bp, synthetic construct
  source 1..75: mol_type = other DNA
cgttatcctacgttgtttgaaaacttgtataataatggaatgtggattcaatttaacaacaattcaggtagtaat

SEQ ID NO: 263976 - DNA, 75 bp, synthetic construct
  source 1..75: mol_type = other DNA
gcagaggaaatggcagacgcggcacagagcgcaatgcttgccactaccggctttgatgtcgatctgttgatgcag

SEQ ID NO: 263977 - DNA, 75 bp, synthetic construct
  source 1..75: mol_type = other DNA
acggtcaaaaaagcggaaatcaaagtagagctgctgccgaagtacgccgcctgggcggagggtgtcctggctgcc

SEQ ID NO: 263978 - DNA, 75 bp, synthetic construct
  source 1..75: mol_type = other DNA
ccagcgtgattgccacccatgtgaataagattgtgcgcagctatattcctgatttatttaactatgacgatatta

SEQ ID NO: 263979 - DNA, 75 bp, synthetic construct
  source 1..75: mol_type = other DNA
ggtcggcctgctgattggcattttatccggatactatggcggctggctggaacgcgtgctgatgcgttttactga

SEQ ID NO: 263980 - DNA, 75 bp, synthetic construct
  source 1..75: mol_type = other DNA
tgaatcaggcgcaacagggcgggaaagtgatgcttgacagcgtgccagtggacccgaatatgctcaaccagttcc

SEQ ID NO: 263981 - DNA, 75 bp, synthetic construct
  source 1..75: mol_type = other DNA
taaccgcaacgtgcagaccgtgctggcagaagaaatggcagatgcagcgcagagcgcaatgcttgccgccaccgg

SEQ ID NO: 263982 - DNA, 75 bp, synthetic construct
  source 1..75: mol_type = other DNA
ttgatggtgacagcgaccgctatatcagcgaggaagtcgggcctctccggcttcgtatgtgggtaatgcgcgaag

SEQ ID NO: 263983 - DNA, 75 bp, synthetic construct
  source 1..75: mol_type = other DNA
tagtgcttgatgcaccacgaatagtccacagagatacaaaaagctattttggtatacttgtagatgacaataatc

SEQ ID NO: 263984 - DNA, 75 bp, synthetic construct
  source 1..75: mol_type = other DNA
tgaattcattatccgcaaaaataaaacaacaagccggagtcattgaaacggaggaagctaccaaaaatgctttcg

SEQ ID NO: 263985 - DNA, 75 bp, synthetic construct
  source 1..75: mol_type = other DNA
gcacaaggcattggggctggcacacagcgaaagccagccgcaggaggcgctggcgcagttccagcgcgcgctaca

SEQ ID NO: 263986 - DNA, 75 bp, synthetic construct
  source 1..75: mol_type = other DNA
aagaagttatgttttcaaatagccctcagggttttgagcgaaaatattatagaaatattgtggatgtcacgacgg

SEQ ID NO: 263987 - DNA, 75 bp, synthetic construct
  source 1..75: mol_type = other DNA
ctactggctttcatatccttaaggaacttcccgccagttccaccagcgacgcgaagcagctgcatgacgcggaca

SEQ ID NO: 263988 - DNA, 75 bp, synthetic construct
  source 1..75: mol_type = other DNA
gagcagatgaaagcggcggggaaagatccggtgctgctggtgccgccgcagctgcgccctttgctggcgcgctat

SEQ ID NO: 263989 - DNA, 75 bp, synthetic construct
  source 1..75: mol_type = other DNA
tcgcaattaaacctgttgacatgcgccggggcatcgacgcactgacgcagtatatacaggatgaactccggtcga

SEQ ID NO: 263990 - DNA, 75 bp, synthetic construct
  source 1..75: mol_type = other DNA
gcccatcagcttaagcctgggctacaagctggtagcgctggtggataaagcccagggcaacccgctcacccagcg

SEQ ID NO: 263991 - DNA, 75 bp, synthetic construct
  source 1..75: mol_type = other DNA
tgctcgacagcggctcggtggtcaccgccgatgacatcatcatcaccagcggctgccataactcgatgtcgatgg

SEQ ID NO: 263992 - DNA, 75 bp, synthetic construct
  source 1..75: mol_type = other DNA
ttttcttacgaaaaaggccgcagagtttcacccctgcggcctggtccgggcgcaaattgccattacggcagcctg

SEQ ID NO: 263993 - DNA, 75 bp, synthetic construct
  source 1..75: mol_type = other DNA
acgctctcctggctgaagtacgtgcgcaggcgtttaatgacctttgctcggtgttcgttaaggacgcgacggttg

SEQ ID NO: 263994 - DNA, 75 bp, synthetic construct
  source 1..75: mol_type = other DNA
cctcgaaacgctgacccgcaccatcaccgaaaccagcgagcaacaggtcagttgggaaactattccgctgatcga

SEQ ID NO: 263995 - DNA, 75 bp, synthetic construct
  source 1..75: mol_type = other DNA
gctatgccgcaaaaattgaatacagcgatgaagatcaatgcattgttggtcacgttgcaggcattcgggatgtca

SEQ ID NO: 263996 - DNA, 75 bp, synthetic construct
  source 1..75: mol_type = other DNA
atagggattattaaaggcgatgaatctaattttaaaataacgcaccagcaagacatttatcttgcggataattta

SEQ ID NO: 263997 - DNA, 75 bp, synthetic construct
  source 1..75: mol_type = other DNA
gcatcatttgctattcagtaccttgttagtccaaaaccagagagtactaatacggccccttcaattacttatgac

SEQ ID NO: 263998 - DNA, 75 bp, synthetic construct
  source 1..75: mol_type = other DNA
accaccggggactgccgctggagcttatcagcgaagacggcaatacggcgtggagcgcggaatatgatgaatggg

SEQ ID NO: 263999 - DNA, 75 bp, synthetic construct
  source 1..75: mol_type = other DNA
gaacgacagaacccgcatccagacgatttatcacccggggagcttcacgccactcatcagagttgaaaccgccac

SEQ ID NO: 264000 - DNA, 75 bp, synthetic construct
  source 1..75: mol_type = other DNA
agcggcaaaaaggaatgtggggacagggacgaatcagatacctgatatgggtagcttcacgctttctgtttcagg

SEQ ID NO: 264001 - DNA, 75 bp, synthetic construct
  source 1..75: mol_type = other DNA
ccaaacagacgtataaagttacggtgactgatgccaataacaacctgttgaaggatagcgacgtgacgctgactg

SEQ ID NO: 264002 - DNA, 75 bp, synthetic construct
  source 1..75: mol_type = other DNA
ttgtcatgactaatttcaaatcaatattaattacagttattgtatattcagtgatatgtttatatagcttgataa

SEQ ID NO: 264003 - DNA, 75 bp, synthetic construct
  source 1..75: mol_type = other DNA
gaaacgcctggcttcactcggtggagcagccccgaatatggagataacaccacgcaggcatggagatgtggcgga

SEQ ID NO: 264004 - DNA, 75 bp, synthetic construct
  source 1..75: mol_type = other DNA
agattataccgtttatgtcagatgagcagattcacaaaactggtttgttcatcaaaagaattgaaagtagaaagc

SEQ ID NO: 264005 - DNA, 75 bp, synthetic construct
  source 1..75: mol_type = other DNA
gattggtaccaacgtgggtgattactatcaagcactgatagcgtcaaccggacaggcgcaggttgataaagagca

SEQ ID NO: 264006 - DNA, 75 bp, synthetic construct
  source 1..75: mol_type = other DNA
ggatgaatatgatgatctcatatcaggaacttgttcgcaccttccctaatatcaaatccttgtttacacagaatt

SEQ ID NO: 264007 - DNA, 75 bp, synthetic construct
  source 1..75: mol_type = other DNA
tcacagctctacaactggcgcagtaaacagcaaaatcagcagacgtcttctgaacgtgaactggagatgtctacc

SEQ ID NO: 264008 - DNA, 75 bp, synthetic construct
  source 1..75: mol_type = other DNA
gcgccagacaggataggagaaggaaaatcatgggtttatcaaagagatacaatgattgaaagaggtgataacagc

SEQ ID NO: 264009 - DNA, 75 bp, synthetic construct
  source 1..75: mol_type = other DNA
aaaagttattaatgatctgttaaaaaacgattataaaatttccctttctccagatacaacttatcgagagttgaa

SEQ ID NO: 264010 - DNA, 75 bp, synthetic construct
  source 1..75: mol_type = other DNA
gtggacgtgcaggcgctggcggtggcgttagaggcagggcatttggttcaggcggaggtggtgcatacgatgcag

SEQ ID NO: 264011 - DNA, 75 bp, synthetic construct
  source 1..75: mol_type = other DNA
attgtgcgcagctatattcctgatttgtttaactatgacgatattactcagttgcataaccgtttgtcgtcgatg

SEQ ID NO: 264012 - DNA, 75 bp, synthetic construct
  source 1..75: mol_type = other DNA
ctgatgtgactccagataaaaatcttatcggtcaaatgacaatcgctaagttaggtggtatagcacttctaaacc

SEQ ID NO: 264013 - DNA, 75 bp, synthetic construct
  source 1..75: mol_type = other DNA
ttatccttcaatgtcggatgcgacgctgccgcgtcttatccgacctacggttggcacgcatccggcaatgttgta

SEQ ID NO: 264014 - DNA, 75 bp, synthetic construct
  source 1..75: mol_type = other DNA
aaatacattgtcgattgcggatttattttctgatatagctgaaagagtgactttaaaatactttaaagtagattt

SEQ ID NO: 264015 - DNA, 75 bp, synthetic construct
  source 1..75: mol_type = other DNA
cttttaaagaattcctgactgttttaataaaggataaatggcaggttgttttcacaacccgtaacaactacttgg

SEQ ID NO: 264016 - DNA, 75 bp, synthetic construct
  source 1..75: mol_type = other DNA
tgccacggcgggcagctattttcactggctgatactgcctttgcctacgcctgcaatagccaggggctggcagcc

SEQ ID NO: 264017 - DNA, 75 bp, synthetic construct
  source 1..75: mol_type = other DNA
cacgacacttactcaaaccattgctccaatatttgaagaatacctaatggaaattttacctcaacgctcagacac

SEQ ID NO: 264018 - DNA, 75 bp, synthetic construct
  source 1..75: mol_type = other DNA
tcgggctagttatgaaggcatatttcgacaagatggaatcaaatggcatcagtgttatggcagccatattactgg

SEQ ID NO: 264019 - DNA, 75 bp, synthetic construct
  source 1..75: mol_type = other DNA
agtgttatggctgccatattattggtagataaccatgctttgacggcccgactaagaataaagaacacaactgaa

SEQ ID NO: 264020 - DNA, 75 bp, synthetic construct
  source 1..75: mol_type = other DNA
atggacaagcatccaccgatcatccccacagccccgtggttacttcatggtgccgattacaatccggaacaatgg

SEQ ID NO: 264021 - DNA, 75 bp, synthetic construct
  source 1..75: mol_type = other DNA
ctggcctaaaggcggcgataaattcaaaccgttacctgaaggattccagttggcaaagaaccgcaaaaagctacc

SEQ ID NO: 264022 - DNA, 75 bp, synthetic construct
  source 1..75: mol_type = other DNA
tggcgctgtataaaaggcacattaagctggctatttgttgatgcagcgacacgatattacagtcctgacagatta

SEQ ID NO: 264023 - DNA, 75 bp, synthetic construct
  source 1..75: mol_type = other DNA
taatccttttaaggatataattgctgtttatgaactaaaaaaattcttaaggatatttccccagatattgtattt

SEQ ID NO: 264024 - DNA, 75 bp, synthetic construct
  source 1..75: mol_type = other DNA
aaatggtacacttgctagtttttctaaaggcattggagctcattttattgttgaaaaagatggtaatatatacca

SEQ ID NO: 264025 - DNA, 75 bp, synthetic construct
  source 1..75: mol_type = other DNA
acggcgaaaccacgtgggtgtttgtgcagaactacaccgcccagcagcagctcattacgctgccgcaggggtata

SEQ ID NO: 264026 - DNA, 75 bp, synthetic construct
  source 1..75: mol_type = other DNA
aaaattaagcttggtaagcaagatgttctggaactagggaacatggatgccaagcgcgattggggttatgcaaaa

SEQ ID NO: 264027 - DNA, 75 bp, synthetic construct
  source 1..75: mol_type = other DNA
atgattactcgtattcatcgcaattctttctctttaaatattaataatacagcccagacaaatgaacaccaaaac

SEQ ID NO: 264028 - DNA, 75 bp, synthetic construct
  source 1..75: mol_type = other DNA
ctccattatcacctgcaacgatgaatttgctaatggcaattggtcagaatcaccaacttacgcaactgatgattc

SEQ ID NO: 264029 - DNA, 75 bp, synthetic construct
  source 1..75: mol_type = other DNA
gcggacatatgaacgttattaatactatttttaacgcattacccactctgtttaatacgtttaaattcgataaaa

SEQ ID NO: 264030 - DNA, 75 bp, synthetic construct
  source 1..75: mol_type = other DNA
tgcaaaatggtcaagaagtggtaattgatagcggtaaaagcgttagcctcacactgacaatggctccagctttta

SEQ ID NO: 264031 - DNA, 75 bp, synthetic construct
  source 1..75: mol_type = other DNA
ggctttacggataaccctcgatacattgcggagaaaaataagatggaaactttactcaaaaagccatctccccat

SEQ ID NO: 264032 - DNA, 75 bp, synthetic construct
  source 1..75: mol_type = other DNA
caggtttatatttggctataaattatggtaatgcggatatcgttgagactattttcaattcactgtcagctcctg

SEQ ID NO: 264033 - DNA, 75 bp, synthetic construct
  source 1..75: mol_type = other DNA
cagtattaatgagctattcggtgcgcatggcttagacgatttctctaatgctcatcaagacgaattacgtaaagt

SEQ ID NO: 264034 - DNA, 75 bp, synthetic construct
  source 1..75: mol_type = other DNA
tctgttggagcaggattttttacgccagtggcccgaaccagaagtgggcaggagacatcacgtacttacgtacag

SEQ ID NO: 264035 - DNA, 75 bp, synthetic construct
  source 1..75: mol_type = other DNA
ggtggttcgattgcgatagggagcggcactaatgacgataagccagcaatcaatccacataaagactcagtgatg

SEQ ID NO: 264036 - DNA, 75 bp, synthetic construct
  source 1..75: mol_type = other DNA
ttttgtcattaaattttccacgtctgtcttacagactgataaaaaagaaattacgataattaataaaaatgaaaa

SEQ ID NO: 264037 - DNA, 75 bp, synthetic construct
  source 1..75: mol_type = other DNA
caatggctgataatgcattcgaagttgaaacacgtcccggaagtttcctcgttccacgttctttagggaaggtgc

SEQ ID NO: 264038 - DNA, 75 bp, synthetic construct
  source 1..75: mol_type = other DNA
gatgatcttaaactgcaatcctgataattatgcattttatgagaaggtaagaaattatctactgggctggaaaaa

SEQ ID NO: 264039 - DNA, 75 bp, synthetic construct
  source 1..75: mol_type = other DNA
cttagaccacataaaggtaagtttttcaatacagtctctaagcgtgatcatgataatgatttgagcaaggaatct

SEQ ID NO: 264040 - DNA, 75 bp, synthetic construct
  source 1..75: mol_type = other DNA
taccggatgtccttaactggtctaatggacaaaacgtatcgctaatttgtgaatgtcctgattcttataagaatg

SEQ ID NO: 264041 - DNA, 75 bp, synthetic construct
  source 1..75: mol_type = other DNA
gcaaccagatcggcaaaggcaagaaaggtgacaagctgataactttacttcccaactgggaatacaatctgggag

SEQ ID NO: 264042 - DNA, 75 bp, synthetic construct
  source 1..75: mol_type = other DNA
attaatatcgttcccaacatcctccaggttgattttattgatgagaatggcaacctgatgtggatgtctattgat

SEQ ID NO: 264043 - DNA, 75 bp, synthetic construct
  source 1..75: mol_type = other DNA
aggtgtctgtgactcttccccataagttagttgtagagttagataggactggtgatgggcagagccgttcagagc

SEQ ID NO: 264044 - DNA, 75 bp, synthetic construct
  source 1..75: mol_type = other DNA
gggggcactggcaggggccgtgctgggggcgatagtgaccatcgcagaaggttgcctgattatggccgcctgcgc

SEQ ID NO: 264045 - DNA, 75 bp, synthetic construct
  source 1..75: mol_type = other DNA
aagggcggcgttagtcactggcttgaaggcagacgtgaaccaaactttgataccctggctgagctttgcgacatg

SEQ ID NO: 264046 - DNA, 75 bp, synthetic construct
  source 1..75: mol_type = other DNA
acattctcaaaggcgcggcgatggaaggccagtacaagggcgctcaacgtggggctaaatgtgaggagatcgcaa

SEQ ID NO: 264047 - DNA, 75 bp, synthetic construct
  source 1..75: mol_type = other DNA
gcactagcaaataaacaagtcccagcagaagcggaagagatgggaggtgaaaaagtggaagaagtggcagcagag

SEQ ID NO: 264048 - DNA, 75 bp, synthetic construct
  source 1..75: mol_type = other DNA
ccctcacggtgatgatgatgtgctgcgcggggtaattatcgagcgtgaattacgtataggtgagcttgagagaga

SEQ ID NO: 264049 - DNA, 75 bp, synthetic construct
  source 1..75: mol_type = other DNA
cggcaaccagatcggcaaaggcaagaaaggtgacaagctgataactttacttcccaactgggaatacaatctggg

SEQ ID NO: 264050 - DNA, 75 bp, synthetic construct
  source 1..75: mol_type = other DNA
gtatccagaagacggcgcaacgaatgaattacgcgaggccgtagcgaaacgagacgtcatcattgacgacctgaa

SEQ ID NO: 264051 - DNA, 75 bp, synthetic construct
  source 1..75: mol_type = other DNA
caccataccgggtacctggcatgtcattggattgattgatgccttgccagattctgtacaagatcagaatatcaa

SEQ ID NO: 264052 - DNA, 75 bp, synthetic construct
  source 1..75: mol_type = other DNA
aagataaggattttcaatctttagtcaaaaaattgaaatcctcagacaagaaatataattcaggattattctcgc

SEQ ID NO: 264053 - DNA, 75 bp, synthetic construct
  source 1..75: mol_type = other DNA
atcacgcctgcgatcatctgccgtttgtgaagagcgcggagcgacccacttacgatgcacccacagtgaggccag

SEQ ID NO: 264054 - DNA, 75 bp, synthetic construct
  source 1..75: mol_type = other DNA
agcagacgcgtctgcgcattgccattgagtgccatagctgtattcagtggctgacgcccgcgttagaaaatttcc

SEQ ID NO: 264055 - DNA, 75 bp, synthetic construct
  source 1..75: mol_type = other DNA
tgatggcttaaaagctatacgtgacgagttggaaaaagatcgtgacattatcgccgcctcactggatttaaaaag

SEQ ID NO: 264056 - DNA, 75 bp, synthetic construct
  source 1..75: mol_type = other DNA
ataacttttctttttatgaagtaaaagacttcaagaagtggttaactcgtgaagataaatatttattatcaagca

SEQ ID NO: 264057 - DNA, 75 bp, synthetic construct
  source 1..75: mol_type = other DNA
tctgaacatacatacaaacttaaatttgaagtaaaaagagaaattctatgtaaatgtatatatgggattgataaa

SEQ ID NO: 264058 - DNA, 75 bp, synthetic construct
  source 1..75: mol_type = other DNA
ctacgcgctcagataaaacaggccgagttcagccagcaggttgtgttgaatacccagattaaacagcaggaacag

SEQ ID NO: 264059 - DNA, 75 bp, synthetic construct
  source 1..75: mol_type = other DNA
gtgaatggcgaagctgcagagcagcagcggcaacaattgcaacattaccgtcaaatcgagcaggacattaaaaaa

SEQ ID NO: 264060 - DNA, 75 bp, synthetic construct
  source 1..75: mol_type = other DNA
aagcgacggttaatgtggccgatctcgaccgcaaccagtttctcgatgcctctctgacgttgatccttcagaaac

SEQ ID NO: 264061 - DNA, 75 bp, synthetic construct
  source 1..75: mol_type = other DNA
gaagaaccacttgtgaagcaagaatagatgacaattgcgtagattatatatatgtaagatttgacaaaaatagca

SEQ ID NO: 264062 - DNA, 75 bp, synthetic construct
  source 1..75: mol_type = other DNA
ttgcgccagtcggtagaggcgacagaaaaagcattgttgaacgctgtttcggcattctgaatgatgaggttattc

SEQ ID NO: 264063 - DNA, 75 bp, synthetic construct
  source 1..75: mol_type = other DNA
atgagcgaacagtacctgataacgctcgatgagtggaagccaaaacggttcagtctcccaataacaaacactacc

SEQ ID NO: 264064 - DNA, 75 bp, synthetic construct
  source 1..75: mol_type = other DNA
gcgaaggtgtggtatccggcgttccttgcaaagatgaaggagtacgggagagatgtcgtctcatcacttgttacc

SEQ ID NO: 264065 - DNA, 75 bp, synthetic construct
  source 1..75: mol_type = other DNA
atgacaaaaacagtctcaaccagtaaaaaaaaccgtaaacagcattcgcctgaatttcgcagtgaagccctgaag

SEQ ID NO: 264066 - DNA, 75 bp, synthetic construct
  source 1..75: mol_type = other DNA
atctggaaagtcagaatcttagtactgaggaatatcggcaagcggtcaaaaataaatacgatatgttatgtgcag

SEQ ID NO: 264067 - DNA, 75 bp, synthetic construct
  source 1..75: mol_type = other DNA
gaatatagtcttttacaggaaactggatttgccatagttttacatggaggtgaacctcttcttttgggggaaaga

SEQ ID NO: 264068 - DNA, 75 bp, synthetic construct
  source 1..75: mol_type = other DNA
aacggacgcgctgagacgtgcgcagcagccatcccgtgatgaatacgaccaacgcccaccattcgacgatgaaac

SEQ ID NO: 264069 - DNA, 75 bp, synthetic construct
  source 1..75: mol_type = other DNA
atgaatacggcaggctggcggagaagacggaccgcatcccggcgggtgtgatacggacggacgacgagcgcaccc

SEQ ID NO: 264070 - DNA, 75 bp, synthetic construct
  source 1..75: mol_type = other DNA
cgggctgatcatcctcgccgccaccaaccgccccgaaatcctcgaccaggcgctgctgcgtgccggccgcttcga

SEQ ID NO: 264071 - DNA, 75 bp, synthetic construct
  source 1..75: mol_type = other DNA
cgtttgtaatagttgagaatgaaaagattgctaaacatttcttctcccttaatgaaagcatctttgatttattag

SEQ ID NO: 264072 - DNA, 72 bp, synthetic construct
  source 1..72: mol_type = other DNA
atggcttcccgccagacagatatgtatccaggcaagggcttgattattgattttcatctgattattattttt

SEQ ID NO: 264073 - DNA, 75 bp, synthetic construct
  source 1..75: mol_type = other DNA
gtccatatgttaaagcaactatttatattagtaacgataataaatcacttaatgaccatgagcaagatcatataa

SEQ ID NO: 264074 - DNA, 75 bp, synthetic construct
  source 1..75: mol_type = other DNA
cggggctgccgatgacctcgcacgggccaccgacattgcccgcgacatgatcacccgctttggcatggacgaagg

SEQ ID NO: 264075 - DNA, 75 bp, synthetic construct
  source 1..75: mol_type = other DNA
agtttggtattttgataattgaatctgatggagagattagaaagaatgatacattgagagcatcatttgaaggtg

SEQ ID NO: 264076 - DNA, 75 bp, synthetic construct
  source 1..75: mol_type = other DNA
atgctcacaacattgtcaatggcctgagcaaagcagacccggagcacgccagcgattatcgaaaacagggtgaca

SEQ ID NO: 264077 - DNA, 75 bp, synthetic construct
  source 1..75: mol_type = other DNA
gaaagctgagactcccggcggcgtatgtggtaccgggtgatgactctccgggagaaaacaaaagccagaccgact

SEQ ID NO: 264078 - DNA, 75 bp, synthetic construct
  source 1..75: mol_type = other DNA
gtgtgggtaaaaccgaaaccgtcctgcaactggcagagctgctctacggcggtcgccagtacctgaccaccatca

SEQ ID NO: 264079 - DNA, 75 bp, synthetic construct
  source 1..75: mol_type = other DNA
ctggcggtgctgactctaatgaagaaactatcattaagtcagctattgatgctgtaatgaagcatagagtccatg

SEQ ID NO: 264080 - DNA, 75 bp, synthetic construct
  source 1..75: mol_type = other DNA
tatggcaagccgcgaacttcgccgggcgaaaagtcatgtccagaagtgggagcgagtctgcgccgcgctgcggga

SEQ ID NO: 264081 - DNA, 75 bp, synthetic construct
  source 1..75: mol_type = other DNA
atcagatctcggagtattgggttcagttagcttttgaaagtacagccgccaaaatcgaagagattttacttgctg

SEQ ID NO: 264082 - DNA, 75 bp, synthetic construct
  source 1..75: mol_type = other DNA
acgttaatgacgacctaagagctgaattcggtttgctaccaccgtgctttttaccccttggtaatagaagactat

SEQ ID NO: 264083 - DNA, 75 bp, synthetic construct
  source 1..75: mol_type = other DNA
acagatgagatagcgaaactggcagggcaaaaacttgtcgctcgcgcgaagccgggtgaatatgtgcaggggatt

SEQ ID NO: 264084 - DNA, 75 bp, synthetic construct
  source 1..75: mol_type = other DNA
actgaggagattgcaaaactggcagggcagaaactggtcgctcgcgctaaaccgggagaatatgtgcaggggatt

SEQ ID NO: 264085 - DNA, 75 bp, synthetic construct
  source 1..75: mol_type = other DNA
ctgcggctgaagctttacatatacgccggtctgcctgagtttttcaaaattgtaacccaactgtggattaacctg

SEQ ID NO: 264086 - DNA, 75 bp, synthetic construct
  source 1..75: mol_type = other DNA
cagcagcagatgccattagagagtcactggataaggggttgcggatctatctcagcttgttaaccgagcaaggtg

SEQ ID NO: 264087 - DNA, 75 bp, synthetic construct
  source 1..75: mol_type = other DNA
gatattaccggaggaaaggtaactatcaatggcccacttaactttttgctgaaaggtacggggttcctgaatgtc

SEQ ID NO: 264088 - DNA, 75 bp, synthetic construct
  source 1..75: mol_type = other DNA
ctgaatattcaacgcgatgaagcgcaaattgatgatgatactgcgctgtttggtaatggttttaaactggactcc

SEQ ID NO: 264089 - DNA, 75 bp, synthetic construct
  source 1..75: mol_type = other DNA
cctcagcccgggatgcggcggcttcaaaagaggcggcaaaatcatcagaaacgaacgcatcctcgagcgccagta

SEQ ID NO: 264090 - DNA, 75 bp, synthetic construct
  source 1..75: mol_type = other DNA
ggatggtggcgcaccattatgcagggagaccggagagccgctaccggtatgatgataccgggcgggtgacggagc

SEQ ID NO: 264091 - DNA, 75 bp, synthetic construct
  source 1..75: mol_type = other DNA
tcaggcacgaacaacggtacaacaaaccactcccacagtgagccagcttgctgccgcgaccattacgaggatctg

SEQ ID NO: 264092 - DNA, 75 bp, synthetic construct
  source 1..75: mol_type = other DNA
aggcatatactcatgtggtctgccctgtgcatttgacgatttttgatggtacgctgccgtatttgccgatgcttg

SEQ ID NO: 264093 - DNA, 75 bp, synthetic construct
  source 1..75: mol_type = other DNA
tggctacgtgtaatgtgtgcaggcttgttattggtttttattcaggttgctccacaatttacacttctgtatacc

SEQ ID NO: 264094 - DNA, 75 bp, synthetic construct
  source 1..75: mol_type = other DNA
cctgcaaaatttcacgagtgctttattaactggatgcgtgactgccattcttcagatgataaagacgtcattgca

SEQ ID NO: 264095 - DNA, 75 bp, synthetic construct
  source 1..75: mol_type = other DNA
gcaattgcaacagtttacccacacggcgtatcagattgtgccgtacgaaagctacgtcacgctggcggagaaaat

SEQ ID NO: 264096 - DNA, 75 bp, synthetic construct
  source 1..75: mol_type = other DNA
agagccagccttcttattcggccttgaattgatcatatgcggattagaaaaacaacttaaatgtgaaagtgggtc

SEQ ID NO: 264097 - DNA, 75 bp, synthetic construct
  source 1..75: mol_type = other DNA
gcagtgcgaaatgcaaaatcggcattacatatgagagtggatattctttgtcgagctttttgtggccgcgaatat

SEQ ID NO: 264098 - DNA, 75 bp, synthetic construct
  source 1..75: mol_type = other DNA
gtggtggaagcggctttgcgcagtggttcgctggtgacagcacgttgtgcgcttgagcaggggcgtgaagttttt

SEQ ID NO: 264099 - DNA, 75 bp, synthetic construct
  source 1..75: mol_type = other DNA
gcaggcacgtacaacggtacaacaaaccactcccgcagtgagccagcttgctgccgtaaccattaccaggagctg

SEQ ID NO: 264100 - DNA, 75 bp, synthetic construct
  source 1..75: mol_type = other DNA
tattctcccggcccctgcgggtctgtcaaaaaattcacgcatcagcctgaaaacgcgaacgctgctggggcatac

SEQ ID NO: 264101 - DNA, 75 bp, synthetic construct
  source 1..75: mol_type = other DNA
tgccacggatgtgaacggacaggtgttattacagctttcaacacagacgggcagcgaggtacagggctggttacc

SEQ ID NO: 264102 - DNA, 75 bp, synthetic construct
  source 1..75: mol_type = other DNA
aatcacagacataccatcgacagtaaaaaatctacatattgaattaactgattcaccatttatacacatcatatc

SEQ ID NO: 264103 - DNA, 75 bp, synthetic construct
  source 1..75: mol_type = other DNA
atgctacacaacatgaaaatttccatcaccgttcaacaacaagcagggcttaaacattttcatgttatccctcgt

SEQ ID NO: 264104 - DNA, 75 bp, synthetic construct
  source 1..75: mol_type = other DNA
tcgattcagcggaatggaactgctggataaatattatccgctggattcgatttcccgtgatgtgaaggcgttcgt

SEQ ID NO: 264105 - DNA, 75 bp, synthetic construct
  source 1..75: mol_type = other DNA
tcgcagaaaaatcggctgaccaatggttaatacaattgaccaatcaaattaaaaacatccctcaggctaaagaca

SEQ ID NO: 264106 - DNA, 75 bp, synthetic construct
  source 1..75: mol_type = other DNA
caaggcagtgacgacgcgctacggtatattgcggaacatgacgatgcgctggcgtttgcgtgtattaatcgccag

SEQ ID NO: 264107 - DNA, 75 bp, synthetic construct
  source 1..75: mol_type = other DNA
tgcttgaacagaattaaattaccagagatgaaagaattctcatcagaaaaaatatatgattacatcgatataatc

SEQ ID NO: 264108 - DNA, 75 bp, synthetic construct
  source 1..75: mol_type = other DNA
tcttgtttaccggtgcttcgctggaaacgatgaaaaccaccgtcgtgctcacagcccttcccttcctcgtcattt

SEQ ID NO: 264109 - DNA, 75 bp, synthetic construct
  source 1..75: mol_type = other DNA
ttgcccgggccgggttctatgcgttgctgcacaacccggtctcggcgcgtgataaagataaccagcgtctgctga

SEQ ID NO: 264110 - DNA, 75 bp, synthetic construct
  source 1..75: mol_type = other DNA
gataaagataatcagcgtctgctgacgcttatccgtgactcctattcactgagcggaggcgtatacggttaccgg

SEQ ID NO: 264111 - DNA, 75 bp, synthetic construct
  source 1..75: mol_type = other DNA
aggcgtatacggttaccggcggggtcatggcgacctgaacgaaatcggggaaacctgcggtaaaaaccgggtggg

SEQ ID NO: 264112 - DNA, 75 bp, synthetic construct
  source 1..75: mol_type = other DNA
ttggtagacaattattgttaactaagaatttaatgagttcaggatctttaacaaaggttgatgtatttaaaaaga

SEQ ID NO: 264113 - DNA, 75 bp, synthetic construct
  source 1..75: mol_type = other DNA
ttcaaacgtgaattaactggcgtcatcgcccgtcttgacctggctgaccagatcgacagcaaaaggaatgcggca

SEQ ID NO: 264114 - DNA, 75 bp, synthetic construct
  source 1..75: mol_type = other DNA
gccattgtgtttgactgcactaaagaaaagctatcggcggcatacgttgaaatggataaaagcaccgaatcacta

SEQ ID NO: 264115 - DNA, 75 bp, synthetic construct
  source 1..75: mol_type = other DNA
gcctcacacacctggagggaacatcattccgtcaaaacggttgaagatttgttgtcatgcgatcttatccattcg

SEQ ID NO: 264116 - DNA, 75 bp, synthetic construct
  source 1..75: mol_type = other DNA
taggtaaagttttttcccgggggctgaccccagcgtgcagatggttgctgcacttgccacgttctccgttccctt

SEQ ID NO: 264117 - DNA, 75 bp, synthetic construct
  source 1..75: mol_type = other DNA
acctgacactacagtatgataagaagctttatctccttgaagataatgaggaaaaccggcgttttcagggcaaat

SEQ ID NO: 264118 - DNA, 75 bp, synthetic construct
  source 1..75: mol_type = other DNA
gacagtgaattaaataaaattaataactatgttgacgaatattataaacaatggggtaaacaatatgtaagattt

SEQ ID NO: 264119 - DNA, 75 bp, synthetic construct
  source 1..75: mol_type = other DNA
attgaacagtgtgaactggtgatcaaagcggcgcgtaaggcgctggcggccatgcgagtaagtgtcgaagaagcg

SEQ ID NO: 264120 - DNA, 75 bp, synthetic construct
  source 1..75: mol_type = other DNA
attcctgcataccaccacctttggcggcaacccgctggcctgtgcggcggcgctggcgaccatcaatgtgttgct

SEQ ID NO: 264121 - DNA, 75 bp, synthetic construct
  source 1..75: mol_type = other DNA
taagaccagtccggttgcgccctttgaaccagaagtcaaacgtcaggctgtgtcaacgccaagattattggccgt

SEQ ID NO: 264122 - DNA, 75 bp, synthetic construct
  source 1..75: mol_type = other DNA
ggtggtgctgcaccagattgttgatcgccggacagcgtcgatgcgcagcgtggggatgctgacaaacctgaacta

SEQ ID NO: 264123 - DNA, 75 bp, synthetic construct
  source 1..75: mol_type = other DNA
aatgtgaatttgaaaaatcaggacacaaataatagttcatttagctacggagataaccgattcgagaagtctcaa

SEQ ID NO: 264124 - DNA, 75 bp, synthetic construct
  source 1..75: mol_type = other DNA
tatcactgccctcgctcagaaatttacaggcgtttatcgccgttgccaacgccctgagcatccatcaggcggcgg

SEQ ID NO: 264125 - DNA, 75 bp, synthetic construct
  source 1..75: mol_type = other DNA
tgttactggagaatatcgctgatgtccacagcctgttcctctattacgggagccgggtcgctcagccacttcgtg

SEQ ID NO: 264126 - DNA, 75 bp, synthetic construct
  source 1..75: mol_type = other DNA
acacactgatactcagtgagaacggcggcagaagcctgtattttgagcacctgtttcccggtgaggacggttaca

SEQ ID NO: 264127 - DNA, 75 bp, synthetic construct
  source 1..75: mol_type = other DNA
atgacatcactctagctcaggaattattaaattcctgtagccatcatgggggcgttagaattgaaaaaaatgagt

SEQ ID NO: 264128 - DNA, 75 bp, synthetic construct
  source 1..75: mol_type = other DNA
cggggagtacaccgatctgacgctggaccagttcgacgaatatccggactacattcctgccgaacctgtcgagtc

SEQ ID NO: 264129 - DNA, 75 bp, synthetic construct
  source 1..75: mol_type = other DNA
actctggcgtactacctcaaagaacgagagagatgccatccgtgcatcatttttatggaagggaacgctggcttt

SEQ ID NO: 264130 - DNA, 75 bp, synthetic construct
  source 1..75: mol_type = other DNA
tttaccgtgcattatccggaaccccggattacaccggagaaggtgagtttattattgctgcttttataaggacga

SEQ ID NO: 264131 - DNA, 75 bp, synthetic construct
  source 1..75: mol_type = other DNA
cccgaatgcggatccgatggctggctgacggaggatgcgctgtggcttatcagcaaaaccaccgccgaccgggtt

SEQ ID NO: 264132 - DNA, 75 bp, synthetic construct
  source 1..75: mol_type = other DNA
ctggcgggaatcaatgccagccatctttcggattatctggtcgatgaggttttggataacgtcgatctcgcaacg

SEQ ID NO: 264133 - DNA, 75 bp, synthetic construct
  source 1..75: mol_type = other DNA
aaggcgattttaattcatcatgttttagctcaggattattatacgtcgaacattctctcgcagatgtattatctc

SEQ ID NO: 264134 - DNA, 75 bp, synthetic construct
  source 1..75: mol_type = other DNA
acagttatgtcagtggataaaaggtatagatttttttaaggtgtcaaaagatatcaatggtaaatctattaatat

SEQ ID NO: 264135 - DNA, 75 bp, synthetic construct
  source 1..75: mol_type = other DNA
gttttgacgaattgctgtcggtattaaaagccaacttcgcaacgccagaaggcgaaaaagtccgcgctcgcttaa

SEQ ID NO: 264136 - DNA, 75 bp, synthetic construct
  source 1..75: mol_type = other DNA
atagcgattatcattacggtaaagaaaaatacaagcggaatgtttataaaatgatgttggaatgtaaaaacgagg

SEQ ID NO: 264137 - DNA, 75 bp, synthetic construct
  source 1..75: mol_type = other DNA
tggcgggtggcattaccggcgtgctggtgatcgctttcggaatcaaacgtctggcacctggtttgggtatctttg

SEQ ID NO: 264138 - DNA, 75 bp, synthetic construct
  source 1..75: mol_type = other DNA
cagcatgggcgctatcattattcccctctgtgttgcggtaaatattgcaatgctggtcgcccgtctgactgactg

SEQ ID NO: 264139 - DNA, 75 bp, synthetic construct
  source 1..75: mol_type = other DNA
gaaaattacatatctgtttacaatgctaggtattggagtaatttgtcttatgttatttgccgttgcgcttaagat

SEQ ID NO: 264140 - DNA, 75 bp, synthetic construct
  source 1..75: mol_type = other DNA
tttgccgatgcagcccggcgtgtacatgcagaattgtctcctggatgggaaaatccaaagcatgtaaggcagtgg

SEQ ID NO: 264141 - DNA, 75 bp, synthetic construct
  source 1..75: mol_type = other DNA
gccctatcattacttcaggtgtatgctgacataacgtgtaatgcgcatggcgctgggattagcaaaccattttat

SEQ ID NO: 264142 - DNA, 75 bp, synthetic construct
  source 1..75: mol_type = other DNA
atgctgatcccgttcgttactctgctggttttcggcgtgctcacttactacgttatcggaccggtaatgtccgac

SEQ ID NO: 264143 - DNA, 75 bp, synthetic construct
  source 1..75: mol_type = other DNA
tgacgttgggtttgctttcctcactgggaccccaggcttacgcggccgggttagtgttaaatgacaacgacttac

SEQ ID NO: 264144 - DNA, 75 bp, synthetic construct
  source 1..75: mol_type = other DNA
tccagggtaacgttgaagggggagagcggatcagcaacgggtctcgctttaacgccaatggcgcctatggcgcgg

SEQ ID NO: 264145 - DNA, 75 bp, synthetic construct
  source 1..75: mol_type = other DNA
aatcaatataccgctgtgccacatacaaaaattatcggcggtcgttttactttctcacctttccagtcactggaa

SEQ ID NO: 264146 - DNA, 75 bp, synthetic construct
  source 1..75: mol_type = other DNA
atggctaaaaatcttagcaaaaagtgggtcgagctctttaaccacactcgcgcccggttccagagtgaaatatcc

SEQ ID NO: 264147 - DNA, 75 bp, synthetic construct
  source 1..75: mol_type = other DNA
aagccttcatcattcagtcgcttgcgtgttatgacacgccatcgcaggtggtcgaggctgtccaaaaagaattcg

SEQ ID NO: 264148 - DNA, 75 bp, synthetic construct
  source 1..75: mol_type = other DNA
gtttctacggccagatgatcggtgaggatgaatcaggttacctgccatcggccaacatgttcctgggtggggtcg

SEQ ID NO: 264149 - DNA, 75 bp, synthetic construct
  source 1..75: mol_type = other DNA
accattccgttttggaactctatggaaggggaaatgggcaaagagggtaagcgtcaacggagcaccgtattgacg

SEQ ID NO: 264150 - DNA, 75 bp, synthetic construct
  source 1..75: mol_type = other DNA
attattgatgatgaaagacaagacgtaatgtatgaaaaaataaagggaaaagattataaaagaaacaataaatta

SEQ ID NO: 264151 - DNA, 75 bp, synthetic construct
  source 1..75: mol_type = other DNA
ggagtaggtaaaactcacttagtcaaagcaatttctaaatttatctttaaagaagaacctaatagcaggatactc

SEQ ID NO: 264152 - DNA, 75 bp, synthetic construct
  source 1..75: mol_type = other DNA
aaacagcagcgcctgccacaactaacggtatctacaatacgctgacaaccaatgaactttccggtagcggtaatt

SEQ ID NO: 264153 - DNA, 75 bp, synthetic construct
  source 1..75: mol_type = other DNA
agtggatacgaacatcaataattttcgactctggaatctctctcctttttctcaacaaccgtttgtatagtgact

SEQ ID NO: 264154 - DNA, 75 bp, synthetic construct
  source 1..75: mol_type = other DNA
gccggaatgagtacaaccttcattacatattatcagccagaacacggtaagccatttgaagtcgagcatatttgg

SEQ ID NO: 264155 - DNA, 75 bp, synthetic construct
  source 1..75: mol_type = other DNA
tcgtgcagttgctttcattgaaagtgaagtggaagagtggattcaatcaactatcgagaattcaagaaagcatgt

SEQ ID NO: 264156 - DNA, 75 bp, synthetic construct
  source 1..75: mol_type = other DNA
gccttactgctttaactgttccgcgtgcgcatagccgcattcaccgcatcacaaaattcactttaaaaagggcgg

SEQ ID NO: 264157 - DNA, 75 bp, synthetic construct
  source 1..75: mol_type = other DNA
agtctatttctgaatattcatttgtattgcctgagaagagcaagattttaaggctcataaaattaaaagatcaac

SEQ ID NO: 264158 - DNA, 75 bp, synthetic construct
  source 1..75: mol_type = other DNA
acggcctggaaaaacgctttccgggcatggacaagcccgctgtcgcgccactcgactgtaccattcacgctggtt

SEQ ID NO: 264159 - DNA, 75 bp, synthetic construct
  source 1..75: mol_type = other DNA
tcgtgctattgcttttatcgaaagcgaaatcgatgaatggattcaattaactatagagaattcaagaaagcatgt

SEQ ID NO: 264160 - DNA, 75 bp, synthetic construct
  source 1..75: mol_type = other DNA
tatactcatcatgaagcaaaaaatttccttctaaacagtaatgactctttaaatctaatgtcttgggatattata

SEQ ID NO: 264161 - DNA, 75 bp, synthetic construct
  source 1..75: mol_type = other DNA
tcacaagaatatgaattcattcctaaattaattaatgaattagaaacatctgctcaaatcggtaatcttttatta

SEQ ID NO: 264162 - DNA, 75 bp, synthetic construct
  source 1..75: mol_type = other DNA
tgatctcaagcgtacgtattgtccatgcgatgaataaaggaaaagttatgaaacacaagctttctgcaatcctta

SEQ ID NO: 264163 - DNA, 75 bp, synthetic construct
  source 1..75: mol_type = other DNA
tacaggtgataaatcaggtgggttaatgccctgttttaaccaggtacttcttgaacgaattggccttaatagcag

SEQ ID NO: 264164 - DNA, 75 bp, synthetic construct
  source 1..75: mol_type = other DNA
caggctggcgcgcgggtggttcgtgtggctacgcactgcaccgaagctgatgtttccgctcagcatattcagtat

SEQ ID NO: 264165 - DNA, 75 bp, synthetic construct
  source 1..75: mol_type = other DNA
ccgcgatttcaaatctaagcgcggggattatgagcacaacaagcggtagtggccagactcgtaatgcagggaaga

SEQ ID NO: 264166 - DNA, 75 bp, synthetic construct
  source 1..75: mol_type = other DNA
ttctggtggaactgggcaaacgtcggatggtgggcggccaggaagatatgatcgtcgacgtagcgctggacctgc

SEQ ID NO: 264167 - DNA, 75 bp, synthetic construct
  source 1..75: mol_type = other DNA
tcaaggtttatataaaataggattgtatatttcaatactttgtattataattgcagtgccgcttatgtatgtgtt

SEQ ID NO: 264168 - DNA, 75 bp, synthetic construct
  source 1..75: mol_type = other DNA
tatcaacaggattgcgcgggcctggtgcgatttgcggcgaacgaggcgctgaaagttcacgacagtaaatggcta

SEQ ID NO: 264169 - DNA, 75 bp, synthetic construct
  source 1..75: mol_type = other DNA
tattatggtcgccgataaaatattatgtgtattagatccgagtgttcatgcattcctatttttgagtcatgtatg

SEQ ID NO: 264170 - DNA, 75 bp, synthetic construct
  source 1..75: mol_type = other DNA
atggcagaagtgcaggcggcaaaaacgaaggcagaagaggcagcaacccgggcagcagtccccggaccgaagggg

SEQ ID NO: 264171 - DNA, 75 bp, synthetic construct
  source 1..75: mol_type = other DNA
gtgaacatcaacaccacgataacgatcgatacagccctgaacaccggcctggcgctccttggttatttctacatc

SEQ ID NO: 264172 - DNA, 75 bp, synthetic construct
  source 1..75: mol_type = other DNA
atggtaaatgatgcacaaataacgataaatacggttctgaacatcggcctggcactcattggttatttttacatc

SEQ ID NO: 264173 - DNA, 75 bp, synthetic construct
  source 1..75: mol_type = other DNA
gacggtgtatgacgatcacagctttgaccggcagattataatcccgccgataatctatgtcgggtcaaaacagga

SEQ ID NO: 264174 - DNA, 75 bp, synthetic construct
  source 1..75: mol_type = other DNA
gggcaaacctgccagtggtcgggccgtattatctcaggaacaggacggcattaaatcgcaaacccacagcgccag

SEQ ID NO: 264175 - DNA, 75 bp, synthetic construct
  source 1..75: mol_type = other DNA
gtattgtctcaggaacaggacggcattaaatcgcatacccacagcgccagcgcatccagtactgatttggggacg

SEQ ID NO: 264176 - DNA, 75 bp, synthetic construct
  source 1..75: mol_type = other DNA
gtattgtctcaggaacaggacggcattaaatcgcaaacccacagcgccagcgcatccagtacagatttggggacg

SEQ ID NO: 264177 - DNA, 75 bp, synthetic construct
  source 1..75: mol_type = other DNA
gtattctctcaggaacaggacggcattaaatcgcacacccacagcgccagcgcatccagtacggatttggggacg

SEQ ID NO: 264178 - DNA, 75 bp, synthetic construct
  source 1..75: mol_type = other DNA
ccttattgctcagggcatcccagaagaattcgcacagaaagcagtgctggcgatcgctggcggcaaagtgcagca

SEQ ID NO: 264179 - DNA, 75 bp, synthetic construct
  source 1..75: mol_type = other DNA
gtattgtctcaggaacaggacggcattaaatcgcagacccacagcgccagcgcatccagtacggatttggggacg

SEQ ID NO: 264180 - DNA, 75 bp, synthetic construct
  source 1..75: mol_type = other DNA
gtattgtctcaggaacaggacggcattaaatcgcacacccacagcgccagcgcatccagtaccgatttggggacg

SEQ ID NO: 264181 - DNA, 75 bp, synthetic construct
  source 1..75: mol_type = other DNA
gggcaatcctgccagtggtcgggccgtattttctcaggaacaggacggcattaaatcgcagacccacagcgccag

SEQ ID NO: 264182 - DNA, 75 bp, synthetic construct
  source 1..75: mol_type = other DNA
gggcaaacctgccagtggtcgggccgtattgtctcaggaacaggacggcattaaatcgcagacccacagcgccag

SEQ ID NO: 264183 - DNA, 75 bp, synthetic construct
  source 1..75: mol_type = other DNA
gggcaaacctgccagtggtcgggccgtattctctcaggaacaggacggcattaaatcgcacacccacagcgccag

SEQ ID NO: 264184 - DNA, 75 bp, synthetic construct
  source 1..75: mol_type = other DNA
gtattatctcaggaacaggacggcattaaatcgcaaacccacagcgccagcgcatccagtacggatttggggacg

SEQ ID NO: 264185 - DNA, 75 bp, synthetic construct
  source 1..75: mol_type = other DNA
gggcaagcctgccagtggtcgggccgtattatctcaggaacaggacggcattaaatcgcagacccacagcgccag

SEQ ID NO: 264186 - DNA, 75 bp, synthetic construct
  source 1..75: mol_type = other DNA
gggcaaccctgccagtggtcgggccgtattatctcaggaacaggacggcattaaatcgcacacccacagcgccag

SEQ ID NO: 264187 - DNA, 75 bp, synthetic construct
  source 1..75: mol_type = other DNA
ttttactgttgttgaagtggacgaactgccggaaggtgtgaatattgacggtaactggcagttttctgatggcct

SEQ ID NO: 264188 - DNA, 75 bp, synthetic construct
  source 1..75: mol_type = other DNA
tatcattgattttcatggtgatgtttatgcaactgattaatgtcaaacgatattacccggaagacaaaccctatg

SEQ ID NO: 264189 - DNA, 75 bp, synthetic construct
  source 1..75: mol_type = other DNA
ctgaaggggggatggaatttttatcagtatccgttgaatccagttacgaatacagatcctctggggttagaagtt

SEQ ID NO: 264190 - DNA, 75 bp, synthetic construct
  source 1..75: mol_type = other DNA
ggagcaaaaggtgatggaataaatgatgattcttacgcttttcaacaagcctgtaatactgctagttctttgggg

SEQ ID NO: 264191 - DNA, 75 bp, synthetic construct
  source 1..75: mol_type = other DNA
ataaaggtggcgttggtaaaacaacagttacgtctaatttagccgctgaattagcattccgaggaaagaatgttt

SEQ ID NO: 264192 - DNA, 75 bp, synthetic construct
  source 1..75: mol_type = other DNA
tcagcaggtgaaactgtcgatgccggaactggaagaactggcggcagcaatggtgcaggcgcaggtcgatcgcaa

SEQ ID NO: 264193 - DNA, 75 bp, synthetic construct
  source 1..75: mol_type = other DNA
ggtgctgaatggcctgaagaggaaatgagttcttggcttggggaggggactaacacttgtcctgactgtagagat

SEQ ID NO: 264194 - DNA, 75 bp, synthetic construct
  source 1..75: mol_type = other DNA
aaaaaagttggcgagacatatgccggattgaaaatgaccgcgttgattatcaatgatttcggcgcagatgaaaaa

SEQ ID NO: 264195 - DNA, 75 bp, synthetic construct
  source 1..75: mol_type = other DNA
cggggaatatatagatctgacgctggatcagtttccagaatatccggagtatatcccggctgaagctgtcgagtc

SEQ ID NO: 264196 - DNA, 75 bp, synthetic construct
  source 1..75: mol_type = other DNA
gataaaatacttatccctgccaaacctgactatttatcaacattaggtattgattatctcaaacgaagcgtagat

SEQ ID NO: 264197 - DNA, 75 bp, synthetic construct
  source 1..75: mol_type = other DNA
tcgtttcacgaatagaggtggatgtgttgatttaatatcatcccatcttggtttaataaatgtagatctagaatt

SEQ ID NO: 264198 - DNA, 75 bp, synthetic construct
  source 1..75: mol_type = other DNA
tttggtttatacgatctagataaagaagtttctaaggaaatatctaattcctataatatactttctgacgaatat

SEQ ID NO: 264199 - DNA, 75 bp, synthetic construct
  source 1..75: mol_type = other DNA
ttccttattgattattgttttaagttagtagtttgcaatgatgctgatttttcacgttatatgaatgctcatccg

SEQ ID NO: 264200 - DNA, 75 bp, synthetic construct
  source 1..75: mol_type = other DNA
gctattgctgacagtaatgagccggagtccgaacgtattgtgattggcgctcgggcggataaggtgtcggatgat

SEQ ID NO: 264201 - DNA, 75 bp, synthetic construct
  source 1..75: mol_type = other DNA
gctatcacggatggctcagtaacatttaatggtaaagttattgctccagcttgtaccctggtagctgcgacgaaa

SEQ ID NO: 264202 - DNA, 75 bp, synthetic construct
  source 1..75: mol_type = other DNA
gctgtgctatgacggttatctcacgccacaaaatccggcgaatcaacatcattgtattggtgccagttatcatcg

SEQ ID NO: 264203 - DNA, 75 bp, synthetic construct
  source 1..75: mol_type = other DNA
cacagaaaaatatgcggttggctctttcttatttggttcgatatcgactctcgaaagtgaaagtgcaattaaaga

SEQ ID NO: 264204 - DNA, 75 bp, synthetic construct
  source 1..75: mol_type = other DNA
tcggctctggttgttcttcagatatcaaaaaatgagatcacaggtaatggcgtcgatagcgcaacgctaactgca

SEQ ID NO: 264205 - DNA, 75 bp, synthetic construct
  source 1..75: mol_type = other DNA
gactgtgaacttcaccagcaacgcagcgacagccgaaatgacgaatggcggccaagccgtaacgaacgaacaggg

SEQ ID NO: 264206 - DNA, 75 bp, synthetic construct
  source 1..75: mol_type = other DNA
tggtcggaacaacgggcgacggagcaaccatatatcaaactagcaatccaggtattggcattgcatatcaactca

SEQ ID NO: 264207 - DNA, 75 bp, synthetic construct
  source 1..75: mol_type = other DNA
cacacgctgactttcccggaaggtttaagcaagagtggttacctacacatcaagtatgaattagttcgtcttaca

SEQ ID NO: 264208 - DNA, 66 bp, synthetic construct
  source 1..66: mol_type = other DNA
atgattccctcactcagggaaacggcatcagcgcaggctctccagcatcgtttctgccatcaccca

SEQ ID NO: 264209 - DNA, 75 bp, synthetic construct
  source 1..75: mol_type = other DNA
aagacgaacttgccagcgaaccgtggtacagcgtctcgccgggcgatgttttcccggaagagtttcgccactggc

SEQ ID NO: 264210 - DNA, 75 bp, synthetic construct
  source 1..75: mol_type = other DNA
agtcattgtcaaaaagatgggtttgtatgccttcatgtcatcaatctttatttataagagtctcgatacataaaa

SEQ ID NO: 264211 - DNA, 75 bp, synthetic construct
  source 1..75: mol_type = other DNA
cgagttattgcttcaggaagaacaacagttaccaattgatgttgaagatattggatttaaaatccactatataaa

SEQ ID NO: 264212 - DNA, 75 bp, synthetic construct
  source 1..75: mol_type = other DNA
tccgtggggatgccatgcggccgatgaccggctttttaatgcagagagccgaacaggccgcaccagagacctggt

SEQ ID NO: 264213 - DNA, 75 bp, synthetic construct
  source 1..75: mol_type = other DNA
gccgctgggatacctcattcgtgtgtctgagtggtgggagttcggcggagaaccgggaacatttaccgttgaagt

SEQ ID NO: 264214 - DNA, 75 bp, synthetic construct
  source 1..75: mol_type = other DNA
gcgctgggcaatgacccgaactttgcgacaaccgtcactaacgcgctggcgggtaaacaaccactcagtgatgtg

SEQ ID NO: 264215 - DNA, 75 bp, synthetic construct
  source 1..75: mol_type = other DNA
tgactgatggcgcaggactccccatgtccggataccatattattctgaaagcccggcagaatacatctgcagtgg

SEQ ID NO: 264216 - DNA, 75 bp, synthetic construct
  source 1..75: mol_type = other DNA
atttttgcgctcccaacccaaagcctgtcactatggggcgcgtatttcagaccggcgtcgagcgtgtgctatttc

SEQ ID NO: 264217 - DNA, 75 bp, synthetic construct
  source 1..75: mol_type = other DNA
gttgacccgtcaaatattgacccctcaacggttgacccgtcaaattttgatggatcaactgttgataaaaaactg

SEQ ID NO: 264218 - DNA, 75 bp, synthetic construct
  source 1..75: mol_type = other DNA
tctgggttacatcatcagcatgagcgaatggtgggaaaccggcgatccacccggcacttttcgcctgaatgtggg

SEQ ID NO: 264219 - DNA, 75 bp, synthetic construct
  source 1..75: mol_type = other DNA
aacgacgcctctggatatgcaaaaggaatcattattcagggcaaaaacagctccctgacagctaaccgactcaca

SEQ ID NO: 264220 - DNA, 75 bp, synthetic construct
  source 1..75: mol_type = other DNA
gaagttctgacagtggtaaaaaccactgacggggcggcctcgttcagcgcgtcttctcaggttgagttgggggga

SEQ ID NO: 264221 - DNA, 75 bp, synthetic construct
  source 1..75: mol_type = other DNA
cgccagaaaaatagtttccacgtactggacagtcagaacaacggcgttaacgccaacggcactgcgaatggattg

SEQ ID NO: 264222 - DNA, 75 bp, synthetic construct
  source 1..75: mol_type = other DNA
ttgataacgacgagtcggacacaacgcgcaaattcaaaacgctgatgttttataaccagtattacgaaggtgagc

SEQ ID NO: 264223 - DNA, 75 bp, synthetic construct
  source 1..75: mol_type = other DNA
agagggccggattttactggcgcagctgtcagaaaaagcccgcgcattactggcgctggacacgcctgaagccat

SEQ ID NO: 264224 - DNA, 75 bp, synthetic construct
  source 1..75: mol_type = other DNA
ccccaccagtgcttaaactggcagctgaacaagcgccaaccggtcgcgtggagcgggaaaaacgacgcgcagcag

SEQ ID NO: 264225 - DNA, 75 bp, synthetic construct
  source 1..75: mol_type = other DNA
cagcaccaactcaaaagtatttggtcagccagcctggctggcggcacaccttaacggtgatagtgtcgcaggaat

SEQ ID NO: 264226 - DNA, 75 bp, synthetic construct
  source 1..75: mol_type = other DNA
ctgaatcctgcaaatggagaagttttagtacacgatttaatgtttagtggatttatggattttgtcgaaacttct

SEQ ID NO: 264227 - DNA, 75 bp, synthetic construct
  source 1..75: mol_type = other DNA
agccatgcagatacgcagtttaaaaatgttccgtcagcttttcaggttggttatatcaatgattttggtggatta

SEQ ID NO: 264228 - DNA, 75 bp, synthetic construct
  source 1..75: mol_type = other DNA
aggaatgtatcgcgcctggggctacgcaggcgatacgccaaccaccggtatctaccgtgaaaaaggggacaccgt

SEQ ID NO: 264229 - DNA, 75 bp, synthetic construct
  source 1..75: mol_type = other DNA
ttatcttcttgctttcttattgtatatcaactcctacattagctacggctgtagtagaaggggttgctgttgatc

SEQ ID NO: 264230 - DNA, 75 bp, synthetic construct
  source 1..75: mol_type = other DNA
aagggggcttagaaaagcaataagtgagttttctattcgttttaaatatatgataaagctcagggagtttaatat

SEQ ID NO: 264231 - DNA, 75 bp, synthetic construct
  source 1..75: mol_type = other DNA
gtatctcttgacgtctataattatttagactctcttaatgaaaatacaaatattcatgtaactaaggtgaatgaa

SEQ ID NO: 264232 - DNA, 75 bp, synthetic construct
  source 1..75: mol_type = other DNA
ggatgattacggcgcgttacgcatgacgacgctcaactgcagcggacaatgccgtttacaagcagtggaggcgaa

SEQ ID NO: 264233 - DNA, 75 bp, synthetic construct
  source 1..75: mol_type = other DNA
acgcacaatttcaggaatgtcgccataatgccctagagtggttacttgcctgctataacaagcagaacgatcacg

SEQ ID NO: 264234 - DNA, 75 bp, synthetic construct
  source 1..75: mol_type = other DNA
tatcaccgccgctccccgcaagaagtggaagcgttgatggcgtattccggactttcgtttgagcatgcaatatgc

SEQ ID NO: 264235 - DNA, 75 bp, synthetic construct
  source 1..75: mol_type = other DNA
tgacggcgcaacccgccagtttgtgccactggcagctaatcctcgcgtttgtgccataccgctacgccaaccgac

SEQ ID NO: 264236 - DNA, 75 bp, synthetic construct
  source 1..75: mol_type = other DNA
tgcgtgaaattcctccctccccagaaaaaaacagcggccatgccgttctgcaggtcgccatccagagtcgtatca

SEQ ID NO: 264237 - DNA, 75 bp, synthetic construct
  source 1..75: mol_type = other DNA
gatggttgcaccttttagtacggtcaacacaaacaccggaagttatagcggcagccagttttatctcggttacat

SEQ ID NO: 264238 - DNA, 75 bp, synthetic construct
  source 1..75: mol_type = other DNA
gatatatcatgtgtttctttttgggatctcgcttagcatacgctgaaaatattgacggcagcagtagcattagca

SEQ ID NO: 264239 - DNA, 75 bp, synthetic construct
  source 1..75: mol_type = other DNA
tataactattcccagattggagtaatgggtgggatagggagtgccgcgaacaaaacaacgtcaacaaataataaa

SEQ ID NO: 264240 - DNA, 75 bp, synthetic construct
  source 1..75: mol_type = other DNA
ttgacgccaaccgctacctcggaaagtggtatgaaatagctcgcctcgagaaccgattcgaacgtggtctggaac

SEQ ID NO: 264241 - DNA, 75 bp, synthetic construct
  source 1..75: mol_type = other DNA
tataccgtggccatcagccacccctccacaaggctacctggtgatgaacgggcagtcattttcatgctcccggta

SEQ ID NO: 264242 - DNA, 75 bp, synthetic construct
  source 1..75: mol_type = other DNA
aaaacagctacggcaggcacaaagtgtgcaccggacggacttgtaggccgcaccagtacaggggccatactttca

SEQ ID NO: 264243 - DNA, 75 bp, synthetic construct
  source 1..75: mol_type = other DNA
acggtcgcaaaaggtaataacgcatctgcaacgctggactactctgattcaaaaattaatatcggtaatggatat

SEQ ID NO: 264244 - DNA, 75 bp, synthetic construct
  source 1..75: mol_type = other DNA
ttctggtttgggacgatgtttgccgaacagatccgcgacaagcacaagagctttccgtttctggaaatcgttggc

SEQ ID NO: 264245 - DNA, 75 bp, synthetic construct
  source 1..75: mol_type = other DNA
tcaaaaagcgcctgctgcatatcgcgcagggcggcatcttcaccggcaccagtcagcagttagataagttgctgc

SEQ ID NO: 264246 - DNA, 75 bp, synthetic construct
  source 1..75: mol_type = other DNA
ggttggcctgttaattggcattttatccgggtactacggcggttggctggaacgcgtactgatgcgttttactga

SEQ ID NO: 264247 - DNA, 75 bp, synthetic construct
  source 1..75: mol_type = other DNA
ttctgctgatttaaccgcagagaagttcgccacagcaatccgaaaccactggcacgtggagaataagctgcactg

SEQ ID NO: 264248 - DNA, 75 bp, synthetic construct
  source 1..75: mol_type = other DNA
cccgggcacgcaggacgctggtactcaatgagctcatgcagcaactggcggaggaaaagagcaggacgaaggaga

SEQ ID NO: 264249 - DNA, 75 bp, synthetic construct
  source 1..75: mol_type = other DNA
atgagtgaagctcttggtattacagtgttttatattttcatcgcggcaatactcgttgtcgcggtgctatacctt

SEQ ID NO: 264250 - DNA, 75 bp, synthetic construct
  source 1..75: mol_type = other DNA
gcaactggcagagctgctctacggcggtcgccagtacctgaccaccatcaatatgtccgagttccaggagaaaca

SEQ ID NO: 264251 - DNA, 75 bp, synthetic construct
  source 1..75: mol_type = other DNA
atagcaaatgcgtttaccggtgatgaatgttattttgactacaatatagtttcaaaaaagggaaaagaagtaaag

SEQ ID NO: 264252 - DNA, 75 bp, synthetic construct
  source 1..75: mol_type = other DNA
aactgcatgtgacagacattaccagaggtgcgacttacccggtactgatagacagcattgcggtggaagtgaaca

SEQ ID NO: 264253 - DNA, 75 bp, synthetic construct
  source 1..75: mol_type = other DNA
ccacgaagcgcaacaaccgtaagattcacgcccgtaaattcctggcaacaccagaggggaaagcctggcttgcta

SEQ ID NO: 264254 - DNA, 75 bp, synthetic construct
  source 1..75: mol_type = other DNA
cgtacgctgatgcaacggatgggtgacctgcgaaatcagagtaaagacggtaatatctggttgcgcagttatggg

SEQ ID NO: 264255 - DNA, 75 bp, synthetic construct
  source 1..75: mol_type = other DNA
gcgaatgcactcactgttgatgtaactggagccgcggccaatggcgtcgaagttcgtggtggtacaaccactatc

SEQ ID NO: 264256 - DNA, 75 bp, synthetic construct
  source 1..75: mol_type = other DNA
gtctctctgatgaaaaccggggcggttcagccgttgtatgtcggtctgtatattggctcaacacatgcatcgccg

SEQ ID NO: 264257 - DNA, 75 bp, synthetic construct
  source 1..75: mol_type = other DNA
agtcagagtcagagtcagaacaggataataccggtgccgtaccggctgatgaggccgacagagaacagccggaag

SEQ ID NO: 264258 - DNA, 75 bp, synthetic construct
  source 1..75: mol_type = other DNA
ccagcctgcataagcatctactgaccgcacgcgccgacctgcgtcgtccgggacgcccgctcggtgcgttcctgc

SEQ ID NO: 264259 - DNA, 75 bp, synthetic construct
  source 1..75: mol_type = other DNA
taccgtctcgcgactgattggttcgcctccgggctacgttggctacggtgaaggcggcgtactgaccgaagcgat

SEQ ID NO: 264260 - DNA, 75 bp, synthetic construct
  source 1..75: mol_type = other DNA
tcatattgttgatgcgacatcttctttatatattacaggtgatgagaaagaacgattgttgctgaaaaatattaa

SEQ ID NO: 264261 - DNA, 75 bp, synthetic construct
  source 1..75: mol_type = other DNA
atgataaaacgttggcactggcgctgtgggcagagtgagtttctcatggcggttgaagacaacaattcaaccgcc

SEQ ID NO: 264262 - DNA, 75 bp, synthetic construct
  source 1..75: mol_type = other DNA
gttttgccgcatttatctttaaagctatttaatcagccaataactataccagcactatatagctttgtgggcttt

SEQ ID NO: 264263 - DNA, 75 bp, synthetic construct
  source 1..75: mol_type = other DNA
accgataaaagccctgggcaccgacgttcagcgcaacttgcagatcccgttgaagggtattgccgatgaacggcg

SEQ ID NO: 264264 - DNA, 75 bp, synthetic construct
  source 1..75: mol_type = other DNA
tattatcgataacctgctcgcccgcggctttcacgttcgcgcattgacgcgtactgcccgcgctcacgtcaatga

SEQ ID NO: 264265 - DNA, 75 bp, synthetic construct
  source 1..75: mol_type = other DNA
agcgattaacggtattacaccgacggcggaaaacattcgcaacggcaaatatgcgtacatcgtcgatgcatttat

SEQ ID NO: 264266 - DNA, 75 bp, synthetic construct
  source 1..75: mol_type = other DNA
agggctgctttgccctgcctgaaacttttcttgatcgcaccgtcaatatcttcgtcccatcgggcaatgaaaggg

SEQ ID NO: 264267 - DNA, 75 bp, synthetic construct
  source 1..75: mol_type = other DNA
tccaacagggcttggcgatcgcgccgaccgcggtattagtccgctggcgcaagaaggtctgctgaaatgggcatt

SEQ ID NO: 264268 - DNA, 75 bp, synthetic construct
  source 1..75: mol_type = other DNA
atgagcaccatcaaccaccaggaaccacgtgaactgacgactgccgtacaaagaatgtctacccaaaaatcactg

SEQ ID NO: 264269 - DNA, 75 bp, synthetic construct
  source 1..75: mol_type = other DNA
cagcgcgacgctgaagggtatctgcaaccgccctgcgcgcccggcaccgatgaccgcaatacacaaagccaggtt

SEQ ID NO: 264270 - DNA, 75 bp, synthetic construct
  source 1..75: mol_type = other DNA
acatcatgttcgttttccgtgtcttgacatcctccacgccctgaatgacgaggatccctgctacgttcaggctgt

SEQ ID NO: 264271 - DNA, 75 bp, synthetic construct
  source 1..75: mol_type = other DNA
tttgatttgtggatggaaagagaatatcggggggtaccgtttgagaggtacgctgatgatattgtagtacattgt

SEQ ID NO: 264272 - DNA, 75 bp, synthetic construct
  source 1..75: mol_type = other DNA
ctgacgccggtgttttacgtgacgctacggaaactggtgacccgcaggaagccggtccaggaggatctgcccgcc

SEQ ID NO: 264273 - DNA, 75 bp, synthetic construct
  source 1..75: mol_type = other DNA
caccgtcaccttccgcccgggtaccgacccggatcaggcgcaggttcaggtgcagaaccgcgtcgcgcaggccga

SEQ ID NO: 264274 - DNA, 75 bp, synthetic construct
  source 1..75: mol_type = other DNA
cgatatgacggtggtcgatctcagtggtcgccagctgctgtcgctttgcgaagcacatcaggagaatcagccact

SEQ ID NO: 264275 - DNA, 75 bp, synthetic construct
  source 1..75: mol_type = other DNA
tcacgatccctcttaagagataaagagaagttttccaagttgcgcgagcaaggcattgctctaaatgaaaatggt

SEQ ID NO: 264276 - DNA, 75 bp, synthetic construct
  source 1..75: mol_type = other DNA
gtactaattacatatacacgcatcatatttacaagggtggttattaccaacagggatatccgttgggtgacgcga

SEQ ID NO: 264277 - DNA, 75 bp, synthetic construct
  source 1..75: mol_type = other DNA
aacggcagggggctagcgcagaaatgggttgagctattccacgaaacccgtaagcgcttccagactgaattaagc

SEQ ID NO: 264278 - DNA, 75 bp, synthetic construct
  source 1..75: mol_type = other DNA
gacattccgatcgccaataaagcctaccgcctgcgagtccttcagcgaatgtctacgactgccgaaggtatgaaa

SEQ ID NO: 264279 - DNA, 75 bp, synthetic construct
  source 1..75: mol_type = other DNA
agcggcgagtggtgggatgtgcacctgcagggtaacgtcgaagggggggagcggatcagcaacggatcgcgcttc

SEQ ID NO: 264280 - DNA, 75 bp, synthetic construct
  source 1..75: mol_type = other DNA
ggaccaattacagctatacccaccacatctacaaagatggttattaccaacaagggtatccactgggcgatgcga

SEQ ID NO: 264281 - DNA, 75 bp, synthetic construct
  source 1..75: mol_type = other DNA
gtggtgctggcccgtatcaatcagcgactgtcagcgttaaaagccgattttcgggtcaccggctacgcctcaacc

SEQ ID NO: 264282 - DNA, 75 bp, synthetic construct
  source 1..75: mol_type = other DNA
ctgggcagtaatgcttattgtttgcttctttgttaatattgctggggtatatcatccaaacttgttttcaaaaga

SEQ ID NO: 264283 - DNA, 75 bp, synthetic construct
  source 1..75: mol_type = other DNA
tatgactcgtgtggttaagcgcggtctgtcccggatgaaaaagcctttattagcacgtcatatgaatgtagacga

SEQ ID NO: 264284 - DNA, 75 bp, synthetic construct
  source 1..75: mol_type = other DNA
gtgcccgaagcgttgttgccagcccctgcctgtagcatggactggtccggcagccggtactcgctgctgttcgaa

SEQ ID NO: 264285 - DNA, 75 bp, synthetic construct
  source 1..75: mol_type = other DNA
aagatgatgacctacaagtagagaaaataatatcgacagctggagcgccagagactgacgatatacaaattattg

SEQ ID NO: 264286 - DNA, 75 bp, synthetic construct
  source 1..75: mol_type = other DNA
cagactcaaacatttttctacaatgcaaggacttgacgcaggtaaatttttccgagattactgcttgtgatgaag

SEQ ID NO: 264287 - DNA, 75 bp, synthetic construct
  source 1..75: mol_type = other DNA
gccgatgcaatgagacattgttacttgatgtgtcgaatgactaagacatttggatcaacaatagctgacgtgata

SEQ ID NO: 264288 - DNA, 75 bp, synthetic construct
  source 1..75: mol_type = other DNA
gaccgatggctgtgtagaagtactcgccgatagtggaaaccgacgccccagcactcgtccgagggcaaaggaata

SEQ ID NO: 264289 - DNA, 75 bp, synthetic construct
  source 1..75: mol_type = other DNA
gaaatacgacagactcatcgcaaatgaaactaatgccttaaaacttgctgaattgcaggacaagagattgcagaa

SEQ ID NO: 264290 - DNA, 75 bp, synthetic construct
  source 1..75: mol_type = other DNA
tagtttgtccccaaatcagtctgaaaaatcagccagagcagctatcaaaacaatcataaaaaccactgagatggc

SEQ ID NO: 264291 - DNA, 75 bp, synthetic construct
  source 1..75: mol_type = other DNA
ctacggtatcggcgcgggtattatctccgggaataaaatgctacgcggcgggttctgcaatgccggtgaagtcgg

SEQ ID NO: 264292 - DNA, 75 bp, synthetic construct
  source 1..75: mol_type = other DNA
gcattgcactctctttcactctgatagcatgtaaggccccgacaccacctaaaggtgtgcagccgattacaaatt

SEQ ID NO: 264293 - DNA, 75 bp, synthetic construct
  source 1..75: mol_type = other DNA
gcgcacgccaaccatcccggatgcggtgaaacaggattatctgaacaccgcgcgcggtctgggcttccaggttga

SEQ ID NO: 264294 - DNA, 75 bp, synthetic construct
  source 1..75: mol_type = other DNA
gatgtaaaaaaccatttcaaagttgatcgtgattttcaacaaaaattaatcaattctgtttcaaaccattatagc

SEQ ID NO: 264295 - DNA, 75 bp, synthetic construct
  source 1..75: mol_type = other DNA
gccggaaaactgcgggcagtggcgtacgtggattgtgctgcgggcgcgacactgcaggaagtggtgcagcgtcgt

SEQ ID NO: 264296 - DNA, 75 bp, synthetic construct
  source 1..75: mol_type = other DNA
gtagtggtgacggtgttgtgtcgccgttttccggcacactgagtggtggcgaagatgaaccgtttccgctgaata

SEQ ID NO: 264297 - DNA, 75 bp, synthetic construct
  source 1..75: mol_type = other DNA
taacaatcgacctgatcgctaaagtaggtggatttgttcagggcatggataaagccgaaagatcttctcagaagt

SEQ ID NO: 264298 - DNA, 75 bp, synthetic construct
  source 1..75: mol_type = other DNA
ttaaggaaagatattaaagcatccctatcaaaggatcgtggctttgaagaagttttgattaatatcatagcaaat

SEQ ID NO: 264299 - DNA, 75 bp, synthetic construct
  source 1..75: mol_type = other DNA
cagcatttccagcaaaaagattctttgttgagatgctcacccgagatattgagttgtctgactcaattctagatt

SEQ ID NO: 264300 - DNA, 75 bp, synthetic construct
  source 1..75: mol_type = other DNA
tccacctgtaccactgcgaccatcgcggcctgccgctggcgctcatcagcacggaaggggcaacagcgtggtgcg

SEQ ID NO: 264301 - DNA, 75 bp, synthetic construct
  source 1..75: mol_type = other DNA
tatattaagaatgtgcataacgaattaaaaatattccataatattgataaagccatgaatatagcctcagatatg

SEQ ID NO: 264302 - DNA, 75 bp, synthetic construct
  source 1..75: mol_type = other DNA
acgacgcttaccggtatcaacttcttcgttaccattctgaagatgcgcgcaccgggcatgaccatgttcaagata

SEQ ID NO: 264303 - DNA, 75 bp, synthetic construct
  source 1..75: mol_type = other DNA
tccgtcgaccataaacgcctcggtatcatgtatatcatcgtggcgattgtgatgttgctgcgtggttttgctgac

SEQ ID NO: 264304 - DNA, 75 bp, synthetic construct
  source 1..75: mol_type = other DNA
gagggttggggccggtaagggaacggataatcgatgacccatggttttttctgtctgtcgcactgattctgttgg

SEQ ID NO: 264305 - DNA, 75 bp, synthetic construct
  source 1..75: mol_type = other DNA
gttgaatccccgtcaacgtatctcgcaaattctggattttccactgcgcctgaacaccgacctggaaccggaaca

SEQ ID NO: 264306 - DNA, 75 bp, synthetic construct
  source 1..75: mol_type = other DNA
tggaaaccttccttgcagcagggttcacccgtaaaaatattcttgaggtcattctgtgcgccgctcagaagacaa

SEQ ID NO: 264307 - DNA, 75 bp, synthetic construct
  source 1..75: mol_type = other DNA
cgggcaggctggagagcgtgcgtaccctcgcagcgaatctggatatccgcatcccgtatgccacagacccggcag

SEQ ID NO: 264308 - DNA, 75 bp, synthetic construct
  source 1..75: mol_type = other DNA
aacattcatcacggtgaaatggtggctctgcttgggccgtcgggttccggcaaatccacccttttacgtcactta

SEQ ID NO: 264309 - DNA, 75 bp, synthetic construct
  source 1..75: mol_type = other DNA
atgcaaacgattatccgtgtcgagaagctcgccaaaaccttcaatcagcatcaggcgctgcatgcggttgatctg

SEQ ID NO: 264310 - DNA, 75 bp, synthetic construct
  source 1..75: mol_type = other DNA
aattaattatgatagcgtttaagaataacgaatatttgcgccgcattgctgagagtgttagcaagaatagcgcag

SEQ ID NO: 264311 - DNA, 75 bp, synthetic construct
  source 1..75: mol_type = other DNA
gcatgcagatgagactaccctgaagatcctgaacacgaagaaaggcggtaaatcctgctccggttatctgtgggc

SEQ ID NO: 264312 - DNA, 75 bp, synthetic construct
  source 1..75: mol_type = other DNA
cgcatcgcagaggatgcgcactatgtttaccactatgatgaatacggcagactgacggagaagacggaccttatc

SEQ ID NO: 264313 - DNA, 75 bp, synthetic construct
  source 1..75: mol_type = other DNA
aagagatgactgaacgcgagcagcgtgaacttaaaacactgctggatcgggcgcggattgcgcatggtcgcgtac

SEQ ID NO: 264314 - DNA, 75 bp, synthetic construct
  source 1..75: mol_type = other DNA
aatgacgaagaagaacgtcagcgcattgttcaggtattgcgagaaaccaatggcattgttgccgggccccgtggc

SEQ ID NO: 264315 - DNA, 75 bp, synthetic construct
  source 1..75: mol_type = other DNA
tccacacatacaggaaagcaccctgcccgttgcgctggctaaggttcgccgggatatgcctggtgtgccgggttt

SEQ ID NO: 264316 - DNA, 75 bp, synthetic construct
  source 1..75: mol_type = other DNA
actgccctggcagatgcactgggagttgggactagtttctttttagaagatgatcttcgagaaccggaagaaagg

SEQ ID NO: 264317 - DNA, 75 bp, synthetic construct
  source 1..75: mol_type = other DNA
ccgcgacggcccaactgactcaggcgatggtgaaatcaattgtcgatagtggtcttgttcccgaaggcgcaatta

SEQ ID NO: 264318 - DNA, 75 bp, synthetic construct
  source 1..75: mol_type = other DNA
tttctgaaaataccgagctgactgagcatgggtgccagcatcgtacaacacatcagattgttcgcgctgtggtgc

SEQ ID NO: 264319 - DNA, 75 bp, synthetic construct
  source 1..75: mol_type = other DNA
gacgaagaacagacgtcgaccacaacggatactccggcaacgcctgcacgcgtctccaccacgctgggtaactga

SEQ ID NO: 264320 - DNA, 75 bp, synthetic construct
  source 1..75: mol_type = other DNA
ccgttccgacgaagatacgtcgacaacaacggatactacagcaacgcctgcacgcgtctccaccacactgggtaa

SEQ ID NO: 264321 - DNA, 75 bp, synthetic construct
  source 1..75: mol_type = other DNA
tgccaagcatccgtgctgctgaaattcgttctaacgaagatgatgtagcagcaacgcctgcacgcgtctctacca

SEQ ID NO: 264322 - DNA, 75 bp, synthetic construct
  source 1..75: mol_type = other DNA
atttctggatttgttctcttagctggagtctttactaatatattagagtcaacatcacaaagatttttatctaag

SEQ ID NO: 264323 - DNA, 75 bp, synthetic construct
  source 1..75: mol_type = other DNA
atgttctttaaaacatcaaacccttccgcgctggctgcgtggcaaaaataccagcaggactgccagacggtaaaa

SEQ ID NO: 264324 - DNA, 75 bp, synthetic construct
  source 1..75: mol_type = other DNA
cactcgagcagcatgaacacggggcgacgctgtttgatggtaagcgtcgtctcagcaccgtctggcagatcctga

SEQ ID NO: 264325 - DNA, 75 bp, synthetic construct
  source 1..75: mol_type = other DNA
aaaatcaccaacgtcaaagacggtgacctgacggctggcagcaccgacgcggttaacggctctcagctcaaaact

SEQ ID NO: 264326 - DNA, 75 bp, synthetic construct
  source 1..75: mol_type = other DNA
tggaaagcttgcgttttatcgaacccgtaaagccaggcgataccatccaagccaggcgataccatccaggtgcgt

SEQ ID NO: 264327 - DNA, 75 bp, synthetic construct
  source 1..75: mol_type = other DNA
tattaaacagtataagggctttttagagtctggggttgtgtatgggaataggtttaataattcatccttaaatgt

SEQ ID NO: 264328 - DNA, 75 bp, synthetic construct
  source 1..75: mol_type = other DNA
ccggtgccgaattggctggagcaattactttggttgcagagtatacaccagtcaaccgacgaggcttttttacct

SEQ ID NO: 264329 - DNA, 75 bp, synthetic construct
  source 1..75: mol_type = other DNA
ttttcttcttcgaaaaccatagaaccaaacgcccatcagtcactaagattaatatatttctaagcaagctaatta

SEQ ID NO: 264330 - DNA, 75 bp, synthetic construct
  source 1..75: mol_type = other DNA
caaaacggtaggcggcgaagacgctattatactgcctacaggtgatactatcagaatttataatggtgcttttaa

SEQ ID NO: 264331 - DNA, 75 bp, synthetic construct
  source 1..75: mol_type = other DNA
atggacagcagaaatgcaatagcgatgatcgaagctgacgggtggtacctggtgcgcgtaaaaggcagtcatcac

SEQ ID NO: 264332 - DNA, 75 bp, synthetic construct
  source 1..75: mol_type = other DNA
caagaaatcgttagacaacattgcgataaagtaccgcagttaaataaaaatatagtaaaagatccgtacccaatt

SEQ ID NO: 264333 - DNA, 75 bp, synthetic construct
  source 1..75: mol_type = other DNA
atcatatccactcaacctaacggagaatattactttgaatactacttacctatatacaaagattctgaagtggct

SEQ ID NO: 264334 - DNA, 75 bp, synthetic construct
  source 1..75: mol_type = other DNA
tactactggaggtggtggcatagttttgtgtaatagtgaggatcttggtaaacgtttaaaacatctaacaacaac

SEQ ID NO: 264335 - DNA, 75 bp, synthetic construct
  source 1..75: mol_type = other DNA
gttaatgaatttgaacgtaaagtcaaagagtttacaggaagtgcttatgctgttgctactgtaaatggtacagca

SEQ ID NO: 264336 - DNA, 75 bp, synthetic construct
  source 1..75: mol_type = other DNA
tatcgtttttcatatcgagggggggcctccagagatgaatggaataataatatttcctgatgatataatacctta

SEQ ID NO: 264337 - DNA, 75 bp, synthetic construct
  source 1..75: mol_type = other DNA
gaatggaattcttgcttaaaaccttacaacgtgacaaaacgtggtaaggaacacgttgttactctgggcgagact

SEQ ID NO: 264338 - DNA, 75 bp, synthetic construct
  source 1..75: mol_type = other DNA
cggtagatataactcaagaaccggtgttcagtttggaaaatacgtacgaaataacttctagtaaactagaggata

SEQ ID NO: 264339 - DNA, 75 bp, synthetic construct
  source 1..75: mol_type = other DNA
aactggaggcgaaaggcttttaccggagggcggcggcgcgatggggtgaagtcatgcagctggtggagacagaca

SEQ ID NO: 264340 - DNA, 75 bp, synthetic construct
  source 1..75: mol_type = other DNA
cggtattcagttgcatgtcacagtgcgtaagacctcaatgtaaggaggtagtggcatgcacaggcagaagtggtc

SEQ ID NO: 264341 - DNA, 75 bp, synthetic construct
  source 1..75: mol_type = other DNA
cctgcacccccgggctctggcgaacaaaatcgccgctgcgcggtaccttcagcttatccccttcggctaccgggt

SEQ ID NO: 264342 - DNA, 75 bp, synthetic construct
  source 1..75: mol_type = other DNA
tatgtctgaatattgaatgcggcgatttcgagcagcatttcatcgaaagtttcatggtgtttcccgatgctctct

SEQ ID NO: 264343 - DNA, 75 bp, synthetic construct
  source 1..75: mol_type = other DNA
actcaggccctgctgtcggcggcggttgatgtgcaatatgaggatgccgcagttgcaaaagcgacattagagaaa

SEQ ID NO: 264344 - DNA, 75 bp, synthetic construct
  source 1..75: mol_type = other DNA
atgcgcttttacatgaaaggtttatgggatttggtttgccgttataagacggttttttctgatgtctggaaaatt

SEQ ID NO: 264345 - DNA, 75 bp, synthetic construct
  source 1..75: mol_type = other DNA
atttaaattccccggcatcgccggtagcctgctttctttcggtggcaccgttacggcactggccactgcaaccag

SEQ ID NO: 264346 - DNA, 75 bp, synthetic construct
  source 1..75: mol_type = other DNA
taatggcaaagcgacagatatcgtccagaacagcggtgccgctctccagacgagcacggctaacggtattgaaat

SEQ ID NO: 264347 - DNA, 75 bp, synthetic construct
  source 1..75: mol_type = other DNA
aaaaaagccgcagctgatgccctgccatcaccggcgcaggttaacaaagccgcaggaaacacaaagcctgaaccg

SEQ ID NO: 264348 - DNA, 75 bp, synthetic construct
  source 1..75: mol_type = other DNA
ctgtcgcacaaaacgccagaggcgtatacctgcatttgcgtgaaatccatcaaatctggagaagccagctttatc

SEQ ID NO: 264349 - DNA, 75 bp, synthetic construct
  source 1..75: mol_type = other DNA
agacgtttaatcatataaataatcttagcaagccatatataaaagggagatttgtctgtcaggatgtatttgttt

SEQ ID NO: 264350 - DNA, 75 bp, synthetic construct
  source 1..75: mol_type = other DNA
tgtactcctggtttggattacagtaatataaatatattcaagataacgagtatagatggaggaataaaaaaagaa

SEQ ID NO: 264351 - DNA, 75 bp, synthetic construct
  source 1..75: mol_type = other DNA
gcgcttaccgatttatccgcaatcccaacgtttctgccgaggcgatcagaaaggctggcgccatgcaaacagtca

SEQ ID NO: 264352 - DNA, 75 bp, synthetic construct
  source 1..75: mol_type = other DNA
aatgaggaaggtgaattatccgataccaataaaaatacactcatgcgtgaactagacttgctgtgcgagttgtgg

SEQ ID NO: 264353 - DNA, 75 bp, synthetic construct
  source 1..75: mol_type = other DNA
tttctttatcacaagttcacatacctaaagaaattgaatatattgaagccaatctcaaaagagatatgactgaat

SEQ ID NO: 264354 - DNA, 75 bp, synthetic construct
  source 1..75: mol_type = other DNA
ggcttggcgttacgtataaaagaaggaaaggttcctgaaacgctcaggaatgtagaggtacttactcttgattta

SEQ ID NO: 264355 - DNA, 75 bp, synthetic construct
  source 1..75: mol_type = other DNA
atatttgtaactgcaaatatcgtccttacaatagtaatgatagtaaaacggctctatctcattttgataaataat

SEQ ID NO: 264356 - DNA, 75 bp, synthetic construct
  source 1..75: mol_type = other DNA
gtatgagtaatggtactacctatgttgctaaagtgaccgccattaacggtggtcaggtcagggtcagtgtgtacg

SEQ ID NO: 264357 - DNA, 75 bp, synthetic construct
  source 1..75: mol_type = other DNA
cacgcgaatggtgatatctgccggacttgatcgcgaaggtgcgacagaggtttacagtggaatatgccgttctgt

SEQ ID NO: 264358 - DNA, 75 bp, synthetic construct
  source 1..75: mol_type = other DNA
ctgaactgttggcactcgcaggtcgggatgcacaacatatgtcaactgttggtgcagagcggctggcgcaggggg

SEQ ID NO: 264359 - DNA, 75 bp, synthetic construct
  source 1..75: mol_type = other DNA
atgatcgctttgcgcataatgcaacaagttaaggccacgggaagtccggttctggatgtggcgcataactttgtt

SEQ ID NO: 264360 - DNA, 75 bp, synthetic construct
  source 1..75: mol_type = other DNA
tattcatgcttatctgcaggacaaactggcgcataacgagcgcttcgtggtgcgctccaagcacccacgcaagga

SEQ ID NO: 264361 - DNA, 75 bp, synthetic construct
  source 1..75: mol_type = other DNA
gttataaaacttgggattgcgtaagaaaagatctcattgattctactaaaaatgttggtgatcataaatcagcaa

SEQ ID NO: 264362 - DNA, 75 bp, synthetic construct
  source 1..75: mol_type = other DNA
tatggcggccaaagctaaacaaacatttggactgacagatgacgacctcccggccatgtttaatatggctgtcgc

SEQ ID NO: 264363 - DNA, 75 bp, synthetic construct
  source 1..75: mol_type = other DNA
acatcgttccaagaccacaaaaaattcgtgggcgttggctgatagatcgccgggcagtatttgttggacctggtg

SEQ ID NO: 264364 - DNA, 75 bp, synthetic construct
  source 1..75: mol_type = other DNA
tcatacctgctattcagacaaatcaatttgctctcttaataaaggatgagcttcctgtagctttttgtagctggg

SEQ ID NO: 264365 - DNA, 75 bp, synthetic construct
  source 1..75: mol_type = other DNA
ctttgttactttcaccgatcaggcaaagatgaaaatcctcagcgtaagccagcaatctcttgaacgatattctgc

SEQ ID NO: 264366 - DNA, 75 bp, synthetic construct
  source 1..75: mol_type = other DNA
gtgaacattaatagagataaaattgtacaacttgcagataccgacactattgaaaacctgacatccgcgttgagt

SEQ ID NO: 264367 - DNA, 75 bp, synthetic construct
  source 1..75: mol_type = other DNA
tggttttcggtggcacctttaccgccggagggcttcgcgtagcttgccaggacgggcagttgcggattatgcagg

SEQ ID NO: 264368 - DNA, 75 bp, synthetic construct
  source 1..75: mol_type = other DNA
aaaaacttcgcctgattcgagaggcagagggattgtcacgtagagagatggaggaggtgacaggggtatctcaat

SEQ ID NO: 264369 - DNA, 75 bp, synthetic construct
  source 1..75: mol_type = other DNA
tctttatggctgaaggtaaccctcgcattgcgaaggcgacgggcgaagggattgctgaaatcgtggcgcgttacc

SEQ ID NO: 264370 - DNA, 75 bp, synthetic construct
  source 1..75: mol_type = other DNA
tcaggctgccggtatggctgcggaaaataacgtggtcatccggggcggacgtgatgtgaacctggtggcagagtc

SEQ ID NO: 264371 - DNA, 75 bp, synthetic construct
  source 1..75: mol_type = other DNA
taacttctgtcgtcaggagtactacggttgggaggacaacttcacggaaaccccagccaccgatgctttcctggc

SEQ ID NO: 264372 - DNA, 75 bp, synthetic construct
  source 1..75: mol_type = other DNA
tccgcagcgcaaaaccagcagagcagcgtcagcggcgtcagcatggacgaagaggcggtgaacctgatcacctat

SEQ ID NO: 264373 - DNA, 75 bp, synthetic construct
  source 1..75: mol_type = other DNA
tgaaaacctgacatccgcgttgagtcaaagacttatcgcggatcaattacgcttaactaccgccgaatcatgcac

SEQ ID NO: 264374 - DNA, 75 bp, synthetic construct
  source 1..75: mol_type = other DNA
ctcagcgtaagccagcaatctcttgaacgatattctgcggtggaaagtggcagcagaaatggcaacaggtgccat

SEQ ID NO: 264375 - DNA, 75 bp, synthetic construct
  source 1..75: mol_type = other DNA
ttaccagtgcacaggagacgaaggagagcagtgacagccgtctgaaagccctgcaggccacaaagacagcgctgt

SEQ ID NO: 264376 - DNA, 75 bp, synthetic construct
  source 1..75: mol_type = other DNA
cgcacctacagcagctaccggactaagactcctgccccggtgggcgtcttaggccccggctggaaagcgccttct

SEQ ID NO: 264377 - DNA, 75 bp, synthetic construct
  source 1..75: mol_type = other DNA
atataaatatctactcaacaattatatatattgggtgtaatttatttttatctctgtttatcgaacctctatatt

SEQ ID NO: 264378 - DNA, 75 bp, synthetic construct
  source 1..75: mol_type = other DNA
tacaggaatagaaaaagatccagaaatttttcgtatcgcattagagcgtatgggaattaaacaggagcatgcagc

SEQ ID NO: 264379 - DNA, 75 bp, synthetic construct
  source 1..75: mol_type = other DNA
tgaaggatgaaagcttgattggtggtttgggtttttcttggtttgtaacgtatataattagcatgctgacgctac

SEQ ID NO: 264380 - DNA, 75 bp, synthetic construct
  source 1..75: mol_type = other DNA
atgggcaaaatcaaccgcagtaaaaccccgtatgtggcggtgttactctccaccggagcggcatttttaacggtg

SEQ ID NO: 264381 - DNA, 75 bp, synthetic construct
  source 1..75: mol_type = other DNA
cgtataaggattacaacaaaagagtttgttgaagtctttaacatcaaggataaaaacgttaaaaataggttatca

SEQ ID NO: 264382 - DNA, 75 bp, synthetic construct
  source 1..75: mol_type = other DNA
gctgaagcaatcgctacagccagggcgaaatgccgtgcggcaattgcagaacaggccaaagaaaaagttaaggaa

SEQ ID NO: 264383 - DNA, 75 bp, synthetic construct
  source 1..75: mol_type = other DNA
cgcacctacagcagctaccggactacgactcctgccccggtgggcgtgttcggccccggctggaaagcgccttct

SEQ ID NO: 264384 - DNA, 75 bp, synthetic construct
  source 1..75: mol_type = other DNA
cgcacctacagcagctaccggactatgactcctgccccggtgggcgttttgggccccggctggaaagcgccttct

SEQ ID NO: 264385 - DNA, 75 bp, synthetic construct
  source 1..75: mol_type = other DNA
cgcacctacagcagctaccggactatgactcctgccccggtgggcgtatttggccccggctggaaagcgccttct

SEQ ID NO: 264386 - DNA, 75 bp, synthetic construct
  source 1..75: mol_type = other DNA
cggcgatgagcgaagcttcaaacaacactttgtcaataacgaaagtgcgctagggcatttaaagaaacgacttac

SEQ ID NO: 264387 - DNA, 75 bp, synthetic construct
  source 1..75: mol_type = other DNA
tatgtttaccactacgatgaatacggcagactgacggagaagacggaccgcatcccggcgggtgtgatacggacg

SEQ ID NO: 264388 - DNA, 75 bp, synthetic construct
  source 1..75: mol_type = other DNA
ccgcgaggaaggcatcagcctttaccgccgctatgacaaccgtggccggttaacctcggtgaaagacgcacaggg

SEQ ID NO: 264389 - DNA, 75 bp, synthetic construct
  source 1..75: mol_type = other DNA
tatctctggcggtgttaatcaccgccgggtgtggctggcatctgcgtgataccacgcaggttccttccactatga

SEQ ID NO: 264390 - DNA, 75 bp, synthetic construct
  source 1..75: mol_type = other DNA
caagagtccaaacagtgcgagttgctacgaagtgtattcggtgaagattttcctgagtgcgcagaaacatcatct

SEQ ID NO: 264391 - DNA, 75 bp, synthetic construct
  source 1..75: mol_type = other DNA
ataaagcagctgtagattcaatctgtcaatgcaacacccctttcaattatctctttcggtgttttgaacttcagt

SEQ ID NO: 264392 - DNA, 75 bp, synthetic construct
  source 1..75: mol_type = other DNA
ccaagcgacgccgaagcgattaaagttcgccatggctgcgcgttgggttccatcgtcggtaaagatgagagcgtg

SEQ ID NO: 264393 - DNA, 75 bp, synthetic construct
  source 1..75: mol_type = other DNA
tcccatatggtgttataacaggtaatggtaataaaatagtcagtatggttgaaaagccagtacatcatttctttg

SEQ ID NO: 264394 - DNA, 75 bp, synthetic construct
  source 1..75: mol_type = other DNA
ccagatatgattcatcagcacttcggtgatggtgatgcgtttaatgcaaaaatcacctatatacatgaagaaact

SEQ ID NO: 264395 - DNA, 75 bp, synthetic construct
  source 1..75: mol_type = other DNA
acagctgcgctgctaaactactctctgatgagcagccgtgcagaattttctaatgggagttcggactactcccag

SEQ ID NO: 264396 - DNA, 75 bp, synthetic construct
  source 1..75: mol_type = other DNA
cgttagttcgcccctttttcttaatgccggtgaggctatgatgactggttcagctggtcagaagcgcgtgcctag

SEQ ID NO: 264397 - DNA, 75 bp, synthetic construct
  source 1..75: mol_type = other DNA
aagattaactccatcagaggccgtcactacatgtaaccaaaaagcaaaagcaacaactgatataaaaactaagat

SEQ ID NO: 264398 - DNA, 75 bp, synthetic construct
  source 1..75: mol_type = other DNA
cagcggccaaatttaaatacggtccggtttgggcgagggcaggttatattcagccaaccggtcagacgctgttag

SEQ ID NO: 264399 - DNA, 75 bp, synthetic construct
  source 1..75: mol_type = other DNA
cgatgtcaggtggtattgccgtacatgatcagggagtgaccttttcaccgtggactatcaatgacactttcgcca

SEQ ID NO: 264400 - DNA, 75 bp, synthetic construct
  source 1..75: mol_type = other DNA
caggatacgaaagactcactgcaaggacagaaatatcgtcttgacgcgaactacaatctcccattttcacttggg

SEQ ID NO: 264401 - DNA, 75 bp, synthetic construct
  source 1..75: mol_type = other DNA
cgcgaaggttgccgctttagtaggggaagttctgcccgatggtatggtcaatatcattggcgtgggcagctgccc

SEQ ID NO: 264402 - DNA, 75 bp, synthetic construct
  source 1..75: mol_type = other DNA
cattaatgaagcactggcgctgacgcggggggatttttcgctcgcgcctccgtatccgtttgtgcagctggccac

SEQ ID NO: 264403 - DNA, 75 bp, synthetic construct
  source 1..75: mol_type = other DNA
tcatcaaaggcatggataagtttgaaagcgctgagtgtgaaaagaggttcaaggctcgcaaggttctgcagtggg

SEQ ID NO: 264404 - DNA, 75 bp, synthetic construct
  source 1..75: mol_type = other DNA
tgacggacagtgacgggaaaatcgtgtgggagacggggtatcaggtctggggtaacacgatacaggagaaggacc

SEQ ID NO: 264405 - DNA, 75 bp, synthetic construct
  source 1..75: mol_type = other DNA
cagcaatgccgatggcccgctgaccgttaacccgaatatcaccgccgatgagctggcgttttccagttcaccgga

SEQ ID NO: 264406 - DNA, 75 bp, synthetic construct
  source 1..75: mol_type = other DNA
agtggtaattttaaagcaatagataaccacgggaaggaaataacaaacagaaaaggattacctaatgtctgcaga

SEQ ID NO: 264407 - DNA, 75 bp, synthetic construct
  source 1..75: mol_type = other DNA
cagtaatgatccgcagctgagacatatcgataaaattcttgtaaacaaaaacaggaattatgaagttttatatgg

SEQ ID NO: 264408 - DNA, 75 bp, synthetic construct
  source 1..75: mol_type = other DNA
aatggactgatcgggatataatggatgtctattctaaagtatttaaatcaacaattaatttgtttgaaaaacttg

SEQ ID NO: 264409 - DNA, 75 bp, synthetic construct
  source 1..75: mol_type = other DNA
aatcgtaggaactcatcttggttacaacgttgccgctatcagaacacagatggcgacggcgtgtaggatgacttt

SEQ ID NO: 264410 - DNA, 75 bp, synthetic construct
  source 1..75: mol_type = other DNA
acgaagagatattgcagttgcaggaaaagcttcgccaacaaggggttaaacatcacctggcggcaggcattgtat

SEQ ID NO: 264411 - DNA, 75 bp, synthetic construct
  source 1..75: mol_type = other DNA
tgctggaaaacgcgttgcgtgaaaaaggttacaccacggggcattctccgcagtcaaagccgctggcgcagatgg

SEQ ID NO: 264412 - DNA, 75 bp, synthetic construct
  source 1..75: mol_type = other DNA
aagggctgattgccctgatcgaaccgcattatccgaaaggcgaaggtggtcgcccggcgtatcccttgatggcga

SEQ ID NO: 264413 - DNA, 75 bp, synthetic construct
  source 1..75: mol_type = other DNA
tatgtcgtggcctctatgtgttttaggcaaattgcgtggaaaaaaaataatatattggacgcatggatggactaa

SEQ ID NO: 264414 - DNA, 75 bp, synthetic construct
  source 1..75: mol_type = other DNA
attacgtagaggagcgcatatcgctcgacaagcgtctaatcgcgcatccggcggctacgtacatgatgatagcgg

SEQ ID NO: 264415 - DNA, 75 bp, synthetic construct
  source 1..75: mol_type = other DNA
atgctgaaggaatttcacaagcactgagtgatgctacaggcgtattcgttattcggcagttgaaaggggataaac

SEQ ID NO: 264416 - DNA, 75 bp, synthetic construct
  source 1..75: mol_type = other DNA
agaacgtggtggagctgccggacagcgactacgatctggataaactggtgaatgtgtatccgatgacgccaggtc

SEQ ID NO: 264417 - DNA, 75 bp, synthetic construct
  source 1..75: mol_type = other DNA
atgctgaaggcatgtctcaagctttcagcgatgctacaggtgtttttgtgattcgccaattgaaaggcgacaagc

SEQ ID NO: 264418 - DNA, 75 bp, synthetic construct
  source 1..75: mol_type = other DNA
ccggagttgactactcctgccggtcagtaccgcagcgccagtgacactggcaactgggtaaatgccgatggaacc

SEQ ID NO: 264419 - DNA, 75 bp, synthetic construct
  source 1..75: mol_type = other DNA
caacaggctaatgcggaaccagaagaacaggtcgatccgcgcaaagctgccgtcgaagcggctattgcacgcgcc

SEQ ID NO: 264420 - DNA, 75 bp, synthetic construct
  source 1..75: mol_type = other DNA
aatgtttatcctatgacgccaggtctaatagatcaactccgtccggaaccgattatagcacgctcgaatcctcag

SEQ ID NO: 264421 - DNA, 75 bp, synthetic construct
  source 1..75: mol_type = other DNA
tgatcgatcaacttcgtccggagactgtactcgctcgtccaaacccgcagcttgataatttactgcgcaattatg

SEQ ID NO: 264422 - DNA, 75 bp, synthetic construct
  source 1..75: mol_type = other DNA
tcatgggtgaagtgggcaaacaaagcactttaaaaatggaccgcagtggtatgactgtagctgaagctttaggaa

SEQ ID NO: 264423 - DNA, 75 bp, synthetic construct
  source 1..75: mol_type = other DNA
aaccgtgtaatctcacagcttgtaccaacaattactggtgtgcatgatatgacagaaacagctaaatatataaag

SEQ ID NO: 264424 - DNA, 75 bp, synthetic construct
  source 1..75: mol_type = other DNA
aatcgtgtcatctcgcagcttgtaccgactataactggcgtgcatgatatgacagaaactgggaaattcataagg

SEQ ID NO: 264425 - DNA, 75 bp, synthetic construct
  source 1..75: mol_type = other DNA
taatggtaaagacacaaaagtctctttatatgcattaatgcagaaaggtgacttgactcaaaatcacttacttta

SEQ ID NO: 264426 - DNA, 75 bp, synthetic construct
  source 1..75: mol_type = other DNA
taatgggaaggatacaaaaatctcattatatgcattaatgcaaaagggtgatttgtcacagaatcatctccttta

SEQ ID NO: 264427 - DNA, 75 bp, synthetic construct
  source 1..75: mol_type = other DNA
tgatcgaacagctccgtcctgaaaccgtgctggctcgtcccaacccgcagctggataatttgctgcgcagttacg

SEQ ID NO: 264428 - DNA, 75 bp, synthetic construct
  source 1..75: mol_type = other DNA
gagactaaaaggagaggctacatatttggcgaactgaaatctgattcaaccgtcagtacgatgggatgcacaaac

SEQ ID NO: 264429 - DNA, 75 bp, synthetic construct
  source 1..75: mol_type = other DNA
acaaggcgttaaaggccttacatggtaaaccccagccgcgtcaaaagatggtggcagatggtcgtggactgtctg

SEQ ID NO: 264430 - DNA, 69 bp, synthetic construct
  source 1..69: mol_type = other DNA
atggtgacagggattttttgttttatggaagcgcgattccagaactgggcagacattgccggatgcgac

SEQ ID NO: 264431 - DNA, 75 bp, synthetic construct
  source 1..75: mol_type = other DNA
acaacttttttggatagccttggattaaattctctgcaggaggatagtgatttttttatcccattagaaacggcg

SEQ ID NO: 264432 - DNA, 75 bp, synthetic construct
  source 1..75: mol_type = other DNA
aaggtgcacccgccgctgtgcgtgccggtctgcgccagaacttccgtatcttccagaacgaggacatcaaaagca

SEQ ID NO: 264433 - DNA, 75 bp, synthetic construct
  source 1..75: mol_type = other DNA
caactgatttcagttttaaaagatattgaatcaaatatagataaatttattaattttaatacctataacgaatct

SEQ ID NO: 264434 - DNA, 75 bp, synthetic construct
  source 1..75: mol_type = other DNA
aggtttgctggcgggaagagacacctcatggatggggatcctgcttgccatccatcttggcgtggtcatggcgct

SEQ ID NO: 264435 - DNA, 75 bp, synthetic construct
  source 1..75: mol_type = other DNA
acccgcgatatcaccatcagcagcaccgattccggcgctgtgcgtgatttcagatataccagcgaagtgtttcac

SEQ ID NO: 264436 - DNA, 75 bp, synthetic construct
  source 1..75: mol_type = other DNA
cagccggagctattgccggattaaccggtcagaataatacgttcccgtattttacgggcgaagacacaatggcat

SEQ ID NO: 264437 - DNA, 75 bp, synthetic construct
  source 1..75: mol_type = other DNA
ggaatgacggtggggatcgatagccgtaatgatattcctgaggggattgcgacgctgggcgcttttatgggttat

SEQ ID NO: 264438 - DNA, 75 bp, synthetic construct
  source 1..75: mol_type = other DNA
tcgcgcggttaacgctatgtacaccgacgctaaccatttaaaagcgactgatccagggaaaatagacggaaatat

SEQ ID NO: 264439 - DNA, 75 bp, synthetic construct
  source 1..75: mol_type = other DNA
atcgtaggcccggcaggcctgctgtggttaaaccttaagcgctcgccactgcatggcgatgcgcgacagaaaccg

SEQ ID NO: 264440 - DNA, 75 bp, synthetic construct
  source 1..75: mol_type = other DNA
atcctaccgtagaaacgtcgagcaactgttacccgcgatcatgtctgtattgccgcttcgataccgcgaccgtgt

SEQ ID NO: 264441 - DNA, 75 bp, synthetic construct
  source 1..75: mol_type = other DNA
catcgtcaatccgtctgaatccggatactgctcgccagctgatctttaatttgtcgcgctatctgcgctataaca

SEQ ID NO: 264442 - DNA, 75 bp, synthetic construct
  source 1..75: mol_type = other DNA
cagggataaaggtccttccggccttatccgtatgagtgtgccggcaacattcgggcggcttcacatcatgccgtt

SEQ ID NO: 264443 - DNA, 75 bp, synthetic construct
  source 1..75: mol_type = other DNA
actggttgtctctggtttgtttgaggttattagagaagatggatacaagtttgataacgatgtacaaaatcaaag

SEQ ID NO: 264444 - DNA, 75 bp, synthetic construct
  source 1..75: mol_type = other DNA
gctggtgcgcccggacttgttcactctcaaaccgtgttttgttgcggtggaaactcagggcgaatttacctccgg

SEQ ID NO: 264445 - DNA, 75 bp, synthetic construct
  source 1..75: mol_type = other DNA
ataacagagcgccatcagagcacctgaaattccagtatcaacacagtgaggctgaaggccagccgatcgatcacc

SEQ ID NO: 264446 - DNA, 75 bp, synthetic construct
  source 1..75: mol_type = other DNA
gagcgcaatcagccaggcttcgctgacaagacgacagacggcagcgacaaccggtactggatcctgcgcaacatg

SEQ ID NO: 264447 - DNA, 75 bp, synthetic construct
  source 1..75: mol_type = other DNA
tcctaaaccagtacaggtacgtgataagttgattaataatggtactatgaagcgtgaactaaatgctatccgtac

SEQ ID NO: 264448 - DNA, 75 bp, synthetic construct
  source 1..75: mol_type = other DNA
cttatccgaaaagacagatactatagaatctgcatttactgaacaggcagcagaatcatcccccgccggaataaa

SEQ ID NO: 264449 - DNA, 75 bp, synthetic construct
  source 1..75: mol_type = other DNA
gtagaagacatcagattaacatcctgtcactcagccaacataacaaaaaaccagactggccccctgaatctccag

SEQ ID NO: 264450 - DNA, 75 bp, synthetic construct
  source 1..75: mol_type = other DNA
aatgcagcatctgtgcacggtgaatcgggaatggctggctacgactttgttgagcacaacagaagcccactggac

SEQ ID NO: 264451 - DNA, 75 bp, synthetic construct
  source 1..75: mol_type = other DNA
ggttgttgatattgatggttgcctgagtaaacctgcaaacgtgcaggtggcgctggatctggatgtgaaaggttt

SEQ ID NO: 264452 - DNA, 75 bp, synthetic construct
  source 1..75: mol_type = other DNA
ggcaaacctgcaaacgtacaggtagcattggatcttgatgtgaaaggcttccagcagtgggtggctgaggtgctg

SEQ ID NO: 264453 - DNA, 75 bp, synthetic construct
  source 1..75: mol_type = other DNA
taatggtaaagacacaaaaatctcgctttatgccctcatgcaaaaaggggatttaaccgagaaccgattacttta

SEQ ID NO: 264454 - DNA, 75 bp, synthetic construct
  source 1..75: mol_type = other DNA
atttcgatcacaaaaagcatatgttactggtgaggttgtaaattctggcaaacaacctatcaccaacatcccatt

SEQ ID NO: 264455 - DNA, 75 bp, synthetic construct
  source 1..75: mol_type = other DNA
cgattggccacttatattgaaagcccacaggttgatgttagcgttgctgcgtttcgttctcaaaaggtttacgtg

SEQ ID NO: 264456 - DNA, 75 bp, synthetic construct
  source 1..75: mol_type = other DNA
gctggtggcttagctcctgatgcagattggcgaaatgttgtactaactcataatgggaaagatacaaaaatttcg

SEQ ID NO: 264457 - DNA, 75 bp, synthetic construct
  source 1..75: mol_type = other DNA
ttatgggggaagtagttaaacaagcaactatgaagatggatcgtagtggtatgactttggctgaagcattaggta

SEQ ID NO: 264458 - DNA, 75 bp, synthetic construct
  source 1..75: mol_type = other DNA
aatgtgtatccgatgaccccgagcttggtcgaccaacttcgtccggagactgtacttgctcgtccaaacccacag

SEQ ID NO: 264459 - DNA, 75 bp, synthetic construct
  source 1..75: mol_type = other DNA
gtaataacaataccagtgattcgcagccggtaacgtttgtggcggacaaaacctcggctcaggttgtcctgcaga

SEQ ID NO: 264460 - DNA, 75 bp, synthetic construct
  source 1..75: mol_type = other DNA
tcagcgatacacagccaatgacgtttgtggcggataaagacagagcggttgtcgttctgcaaacatcgaaagcgg

SEQ ID NO: 264461 - DNA, 75 bp, synthetic construct
  source 1..75: mol_type = other DNA
gggatagagatttatgttagagataagtttaaaataaaaaaagtgaatcctacaactataaataaaaatgattcg

SEQ ID NO: 264462 - DNA, 75 bp, synthetic construct
  source 1..75: mol_type = other DNA
agtaactacaccgcaatgatggatgcgatgagggagctgcgagcggctatcgagcgcattgataacaaactggac

SEQ ID NO: 264463 - DNA, 75 bp, synthetic construct
  source 1..75: mol_type = other DNA
gtgggggtgttctttgacgggacggggaataaccgggcgaacgcagacgatctacggctggcatatgcccactgt

SEQ ID NO: 264464 - DNA, 75 bp, synthetic construct
  source 1..75: mol_type = other DNA
aatggggaagcgcatgtcacgctcaaaggtaaaaaagcgggtactcatacggttaccgcaacgctgagtaataac

SEQ ID NO: 264465 - DNA, 75 bp, synthetic construct
  source 1..75: mol_type = other DNA
cccgtgccaccggcttcttctgaacctgaagcaacgacactggtggctacacaggtgagcaactccgcgccgtac

SEQ ID NO: 264466 - DNA, 75 bp, synthetic construct
  source 1..75: mol_type = other DNA
gcatcatgaaagctgccgggataagccgtgcaacgttctatcgcatcaagcgagagctggccgccagcgttacgg

SEQ ID NO: 264467 - DNA, 75 bp, synthetic construct
  source 1..75: mol_type = other DNA
gggcatccaccgccgagcaacacgccgaccgtgccgttcctgcgctggaggatttcgctaatgagcgtggttggt

SEQ ID NO: 264468 - DNA, 75 bp, synthetic construct
  source 1..75: mol_type = other DNA
gagcattgattacaacggtaaaggaattgatttttccggcacgctggttcaggcgcgcgaacatgggcttgatcc

SEQ ID NO: 264469 - DNA, 75 bp, synthetic construct
  source 1..75: mol_type = other DNA
agacccggcaggtaaccgcctgcccgacccggagctgcacccggacagcaccctcagcatgtggccggataaccg

SEQ ID NO: 264470 - DNA, 75 bp, synthetic construct
  source 1..75: mol_type = other DNA
tgaggaaagccgccgctggctggcatcgtgcggcctgacggtggcgcagatgcaaagccagatggacccggtata

SEQ ID NO: 264471 - DNA, 75 bp, synthetic construct
  source 1..75: mol_type = other DNA
ccactgtcctgaatatggcgattgcggcaggaaaagaaggcagctttgaactgaacgatatggcccgctggttat

SEQ ID NO: 264472 - DNA, 75 bp, synthetic construct
  source 1..75: mol_type = other DNA
gatttataaccttctccgcgaatacgaaggccgtgtaacggtcaaggttctgggtattgccgccagtgccgcatc

SEQ ID NO: 264473 - DNA, 75 bp, synthetic construct
  source 1..75: mol_type = other DNA
tttgttctttcacttgatgaaggaggtaacagcgtagggcggcgcattgtcgcgtcagggagcacaataaccgta

SEQ ID NO: 264474 - DNA, 75 bp, synthetic construct
  source 1..75: mol_type = other DNA
tcatcagctcctttaaaactggggaccgtataagtaatgatataaaaaatgaattgcatcgggtattaaaagaat

SEQ ID NO: 264475 - DNA, 75 bp, synthetic construct
  source 1..75: mol_type = other DNA
attatcgataccaagtgtagactatttaatcactgactttaccattgatctagagtattctataaatgcaaagaa

SEQ ID NO: 264476 - DNA, 75 bp, synthetic construct
  source 1..75: mol_type = other DNA
ggagcttcgcgccgctcatccgcatcgaaacagacaacggtgagcgggagaaagcgcagcgccgcagcctggcgg

SEQ ID NO: 264477 - DNA, 75 bp, synthetic construct
  source 1..75: mol_type = other DNA
gcaatagataaccacggaaaggaaataacaaacagaaaaggattacctaatgtctgcagagttcatggtaatatg

SEQ ID NO: 264478 - DNA, 75 bp, synthetic construct
  source 1..75: mol_type = other DNA
ctgggccaatgggatatgaccttctcgctaatgatgggcgtgccgggaaggctctgagcgatgggcagttaataa

SEQ ID NO: 264479 - DNA, 75 bp, synthetic construct
  source 1..75: mol_type = other DNA
gttcaagggccggtgacggtcagctaaatactcaggctaaccgctatgtattgcagctaggcggcgatttggcgc

SEQ ID NO: 264480 - DNA, 75 bp, synthetic construct
  source 1..75: mol_type = other DNA
aaataacgctggataccctggaaaaacaacgcctgcaatacacagatgcgtttcgtcgctcatcagatattatac

SEQ ID NO: 264481 - DNA, 75 bp, synthetic construct
  source 1..75: mol_type = other DNA
gactcgtcgctgacgccgaaagacggttctcttctggtgtgcacacttgatggcgagttcaggataatgcgctac

SEQ ID NO: 264482 - DNA, 75 bp, synthetic construct
  source 1..75: mol_type = other DNA
cagagatcggttcggtaggaggccctccggggatgttagtcggtgcggcagtcggtacggtggttattggtggtg

SEQ ID NO: 264483 - DNA, 75 bp, synthetic construct
  source 1..75: mol_type = other DNA
aatccatactccataagttctataagaaaagccattgaggatgcttataatgcaccgctaatgcgtaaatccatt

SEQ ID NO: 264484 - DNA, 75 bp, synthetic construct
  source 1..75: mol_type = other DNA
gcatcaacgcaacccggacgcatcacccagccggaatacctcacgcactggggaccacctgccagccccattaat

SEQ ID NO: 264485 - DNA, 75 bp, synthetic construct
  source 1..75: mol_type = other DNA
ggtgtacacgccggcgcgaaaaattcacctgtaccactgcgaccatcgcggcctgccgctggcgcttatcagcac

SEQ ID NO: 264486 - DNA, 75 bp, synthetic construct
  source 1..75: mol_type = other DNA
ctgtaccactgcgaccatcgcggcctgccgctggcgcttatcagtgcggaaggggctacagaatggtgcgcagaa

SEQ ID NO: 264487 - DNA, 75 bp, synthetic construct
  source 1..75: mol_type = other DNA
acttactttatcttcagacttaaatcacaacgtcaaagtcgctgcaattaaagctcttggccgtattactcgacc

SEQ ID NO: 264488 - DNA, 75 bp, synthetic construct
  source 1..75: mol_type = other DNA
tggccggcatggtcacgcctgcgtgggggggtgtctatatctacggcactcgtgttatttatccagaacagaaaa

SEQ ID NO: 264489 - DNA, 75 bp, synthetic construct
  source 1..75: mol_type = other DNA
gccgatgccataagctgggcgggtgaaaaatttccggggctgaccacagcagtggtgacagctaccacagccatt

SEQ ID NO: 264490 - DNA, 75 bp, synthetic construct
  source 1..75: mol_type = other DNA
cttatagaaagcattattgttgccttattatcattattaatatcattagttgtttcttttggcattttggtaact

SEQ ID NO: 264491 - DNA, 75 bp, synthetic construct
  source 1..75: mol_type = other DNA
aaaatttttttttcaggtgggagaaaccccatatacaacgcaattaaaaaaaataacgggaattgagagcaaaga

SEQ ID NO: 264492 - DNA, 75 bp, synthetic construct
  source 1..75: mol_type = other DNA
gctcagtcagagttaagagacgaaggaaactcaattattaccataaattttcacataccaaaatcaagataccag

SEQ ID NO: 264493 - DNA, 75 bp, synthetic construct
  source 1..75: mol_type = other DNA
gaaccagaacaacaggtcgatccgcgcaaagctgccgtcgaagccgctattgcccgtgccaaagcgcgcaaactg

SEQ ID NO: 264494 - DNA, 75 bp, synthetic construct
  source 1..75: mol_type = other DNA
agcggctattgcacgcgccaaagcgcgcaagctggaacagcaacaacaggctaatgcggaaccagaagaacaggt

SEQ ID NO: 264495 - DNA, 75 bp, synthetic construct
  source 1..75: mol_type = other DNA
aatggggaatgcacaggcagtgacgaccattccgttctggcattctatggaaggggaactgggtaaagaggtgga

SEQ ID NO: 264496 - DNA, 75 bp, synthetic construct
  source 1..75: mol_type = other DNA
gatgacgtacagcgccgggtgaaaggtatggtgacctggtttgaactgggggagaacgacaaaaaccagatgctg

SEQ ID NO: 264497 - DNA, 75 bp, synthetic construct
  source 1..75: mol_type = other DNA
gcgattattactacaaaatctatgagtaaaaaagtttttcagcacagaagcactgagttcgcactaaaaatgctt

SEQ ID NO: 264498 - DNA, 75 bp, synthetic construct
  source 1..75: mol_type = other DNA
aaaaatgaatatatagatacagacttcttttatataaacggcattccatttaagattaatggtgttataagcaaa

SEQ ID NO: 264499 - DNA, 75 bp, synthetic construct
  source 1..75: mol_type = other DNA
gggggcaactgtcactataaacttccatacgcctaagccacgataccacatagcaaacattctatcacaaatgga

SEQ ID NO: 264500 - DNA, 75 bp, synthetic construct
  source 1..75: mol_type = other DNA
gaacggtgaaccggcggagcagtggcagtatgacgaccacggctggctgacagaaatcagccacctgagtgaagg

SEQ ID NO: 264501 - DNA, 75 bp, synthetic construct
  source 1..75: mol_type = other DNA
gtttacttatgatgcggagcacgccgggcggatggtggcgcaccattatgcagggagaccggagagccgctaccg

SEQ ID NO: 264502 - DNA, 75 bp, synthetic construct
  source 1..75: mol_type = other DNA
ccaaagcacgcaagctggaacagcaacaggccaatgcggagccagaacaacaggtcgatccgcgcaaagctgccg

SEQ ID NO: 264503 - DNA, 75 bp, synthetic construct
  source 1..75: mol_type = other DNA
gcaaaaacccgttacttcaggatgtggctgtcggctggttgcagaaataccgcaatgacgcgcctgagcgcgtga

SEQ ID NO: 264504 - DNA, 75 bp, synthetic construct
  source 1..75: mol_type = other DNA
tgtcctgcattaccgatgatgacggaaaagtgatttccgacaccatcaaaatcggctcaaaagataagggtggtc

SEQ ID NO: 264505 - DNA, 75 bp, synthetic construct
  source 1..75: mol_type = other DNA
agggcgtgcaggtactggctaacccgctgcgcgtggaggaaaaccgctatcagcttgattttaatctgatagaag

SEQ ID NO: 264506 - DNA, 75 bp, synthetic construct
  source 1..75: mol_type = other DNA
tcattaacaatgcgtctatttcttctgtcacaccccgcctgttcagcgccgcttatacttcttcgaaacacgcga

SEQ ID NO: 264507 - DNA, 75 bp, synthetic construct
  source 1..75: mol_type = other DNA
caggctaaaaacacgcttgaattttcacaaatggatggtgtgaaaaaactggcggatgcatccggtactgtggcc

SEQ ID NO: 264508 - DNA, 75 bp, synthetic construct
  source 1..75: mol_type = other DNA
atgaaatacgccacggcttcaggcgcatctgcaacagacctggctaaggtgatgattaagggcaaaaagaccttt

SEQ ID NO: 264509 - DNA, 75 bp, synthetic construct
  source 1..75: mol_type = other DNA
caataaagtaacaaaagaaaatgatgtttatgatagtctaaatttttcaagcaaagatttaacgaattcttatat

SEQ ID NO: 264510 - DNA, 75 bp, synthetic construct
  source 1..75: mol_type = other DNA
cacccgcgaccgcctgcaccgggaaacgctgcgcagcttcggccgttatgaactcaccaccgcttacacccctgc

SEQ ID NO: 264511 - DNA, 75 bp, synthetic construct
  source 1..75: mol_type = other DNA
gtccggcggtgaagacggtggcagtgtggtgttcccgccggtgctggtgcagatgctcgaccggctggaaagtga

SEQ ID NO: 264512 - DNA, 75 bp, synthetic construct
  source 1..75: mol_type = other DNA
taacggcagcgaaaaagagctctatctgctttccgggcagcaattccttaagtgtccactgagtgttgtaaagaa

SEQ ID NO: 264513 - DNA, 75 bp, synthetic construct
  source 1..75: mol_type = other DNA
gccagctttaactacaactatatcggtcgtttattactgccggcagcggtgaaaaaattcccgattgtggggctg

SEQ ID NO: 264514 - DNA, 75 bp, synthetic construct
  source 1..75: mol_type = other DNA
agaagaacagattgatccgcgcaaagcggcagttgctgcggctattgcccgcgttcaggccaaaaaagccgccca

SEQ ID NO: 264515 - DNA, 75 bp, synthetic construct
  source 1..75: mol_type = other DNA
gcgccactttcccggaaggagccgccgtacgggattattacagccagcaaattgcgatagtgaagaacggtcaaa

SEQ ID NO: 264516 - DNA, 75 bp, synthetic construct
  source 1..75: mol_type = other DNA
gcgcagttgctgcatctatcgtcggcattgaagtcaatgcgctggtggctgttactgtgcaccgaaacgcatcaa

SEQ ID NO: 264517 - DNA, 75 bp, synthetic construct
  source 1..75: mol_type = other DNA
cctactctgtttatagcttgccgagaaaagaaaaccgaagtatttcttaattgggatgtatatttaggccttgaa

SEQ ID NO: 264518 - DNA, 75 bp, synthetic construct
  source 1..75: mol_type = other DNA
gcttcagcactggcgtgtccggctcgctgaatgaccgtttcagctatagcctggcggcggtcgtgacagcggtgg

SEQ ID NO: 264519 - DNA, 75 bp, synthetic construct
  source 1..75: mol_type = other DNA
ctggaactgtggtgccacacaacctgtaccggatgcgcctgtgccgaaagatttaccccccggaatgccggatat

SEQ ID NO: 264520 - DNA, 75 bp, synthetic construct
  source 1..75: mol_type = other DNA
cagaggtgagcgtggagaaaccgggccgatggggccaaagggcgagagaggcgagagaggcgagagaggggcgca

SEQ ID NO: 264521 - DNA, 75 bp, synthetic construct
  source 1..75: mol_type = other DNA
catctacaacgcagagcaatgatatttctgagcatcgttatttcaaacaattatcagtagtgaagtttccagaat

SEQ ID NO: 264522 - DNA, 75 bp, synthetic construct
  source 1..75: mol_type = other DNA
gttattgcatccgggaaaaacatcgcgttggtctgaaggtcatgttgaagctagcaccatgagacgcctaaacga

SEQ ID NO: 264523 - DNA, 75 bp, synthetic construct
  source 1..75: mol_type = other DNA
aaaattggctttattgcatggataagttattgcatccgggaaaaacatcgcgttggtctgaaggtcatgttgaag

SEQ ID NO: 264524 - DNA, 75 bp, synthetic construct
  source 1..75: mol_type = other DNA
agagttggaggataaagctaaactactacaaacttacatgacatttatcgtcatggataatacactggaaaaagt

SEQ ID NO: 264525 - DNA, 75 bp, synthetic construct
  source 1..75: mol_type = other DNA
aagaaaatacagaaagagtatattcgttataaagcgataacagataatcagtcaaaaatacctattgttataaaa

SEQ ID NO: 264526 - DNA, 75 bp, synthetic construct
  source 1..75: mol_type = other DNA
tgacaaaattccctgaatatgtcaactttggtgctgtttacgagttggttgttgactggatgaccggaagcaaaa

SEQ ID NO: 264527 - DNA, 75 bp, synthetic construct
  source 1..75: mol_type = other DNA
gctattgcgtgccagcttcagaaaatggggatgacgccggagcagattaagcaggctaccggactttccgatgac

SEQ ID NO: 264528 - DNA, 75 bp, synthetic construct
  source 1..75: mol_type = other DNA
cttaacggcgtcgggttggcttatgcactatggttgatgttcaaaagaccatcattagcatcccgcctgattgct

SEQ ID NO: 264529 - DNA, 75 bp, synthetic construct
  source 1..75: mol_type = other DNA
cttaacggcgtcgggcttgcttatgccctgtggttgatgttcaaaaggccatcattcacgtcccgcctggttgct

SEQ ID NO: 264530 - DNA, 75 bp, synthetic construct
  source 1..75: mol_type = other DNA
cagttcccagggctggccccggaagccggtatacgctgctgttcgaatcgttcgttctctcatggctgaaaatca

SEQ ID NO: 264531 - DNA, 75 bp, synthetic construct
  source 1..75: mol_type = other DNA
ttccctcagggcatggagtggttagaaaaaaaatatagaagaactcaaactcaaagggactcttggcgattcaat

SEQ ID NO: 264532 - DNA, 75 bp, synthetic construct
  source 1..75: mol_type = other DNA
cggtcaggaatgccgcgtataacgaatatggcgctatcacctgcgaggtacagtttgagggggccgtggatacca

SEQ ID NO: 264533 - DNA, 75 bp, synthetic construct
  source 1..75: mol_type = other DNA
ctttgagcacaatgggcgtaaatgggactacgggaagtcaacgcagacgcgtcttgagccgtcggtggcggcagc

SEQ ID NO: 264534 - DNA, 75 bp, synthetic construct
  source 1..75: mol_type = other DNA
cagagctgattgcggcggcaaaagcgggaatggattctcatggtttcggcatggcttcagtacgttttatctgcg

SEQ ID NO: 264535 - DNA, 75 bp, synthetic construct
  source 1..75: mol_type = other DNA
gtcaatgatgcaggtcggcatagcctgtgaagtcatttttatgttcctgctctcgtttttcttactgaaagccgg

SEQ ID NO: 264536 - DNA, 75 bp, synthetic construct
  source 1..75: mol_type = other DNA
ttagtcgaattaacggcaaccggcgataaattcttttgtgcgggtggcgatattaaatcgtggtcggcctattcg

SEQ ID NO: 264537 - DNA, 75 bp, synthetic construct
  source 1..75: mol_type = other DNA
ggcagcaagaataacgccgctctaaaccagcaagtgttgatggccatccaagccgcacaggaagctcaaaggcag

SEQ ID NO: 264538 - DNA, 75 bp, synthetic construct
  source 1..75: mol_type = other DNA
ccgctgcgcatttctacggcggcatgggtatgcttaatcgcatgccacttttcggcagcaagaatcaggtggtac

SEQ ID NO: 264539 - DNA, 75 bp, synthetic construct
  source 1..75: mol_type = other DNA
tcaggttattgcggacagcgtaatcagtgcccgcgcggcacgtcctggtgggaacagacgcaaagccacaggcac

SEQ ID NO: 264540 - DNA, 75 bp, synthetic construct
  source 1..75: mol_type = other DNA
cactgatgcggcgtctggatagcctgggggaaacgctgacagcatcaggtggtcagccggctcagggcagcggac

SEQ ID NO: 264541 - DNA, 75 bp, synthetic construct
  source 1..75: mol_type = other DNA
catcggcaaggtgatcgcatttatcgccattatgatgctggtaggtcgccgtctggtgccgtggattatggcacg

SEQ ID NO: 264542 - DNA, 75 bp, synthetic construct
  source 1..75: mol_type = other DNA
ttttcgctcaaggatttgatggcggtaaaggccatcgccattcccggtgcgatcgcccagatagccgtggcgacg

SEQ ID NO: 264543 - DNA, 75 bp, synthetic construct
  source 1..75: mol_type = other DNA
gtcttcgtgaagttgatctggagtttgttcgatatgttgctagtcgttcaaatattgagaggcaacttaatcaga

SEQ ID NO: 264544 - DNA, 75 bp, synthetic construct
  source 1..75: mol_type = other DNA
aaatacacacagagcatgttgcaaaaatgggggtgttttgtacaactgaagaaacgacaaaacaagcactcatta

SEQ ID NO: 264545 - DNA, 75 bp, synthetic construct
  source 1..75: mol_type = other DNA
ctgatatatgctcgaatgcagaagactcctctactgatatgctgctcgttggattcgaatcttacatggttaatg

SEQ ID NO: 264546 - DNA, 75 bp, synthetic construct
  source 1..75: mol_type = other DNA
gcatcatttaacttgtggggaaattcgtcaagaccaattgttgtagagcttggtgatgattcaggctggcatttc

SEQ ID NO: 264547 - DNA, 75 bp, synthetic construct
  source 1..75: mol_type = other DNA
tttaggagataacgataccgggtttaaacaaaatggtgatggggtgctggatgcttatgctaatggtgtgcatgt

SEQ ID NO: 264548 - DNA, 75 bp, synthetic construct
  source 1..75: mol_type = other DNA
gcttcctgagtaacattaatgtttacagcaaaggcgaggtggataagaaaaaaggaatgcagcagtacgcattta

SEQ ID NO: 264549 - DNA, 75 bp, synthetic construct
  source 1..75: mol_type = other DNA
tgggatatctgttagcgggcgtgctggcaggaccattcactccagggtttgttgccgataccaagcttgcgccgg

SEQ ID NO: 264550 - DNA, 75 bp, synthetic construct
  source 1..75: mol_type = other DNA
ccacaaagcagggaccttcactgcggaccggaagaacactgagaaagttctgtccactctcggagactgcagcaa

SEQ ID NO: 264551 - DNA, 75 bp, synthetic construct
  source 1..75: mol_type = other DNA
tcacagcaatatcatggtgtgaacaactggcaaacatggaatttccagtgcccgtcaggtcatgtattgtctggt

SEQ ID NO: 264552 - DNA, 75 bp, synthetic construct
  source 1..75: mol_type = other DNA
tgttcagtgagcagcattggatgggagggatcaactactttagaagtctaatttctgctttttcacttgttgaac

SEQ ID NO: 264553 - DNA, 75 bp, synthetic construct
  source 1..75: mol_type = other DNA
gtagcattctgaaaggaggctatgtcatagacgcgattgatcctaaagatggtatcaacatctcccgcccagacg

SEQ ID NO: 264554 - DNA, 75 bp, synthetic construct
  source 1..75: mol_type = other DNA
gtttctcaacagaacgagagcaagattcttgccatcataaacgagatgagcaaaaagagtaacgtcaagatactc

SEQ ID NO: 264555 - DNA, 75 bp, synthetic construct
  source 1..75: mol_type = other DNA
aaaaaagtcccgccaggcccgtttattattgatgacctcaatcagtctgttcagggcacgctggatgtcaaagtg

SEQ ID NO: 264556 - DNA, 75 bp, synthetic construct
  source 1..75: mol_type = other DNA
ccgccgaagaagtcgcaaaactttttggtgtgaacaagaggacgatccttcgctggattgacactattaatggct

SEQ ID NO: 264557 - DNA, 75 bp, synthetic construct
  source 1..75: mol_type = other DNA
ttaacgaggtagcagctttattcggcgttacccgtcggaaaatattccggtggatgaacaagattaaaggctggc

SEQ ID NO: 264558 - DNA, 75 bp, synthetic construct
  source 1..75: mol_type = other DNA
ttaaagagaggggctatatatacactatttcacagaacagataataaagacattatgaatatgcaactcctcatt

SEQ ID NO: 264559 - DNA, 75 bp, synthetic construct
  source 1..75: mol_type = other DNA
tactcaatcagcgatctggctgaactgttttcagtttcacgtccaacagtctaccggacacttttgcgagggaaa

SEQ ID NO: 264560 - DNA, 75 bp, synthetic construct
  source 1..75: mol_type = other DNA
gcaacatcagttttattcgcctgcaggacaaatggtgttatctcgcactcgttgttgatttatattcacggcgga

SEQ ID NO: 264561 - DNA, 75 bp, synthetic construct
  source 1..75: mol_type = other DNA
atatttcgtgcaaagaaggctgctgagcaatataagtttaaaagaaaggaatttggtctctcatactataatatc

SEQ ID NO: 264562 - DNA, 75 bp, synthetic construct
  source 1..75: mol_type = other DNA
ggcggaagggttgtttaaagaagagcgcattatcacgtctgcgcagcaagcagacatcactgtggctgatggaag

SEQ ID NO: 264563 - DNA, 75 bp, synthetic construct
  source 1..75: mol_type = other DNA
ccaggttcgtcgaatattaatgcgagaacgacttttaatatgagtcatatgagtcagatgagtcagatgagtcag

SEQ ID NO: 264564 - DNA, 75 bp, synthetic construct
  source 1..75: mol_type = other DNA
gtggacaggcatccgggcttggtggactaccgcccattgcacaggcattaaaagatcatttagctgcctatgagc

SEQ ID NO: 264565 - DNA, 75 bp, synthetic construct
  source 1..75: mol_type = other DNA
gagtggtaaaggagaggccctggaaataccccacagccccgaaaaagagccagtcagttgcttaactgactggca

SEQ ID NO: 264566 - DNA, 75 bp, synthetic construct
  source 1..75: mol_type = other DNA
ttaatcaaggtataacctggctttcagaaatgttgtcggttaataaaaagctatgggaaaagaaattggaaaatg

SEQ ID NO: 264567 - DNA, 75 bp, synthetic construct
  source 1..75: mol_type = other DNA
gggtggtgcaggtgtgagtaaaaaaaacataaaaaatgcaaaagcgaaaatgctcaaaggggtaagtaaatactg

SEQ ID NO: 264568 - DNA, 75 bp, synthetic construct
  source 1..75: mol_type = other DNA
tcatctggacttcgttaagttgggggacgcgtattggacaatggggcggccgacttatgggcattccggttatca

SEQ ID NO: 264569 - DNA, 75 bp, synthetic construct
  source 1..75: mol_type = other DNA
aatagatggtcatactggatatacgcttaatggcgagctaacgccagcgctggagggtgtgcttaaccgtatttt

SEQ ID NO: 264570 - DNA, 75 bp, synthetic construct
  source 1..75: mol_type = other DNA
aggccttcccgagagtggtaaaggagaggccctggaaataccccacagccccgaaaaagagccagtcagttgctt

SEQ ID NO: 264571 - DNA, 75 bp, synthetic construct
  source 1..75: mol_type = other DNA
atggctacatacggcggtcagtttacgcttacagttgtctgggcgattggcctgaaatacacccacggttttacg

SEQ ID NO: 264572 - DNA, 75 bp, synthetic construct
  source 1..75: mol_type = other DNA
gcaagtcacgacagataaagatacagataaagatacagataaagatacagataaagatacagataaagatacaga

SEQ ID NO: 264573 - DNA, 75 bp, synthetic construct
  source 1..75: mol_type = other DNA
aaagtgttgctgcaggatatggatctgattcgcttccggcaggaactggaggccgaccgcgagtttctgacttac

SEQ ID NO: 264574 - DNA, 75 bp, synthetic construct
  source 1..75: mol_type = other DNA
accgggaggcttgttcaaaggcatctgatggtgtatctaaagctgcatttcctgatccttgctggacgccaccat

SEQ ID NO: 264575 - DNA, 75 bp, synthetic construct
  source 1..75: mol_type = other DNA
agtattgcacttcaattagttcggtgttttcaaattacaaggcgcatattgctgctattattactaagtcttcag

SEQ ID NO: 264576 - DNA, 75 bp, synthetic construct
  source 1..75: mol_type = other DNA
aattccttaaaaacatactggccactttgcatttctaccatcaaaaatcactgattgacgcaacaaatgctgtaa

SEQ ID NO: 264577 - DNA, 75 bp, synthetic construct
  source 1..75: mol_type = other DNA
gcgaacaaaggggcattatcccgcgccatccgccgtcgcctgacgggaacacgtggactggtgattgttgacgaa

SEQ ID NO: 264578 - DNA, 75 bp, synthetic construct
  source 1..75: mol_type = other DNA
gcagcaggctatggagatggtccttccactgcggcgggtggctttatgtatctcggcttaagtgaagttaccttt

SEQ ID NO: 264579 - DNA, 75 bp, synthetic construct
  source 1..75: mol_type = other DNA
accagaaaatgaaactggaatgactctgtttgccaataacaccgttacaggagaatataataacggcggggccat

SEQ ID NO: 264580 - DNA, 75 bp, synthetic construct
  source 1..75: mol_type = other DNA
gaataagagcgagagatcttggttatacagtcattgatatgagtgttacagaaaatgcatttagggctaactctt

SEQ ID NO: 264581 - DNA, 75 bp, synthetic construct
  source 1..75: mol_type = other DNA
tagaattaaagcttgcgatgatgtgcatagaaatacttatcttgaaaatcttgccttgcattatcaaattttcag

SEQ ID NO: 264582 - DNA, 75 bp, synthetic construct
  source 1..75: mol_type = other DNA
gcccaatatggttggatttcagttcgtattgcgcggtatctgttcccgcctgggagcaccaaatcgcaaagccga

SEQ ID NO: 264583 - DNA, 75 bp, synthetic construct
  source 1..75: mol_type = other DNA
atgacgatggatccgggggagtatgcggtttcggtgacggtgaaagggaagactctgagcgcatccggtgaaact

SEQ ID NO: 264584 - DNA, 75 bp, synthetic construct
  source 1..75: mol_type = other DNA
ttgctactttattatcaagtggagccgctattaatgcaactgcggtagcaaaaactgcgaccagtactatcactg

SEQ ID NO: 264585 - DNA, 75 bp, synthetic construct
  source 1..75: mol_type = other DNA
ctaatacaaatttcaagaaaatttgattctccggctgtggaaaatcggtattataaaatgggtgtgccaactata

SEQ ID NO: 264586 - DNA, 75 bp, synthetic construct
  source 1..75: mol_type = other DNA
tcgaactttagctgaaggagaattcaatcgtttatttgcccgaggcttgagctcgcgagcaatagcagaaggaat

SEQ ID NO: 264587 - DNA, 75 bp, synthetic construct
  source 1..75: mol_type = other DNA
tgtttaatgggaaaaataatacatttaaaggatttaactggaatagtaactttacagactacagtatatctccta

SEQ ID NO: 264588 - DNA, 75 bp, synthetic construct
  source 1..75: mol_type = other DNA
tgcagggctcaattacaccggctatgccactacgaccaggaatatatgaagtagtattaaatgctgagcttgtga

SEQ ID NO: 264589 - DNA, 75 bp, synthetic construct
  source 1..75: mol_type = other DNA
tgtctggctcaattacaccgactatgccactacgaccaggaatatatgaagtagtattaaatgctgagcttgtga

SEQ ID NO: 264590 - DNA, 75 bp, synthetic construct
  source 1..75: mol_type = other DNA
atataagccatcagaacttgagtttgtgttgctttccggcttaggcagtgcgtggcctcttgtacgagggcatga

SEQ ID NO: 264591 - DNA, 75 bp, synthetic construct
  source 1..75: mol_type = other DNA
ggcgttctggcgctctgccatctggctggctgggtgccgcaggcgattgaccccgcaccgctgccggaaatcgat

SEQ ID NO: 264592 - DNA, 75 bp, synthetic construct
  source 1..75: mol_type = other DNA
agaacgatctttattttgtgaagtatattaaaaccatgcaaaatatattttgcgatgcttcgatgttgagtggga

SEQ ID NO: 264593 - DNA, 75 bp, synthetic construct
  source 1..75: mol_type = other DNA
acgcctggccgttggtgcgcgggcatgagctcatgagtgctttacaggatgtaatgggttttacgccacttctga

SEQ ID NO: 264594 - DNA, 75 bp, synthetic construct
  source 1..75: mol_type = other DNA
gagctgtctaaaacagcagaatattgttcttcaattggcaaaaaaatatctgatgttggtcccgcatattgcgtc

SEQ ID NO: 264595 - DNA, 75 bp, synthetic construct
  source 1..75: mol_type = other DNA
gtcatggggttcaccccactgctgatgttttatcctggcacctacagcgggtacaacctttccccgctcacagac

SEQ ID NO: 264596 - DNA, 75 bp, synthetic construct
  source 1..75: mol_type = other DNA
agcaggtgaactacgacacgtttatttcgtatccgcagcttgatgcctgggcggcgcacaatgacttccagaccc

SEQ ID NO: 264597 - DNA, 75 bp, synthetic construct
  source 1..75: mol_type = other DNA
atgcgtggagatttttatcagcagttagccaacgatctggaaaccgctcgtgcggaaggattgtttaaagaagag

SEQ ID NO: 264598 - DNA, 75 bp, synthetic construct
  source 1..75: mol_type = other DNA
tgaagcgggtagcgagctgcgtgaccgtctgtgggcgaacgcgcgtcagttccgtgagcaaatgtcggcggcggg

SEQ ID NO: 264599 - DNA, 75 bp, synthetic construct
  source 1..75: mol_type = other DNA
gtgagcaagattgactatcaagaactgcgcgaggcggcggaacaggcaacgcaagatgaatgggtagcatatatt

SEQ ID NO: 264600 - DNA, 75 bp, synthetic construct
  source 1..75: mol_type = other DNA
ttgataagtacattcagcgacaggctgaactcaaccatatcagcgctgcccacgtcaccaaggcgtacagcattg

SEQ ID NO: 264601 - DNA, 75 bp, synthetic construct
  source 1..75: mol_type = other DNA
atacaaccgcatcgccacctaccagtccatcaatgacgcttatgtcgttgaagactatggcaagtgcgcgatgat

SEQ ID NO: 264602 - DNA, 75 bp, synthetic construct
  source 1..75: mol_type = other DNA
tatatggtaaatctattgattatgcagcgctgcgtcatcgggatataattattgcaaaaatagatttgtttattc

SEQ ID NO: 264603 - DNA, 75 bp, synthetic construct
  source 1..75: mol_type = other DNA
acgctgacccgcagtattggcggcaaaaccgcgctggactgggcaatgaagcaggattttcgttgcggctgctgg

SEQ ID NO: 264604 - DNA, 75 bp, synthetic construct
  source 1..75: mol_type = other DNA
ggcaacaggtgatttcaaaatattcgtgacggacacgggggccagcccggcagcaggagatagccttacactggt

SEQ ID NO: 264605 - DNA, 75 bp, synthetic construct
  source 1..75: mol_type = other DNA
tgaatatggcggcagcacaaccgctggtatttgatgcagaactggacaccgtgcgtgagcgtcttggtagcgtaa

SEQ ID NO: 264606 - DNA, 75 bp, synthetic construct
  source 1..75: mol_type = other DNA
agcacccggcagcttttgacgtggtttgataatgtctgggctgatgcacagaatcttcgtgacataaagaatgat

SEQ ID NO: 264607 - DNA, 75 bp, synthetic construct
  source 1..75: mol_type = other DNA
gcatcatttaggtttgacctgtgatccagttggcgggcaggtacaaattccttgtattgaacgaaatgctatttc

SEQ ID NO: 264608 - DNA, 75 bp, synthetic construct
  source 1..75: mol_type = other DNA
gcggaaaattgatgtcgaactttatggtgcgctgtcattaagccgcaagtgccataatgttgatgtggcgattta

SEQ ID NO: 264609 - DNA, 75 bp, synthetic construct
  source 1..75: mol_type = other DNA
atctctgaaaatatggttatcaacaatggccgcgctaatgtctgggctggcacaatggttaacgtttcagtcaga

SEQ ID NO: 264610 - DNA, 75 bp, synthetic construct
  source 1..75: mol_type = other DNA
atcaacaatggccgcgctaacgtctgggctggcacaatggttaacgtttcagtcagagggaatgatggcattctt

SEQ ID NO: 264611 - DNA, 75 bp, synthetic construct
  source 1..75: mol_type = other DNA
aaaacactcgcctcaacttagccaaccttgcgatgtccggcgcaaatgtgattatgatggctgaaccagtgactc

SEQ ID NO: 264612 - DNA, 75 bp, synthetic construct
  source 1..75: mol_type = other DNA
caccgtgcgtgagcgtcttggtagcaaggcgttaattacgatacggcgatgtggagttcggcaattaacacccgc

SEQ ID NO: 264613 - DNA, 75 bp, synthetic construct
  source 1..75: mol_type = other DNA
ttccgttggggggaggggttgtggaatgtaaggccttatctgtcctttaccggctttaccactgatggtcaggac

SEQ ID NO: 264614 - DNA, 75 bp, synthetic construct
  source 1..75: mol_type = other DNA
tatgggaccgcaaataatacgaaaatcactcccagcggagaacagcatataaaagaatgtggtgtaagtaataat

SEQ ID NO: 264615 - DNA, 75 bp, synthetic construct
  source 1..75: mol_type = other DNA
gtggtatccagttattttccggcgttccacaggcagcactggcgagctggcttccagagtgattataacgaccac

SEQ ID NO: 264616 - DNA, 75 bp, synthetic construct
  source 1..75: mol_type = other DNA
ctgaagtccacctccaggagcaagaccaaccgtaaaaacgtcactgacgccactgaggagctcgtacagctgtcg

SEQ ID NO: 264617 - DNA, 75 bp, synthetic construct
  source 1..75: mol_type = other DNA
aaatcgctaccggtaggtacagcttatgctgtctggacggggattggcgcagtcggggcggcgatcaccggtatt

SEQ ID NO: 264618 - DNA, 75 bp, synthetic construct
  source 1..75: mol_type = other DNA
gcagtattgggcagttctccacactttacggcgcaattgaagatatggtcgttggcctggaagcggtactggcag

SEQ ID NO: 264619 - DNA, 75 bp, synthetic construct
  source 1..75: mol_type = other DNA
tataacagattggaaagctgtgccctatattaatggacacgttggaagaaaacacagccagttaattatagatag

SEQ ID NO: 264620 - DNA, 75 bp, synthetic construct
  source 1..75: mol_type = other DNA
gttcctgaatcgtgacccgttcgaatgtgtgctgtgtggaggggggggatggtgtaccgtcgtgcagtcgcgggg

SEQ ID NO: 264621 - DNA, 75 bp, synthetic construct
  source 1..75: mol_type = other DNA
gccactacttcacccgctggtttagcggttaccgcaaaaaattaggggttccagagtttcattcactgcgacatt

SEQ ID NO: 264622 - DNA, 75 bp, synthetic construct
  source 1..75: mol_type = other DNA
attataaaactgtagaaacatattatgctgctattaatgcaatcagccaaagcctgagttttagtgctgatgaaa

SEQ ID NO: 264623 - DNA, 75 bp, synthetic construct
  source 1..75: mol_type = other DNA
agataatcacatcattcatgaagataatctggttaaattactgcaaactaaaagtgctaacgaaacacctggact

SEQ ID NO: 264624 - DNA, 75 bp, synthetic construct
  source 1..75: mol_type = other DNA
gagttaatgttttatactctgtgatctatgcaggtcaaaattcaaacataaacaacataaggctaagaagcagta

SEQ ID NO: 264625 - DNA, 75 bp, synthetic construct
  source 1..75: mol_type = other DNA
catcgggcattatctgaacataaaacactatcaataagttggagtcattaccctattttttgtcgccatctgtca

SEQ ID NO: 264626 - DNA, 75 bp, synthetic construct
  source 1..75: mol_type = other DNA
ttataaaacagtagaaacatattatgcagctataaatgtaatcagccaaagcctgagctttagttcagatgaact

SEQ ID NO: 264627 - DNA, 75 bp, synthetic construct
  source 1..75: mol_type = other DNA
caatagcacaagagcttttaaacaaaaaaatggtgatggatattttagccatgaaaacacgtgatggtgaaccag

SEQ ID NO: 264628 - DNA, 75 bp, synthetic construct
  source 1..75: mol_type = other DNA
gagagattggaggaagagtatcaacaagaaaatacacttaatgatgtagttcaaaatatcaggcgttggctaaaa

SEQ ID NO: 264629 - DNA, 75 bp, synthetic construct
  source 1..75: mol_type = other DNA
ttaagtaaaactaacgcaggcactgatactcaagctaaactgtctgacttaatggcaaacaatgctaatgccaaa

SEQ ID NO: 264630 - DNA, 75 bp, synthetic construct
  source 1..75: mol_type = other DNA
gaaatctataaagacgctgatggtgtctacagcacagagaataaaacatcgaagacgtccgatccattggctgcg

SEQ ID NO: 264631 - DNA, 75 bp, synthetic construct
  source 1..75: mol_type = other DNA
tcgggcaatattacttcaagtgatggcgatcaactttatctggattcaacaggtaacctgactaaaaaccaggcc

SEQ ID NO: 264632 - DNA, 75 bp, synthetic construct
  source 1..75: mol_type = other DNA
cgttggcctgaaatatacccacggctttagtcgtttgacgccaagtgttattactgtgacggcgatgattgtcag

SEQ ID NO: 264633 - DNA, 75 bp, synthetic construct
  source 1..75: mol_type = other DNA
accaaagccgcaaccaccaccgatccgctggccgctctggatgacgcaatcagccagatcgacaagttccgttca

SEQ ID NO: 264634 - DNA, 75 bp, synthetic construct
  source 1..75: mol_type = other DNA
gtaaagcggtctatgtagaagcggatggtgatttcactaccgacgctgcaaccaaagccgcaaccaccaccgatc

SEQ ID NO: 264635 - DNA, 75 bp, synthetic construct
  source 1..75: mol_type = other DNA
gagtactgtggccgttatactgaattgccatcatcagggggcgcgttctgttcgcgccgtgaatgaagagagtca

SEQ ID NO: 264636 - DNA, 75 bp, synthetic construct
  source 1..75: mol_type = other DNA
cctggcagagcggcacatcatacaatgatggccttgaagtcagtggcagcagcggaacggttatcggcagtcagg

SEQ ID NO: 264637 - DNA, 75 bp, synthetic construct
  source 1..75: mol_type = other DNA
acccgcgaatggctgggctggggccatgcctgggcgcatgaaaccgcggtggtccgacggaagagcgaggcgtcc

SEQ ID NO: 264638 - DNA, 75 bp, synthetic construct
  source 1..75: mol_type = other DNA
tcgtgaggccgagcaatgtttatggcctggcaataaaaagccctctattcttacccacaataacaagaaatgcaa

SEQ ID NO: 264639 - DNA, 75 bp, synthetic construct
  source 1..75: mol_type = other DNA
tacgtccatctaatgtgtatggattagctttgaatagtaagttatttctccctcaaatcataaaaaatgcaatat

SEQ ID NO: 264640 - DNA, 75 bp, synthetic construct
  source 1..75: mol_type = other DNA
tgaaattcgtcgtgtgtggatcgaaaacggtaagcccggcgcggcaagattacgaacaatcatgattggcttagg

SEQ ID NO: 264641 - DNA, 75 bp, synthetic construct
  source 1..75: mol_type = other DNA
acggatgatgagcgcacccaccagtaccattacgacagtcagcaccggctggtgcactacacgcggacacaatat

SEQ ID NO: 264642 - DNA, 75 bp, synthetic construct
  source 1..75: mol_type = other DNA
caccctcagcatgtggccggataaccgtatcgcccgtgacgcgcactatctttaccggtatgaccgtcacggcag

SEQ ID NO: 264643 - DNA, 75 bp, synthetic construct
  source 1..75: mol_type = other DNA
ggtatctaaagtataatataagtgccggacagtatcgttcatcggatgaatctgtagaaaaagcatatctatggc

SEQ ID NO: 264644 - DNA, 75 bp, synthetic construct
  source 1..75: mol_type = other DNA
tcaggcgacagcctgaacgtagcagggatcctcgtccttcagggcgtggaggatgtcaacaaacaggttgaatta

SEQ ID NO: 264645 - DNA, 75 bp, synthetic construct
  source 1..75: mol_type = other DNA
aagcaggaacccaccgaaatgattcaggcgacagcctgaacgaagcagggatccacgtccttcagggcgtggagg

SEQ ID NO: 264646 - DNA, 75 bp, synthetic construct
  source 1..75: mol_type = other DNA
gtcgctgaagtatttccaaaaattaaactctggcagggcttactggcaggtgctttagcccaactttttgttcat

SEQ ID NO: 264647 - DNA, 75 bp, synthetic construct
  source 1..75: mol_type = other DNA
gcgggtcagtaccgttcaccggatgatgcggttgagcagacgtcgctgggacaggtgacggccatgtacggtctg

SEQ ID NO: 264648 - DNA, 75 bp, synthetic construct
  source 1..75: mol_type = other DNA
ctggggctaatcaacgcattgggttatgcgccaggcgatatgcagccgtcagattccgcaacctggggcgtggca

SEQ ID NO: 264649 - DNA, 75 bp, synthetic construct
  source 1..75: mol_type = other DNA
ctgaactggggaccggataaagtggctgccgaacgtgtgcagatcctcaaaaccggcaacatgggctttaccacc

SEQ ID NO: 264650 - DNA, 75 bp, synthetic construct
  source 1..75: mol_type = other DNA
gatggaacacctttaccatttggtacagtcgttaccttagaaggaaaaacggaagtatcaaattctacagggata

SEQ ID NO: 264651 - DNA, 75 bp, synthetic construct
  source 1..75: mol_type = other DNA
taagacaacagcccttatgcaacactcctccggcagagacactcgttatgaaataggacttaatggtcaggcatt

SEQ ID NO: 264652 - DNA, 75 bp, synthetic construct
  source 1..75: mol_type = other DNA
tctctagatgctatccattctcgtagtcagatgaagggaaaagagcatgagacagggaatgcttggcgtgttcgc

SEQ ID NO: 264653 - DNA, 75 bp, synthetic construct
  source 1..75: mol_type = other DNA
gacagcctgaacgtagcagggatcctcgtccttcagggcgtggaggatgtcaacaaacaggttgaattaactccg

SEQ ID NO: 264654 - DNA, 75 bp, synthetic construct
  source 1..75: mol_type = other DNA
tgtcggtattcaaatattcgtctgttccggttctccaacgtgctggatatacgcgttatgcgcttgccatggggg

SEQ ID NO: 264655 - DNA, 75 bp, synthetic construct
  source 1..75: mol_type = other DNA
aagctgaatgattgtgataccaatgtttccagtaatgcagctgttgcattcctggtagactggccccctgaatct

SEQ ID NO: 264656 - DNA, 75 bp, synthetic construct
  source 1..75: mol_type = other DNA
caatgtttccagtaatgcagctgttgcattcctggtagactggccccctgaatctccagacaaccagtatcactt

SEQ ID NO: 264657 - DNA, 75 bp, synthetic construct
  source 1..75: mol_type = other DNA
taaaccttctttgcaggcgacggctctcttgcagcaccttaaacaatcgctggcaattacaggaaaattacataa

SEQ ID NO: 264658 - DNA, 75 bp, synthetic construct
  source 1..75: mol_type = other DNA
atcaggctgatgcgcagattttatcgcagactgaactgcaagtgatgcatccggagcttttacctccggaggttt

SEQ ID NO: 264659 - DNA, 75 bp, synthetic construct
  source 1..75: mol_type = other DNA
aatctgattgatactgcaccaggatataactttggcaatagtgaagttatcgtcggtcaggcgttaaaaaaactg

SEQ ID NO: 264660 - DNA, 75 bp, synthetic construct
  source 1..75: mol_type = other DNA
ctgcgcgatcagatagccctgcgggtgaccgaagcaggtgcggatgatgaggaggaattacagcaggaggagtaa

SEQ ID NO: 264661 - DNA, 75 bp, synthetic construct
  source 1..75: mol_type = other DNA
acggcacaactcattccggccagtgatgtcagacgggagtttgccatctgggcaaaagcggtcgtgcaggtgctg

SEQ ID NO: 264662 - DNA, 75 bp, synthetic construct
  source 1..75: mol_type = other DNA
ttcttaatgtcagccagttagctgcgctgtcgggtgtgcaccgacagactgtcgcatcaagaatcaaaaatatcc

SEQ ID NO: 264663 - DNA, 75 bp, synthetic construct
  source 1..75: mol_type = other DNA
actacgatgcactcggcaatcgtattcgtaaccttgatgatccattatttcctcaggacgcttccacgaagaaat

SEQ ID NO: 264664 - DNA, 75 bp, synthetic construct
  source 1..75: mol_type = other DNA
ggttagagtctcgaagagactatgttttttttaatgctggctttattgcaataactttactgctcttaagctatc

SEQ ID NO: 264665 - DNA, 75 bp, synthetic construct
  source 1..75: mol_type = other DNA
tgtattgctcccattttactttttccttagaattgataattttaaacctgtatattatggtatagtggtcttatt

SEQ ID NO: 264666 - DNA, 75 bp, synthetic construct
  source 1..75: mol_type = other DNA
cgggtgctggcatcgcccctcaccctaaccctctccccaaaggggcgaggggaccgatggtgcacggggtgattt

SEQ ID NO: 264667 - DNA, 75 bp, synthetic construct
  source 1..75: mol_type = other DNA
gaggaagggatgtctgagaacgcagctattgttcaggcgcttgtatgggcattgaaatttagagcacggatacat

SEQ ID NO: 264668 - DNA, 75 bp, synthetic construct
  source 1..75: mol_type = other DNA
caggatcgctggcatcttggcgtgatggcaggttacgctaatcagcacagtaatactcagagtaatcgtgtgggt

SEQ ID NO: 264669 - DNA, 75 bp, synthetic construct
  source 1..75: mol_type = other DNA
aaaaaatgagagtctcctaaagtttccttcgataatatcaatgcttaatatcaatcttctttttaatccactaaa

SEQ ID NO: 264670 - DNA, 75 bp, synthetic construct
  source 1..75: mol_type = other DNA
tgggccgcgacacacgagagttagtgttagccaacggcgaaagctggcactgggatcagctttttatagcaaccg

SEQ ID NO: 264671 - DNA, 75 bp, synthetic construct
  source 1..75: mol_type = other DNA
tttaccctacgccatgccggtgatgccgccagttcaatcactgtcaccttacatctgcgctgcgtggcgctggca

SEQ ID NO: 264672 - DNA, 75 bp, synthetic construct
  source 1..75: mol_type = other DNA
gtgcagaaatctatcgttcaggagataaaaaatcgtagctggcaatatgaagatattatagacgccgccattatc

SEQ ID NO: 264673 - DNA, 75 bp, synthetic construct
  source 1..75: mol_type = other DNA
gctatgttgttttacatttgcagtcgctctcaaaagaagagcagactgtgattctacaagctaatggtgtagaac

SEQ ID NO: 264674 - DNA, 75 bp, synthetic construct
  source 1..75: mol_type = other DNA
cgggatatcgctacccgaattacttatgaaaataccgatatttataaacagttctggaatgaggatggccatggt

SEQ ID NO: 264675 - DNA, 75 bp, synthetic construct
  source 1..75: mol_type = other DNA
gagaaggctattgctctgggccaacaagcaattgcggatgatatgaaagatcccacgtcggtgatgtttaggaaa

SEQ ID NO: 264676 - DNA, 75 bp, synthetic construct
  source 1..75: mol_type = other DNA
attaatacactcgggtctatcaggtattaaagaagtcgtcaaaatttattctgaattgaacgagattaatcacga

SEQ ID NO: 264677 - DNA, 75 bp, synthetic construct
  source 1..75: mol_type = other DNA
cttcacaacccacaaaatctgcttatgttggctgaggccgttaaagaaggaaactggccccggacgaggtctgag

SEQ ID NO: 264678 - DNA, 75 bp, synthetic construct
  source 1..75: mol_type = other DNA
gtgacttgatgatggtgtcagcgggagcgggaaccttcaacggtgaatctgcggtgtctgtaggaacatctttta

SEQ ID NO: 264679 - DNA, 75 bp, synthetic construct
  source 1..75: mol_type = other DNA
tgttggtgcatacaccaaaactgagtcagattcacgttatgtgagagacatgcggctgggcggtgcatctacata

SEQ ID NO: 264680 - DNA, 75 bp, synthetic construct
  source 1..75: mol_type = other DNA
cacgaaaaccatcagcgggagatgttggtgcatacaccaaagctgaatcagattctcgctatgtccgggatattc

SEQ ID NO: 264681 - DNA, 75 bp, synthetic construct
  source 1..75: mol_type = other DNA
caaccacgcgatactggtgggctatggtcgcgtgggcagcctgctgggagaaaaattgctcgcgtctgatattcc

SEQ ID NO: 264682 - DNA, 75 bp, synthetic construct
  source 1..75: mol_type = other DNA
tgtagattcgtcacctgatgcactgaacacgctgaacgagctggcggcggcgctgggaaacgacccgaattttgc

SEQ ID NO: 264683 - DNA, 75 bp, synthetic construct
  source 1..75: mol_type = other DNA
atggtgtgcatgtattccgctttagaaatggttcagcaatatcattaaagggtattcaagctggggaaagtaagt

SEQ ID NO: 264684 - DNA, 75 bp, synthetic construct
  source 1..75: mol_type = other DNA
agaagggctaacggttattgttccaactcaggattataccgtcggtcaaacaacatataagtggggagcaactaa

SEQ ID NO: 264685 - DNA, 75 bp, synthetic construct
  source 1..75: mol_type = other DNA
aagcgccggaagaaccggaagccatgcgggataaagagacacaataccaaacggaagaaaaaggaatttattgta

SEQ ID NO: 264686 - DNA, 75 bp, synthetic construct
  source 1..75: mol_type = other DNA
caaatgcaaagtctggcgcagaagtctgtccaggcacatgagcaaattgaaagtctgagacaagattccgcacaa

SEQ ID NO: 264687 - DNA, 75 bp, synthetic construct
  source 1..75: mol_type = other DNA
atgccaggctggcggctcaaaatgaggctaatcagcgcactaccactgaacaagggcagaaaatgaatgcgctga

SEQ ID NO: 264688 - DNA, 75 bp, synthetic construct
  source 1..75: mol_type = other DNA
tgctgaatccggcaacgccagaggaaattaagtatgcttctgataaacttgcaacaggtaatcttccggaaggac

SEQ ID NO: 264689 - DNA, 75 bp, synthetic construct
  source 1..75: mol_type = other DNA
atgagttcaataacaatcccaacccttttggttgggattgttgttgagaataatgcaatgtctggcctggaaggg

SEQ ID NO: 264690 - DNA, 75 bp, synthetic construct
  source 1..75: mol_type = other DNA
tgatgttattggaactgtctctggggggactataggtacagctatcgacttcggcattgaagaatctcagaagaa

SEQ ID NO: 264691 - DNA, 75 bp, synthetic construct
  source 1..75: mol_type = other DNA
gcgaccgaagtgtccaacatgtcgaaagcgcagatcattcagcaggccggtaactccgtgctggcaaaagccaac

SEQ ID NO: 264692 - DNA, 75 bp, synthetic construct
  source 1..75: mol_type = other DNA
agatcgataagttccgttcatccctgggtgctatccagaaccgtctggattccgcggtcaccaacctgaacaaca

SEQ ID NO: 264693 - DNA, 75 bp, synthetic construct
  source 1..75: mol_type = other DNA
atccagcaggcaggcaactccgtgctggcaaaagccaaccaggtaccgcagcaggttctgtctctgctgcagggt

SEQ ID NO: 264694 - DNA, 75 bp, synthetic construct
  source 1..75: mol_type = other DNA
cgggtgagcgataaatattgtcatcgcgcagagtctcacgatgcgggcgatatcagctttagcgatatctttcgt

SEQ ID NO: 264695 - DNA, 75 bp, synthetic construct
  source 1..75: mol_type = other DNA
aagttctaaaaaatgcccattatgtgggatcgaatcatcaaccgacctagatcattatcttcccgaatcaatata

SEQ ID NO: 264696 - DNA, 75 bp, synthetic construct
  source 1..75: mol_type = other DNA
acttaagtattcacgtttcgagacaaatgaacgtgatgggaaatgtattggtgtgcggttagtaagagaatacgc

SEQ ID NO: 264697 - DNA, 75 bp, synthetic construct
  source 1..75: mol_type = other DNA
tggggcatgaggatgggaaggacaaaacggtaattgcagtgatgaaagctatcagagccgctggaattaaagaga

SEQ ID NO: 264698 - DNA, 75 bp, synthetic construct
  source 1..75: mol_type = other DNA
aatcttattccttcaatgccaatggtctgacgggcgcaaataccgcaactgtactcaaaggttacttggggacag

SEQ ID NO: 264699 - DNA, 75 bp, synthetic construct
  source 1..75: mol_type = other DNA
tcatccagcaggccggtaactccgtgctggcaaaagctaaccaggtaccgcagcaggttctgtctctgctgcagg

SEQ ID NO: 264700 - DNA, 75 bp, synthetic construct
  source 1..75: mol_type = other DNA
catgtcgaaagcgcagatcattcagcaggccggtaactccgtgctggcaaaagccaaccaggtaccgcagcaggt

SEQ ID NO: 264701 - DNA, 75 bp, synthetic construct
  source 1..75: mol_type = other DNA
gctgttagcttagtaaaactgcaggattccaagggtaatgataccgatacatatgcgcttaaagatacaaatggc

SEQ ID NO: 264702 - DNA, 75 bp, synthetic construct
  source 1..75: mol_type = other DNA
aaattaacaacaacttacagcgtattcgtgaactgacggttcaggcttctaccgggactaactccgattcggatc

SEQ ID NO: 264703 - DNA, 75 bp, synthetic construct
  source 1..75: mol_type = other DNA
ctcatcctgaaaacaccctcaaaaggtacgtcttggaagaagttaaacagctgttagatgagattgatgatcatg

SEQ ID NO: 264704 - DNA, 75 bp, synthetic construct
  source 1..75: mol_type = other DNA
caccaacccgcgtcagtgtggtagcaacgaccggttatctggctttcctcgtcgggccgccgctgctgggctatc

SEQ ID NO: 264705 - DNA, 75 bp, synthetic construct
  source 1..75: mol_type = other DNA
caacgacaacaagagcagtaaccaatttcttgataagccaggcaagcgaatcaatccggcgtataacctgcgggt

SEQ ID NO: 264706 - DNA, 75 bp, synthetic construct
  source 1..75: mol_type = other DNA
actattgccgggatagagatcagttgtgacttctggcacaaacaacagtcagttgaagcaacacgcgccctcaca

SEQ ID NO: 264707 - DNA, 75 bp, synthetic construct
  source 1..75: mol_type = other DNA
ttacaagaggcaaaatatctgacagtacgtcatttcttaagtggcgtgccgatagataatcagaaaacgttattc

SEQ ID NO: 264708 - DNA, 75 bp, synthetic construct
  source 1..75: mol_type = other DNA
tctcggcctgatggctggctatgccaacagcaagagtcacacacattccagcctgaccgggtacaactcacgcgg

SEQ ID NO: 264709 - DNA, 75 bp, synthetic construct
  source 1..75: mol_type = other DNA
cggggtggaaggacagctaaatgccaacctgaatgtctgggggaatgtgggcgttcaggttgccgataggggata

SEQ ID NO: 264710 - DNA, 75 bp, synthetic construct
  source 1..75: mol_type = other DNA
gtcaggatgaaataggtctgcgttataacagccaccgcacacggcgggaagagtaccttgtgatgagcggtgatg

SEQ ID NO: 264711 - DNA, 75 bp, synthetic construct
  source 1..75: mol_type = other DNA
cagcatttatctgtttacgctggtgactcgctcgcaatcctgccctttctcaaaaacgttcgatacaaatgataa

SEQ ID NO: 264712 - DNA, 75 bp, synthetic construct
  source 1..75: mol_type = other DNA
cagaaagggagcgaggccaaagccgttaaagtgtattttggccgttacccggatgtggggcttaaggtcgcgcga

SEQ ID NO: 264713 - DNA, 75 bp, synthetic construct
  source 1..75: mol_type = other DNA
acgcgacaagaaaggccgaactcggaaagagagcagtcacctgacagcagacaaagaactgagtaaccgggttag

SEQ ID NO: 264714 - DNA, 75 bp, synthetic construct
  source 1..75: mol_type = other DNA
attcggccttgaagcaattcagggctaccgccgtcatcgactggctcgacgttgagatacacaccgaatgcccaa

SEQ ID NO: 264715 - DNA, 75 bp, synthetic construct
  source 1..75: mol_type = other DNA
gacgggcgcgggacatggttctgtaaccagtgtggcgctggtgacggactggatctggtatccctggtcttcggt

SEQ ID NO: 264716 - DNA, 75 bp, synthetic construct
  source 1..75: mol_type = other DNA
acgtcctgtttatcgactgggaagcacagttttcttgtactattgactatgttcaatcgctacgggaacaatatg

SEQ ID NO: 264717 - DNA, 75 bp, synthetic construct
  source 1..75: mol_type = other DNA
gcccggaagcagccggcattaccgcctgtctgatggcatacagtcatcatgcctgccgtacggaatgttatgcca

SEQ ID NO: 264718 - DNA, 75 bp, synthetic construct
  source 1..75: mol_type = other DNA
gcctgtcgcacggagtgttatgccatgacggttcattattaccgtctgcgggactacgccctgcagcatccggaa

SEQ ID NO: 264719 - DNA, 75 bp, synthetic construct
  source 1..75: mol_type = other DNA
ttggttgccactcccgtccctgatgaacaccgaatcagcttctggccgcagcattttggcctcattccacagtgg

SEQ ID NO: 264720 - DNA, 75 bp, synthetic construct
  source 1..75: mol_type = other DNA
aggccggaaaaactggctgtttgcaggttccgacagcggtggcgaacatgcggcggtgttgtactcgctgatcgg

SEQ ID NO: 264721 - DNA, 75 bp, synthetic construct
  source 1..75: mol_type = other DNA
gttcgcatacctgctgaaacagtgggatggcctgaacgtgtactgcagtaatggctgggtggaaatcgacaacaa

SEQ ID NO: 264722 - DNA, 75 bp, synthetic construct
  source 1..75: mol_type = other DNA
ttacggggagtggccgtaggccggaaaaactggatgttcgcgggttccgacagcggtggtgaacatgcggcggtg

SEQ ID NO: 264723 - DNA, 75 bp, synthetic construct
  source 1..75: mol_type = other DNA
catcacgcctgccgtacggagtgttatgccatgacggttcattattaccgtctgcgggattacgccctgcaacat

SEQ ID NO: 264724 - DNA, 75 bp, synthetic construct
  source 1..75: mol_type = other DNA
tatatatcagtaccaaaagcgcgacagcggaagaagccctgaaactaatcggtgagctgtacgccatcgagcacg

SEQ ID NO: 264725 - DNA, 75 bp, synthetic construct
  source 1..75: mol_type = other DNA
tggagccagaagaaagctgttgcccggagtgtggcggtgagctggattatctgggagaagtcagcgctgaacagc

SEQ ID NO: 264726 - DNA, 75 bp, synthetic construct
  source 1..75: mol_type = other DNA
gctgatcggcacctgccgtctgaacaatgtggagccagaaaaatggctgcgttacgtcattgaacatatccagga

SEQ ID NO: 264727 - DNA, 75 bp, synthetic construct
  source 1..75: mol_type = other DNA
gtataccggccgtgaagtgcaggatattcccggtgtgctggccgtgtttgctgaacgccgtaaggacagttttgg

SEQ ID NO: 264728 - DNA, 75 bp, synthetic construct
  source 1..75: mol_type = other DNA
tattcaccaacagcatcctgcatcccgtctttttccgttctgtaccggtaagtatcgctggcacggcagtgctga

SEQ ID NO: 264729 - DNA, 75 bp, synthetic construct
  source 1..75: mol_type = other DNA
gtatctggaatctgtacactctgaacaacggcggggcatttatggcccccgaaccggatgacgatgatgtcgaaa

SEQ ID NO: 264730 - DNA, 75 bp, synthetic construct
  source 1..75: mol_type = other DNA
atcgctggcagtggagtatgcacagtcggggattcgcgttaatgcaatctgccctggttacgttcgcacgccaat

SEQ ID NO: 264731 - DNA, 75 bp, synthetic construct
  source 1..75: mol_type = other DNA
atgcccggtaaagtccatgccgatgatatccccgtcccggtccaggagccgggcagcggtaaaacccggacagcc

SEQ ID NO: 264732 - DNA, 75 bp, synthetic construct
  source 1..75: mol_type = other DNA
acagcgcataaagtggcctggtccgcagtgaaacatgaatatgccaaaggggatgatgataaatggcataaaaaa

SEQ ID NO: 264733 - DNA, 75 bp, synthetic construct
  source 1..75: mol_type = other DNA
tcgcgggctccggattacttgcccgcgtgttaacgggaaaatactgcgaacatctgccactgtatcgtcagagtg

SEQ ID NO: 264734 - DNA, 75 bp, synthetic construct
  source 1..75: mol_type = other DNA
agtacaggatattcccggtgtgctggccgtgtttgctgaacgccgtaaggacagttttggtccgtatgtccggct

SEQ ID NO: 264735 - DNA, 75 bp, synthetic construct
  source 1..75: mol_type = other DNA
tctttttccgttctgtaccggtaaataccgctggcacggcagtgctgaagcgtataccggtcgtgaagtgcagga

SEQ ID NO: 264736 - DNA, 75 bp, synthetic construct
  source 1..75: mol_type = other DNA
tcgaaacacaacgtccgaaactggcctgttgccggtgcgaccatatcgtgcaggctccggtgccttcaaaaccca

SEQ ID NO: 264737 - DNA, 75 bp, synthetic construct
  source 1..75: mol_type = other DNA
gtatctggaatctgtacacgctgaacaacggcggggcatttatggcacccgaaccggatgacgatgatgacgaaa

SEQ ID NO: 264738 - DNA, 75 bp, synthetic construct
  source 1..75: mol_type = other DNA
gtatctggaatctgtacaccctgaacaacggcggggcatttatggcgcccgaaccggatgacgatgatggcgaaa

SEQ ID NO: 264739 - DNA, 75 bp, synthetic construct
  source 1..75: mol_type = other DNA
tggccggttacagcggtgtgcttcaggccgatgcttacggtggttaccgggcgttatacgaatccggcagaataa

SEQ ID NO: 264740 - DNA, 75 bp, synthetic construct
  source 1..75: mol_type = other DNA
agtacaggatattcccggcgttcttgccgtgtttgcagaacgccgtaaggacagtgttggcccgtatgtccggct

SEQ ID NO: 264741 - DNA, 75 bp, synthetic construct
  source 1..75: mol_type = other DNA
atatccccgttccggtccaggaggcgggcagtggtaaaacaaggactgcccggctgtgggcctacgtccgtgatg

SEQ ID NO: 264742 - DNA, 75 bp, synthetic construct
  source 1..75: mol_type = other DNA
cttgcggggttcagtggtgtactgcaggcggatgcatacgccggcttcaacgagctgtaccgggatggccggata

SEQ ID NO: 264743 - DNA, 75 bp, synthetic construct
  source 1..75: mol_type = other DNA
gcttacagcccggacagaaaaagcatccatccgcagactcatcttgcttgcttcagcggtgtgctgcaagcggat

SEQ ID NO: 264744 - DNA, 75 bp, synthetic construct
  source 1..75: mol_type = other DNA
gctctgcactggcacgtgccgaagaaaagatcgaagaagatgaacgggaaacagaacatctgcgggctcagatag

SEQ ID NO: 264745 - DNA, 75 bp, synthetic construct
  source 1..75: mol_type = other DNA
atggccgaatacaaccgcctgctctcacagcgggtggcggcttacgcttccgaaattaagcgactgaaggcgctg

SEQ ID NO: 264746 - DNA, 75 bp, synthetic construct
  source 1..75: mol_type = other DNA
ttatgccggagcggggcgttctggcccatgttgtcaccgggaaatatgcagaccatctgccgttataccgccagt

SEQ ID NO: 264747 - DNA, 75 bp, synthetic construct
  source 1..75: mol_type = other DNA
ggctcatgcccggagaaaaatccacgatgtgcatgcaagagcgtccacctacatcaccacggaagccctgcagcg

SEQ ID NO: 264748 - DNA, 75 bp, synthetic construct
  source 1..75: mol_type = other DNA
gcaaaagtacgacggcagaagaagctctgaagcgcatcagtgaactgtacgccattgaggatgaaatacggggct

SEQ ID NO: 264749 - DNA, 75 bp, synthetic construct
  source 1..75: mol_type = other DNA
ggcagcagcgaagcaaagcgttactgacgtcgctgcatgaatggatggtggagaagaatggcacgctgtcgaaaa

SEQ ID NO: 264750 - DNA, 75 bp, synthetic construct
  source 1..75: mol_type = other DNA
tgatgaacacccgcaaggttcacactgacgacacaccagtaaaagtgctggcaccgggcagaaaaaaggcaaaaa

SEQ ID NO: 264751 - DNA, 75 bp, synthetic construct
  source 1..75: mol_type = other DNA
gcttcgttatatcgcggattaaagaacctgaaacagtcagactgtatcttggattttacaaactcttattcgggg

SEQ ID NO: 264752 - DNA, 75 bp, synthetic construct
  source 1..75: mol_type = other DNA
ctgtgataacggtctggcggaagtggataataatgccgcggaaagagcgcttcgtgcagtctgtctcggaaagaa

SEQ ID NO: 264753 - DNA, 75 bp, synthetic construct
  source 1..75: mol_type = other DNA
gccagggtgtcgaactgagccgtgccttactctccaactgggttgatgcgtgctgccagttaatgacgccgctga

SEQ ID NO: 264754 - DNA, 75 bp, synthetic construct
  source 1..75: mol_type = other DNA
aaatatgcagaccatctgccgttataccgccagtcagaaatataccgtcgtcagggtgtggagctgagccgtgcc

SEQ ID NO: 264755 - DNA, 75 bp, synthetic construct
  source 1..75: mol_type = other DNA
ttatatcgcggattaaagaacctgaaacagtcagactgtatcttggattttacaaactcttattcggggatttta

SEQ ID NO: 264756 - DNA, 75 bp, synthetic construct
  source 1..75: mol_type = other DNA
gacacttactctcccagccgttcaacagctcgactcctgttctctattacaacaaagatgctttcaagaaagcag

SEQ ID NO: 264757 - DNA, 75 bp, synthetic construct
  source 1..75: mol_type = other DNA
acggtgctgacggggggcttatggggcatttcctggggatgtgcaatgtggtttatctactgggggcgcaggaaa

SEQ ID NO: 264758 - DNA, 75 bp, synthetic construct
  source 1..75: mol_type = other DNA
tgtctcggaaagaaaaatacgtgttcttcggtagcgatcacggaggcgagcgtggtgcactgttgtacgggctga

SEQ ID NO: 264759 - DNA, 75 bp, synthetic construct
  source 1..75: mol_type = other DNA
gaagtcgagctgaacagtggttttcatgccggacctaatcagtctattgccgatcgggcggcattcacgctgttt

SEQ ID NO: 264760 - DNA, 75 bp, synthetic construct
  source 1..75: mol_type = other DNA
ttggcacttctcggtgatggaagcaggtactctctgccatttactggaagaagatgcgccgcgctacggattggg

SEQ ID NO: 264761 - DNA, 75 bp, synthetic construct
  source 1..75: mol_type = other DNA
cgctgaaatgagtccggaagctgccggcattgctgcctgtctgatgacgtacagtcatcatgcctgtcgtacgga

SEQ ID NO: 264762 - DNA, 75 bp, synthetic construct
  source 1..75: mol_type = other DNA
aacagcgtctggcggcaagaaaagccagagctgcgccactgatgcagtcgttgtacgactggatacagactcaga

SEQ ID NO: 264763 - DNA, 75 bp, synthetic construct
  source 1..75: mol_type = other DNA
ttatcggcacttgccttctgaacgacattgatccggaagcgtatctgcgccatatgctgagcctactgccggaat

SEQ ID NO: 264764 - DNA, 75 bp, synthetic construct
  source 1..75: mol_type = other DNA
cggtctggttcgcctactcaccggaccatcagggtaaacatccggagcaacaccttcgtcccttccggggtatcc

SEQ ID NO: 264765 - DNA, 75 bp, synthetic construct
  source 1..75: mol_type = other DNA
gtacccgtctgctttaccgtcccggagaaatcagtctgtgcagactgagtatacaggcaatggcatctggccatc

SEQ ID NO: 264766 - DNA, 75 bp, synthetic construct
  source 1..75: mol_type = other DNA
atgtacggttccgtgagcagccgggggggagggggaaattctctccggctgactcgactcgcagtttctgacagc

SEQ ID NO: 264767 - DNA, 75 bp, synthetic construct
  source 1..75: mol_type = other DNA
tcccccgccgtatcgcacaaatggaagccgatctgaaccagcttcagaaagagagcgatacgctgactggtaggg

SEQ ID NO: 264768 - DNA, 75 bp, synthetic construct
  source 1..75: mol_type = other DNA
ggatagtttcatcaaggattataacgagctgtatggcaccagctactcggccaatgattcaaagagcttctacaa

SEQ ID NO: 264769 - DNA, 75 bp, synthetic construct
  source 1..75: mol_type = other DNA
cccgtaaaccgttaccggcttcacttccccgtgaaacccgggtcatccggccggaagaggaatgctgtccggcct

SEQ ID NO: 264770 - DNA, 75 bp, synthetic construct
  source 1..75: mol_type = other DNA
gcaaaagtgcgacggcagaagaagccctgaagcgcatcagtgaactgtacgccatcgaggatgaaatacggggat

SEQ ID NO: 264771 - DNA, 75 bp, synthetic construct
  source 1..75: mol_type = other DNA
gggatgccctctgttattacagtgatgacggtctggcggaggcggataataatgctgcggaaagagcgcttcgtg

SEQ ID NO: 264772 - DNA, 75 bp, synthetic construct
  source 1..75: mol_type = other DNA
atgaacggcaaccgcgctgaaatgagcccggaagccgctggcattgctgcctgtctgatgacgtacagtcatcac

SEQ ID NO: 264773 - DNA, 75 bp, synthetic construct
  source 1..75: mol_type = other DNA
aagccgccggtattgccgcctgtctgatgacgtacagccatcatgcctgtcgtacggaatgttatgccatgacgg

SEQ ID NO: 264774 - DNA, 75 bp, synthetic construct
  source 1..75: mol_type = other DNA
cctcttcggcctgtgcaccggagactgacctgcaacaactggttgccaccctcgtccctgatgaacagcgcatta

SEQ ID NO: 264775 - DNA, 75 bp, synthetic construct
  source 1..75: mol_type = other DNA
catcttccccgtgaaatacaccgcctggaacctgaagaaagttgttgccaggagtgtggcagtgagctggattat

SEQ ID NO: 264776 - DNA, 75 bp, synthetic construct
  source 1..75: mol_type = other DNA
atatccccgtcccggtccaggagccgggcagcggtaaaacccggccgcccggctgtgggtctacgtccgtgatga

SEQ ID NO: 264777 - DNA, 75 bp, synthetic construct
  source 1..75: mol_type = other DNA
cagtgatgacggactggcggagacggacaataacacagcggaaagagcgcttcgtgcagtctgtcttggaaagaa

SEQ ID NO: 264778 - DNA, 75 bp, synthetic construct
  source 1..75: mol_type = other DNA
actgttgtatgggcttatcggcacttgccttctgaacgacattgatccggaagcgtatctgcgccatatcctgag

SEQ ID NO: 264779 - DNA, 75 bp, synthetic construct
  source 1..75: mol_type = other DNA
tgcagtctgtctcggaaagaaaaattcttatgacctttgtcaaatattaagcccaaaaagaccttacgcagctcc

SEQ ID NO: 264780 - DNA, 75 bp, synthetic construct
  source 1..75: mol_type = other DNA
aagccctggagcagatcggtcagttgtacgccatagaggcggatataaggggaatgccggcagagcagcggcttg

SEQ ID NO: 264781 - DNA, 75 bp, synthetic construct
  source 1..75: mol_type = other DNA
ccagcggtctggttcgcgtactcgccgaaccggcaggggaaacacccggagcaacacctccgccccttccggggt

SEQ ID NO: 264782 - DNA, 75 bp, synthetic construct
  source 1..75: mol_type = other DNA
aagccatgcgtattcaccaacaacatccggcatcccgtctttttccgttctgtaccggcaaataccgctggcacg

SEQ ID NO: 264783 - DNA, 75 bp, synthetic construct
  source 1..75: mol_type = other DNA
gagcacgaaatacgcgggttgccggtgtctgaacgcttggcggtcagaccaatgcagagtaaaccgctactgact

SEQ ID NO: 264784 - DNA, 75 bp, synthetic construct
  source 1..75: mol_type = other DNA
atgaaaatcatcacccgtggtgaagccatgcgaattcaccaacaacatccgacatcccgtctttttccgttctgt

SEQ ID NO: 264785 - DNA, 75 bp, synthetic construct
  source 1..75: mol_type = other DNA
gacatcccgtctttttccgttctgcaccggtaagtaccgctggcacggtggcactgaatcgtataccggtcgtga

SEQ ID NO: 264786 - DNA, 75 bp, synthetic construct
  source 1..75: mol_type = other DNA
acgccatagaggcggatataaggggaatgccggcagagcagcggcttgctgaacgtcagcgaaaaacgaaaccgc

SEQ ID NO: 264787 - DNA, 75 bp, synthetic construct
  source 1..75: mol_type = other DNA
tgttcgtgatgaccgcaatgctgggtcagcgttggcacctgcagtgtggttcgcttacagcctggacagaaaagg

SEQ ID NO: 264788 - DNA, 75 bp, synthetic construct
  source 1..75: mol_type = other DNA
gtgggacgccctctgttattacagtgatgacggtctggcggaggcggacaataacacagcggaaagagcgcttcg

SEQ ID NO: 264789 - DNA, 75 bp, synthetic construct
  source 1..75: mol_type = other DNA
gcgagcgtggtgcactgctatacgggctgatcggcacctgccgtctgaacggtatcgatccggaagcgtatctgc

SEQ ID NO: 264790 - DNA, 75 bp, synthetic construct
  source 1..75: mol_type = other DNA
gcgagcgtggtgcactgttgtacgggctgatcggcacctgccggttgaatggtatcgatccggaagcgtatctgc

SEQ ID NO: 264791 - DNA, 75 bp, synthetic construct
  source 1..75: mol_type = other DNA
tgtgcttcaggccgatgcttacggtggttaccgggcgttatacgaatccggcagaataacggaagccgcatgtat

SEQ ID NO: 264792 - DNA, 75 bp, synthetic construct
  source 1..75: mol_type = other DNA
cgtgccgggcccatgcccggagaaaaatccacgatgtatacatcagcagcaaaagtgcgacggcagaagaagccc

SEQ ID NO: 264793 - DNA, 75 bp, synthetic construct
  source 1..75: mol_type = other DNA
atgagtcggaaatacctcattcgtatcactgagctggaaaggctgttctctgagcaggctgaagccctccgtcag

SEQ ID NO: 264794 - DNA, 75 bp, synthetic construct
  source 1..75: mol_type = other DNA
tactcagtgcgatgccatcgtgcaggcccccgcgccttcacggcccatcgagcggggtatcgcaggaccggggct

SEQ ID NO: 264795 - DNA, 75 bp, synthetic construct
  source 1..75: mol_type = other DNA
agtgatccgcacagttcgggtaaaaaaagcgtgtacaaaatgtgactgcatcgttgaagcgccggcgccgtcccg

SEQ ID NO: 264796 - DNA, 75 bp, synthetic construct
  source 1..75: mol_type = other DNA
cctgagcgtactgccagaatggccttccaaccgagttgatgaactcctgccatggaacgtagtactcaccaataa

SEQ ID NO: 264797 - DNA, 75 bp, synthetic construct
  source 1..75: mol_type = other DNA
tcattgaagcaccggcaccatcccgtccgatagagcgtggtatcgcgggcccggggttacttgcccgcatgttaa

SEQ ID NO: 264798 - DNA, 75 bp, synthetic construct
  source 1..75: mol_type = other DNA
gtgttcttcggtagcgatcacggtggcgagcgtggtgcactgctatacgggctgatcggcacctgccgtctgaac

SEQ ID NO: 264799 - DNA, 75 bp, synthetic construct
  source 1..75: mol_type = other DNA
tgactgaaatggcgaaagcaatcccgctgcgtcgcctcgccgatccgctggaagtcggcgaactggcggccttcc

SEQ ID NO: 264800 - DNA, 75 bp, synthetic construct
  source 1..75: mol_type = other DNA
aaaaaagcctgtacaaaatgtgactgcatcgttaaagcaccggcaccgtcccgtccgatagagcgtggtatcgcg

SEQ ID NO: 264801 - DNA, 75 bp, synthetic construct
  source 1..75: mol_type = other DNA
ggactgtacgtgaaaagcatgcctgtactcagtgcgatgccatcgtgcaggcccccgcgccttcacggcccatcg

SEQ ID NO: 264802 - DNA, 75 bp, synthetic construct
  source 1..75: mol_type = other DNA
gtcccggtgctgttgccaggcaataagaaaacaaagaccgggcggttatggacctacgttcgtgacgaccgtaac

SEQ ID NO: 264803 - DNA, 75 bp, synthetic construct
  source 1..75: mol_type = other DNA
gccatattctgagcgtactgccggaatggccctccaaccgtgttgacgaactcctgccatggaacgtggttctca

SEQ ID NO: 264804 - DNA, 75 bp, synthetic construct
  source 1..75: mol_type = other DNA
ttgttctgtaatgttccagaaaaagcggttatttctctgaaagacgtcgattccatctataaaattccgggccta

SEQ ID NO: 264805 - DNA, 75 bp, synthetic construct
  source 1..75: mol_type = other DNA
tgcagtctgtctcggaaagaaaaattacgtgttcttcggtagcgatcacggcggcgagcgtggagcactgctgta

SEQ ID NO: 264806 - DNA, 75 bp, synthetic construct
  source 1..75: mol_type = other DNA
gccaaagataaagtctcgattctggatgaggtcgattttgaagtgtcactgattcatcgggatgaaattaatgtc

SEQ ID NO: 264807 - DNA, 75 bp, synthetic construct
  source 1..75: mol_type = other DNA
ctgtcgcgacactcagaactggcgaaagcgttcgcatacgccctgaaccagtggctggcgctgacgtactatgca

SEQ ID NO: 264808 - DNA, 75 bp, synthetic construct
  source 1..75: mol_type = other DNA
gcgctgaagcgtataccggtcgtgaagtgcaggatattctcggcgttcttgccgtgtttgctgaacgccgtaagg

SEQ ID NO: 264809 - DNA, 75 bp, synthetic construct
  source 1..75: mol_type = other DNA
accggcaaataccgctggcacggcagcactgaagcatataccggtcgtgaggtgcaggatattcccggtgtgctg

SEQ ID NO: 264810 - DNA, 75 bp, synthetic construct
  source 1..75: mol_type = other DNA
cgacagtcacgtcatcgtcgtccgttaccggcacaccttccccgtgaaatacaccgcctggagcctgaagaaagt

SEQ ID NO: 264811 - DNA, 75 bp, synthetic construct
  source 1..75: mol_type = other DNA
cgtatactggtcgtgaagtgcaggatattcccggtgtgctggccgtgtttgctgaacgccgtaaggacagttttg

SEQ ID NO: 264812 - DNA, 75 bp, synthetic construct
  source 1..75: mol_type = other DNA
tgcatcccgtctttttccgttctgtaccggcaaataccgctggcacggcagtgctgaagcgtataccggtcgtga

SEQ ID NO: 264813 - DNA, 75 bp, synthetic construct
  source 1..75: mol_type = other DNA
tggaactggtgagcagtgccctgaaagtgatccgcacagaacgggtaaaaaaagcctgtacaaaatgtgactgta

SEQ ID NO: 264814 - DNA, 75 bp, synthetic construct
  source 1..75: mol_type = other DNA
gtccactattaccggctgcgggattacgccctgcaacatccggaatgcagtgccattatgcgcatcattgactga

SEQ ID NO: 264815 - DNA, 75 bp, synthetic construct
  source 1..75: mol_type = other DNA
atgccatgacggtccattattaccggttgcgggattacgccctgcagcatccggaaggcagcgccattatgcgca

SEQ ID NO: 264816 - DNA, 75 bp, synthetic construct
  source 1..75: mol_type = other DNA
agagaataatccgcctcagttggttgccagcctcgtccctgatgaacagcgcatcagtttctggccacagcactt

SEQ ID NO: 264817 - DNA, 75 bp, synthetic construct
  source 1..75: mol_type = other DNA
atgccgttctggcaggtcacggtgctgatggggggcttatggggcatttcctggggatgtgcaatgtggtttatc

SEQ ID NO: 264818 - DNA, 75 bp, synthetic construct
  source 1..75: mol_type = other DNA
ggggagtctgctgtttgggctgctgacgtatctgactaacctgtatttcaaaatcagagaggaccgtcgtaaggc

SEQ ID NO: 264819 - DNA, 75 bp, synthetic construct
  source 1..75: mol_type = other DNA
gggtagtctggtatttggcatgctgacgtatctgacaaacctttatttcaagattaaagaagacaggcgtaaggt

SEQ ID NO: 264820 - DNA, 75 bp, synthetic construct
  source 1..75: mol_type = other DNA
atggaaaaaatcacaacaggtgtgtcatacaccacgtcagcggtgggaacgggctactggttcctgcagttgctg

SEQ ID NO: 264821 - DNA, 75 bp, synthetic construct
  source 1..75: mol_type = other DNA
atgaaatccatggataagttaacaacaggtgtcgcctatggcacctccgcaggcagtgctggctactggttttta

SEQ ID NO: 264822 - DNA, 75 bp, synthetic construct
  source 1..75: mol_type = other DNA
attgccagcgagcagctcaacgccctttccaccggcaccgccgttgcgccggaagccggtgcgacgttgatttta

SEQ ID NO: 264823 - DNA, 75 bp, synthetic construct
  source 1..75: mol_type = other DNA
aacgatcgcgacattttgatatccgaccatgtcatcgagcgcatcaactgtactaacggcaaaatcaactggggt

SEQ ID NO: 264824 - DNA, 75 bp, synthetic construct
  source 1..75: mol_type = other DNA
tgacaatatcaacaccggcatcttcattcctcctggcaaaacgttacacatccttggaagcctgcgcggcaatgg

SEQ ID NO: 264825 - DNA, 75 bp, synthetic construct
  source 1..75: mol_type = other DNA
accgtggcatttgaagaaaagtatggctctcagctggagctgatatttcgttttatcgatcgtgcgctggcaatt

SEQ ID NO: 264826 - DNA, 75 bp, synthetic construct
  source 1..75: mol_type = other DNA
ccaggttcagagctgatgcccctgtttatgcaggggcgtgtcctgctggagcctgagccggaacgttattcatct

SEQ ID NO: 264827 - DNA, 75 bp, synthetic construct
  source 1..75: mol_type = other DNA
cggtagcctcatgtttggtttgctgacgtggttaacgagtctgtacttccaaatcaaagcggatcgccgcaaagc

SEQ ID NO: 264828 - DNA, 75 bp, synthetic construct
  source 1..75: mol_type = other DNA
ggtatttggcttgctgacgtacctgacaaacctttatttcaagattaaagaagataagcgtaaggctgcgagagg

SEQ ID NO: 264829 - DNA, 75 bp, synthetic construct
  source 1..75: mol_type = other DNA
cagtgggctgcgattggtgtactggggagtctggttctgggcttcctgacatatctgactaacctgtatttcaaa

SEQ ID NO: 264830 - DNA, 75 bp, synthetic construct
  source 1..75: mol_type = other DNA
gtgagttcgatagataagatttcaactggtatttcctatggcacctccgtaggcagtgctggctactggttttta

SEQ ID NO: 264831 - DNA, 75 bp, synthetic construct
  source 1..75: mol_type = other DNA
ctgctgtttggcctgctgacgtatctgactaacctgtatttcaaaatcagggaggaccgccgtaagacggcgcgg

SEQ ID NO: 264832 - DNA, 75 bp, synthetic construct
  source 1..75: mol_type = other DNA
gcaataggtgtgctgggaagtctgctgtttggcctgctgacgtatctgactaacctgtatttcaaaatcagagag

SEQ ID NO: 264833 - DNA, 75 bp, synthetic construct
  source 1..75: mol_type = other DNA
aataggtgtgctgggaagtctgctgtttggcctgctgacgtatctgacaaatctttatttcaagattaaagaaga

SEQ ID NO: 264834 - DNA, 75 bp, synthetic construct
  source 1..75: mol_type = other DNA
acaaatctttatttcaagattaaagaagacaggcgtaaggtaagcgtacagcctgaaccgtctggtcagaatctg

SEQ ID NO: 264835 - DNA, 75 bp, synthetic construct
  source 1..75: mol_type = other DNA
aataggtgtgctggggagtctgctgtttggcctgctgacgtatctgactaacctttatttcaagattaaagaaga

SEQ ID NO: 264836 - DNA, 75 bp, synthetic construct
  source 1..75: mol_type = other DNA
caggtgtgtcatacaccacgtcagcagtgggaacgggctactggttcctgcagttgctggacagggtttccccgt

SEQ ID NO: 264837 - DNA, 75 bp, synthetic construct
  source 1..75: mol_type = other DNA
cagtggttggatcaggtcagtccatcacagtgggctgcgattggtgtgctgggaagtctgcttctggggcttctg

SEQ ID NO: 264838 - DNA, 75 bp, synthetic construct
  source 1..75: mol_type = other DNA
gggtagcctggtgtttggcctgctgacgtatctgacaaacctttatttcaagattaaagaagacaagcgtaaggc

SEQ ID NO: 264839 - DNA, 75 bp, synthetic construct
  source 1..75: mol_type = other DNA
atgagaaccgcaaagcccggcaaaatcccgggcttttttgccagcaggagcagagcaagcagcatgacgattgca

SEQ ID NO: 264840 - DNA, 75 bp, synthetic construct
  source 1..75: mol_type = other DNA
tggttactgcagctgctggacaaagtctctccgtcccagtgggtggcaataggtgtgctggggagtctgctgttt

SEQ ID NO: 264841 - DNA, 75 bp, synthetic construct
  source 1..75: mol_type = other DNA
atggaaaaaatatcaacaggcattgcctacggcacctccgccggcagtgccggctactggtttttgcagtggttg

SEQ ID NO: 264842 - DNA, 75 bp, synthetic construct
  source 1..75: mol_type = other DNA
gctgtttggcctgctgacgtatctgacaaatctgtatttcaagattaaagaagaccggcgtaaggcggcgcgggg

SEQ ID NO: 264843 - DNA, 75 bp, synthetic construct
  source 1..75: mol_type = other DNA
gaatctttcatgaagcgacctaaacgccgccgctgggttaacgagaaatacacgcgctgggtaaagacacagccg

SEQ ID NO: 264844 - DNA, 75 bp, synthetic construct
  source 1..75: mol_type = other DNA
cggtaccggaacttgggctggtggtgctaaaaccggggcgtgaatccatgcaggtatttcataatcctcgagttt

SEQ ID NO: 264845 - DNA, 75 bp, synthetic construct
  source 1..75: mol_type = other DNA
gaaagcgacatcgtaccgggagagcagaccgccaccagcatactgaagcagcgcacaaaagacattgcgccaccg

SEQ ID NO: 264846 - DNA, 75 bp, synthetic construct
  source 1..75: mol_type = other DNA
tggtaccggaactcgggctggtggtccttaagccaggtcgtgaatccatgcaggtatttcacaatccccgggtgc

SEQ ID NO: 264847 - DNA, 75 bp, synthetic construct
  source 1..75: mol_type = other DNA
ggcagccagctgttgttgctgattcgttttttaatgcacgcgagaaattcgggtgtcctgaagtggaaagcatga

SEQ ID NO: 264848 - DNA, 75 bp, synthetic construct
  source 1..75: mol_type = other DNA
gaaaaacacggcagccagctgttgttgctgattcgttttttaatgcacgcgaaaaattcgggcgtcctgaagtgg

SEQ ID NO: 264849 - DNA, 75 bp, synthetic construct
  source 1..75: mol_type = other DNA
ggaaaaaatccgctcggtgtaccgcgaaagcgacatcataccgggagagcagaccgccaccagcatactgaagca

SEQ ID NO: 264850 - DNA, 75 bp, synthetic construct
  source 1..75: mol_type = other DNA
acgatccgcatcacctgattggtcatggtcaggggggaatggggacaaaggcccacgatattttcacgctaccgt

SEQ ID NO: 264851 - DNA, 75 bp, synthetic construct
  source 1..75: mol_type = other DNA
gattgttgacttacgaattaagttcagccaggtggatgtggactataacgacaacacggtagttatcgtcctgaa

SEQ ID NO: 264852 - DNA, 75 bp, synthetic construct
  source 1..75: mol_type = other DNA
gagagtgacatcgtaccgggagaacagacagccatcagcatactgaagcagcgcacaaaaaatattgcgctgcca

SEQ ID NO: 264853 - DNA, 75 bp, synthetic construct
  source 1..75: mol_type = other DNA
agacagccaccagcgtactgaagcagcgcacaaaaaatcttgtgcagccatctcacgcccaccagcaacaaaacc

SEQ ID NO: 264854 - DNA, 75 bp, synthetic construct
  source 1..75: mol_type = other DNA
gtgcgggtattacttcgacctgttctggtaccggaactcgggctggtggtccttaagcccggtcgtgaatcattg

SEQ ID NO: 264855 - DNA, 75 bp, synthetic construct
  source 1..75: mol_type = other DNA
tcagtatctccagcgccagaaaccacaacgggaagagatgcccgtatacacgcgctgggtaaaaacgcagaaatg

SEQ ID NO: 264856 - DNA, 75 bp, synthetic construct
  source 1..75: mol_type = other DNA
gaatctttcatgaaacgacctaaacgtcgccgctgggttaacgagaaatacacacgctgggtgaagactcagccg

SEQ ID NO: 264857 - DNA, 75 bp, synthetic construct
  source 1..75: mol_type = other DNA
gcgttgggtaaagacacagccgtgtgcgtgttgtggtaagccagccgacgatccccatcacctgattggtcacgg

SEQ ID NO: 264858 - DNA, 75 bp, synthetic construct
  source 1..75: mol_type = other DNA
gtcgccgttgggtaaatgagaaatacacacgctgggtaaagacacagtcgtgtgcgtgctgtggtaagccagctg

SEQ ID NO: 264859 - DNA, 75 bp, synthetic construct
  source 1..75: mol_type = other DNA
cttgcaaatgttcatgcggtgaatgaaaaaggacaaagctccgtcgatatcgacaggataaatcaccatattgtt

SEQ ID NO: 264860 - DNA, 75 bp, synthetic construct
  source 1..75: mol_type = other DNA
ccaggcagtgaaaaactttgtcgtggcgaatatcacgggatcggattgtcgacagttgatccatgttgaaaatgg

SEQ ID NO: 264861 - DNA, 75 bp, synthetic construct
  source 1..75: mol_type = other DNA
cccaccagcaaaacccgccacaggaaaagacggtggtcagcattgctgttgatccggagtctccggaatctttca

SEQ ID NO: 264862 - DNA, 75 bp, synthetic construct
  source 1..75: mol_type = other DNA
gcgcacaaaaaatattgtgctatcgcctcacgtccaccagcaacagaactcaccgcaggaaaaggcggttgtcag

SEQ ID NO: 264863 - DNA, 75 bp, synthetic construct
  source 1..75: mol_type = other DNA
gtggatgcactacctgaggcagtatcgcgtcgttctctgggattaccggcggaaaaaatccgctccgtataccgt

SEQ ID NO: 264864 - DNA, 75 bp, synthetic construct
  source 1..75: mol_type = other DNA
cgggtgattcgtgctgctggtggtgctggtgcattgtctgactggctgttgcgccatattaaatcctgccagtgg

SEQ ID NO: 264865 - DNA, 75 bp, synthetic construct
  source 1..75: mol_type = other DNA
cctttttgtgttgcctttgtgcagaaagcatcacgacgagctgcatgcggataccgtggcatttgaagagatgta

SEQ ID NO: 264866 - DNA, 75 bp, synthetic construct
  source 1..75: mol_type = other DNA
gtggatgcgctaccggaagcagtattacgtcgttctctgggattaccggcggaaaaaatccgctccttgtaccgc

SEQ ID NO: 264867 - DNA, 75 bp, synthetic construct
  source 1..75: mol_type = other DNA
gtcgccgttgggtaaatgagaaatacactcgctgggtaaagacacagccgtgtgcgtgttgtggtcagccagccg

SEQ ID NO: 264868 - DNA, 75 bp, synthetic construct
  source 1..75: mol_type = other DNA
tggaccgtctgtgcgaagactactgcggagggatctggaatctgtacaccctgaacaacggaggcgcatttatgg

SEQ ID NO: 264869 - DNA, 75 bp, synthetic construct
  source 1..75: mol_type = other DNA
tggaccgtctgtgcgaagactactgcggaggcatctggaatctgtacaccctgaacaacggaggggcatttatgg

SEQ ID NO: 264870 - DNA, 75 bp, synthetic construct
  source 1..75: mol_type = other DNA
tggaccgtctgtgcgaagactactgcggaggtatctggaatctgtacaccctgaacaacgggggtgcatttatgg

SEQ ID NO: 264871 - DNA, 75 bp, synthetic construct
  source 1..75: mol_type = other DNA
gcatcagcttctggccgcagcaatttggcctcattccacagtgggtgaccctggaaccccgtgtcttcggctgga

SEQ ID NO: 264872 - DNA, 75 bp, synthetic construct
  source 1..75: mol_type = other DNA
cgggggcatctggaatctgtacaccctgaataacggcggcgcatttatggcgcccgaaccggatgaagatgatgg

SEQ ID NO: 264873 - DNA, 75 bp, synthetic construct
  source 1..75: mol_type = other DNA
taagtatcacgagtggttttttgttcggactgctcatggcctctttccactggtggcgcaggaaagttaaccggc

SEQ ID NO: 264874 - DNA, 75 bp, synthetic construct
  source 1..75: mol_type = other DNA
ggatgacgatgatgacgaaacatgggtgctgttcaatgtcatgaacggtaaccgcgctgaaatgagcccggaagc

SEQ ID NO: 264875 - DNA, 75 bp, synthetic construct
  source 1..75: mol_type = other DNA
ctggagccccgtgttttcggctggatggaccgtctgagcgaagactactgcggtggtatctggaatctgtacact

SEQ ID NO: 264876 - DNA, 75 bp, synthetic construct
  source 1..75: mol_type = other DNA
cggcatgaacggcaatggtgcgcaaatgagcgcggaagccgcaggtatcgctgtctgtctgattgaatacagcca

SEQ ID NO: 264877 - DNA, 75 bp, synthetic construct
  source 1..75: mol_type = other DNA
tggaccgtctgtgcgaagactactgcggaggtatctggaatctgtacaccctgaacaacggtggagcatttatgg

SEQ ID NO: 264878 - DNA, 75 bp, synthetic construct
  source 1..75: mol_type = other DNA
ggtaaccgcgctgaaatgagtccggaagctgccggcattgctgcctgtctgatgacgtacagtcatcatgcctgt

SEQ ID NO: 264879 - DNA, 75 bp, synthetic construct
  source 1..75: mol_type = other DNA
cggagaattatgccatgacggtccattattaccggttgcgggattacgccctgcaacatccggaatgcagcgcca

SEQ ID NO: 264880 - DNA, 75 bp, synthetic construct
  source 1..75: mol_type = other DNA
gcatcagcttctggccgcagcactttggcctcattccacagtgggtgaccctggacccccgtgtcttcggctgga

SEQ ID NO: 264881 - DNA, 75 bp, synthetic construct
  source 1..75: mol_type = other DNA
atgataccccggtccaggtactgctgccgggtaataagaagacgaagaccgggcggttgtgggcgtatgttcgtg

SEQ ID NO: 264882 - DNA, 75 bp, synthetic construct
  source 1..75: mol_type = other DNA
ctactgcgttggtatctggaatctgtacactctgaacaacggtggtgcatttatggcccccgaaccggatgatga

SEQ ID NO: 264883 - DNA, 75 bp, synthetic construct
  source 1..75: mol_type = other DNA
aacgtcatgaacggtaaccgcgctgaaatgagcccggaagccgccggtattaccgcctgtctgatgacgtacagt

SEQ ID NO: 264884 - DNA, 75 bp, synthetic construct
  source 1..75: mol_type = other DNA
tttgagtttcgccgtgtgcgctttaacttcaatgtcttcttttcattgctgtttttgctcacctttttcttcggc

SEQ ID NO: 264885 - DNA, 75 bp, synthetic construct
  source 1..75: mol_type = other DNA
ttcgctttgatgttggtgtcgcgccgccagaaatcttgttgcaggcgttgctttctgcgggctgcttctacgcgg

SEQ ID NO: 264886 - DNA, 75 bp, synthetic construct
  source 1..75: mol_type = other DNA
ggggattctgatgggcatcgcgctggtgagtgtcggtatcttcttcatgcacaacggctttttgctgttccggct

SEQ ID NO: 264887 - DNA, 75 bp, synthetic construct
  source 1..75: mol_type = other DNA
gcatcagcttctggccgcagcagtttggcctcattccacagtgggtcaccctggacccccgtgtcttcggctgga

SEQ ID NO: 264888 - DNA, 75 bp, synthetic construct
  source 1..75: mol_type = other DNA
gcatcagcttctggccgcagcagtttggcctcattccacagtgggttaccctggatccccgtgtcttcggctgga

SEQ ID NO: 264889 - DNA, 75 bp, synthetic construct
  source 1..75: mol_type = other DNA
gcatcagcttctggccgcagcagtttggcctcattccacagtgggtaaccctggaaccccgtgtcttcggctgga

SEQ ID NO: 264890 - DNA, 75 bp, synthetic construct
  source 1..75: mol_type = other DNA
acaacatcgacttccagggcctggctccaattgtccgcgatttctatgtctttatcccttcctggctgtggccgg

SEQ ID NO: 264891 - DNA, 75 bp, synthetic construct
  source 1..75: mol_type = other DNA
aaatgagtccggaagctgccggcattgctgcctgtctgatgacgtacagtcatcatgcctgtcgtacggagtgtt

SEQ ID NO: 264892 - DNA, 75 bp, synthetic construct
  source 1..75: mol_type = other DNA
gcatcagcttctggccgcagcagtttggcctcattccacagtgggtgaccctggagccccgtgtcttcggctgga

SEQ ID NO: 264893 - DNA, 75 bp, synthetic construct
  source 1..75: mol_type = other DNA
tcagatggaaaaaatatcaacaggcattgcctacggcacctccgcaggcagtgctggctactggtttttacaatg

SEQ ID NO: 264894 - DNA, 75 bp, synthetic construct
  source 1..75: mol_type = other DNA
ggggagtctggttctgggcttcctgacttatctgacaaatctgtacttcaaaataagagaagataagcgtaaggc

SEQ ID NO: 264895 - DNA, 75 bp, synthetic construct
  source 1..75: mol_type = other DNA
gggaagtctgtttttcgggctgctgacgtacctgacgaacctgtatttcaaaatcaaagaggaccggcgtaaggc

SEQ ID NO: 264896 - DNA, 75 bp, synthetic construct
  source 1..75: mol_type = other DNA
tacatgttcttcggcaacgatcatggaggcgagcgcggagctctgctgtacggactaatcgggagctgtcggttg

SEQ ID NO: 264897 - DNA, 75 bp, synthetic construct
  source 1..75: mol_type = other DNA
tcatacaccacgtcagcggtgggaacgggctactggttcctgcagttgctggacagggtttccccgtctcagtgg

SEQ ID NO: 264898 - DNA, 75 bp, synthetic construct
  source 1..75: mol_type = other DNA
acatatctgacgaacctgtatttcaaaattaaagaagaccggcgtaaggctgcgcgggggagagtagacgatgaa

SEQ ID NO: 264899 - DNA, 75 bp, synthetic construct
  source 1..75: mol_type = other DNA
aggtagtgccgggtactggtttttacagttgctcgataaagtcacgccctcacagtgggcggcaataggtgtgct

SEQ ID NO: 264900 - DNA, 75 bp, synthetic construct
  source 1..75: mol_type = other DNA
gggtagtctggtgtttggcctgctgacgtatctgacaaatctttatttcaagattaaagaagacaagcgtaaggc

SEQ ID NO: 264901 - DNA, 75 bp, synthetic construct
  source 1..75: mol_type = other DNA
atgaaatccatggataagttaacaacgggtgtcgcctatggcacctcagcaggtagtgccggatactggttttta

SEQ ID NO: 264902 - DNA, 75 bp, synthetic construct
  source 1..75: mol_type = other DNA
ggggagtctgctgtttggcctgctgacgtatctgacaaacctttatttcaagattaaagaagataagcgcaaggc

SEQ ID NO: 264903 - DNA, 75 bp, synthetic construct
  source 1..75: mol_type = other DNA
ctgctatcggggttttggggagcctgtgtctggggttcctgacatacctgacgaatctgtatttcaaaattaaag

SEQ ID NO: 264904 - DNA, 75 bp, synthetic construct
  source 1..75: mol_type = other DNA
gctgtttggcctgctgacgtatctgactaacctgtatttcaaaatcagggaggaccgtcgtaaggcggcgcgggg

SEQ ID NO: 264905 - DNA, 75 bp, synthetic construct
  source 1..75: mol_type = other DNA
ggcctgctgacgtatctgacaaacctttatttcaagattaaagaagacaagcgtaaggctgcacggggagagtaa

SEQ ID NO: 264906 - DNA, 75 bp, synthetic construct
  source 1..75: mol_type = other DNA
acccgcaaggttcacactgacgacacaccggtaaaagtgctgacaccgggcagaaaaaaggcaaaaacaggacgc

SEQ ID NO: 264907 - DNA, 75 bp, synthetic construct
  source 1..75: mol_type = other DNA
gaagcactgggttgcgttgtgcaacttctgtgatgacggtctggcggaggcggacaataacacagcggaaagagc

SEQ ID NO: 264908 - DNA, 75 bp, synthetic construct
  source 1..75: mol_type = other DNA
atgaagttacacgctcaattaaactactctcgtggacagcaggctgaagccctccgtcagagagatctgcaactg

SEQ ID NO: 264909 - DNA, 75 bp, synthetic construct
  source 1..75: mol_type = other DNA
cattccacagtgggtgaccctggagccccgtgtcttcggctggatggaccgtctgtgcgaagactactgcggggg

SEQ ID NO: 264910 - DNA, 75 bp, synthetic construct
  source 1..75: mol_type = other DNA
gcaccttcctgacggcaggttccttacttgctactctacctgtactcccgatccctttcgcccgcgcgcaggaac

SEQ ID NO: 264911 - DNA, 75 bp, synthetic construct
  source 1..75: mol_type = other DNA
gcatttcgtcaggcgtttgacgatgccgatattatcgacgtccccaaaggcgtgatttgcgacaatattaatacc

SEQ ID NO: 264912 - DNA, 75 bp, synthetic construct
  source 1..75: mol_type = other DNA
atgacgattgcagaacgtcttattcaaaaaggcgctcttgaagtggcgcgggaaatagcctggcggcttcgggat

SEQ ID NO: 264913 - DNA, 75 bp, synthetic construct
  source 1..75: mol_type = other DNA
tcagggagtggagctgagccgtgccacactggggcgctggacaggtgccgttgctgaactactggagccgctgta

SEQ ID NO: 264914 - DNA, 75 bp, synthetic construct
  source 1..75: mol_type = other DNA
gcactgaaacgtataccggtcgtgaagtgcaggatattcccggtgtgctggctgtatttgcagaacgccgtaagg

SEQ ID NO: 264915 - DNA, 75 bp, synthetic construct
  source 1..75: mol_type = other DNA
aatacatatttatgcgtaatatcaaggtgatacagcctgcggcgcgcgggcccgcactacagctccacttcgact

SEQ ID NO: 264916 - DNA, 75 bp, synthetic construct
  source 1..75: mol_type = other DNA
tcagtgctgagcagctggaactggtgagtagcgccctgaaagtgatccgcactgttcgggtaaaaaaagcctgta

SEQ ID NO: 264917 - DNA, 75 bp, synthetic construct
  source 1..75: mol_type = other DNA
tcgatgtcaaatattcatgcggtcaatgaaaacggccagcggtctgtggatattgaccgtattgatcagcacgtt

SEQ ID NO: 264918 - DNA, 75 bp, synthetic construct
  source 1..75: mol_type = other DNA
aaacagacgaatacgtttcaaatgcaacgttgattcggctcattctgtgggctgaccagcacaatagccattatg

SEQ ID NO: 264919 - DNA, 75 bp, synthetic construct
  source 1..75: mol_type = other DNA
cagcgtattcgggagttgctggaaagactgaataacaaaataatgcagaagtgggttgagcctgtacatagattt

SEQ ID NO: 264920 - DNA, 75 bp, synthetic construct
  source 1..75: mol_type = other DNA
gcgcacgttttcggtgaacgcactctggccacactggcgcgtcttctgagcctgctgtcggcctttgaggtcgtg

SEQ ID NO: 264921 - DNA, 75 bp, synthetic construct
  source 1..75: mol_type = other DNA
ttcacaatcagcaattgaaggcgtttattactggcttccttaccgacccagcgcatgacaatcagtcgcctcgca

SEQ ID NO: 264922 - DNA, 75 bp, synthetic construct
  source 1..75: mol_type = other DNA
ggagcgccgcaaggctgatagtgtgtctgtagaaatcaacgacgacatggcttacgcattccatcatgcactgtc

SEQ ID NO: 264923 - DNA, 75 bp, synthetic construct
  source 1..75: mol_type = other DNA
ggagcgccgcaaggctgatagtgtgcctgtagaaatcaacgacgacatggcttacgcatttcaccatgcgctttc

SEQ ID NO: 264924 - DNA, 75 bp, synthetic construct
  source 1..75: mol_type = other DNA
tatgaccggatacggaggacagttgtggcgcacgttttcggtgaacgcactctggccacactggcgcgtcttctg

SEQ ID NO: 264925 - DNA, 75 bp, synthetic construct
  source 1..75: mol_type = other DNA
gatatctgattcgctcctgtcagatctcttgacgattgcgaaaactgccgccaatgcggcagacgagtgcgcaca

SEQ ID NO: 264926 - DNA, 75 bp, synthetic construct
  source 1..75: mol_type = other DNA
ggtattgctggcttatatcggtctgaaggaccgcttcgcccatgccagacagttcgccgcttttgcgggtctgac

SEQ ID NO: 264927 - DNA, 75 bp, synthetic construct
  source 1..75: mol_type = other DNA
cgggtatcggagagaaaacatctgcggtattgctggcttatatcggtctgaaggaccgcttcgcccatgccagac

SEQ ID NO: 264928 - DNA, 75 bp, synthetic construct
  source 1..75: mol_type = other DNA
tatgttaaagttattgacacttatgggaatatacaaacattcattgtgccttattctcaacctgcagtagcagtt

SEQ ID NO: 264929 - DNA, 75 bp, synthetic construct
  source 1..75: mol_type = other DNA
tgacaattattcaagtcaatcagagcgaatgttggatgctgttaaagcccgcccaggattgctggatgccgtgga

SEQ ID NO: 264930 - DNA, 75 bp, synthetic construct
  source 1..75: mol_type = other DNA
cgcgtaatgaagatcagaactggcgcgataacctggtgcgccaggtgcagcattcacagctggagctggtcgcca

SEQ ID NO: 264931 - DNA, 75 bp, synthetic construct
  source 1..75: mol_type = other DNA
aaggtctgtggcctttgttgaaagtgagatagacgcatggattgaaaaaatgattgctgaatctcgttgcgtatc

SEQ ID NO: 264932 - DNA, 75 bp, synthetic construct
  source 1..75: mol_type = other DNA
taaccacaaactttaatttttataagaagaagctcgatatttttgtaaaaacaaaatttgttaaatcaaaaaata

SEQ ID NO: 264933 - DNA, 75 bp, synthetic construct
  source 1..75: mol_type = other DNA
tacttttttgtggcaccctatgatttatctactacattttctaatttattgaaaaataaaaacgagcttaaaaaa

SEQ ID NO: 264934 - DNA, 75 bp, synthetic construct
  source 1..75: mol_type = other DNA
gagaacccgcatcacctgcaccagccgtaccggctgccggggcagcagtatgataaggagtcggggctgtactac

SEQ ID NO: 264935 - DNA, 75 bp, synthetic construct
  source 1..75: mol_type = other DNA
ttatattggttctggatattttcctttaagagggtttgattcattcaaatttaaaggaggagtattaaagacaga

SEQ ID NO: 264936 - DNA, 75 bp, synthetic construct
  source 1..75: mol_type = other DNA
tcaagtttcaaggtggagtattgaagacagacgaatcaatgtatccgtcaattgagaaaaaattttctcctgttg

SEQ ID NO: 264937 - DNA, 75 bp, synthetic construct
  source 1..75: mol_type = other DNA
ataaactattatgcatacgggaactattacttaaaaaacacatacaaaatgagcaactcgcaatatgctaatttt

SEQ ID NO: 264938 - DNA, 75 bp, synthetic construct
  source 1..75: mol_type = other DNA
aaagctgcacgtaatcagcaagcgttacactcagcgaattgagcgacataacctgaatctgagacaacatctggc

SEQ ID NO: 264939 - DNA, 75 bp, synthetic construct
  source 1..75: mol_type = other DNA
cgttatcagcaagcgttacactcagcgcattgagcgacataatctgagacaacatctggcacggctgggacggaa

SEQ ID NO: 264940 - DNA, 75 bp, synthetic construct
  source 1..75: mol_type = other DNA
gacataatctgaatctgagacaacatctggcaaggctgggacggaagtcactgtcgttctcaaaatcggtggagc

SEQ ID NO: 264941 - DNA, 75 bp, synthetic construct
  source 1..75: mol_type = other DNA
gatatggatgacggatggctggccgctttatgaatcccgcctgaaggaaaagctgcacgttatcagcaagcgata

SEQ ID NO: 264942 - DNA, 75 bp, synthetic construct
  source 1..75: mol_type = other DNA
gcacggctgggacggctgggacggctgggacggctgggacggctgggacggaagtcgctgtcgttctcaaaatcg

SEQ ID NO: 264943 - DNA, 75 bp, synthetic construct
  source 1..75: mol_type = other DNA
atgacggatggctggccgctgtatgaaccccgcctgaagggaaagctgcacgttatcagcaagcgttacactcag

SEQ ID NO: 264944 - DNA, 75 bp, synthetic construct
  source 1..75: mol_type = other DNA
aagacggttgttgcgcacgtcttcggtgaacgcactctggccacactggagcgtcttctgagcctgctgtcggcc

SEQ ID NO: 264945 - DNA, 75 bp, synthetic construct
  source 1..75: mol_type = other DNA
tgccggggggaatacgctgaccagtaatcaggatgcggcgtattatcagatacgcccggaaggtggctggttacc

SEQ ID NO: 264946 - DNA, 75 bp, synthetic construct
  source 1..75: mol_type = other DNA
actttcagatgaagacaatgaactatctgtaattgacatgaatgatgatcctgacggttatgggtttgattgttt

SEQ ID NO: 264947 - DNA, 75 bp, synthetic construct
  source 1..75: mol_type = other DNA
ttgaaacggaaggcgacggaaatgtgcaaacgcgacttggggtgaaaacctacctgaacagccatcaccagcgtg

SEQ ID NO: 264948 - DNA, 75 bp, synthetic construct
  source 1..75: mol_type = other DNA
gacgtagccaaggctgattacgagaaaagtagtaatgttcacagtaacgaaaagcttggcgtgaattacaaaaca

SEQ ID NO: 264949 - DNA, 75 bp, synthetic construct
  source 1..75: mol_type = other DNA
tctggtccattttcatgttccaaatccgattgctacatttgcatctttttttgtgaaaaagaataaatatatcgt

SEQ ID NO: 264950 - DNA, 75 bp, synthetic construct
  source 1..75: mol_type = other DNA
tacttcattcacctaactccgaagccacaactttcaaatacattcgatttatacaggcactaccggtaaagcaag

SEQ ID NO: 264951 - DNA, 75 bp, synthetic construct
  source 1..75: mol_type = other DNA
aaacgctggagagagtggctgagcggatcgataacatctctgtattcggtggtcttgaccaggtgctgcatgggt

SEQ ID NO: 264952 - DNA, 75 bp, synthetic construct
  source 1..75: mol_type = other DNA
aagttggtgaaacaacatttatgaaattgcgcgatccccttgacgatgaatattacttacagggacctgggacca

SEQ ID NO: 264953 - DNA, 75 bp, synthetic construct
  source 1..75: mol_type = other DNA
tttctatttaaataattttgcagatatttattgtgagttctgtaatacaccgcaaaaaaaagaaaatgaaatatc

SEQ ID NO: 264954 - DNA, 75 bp, synthetic construct
  source 1..75: mol_type = other DNA
tgtctgttgtactttggggactgggtgcctcgctgggcttcccgctgaccatttctgccgccagcgataccggcc

SEQ ID NO: 264955 - DNA, 75 bp, synthetic construct
  source 1..75: mol_type = other DNA
tctgtgggtttggtcggtactttgtttctggtggcgaggatctgggatgctattaacgatccgattatgggatag

SEQ ID NO: 264956 - DNA, 75 bp, synthetic construct
  source 1..75: mol_type = other DNA
gaaattaagtggcagacaccttctgccgtaagcgtgcatttcaacgttcagattgcaaataataatgcgctaccc

SEQ ID NO: 264957 - DNA, 75 bp, synthetic construct
  source 1..75: mol_type = other DNA
tacatcaacaaaaacgtaaaatcccgcaagatatttctgtcattggctatgacgacacctatgagagtgcgtttt

SEQ ID NO: 264958 - DNA, 75 bp, synthetic construct
  source 1..75: mol_type = other DNA
ataaaagtctgactcgctatgtgctgctttcggtgtgcggtaatgactccaacttattgatagtgttttatgttc

SEQ ID NO: 264959 - DNA, 75 bp, synthetic construct
  source 1..75: mol_type = other DNA
atgagaacacttgatgggttatctgaaaaagaatttgaataccttctactggatgcggaaaataaatatagctcc

SEQ ID NO: 264960 - DNA, 75 bp, synthetic construct
  source 1..75: mol_type = other DNA
ccgaaccgcctggcgcagcagctggtcagaaagcagacccagaccgtcggactggtgacgatttcgctggctttg

SEQ ID NO: 264961 - DNA, 75 bp, synthetic construct
  source 1..75: mol_type = other DNA
acaaagacatccagaacgctgaacgactgcgcaaaatctgggatgaaaaacggaaacagctatccctaagccagg

SEQ ID NO: 264962 - DNA, 75 bp, synthetic construct
  source 1..75: mol_type = other DNA
cctgcacggcaactgggatgcgcaaagcggctatgccggtgcgctgcagatgctgcgcgaaacgcccaattttag

SEQ ID NO: 264963 - DNA, 75 bp, synthetic construct
  source 1..75: mol_type = other DNA
ataaagaaactcgtcgtactttctctagatccacttgggttcctttgagagcggcagaaaagaaagaaaaagaca

SEQ ID NO: 264964 - DNA, 75 bp, synthetic construct
  source 1..75: mol_type = other DNA
ttttgtgaaaaaggtaaaaatgattgaacgcgatctacacagccagttagcaagcatcgacgcagacgtaggcga

SEQ ID NO: 264965 - DNA, 75 bp, synthetic construct
  source 1..75: mol_type = other DNA
aacgttgtagagacggtttatcttgctttatctgaccatgcacgcctgtttggatttaccgctgaagatattatg

SEQ ID NO: 264966 - DNA, 75 bp, synthetic construct
  source 1..75: mol_type = other DNA
tccccaacgcgtcgttcctgacaatatcgaggttactcccgacttttccatggggtgggttgatgagcgtctgaa

SEQ ID NO: 264967 - DNA, 75 bp, synthetic construct
  source 1..75: mol_type = other DNA
taatgataaagaacctattggtattcacttagtcttagaattacctcaaccagtcgttggtgggaggcaatggat

SEQ ID NO: 264968 - DNA, 75 bp, synthetic construct
  source 1..75: mol_type = other DNA
ttcattgttgaaacggatggcacacgtctggcatcatctgctctaaattgtgaagagattggtagatggctatgg

SEQ ID NO: 264969 - DNA, 75 bp, synthetic construct
  source 1..75: mol_type = other DNA
tcgatggcctgctctcggcggtgcgctatgacaaaacctatttcgacaagattgtcgcctcactgctgccactgc

SEQ ID NO: 264970 - DNA, 75 bp, synthetic construct
  source 1..75: mol_type = other DNA
tcgacggcctgctttcggcggtgcgctacgacaaaacctacttcgacaagattgtcgcctcgctgctgccgctgc

SEQ ID NO: 264971 - DNA, 75 bp, synthetic construct
  source 1..75: mol_type = other DNA
tgctgcgcccgcccgtggagttttacagcaccgtcactgctggctgtggcgcattaatctgcctgacgcaggccc

SEQ ID NO: 264972 - DNA, 75 bp, synthetic construct
  source 1..75: mol_type = other DNA
ggagtcctctttggtctgtcgatcggttcaatgagcggtattctctgctcggcgtggttagtgaaacgctttggg

SEQ ID NO: 264973 - DNA, 75 bp, synthetic construct
  source 1..75: mol_type = other DNA
gtaatgcaatgcaagctgaatgcgttatcgaaatgcaattatattctcagattcatgaaaccaaaattcatgagg

SEQ ID NO: 264974 - DNA, 75 bp, synthetic construct
  source 1..75: mol_type = other DNA
agcgcccatttgtcgctgattcaggatgatgaatttgcaggcaatatccgtcgcctgatgacagaacagcattag

SEQ ID NO: 264975 - DNA, 75 bp, synthetic construct
  source 1..75: mol_type = other DNA
aggtctaatggcgggattctcgcggcggacgatacaggtgaaattcctgtcgacctgattcaaactgaccactgg

SEQ ID NO: 264976 - DNA, 75 bp, synthetic construct
  source 1..75: mol_type = other DNA
acagattcaactgatacagaattaactatcatcggcgagtatacccctggtgcatgtaccccagttgttacgggc

SEQ ID NO: 264977 - DNA, 75 bp, synthetic construct
  source 1..75: mol_type = other DNA
gtgcttttggggataacattatcgataataccgacctttagattgatttttaatttattaatattagggcatcct

SEQ ID NO: 264978 - DNA, 75 bp, synthetic construct
  source 1..75: mol_type = other DNA
caggatatggaacaaacggcgttaatggggctgcttaatgccatccgtcgctacgggctgccggacgaaggtttt

SEQ ID NO: 264979 - DNA, 75 bp, synthetic construct
  source 1..75: mol_type = other DNA
atgtttaataaaaaatatgtagtgataatttggggtggagtattatcattactatgttctttacctctgtctatt

SEQ ID NO: 264980 - DNA, 75 bp, synthetic construct
  source 1..75: mol_type = other DNA
tttattatgaacaggctatttatatttggaataatggattactggaggggttgagttctatttatcatcaaacca

SEQ ID NO: 264981 - DNA, 75 bp, synthetic construct
  source 1..75: mol_type = other DNA
gcgcaaaagccgaattaaacggagcattctttaacataacccgcccccgcaatatcgcgtttaactatatcgtga

SEQ ID NO: 264982 - DNA, 75 bp, synthetic construct
  source 1..75: mol_type = other DNA
aagccagatggaggcggaatacatcccggagcggaggctgcatctttaccactgtgaccaccggggactgccgca

SEQ ID NO: 264983 - DNA, 75 bp, synthetic construct
  source 1..75: mol_type = other DNA
gcaagatggctacatggtgggggatcatcgttgcgcgatccttatgctcctcgacaaggctggaaaccaactatg

SEQ ID NO: 264984 - DNA, 75 bp, synthetic construct
  source 1..75: mol_type = other DNA
caagaatccagacggtataccagccgggaagcttcacgccgctcctgagaatcgaaacagagaatggcgaacagg

SEQ ID NO: 264985 - DNA, 75 bp, synthetic construct
  source 1..75: mol_type = other DNA
tgttcgcgaacatgaattaattatgttaagaaaaaatgatgttaatgaaatttatcaagcagaaaaagtgatttt

SEQ ID NO: 264986 - DNA, 75 bp, synthetic construct
  source 1..75: mol_type = other DNA
cctagcgaggagacaaaaagaaagtctgaatttaaattccttttaactcagagagatgatactaactccttagca

SEQ ID NO: 264987 - DNA, 75 bp, synthetic construct
  source 1..75: mol_type = other DNA
ttagggagtgaaaaactaaaaaataaagatatcgatcatgctcaaggttatgatttagcctatctggaatttaat

SEQ ID NO: 264988 - DNA, 75 bp, synthetic construct
  source 1..75: mol_type = other DNA
attcatgcggctgaatttgttgccagaacctataccgattcatatcagttaggagatggggaactgcttgtttgt

SEQ ID NO: 264989 - DNA, 75 bp, synthetic construct
  source 1..75: mol_type = other DNA
ggtcgctctattttaagcgagcaaggatatgcaacggaggatcatgctcacggattaccgtcaaaatcaaccgta

SEQ ID NO: 264990 - DNA, 75 bp, synthetic construct
  source 1..75: mol_type = other DNA
aattcttagtaagcccagtattcagagcgttcttaattaccttggtttaggggaaggctcggcgctgcccgttgg

SEQ ID NO: 264991 - DNA, 75 bp, synthetic construct
  source 1..75: mol_type = other DNA
catgaagagatggtgacattgcttcgtgatgatgtaagtctggtggaggcaagcggaagatcctacccggggcgt

SEQ ID NO: 264992 - DNA, 75 bp, synthetic construct
  source 1..75: mol_type = other DNA
accttgttgtaatcaagcggggtagagaggatgagttcgaggtcatagatggacaacaacgacttacaaccctct

SEQ ID NO: 264993 - DNA, 75 bp, synthetic construct
  source 1..75: mol_type = other DNA
tgtatccgaccgcatcgatctcacgataggcattgaaatttccgactctgtaaccagtaccagaagtgatgtcgc

SEQ ID NO: 264994 - DNA, 75 bp, synthetic construct
  source 1..75: mol_type = other DNA
tcacgcctgaagggaaagctgcacgttatcagcaagcgttacactcagcgcattgagcgacataatctgaatctg

SEQ ID NO: 264995 - DNA, 75 bp, synthetic construct
  source 1..75: mol_type = other DNA
aaaaactgcgtcgtgaggttgaacaggctgaagccctgctgaaacaacgcgagcaggaaagcgatcgttacagtg

SEQ ID NO: 264996 - DNA, 75 bp, synthetic construct
  source 1..75: mol_type = other DNA
gtgcaggcaccggtgccttcaaaacccattgcacgcagttatgccggagcggggcttctggcccatgttgtcacc

SEQ ID NO: 264997 - DNA, 75 bp, synthetic construct
  source 1..75: mol_type = other DNA
tggcggcaagaaaagccagagccgcgccactgatgcagtcactgtatgactggatacagcaacagatgaaaacac

SEQ ID NO: 264998 - DNA, 75 bp, synthetic construct
  source 1..75: mol_type = other DNA
gccatattctgagcatactgccggaatggccctccaaccgtgttgacgaactcctgccatggaacgtagttctca

SEQ ID NO: 264999 - DNA, 75 bp, synthetic construct
  source 1..75: mol_type = other DNA
tgtgcttcaggccgatgcttacggtggttaccggacgttatacgaatccggcagaataacggaagccgcgtgtat

SEQ ID NO: 265000 - DNA, 75 bp, synthetic construct
  source 1..75: mol_type = other DNA
gcacggatacatataccggtcgtgaagtacaggatattcccggtgtgctggccgtgtttgctgaacgccgtaagg

SEQ ID NO: 265001 - DNA, 75 bp, synthetic construct
  source 1..75: mol_type = other DNA
cgcacagaacgggtaaaaaaagcctgtacaaaatgtgactgtattgttgaagcaccggcgtgtcagcgccagtga

SEQ ID NO: 265002 - DNA, 75 bp, synthetic construct
  source 1..75: mol_type = other DNA
ggcacaccttccccgtgaaatacaccgcctggagccagaagaaagctgttgcccggagtgtggcggtgagctgga

SEQ ID NO: 265003 - DNA, 75 bp, synthetic construct
  source 1..75: mol_type = other DNA
gtgggtgaccctggagccccgggtcttcggctggatggaccgtctgtgtgaagactactgcggtggtatctggaa

SEQ ID NO: 265004 - DNA, 75 bp, synthetic construct
  source 1..75: mol_type = other DNA
atcacctggccggttacagcggtgtgcttcaggccgatgcttacggtggttaccgggcgttatacgaatccggca

SEQ ID NO: 265005 - DNA, 75 bp, synthetic construct
  source 1..75: mol_type = other DNA
tgtacgggctgatcggcacctgccgtctgaacggtatcgatccggaagcgtatctgcgccatattctgagcgtac

SEQ ID NO: 265006 - DNA, 75 bp, synthetic construct
  source 1..75: mol_type = other DNA
gccctgaagcgaatcagtgaactgtacgccatcgaggatgaaatacggggattaccagagtcagagcgtcttgaa

SEQ ID NO: 265007 - DNA, 75 bp, synthetic construct
  source 1..75: mol_type = other DNA
tatctgggccatatcctgagcgtactgccggaatggccttccaaccgagttgatgaactcctgccatggaacgta

SEQ ID NO: 265008 - DNA, 75 bp, synthetic construct
  source 1..75: mol_type = other DNA
tgcatcagggaataaccagtctcaactggttgccactcctgtccctgatgaacagcgcatcagtttctggccgca

SEQ ID NO: 265009 - DNA, 75 bp, synthetic construct
  source 1..75: mol_type = other DNA
cattccacagtgggtgaccctggatccccgtgtcttcggctggatggaccgtctgtgcgaaaactactgcggtgg

SEQ ID NO: 265010 - DNA, 75 bp, synthetic construct
  source 1..75: mol_type = other DNA
cattccacagtgggtcaccctggatccccgtgtcttcggctggatggaccgtctctgcgaaaactactgcggtgg

SEQ ID NO: 265011 - DNA, 75 bp, synthetic construct
  source 1..75: mol_type = other DNA
gacgtacagtcatcacgcctgccgtacggagtgttatgccatgacggttcattattaccgtctgcgggattacgc

SEQ ID NO: 265012 - DNA, 75 bp, synthetic construct
  source 1..75: mol_type = other DNA
accggcaaataccgctggcaaggcagcactgaagcgtataccggtcgtgaagtacaggatattcccggtgtgctg

SEQ ID NO: 265013 - DNA, 75 bp, synthetic construct
  source 1..75: mol_type = other DNA
cgtgaagtgcaggatattcccggtgtgctggccgtgtttgctgaacgccgtaaggacagttttggtccgtatgtc

SEQ ID NO: 265014 - DNA, 75 bp, synthetic construct
  source 1..75: mol_type = other DNA
gcgtgctgccagttaatgacgccactgaatgatgccctgtaccgttacgtgatgaataccttcaagcttcacact

SEQ ID NO: 265015 - DNA, 75 bp, synthetic construct
  source 1..75: mol_type = other DNA
gcccatgtcgtcaccgggaagtatgcagaccatctgccgttataccgccagtcagagatataccgtcgtcagggt

SEQ ID NO: 265016 - DNA, 75 bp, synthetic construct
  source 1..75: mol_type = other DNA
tctggcggcaagaaaagcaagagccgcgccactgatgcagtcactgtatgaccggatacagcaacagatgaaaac

SEQ ID NO: 265017 - DNA, 75 bp, synthetic construct
  source 1..75: mol_type = other DNA
cattccacagtgggttaccctggatccccgtgtcttcggctggatggaccgtctttgcgaaaactactgcggtgg

SEQ ID NO: 265018 - DNA, 75 bp, synthetic construct
  source 1..75: mol_type = other DNA
cattccacagtgggtaaccctggatccccgtgtcttcggctggatggaccgtctatgcgaaaactactgcggtgg

SEQ ID NO: 265019 - DNA, 75 bp, synthetic construct
  source 1..75: mol_type = other DNA
gcttctggccgcagcattttggcctcattccacagtgggttaccctggacccccgtgtcttcggctggatggacc

SEQ ID NO: 265020 - DNA, 75 bp, synthetic construct
  source 1..75: mol_type = other DNA
ggatgatcgcaatgcgggttcgtcatctcctccggcggtctggttcgcgtactcatcgaaccggcaggggaaaca

SEQ ID NO: 265021 - DNA, 75 bp, synthetic construct
  source 1..75: mol_type = other DNA
tcagtgaactgtacgccatcgaggatgaaatacggggattaccggagtcagagcgtcttgccgtcaggcagcagc

SEQ ID NO: 265022 - DNA, 75 bp, synthetic construct
  source 1..75: mol_type = other DNA
ttgcccggagtgtggcggtgagctggattatctgggggaagtcagcgctgaacagctggaactggtgagcagtgc

SEQ ID NO: 265023 - DNA, 75 bp, synthetic construct
  source 1..75: mol_type = other DNA
atacccgcctgcgggcactgttgcagacgcaacaggacaccatccgccagatggctgaatacaaccgcctgctct

SEQ ID NO: 265024 - DNA, 75 bp, synthetic construct
  source 1..75: mol_type = other DNA
ctcaccagacaggcagggaaaacatccggtacaacaccttcgtcccttccggggtatcctgcaggcggatgcgtt

SEQ ID NO: 265025 - DNA, 75 bp, synthetic construct
  source 1..75: mol_type = other DNA
aactgtacgccatcgaggatgaaatacggggattaccggagtcagagcgtcttgcagtcaggcagcagcgaagca

SEQ ID NO: 265026 - DNA, 75 bp, synthetic construct
  source 1..75: mol_type = other DNA
cgcacagcaggctgttatcgtccgtctgtctggtgaaataaccggctatgcccgcgagatcagctcactcagagc

SEQ ID NO: 265027 - DNA, 75 bp, synthetic construct
  source 1..75: mol_type = other DNA
aagcgttcgcatacctgctgaaacagtgggatgcactgaacgtgtactgcagtaatggctgggtggaaatcgaca

SEQ ID NO: 265028 - DNA, 75 bp, synthetic construct
  source 1..75: mol_type = other DNA
tggagaagaatggcacgctgtcgaaaaaatccagactgggcgaagcgttcagctatgtactgaatcagtgggacg

SEQ ID NO: 265029 - DNA, 75 bp, synthetic construct
  source 1..75: mol_type = other DNA
actcgctgatcggcacatgccgtctgaacaatgtagagccagaaaaatggctgcgttacgttattgagcatctcc

SEQ ID NO: 265030 - DNA, 75 bp, synthetic construct
  source 1..75: mol_type = other DNA
cagtaatggctgggtggaaatcgacaacaacatcgcagagaacgccttacgaggagtggccgtaggccggaaaaa

SEQ ID NO: 265031 - DNA, 75 bp, synthetic construct
  source 1..75: mol_type = other DNA
tctggtcggttacagcggtgtgcttcaggccgatgcttacggtggttaccgggcgttatacgaatccggcagaat

SEQ ID NO: 265032 - DNA, 75 bp, synthetic construct
  source 1..75: mol_type = other DNA
tcagggtgtggacctgagtcgtgccacgctgggtcgctggaccggtgctgttgctgagctgctggagccgctgta

SEQ ID NO: 265033 - DNA, 75 bp, synthetic construct
  source 1..75: mol_type = other DNA
gctgtgggtctatgttcgtgatgatcgcaacgccggttcgaccatgctggcagcggtgtggttctcatactctcc

SEQ ID NO: 265034 - DNA, 75 bp, synthetic construct
  source 1..75: mol_type = other DNA
cgagtgtgacgcgatgactgagcactattatcgcttacgcgactacgtgctgaaccatccagagtgcagcgccat

SEQ ID NO: 265035 - DNA, 75 bp, synthetic construct
  source 1..75: mol_type = other DNA
cggtcgtgaagtacaggatattcccggtgtgctggccgtgtttgctgaacgccgtaaggacagttttggcccgta

SEQ ID NO: 265036 - DNA, 75 bp, synthetic construct
  source 1..75: mol_type = other DNA
aaatgagcccggaagctgccggcattgccgcctgtctgatggcgtacagtcatcacgcctgtcgtacagagaatt

SEQ ID NO: 265037 - DNA, 75 bp, synthetic construct
  source 1..75: mol_type = other DNA
agttaccgggcgttgtacgaatccggcagaataacggaagccgcatgtatggctcatgtccggagaaaaatccac

SEQ ID NO: 265038 - DNA, 75 bp, synthetic construct
  source 1..75: mol_type = other DNA
aaatatgcagaccatctgccgttataccgccagtcagaaatataccgtcgtcagggcgtggagctgagtcgtgcc

SEQ ID NO: 265039 - DNA, 75 bp, synthetic construct
  source 1..75: mol_type = other DNA
atgtgatgtgtcagagcaactggagcttatcagcagcgcttttaaggttatcgaaacacaacgtccgaaactggc

SEQ ID NO: 265040 - DNA, 75 bp, synthetic construct
  source 1..75: mol_type = other DNA
ctggcggcaagaaaagccagagctgcgccactgatgcagtcactgtatgactggatacagactcagatgaaaaca

SEQ ID NO: 265041 - DNA, 75 bp, synthetic construct
  source 1..75: mol_type = other DNA
atgagcatcggcgatgcgttgacgaatataatcccggtactgccatccgccctgcgacagtcttcagcccgtaaa

SEQ ID NO: 265042 - DNA, 75 bp, synthetic construct
  source 1..75: mol_type = other DNA
ccggtgtgctggccgtgtttgctgaacgccgtaaggacagttttggtccgtatgtccggctgatgagcgtcaccc

SEQ ID NO: 265043 - DNA, 75 bp, synthetic construct
  source 1..75: mol_type = other DNA
atgaaagtcgtttctcagaacacaacagatctttcttcagctacagcaccagggaataacccgcctcagctggtt

SEQ ID NO: 265044 - DNA, 75 bp, synthetic construct
  source 1..75: mol_type = other DNA
tggagccagaagaaagctgttgcccggagtgtggcggtgaactggattatctgggggaagtcagcgctgaacagc

SEQ ID NO: 265045 - DNA, 75 bp, synthetic construct
  source 1..75: mol_type = other DNA
ccgccgcccaatatgaccggtgtggtctcacagaccttcgataaaaaggtgtcagatgcggcggttgcagatatt

SEQ ID NO: 265046 - DNA, 75 bp, synthetic construct
  source 1..75: mol_type = other DNA
gctcagctttatcaataaagaggagtggtgccagaacgagtttcaggtgacgaaccaggtgaagcagttcaacgc

SEQ ID NO: 265047 - DNA, 75 bp, synthetic construct
  source 1..75: mol_type = other DNA
cacagacgtttgacaagaaggtctccgatgctgcggtcgcggatattcagcataccgccagtgaggcggagaaaa

SEQ ID NO: 265048 - DNA, 75 bp, synthetic construct
  source 1..75: mol_type = other DNA
gaggactgttgtggcgcacgtcttcggtgaacgcactctggccacactggagcgtcttctgagcctgctgtcggc

SEQ ID NO: 265049 - DNA, 75 bp, synthetic construct
  source 1..75: mol_type = other DNA
agcgacacaacctgaatctgagacagcatctggcaaggctgggcaggaagtccctgtcgttctccaaatcggtgg

SEQ ID NO: 265050 - DNA, 75 bp, synthetic construct
  source 1..75: mol_type = other DNA
tccgcctgaccggcctggtcaggatgcccaacgataaaacgtatgatctgacaggctgtatggtcactgccgggg

SEQ ID NO: 265051 - DNA, 75 bp, synthetic construct
  source 1..75: mol_type = other DNA
gaaaacagcgcaccggaattacccgccgggcaacctgcaccttcttttggtccgggcgcagctgttccaccgcca

SEQ ID NO: 265052 - DNA, 75 bp, synthetic construct
  source 1..75: mol_type = other DNA
atctggcaaggctgggacggaagtcactgtcgttctcaaaatcggcggagctgcatgacaaggtcatcgggcatt

SEQ ID NO: 265053 - DNA, 75 bp, synthetic construct
  source 1..75: mol_type = other DNA
gtatactgcagtaatggttgggtggaaatcgacaacaacatcgcagagaacgccttacggggtgtggctgtaggc

SEQ ID NO: 265054 - DNA, 75 bp, synthetic construct
  source 1..75: mol_type = other DNA
gagcgcttcgtgcagtctgtctcggaaagaaaaactttatgttcttcggcagcgatcacggcggcgagcgaggag

SEQ ID NO: 265055 - DNA, 75 bp, synthetic construct
  source 1..75: mol_type = other DNA
cagtcatcacgcctgccgtacggagtgttatgccatgacggttcattattaccgtctgcgggattacgccctgca

SEQ ID NO: 265056 - DNA, 75 bp, synthetic construct
  source 1..75: mol_type = other DNA
gtatgacgtcctgcgccagtatgtgctgatgcccggtaaagtccatgctgatgatatccccgtcccggtccagga

SEQ ID NO: 265057 - DNA, 75 bp, synthetic construct
  source 1..75: mol_type = other DNA
gtgcaggcaccagtaccttcaaaacccattgcacgcagttatgccggagcggggcttctggcccatgttgtcacc

SEQ ID NO: 265058 - DNA, 75 bp, synthetic construct
  source 1..75: mol_type = other DNA
gcgccactgatgcagtcactgtatgactggatacagcaacagatgaaaacactgtcgcgtcactcagatacggca

SEQ ID NO: 265059 - DNA, 75 bp, synthetic construct
  source 1..75: mol_type = other DNA
catgccgcctgatagtgaagaaaaacggggctgaaatttataaccgaaccgcgctggataatacgctgatttaca

SEQ ID NO: 265060 - DNA, 75 bp, synthetic construct
  source 1..75: mol_type = other DNA
ctgatgacacgcctgtcccggtgctgttgccaggtaataagaaaacgaagaccgggcggttgtggacgtacgttc

SEQ ID NO: 265061 - DNA, 75 bp, synthetic construct
  source 1..75: mol_type = other DNA
atcccggtgctgttgccaggcaataagaaaacgaagaccgggcggttatggacctacgttcgtgacgaccgtaac

SEQ ID NO: 265062 - DNA, 75 bp, synthetic construct
  source 1..75: mol_type = other DNA
ccatattctgagcgtactaccggaatggccctccaaccgtgttggcgaactcctgccatggaacgtagttctcac

SEQ ID NO: 265063 - DNA, 75 bp, synthetic construct
  source 1..75: mol_type = other DNA
gactctcccgtccgcaaagcacttccggcaacacttccccgtgacaggcaggttatctccgcggcagaaaccgaa

SEQ ID NO: 265064 - DNA, 75 bp, synthetic construct
  source 1..75: mol_type = other DNA
cgttacagtgggcgtgaggatgagccgctggttccccgccagttgcgacagtcgcgccatcgtcgtccgttaccg

SEQ ID NO: 265065 - DNA, 75 bp, synthetic construct
  source 1..75: mol_type = other DNA
aaaaatggctgcgttacgttattgagcatatccaggactggccggcaaaccgggtacgcgatctgtttccatgga

SEQ ID NO: 265066 - DNA, 75 bp, synthetic construct
  source 1..75: mol_type = other DNA
cagctggaactggtgagcagtgccctgaaagtgatccgcacagaacgggtaaaaaaagcctgtacaaaatgtgac

SEQ ID NO: 265067 - DNA, 75 bp, synthetic construct
  source 1..75: mol_type = other DNA
gtggatcgggtcatttttgtggttgatcgccgggatctggattatcagacggcgaaagagttcaacggttttgcg

SEQ ID NO: 265068 - DNA, 75 bp, synthetic construct
  source 1..75: mol_type = other DNA
cagcaatgagatcgatatcgatgtggaggatatcgacaccaaagaggtgatggaaagcgacatccggttgggcaa

SEQ ID NO: 265069 - DNA, 75 bp, synthetic construct
  source 1..75: mol_type = other DNA
cgggccgggtctgctggcccgcgtgttaacggccaaatactgcgaacacctgccgctgtatcgccagtgcgaaat

SEQ ID NO: 265070 - DNA, 75 bp, synthetic construct
  source 1..75: mol_type = other DNA
catcacgcctgccgtacggagtgttatgccatgacggtccactattaccgtctgcgggattacgccctgcagcat

SEQ ID NO: 265071 - DNA, 75 bp, synthetic construct
  source 1..75: mol_type = other DNA
ggcattgctgcctgtctgatgacgtacagtcatcacgcctgtcgtacggagtgttatgccatgacggtccattat

SEQ ID NO: 265072 - DNA, 75 bp, synthetic construct
  source 1..75: mol_type = other DNA
ttcacactgatgacacaccagtaaaagtgctggcaccgggcaggaagaaggcgaaaacaggatatatctggacgt

SEQ ID NO: 265073 - DNA, 75 bp, synthetic construct
  source 1..75: mol_type = other DNA
ggagcctgaagaaagctgttgcccggagtgtggcggtgagctggattatctgggggaagtcagcgcagaacaact

SEQ ID NO: 265074 - DNA, 75 bp, synthetic construct
  source 1..75: mol_type = other DNA
ccggcaaggtgtggagctgagccgttcactgctgtcgggctgggtggatgcatgctgccggctgctgtctccgct

SEQ ID NO: 265075 - DNA, 75 bp, synthetic construct
  source 1..75: mol_type = other DNA
atcgttctctggggttacgcgcggaaaaaatccactcagtataccgcgagagtgacatcataccgggagaacaga

SEQ ID NO: 265076 - DNA, 75 bp, synthetic construct
  source 1..75: mol_type = other DNA
ctgattaaaactgaactgctggagacgcagaccgtggatttcagcgtcggtgcagaagggcttcgccatgtaccg

SEQ ID NO: 265077 - DNA, 75 bp, synthetic construct
  source 1..75: mol_type = other DNA
ctgattaaaactgaactgctggagacgcagaccgtggatttcagcgttggcgccgaagggcttcgccatgtaccg

SEQ ID NO: 265078 - DNA, 75 bp, synthetic construct
  source 1..75: mol_type = other DNA
ctgattaaaactgaactgctggagacgcagaccgtggatttcagcgtaggggctgaagggcttcgccatgtaccg

SEQ ID NO: 265079 - DNA, 75 bp, synthetic construct
  source 1..75: mol_type = other DNA
ttcatcaggagcgaataactggacaccaacaaccagtatcagcgatctgctggttgtggtgatgaaaaaatccac

SEQ ID NO: 265080 - DNA, 75 bp, synthetic construct
  source 1..75: mol_type = other DNA
taccacgctgataagcctggttgacggtcagggaagtccggtcagcgtggaggtacagtccgtcaccgacggcgt

SEQ ID NO: 265081 - DNA, 75 bp, synthetic construct
  source 1..75: mol_type = other DNA
tcaggcccaccgtgccgggctgtgggtgataaagaccgaactgctggaaacgcagacggttgatttcacactcgg

SEQ ID NO: 265082 - DNA, 75 bp, synthetic construct
  source 1..75: mol_type = other DNA
gctacgggatgggaaaacgcctgggggcggcggatgtggacaagtgggcgctgtatgccatcgggcagtactgcg

SEQ ID NO: 265083 - DNA, 75 bp, synthetic construct
  source 1..75: mol_type = other DNA
atcacgaacacggcacaggtggaaaaatctgcccgttatctggggactggcagtcagtggactgtctccggcccg

SEQ ID NO: 265084 - DNA, 75 bp, synthetic construct
  source 1..75: mol_type = other DNA
tgaattctggttctcagaaaaacgcatcacgaacacggcacaggtggaaaaatctgcccgttatctggggactgg

SEQ ID NO: 265085 - DNA, 75 bp, synthetic construct
  source 1..75: mol_type = other DNA
caccgtttcagtggcctgcctctcggggaatacaccctgacggtcagggcgattaacagctatggccagcagggc

SEQ ID NO: 265086 - DNA, 75 bp, synthetic construct
  source 1..75: mol_type = other DNA
taaggtgaaagtgaatcgggttcctgacggcgttgcagaatacagtgtgtgggggctgaagttgccgacgttgcg

SEQ ID NO: 265087 - DNA, 75 bp, synthetic construct
  source 1..75: mol_type = other DNA
taccacgctgataagcctggttgacgggcagggaattccggtcagcgtggaggtacagtccgtcaccgacggcgt

SEQ ID NO: 265088 - DNA, 75 bp, synthetic construct
  source 1..75: mol_type = other DNA
taccacgctgataagcctggttgacggccagggtactccggtcagcgtggaggtacagtccgtcaccgacggcgt

SEQ ID NO: 265089 - DNA, 75 bp, synthetic construct
  source 1..75: mol_type = other DNA
gcgaactcaggaacgctcaacaatgtcacgattaaccagaactgtacgattaagggcatgctggaggcgacccag

SEQ ID NO: 265090 - DNA, 75 bp, synthetic construct
  source 1..75: mol_type = other DNA
atactgatggccagccactgagcaacatactgctgctggctgaccgtatcgcgatgataaatccggagagcggca

SEQ ID NO: 265091 - DNA, 75 bp, synthetic construct
  source 1..75: mol_type = other DNA
cgtggaggtgacgaaggcaaagccggtgacgcgcaccatcacgtcagcgaacattgaccgtctgcgggtgacctt

SEQ ID NO: 265092 - DNA, 75 bp, synthetic construct
  source 1..75: mol_type = other DNA
ccgtgatacatggtgtgacagcggtctggcgcgccggggagcaggagcagacaccacctgaaggctttgagtctt

SEQ ID NO: 265093 - DNA, 75 bp, synthetic construct
  source 1..75: mol_type = other DNA
gtcagcgtgatgcaactggttgcgccgctggtgatttttgttccggtatttgcctttcttggtgttaatggcgta

SEQ ID NO: 265094 - DNA, 75 bp, synthetic construct
  source 1..75: mol_type = other DNA
agcttgcgccggacctggctgaaatcaggacgtccattacgaatgtcagcaatgaaatcacgcagaccgtcaata

SEQ ID NO: 265095 - DNA, 75 bp, synthetic construct
  source 1..75: mol_type = other DNA
cgcttcagtctgcgcctgaccagtggaagcggtcaggacagccgtctggtgaccaccgccatcaccgcggataca

SEQ ID NO: 265096 - DNA, 75 bp, synthetic construct
  source 1..75: mol_type = other DNA
gtgctgctggcggcagacaggattgcgatgattaatcctgcgaatggcaacacaaaaccgatgtttgttggtcag

SEQ ID NO: 265097 - DNA, 75 bp, synthetic construct
  source 1..75: mol_type = other DNA
attgaaatctgtgataacgactatgccgggaccctgaccggcggacgcatcctgtccatcgatgccgccagccgc

SEQ ID NO: 265098 - DNA, 75 bp, synthetic construct
  source 1..75: mol_type = other DNA
gaaacccgcaatgaaatcacacagacggtcagtaaaaccctggaagaccagagtgccaccatacagcagatacag

SEQ ID NO: 265099 - DNA, 75 bp, synthetic construct
  source 1..75: mol_type = other DNA
ccggtactggacagcggggggaataccaacttttccggtgtcacggtggtgttccgttccggtgaacaggagcag

SEQ ID NO: 265100 - DNA, 75 bp, synthetic construct
  source 1..75: mol_type = other DNA
cctgatgtacaaccgtgtcgcatccgacaaggcatcagatcccaattcattcctggagcaggagtcatgtcatga

SEQ ID NO: 265101 - DNA, 75 bp, synthetic construct
  source 1..75: mol_type = other DNA
tactgatggccagccactgagcaacatactgctgctggctgaccgtatcgcgatgataaatccggagagcggcaa

SEQ ID NO: 265102 - DNA, 75 bp, synthetic construct
  source 1..75: mol_type = other DNA
tgctggaggcgactcaggtcagaggtgacttcgttaaagctgtatccaaatcattcccgaaacaggctggtacgt

SEQ ID NO: 265103 - DNA, 75 bp, synthetic construct
  source 1..75: mol_type = other DNA
ggaaatctgcgtttgtggaagtcagcgggcagcccagcaatgatggtgaagggtatctggaatttttccgggaaa

SEQ ID NO: 265104 - DNA, 75 bp, synthetic construct
  source 1..75: mol_type = other DNA
attaatgcacctgcggtacccgccacgattgagctgacaccgggctattttcagataacagcggtcccgcgtctt

SEQ ID NO: 265105 - DNA, 75 bp, synthetic construct
  source 1..75: mol_type = other DNA
ttcaacagcccgaatcagcagtcgtactggtattccacctgtaagctgcaggtgctgaagaacggggttgagatt

SEQ ID NO: 265106 - DNA, 75 bp, synthetic construct
  source 1..75: mol_type = other DNA
gagtatcacgtcatccggcaaccccccgacgttttccctgacgccggaagggaagctgacagccaggaacgcgga

SEQ ID NO: 265107 - DNA, 75 bp, synthetic construct
  source 1..75: mol_type = other DNA
gttccgggcaggtgagcaggaacagacaccgccggagggatttgaatcctccggatccgagacggtgctgggtac

SEQ ID NO: 265108 - DNA, 75 bp, synthetic construct
  source 1..75: mol_type = other DNA
ctgtccggctgctgattcagttgcagcgtaacggtaactgggtgacggaaaaggatgtcaccattaacggcaaga

SEQ ID NO: 265109 - DNA, 75 bp, synthetic construct
  source 1..75: mol_type = other DNA
aacagtgggcaaagctttcccccgggactcccgtgcaccggagcggtggccatcagggaccattaccgtcagggt

SEQ ID NO: 265110 - DNA, 75 bp, synthetic construct
  source 1..75: mol_type = other DNA
accgtcaataaaaaactggaaaatcagagtgcggcaatccagcagatacagaaagttcaggttgatacaaataat

SEQ ID NO: 265111 - DNA, 75 bp, synthetic construct
  source 1..75: mol_type = other DNA
aaaatcagagtgcggcaatccagcagatacagaaagttcaggttgatacaaataataacctgaacagcatgtggg

SEQ ID NO: 265112 - DNA, 75 bp, synthetic construct
  source 1..75: mol_type = other DNA
ctgttcatgaacgacgtgttcctgaagcgtctgtttgcggcgagtatcacgtcatccggcaaccccccgacgttt

SEQ ID NO: 265113 - DNA, 75 bp, synthetic construct
  source 1..75: mol_type = other DNA
gtgcagcacgtaccggaaaaagaagccatcgtggataacggggccagctttgagccgcagtcaggcaccctgaac

SEQ ID NO: 265114 - DNA, 75 bp, synthetic construct
  source 1..75: mol_type = other DNA
gtactccgcatgaagtgaaagataatctcagatccacacagttactgagtgtgatcgatgccatcagcgaagggc

SEQ ID NO: 265115 - DNA, 75 bp, synthetic construct
  source 1..75: mol_type = other DNA
gggtttatgacgatcagccgtttaaccggcagattgttattccggcggtggctttcagcggtgccagacatgagc

SEQ ID NO: 265116 - DNA, 75 bp, synthetic construct
  source 1..75: mol_type = other DNA
ttaacgcgccagcaaaacccgccaccattgaactgacgccggggtattttcagataacggcggtaccggtgctgg

SEQ ID NO: 265117 - DNA, 75 bp, synthetic construct
  source 1..75: mol_type = other DNA
gctgaaatttataaccgaacggctctggataatacgctgatatatacgggtgttattgatatgcctgcaggcagt

SEQ ID NO: 265118 - DNA, 75 bp, synthetic construct
  source 1..75: mol_type = other DNA
gttatttgtggcgcaggggaatcagctgttcatgaacgacgtgttcctgaagcgactgtttgcggtgagtatcac

SEQ ID NO: 265119 - DNA, 75 bp, synthetic construct
  source 1..75: mol_type = other DNA
ttcaacctgtaagctgcaggtgctgaagaacggacaggaaatctttcagcaacccgcgacggatgtcagcagggt

SEQ ID NO: 265120 - DNA, 75 bp, synthetic construct
  source 1..75: mol_type = other DNA
agacggtcagtaaaacgctggaggaccagagcgccaccattcagcagatacagcgcgtgcagaaggacacaaatg

SEQ ID NO: 265121 - DNA, 75 bp, synthetic construct
  source 1..75: mol_type = other DNA
agggtgtgcgcttcagtctgcgcctgaccagcggaagcggagaagacagccgtctggtgaccaccgccatcactg

SEQ ID NO: 265122 - DNA, 75 bp, synthetic construct
  source 1..75: mol_type = other DNA
agtccacactaagcgccggtatcttcagacccatactgatatgccaggcagtgatgacctgaagggcattaacgt

SEQ ID NO: 265123 - DNA, 75 bp, synthetic construct
  source 1..75: mol_type = other DNA
atatggtgctaataactggacgccaacgaccagtatcagcgaccttcttgttgttgtgatgaagaaatctacagc

SEQ ID NO: 265124 - DNA, 75 bp, synthetic construct
  source 1..75: mol_type = other DNA
agtatctggcgcaggcgaaatgggacacgccgcgggtggtgaagggcgtgcgcttcagtctgcgcctgaccagcg

SEQ ID NO: 265125 - DNA, 75 bp, synthetic construct
  source 1..75: mol_type = other DNA
gtatgccatcgggcagtactgcgaccagacggtcccggatggtttcggggggcacagagccgcggatgactttca

SEQ ID NO: 265126 - DNA, 75 bp, synthetic construct
  source 1..75: mol_type = other DNA
gtgacaatgagagttgaaggtggtcctggcaatatgggggatgtggaagggagaaagagagaactggtgcgatgg

SEQ ID NO: 265127 - DNA, 75 bp, synthetic construct
  source 1..75: mol_type = other DNA
gctgtgaagctgcagcagatgcaggacggacgcctttatatcgcgggtattggtgccggtattgagaatacccct

SEQ ID NO: 265128 - DNA, 75 bp, synthetic construct
  source 1..75: mol_type = other DNA
gcgcgctgggacacgccgaaggtggtgaagggcgtgagctttatgcttcgcctgaccgtggccgcggatgatggc

SEQ ID NO: 265129 - DNA, 75 bp, synthetic construct
  source 1..75: mol_type = other DNA
aatcagcagtcgtacaggtattccacctgtaagctgcaggtgctgaagaacggggttgagattttccatgaaccg

SEQ ID NO: 265130 - DNA, 75 bp, synthetic construct
  source 1..75: mol_type = other DNA
cattgaactgacgccggggtattatcagataacggcggtcccgcatcttacggtgtatgacccgacggtacaatt

SEQ ID NO: 265131 - DNA, 75 bp, synthetic construct
  source 1..75: mol_type = other DNA
gccagccgtaccctgacgctggaccgtgaggtgacactgccggaatcagggacatcgacggtgaacctgattaac

SEQ ID NO: 265132 - DNA, 75 bp, synthetic construct
  source 1..75: mol_type = other DNA
ctgcaggcagtggtgtaatgacactggagttttctgtatcagcatggtgggtaaatggctggtatcccacagcaa

SEQ ID NO: 265133 - DNA, 75 bp, synthetic construct
  source 1..75: mol_type = other DNA
atgggcaaaggtggcggcagggcgcacacaccgcgtgaggcgaaagacaatctcaaatccacgcagatgatgagc

SEQ ID NO: 265134 - DNA, 75 bp, synthetic construct
  source 1..75: mol_type = other DNA
gtggtgtggccgtacaccaactgcgatgtggtggtggatgataacggcgtggggtttcgctacagcttcagcgcc

SEQ ID NO: 265135 - DNA, 75 bp, synthetic construct
  source 1..75: mol_type = other DNA
tttcacgtaacggaaaactggaaattaacagcagtaatgacggtgggcgcatgacttttaacggcgatcgtatcg

SEQ ID NO: 265136 - DNA, 75 bp, synthetic construct
  source 1..75: mol_type = other DNA
gccgacgttgcgccagcgcctgttccgctgtgtgagtatccgtgagaacgatgacggcacgtatgctatcaccgc

SEQ ID NO: 265137 - DNA, 75 bp, synthetic construct
  source 1..75: mol_type = other DNA
aggcacgcgatacacgggttatggttttgaagttcgcaaaaacggcgtattaatcgcgtccagagaaactaaagg

SEQ ID NO: 265138 - DNA, 75 bp, synthetic construct
  source 1..75: mol_type = other DNA
acttcatgataagagtaaaattcggatccatgacccggttctgttttacctgaaatcctatacagacgattttga

SEQ ID NO: 265139 - DNA, 75 bp, synthetic construct
  source 1..75: mol_type = other DNA
gctggcgaaatgggacacgccgcgggtggtgaagggcgtgcgcttcagtctgcgcctgaccagtggaagcggtga

SEQ ID NO: 265140 - DNA, 75 bp, synthetic construct
  source 1..75: mol_type = other DNA
atggctggtaaataactggtatcccacagcaagtatcagcgatttgctggttgtggtgatgaagaaagccaccgc

SEQ ID NO: 265141 - DNA, 75 bp, synthetic construct
  source 1..75: mol_type = other DNA
taacagttatggccagcagggggaaccggccaccaccacgttcaggattaatgcacctgcggtacccgccacgat

SEQ ID NO: 265142 - DNA, 75 bp, synthetic construct
  source 1..75: mol_type = other DNA
gaggtgagcgcagctgacggccagtatctggcgcaggtcgaaatgggacacgccgcgggtggtgaagggcgtgcg

SEQ ID NO: 265143 - DNA, 75 bp, synthetic construct
  source 1..75: mol_type = other DNA
gccgtcaccgaaacggcggcggctctgggctttatctcagccattggcgcagtgggcggcttttttattccgcag

SEQ ID NO: 265144 - DNA, 75 bp, synthetic construct
  source 1..75: mol_type = other DNA
ccggcaaattgttattccagcggtggctttctgcggtgccagacatgagcgggagaatagcgatacttattcgtc

SEQ ID NO: 265145 - DNA, 75 bp, synthetic construct
  source 1..75: mol_type = other DNA
cgcgaataccggcacgctcaataatgtcaccattaacgagaactgtgtcatcagagggaaactgtctgcaaacca

SEQ ID NO: 265146 - DNA, 75 bp, synthetic construct
  source 1..75: mol_type = other DNA
ggagtgtctccggtccgcacattaagcccggaaaggatttctggttttatgtgcgcagcgtcaacctggtgggta

SEQ ID NO: 265147 - DNA, 75 bp, synthetic construct
  source 1..75: mol_type = other DNA
cgacggtacagtttgagttctggttttcggaaacgcggattaccgatatcaggcaggttgaaaccacagcccgct

SEQ ID NO: 265148 - DNA, 75 bp, synthetic construct
  source 1..75: mol_type = other DNA
aggagttgtggactcagattgataacggtcagcttgcgcctgacctggcggaaatcagaacgtccatcacggatg

SEQ ID NO: 265149 - DNA, 75 bp, synthetic construct
  source 1..75: mol_type = other DNA
atttataaccgtaccgcgctggataatacgctgatttacagtggcgttattgatatgcctgccggtcacggtcac

SEQ ID NO: 265150 - DNA, 75 bp, synthetic construct
  source 1..75: mol_type = other DNA
ggcaggccagcaatgatggtgaagggtatctggaaattttccgtgggctgatagatgaggcgctgctggggaagg

SEQ ID NO: 265151 - DNA, 75 bp, synthetic construct
  source 1..75: mol_type = other DNA
attaatgagaactgtcgggttctgggaaaactgtccgcgaaccagattgaaggcgatctcgttaaaacagtgggt

SEQ ID NO: 265152 - DNA, 75 bp, synthetic construct
  source 1..75: mol_type = other DNA
ttgtgcaggaccgtccgtcagatgtggtgtggccctacacaaacagtgatgtggtggctgacaatgaaggtgtgg

SEQ ID NO: 265153 - DNA, 75 bp, synthetic construct
  source 1..75: mol_type = other DNA
ctgccgctcggggaatacaccctgacggtcagggcgataaacagctacggccagcagggcgaacctgccaccacc

SEQ ID NO: 265154 - DNA, 75 bp, synthetic construct
  source 1..75: mol_type = other DNA
ccggtcagcgtggaggtccagtccgtcaccgacggcgtgaaggtgaaagtgaaccgggttcctgacggcgttgct

SEQ ID NO: 265155 - DNA, 75 bp, synthetic construct
  source 1..75: mol_type = other DNA
acaccacctgaaggctttgagtcctccggggcggaaaccgcactgggcgtggaagtgacgaaggcaaagccggtg

SEQ ID NO: 265156 - DNA, 75 bp, synthetic construct
  source 1..75: mol_type = other DNA
gaatgcgaactccgggacgctcaacaacgtcacgataaatgagaactgtcagattaaggggaaactgtcagccaa

SEQ ID NO: 265157 - DNA, 75 bp, synthetic construct
  source 1..75: mol_type = other DNA
ccgctgacggacacggacggtaatcctgtgatacacggtgtgacagcggtctggcgcgccggggagcaggagcag

SEQ ID NO: 265158 - DNA, 75 bp, synthetic construct
  source 1..75: mol_type = other DNA
gtcagattaaggggaaactgtcagccaaccagattgaaggcgatattgtcaaaacggtcagcaagtctttccccc

SEQ ID NO: 265159 - DNA, 75 bp, synthetic construct
  source 1..75: mol_type = other DNA
gggagtgaaattacctcgaccacggataaaaacctgggtgaccaggccgtgaccatacagcaaatccagcgggtt

SEQ ID NO: 265160 - DNA, 75 bp, synthetic construct
  source 1..75: mol_type = other DNA
ggtgtggccgtacaccaacagcgatgtggtggtggatgataacggcgtgggtttccgctacagcttcagtgccct

SEQ ID NO: 265161 - DNA, 75 bp, synthetic construct
  source 1..75: mol_type = other DNA
gaaaaacggtgctgaaatttataaccgtaccgcgctggataatacgctgctttacagtggtgttattgatatgcc

SEQ ID NO: 265162 - DNA, 75 bp, synthetic construct
  source 1..75: mol_type = other DNA
cggacgtgtcctgtccattgatgctgccacccgcaccctgacgctggaccgtgaagtgacacttccggagaccgg

SEQ ID NO: 265163 - DNA, 75 bp, synthetic construct
  source 1..75: mol_type = other DNA
ctgtatgccatcgggcagtactgcgaccagatggtgccggatggcttcgggggcaccgagccgcggatgaccttc

SEQ ID NO: 265164 - DNA, 75 bp, synthetic construct
  source 1..75: mol_type = other DNA
atgcttcagcgctgcgtacggaggtcacgcaactggaagaagacatccgtcagcggatggacacggatatcgcag

SEQ ID NO: 265165 - DNA, 75 bp, synthetic construct
  source 1..75: mol_type = other DNA
gacgacgaaaccacataccgcttcagcactggcgctggggcgttacagctgacggtccgggcggtaaatgcgtgg

SEQ ID NO: 265166 - DNA, 75 bp, synthetic construct
  source 1..75: mol_type = other DNA
tcggcgcaaccgtacaggttattccgcacatcactaacgcaatcaaagagcgcgtgctggaaggtggcgaaggtc

SEQ ID NO: 265167 - DNA, 75 bp, synthetic construct
  source 1..75: mol_type = other DNA
ggagcggtggccatcagggaccattaccgtcaggatttatgacgatcagccttttgacaggcaaattgttattcc

SEQ ID NO: 265168 - DNA, 75 bp, synthetic construct
  source 1..75: mol_type = other DNA
acattcaccgtatcttcatcaggagcgaataactggacaccaacaaccagtatcagcgatctgctggttgtggtg

SEQ ID NO: 265169 - DNA, 75 bp, synthetic construct
  source 1..75: mol_type = other DNA
ctgtgggacatgctgactcacccgcgctacggcatgggaaaacgcctgggggccgcggatgttgacaagtgggcg

SEQ ID NO: 265170 - DNA, 75 bp, synthetic construct
  source 1..75: mol_type = other DNA
aaggatgtcaccattaacggcaagaccacctcgcagttcctggcgtcggtgattctggataatctgccgccccgg

SEQ ID NO: 265171 - DNA, 75 bp, synthetic construct
  source 1..75: mol_type = other DNA
ggtgtggccctacaccagcagtgatgtggtggtggatgataacggcgtggggtttcgctacagcttcagcgccct

SEQ ID NO: 265172 - DNA, 75 bp, synthetic construct
  source 1..75: mol_type = other DNA
aggagaatgcacgccagattgcgcaggttcgtcagtatgtggatgaaaaaagcagtgaaatcatctcgacgacag

SEQ ID NO: 265173 - DNA, 75 bp, synthetic construct
  source 1..75: mol_type = other DNA
tacagtggcgttattgatatgcctgccggtcacggtcacatgacgctggagttttcggtgtcagcatggctggta

SEQ ID NO: 265174 - DNA, 75 bp, synthetic construct
  source 1..75: mol_type = other DNA
gggggctctccctgccgtcactgcgtcgtcgcctgttccgctgtgtctccatccgggaaaacacggacggcacct

SEQ ID NO: 265175 - DNA, 75 bp, synthetic construct
  source 1..75: mol_type = other DNA
gagttttcgaaagagtggaaggacgctaacgataaatggaatgcgatgtggggcgtcaaaattgagcagaccaaa

SEQ ID NO: 265176 - DNA, 75 bp, synthetic construct
  source 1..75: mol_type = other DNA
caccacgttcaggattaatgcacctgcggtacccgccacgattgagctgacaccgggctattttcagataacagc

SEQ ID NO: 265177 - DNA, 75 bp, synthetic construct
  source 1..75: mol_type = other DNA
cccgacggtacagtttgagttctggttctcggaaaagcggattaccgatatcaggcaggttgaaaccacagcccg

SEQ ID NO: 265178 - DNA, 75 bp, synthetic construct
  source 1..75: mol_type = other DNA
taaggcacaggcaatccttgccagagaaacggcacatgtaaaattccggccgtggcaggatgataagtggagtcg

SEQ ID NO: 265179 - DNA, 75 bp, synthetic construct
  source 1..75: mol_type = other DNA
ggtaaataactggtatcccacagcaagtatcagcgatctgctggttgtggtgatgaaaaaatccacagcaggtat

SEQ ID NO: 265180 - DNA, 75 bp, synthetic construct
  source 1..75: mol_type = other DNA
ccggcggtggcattcagcggcgctaaacatgagagagagcatactgatatttactcctcatgccgtctgatagtg

SEQ ID NO: 265181 - DNA, 75 bp, synthetic construct
  source 1..75: mol_type = other DNA
tttcggaggcaaaaatcgcagacatatctcaggtggaaacctctgcccgttatctggggaccggcagtcagtgga

SEQ ID NO: 265182 - DNA, 75 bp, synthetic construct
  source 1..75: mol_type = other DNA
gggggctgaagctgccgacgctgcgccagcgcctgttccgctgtgtgagtatccgtgagaacgacgacggtacgt

SEQ ID NO: 265183 - DNA, 75 bp, synthetic construct
  source 1..75: mol_type = other DNA
gtgagccgtgttcctgacggcgttgcagaatacagcgtgtgggggctgaagttgccaacgttgcgccagcgcctg

SEQ ID NO: 265184 - DNA, 75 bp, synthetic construct
  source 1..75: mol_type = other DNA
cagagtcaggtgctgctggcggcagacaggattgcgatgattaatcctgcgaatggcaacacaaagccgatgttt

SEQ ID NO: 265185 - DNA, 75 bp, synthetic construct
  source 1..75: mol_type = other DNA
agcagatacagaaggttcaggttgatacaaataataacctgaacagcatgtgggccgtgaaactgcagcagatgc

SEQ ID NO: 265186 - DNA, 75 bp, synthetic construct
  source 1..75: mol_type = other DNA
gctgaaggtacagaaaacaaaaaatggcataccctatgttgccggtattggagcggggattgaggatactgatgg

SEQ ID NO: 265187 - DNA, 75 bp, synthetic construct
  source 1..75: mol_type = other DNA
ggggttgagattttccatgaaccggcaacggatgtcagccgggtgttctcatcggtgatagatatgccggcaggg

SEQ ID NO: 265188 - DNA, 75 bp, synthetic construct
  source 1..75: mol_type = other DNA
actctccctgccgtcactgcgtcgtcgcctgttccgctgtgtctccatccgggaaaacacggacggcacctttgc

SEQ ID NO: 265189 - DNA, 75 bp, synthetic construct
  source 1..75: mol_type = other DNA
gaccggcacacggcggtggaggtgaattacaccgacccgcagaacggctggcagacctccacggaactggtggaa

SEQ ID NO: 265190 - DNA, 75 bp, synthetic construct
  source 1..75: mol_type = other DNA
ttaatgtgtcgtcggccggtgcgaacaactggacgccgacaacgtacatcagtgatttactggttgtggtcatga

SEQ ID NO: 265191 - DNA, 75 bp, synthetic construct
  source 1..75: mol_type = other DNA
agattgttattccggcggtggcattcagcggcgctaaacatgagaaagagcatactgatatttactcctcatgcc

SEQ ID NO: 265192 - DNA, 75 bp, synthetic construct
  source 1..75: mol_type = other DNA
atacaccctgacagtcagggcaattaacagttatggccagcagggggaaccggccaccaccaccttccggattaa

SEQ ID NO: 265193 - DNA, 75 bp, synthetic construct
  source 1..75: mol_type = other DNA
tcagtggcctgccgctcggggaatacaccctgacggtcagggcgataaacagctacggccagcagggcgaacctg

SEQ ID NO: 265194 - DNA, 75 bp, synthetic construct
  source 1..75: mol_type = other DNA
cgctgacatttcgcggaagcaggcgtaccgacagcggcagaacaacatattcgatgtgttatctgaaggtgctga

SEQ ID NO: 265195 - DNA, 75 bp, synthetic construct
  source 1..75: mol_type = other DNA
ggacagtaccacggaccagctgcagaacagaacgctgtggtcgtcatacaccgaaatcatcgatgtgaaacagtg

SEQ ID NO: 265196 - DNA, 75 bp, synthetic construct
  source 1..75: mol_type = other DNA
acgactatgccgggaccctgaccggcggacgtatcctgtccattgatgccgccagccgcacactgacgctggacc

SEQ ID NO: 265197 - DNA, 75 bp, synthetic construct
  source 1..75: mol_type = other DNA
gggcaggagctgaacgatcgtattaatgcctcggcattgcgcagtgaagttgagcaactggaggatgagatcaat

SEQ ID NO: 265198 - DNA, 75 bp, synthetic construct
  source 1..75: mol_type = other DNA
acttttatatccgcagtgtgaacatcgtcggtaaatcagcgtttgtggaagctgtcggccagccggttaatgatg

SEQ ID NO: 265199 - DNA, 75 bp, synthetic construct
  source 1..75: mol_type = other DNA
aagggtaatttttcatcagccggcaacggatgtcacccgggtgttttcgtccgtcattgatatgccagcaggacg

SEQ ID NO: 265200 - DNA, 75 bp, synthetic construct
  source 1..75: mol_type = other DNA
tcagcgatgatcataactttgaccgtcagattattattccgcccattatctttaacggaatagcgtatagcgatc

SEQ ID NO: 265201 - DNA, 75 bp, synthetic construct
  source 1..75: mol_type = other DNA
ggtacagtcactggtggagaccacctccaggggcgaccgtaatccggcttctgttcgtctgctgattcagctgca

SEQ ID NO: 265202 - DNA, 75 bp, synthetic construct
  source 1..75: mol_type = other DNA
gatagcgcaggtccgccagtacgtggatgacaaagggagtgaaatcacctcgaccacggataaaaagctggaaga

SEQ ID NO: 265203 - DNA, 75 bp, synthetic construct
  source 1..75: mol_type = other DNA
cagctggttgcgaaaaagaatgaggaccagacgctggccatcgcgcaggtgagtcagcaggtggaccgggtgagc

SEQ ID NO: 265204 - DNA, 75 bp, synthetic construct
  source 1..75: mol_type = other DNA
tgtttgcggtgagcatcacgtcatccggcaatcctcctacgttttccctgacgccggatggcaggctgacagccc

SEQ ID NO: 265205 - DNA, 75 bp, synthetic construct
  source 1..75: mol_type = other DNA
acggcattaccctccgtttctggcgcattattacgtgttccctactcttttatggtcccgatatttggcggacgt

SEQ ID NO: 265206 - DNA, 75 bp, synthetic construct
  source 1..75: mol_type = other DNA
aacgcctgacggctcccaccattaccagcggtggaaatccgccggcattttccctgacaccagacggaaagctga

SEQ ID NO: 265207 - DNA, 75 bp, synthetic construct
  source 1..75: mol_type = other DNA
gtatcccacagcaagtatcagcgatttactggttgtggtgatgaagaaatcaacagcaggtatcagtatcagttg

SEQ ID NO: 265208 - DNA, 75 bp, synthetic construct
  source 1..75: mol_type = other DNA
gatgctcagggcgtattttcttcagttatagatatgcctgccggacaggggacactgacactgacattcaccgta

SEQ ID NO: 265209 - DNA, 75 bp, synthetic construct
  source 1..75: mol_type = other DNA
gagcagttcggcagccagcaggtgagtcgtaattatcatcttcgcgggcgcattctgcaggtgccgtcgaactat

SEQ ID NO: 265210 - DNA, 75 bp, synthetic construct
  source 1..75: mol_type = other DNA
gcaaaaacggtgtattaatcgcatccagagaaactaaaggggccattcccggtagttacagtgcagttattgata

SEQ ID NO: 265211 - DNA, 75 bp, synthetic construct
  source 1..75: mol_type = other DNA
ttattccggcggtggcattcagcggcgctaaacatgagaaagagcatactgatatttactcctcatgccgtctga

SEQ ID NO: 265212 - DNA, 75 bp, synthetic construct
  source 1..75: mol_type = other DNA
gacgggcggctgacggcgaaaaatgccgatatcagcggtaacgtgaatgcgaactccgggacgctcaacaacgtc

SEQ ID NO: 265213 - DNA, 75 bp, synthetic construct
  source 1..75: mol_type = other DNA
cggaaggttacctggattttttcaaaggagaaatcgggaaaacacatctggcccaggagctgtggacgcagattg

SEQ ID NO: 265214 - DNA, 75 bp, synthetic construct
  source 1..75: mol_type = other DNA
tggccatcagggaccattaccgtcagggtttatgacgatcagccgtttgaccggcagattgttattccggcggtg

SEQ ID NO: 265215 - DNA, 75 bp, synthetic construct
  source 1..75: mol_type = other DNA
tgggtaaatggctggtaccccacagcaagtatcagcgatttgctggttgttgtgatgaagaaagccactgcaggc

SEQ ID NO: 265216 - DNA, 75 bp, synthetic construct
  source 1..75: mol_type = other DNA
attttttcaaaggagaaatcgggaaaacacatctggcccaggagttgtggacgcagattgataacggtcagcttg

SEQ ID NO: 265217 - DNA, 75 bp, synthetic construct
  source 1..75: mol_type = other DNA
acgatccccatcacctgataggtcatggtcagggcggaatgggaacaaaggcccacgatattttcacgttaccgt

SEQ ID NO: 265218 - DNA, 75 bp, synthetic construct
  source 1..75: mol_type = other DNA
tatcgccgttgatccggagtctccggaatctttcatgaaacggcctaaacgtcgtcgctgggttaatgaaaagta

SEQ ID NO: 265219 - DNA, 75 bp, synthetic construct
  source 1..75: mol_type = other DNA
cattgttggcgcgtatttatttgatcgagatggagagcgacgatcctgctaacgctctgccgtcgacggacaaag

SEQ ID NO: 265220 - DNA, 75 bp, synthetic construct
  source 1..75: mol_type = other DNA
ggaaaaaattcgctcagtataccgtgagagcgacatcgtgccgggagagcagaccgccaccagcatgctgaagca

SEQ ID NO: 265221 - DNA, 75 bp, synthetic construct
  source 1..75: mol_type = other DNA
gttacggtaccggcgcgatggtgttgtgctggcactgcgacaaccagctgcgtaaccagacttccgaatcactcg

SEQ ID NO: 265222 - DNA, 75 bp, synthetic construct
  source 1..75: mol_type = other DNA
aaccagctgcgcgaccagacctccgaatcactcgggcaacttgctcaccaaaacctgtctgcatggatgattgac

SEQ ID NO: 265223 - DNA, 75 bp, synthetic construct
  source 1..75: mol_type = other DNA
taatctgccgtccggggtcgttcctgccgttcgccagccgctgggggatgacaaatcatttctgccatttttcag

SEQ ID NO: 265224 - DNA, 75 bp, synthetic construct
  source 1..75: mol_type = other DNA
taatctgccgtccggggtcgttcctgccgttcgccagccgctgggggatgataaaccatttctgccatttttcag

SEQ ID NO: 265225 - DNA, 75 bp, synthetic construct
  source 1..75: mol_type = other DNA
gattacaccccaggtgatggaaatatatatgcaattattcctccccgttattctaaataccaacgatgccagtga

SEQ ID NO: 265226 - DNA, 75 bp, synthetic construct
  source 1..75: mol_type = other DNA
ctagtgaacgagttgcgggatattgcggttacgtatcacggaacgcagcaattgcgggagaaaattgccagagca

SEQ ID NO: 265227 - DNA, 75 bp, synthetic construct
  source 1..75: mol_type = other DNA
taatctgccgtccggggtcgttcctgccgttcgccagccgctgggggatgagaaaccatttctgccttttttcag

SEQ ID NO: 265228 - DNA, 75 bp, synthetic construct
  source 1..75: mol_type = other DNA
taatctgccgtccggggtcgttcctgccgttcgccagccgctgggggatgacaaagcatttctgccttttttcag

SEQ ID NO: 265229 - DNA, 75 bp, synthetic construct
  source 1..75: mol_type = other DNA
catgcagtgaatggcacgcaggagcgggaattatcgctggctgaattgtgctgctgggcttctgtaaatgatgta

SEQ ID NO: 265230 - DNA, 75 bp, synthetic construct
  source 1..75: mol_type = other DNA
agaccgccaccagcatactgaagcagcgcacaaaaaatattgcgctgccacttcacgtccaccagcaacaaaatc

SEQ ID NO: 265231 - DNA, 75 bp, synthetic construct
  source 1..75: mol_type = other DNA
gatccgctggcgttcgaagaaaagcatggttctcaggttgatttaatttttcgttttcttgatcacgcctttgca

SEQ ID NO: 265232 - DNA, 75 bp, synthetic construct
  source 1..75: mol_type = other DNA
tccttcatgaaacgacctaaacgtcgccgctgggtaaatgagaaatacacacgctgggtaaagacacagccgtgt

SEQ ID NO: 265233 - DNA, 75 bp, synthetic construct
  source 1..75: mol_type = other DNA
aagacacagccgtgtgcatgttgtggtaagccagctgacgatccgcatcacctgattggtcatggtcagggagga

SEQ ID NO: 265234 - DNA, 75 bp, synthetic construct
  source 1..75: mol_type = other DNA
caccacaggaaaagacggtggtcagcattgccgttgatccggagactccggaatctttcatgaaacgacctaaac

SEQ ID NO: 265235 - DNA, 75 bp, synthetic construct
  source 1..75: mol_type = other DNA
caccacaggaaaagacggtggtcagcattgccgttgatccagaggctccggaatctttcatgaaacgacctaaac

SEQ ID NO: 265236 - DNA, 75 bp, synthetic construct
  source 1..75: mol_type = other DNA
cgcagaccgtcaataagaaactggaagaccagagtgcggcaattcagcagatacagaaagttcaggttgatacaa

SEQ ID NO: 265237 - DNA, 75 bp, synthetic construct
  source 1..75: mol_type = other DNA
ctgacgctcgaccgtgaaatcacgctgccatcttccggcaccacgctgataagcctggttgacgggcaggggagt

SEQ ID NO: 265238 - DNA, 75 bp, synthetic construct
  source 1..75: mol_type = other DNA
tcacgacgagctgcatgcggataccgtggcatttgaagagaagtatggctcccagctggagctgatatttcgttt

SEQ ID NO: 265239 - DNA, 75 bp, synthetic construct
  source 1..75: mol_type = other DNA
ctcaatatgaccggctctccggtaggcgcgatgaaagtgtttttaatcttctacatcgtttgtgtgctactgacc

SEQ ID NO: 265240 - DNA, 75 bp, synthetic construct
  source 1..75: mol_type = other DNA
atggctgttttcagcgccctgctgttcctgacgctaccgggtactggctcaggaaatttcatcgcgttttacgcc

SEQ ID NO: 265241 - DNA, 75 bp, synthetic construct
  source 1..75: mol_type = other DNA
ccggacgggcggttgacggcgaaaaatgccgatatcagcggtaacgtgaatgcgaactccgggacgctcaacaac

SEQ ID NO: 265242 - DNA, 75 bp, synthetic construct
  source 1..75: mol_type = other DNA
tgttacgccccaaacgtcgccgctgggttaatgaaaagtacacgcgatgggttaagacgcagccgtgcgcatgtt

SEQ ID NO: 265243 - DNA, 75 bp, synthetic construct
  source 1..75: mol_type = other DNA
ctgtgggacatgctgacccacccgcgctacggaatgggaaaacgcctgggggcggcggatgtggacaagtgggcg

SEQ ID NO: 265244 - DNA, 75 bp, synthetic construct
  source 1..75: mol_type = other DNA
tgaagttcgcaaaaacggcgtattaatcgcatccagagaaactaaaggggccattcccggtagttacagtgcagt

SEQ ID NO: 265245 - DNA, 75 bp, synthetic construct
  source 1..75: mol_type = other DNA
tgggctttatctcagccattggcgcagtgggcggcttttttattccgcaggcgtttggcatgtcgctcaatatga

SEQ ID NO: 265246 - DNA, 75 bp, synthetic construct
  source 1..75: mol_type = other DNA
gatcagttcacggaacggctggaatcaatggcaacggataactgtgcccgctgggtgttgtccgtagtccgtcgt

SEQ ID NO: 265247 - DNA, 75 bp, synthetic construct
  source 1..75: mol_type = other DNA
gtgagagcactactgacccctgaaatagccccgcgtatggggattgtattgttcagaccaggttcagagctgatg

SEQ ID NO: 265248 - DNA, 75 bp, synthetic construct
  source 1..75: mol_type = other DNA
ataactggacgccaacgaccagtatcagcgaccttcttgttgtcgtgatgaagaaatcaacagccggcatcagta

SEQ ID NO: 265249 - DNA, 75 bp, synthetic construct
  source 1..75: mol_type = other DNA
tcttgcgccgctgcctcacgcccaccagcaaaacccgccacaggaaaagacggtggtcagcattgccgttgatcc

SEQ ID NO: 265250 - DNA, 75 bp, synthetic construct
  source 1..75: mol_type = other DNA
gaattcaataggtgaaaactgtacgatttttcagaacgtaactattggagcgaaaacgcttgatattgtatataa

SEQ ID NO: 265251 - DNA, 75 bp, synthetic construct
  source 1..75: mol_type = other DNA
gtcgccgctgggttaaggagaaatacacacgttgggttaagacacagccgtgtgcttgctgcggtatgccagccg

SEQ ID NO: 265252 - DNA, 75 bp, synthetic construct
  source 1..75: mol_type = other DNA
aaagcgacatcgtaccgggagagcagaccgccaccagcatactgaagcagcgcacaaaaaatcttgcgccgctgc

SEQ ID NO: 265253 - DNA, 75 bp, synthetic construct
  source 1..75: mol_type = other DNA
tacgatagaacaactcaaaaataagggggtgataaccccttttgcagaaccacagataggttattttacagtatc

SEQ ID NO: 265254 - DNA, 75 bp, synthetic construct
  source 1..75: mol_type = other DNA
ccatacagatatttcataatcctcgagtgctggtggaaccggaaccaaaaagcatgcgtaatctgccatccggag

SEQ ID NO: 265255 - DNA, 75 bp, synthetic construct
  source 1..75: mol_type = other DNA
gtgagccgtgttcctgacggcgttgccggatacagcgtgtgggggctgaagctgccgacgctgcgccagcgcctg

SEQ ID NO: 265256 - DNA, 75 bp, synthetic construct
  source 1..75: mol_type = other DNA
acgcacaaaaaatcttgcaccgttgccttacgcccaccagcaacaaaaatcaccacaggaaaagacggtggtaag

SEQ ID NO: 265257 - DNA, 75 bp, synthetic construct
  source 1..75: mol_type = other DNA
agctttatgcttcgcctgactgtggcagcagacgacggcagtgagcggctggtcagcacggccaggacgacggaa

SEQ ID NO: 265258 - DNA, 75 bp, synthetic construct
  source 1..75: mol_type = other DNA
taccacgctgataagcctggttgacgggacggggagtccggtcagcgtggaggtccagtctgtcaccgacggcgt

SEQ ID NO: 265259 - DNA, 75 bp, synthetic construct
  source 1..75: mol_type = other DNA
gagagcgacatcataccgggagagcagacagccatcagcatactgaagcaacgcacaaaaaacatagcgccaccg

SEQ ID NO: 265260 - DNA, 75 bp, synthetic construct
  source 1..75: mol_type = other DNA
ctgccagtggcctcatggagactatcaccatagtgaaaccgtcatacatcgttacggtaccggcgcaatggtgtt

SEQ ID NO: 265261 - DNA, 75 bp, synthetic construct
  source 1..75: mol_type = other DNA
tggtaccggaacttgggctggtggtccttaagcctggccgcgaatcaatgccggtattccatagcgctcgagtgc

SEQ ID NO: 265262 - DNA, 75 bp, synthetic construct
  source 1..75: mol_type = other DNA
gcgcacaaaaaatattgcgctaccgcctcacgtccaccagcaacaaaccccaccacaggaaaagacggtggtcag

SEQ ID NO: 265263 - DNA, 75 bp, synthetic construct
  source 1..75: mol_type = other DNA
acgatccccatcacctgattggtcacggtcagggagggatgggaacaaaggcccacgatattttcacgctaccgc

SEQ ID NO: 265264 - DNA, 75 bp, synthetic construct
  source 1..75: mol_type = other DNA
cgtgaaagcgacatcgtaccgggagagcagaccgccaccagcatactgaaacagcgcacaaaaaatcttgcgccg

SEQ ID NO: 265265 - DNA, 75 bp, synthetic construct
  source 1..75: mol_type = other DNA
aattctggtgaatatcgaaaaactgctcaatagtgaagagatggcgctgttagatagcgcagcgtcagaggtggc

SEQ ID NO: 265266 - DNA, 75 bp, synthetic construct
  source 1..75: mol_type = other DNA
catcaccgttgatccagagtctccggaatctttcatgaagctgcctaaacgtcaccggtgggttaaggagaaata

SEQ ID NO: 265267 - DNA, 75 bp, synthetic construct
  source 1..75: mol_type = other DNA
aggaaaagacggtggtcagcattgccgttgatccggagtcaccggctcagtatctccagcgccagaaaccacaac

SEQ ID NO: 265268 - DNA, 75 bp, synthetic construct
  source 1..75: mol_type = other DNA
ggcaacttgctcaccaaaacctgtcagcatggatgattgacgtcatacgccatgcaatgaatggcacgcaggagc

SEQ ID NO: 265269 - DNA, 75 bp, synthetic construct
  source 1..75: mol_type = other DNA
cagcgatgagcgggtgattcgtgctgctggcggcgctggtgcactgtctgactggctgttgcgtcatgtcaaatc

SEQ ID NO: 265270 - DNA, 75 bp, synthetic construct
  source 1..75: mol_type = other DNA
acctgataggccacggtcagtgtggaatgggtacaaaagcgcatgacctttttgtgttgcctttgtgcagaaagc

SEQ ID NO: 265271 - DNA, 75 bp, synthetic construct
  source 1..75: mol_type = other DNA
gtgcgggtattgcttcgacctgttcatgtaccggaacttgggctggtgatccttaaacctggccgtgaatccatg

SEQ ID NO: 265272 - DNA, 75 bp, synthetic construct
  source 1..75: mol_type = other DNA
ttgagagcactactgacccctgaaattgccccacgtatggggatcgtattgttcaggccaggttcagagttgatg

SEQ ID NO: 265273 - DNA, 75 bp, synthetic construct
  source 1..75: mol_type = other DNA
ggatacagtggcatttgaagagaagtatggttcccaactggagctgatatttcgttttatcgatcgcgcgctggc

SEQ ID NO: 265274 - DNA, 75 bp, synthetic construct
  source 1..75: mol_type = other DNA
ctgggttaatgaaaagtacacgcgctgggttaagacgcagccgtgtgcatgttgtggaaagcctgctgatgatcc

SEQ ID NO: 265275 - DNA, 75 bp, synthetic construct
  source 1..75: mol_type = other DNA
aacgggaagagatgcctgtatacacacgctgggtaaaaacgcagaaatgcatgacgtgcggtaatcaggcagatg

SEQ ID NO: 265276 - DNA, 75 bp, synthetic construct
  source 1..75: mol_type = other DNA
ctggtgggcggtctgcaatcaggtggctgatgcgcttccggagtctgtattgcgtcgttcgctgggattaccggt

SEQ ID NO: 265277 - DNA, 75 bp, synthetic construct
  source 1..75: mol_type = other DNA
aagataaatcattactgccatttttcagcgatgagcgggtgattcgtgctgctggcggcgctggtgcactgtctg

SEQ ID NO: 265278 - DNA, 75 bp, synthetic construct
  source 1..75: mol_type = other DNA
cagtatctccagcgccagaaaccacaacgggaagagatgcctgtatacacgcgctgggtaaaaacgcagaaatgc

SEQ ID NO: 265279 - DNA, 75 bp, synthetic construct
  source 1..75: mol_type = other DNA
ggcactgcgacaaccagctgcgcgaccagacctccgaatcactcgggcaacttgctcaccaaaacctgtatgcat

SEQ ID NO: 265280 - DNA, 75 bp, synthetic construct
  source 1..75: mol_type = other DNA
gccggaaccgaaaaacatgcgggcgctgccatccggagcggttcccactgttcgccagccgctggtggaagacaa

SEQ ID NO: 265281 - DNA, 75 bp, synthetic construct
  source 1..75: mol_type = other DNA
aactgcatgcggataccgtggcatttgaagagaagtatggctcccagctggagctgatatttcgttttatcgatc

SEQ ID NO: 265282 - DNA, 75 bp, synthetic construct
  source 1..75: mol_type = other DNA
tggtaccggaacttgggctggtggtcgttaagccgggccgtgaatccatgccggtattccacaatacccgggtat

SEQ ID NO: 265283 - DNA, 75 bp, synthetic construct
  source 1..75: mol_type = other DNA
cctggcgctcgccagccgctggtggaagacaaaacattgctgccgtttttcagtaacgcacgggtgattcgtgct

SEQ ID NO: 265284 - DNA, 75 bp, synthetic construct
  source 1..75: mol_type = other DNA
acgctccgggcgcaatccgtctgtgctggcactgcgataaccagctgcgcgatcagttcacggaacggctggaat

SEQ ID NO: 265285 - DNA, 75 bp, synthetic construct
  source 1..75: mol_type = other DNA
atgttgtctgttgtgcgtcgggatctcggttttgatgatagtcacgttgtgacaatgccggaactatgctggtgg

SEQ ID NO: 265286 - DNA, 75 bp, synthetic construct
  source 1..75: mol_type = other DNA
ttatttggctttgattgctggaacagttgctgaggtatctgctttatttttgataattgtaaagtcagtttttaa

SEQ ID NO: 265287 - DNA, 75 bp, synthetic construct
  source 1..75: mol_type = other DNA
aaacacggtagtcagttgttgttgctgattcgttttttaatgcacgcgagaaattcgggtgtcctgaagtggaaa

SEQ ID NO: 265288 - DNA, 75 bp, synthetic construct
  source 1..75: mol_type = other DNA
tccgcaatgaggcagtgatccgtcgtgctggtggcgtggaatgtcttgaaagctggttacttcgtgaaaagggct

SEQ ID NO: 265289 - DNA, 75 bp, synthetic construct
  source 1..75: mol_type = other DNA
ggcaacttgctcaccaaaacctgtcagcatggatgattgacgtcatacgccatgcagtgaatggcacacaggagc

SEQ ID NO: 265290 - DNA, 75 bp, synthetic construct
  source 1..75: mol_type = other DNA
aattgaatacgaaaaagattattgtctttatgcacccacggcagagacggtacgcgcatacgctagtgctttaaa

SEQ ID NO: 265291 - DNA, 75 bp, synthetic construct
  source 1..75: mol_type = other DNA
accgtggcatttgaagaaaagtatggctcccagctggagctgatatttcgttttatcgatcgcgcgctggcgatt

SEQ ID NO: 265292 - DNA, 75 bp, synthetic construct
  source 1..75: mol_type = other DNA
gctggttacttcgtgaaaaaggctgccagtggcctcattccgactggcacagcgagaacatgacaacaatgcgac

SEQ ID NO: 265293 - DNA, 75 bp, synthetic construct
  source 1..75: mol_type = other DNA
catcaccgttgatccggagtctccggaatctttcatgaggcgacctaaacgtcgccgttgggtaaatgagaaata

SEQ ID NO: 265294 - DNA, 75 bp, synthetic construct
  source 1..75: mol_type = other DNA
acgacgagctgcatgcggataccgtggcatttgaagagaagtatggctcccagctggagctggtatttcgtttta

SEQ ID NO: 265295 - DNA, 75 bp, synthetic construct
  source 1..75: mol_type = other DNA
gagaagtatggctcccagctggagctgatatttcgttttatcgatcgtgcgctggcaacaggcgtactggcgtaa

SEQ ID NO: 265296 - DNA, 75 bp, synthetic construct
  source 1..75: mol_type = other DNA
tggtggagccggaaccaaaaagcatgcgtaatctgccgtccggggtcgttcctgccgctcgccagccgctggtgg

SEQ ID NO: 265297 - DNA, 75 bp, synthetic construct
  source 1..75: mol_type = other DNA
taatctgccgtccggggtcgttcctgccgttcgccagccgctggaggaggataaagcattcctgccatttttcag

SEQ ID NO: 265298 - DNA, 75 bp, synthetic construct
  source 1..75: mol_type = other DNA
taatctgccgtccggggtcgttcctgccgttcgccagccgctggaggacgataaagcattgctgccatttttcag

SEQ ID NO: 265299 - DNA, 75 bp, synthetic construct
  source 1..75: mol_type = other DNA
taatctgccgtccggggtcgttcctgccgttcgccagccgctggaggatgataaagcattactgccttttttcag

SEQ ID NO: 265300 - DNA, 75 bp, synthetic construct
  source 1..75: mol_type = other DNA
gtgcgggtattacttcgacctgttctggtaccggaacttgggctggttatcgttaagccaggccgtgaatccatg

SEQ ID NO: 265301 - DNA, 75 bp, synthetic construct
  source 1..75: mol_type = other DNA
cgaccaggtcacgcggattgcgaatacgccagcgtttatcaaaggcgtcactaacctgcgcggcgtcattgtgcc

SEQ ID NO: 265302 - DNA, 75 bp, synthetic construct
  source 1..75: mol_type = other DNA
actggttattacgtcacgtgaaatcctgccagtggccacacggtgattatcatcacagcgaaaccgtcattcacc

SEQ ID NO: 265303 - DNA, 75 bp, synthetic construct
  source 1..75: mol_type = other DNA
tgttacgcccaaaacgtcgccgctgggttaatgaaaagtacacgcgctgggttaagacgcagccgtgcgcatgtt

SEQ ID NO: 265304 - DNA, 75 bp, synthetic construct
  source 1..75: mol_type = other DNA
gaccagacctccgaatcactcgggcaacttgctcaccaaaacctgtctgcatggatgattgacgtcatacgccat

SEQ ID NO: 265305 - DNA, 75 bp, synthetic construct
  source 1..75: mol_type = other DNA
gaaagcgacatcataccgggagagcagaccgccaccagcatactgaagcagcgcacaaaaaatattgcgttactg

SEQ ID NO: 265306 - DNA, 75 bp, synthetic construct
  source 1..75: mol_type = other DNA
taatctgccgtccggggtcgttcctgccgttcgccagccgctggaggaagataaagcatttctgccttttttcag

SEQ ID NO: 265307 - DNA, 75 bp, synthetic construct
  source 1..75: mol_type = other DNA
cgttcgaagaaaagcatggttcccagattgatttaatttttcgttttcttgatcacgcctttgcaaccggcgtgc

SEQ ID NO: 265308 - DNA, 75 bp, synthetic construct
  source 1..75: mol_type = other DNA
gcgcacaaaaaatcttgcgccgttgcctcatgcccaccagcaacagaacccaccacaggaaaagacggtggtatg

SEQ ID NO: 265309 - DNA, 75 bp, synthetic construct
  source 1..75: mol_type = other DNA
cctgaagtccacgcagctgctgagtgtgatcgatgccatcagcgaagggccggttgaaggtaagcgcatcattta

SEQ ID NO: 265310 - DNA, 75 bp, synthetic construct
  source 1..75: mol_type = other DNA
acgacggatgttcatggcgtattttcctcagttatagatatgcctgccggacaggggacgctgacactgacattc

SEQ ID NO: 265311 - DNA, 75 bp, synthetic construct
  source 1..75: mol_type = other DNA
agggtattttcatcagtcattgatatgcctgccggacacggccatgtcaccctgactttcaatgtttcttcatat

SEQ ID NO: 265312 - DNA, 75 bp, synthetic construct
  source 1..75: mol_type = other DNA
acacaccgcgtgaggcgaaggataacctgaagtccacgcagatgctgagtgttattgatgctctgggagaaggcc

SEQ ID NO: 265313 - DNA, 75 bp, synthetic construct
  source 1..75: mol_type = other DNA
ttatcccaccggcagtgcagcacctgacggtggaggtgagtgcagctgacggtcagtatctggcacaggcgaaat

SEQ ID NO: 265314 - DNA, 75 bp, synthetic construct
  source 1..75: mol_type = other DNA
tgtctccatccgggaaaacacggacggcacgttcgccatcacggcggtgcagcacgtaccggaaaaagaagccat

SEQ ID NO: 265315 - DNA, 75 bp, synthetic construct
  source 1..75: mol_type = other DNA
cggacaggattgcgatgattaatcctgcgaatggcaatacaaagccgatgtttgttgggcagggcgatcagatat

SEQ ID NO: 265316 - DNA, 75 bp, synthetic construct
  source 1..75: mol_type = other DNA
aatggtcaataactggacaccgacaaccagtatcagcgatttgctggttgtggtgatgaagaaatccaccgcagg

SEQ ID NO: 265317 - DNA, 75 bp, synthetic construct
  source 1..75: mol_type = other DNA
ataaccgtaccgcgctggataatacgctgatttacagtggcgttattgatatgcctgccggtcacggtcacatga

SEQ ID NO: 265318 - DNA, 75 bp, synthetic construct
  source 1..75: mol_type = other DNA
gggcggctgacggcgaaaaatgccgatatcagcggtaacgtgaatgcgaactccgggacgctcaacaacgtcacg

SEQ ID NO: 265319 - DNA, 75 bp, synthetic construct
  source 1..75: mol_type = other DNA
atgctcagggcgtattttcctcagttatagatatgcctgccggacaggggacgctgacactgacattcaccgtat

SEQ ID NO: 265320 - DNA, 75 bp, synthetic construct
  source 1..75: mol_type = other DNA
tcggattctgggaaaactgtcagctaaccagattgaaggtgatattgtcaaaacggtgggaaaagcctttccgag

SEQ ID NO: 265321 - DNA, 75 bp, synthetic construct
  source 1..75: mol_type = other DNA
cagaagggtatctggggctgtttcgggaaaaaataggaaaactgcatctggctcaggggctgtgggagctgatag

SEQ ID NO: 265322 - DNA, 75 bp, synthetic construct
  source 1..75: mol_type = other DNA
ggttttacgtgcgcagcgtcaacctggtggggaaatctgcttttgtggaagccagtggccgggccagcaatgatg

SEQ ID NO: 265323 - DNA, 75 bp, synthetic construct
  source 1..75: mol_type = other DNA
catgagaatttcaacagtaataaccaacagtcatactggtattcaacctgccggttaagagtgacccgcaatggt

SEQ ID NO: 265324 - DNA, 75 bp, synthetic construct
  source 1..75: mol_type = other DNA
aactggagcagttttcgaaagagtggaaggatgctaacgataagtggaatgccatgtggggcgtcaaaattgagc

SEQ ID NO: 265325 - DNA, 75 bp, synthetic construct
  source 1..75: mol_type = other DNA
ataagtggaatgccatgtggggcgtcagaattgagcagaccgaagacggcaggcattatgtcgcggggcttggcc

SEQ ID NO: 265326 - DNA, 75 bp, synthetic construct
  source 1..75: mol_type = other DNA
caccggcagcgccgtcacagattgagctgacaccgggctattttcagataacagcggtcccgcgtcttgcggtgt

SEQ ID NO: 265327 - DNA, 75 bp, synthetic construct
  source 1..75: mol_type = other DNA
gatgcgctgtatgccggtatggaacggccagacgctgacgttcgttcaggaccgcccgtcggatgtggtgtggcc

SEQ ID NO: 265328 - DNA, 75 bp, synthetic construct
  source 1..75: mol_type = other DNA
cggtacagtttgagttctggttctcggaaaagcggattaccgatatcaggcaggttgaaaccacagcccgctatc

SEQ ID NO: 265329 - DNA, 75 bp, synthetic construct
  source 1..75: mol_type = other DNA
gaatttcaacagtcataaccaacagtcatactggtattccacctgcaagctgcaggtgtttaaaaacggggctga

SEQ ID NO: 265330 - DNA, 75 bp, synthetic construct
  source 1..75: mol_type = other DNA
ctgatatcagcggtaacgttaatgcgaattccgggacgctcaacaacgtcacgattaatcagaactgccggatcc

SEQ ID NO: 265331 - DNA, 75 bp, synthetic construct
  source 1..75: mol_type = other DNA
gtcacaggggctgcgtcacacacccggtgatattattgaaatctgtgataacgactatgccgggaccatgaccgg

SEQ ID NO: 265332 - DNA, 75 bp, synthetic construct
  source 1..75: mol_type = other DNA
taaccgaatcccatcttggtaaagagctgctggaaaaagtcgacctgacggaggataacgccagcaaactggagc

SEQ ID NO: 265333 - DNA, 75 bp, synthetic construct
  source 1..75: mol_type = other DNA
agcggtcccgcgtcttgcggtgtatgacccgacggtacagtttgagttctggttttcggaaacgcggattaccga

SEQ ID NO: 265334 - DNA, 75 bp, synthetic construct
  source 1..75: mol_type = other DNA
cggtgaacctgattaacggcagcggtaagccggtgagcgtggccatcactgcacaccccgcgccggaccggatac

SEQ ID NO: 265335 - DNA, 75 bp, synthetic construct
  source 1..75: mol_type = other DNA
tttttcaaaggagagatagggaaaacccatctggctcaggagttgtggacgcagattgataacggtcagcttgcg

SEQ ID NO: 265336 - DNA, 75 bp, synthetic construct
  source 1..75: mol_type = other DNA
aaatctgcgtttgtggaagtcagcgggcagcccagcaatgatggtgaagggtatctggaatttttccgggaaaaa

SEQ ID NO: 265337 - DNA, 75 bp, synthetic construct
  source 1..75: mol_type = other DNA
catggctggtgaataactggtatcccacagcaagtatcagcgatttgctggttgtggtgatgaagaaagccaccg

SEQ ID NO: 265338 - DNA, 75 bp, synthetic construct
  source 1..75: mol_type = other DNA
gtctgccgctcggggaatacaccctgacagtcagggcaattaacagttatggccagcagggggaaccggccatca

SEQ ID NO: 265339 - DNA, 75 bp, synthetic construct
  source 1..75: mol_type = other DNA
ggagaccggtgccgccacggtgaacctgattaacggcagcggtaagccggtgagcgtggccatcactgcacaccc

SEQ ID NO: 265340 - DNA, 75 bp, synthetic construct
  source 1..75: mol_type = other DNA
cacacacccggtgacattattgaaatctgtgataacgactatgccgggaccatgaccggcggacgtatcctgtcc

SEQ ID NO: 265341 - DNA, 75 bp, synthetic construct
  source 1..75: mol_type = other DNA
tgatgactatgccggtatcagcaccggcgggcgcgtgctggcggtgaacagccagacctggacgctgacgctcga

SEQ ID NO: 265342 - DNA, 75 bp, synthetic construct
  source 1..75: mol_type = other DNA
acagtgggcaaggctttcccccggattccgtgcacagcggtggccatcagggaccattaccgtcaggtttatgac

SEQ ID NO: 265343 - DNA, 75 bp, synthetic construct
  source 1..75: mol_type = other DNA
accacctcaaagggcgaccgtaatccctcttctgtccgactgctgattcagttgcagcgtaacggtaactgggtg

SEQ ID NO: 265344 - DNA, 75 bp, synthetic construct
  source 1..75: mol_type = other DNA
gatggcgtggagacatacggtgtgtggggactctccctgccgtcactgcgtcgtcgcctgttccgctgtgtctcc

SEQ ID NO: 265345 - DNA, 75 bp, synthetic construct
  source 1..75: mol_type = other DNA
cctctgcccgttatctggggaccggcagtcagtggagtgtctccggtccgcacattaagcccggaaaggatttct

SEQ ID NO: 265346 - DNA, 75 bp, synthetic construct
  source 1..75: mol_type = other DNA
ggcgcaggggaatcagctgttcatgaacgacgtgttcctgaagcgactgtttgcggtgagtatcacgtcatccgg

SEQ ID NO: 265347 - DNA, 75 bp, synthetic construct
  source 1..75: mol_type = other DNA
cagccgtctggtgagcaccgccatcaccgcagacacggagcaccgtttcagtggtctgccgctgggggaatacac

SEQ ID NO: 265348 - DNA, 75 bp, synthetic construct
  source 1..75: mol_type = other DNA
tggttgcgaaaaagaatgaggaccagacactggccatcgcgcagatgagccagaaagtggaccgggtgagcagtg

SEQ ID NO: 265349 - DNA, 75 bp, synthetic construct
  source 1..75: mol_type = other DNA
gagcgccaccattcagcagatacagcgcgtgcagaaggacacaaatgatgacctggctgcgctgtacatgctgaa

SEQ ID NO: 265350 - DNA, 75 bp, synthetic construct
  source 1..75: mol_type = other DNA
gccagccgcaccctgacactggaccgtgaggtgaccctgccggagacaggtgccgccacggtgaacctgattaac

SEQ ID NO: 265351 - DNA, 75 bp, synthetic construct
  source 1..75: mol_type = other DNA
aaacagtgggcaaagctttcccccgggactcccgtgcaccggaacggtggccatcagggaccatcaccgtcaggg

SEQ ID NO: 265352 - DNA, 75 bp, synthetic construct
  source 1..75: mol_type = other DNA
gactggatgagttttcgaaagagtggaaggacgctaacgataaatggaatgccatgtggggcgtcaaaattgagc

SEQ ID NO: 265353 - DNA, 75 bp, synthetic construct
  source 1..75: mol_type = other DNA
atcaggccggggtatgattattatttttatatccgcagcgtcaacctggtgggtaaatcggcattcgtggaggcc

SEQ ID NO: 265354 - DNA, 75 bp, synthetic construct
  source 1..75: mol_type = other DNA
gataaacagttatggtcagcagggggagcctgccggtaccacgttccggattaatgccccggcagcgcctgtaac

SEQ ID NO: 265355 - DNA, 75 bp, synthetic construct
  source 1..75: mol_type = other DNA
ggcagcggatgtggacaagtgggcactgtatgccatcggacagtactgtgaccagccggtgccggacggtttcgg

SEQ ID NO: 265356 - DNA, 75 bp, synthetic construct
  source 1..75: mol_type = other DNA
cagataacggcggtcccgaaactggctgtatatgacccgacggtgcagtttgaattctggttttcggaacagcag

SEQ ID NO: 265357 - DNA, 75 bp, synthetic construct
  source 1..75: mol_type = other DNA
gatggcaggctgacagcccgcaatgcggatatcagtggagccatcacggcgaataccggcacgctcaataatgtc

SEQ ID NO: 265358 - DNA, 75 bp, synthetic construct
  source 1..75: mol_type = other DNA
aaggttcaggttgatacaaataataacctgaacagcatgtgggctgtgaagctgcagcagatgcaggacggacgc

SEQ ID NO: 265359 - DNA, 75 bp, synthetic construct
  source 1..75: mol_type = other DNA
cgatgtgttcctgaagcggctgtttgcggtgagtatcacctcgtccggcaatccccctacgttctccctgacgcc

SEQ ID NO: 265360 - DNA, 75 bp, synthetic construct
  source 1..75: mol_type = other DNA
gctgcaggggagcacagacacgcgacagaacgaacggttactgtcattgatgatcagtcgtttgaccggaatatt

SEQ ID NO: 265361 - DNA, 75 bp, synthetic construct
  source 1..75: mol_type = other DNA
gatggtgaaatgtaacggcagggtgctttttgaaaggacggcgctggctgagtctcaggtgtattcaggggtgat

SEQ ID NO: 265362 - DNA, 75 bp, synthetic construct
  source 1..75: mol_type = other DNA
gggaccattaccgtcaggatttatgacgatcagccttttgaccggcaaattgtgatcccggcagtggctttcagc

SEQ ID NO: 265363 - DNA, 75 bp, synthetic construct
  source 1..75: mol_type = other DNA
acatgagaaagagcatactgatatttactcctcatgccgtctgatagtgcggaaaaacggtgctgaaatttataa

SEQ ID NO: 265364 - DNA, 75 bp, synthetic construct
  source 1..75: mol_type = other DNA
ggtactggcccgctgggacacgccgaaggtggtgaagggcgtgagctttatgcttcgcctgaccgtggcagcgga

SEQ ID NO: 265365 - DNA, 75 bp, synthetic construct
  source 1..75: mol_type = other DNA
gtcagtaaaacgctggaggaccagagcgccaccatacagcagatacagcgcgtgcagaaggacacaaatgatgac

SEQ ID NO: 265366 - DNA, 75 bp, synthetic construct
  source 1..75: mol_type = other DNA
agcatactgatatttactcctcatgccgtctgatagtgcggaaaaacggtgctgaaatttataaccgtaccgcgc

SEQ ID NO: 265367 - DNA, 75 bp, synthetic construct
  source 1..75: mol_type = other DNA
agtatcaatattaagccgggtcatgattattatttttacgttcgcagtgtgaacaccgtcggcaaatcgacattc

SEQ ID NO: 265368 - DNA, 75 bp, synthetic construct
  source 1..75: mol_type = other DNA
agtatcaggtactggcccgctgggacacgccgaaggtggtgaagggcgtaagtttcatgcttcgcctgaccgtgg

SEQ ID NO: 265369 - DNA, 75 bp, synthetic construct
  source 1..75: mol_type = other DNA
agttctggttctcggaaaagcggattaccgatatcaggcaggttgaaaccacagcccgctatcttggcacggggc

SEQ ID NO: 265370 - DNA, 75 bp, synthetic construct
  source 1..75: mol_type = other DNA
ggtaaataactggtatcccacagcaagcatcagcgatttgctggttgtggtgatgaagaaatccacagcaggtat

SEQ ID NO: 265371 - DNA, 75 bp, synthetic construct
  source 1..75: mol_type = other DNA
gtcaacctggtgggtaaatctgcttttgtggaagccagtggacgggcgagcaatgatgctgcgggctatctggaa

SEQ ID NO: 265372 - DNA, 75 bp, synthetic construct
  source 1..75: mol_type = other DNA
ccgctgacggatatggacggtaatcccgtgatacatggcgtgacagccgtctggcgtgccggggagcaggagcag

SEQ ID NO: 265373 - DNA, 75 bp, synthetic construct
  source 1..75: mol_type = other DNA
tgattaaaacggaactgctggaaacgcagaccgtggacttcagcgtgggtgcagaagggcttcgccatgtaccgg

SEQ ID NO: 265374 - DNA, 75 bp, synthetic construct
  source 1..75: mol_type = other DNA
ggaagcgtcactctggagtttaagattttccagaaaggcaatcagggggcaggcaatatcaccgactgtacggtg

SEQ ID NO: 265375 - DNA, 75 bp, synthetic construct
  source 1..75: mol_type = other DNA
ggcggaaatgaagaccaccatcacggaaacccggaacgaaatcacacagacggtcaataaaaagctggaagacca

SEQ ID NO: 265376 - DNA, 75 bp, synthetic construct
  source 1..75: mol_type = other DNA
gccagcgggcatgccagtaatgatgccgccggatatctggagatgttccgggaaaagataggaaaactgcatctg

SEQ ID NO: 265377 - DNA, 75 bp, synthetic construct
  source 1..75: mol_type = other DNA
ccctttaatatccggatggtcagagagacggcggacagtaccacagaccagctgcagaacagaacgctctggtcg

SEQ ID NO: 265378 - DNA, 75 bp, synthetic construct
  source 1..75: mol_type = other DNA
tattcatcctgtcgtcttgttgtaaaaaagaatggttctgtaatttatgacagatcgaccaccgatgtcacagcc

SEQ ID NO: 265379 - DNA, 75 bp, synthetic construct
  source 1..75: mol_type = other DNA
tcagttacagcgtaacggtaactgggtgacggaaaaggatgtcaccattaacggcaagaccacctcgcagtttct

SEQ ID NO: 265380 - DNA, 75 bp, synthetic construct
  source 1..75: mol_type = other DNA
ctcaacaacgtcacgattaatgagagctgtactattaaggggatgcttgatgctaaccaggtgcgtggtgatttt

SEQ ID NO: 265381 - DNA, 75 bp, synthetic construct
  source 1..75: mol_type = other DNA
tcatcggtgatagatatgccggcagggcggggtcatgtcaccctgacgtttaatgtgtcgtcggccggtgcgaac

SEQ ID NO: 265382 - DNA, 75 bp, synthetic construct
  source 1..75: mol_type = other DNA
gctgaaatttataaccgtaccgcgctggataatacgctgatttacagtggcgttgttgatatgcctgccggtcac

SEQ ID NO: 265383 - DNA, 75 bp, synthetic construct
  source 1..75: mol_type = other DNA
gtgaatgcgaactccgggacgctcaacaacgtcacgattaacgagaactgtcgggttctgggaaaactgtccgcg

SEQ ID NO: 265384 - DNA, 75 bp, synthetic construct
  source 1..75: mol_type = other DNA
ggttcgcggacggcggatatgaaggcagcgctggttgaaaaattcagagatgaaggcacgctaatgatttgtact

SEQ ID NO: 265385 - DNA, 75 bp, synthetic construct
  source 1..75: mol_type = other DNA
ttgcctgtggagagatggtgcagtcaggccgcccgttgaagcaggaacccaccgaaatgattcaggcgacagcct

SEQ ID NO: 265386 - DNA, 75 bp, synthetic construct
  source 1..75: mol_type = other DNA
atgaccaaaaaattagtagagggaatggtcattttataagtataatggttaataattacaggacgcactgtggag

SEQ ID NO: 265387 - DNA, 75 bp, synthetic construct
  source 1..75: mol_type = other DNA
ctgttaccgtcctttcatccagaaaccgatccgcagggtttaaagcattacgccaggcctatgaagaggcgctgc

SEQ ID NO: 265388 - DNA, 75 bp, synthetic construct
  source 1..75: mol_type = other DNA
cactcagctatgagcagcttttgcaggaaacggaagagctgattaaaaaatacgatttgaacaagaccggtgaac

SEQ ID NO: 265389 - DNA, 75 bp, synthetic construct
  source 1..75: mol_type = other DNA
cacgggaaagtgagcgtgtggaagccgactggcagcgtctctgcgacctcgttcatcagcgtaaggacggtggcg

SEQ ID NO: 265390 - DNA, 75 bp, synthetic construct
  source 1..75: mol_type = other DNA
gagtacaagcagctctggcgtggcggtcaggtgcttgctgttccgccagcgtacacaagccagcgttgcgcgtgc

SEQ ID NO: 265391 - DNA, 75 bp, synthetic construct
  source 1..75: mol_type = other DNA
gcgcgtcacgggcgatacggttatccggccacatgctgagggtgctgtccgggtgcagctccgggtcgggcaggc

SEQ ID NO: 265392 - DNA, 75 bp, synthetic construct
  source 1..75: mol_type = other DNA
ggtcacctgatgtatgggctggtgggggtgttgggctgattgcaggtctgatactccgctacgtactcgtcagag

SEQ ID NO: 265393 - DNA, 75 bp, synthetic construct
  source 1..75: mol_type = other DNA
cgttctctttccacgaacaattccctttacgccaggtctgggggatgacagtgctacgctaaaatcaaaggtatt

SEQ ID NO: 265394 - DNA, 75 bp, synthetic construct
  source 1..75: mol_type = other DNA
acatagaggaaacgactgacgtcgatattatccgccgcgcttatctggcgctgttaccgtcctttcatccagaaa

SEQ ID NO: 265395 - DNA, 75 bp, synthetic construct
  source 1..75: mol_type = other DNA
ggttacccctgaatttttcgccattttggccacagccgtggactggttttgtcggtccgataagcgcacagcttg

SEQ ID NO: 265396 - DNA, 75 bp, synthetic construct
  source 1..75: mol_type = other DNA
cgcgggcgctactttgctgacgggcaagtcgcctttttggggcgcaacgatacccaagtgaaggtgaatggttac

SEQ ID NO: 265397 - DNA, 75 bp, synthetic construct
  source 1..75: mol_type = other DNA
aggctggcgctgaaagggaagagaggaccagcagacgcgagtatatacgagcgtatcgaagccgactgggagcgt

SEQ ID NO: 265398 - DNA, 75 bp, synthetic construct
  source 1..75: mol_type = other DNA
tccaaaatagagtattgggaagagattttgcgtcgcagcaggcagatcaacatagattggcaagggagttagtgc

SEQ ID NO: 265399 - DNA, 75 bp, synthetic construct
  source 1..75: mol_type = other DNA
tatgatgtaaaaatggctagcagggctttagctgcattcactatgtatcagttaggatgtgtggatgataagtat

SEQ ID NO: 265400 - DNA, 75 bp, synthetic construct
  source 1..75: mol_type = other DNA
gcgccgctgccgccgtaccgggtgcttaccgggctggcagaccgcttcgggcggacgctgacgtaccggcgtgag

SEQ ID NO: 265401 - DNA, 75 bp, synthetic construct
  source 1..75: mol_type = other DNA
atagtgctgctaatgttaacagtaatgatttagctttagagttgtactggaaaatccaagaagtctctgcatggt

SEQ ID NO: 265402 - DNA, 75 bp, synthetic construct
  source 1..75: mol_type = other DNA
agttattttcaggcaagcgtcagaccaaaagatacgcctgaaagcaattttgtataccgtaaaatgggcaccatt

SEQ ID NO: 265403 - DNA, 75 bp, synthetic construct
  source 1..75: mol_type = other DNA
atgcggtgattttactcacccagcaagagttcaacggcccattttgtgaaccgcctgaacttatacctaatcact

SEQ ID NO: 265404 - DNA, 75 bp, synthetic construct
  source 1..75: mol_type = other DNA
acatagtgtacacaaataaatatttcaccgaatatcagcgggatgttttaccgctacgcaacagtattcttcggg

SEQ ID NO: 265405 - DNA, 75 bp, synthetic construct
  source 1..75: mol_type = other DNA
gtaggcgcttatggcagggaaataaacggctgtattcctgaagaatgccagaaaattaaacgttctgaatatgtg

SEQ ID NO: 265406 - DNA, 75 bp, synthetic construct
  source 1..75: mol_type = other DNA
aatatgttgggccattatacattcacgttgccagaggatattttaaaaggggaactgagagctctaaatttaaat

SEQ ID NO: 265407 - DNA, 75 bp, synthetic construct
  source 1..75: mol_type = other DNA
tcaaaatatgatgagcatatttctggtaaaaaaggacaccagatagcagaagagtttgttaaagctggcttactt

SEQ ID NO: 265408 - DNA, 75 bp, synthetic construct
  source 1..75: mol_type = other DNA
cctggtggaccccgtcgctctcccgtgatgccctgtgcgtggtgtttaaagtaggcgcttatggcagggaaataa

SEQ ID NO: 265409 - DNA, 75 bp, synthetic construct
  source 1..75: mol_type = other DNA
gtatggctgacacacgacccggcatacccggatgaacagccgactgcgccgctggcgcgctacacgtacacggcc

SEQ ID NO: 265410 - DNA, 75 bp, synthetic construct
  source 1..75: mol_type = other DNA
gggcagacttttgacaaatctgcatacccgaaacttgcagccgcttatccgtcaggcgtgatccctgatatgcgt

SEQ ID NO: 265411 - DNA, 75 bp, synthetic construct
  source 1..75: mol_type = other DNA
gctcatcctcctgcagagttttatccagtcggtgcaccaatcccgtggccatcagataccgttccgtctggctat

SEQ ID NO: 265412 - DNA, 75 bp, synthetic construct
  source 1..75: mol_type = other DNA
ttggcgaaggtgagttactcatcggctggagtggtacaagcggtgctcatgctccggcatttattcgttcacgac

SEQ ID NO: 265413 - DNA, 75 bp, synthetic construct
  source 1..75: mol_type = other DNA
ccgtaatgcggaattacttgccgggcagctcatcctgtcatcgcgcaccattggcgggctgggcgtgttccttgc

SEQ ID NO: 265414 - DNA, 75 bp, synthetic construct
  source 1..75: mol_type = other DNA
acaacgtgtcacggctgtaatgcgttatgccgttcagaacgattacatcgactctaatccggccagtgatatggc

SEQ ID NO: 265415 - DNA, 75 bp, synthetic construct
  source 1..75: mol_type = other DNA
gcatacccatagtgttagcggtacggctgcttcagccggtgcacatacccattcgatgacatttgtttcaggtgg

SEQ ID NO: 265416 - DNA, 75 bp, synthetic construct
  source 1..75: mol_type = other DNA
gattgctgatacagtggagtattcgtggtatcacacgggaaaacgttgcgcggccattactttttcaggtcagac

SEQ ID NO: 265417 - DNA, 75 bp, synthetic construct
  source 1..75: mol_type = other DNA
ttcaaacaactgcataatgctttaaaaatcaataacatgatctctctagaggtagatgctaacgttcataaacga

SEQ ID NO: 265418 - DNA, 75 bp, synthetic construct
  source 1..75: mol_type = other DNA
atcatcttcgacaacacaaagctgtcgaaagaaatctattcattgagttgctcagaaaactcaacaactatgtaa

SEQ ID NO: 265419 - DNA, 75 bp, synthetic construct
  source 1..75: mol_type = other DNA
ctggacgactgcacagtttatcgagtggctggattctcagggagcatttaaccatccatactggatgtgcaaggg

SEQ ID NO: 265420 - DNA, 75 bp, synthetic construct
  source 1..75: mol_type = other DNA
gattttgttccgatttaatttttttaaagaggtgtcgtctttatatttacttaaaggatacatagttggtggaag

SEQ ID NO: 265421 - DNA, 75 bp, synthetic construct
  source 1..75: mol_type = other DNA
tattcgcgacaccttctataacctgcgtcaaaacaagccgctatttatagttttgctgtcgttctttttctgcgt

SEQ ID NO: 265422 - DNA, 75 bp, synthetic construct
  source 1..75: mol_type = other DNA
atgaacagtcacgacgtcacccggacgcctcgctgaccgcaaaaggctttgttcaactcagtagcgccactaaca

SEQ ID NO: 265423 - DNA, 75 bp, synthetic construct
  source 1..75: mol_type = other DNA
cttgagctttatatcttccctcatatcggctcatccgacattcgccagctcaaaactagccatctattagctccg

SEQ ID NO: 265424 - DNA, 75 bp, synthetic construct
  source 1..75: mol_type = other DNA
agaaaaaattaataaggaactttggtcagaggttgataggtactacaacctcattgccaatgaaacctttccagc

SEQ ID NO: 265425 - DNA, 75 bp, synthetic construct
  source 1..75: mol_type = other DNA
attttttatctccatatggatatagggtttcttctataacaacagaaccatcccatttggcgatagttttaatgc

SEQ ID NO: 265426 - DNA, 75 bp, synthetic construct
  source 1..75: mol_type = other DNA
gtggtgggctgattatctggatgcgaatcgggagaagggggttagtccgtttgattttgggaaaaccaataataa

SEQ ID NO: 265427 - DNA, 75 bp, synthetic construct
  source 1..75: mol_type = other DNA
cccgtaaggagccattcggcatggtcgttgtggaagcttctgctagtggtgttccggtaatagccagtgatgtgg

SEQ ID NO: 265428 - DNA, 75 bp, synthetic construct
  source 1..75: mol_type = other DNA
ccgttcccctatgcattggtttagggttgggttcgaaagtcatccctccgcgtctgttatttgccggaatcatcc

SEQ ID NO: 265429 - DNA, 75 bp, synthetic construct
  source 1..75: mol_type = other DNA
ccggaatccgccatcgcaaatcgtatcagtcgagacacacttatgcctgctggtcgttaacagcaggagctaacc

SEQ ID NO: 265430 - DNA, 75 bp, synthetic construct
  source 1..75: mol_type = other DNA
aaagaaagtttgcagaaattgtctccaccaatgacgttaaaaaaatttacagtataagtaatgaactgcgggtaa

SEQ ID NO: 265431 - DNA, 75 bp, synthetic construct
  source 1..75: mol_type = other DNA
gttcaactcagtagcgccactaacagcgattctgaaacgctggctgcaacgccgaaagcggttaaggtcgcgtat

SEQ ID NO: 265432 - DNA, 75 bp, synthetic construct
  source 1..75: mol_type = other DNA
gaaattcctggaatggcgtaaaaatggcgaccaaattgagattagcaaccccagtaattatgtcgttcgtatgac

SEQ ID NO: 265433 - DNA, 75 bp, synthetic construct
  source 1..75: mol_type = other DNA
aagccagaaaaagcggatatagttaaatgtgttggagatgttggtattggctggtcatatgacggtaaaaaattc

SEQ ID NO: 265434 - DNA, 75 bp, synthetic construct
  source 1..75: mol_type = other DNA
gatatcccgttgattggtaacctgtttaaatcgacggcggataaaaaagaaaaacgtaacctgatggtgtttatc

SEQ ID NO: 265435 - DNA, 75 bp, synthetic construct
  source 1..75: mol_type = other DNA
cgttacatcttacaggtgaaagaacgggatggtcgggtacttaacgggggaagtgcacagacagagcagggactg

SEQ ID NO: 265436 - DNA, 75 bp, synthetic construct
  source 1..75: mol_type = other DNA
gaagggtatgtatccacttttgatgcagcaaagcagtgttacgttctcagtcgtaatccttatacaaaagtggat

SEQ ID NO: 265437 - DNA, 75 bp, synthetic construct
  source 1..75: mol_type = other DNA
gtcagcctgtccgggtacgccaaaaacagtatcaatatcaatatggacaatgtgccggatgatatcgattttgaa

SEQ ID NO: 265438 - DNA, 75 bp, synthetic construct
  source 1..75: mol_type = other DNA
ccacagggggaactctcagtacagggttttcattgtttgacagtgtttctatgagtgtgagtggaaactacagtc

SEQ ID NO: 265439 - DNA, 75 bp, synthetic construct
  source 1..75: mol_type = other DNA
atctgaaaggaacccgcaattacagcagtaacagtgtgggctatacccgtaccagtggtacgactttcaacagca

SEQ ID NO: 265440 - DNA, 75 bp, synthetic construct
  source 1..75: mol_type = other DNA
cggtacactctcgttgagtacctcctttgacggtgtctccgtttttctgaacggaacacattcgaggtatgtctg

SEQ ID NO: 265441 - DNA, 75 bp, synthetic construct
  source 1..75: mol_type = other DNA
acatttccggtatcgcctccactccttcacgtattaccgtaaaacagaacggatatacagtttattcaaaaatgg

SEQ ID NO: 265442 - DNA, 75 bp, synthetic construct
  source 1..75: mol_type = other DNA
aacacggtggtgtggctgtctgagtattcagaaaacagtatcaacatcaacatggataacgtgccagatgacatg

SEQ ID NO: 265443 - DNA, 75 bp, synthetic construct
  source 1..75: mol_type = other DNA
ttccccaagtgtatttgctgggtaaaacagaccccacgcgctgggattacggcgtgaatggcggacgtctgaaat

SEQ ID NO: 265444 - DNA, 75 bp, synthetic construct
  source 1..75: mol_type = other DNA
cggcagaaacaggcctgctctttaccagagaagctgcggatactgtcgggatcgtcagtgtaccgggcgttgagg

SEQ ID NO: 265445 - DNA, 75 bp, synthetic construct
  source 1..75: mol_type = other DNA
gacctcgttgtcactctggaagatgaaagcgggcataagactgaacggatttatccggtgacgacactgcccacg

SEQ ID NO: 265446 - DNA, 75 bp, synthetic construct
  source 1..75: mol_type = other DNA
agcagcagtgtgggatataaccgttacggcggaacaacatttaactccggactttctgcaagcgtgacagatcgt

SEQ ID NO: 265447 - DNA, 75 bp, synthetic construct
  source 1..75: mol_type = other DNA
atcaaacaaacaggggataagtcttttaatattacactggttggtagagataaatgttcacgaaaaggaattcct

SEQ ID NO: 265448 - DNA, 75 bp, synthetic construct
  source 1..75: mol_type = other DNA
cggccattttatcaaaaaatatagcagattatactcgttctcatcatattgataaatatttagattcggtggctc

SEQ ID NO: 265449 - DNA, 75 bp, synthetic construct
  source 1..75: mol_type = other DNA
ggacatcatcagtctggcggttggagcattccttctcacataagtgaagcaatgggtctatcaggaaaatgcatg

SEQ ID NO: 265450 - DNA, 75 bp, synthetic construct
  source 1..75: mol_type = other DNA
cgctaaaaccgaacggcagatacaggaagcccaggagcgaatcagcgcacttcaggaagaaatggcggaaacgct

SEQ ID NO: 265451 - DNA, 75 bp, synthetic construct
  source 1..75: mol_type = other DNA
caccaaataacacctatctaaaatataatcccaaagctaaagggaatggagttacaattatcaggcaagggagta

SEQ ID NO: 265452 - DNA, 75 bp, synthetic construct
  source 1..75: mol_type = other DNA
atctggttcaaccgcaggagatggaaatcgttctataccttgacccgatgctctactggtttaatggtcattttg

SEQ ID NO: 265453 - DNA, 75 bp, synthetic construct
  source 1..75: mol_type = other DNA
ttaactggcaggaagaacgccagattctgagctttagctatcagcgtcacgacggtgacgcccgccacaccgcca

SEQ ID NO: 265454 - DNA, 75 bp, synthetic construct
  source 1..75: mol_type = other DNA
cacaatcagccaggcggtcggtttttagtggcttttaaccgccgtgggtatttctcgacaaaagcctcaagggca

SEQ ID NO: 265455 - DNA, 75 bp, synthetic construct
  source 1..75: mol_type = other DNA
aggattaccacgcctttcgtttttgtgtgttgacacgttaactacacctcatgtaatgtatttatgtgtagtgac

SEQ ID NO: 265456 - DNA, 75 bp, synthetic construct
  source 1..75: mol_type = other DNA
ctcaagatgttcgcgagttactctcaaagagtttggatggtgccacttcattaacattgcatttaaaaaaatcag

SEQ ID NO: 265457 - DNA, 75 bp, synthetic construct
  source 1..75: mol_type = other DNA
gctggtctttgatactgaccccgctaacgacaaaggaggcaacagtgccggaactgaacaacagcgtcagcaggc

SEQ ID NO: 265458 - DNA, 75 bp, synthetic construct
  source 1..75: mol_type = other DNA
aatatcaaatacatctgaaaaagaattggctaacttaaaaactgaacaaattattatggcgtatggtgatttata

SEQ ID NO: 265459 - DNA, 75 bp, synthetic construct
  source 1..75: mol_type = other DNA
ttgcttttaatggcccatttggcgacgcaatggctgagcagcttaaaccacttgctgagtcgattaatcaggaac

SEQ ID NO: 265460 - DNA, 75 bp, synthetic construct
  source 1..75: mol_type = other DNA
cccataccggtgatgcagggctgggcctagcaacaaccggcaacggcatcaaagtggtggatgcgattaacggag

SEQ ID NO: 265461 - DNA, 75 bp, synthetic construct
  source 1..75: mol_type = other DNA
gctgggttcgctggaaaccggtctgcccttcagtatcactgacaatctgatgctggagccgcaactgcagtacac

SEQ ID NO: 265462 - DNA, 75 bp, synthetic construct
  source 1..75: mol_type = other DNA
tggcattactgcatattcctcatgatctaccatcctatcggcaggtcatggaagggcaatttaagatctcgcgca

SEQ ID NO: 265463 - DNA, 75 bp, synthetic construct
  source 1..75: mol_type = other DNA
aaagtgaaagctcatctggttcattcgtctcctggcaacttcttgtctggcaggtgatgttcgctatcggtgtcg

SEQ ID NO: 265464 - DNA, 75 bp, synthetic construct
  source 1..75: mol_type = other DNA
attgaccatgcgcatatctgcatcgaagcgaccggcacctatatggaacctgtcgctgagtgcctttacgatgct

SEQ ID NO: 265465 - DNA, 75 bp, synthetic construct
  source 1..75: mol_type = other DNA
gacgatcgctctgcagcaggcagcgtgcgtgacacggtgtacagcatcggcggctatctgacagcagttcatgat

SEQ ID NO: 265466 - DNA, 75 bp, synthetic construct
  source 1..75: mol_type = other DNA
aatgaaggtatttttgattttctatatcgcctgcgtagtgattacctgggcggtatatggtcggcattctaaaaa

SEQ ID NO: 265467 - DNA, 75 bp, synthetic construct
  source 1..75: mol_type = other DNA
ctattccagtaagtccaatcggagcgcggattaaattcattcgtagcgagattattgagttttacaaaaacaaag

SEQ ID NO: 265468 - DNA, 75 bp, synthetic construct
  source 1..75: mol_type = other DNA
atgcagcatgaacggtataaagatgaattgcgacagaaaatgggaaaacccgacgttacagattcaaatttgaaa

SEQ ID NO: 265469 - DNA, 75 bp, synthetic construct
  source 1..75: mol_type = other DNA
actctaataacgttgttccgctaataagaacgctggaagccaagccagtggaaatccccttatggatttatgaga

SEQ ID NO: 265470 - DNA, 75 bp, synthetic construct
  source 1..75: mol_type = other DNA
attaattgacttaaaccttacgcttggcagtaactggaatatcgatactccaaacaaattattctctgaatatgt

SEQ ID NO: 265471 - DNA, 75 bp, synthetic construct
  source 1..75: mol_type = other DNA
aatgtgtccactggtcagatggtcggggggactgctgaatccaccaccatcaacaacaatggccgacaggttatc

SEQ ID NO: 265472 - DNA, 75 bp, synthetic construct
  source 1..75: mol_type = other DNA
cgggtaatttgtcgcgataaacaactcatctttgaagaagcgccacaagcctataaatcggctgaaagcgtggtg

SEQ ID NO: 265473 - DNA, 75 bp, synthetic construct
  source 1..75: mol_type = other DNA
tttgctgtccgtgatgcgaccctgtccacagcactgagttccgttcggggtgacctgaaactggggaaatcctgg

SEQ ID NO: 265474 - DNA, 75 bp, synthetic construct
  source 1..75: mol_type = other DNA
agtatgacaataaggaagtgaagcgtggtcacagtatcagcgcgaaatatgccaagagttttgcaaatacaacca

SEQ ID NO: 265475 - DNA, 75 bp, synthetic construct
  source 1..75: mol_type = other DNA
tgtggattttaactacggaaatcaggcgctgattttcagtgttccacagaccaatattatcagccagactgaccc

SEQ ID NO: 265476 - DNA, 75 bp, synthetic construct
  source 1..75: mol_type = other DNA
taacagcaacgaactggacaaggcgtttcattctgataccggtctgttctggttgggtagcttggactatggctt

SEQ ID NO: 265477 - DNA, 75 bp, synthetic construct
  source 1..75: mol_type = other DNA
tatctctactggccctgagtatatggtattctcactccagcttggctgatgaacttaatctggattttatacaga

SEQ ID NO: 265478 - DNA, 75 bp, synthetic construct
  source 1..75: mol_type = other DNA
gatgatgaaacaggacgcttatgatgaagcctttgacaaggaagaacagtgttatgtactgacccgtaatcccca

SEQ ID NO: 265479 - DNA, 75 bp, synthetic construct
  source 1..75: mol_type = other DNA
ttacacttatgatatccataattaactactctgtgcatatggatgcgtttttatatatgcaaaaacaaaagaaaa

SEQ ID NO: 265480 - DNA, 75 bp, synthetic construct
  source 1..75: mol_type = other DNA
tgtatgacggggtgggggggcgttttcaggacaaacccgaccccgccgggcaccgaccgcctcctcaaattttta

SEQ ID NO: 265481 - DNA, 75 bp, synthetic construct
  source 1..75: mol_type = other DNA
gctgaactgtttgcactggcaggtctggatgcacaacatctgcaactgttggttcatagcggctcgcggggggtg

SEQ ID NO: 265482 - DNA, 75 bp, synthetic construct
  source 1..75: mol_type = other DNA
atatttccgggattgctcccaccccttctcgtattactgttaaacagaacggatatacggtgtattcaaaaatga

SEQ ID NO: 265483 - DNA, 75 bp, synthetic construct
  source 1..75: mol_type = other DNA
aggtgacttgttactgggtaaatctcagacgcgtactgaactgttttctgattttaatttttatggtgcggcgct

SEQ ID NO: 265484 - DNA, 75 bp, synthetic construct
  source 1..75: mol_type = other DNA
ctctgcttcaggtagttatgcatttgacagtattcagactaactttgggatttccaaaagtcactccgagaccgg

SEQ ID NO: 265485 - DNA, 75 bp, synthetic construct
  source 1..75: mol_type = other DNA
aaagttaaattcattgatgctaaatacaatacgcaatttagtttaaattatgaattaaaaaaatcatttgtttgt

SEQ ID NO: 265486 - DNA, 75 bp, synthetic construct
  source 1..75: mol_type = other DNA
caatgtctgtgagttcagacacaggggtgagccatttcagtgatacgtctcttcgccagattgaaggtgtttatg

SEQ ID NO: 265487 - DNA, 75 bp, synthetic construct
  source 1..75: mol_type = other DNA
cggattactgcagtcaatgtttgatggtgaaggtccggggtggttgccgacgatgtcagtaagttcagagacagg

SEQ ID NO: 265488 - DNA, 75 bp, synthetic construct
  source 1..75: mol_type = other DNA
gaatgtcaaacattctccggtttcacgtagtggagatacggtggttcctgtttctttgcctgccatgaatcttat

SEQ ID NO: 265489 - DNA, 75 bp, synthetic construct
  source 1..75: mol_type = other DNA
gcgaggtcgttttgtagaaggtctgggtggcgcgcaattcgctgaacgtctgactattgaccgattgcgcgatct

SEQ ID NO: 265490 - DNA, 75 bp, synthetic construct
  source 1..75: mol_type = other DNA
gctctgccggtggttaccatgggcgggctggcactggccggaagctggcttcatcagcatgtcagcgaacgtcgc

SEQ ID NO: 265491 - DNA, 75 bp, synthetic construct
  source 1..75: mol_type = other DNA
cagattagtggtgataaggatctgctttttccgggtgatcatgacgcaactaaggttatgagtgaaaacacagta

SEQ ID NO: 265492 - DNA, 75 bp, synthetic construct
  source 1..75: mol_type = other DNA
ttctcatcacactcaagcattcatttgcaatccgccattaatgattacataggaatatattctttcactcaatct

SEQ ID NO: 265493 - DNA, 75 bp, synthetic construct
  source 1..75: mol_type = other DNA
accgcgagttcctgtgcatggggttgcagcaggaatggaacgggaggcatcagcgcagtatggagtcccggctga

SEQ ID NO: 265494 - DNA, 75 bp, synthetic construct
  source 1..75: mol_type = other DNA
cttgagctttatatcttccctcatatcggctcgtccgacattcgccagctcaaaactagccacctgttagccccg

SEQ ID NO: 265495 - DNA, 75 bp, synthetic construct
  source 1..75: mol_type = other DNA
acaatagctggcagtggtgaattacgtcttaacggcacaatacctgaacattggcgagtatcgttaccagtaagt

SEQ ID NO: 265496 - DNA, 75 bp, synthetic construct
  source 1..75: mol_type = other DNA
agttgacggtgtgtatggtgctcaaacaatagctggcagtggtgaattacgtcttaacggcacaatacctgaaca

SEQ ID NO: 265497 - DNA, 75 bp, synthetic construct
  source 1..75: mol_type = other DNA
tccgatgcctgtaaatggggggggggacgtccgatggaaagtggtaactgattacggtggtattagtgaaacatt

SEQ ID NO: 265498 - DNA, 75 bp, synthetic construct
  source 1..75: mol_type = other DNA
gtacagaaagacggacggagagtggagtttacggccacttccgtatctgacctgaaaaatacattgcggagctgg

SEQ ID NO: 265499 - DNA, 75 bp, synthetic construct
  source 1..75: mol_type = other DNA
agtaataaactcgaacatacgctgcacaatttaccggcaggtgactgggcggcgggggagcgcggtattgcctgt

SEQ ID NO: 265500 - DNA, 75 bp, synthetic construct
  source 1..75: mol_type = other DNA
aagacttatttggggttaggataatattatattttcctgatgatttatttattgctcaaaaaacactggagaaat

SEQ ID NO: 265501 - DNA, 75 bp, synthetic construct
  source 1..75: mol_type = other DNA
gatggtacagtggtgggctgattatcttgatgcttgtcgctacggttccattacaccatatgaatactcgaaatt

SEQ ID NO: 265502 - DNA, 75 bp, synthetic construct
  source 1..75: mol_type = other DNA
ctcttctttatcttctccagccggtccccgttctgtttcctcttctcaggttttccccgatacgctgcccgccgg

SEQ ID NO: 265503 - DNA, 75 bp, synthetic construct
  source 1..75: mol_type = other DNA
tcctggcactgaaagatgttgcaccatcaccgagtgatgtccttctgattgccctgagtgcggagccggtgctga

SEQ ID NO: 265504 - DNA, 75 bp, synthetic construct
  source 1..75: mol_type = other DNA
aaaaatgccttattggattaatttccgaaaaacaacaatctatgacatcggtcacacgccagcaaacatgctaca

SEQ ID NO: 265505 - DNA, 75 bp, synthetic construct
  source 1..75: mol_type = other DNA
attctgctggcagctgatgtgcgcctggcgctgcggcgcagcattacccatccgttcgttcgcaagcaggagctg

SEQ ID NO: 265506 - DNA, 75 bp, synthetic construct
  source 1..75: mol_type = other DNA
cagtagcgcggtgaccaaagatcatattctgctggcagctgatgtgcgcctggcgctgcggcgcagcattaccca

SEQ ID NO: 265507 - DNA, 75 bp, synthetic construct
  source 1..75: mol_type = other DNA
gattagaaatcatagcttcagaaaagaaagaaattaaagaaattttaaaaaataaaaaatgcaattcaaacataa

SEQ ID NO: 265508 - DNA, 75 bp, synthetic construct
  source 1..75: mol_type = other DNA
tggcatatatactcgccattacaatggtaattcaatcttatagtaaggttttctttgcatctgatactatctttc

SEQ ID NO: 265509 - DNA, 75 bp, synthetic construct
  source 1..75: mol_type = other DNA
gacagcgcaacgctgaaggctttttggcagatccagctgccgcccacgccggttttacgcctggaaacgatgtcg

SEQ ID NO: 265510 - DNA, 75 bp, synthetic construct
  source 1..75: mol_type = other DNA
atgtgcagttcagccgcatttattattctccccatccttattggctttactgctgctcgtgaatttggtggaaat

SEQ ID NO: 265511 - DNA, 75 bp, synthetic construct
  source 1..75: mol_type = other DNA
aagtccacaccagaatggtgaaagagattctaaaagccgtcgccagagccaataatcacccttatcagtccgtat

SEQ ID NO: 265512 - DNA, 75 bp, synthetic construct
  source 1..75: mol_type = other DNA
ttgttgctggtgtagcaatgattctttccaataacgtgtttgctgatgaaggtcacggtattgttaaatttaaag

SEQ ID NO: 265513 - DNA, 75 bp, synthetic construct
  source 1..75: mol_type = other DNA
tccgtattgaagcaataatcggactttcctacagaaaagataaaagggttttatctgttttatgcgatgagttaa

SEQ ID NO: 265514 - DNA, 75 bp, synthetic construct
  source 1..75: mol_type = other DNA
tcgaaacgctcaaggcgaaccccgacaagaagtttactgctcgggatttagccaaagaatttgtgcttcgatggc

SEQ ID NO: 265515 - DNA, 75 bp, synthetic construct
  source 1..75: mol_type = other DNA
cggatttgaacgttacgccgattatgtcgggtattcacaaactaacggcctgagtggtcatactgccgatttgga

SEQ ID NO: 265516 - DNA, 75 bp, synthetic construct
  source 1..75: mol_type = other DNA
tcggttatctcgccaccaatggcctaaataatttagtcccagacttccagattttagagaatgctgatcactatg

SEQ ID NO: 265517 - DNA, 75 bp, synthetic construct
  source 1..75: mol_type = other DNA
tcaaaaagtgggacaggaaagtttcatcagattattggcgcactgccagagtctgagcgatctccagcaattgca

SEQ ID NO: 265518 - DNA, 75 bp, synthetic construct
  source 1..75: mol_type = other DNA
tattgctccaagggtttcacaggctcttggtggtgcagcactgaattctgctaatgatgtttccaggatggcaaa

SEQ ID NO: 265519 - DNA, 75 bp, synthetic construct
  source 1..75: mol_type = other DNA
gatgagtattttgctggtcaggctgttcagcaacaaacagttaatcaggccaataatgaaccagcacgtgaagaa

SEQ ID NO: 265520 - DNA, 75 bp, synthetic construct
  source 1..75: mol_type = other DNA
tgaatatattagcaatttaatttcctcaactgatactatgtatcaggcacttaaaaatcatgcagaaagaatcaa

SEQ ID NO: 265521 - DNA, 75 bp, synthetic construct
  source 1..75: mol_type = other DNA
aatattccggtagccgttgataatacctggggctctgcttggttatacaacccgctggagctgggggcggatatt

SEQ ID NO: 265522 - DNA, 75 bp, synthetic construct
  source 1..75: mol_type = other DNA
tgcttaaaaaaagaacaaatggtagtgtccgctattgccagtacacctcagggtttaagccatacagaactagcc

SEQ ID NO: 265523 - DNA, 75 bp, synthetic construct
  source 1..75: mol_type = other DNA
gatccacatggaggaaagtggtatagtgaatttgtatcattaccaatgacaacttatggaaaagtaatattagtt

SEQ ID NO: 265524 - DNA, 75 bp, synthetic construct
  source 1..75: mol_type = other DNA
gggcgaggcaatgccagtcaccgtgacggtgaaagacagcgccgggaaacctgtgccaaatgtggcgtttactct

SEQ ID NO: 265525 - DNA, 75 bp, synthetic construct
  source 1..75: mol_type = other DNA
cgcgttaaccgacgctgatggcagcaaaattctgaccatcactcgtccggatacccatggcaccaaaacagcgct

SEQ ID NO: 265526 - DNA, 75 bp, synthetic construct
  source 1..75: mol_type = other DNA
ggtgcttaatgacggcggcacactcgatgtgcgggagaaaggcagcgcaacggggatacagcagagtagccaggg

SEQ ID NO: 265527 - DNA, 75 bp, synthetic construct
  source 1..75: mol_type = other DNA
tttgggcatctgaagtggtcaacaaaaactggccaccgagttagagtttttccagtatcgattttccgattcgtt

SEQ ID NO: 265528 - DNA, 75 bp, synthetic construct
  source 1..75: mol_type = other DNA
cagtcacttcgctggaggacaatactggaaaatggtatctgactcaggtgaaagctttaaagtttttgtgaaagc

SEQ ID NO: 265529 - DNA, 75 bp, synthetic construct
  source 1..75: mol_type = other DNA
atgtacaggcaagaatatcagatggttgtcactgtaccaactgctgacgcgaacgatcccaactggccaaataaa

SEQ ID NO: 265530 - DNA, 75 bp, synthetic construct
  source 1..75: mol_type = other DNA
gcttgaggaagccaataaacgtgtattacctaaagaatggcgcaccaatcctttgcaggaagctagatattcctt

SEQ ID NO: 265531 - DNA, 75 bp, synthetic construct
  source 1..75: mol_type = other DNA
gagaaaatgtgtgaagaatatatgaagggaggaaatcaaaatttccacacattaagaaaattgtgggattttttg

SEQ ID NO: 265532 - DNA, 75 bp, synthetic construct
  source 1..75: mol_type = other DNA
ctgcaaagtttttttgagaaggtattgaaactaatcaaggatggcaaaaatactgaagcccaaaatttattagcc

SEQ ID NO: 265533 - DNA, 75 bp, synthetic construct
  source 1..75: mol_type = other DNA
gcggtactcaccagtacggcactttttccatttccggcaatttagcgaccaatatgttgctggaaaatggcggta

SEQ ID NO: 265534 - DNA, 75 bp, synthetic construct
  source 1..75: mol_type = other DNA
gctaagtcactcagaacgtaataatgtacgtgctgcttatattcatacatctgagcatttagacgaaaggcgttt

SEQ ID NO: 265535 - DNA, 75 bp, synthetic construct
  source 1..75: mol_type = other DNA
aattgccttcaacggcaccaacagctatcaggaactgggtaatgactccaacttattgatagtgttttatgttca

SEQ ID NO: 265536 - DNA, 75 bp, synthetic construct
  source 1..75: mol_type = other DNA
ctacaaaatggctgatggtggcggtttgtatcttgaggtttcggccaaaggttccaaatactggcgaatgaaata

SEQ ID NO: 265537 - DNA, 75 bp, synthetic construct
  source 1..75: mol_type = other DNA
taaactgagcggcattgaacgtgctggaaccggcgcggaaggatttcgctatgaccgccacggcaacctgctggc

SEQ ID NO: 265538 - DNA, 75 bp, synthetic construct
  source 1..75: mol_type = other DNA
agcggtaagggaagcattcagttcgcggggcaccactggaagcatggtccgcaacaaaactcgcgctgcatcgcg

SEQ ID NO: 265539 - DNA, 75 bp, synthetic construct
  source 1..75: mol_type = other DNA
acgggccattgaataccactaccccgacgaacacaccgtcatccgctgtatcctgccaccggaagatgaacgcga

SEQ ID NO: 265540 - DNA, 75 bp, synthetic construct
  source 1..75: mol_type = other DNA
agaaaatccgcttcacgtacctgtgggacggcgacagtattgcggaaatccgggaataccgcgatgataaactgt

SEQ ID NO: 265541 - DNA, 75 bp, synthetic construct
  source 1..75: mol_type = other DNA
cagacggcgcggagtggcagtaccgctatgatgagcgcggcctgctcagcaacatcaccgaccctgccggacaga

SEQ ID NO: 265542 - DNA, 75 bp, synthetic construct
  source 1..75: mol_type = other DNA
ctggggggaataacgatagccagctatcttctgccgcccgcgggactgctgggaaaactggggaatctggcgaaa

SEQ ID NO: 265543 - DNA, 75 bp, synthetic construct
  source 1..75: mol_type = other DNA
gccagggccgccgtcacccttccccctcctcccctgactgaagcaataccctctccaccacagggggaaccctca

SEQ ID NO: 265544 - DNA, 75 bp, synthetic construct
  source 1..75: mol_type = other DNA
acaactgtggccgggtgacggaagagcgtgactggggcggcgtggtctggcgttaccgctatgacgccgatggcc

SEQ ID NO: 265545 - DNA, 75 bp, synthetic construct
  source 1..75: mol_type = other DNA
taacattacgtgggcctcttttaacctcagcgaacaggaccttgacgaatactacaaccaattctccaatgccgt

SEQ ID NO: 265546 - DNA, 75 bp, synthetic construct
  source 1..75: mol_type = other DNA
cgccgccagtgccggtggccttgccgttggcatactgggggcactgaaagccgcaggcggactgtggtttggctg

SEQ ID NO: 265547 - DNA, 75 bp, synthetic construct
  source 1..75: mol_type = other DNA
gccactggcgaaggcctgggggaacgctgttatcaccctgacggacagcaatgccagttttatggatcgcttatg

SEQ ID NO: 265548 - DNA, 75 bp, synthetic construct
  source 1..75: mol_type = other DNA
acttgctggttgccccagagctctggcaagggcaatgaaacgggctaacagaaacctagctaagagtgccggata

SEQ ID NO: 265549 - DNA, 75 bp, synthetic construct
  source 1..75: mol_type = other DNA
cttaaaatcaccatcatacactaaatcagtaagttggcagcattacccttcgcatctactgaaaagccgtattct

SEQ ID NO: 265550 - DNA, 75 bp, synthetic construct
  source 1..75: mol_type = other DNA
gaaatttaacatctattgaaacaattacagcgaatgacagactaggaataaggcttagggaggatggctttgttt

SEQ ID NO: 265551 - DNA, 75 bp, synthetic construct
  source 1..75: mol_type = other DNA
taaattccctgaggacattgtaattcccaaattaatgtctcaggcaattaatgaactccatgcaaggtttggatg

SEQ ID NO: 265552 - DNA, 75 bp, synthetic construct
  source 1..75: mol_type = other DNA
gcgcacaggcggcagcagactcacaaactgcatcggcaaactccgcgacagcagccaaaaaatcagaaaccaacg

SEQ ID NO: 265553 - DNA, 75 bp, synthetic construct
  source 1..75: mol_type = other DNA
caatatgttcgaaagcggtcagttgccgattgcaacttatggttgggtagttgatcaggtgtatgcggcgttaaa

SEQ ID NO: 265554 - DNA, 75 bp, synthetic construct
  source 1..75: mol_type = other DNA
aacggcgggggctatggtgatgtgcagctgttcaatgcggaaacggtgaagatgttcaccaccagctctaaggaa

SEQ ID NO: 265555 - DNA, 75 bp, synthetic construct
  source 1..75: mol_type = other DNA
caatcgtgggaggttcgccggacgtctttattggcggtgagcaggtgacctatctggatatccagccggagttcc

SEQ ID NO: 265556 - DNA, 75 bp, synthetic construct
  source 1..75: mol_type = other DNA
gtgacgcggacgaatcacgcggtgagcgacccgacgggccgcccgctgatgctctttaacagtgaaggtaaaacc

SEQ ID NO: 265557 - DNA, 75 bp, synthetic construct
  source 1..75: mol_type = other DNA
ttgcctgggatgacccccgtgctttaggcgcaagaaaaattctggaaaaatatggtatacacattgattccgcag

SEQ ID NO: 265558 - DNA, 75 bp, synthetic construct
  source 1..75: mol_type = other DNA
gtaatttaatttcaattgaaaccattacaagtacagacagaataggaatccgttttaaagaatctggttttaatg

SEQ ID NO: 265559 - DNA, 75 bp, synthetic construct
  source 1..75: mol_type = other DNA
cagatgagtggtgataaagagctgctttttccgggcgatcatgacccaaccaaggttatgagtgaaaacacggta

SEQ ID NO: 265560 - DNA, 75 bp, synthetic construct
  source 1..75: mol_type = other DNA
aagctccatcaccaaaccagtatcagagtttgtttttgccgggcgcaacgataagaagaagccaatctgcgagaa

SEQ ID NO: 265561 - DNA, 75 bp, synthetic construct
  source 1..75: mol_type = other DNA
agcgtctgaacaatcttgaggctttcgtgcaatcacgtcttgagagcgatgctgccacaactgagtgtctgtatg

SEQ ID NO: 265562 - DNA, 75 bp, synthetic construct
  source 1..75: mol_type = other DNA
ctgtatgaagaattactgattggtgattcagttcaaggtacctctcatccacgaattatgacggccaacgaagtg

SEQ ID NO: 265563 - DNA, 75 bp, synthetic construct
  source 1..75: mol_type = other DNA
gtattcagaacctgatgaaggcgataactatttaataaaagatggcgctaattttgtgatccagttcaatggagt

SEQ ID NO: 265564 - DNA, 75 bp, synthetic construct
  source 1..75: mol_type = other DNA
ctcttgttatcagattgccgttcggctggaggaaaactcgcgcggcggttcccgctttttgcatcagcaggtaaa

SEQ ID NO: 265565 - DNA, 75 bp, synthetic construct
  source 1..75: mol_type = other DNA
cgaccttgaagcctggggattgatcaaggtaacgcgcggcaagaaacgtaaggacgggcaaggcaactcaccgaa

SEQ ID NO: 265566 - DNA, 75 bp, synthetic construct
  source 1..75: mol_type = other DNA
aactacgatgaccacaataagccaaagtgaaatagagtattttccagtaccagtaccaagtctgaaagtacaaaa

SEQ ID NO: 265567 - DNA, 75 bp, synthetic construct
  source 1..75: mol_type = other DNA
gactcggttgtgagttttatatccgcatacttccctatatttcttgttggtgctgtttttggaacattaatgaat

SEQ ID NO: 265568 - DNA, 75 bp, synthetic construct
  source 1..75: mol_type = other DNA
tcgagcctggggggacactcggggcgattatgaattgctggcagccgccaaagatgcccactggcggcacttcca

SEQ ID NO: 265569 - DNA, 75 bp, synthetic construct
  source 1..75: mol_type = other DNA
tgatgagagcatcaggcctattggccgtggcaacggaagtttctaacaatgttgaggtgacactctgctcagcct

SEQ ID NO: 265570 - DNA, 75 bp, synthetic construct
  source 1..75: mol_type = other DNA
taaaacgtgccggactccgccatcgaaaatcatatcagtcgagacatacttatgcctgctggtcgctgacagctg

SEQ ID NO: 265571 - DNA, 75 bp, synthetic construct
  source 1..75: mol_type = other DNA
tcttgagactggaaaagttactttggcatttatacctatactgatagttattataggaaatgcatttttaacata

SEQ ID NO: 265572 - DNA, 75 bp, synthetic construct
  source 1..75: mol_type = other DNA
aggtacagcaattctttcgggaatagtgggctcaacatcaggaggggtgggattagttatggtaacgtttggtca

SEQ ID NO: 265573 - DNA, 75 bp, synthetic construct
  source 1..75: mol_type = other DNA
gacccaatcgatcttgccagggcgattcgcaaaggtccggatatgcctactgttcagggtggcaactatccggta

SEQ ID NO: 265574 - DNA, 75 bp, synthetic construct
  source 1..75: mol_type = other DNA
ctgtcggggatattccgccaggatgaacggcgtctgggcatagagtacgaccaccacaaccggccggaaacactc

SEQ ID NO: 265575 - DNA, 75 bp, synthetic construct
  source 1..75: mol_type = other DNA
aagctgctgggggcaaagctcggcgcgttgctgggaaaaacaggtaagtcgttaaaaagtattgccaataaagtc

SEQ ID NO: 265576 - DNA, 75 bp, synthetic construct
  source 1..75: mol_type = other DNA
cgatgaacacaccgttatccgctgtatcctgccaccggaagatgaacgcgacagacaccccggtgaatccctgct

SEQ ID NO: 265577 - DNA, 75 bp, synthetic construct
  source 1..75: mol_type = other DNA
actgacagaagtcatcaacccgcagggtgagtcataccgttatcttctcgacaactgtgggcgggtgacggaaga

SEQ ID NO: 265578 - DNA, 75 bp, synthetic construct
  source 1..75: mol_type = other DNA
ataacgtcctgaaaaagtttatcaaagatccggttgacccggtaaccggcgcgtactgcgacgaacgtaccgact

SEQ ID NO: 265579 - DNA, 75 bp, synthetic construct
  source 1..75: mol_type = other DNA
tctattccggcatcatgacaggcctgcagctactgcgccatttccagcggatcgccctcccggcgtaccacccca

SEQ ID NO: 265580 - DNA, 75 bp, synthetic construct
  source 1..75: mol_type = other DNA
ccaaacaggtgatgatgccaatttcaaactggctcatgaatggcaacgagagttaacaataagtcactggttcaa

SEQ ID NO: 265581 - DNA, 75 bp, synthetic construct
  source 1..75: mol_type = other DNA
aaccactcgtggcggtgattttgtcatggatatcggccaagatatatccataggttacctgaaccataccggcac

SEQ ID NO: 265582 - DNA, 75 bp, synthetic construct
  source 1..75: mol_type = other DNA
gtcgttatatacaaaaggttaattgagtctgcatacttattttcccaatccgagtcagacgaggataaaaactta

SEQ ID NO: 265583 - DNA, 75 bp, synthetic construct
  source 1..75: mol_type = other DNA
ggagggctattacaacgccacgctggactatggtgacggctgcaccaccgtgacggacggcaagggcattcaccg

SEQ ID NO: 265584 - DNA, 75 bp, synthetic construct
  source 1..75: mol_type = other DNA
acatttgaaactcggtcacggatattgactgaaattcgtcgttacatggcggaacatgattttatggaagttgaa

SEQ ID NO: 265585 - DNA, 75 bp, synthetic construct
  source 1..75: mol_type = other DNA
ttgttccagtgatatactccccgaatcaacgttttctgatatcaaaaaacttgatacaggagatataattggtat

SEQ ID NO: 265586 - DNA, 75 bp, synthetic construct
  source 1..75: mol_type = other DNA
atctctctcggctaacggccacaatactcgaccgagcattggatcgccaggcaagtctgagtaagagcattcgca

SEQ ID NO: 265587 - DNA, 75 bp, synthetic construct
  source 1..75: mol_type = other DNA
cgaatcagatggggtaaccgtcacacggctggcattgggtgaatatctgattgagggttgcgtaggtctgaatgc

SEQ ID NO: 265588 - DNA, 75 bp, synthetic construct
  source 1..75: mol_type = other DNA
gcaggtaacacaggctgggctgaggcatggtcgtcgctgaacacgaccgtcgattcaagtggtttcatcaaaaaa

SEQ ID NO: 265589 - DNA, 75 bp, synthetic construct
  source 1..75: mol_type = other DNA
tagtcaccattgtggcgatgggttgcttctacagtctgaacgagaagatgtacgtccgcattgttgaagaaatag

SEQ ID NO: 265590 - DNA, 75 bp, synthetic construct
  source 1..75: mol_type = other DNA
acgcggtaaatttatggccaaacaggataccttgctatcactggcgaatatccatgcggtaaacgaaaccgggca

SEQ ID NO: 265591 - DNA, 75 bp, synthetic construct
  source 1..75: mol_type = other DNA
aagttcagttgacattgaccgtgtaaaccatcaggtggtgaatgtagaagcggtgaatttccgactgccggggta

SEQ ID NO: 265592 - DNA, 75 bp, synthetic construct
  source 1..75: mol_type = other DNA
gctgctaatattagcaagaatagttggtatgtagctaatagtttcgatcctgattttgtcgcaaactataacgaa

SEQ ID NO: 265593 - DNA, 75 bp, synthetic construct
  source 1..75: mol_type = other DNA
tgaacttcgagaaccccctattcacctattcagctttttatgctgctggtattctgaataatgcagttatctcaa

SEQ ID NO: 265594 - DNA, 75 bp, synthetic construct
  source 1..75: mol_type = other DNA
ctgctgaagagcttatgcgcggagaagcagcggcgctgtttaaactggcagatgaattaagcgatgtaacagaac

SEQ ID NO: 265595 - DNA, 75 bp, synthetic construct
  source 1..75: mol_type = other DNA
gattctcggatcccctggtctggttgatgtatcaattcgctcacctaactcactaaatcttccagaatttgctgg

SEQ ID NO: 265596 - DNA, 75 bp, synthetic construct
  source 1..75: mol_type = other DNA
tcattttccgaataacgttggtgcaccagaaggcatccacgtttaccgagtggcaggacagcgttacatcctgct

SEQ ID NO: 265597 - DNA, 75 bp, synthetic construct
  source 1..75: mol_type = other DNA
tcgtatcgatgccttcgcaactcttcactatggctcgttcttttaaagccgtagccaatggcaaaatttatatcg

SEQ ID NO: 265598 - DNA, 75 bp, synthetic construct
  source 1..75: mol_type = other DNA
tccgacgttccttggcgacaaacgtattgaaggctcggtctggccaaaagtccatccgtggctccacgcccaaaa

SEQ ID NO: 265599 - DNA, 75 bp, synthetic construct
  source 1..75: mol_type = other DNA
agaaaacagcggtgttaatcctggatgatctggggctggagcctctgacaaaccagcagtgcaatgacctgctgg

SEQ ID NO: 265600 - DNA, 75 bp, synthetic construct
  source 1..75: mol_type = other DNA
gctacacggctgccatcatcgcctttccgatggttaatattactgaggccagccagctgtaggatatcgctcagg

SEQ ID NO: 265601 - DNA, 75 bp, synthetic construct
  source 1..75: mol_type = other DNA
ttttttgcagtcagacattactcagcaagagctggcgaagcgaattggtaaacctaagcaggagattacccgctt

SEQ ID NO: 265602 - DNA, 75 bp, synthetic construct
  source 1..75: mol_type = other DNA
gtaagcgtgttgccttgggtgaacctatggtttcaactcgctacgctcgctacgtctatgctgttgtcaacgacg

SEQ ID NO: 265603 - DNA, 75 bp, synthetic construct
  source 1..75: mol_type = other DNA
aaacgtcggcatggttctagcgatcagatgtcaccgacagaatatgaaaaccagtattatcaacggttcggaagt

SEQ ID NO: 265604 - DNA, 75 bp, synthetic construct
  source 1..75: mol_type = other DNA
ttccccgtagataaatggtacggactgatggaaaacccgacgacagccgacgcaatcctggacaggctggtacat

SEQ ID NO: 265605 - DNA, 75 bp, synthetic construct
  source 1..75: mol_type = other DNA
ggttctgttcgcgtctcaaacccaggcgaacgagcttggcttgtgcagtcatgggttgaagatagtgaacataaa

SEQ ID NO: 265606 - DNA, 75 bp, synthetic construct
  source 1..75: mol_type = other DNA
tgacagtttactgactattcctgtggcgtataaacttaagatgttaaataaagatagaagtatcattaataatga

SEQ ID NO: 265607 - DNA, 75 bp, synthetic construct
  source 1..75: mol_type = other DNA
ctaaggtattgctgttaaatgcttttttacagtcagaaatcactcagcaagagttagccaggcgaattggcaaac

SEQ ID NO: 265608 - DNA, 75 bp, synthetic construct
  source 1..75: mol_type = other DNA
gtttgatttgcaccacgcgacaaaaatcgacgccgtccagcttgcggctaaagctctgggcaaagagttatcgct

SEQ ID NO: 265609 - DNA, 75 bp, synthetic construct
  source 1..75: mol_type = other DNA
tcaataatgaaaattatcagtttcatcatataagatttgactgcatccagggcgagcaaggtgaattagtttttg

SEQ ID NO: 265610 - DNA, 75 bp, synthetic construct
  source 1..75: mol_type = other DNA
atccctggaaccgaacacccgtaccgaggtgagcaccctctgcatcagccagttcgctacagcgcacaaatccgc

SEQ ID NO: 265611 - DNA, 75 bp, synthetic construct
  source 1..75: mol_type = other DNA
tttaattataacgataactatttcagccatcgttatcagggtatgccacgtgatggatatactaatataattagt

SEQ ID NO: 265612 - DNA, 75 bp, synthetic construct
  source 1..75: mol_type = other DNA
agcaggctttatcatttattggtcgagacttgtacgaggcattttttagaacgtataccattaaacaatggggtc

SEQ ID NO: 265613 - DNA, 75 bp, synthetic construct
  source 1..75: mol_type = other DNA
gaaatgcgctctaccggggaagtcatgggcgtgggccgcaccttcgctgaagcgtttgccaaagcgcagctgggc

SEQ ID NO: 265614 - DNA, 75 bp, synthetic construct
  source 1..75: mol_type = other DNA
ggcagcctgccgggaacaaagacgcagatgaccatccgctccaaaacgtacatgggcagcggatttaatgagctg

SEQ ID NO: 265615 - DNA, 75 bp, synthetic construct
  source 1..75: mol_type = other DNA
ccggttgtagacctgataagcgaagcgcatcaggcaacggcatcaaaaatcaatggcccattcagcatggaatag

SEQ ID NO: 265616 - DNA, 75 bp, synthetic construct
  source 1..75: mol_type = other DNA
ccgaaaatttacttttgtatccattcaaggaggtttgggggacgacaaaagatattcccaaaactgatattttgc

SEQ ID NO: 265617 - DNA, 75 bp, synthetic construct
  source 1..75: mol_type = other DNA
cttgggtaagttctcttcagaccctgaaggcaagattatttcagcaatatttgatacgttaagggtttatctttt

SEQ ID NO: 265618 - DNA, 75 bp, synthetic construct
  source 1..75: mol_type = other DNA
taatattgtttgctattataattaaaagattaactccaagtcaaagcaagaaaaatattgtcttaatagccaatg

SEQ ID NO: 265619 - DNA, 75 bp, synthetic construct
  source 1..75: mol_type = other DNA
ggggagattatcagggatgtgcagtaatgaattattgtgataattctaaaccatatacacgtattactgaacata

SEQ ID NO: 265620 - DNA, 75 bp, synthetic construct
  source 1..75: mol_type = other DNA
attatggttcatacatatggcccacatatatttcatactaacagtaaatttgtttgggattatattaataagctg

SEQ ID NO: 265621 - DNA, 75 bp, synthetic construct
  source 1..75: mol_type = other DNA
ggcttcgatgatgatcttgccgcacagacaacacaggccagcaaccacatccgcggcttgttaacccagatacac

SEQ ID NO: 265622 - DNA, 75 bp, synthetic construct
  source 1..75: mol_type = other DNA
gcgggacaccaaaggacgaaggcgctacgtaagttgggaataacgcgtgctgcggtgtatgtgttgccctgtgaa

SEQ ID NO: 265623 - DNA, 75 bp, synthetic construct
  source 1..75: mol_type = other DNA
gaagctgccggtggtggtgatcccgacaattgcctcaaccgatgcgccgaccagcgcgctgtcggttatctacac

SEQ ID NO: 265624 - DNA, 75 bp, synthetic construct
  source 1..75: mol_type = other DNA
ggcgagtgcagccatgcggaaatcaaccgcctgatcgccattcttaagcagcacggctgccgcggcgtggtgggt

SEQ ID NO: 265625 - DNA, 75 bp, synthetic construct
  source 1..75: mol_type = other DNA
gccttcggtaccctggcgcagctggtgctacagaacagcccgatggacgagattgaaacggtgctgggcttctgc

SEQ ID NO: 265626 - DNA, 75 bp, synthetic construct
  source 1..75: mol_type = other DNA
cagaacagcgaagccgacgcccacgcacaactcgactatgccgtcgctcagggcattaaccttatcgtaagcggc

SEQ ID NO: 265627 - DNA, 75 bp, synthetic construct
  source 1..75: mol_type = other DNA
aacagcgaagccgacgcccacgcacaactcgactatgccgtcgctcagggcattaaccttatcgacgttgcctaa

SEQ ID NO: 265628 - DNA, 75 bp, synthetic construct
  source 1..75: mol_type = other DNA
atctgcactttgccgctgaacgatcgcgtccagcggtggagctgcttgccagagtgccgctggagaatatcaaat

SEQ ID NO: 265629 - DNA, 75 bp, synthetic construct
  source 1..75: mol_type = other DNA
accccaaatcttagcctttggggtaatgttggtattcagactggcgataaaggatacagcaatacagttggtatg

SEQ ID NO: 265630 - DNA, 75 bp, synthetic construct
  source 1..75: mol_type = other DNA
cgataaagcaaccgaagcaattaaaggctgggtggattcatataactccctcattgacacctttaacaccctgac

SEQ ID NO: 265631 - DNA, 75 bp, synthetic construct
  source 1..75: mol_type = other DNA
gatatacagtatatagaagatcttgcaataaagatatcttgcatgcccaataccttataccttgcgtattggatt

SEQ ID NO: 265632 - DNA, 75 bp, synthetic construct
  source 1..75: mol_type = other DNA
tcgaggcgaacacttacctcagtggcattggctttgaaagcagtggcctggccgccgcccacgcaatccacaacg

SEQ ID NO: 265633 - DNA, 75 bp, synthetic construct
  source 1..75: mol_type = other DNA
aagcgccggtacgtctgctggtggccgggatgggcgatgcgctctcgacctggtttgaagcgaaagcctgttatg

SEQ ID NO: 265634 - DNA, 75 bp, synthetic construct
  source 1..75: mol_type = other DNA
cgcctcaaccgatgcgccaaccagcgcgctgtccgttatctataccgaagcgggtgagtttgaagagtatctgat

SEQ ID NO: 265635 - DNA, 75 bp, synthetic construct
  source 1..75: mol_type = other DNA
atgaaacttatcgctaacggattaaataaacaattttttagttcatttttaccacctcctgatacagaaattgat

SEQ ID NO: 265636 - DNA, 75 bp, synthetic construct
  source 1..75: mol_type = other DNA
accagacgcagcgtacccgggactaccagcaggcacagaaaatcgtcattgatgacgctgcttatgtgtacctgt

SEQ ID NO: 265637 - DNA, 75 bp, synthetic construct
  source 1..75: mol_type = other DNA
acagcaaagcgcctcttaatcaggcggatctgcgtcgggccatttcctggtctaccgattatcagggcatggtta

SEQ ID NO: 265638 - DNA, 75 bp, synthetic construct
  source 1..75: mol_type = other DNA
gaacgaccggtgatacacagtgacagaggtgggcatgatcgctggccaggctggctggaaagagtgaatacagca

SEQ ID NO: 265639 - DNA, 75 bp, synthetic construct
  source 1..75: mol_type = other DNA
ttcaggcctgcatggatatcagaagataccccagcattctggcagacagatcagtttttacatgcgtattattat

SEQ ID NO: 265640 - DNA, 75 bp, synthetic construct
  source 1..75: mol_type = other DNA
cttatctgaccttgactcttgtatcgaacttactaaagagataattcaagaacaacagcagttacaaaaattaaa

SEQ ID NO: 265641 - DNA, 75 bp, synthetic construct
  source 1..75: mol_type = other DNA
aaccagaggtcagaataaaaccaacagcgtttcatcatccaatacaggtataaaaggagttcatcttcttaaagg

SEQ ID NO: 265642 - DNA, 75 bp, synthetic construct
  source 1..75: mol_type = other DNA
caatctattttctggatagttttcttctccataatgctggcaaacattgcgcatgacatggtggtgtgtgtgcaa

SEQ ID NO: 265643 - DNA, 75 bp, synthetic construct
  source 1..75: mol_type = other DNA
ctccgctgtataagctgaaaaagagctacaaaattcttgttcgcgttcagtccataacctttcttgacgaaaaca

SEQ ID NO: 265644 - DNA, 75 bp, synthetic construct
  source 1..75: mol_type = other DNA
caatgccattttcgtaaaagacagacaacgcctgcaggtgttaaagagcgggttcaggcatacagtactattctt

SEQ ID NO: 265645 - DNA, 75 bp, synthetic construct
  source 1..75: mol_type = other DNA
aaattatcagaaaaatcattcatgacactctgctgggtaatattgcgctcgtcgttattgcattaatgtctccgg

SEQ ID NO: 265646 - DNA, 75 bp, synthetic construct
  source 1..75: mol_type = other DNA
actagacaagctaaaaaagaaaagtatgacgattccatcccaatggaagaacctcacatacttaaagagagttta

SEQ ID NO: 265647 - DNA, 75 bp, synthetic construct
  source 1..75: mol_type = other DNA
tactgctggcgtcattagaggcatctgcgggtatccaggtcgatcaaacgcgtgtgatttataacggcaatgaaa

SEQ ID NO: 265648 - DNA, 75 bp, synthetic construct
  source 1..75: mol_type = other DNA
gatatcccctcctggcggcggatatgcaaagttttactcaataacgattactggtgtcgggcattatcatttagc

SEQ ID NO: 265649 - DNA, 75 bp, synthetic construct
  source 1..75: mol_type = other DNA
ggtagcgctgccattaacaacgcaaaattcgctttcccaatatcaaccagaatggcaatgttgggaaccgggtat

SEQ ID NO: 265650 - DNA, 75 bp, synthetic construct
  source 1..75: mol_type = other DNA
tgggctgctatgtgcgcacgagtcagcggggtaaaaagtggcggcatttacgccggacatgacaatcatttctag

SEQ ID NO: 265651 - DNA, 75 bp, synthetic construct
  source 1..75: mol_type = other DNA
gtcatagctggtacatttaccccatttacgactggaaagtggctgatatctggacctggtatgcaaatcatcaaa

SEQ ID NO: 265652 - DNA, 75 bp, synthetic construct
  source 1..75: mol_type = other DNA
cgaaaaaaaactgctgcaaaaatccattgaaatagatggttttacccaacccattgtggtcacacatacggataa

SEQ ID NO: 265653 - DNA, 75 bp, synthetic construct
  source 1..75: mol_type = other DNA
aaaaattatcaacgttataacgaacggattaaaggaaaacgtcaggaatggggaatactatgcaacagcgattaa

SEQ ID NO: 265654 - DNA, 75 bp, synthetic construct
  source 1..75: mol_type = other DNA
cgggagtttacgggatcatgtttgcggctggctgggcggtatgatttggtgtgtcggtctggcattcagtctgat

SEQ ID NO: 265655 - DNA, 75 bp, synthetic construct
  source 1..75: mol_type = other DNA
atggcgggatggaatccggtgtccatatccgtgggtgttaatccggacaccggtaacagcgataacaccatgaag

SEQ ID NO: 265656 - DNA, 75 bp, synthetic construct
  source 1..75: mol_type = other DNA
ggcgcgtctattgccgatcagctctctttcacctttattaatgattttggcggacacacggaaattaaagacatc

SEQ ID NO: 265657 - DNA, 75 bp, synthetic construct
  source 1..75: mol_type = other DNA
ccgatgtcatcgaagagttttactgggttgcgctcccgcttacgacgcaaaattccctttcacaataccaacccg

SEQ ID NO: 265658 - DNA, 75 bp, synthetic construct
  source 1..75: mol_type = other DNA
ctggcggctgaaatgaaaaaaatatctttggtttcagaagtcaatacctacatcaatacccatcagtggcctggc

SEQ ID NO: 265659 - DNA, 75 bp, synthetic construct
  source 1..75: mol_type = other DNA
aaaggagatttttttatatttttcagagaaagtttcaaagaggtccgtttttatttatcttatggaaaagttatt

SEQ ID NO: 265660 - DNA, 75 bp, synthetic construct
  source 1..75: mol_type = other DNA
gaaatggatgtgtacttaatcgaaagtaaaaggttatttgtaaagggaaagcacttttggggatattgtgtgggg

SEQ ID NO: 265661 - DNA, 75 bp, synthetic construct
  source 1..75: mol_type = other DNA
atgaattttgaagaacactatggtgaacttacgagtgagataacgctgaatggtactataccagatggtaatagt

SEQ ID NO: 265662 - DNA, 75 bp, synthetic construct
  source 1..75: mol_type = other DNA
gaaatggatgtgtacgtaatcgaacataaaaaactattcgttaagggaaaacacttttgggtgtattgcgtgggg

SEQ ID NO: 265663 - DNA, 75 bp, synthetic construct
  source 1..75: mol_type = other DNA
gcgtcttatccgacctacagttcagttcaccccgtaggcctgataagtcgcgtcagcggcgcatcaggcatcggt

SEQ ID NO: 265664 - DNA, 75 bp, synthetic construct
  source 1..75: mol_type = other DNA
gtacatcccgtaggcctgataagtcgcgtcagcggcgcatcaggcatcggttgtcggatgcgacgctatgcgtct

SEQ ID NO: 265665 - DNA, 75 bp, synthetic construct
  source 1..75: mol_type = other DNA
cgaacagaaaaatgatggaaaacctgtaagtgttgtacaagctcctgcaatagttcttgtatctgaagtagcggg

SEQ ID NO: 265666 - DNA, 75 bp, synthetic construct
  source 1..75: mol_type = other DNA
gcattctgattatataccttcagagtttttacccacgttcaactcgcatgttattgagttgaatttacatagaat

SEQ ID NO: 265667 - DNA, 75 bp, synthetic construct
  source 1..75: mol_type = other DNA
tttaactatgcaaaattagaactggagaaatcgtttgagttaattcttcctgaaaaatcatcatttgagaactaa

SEQ ID NO: 265668 - DNA, 75 bp, synthetic construct
  source 1..75: mol_type = other DNA
tatggtttcaactcgctacgctcgctacgtctatgctgccgtcgtcagcgccagtaaatccgtccagtaccacgc

SEQ ID NO: 265669 - DNA, 75 bp, synthetic construct
  source 1..75: mol_type = other DNA
aagatgcctgtatttctaattgagagtaaaaagctctttgtgaagggtaaacatttttgggtatatgccgtgggg

SEQ ID NO: 265670 - DNA, 75 bp, synthetic construct
  source 1..75: mol_type = other DNA
gcagatctcgtttatggtggcaatgttacccgcgtccaggttgacgccgcccgccgctcactcatgacgatggtt

SEQ ID NO: 265671 - DNA, 75 bp, synthetic construct
  source 1..75: mol_type = other DNA
cgcggaagatgcgcactatgtctaccgctacgatgaatacggcaggctggcggagaagacggacctcatcccgga

SEQ ID NO: 265672 - DNA, 75 bp, synthetic construct
  source 1..75: mol_type = other DNA
ccggttttttcccggaagaagccacatggggcgggctggttccgtcactggcgcgggagtaccgttacgacagcg

SEQ ID NO: 265673 - DNA, 75 bp, synthetic construct
  source 1..75: mol_type = other DNA
gcgctggtgagtgaattaataacagcagtcctaaaccaagaggaaccgaatgaccgaaaagaaaccagtagtaaa

SEQ ID NO: 265674 - DNA, 75 bp, synthetic construct
  source 1..75: mol_type = other DNA
ccaccagcttccggtagctatttacagttattgccagtatcaggacggtgcagcccccgggcgtggtgcctggac

SEQ ID NO: 265675 - DNA, 75 bp, synthetic construct
  source 1..75: mol_type = other DNA
tagctactttgaagaagacaagaaaatggcaatcgagaaatacgaagcgaacccacatttgggaaatggatttga

SEQ ID NO: 265676 - DNA, 75 bp, synthetic construct
  source 1..75: mol_type = other DNA
tggggggctggacattctgttagtatttcagtggagtctggttcttttgttctaaaaccgtcagatcaatttgta

SEQ ID NO: 265677 - DNA, 75 bp, synthetic construct
  source 1..75: mol_type = other DNA
attttagtagtgacaaacagatagaaaaatgtgagaaactatcttcaatagataatattgatagtctcgttttga

SEQ ID NO: 265678 - DNA, 75 bp, synthetic construct
  source 1..75: mol_type = other DNA
tataacaaaaaacaaagctattgaattacataagctacgtatcagtaatgatccttccgccagtcctgatgattg

SEQ ID NO: 265679 - DNA, 75 bp, synthetic construct
  source 1..75: mol_type = other DNA
atccggctggaggcggtgtggctgacacacgacccggcatacccggatgaacagccgactgcgccgctggcgcgc

SEQ ID NO: 265680 - DNA, 75 bp, synthetic construct
  source 1..75: mol_type = other DNA
gttccggtactacgagccggaaaccgggatgtacctggtgagtgatccactggggttgctggggggtgagcagac

SEQ ID NO: 265681 - DNA, 75 bp, synthetic construct
  source 1..75: mol_type = other DNA
atcgccaactgctattgctcaacatttatccaacaaacttggtgtgccagttacagcaccgagtgatacattatg

SEQ ID NO: 265682 - DNA, 75 bp, synthetic construct
  source 1..75: mol_type = other DNA
gaatttaatgttgtgcctggagaacatgcaatcagtaaagcaaaagatggttctccacgttttgcagttggcaac

SEQ ID NO: 265683 - DNA, 75 bp, synthetic construct
  source 1..75: mol_type = other DNA
atatccgcaactggcaaccggaacaggcactcgatctgatttttgctaatgcctcactgcaatggctgcccgacc

SEQ ID NO: 265684 - DNA, 75 bp, synthetic construct
  source 1..75: mol_type = other DNA
ggcagataccggataacggaaaagattatggttatttgtatttacagcagcggaaacgccacgctaacttttacc

SEQ ID NO: 265685 - DNA, 75 bp, synthetic construct
  source 1..75: mol_type = other DNA
aatactgatgacagggatttgcgccggtgtatcaggaaaaacttcgttaggagatattatcgtcggcgatcctgt

SEQ ID NO: 265686 - DNA, 75 bp, synthetic construct
  source 1..75: mol_type = other DNA
aaaggcaatttttttaccgatgagggtaagtgacattatgggaaatgataaactgctggatgaattgcgagtcag

SEQ ID NO: 265687 - DNA, 75 bp, synthetic construct
  source 1..75: mol_type = other DNA
attgtgggtatgagcggtgatggccgtacggggcaggtggtcaaggtgaccgtggcccctgctgaggagaagagt

SEQ ID NO: 265688 - DNA, 75 bp, synthetic construct
  source 1..75: mol_type = other DNA
gaagagcacatctcagggccagaaaaccgctggcgatacgtctgccacactggcatggcgtccgggcgacagcgg

SEQ ID NO: 265689 - DNA, 75 bp, synthetic construct
  source 1..75: mol_type = other DNA
ttgaccacttcagccacttcacctttctttccgaaccttgttgatcaccttctggttaagcatcacacggctgat

SEQ ID NO: 265690 - DNA, 75 bp, synthetic construct
  source 1..75: mol_type = other DNA
cattctctcgacgctacccaccgcaggggtcggcgcgctgctggcattaatgattgccggtagcgaactggatgt

SEQ ID NO: 265691 - DNA, 75 bp, synthetic construct
  source 1..75: mol_type = other DNA
tcgtgatggcggatcacggcaacgatccgaccattggtcacagccaccatacccgcgaagtggtgccagtgctgg

SEQ ID NO: 265692 - DNA, 75 bp, synthetic construct
  source 1..75: mol_type = other DNA
tgttgttttgattttaaaaataaatctttttgtaatgccaggttgcaatatataacgtttattgcatgtttattt

SEQ ID NO: 265693 - DNA, 75 bp, synthetic construct
  source 1..75: mol_type = other DNA
cgctatcacagtgagcagaactatcgtgcgctggcagcattgtttggcgtaacagtgccagatttactaccactg

SEQ ID NO: 265694 - DNA, 75 bp, synthetic construct
  source 1..75: mol_type = other DNA
tttcccagatgaatacctcgttctgggcccaggggaaaacgcgggcagtttatgtgctggaactgggcgatgtgt

SEQ ID NO: 265695 - DNA, 75 bp, synthetic construct
  source 1..75: mol_type = other DNA
caaactacgtagttccccataagtatatagacatggagcaaatggaatatttatgtcatctcaatcgtttttcta

SEQ ID NO: 265696 - DNA, 75 bp, synthetic construct
  source 1..75: mol_type = other DNA
ttatgtcatctcaatcgtttttctaaattacctgacgattttttaataaatggtccaagagatgacatttttaca

SEQ ID NO: 265697 - DNA, 75 bp, synthetic construct
  source 1..75: mol_type = other DNA
atggataatcttattggcacaccaccaaaccacgcagttccccataactatatagacatggagcaaatggaatat

SEQ ID NO: 265698 - DNA, 75 bp, synthetic construct
  source 1..75: mol_type = other DNA
cgtggggagccgttaaatcatgggcgcataaagtgccaaccgcatggcctcatgatggaaaccagcacgagaagg

SEQ ID NO: 265699 - DNA, 75 bp, synthetic construct
  source 1..75: mol_type = other DNA
gctcatgcgaccgttcgtcgtcttaacctgagcgtggatggcgaagcggggatgaacctgctggcccgcagcgct

SEQ ID NO: 265700 - DNA, 75 bp, synthetic construct
  source 1..75: mol_type = other DNA
gcggtcattctcacccctgcgaatgcaccgtcctggtgtggtgaccgttccgttctctggaatgcggtcgagaaa

SEQ ID NO: 265701 - DNA, 75 bp, synthetic construct
  source 1..75: mol_type = other DNA
atgagtccagtgcttacacaacatgtcagccagcccatcacgctggacgagcaaacgcaaaagatgaagcggcat

SEQ ID NO: 265702 - DNA, 75 bp, synthetic construct
  source 1..75: mol_type = other DNA
gcacagggatattcgcaggctgacagatgatgaacgctacaggctggccgtgtttgttgccgtgcagcgcgcacg

SEQ ID NO: 265703 - DNA, 75 bp, synthetic construct
  source 1..75: mol_type = other DNA
attgaatacgacaacggtgcatatcatttatgtgccacgatcaccggagcccccttcaccacaaccactgaagtt

SEQ ID NO: 265704 - DNA, 75 bp, synthetic construct
  source 1..75: mol_type = other DNA
gcctaacggccttgtaggccgcgataatacaggggcaatactttcgtgccaatccggtacgtgggggacaatagg

SEQ ID NO: 265705 - DNA, 75 bp, synthetic construct
  source 1..75: mol_type = other DNA
tggtgaacgaaataattcgcctggcaaaccttgtttatccggtggagggcaaaggttacgacacaatccctcttg

SEQ ID NO: 265706 - DNA, 75 bp, synthetic construct
  source 1..75: mol_type = other DNA
cttggcgtcgttgcgggtccgcgtatcgcttttttgatgctggagcggatctcgcgtgattctaatatctgggaa

SEQ ID NO: 265707 - DNA, 75 bp, synthetic construct
  source 1..75: mol_type = other DNA
accccggaacgttatcgttcactcggaccgaggaagtcagtactgttcagcagattatcaggcgctgctgaagtg

SEQ ID NO: 265708 - DNA, 75 bp, synthetic construct
  source 1..75: mol_type = other DNA
cctacgtttatcgcgtggattgtggcggctgcaacgcctgtgaaatcgaaatttttgccgccatcacgccagtgt

SEQ ID NO: 265709 - DNA, 75 bp, synthetic construct
  source 1..75: mol_type = other DNA
tgactttatatggcatagcacattaaaggagcgcaaccgttctcatattccaaatagttttgcccatatgttatc

SEQ ID NO: 265710 - DNA, 75 bp, synthetic construct
  source 1..75: mol_type = other DNA
tgtgcagattccggcctaaatgtaaaaacagcagctcagtttcgtgagctgctcaaattcaaaaatcccgcagga

SEQ ID NO: 265711 - DNA, 75 bp, synthetic construct
  source 1..75: mol_type = other DNA
ccgcccggtatgggaaaccgctaaagatgccctgcaattcggtcaggacggacacggtagcggtttcttctttac

SEQ ID NO: 265712 - DNA, 75 bp, synthetic construct
  source 1..75: mol_type = other DNA
ggagcgaaagatgatggcagcgataagcgtctcggcgatggacaaaccgcccgcccggtatgggaaaccgctaaa

SEQ ID NO: 265713 - DNA, 75 bp, synthetic construct
  source 1..75: mol_type = other DNA
ggttgtcgtagtgcgtcagaaagacggcagcatcaaggcgtttctcaaccaatgccgccaccgggccatgcgtgt

SEQ ID NO: 265714 - DNA, 75 bp, synthetic construct
  source 1..75: mol_type = other DNA
gcgcggccatcgggctgggcttcttgagccagtacgagggactgttcatcagccgcctgctgccgctgtttgccg

SEQ ID NO: 265715 - DNA, 75 bp, synthetic construct
  source 1..75: mol_type = other DNA
atgaccacaccctcagatttgaacatttaccaactgattgacacccaaaacggtcgggtcactccgcgtatttat

SEQ ID NO: 265716 - DNA, 75 bp, synthetic construct
  source 1..75: mol_type = other DNA
ggcgtttctcaaccaatgccgccaccgggccatgcgtgtgagttatgcagattgcggcaacactcgcgcctttac

SEQ ID NO: 265717 - DNA, 75 bp, synthetic construct
  source 1..75: mol_type = other DNA
atgtaccagccgcgcctggaatacgcgatggcgaaagacaatttattcctcaaatgcttcgggcatgtgcatccg

SEQ ID NO: 265718 - DNA, 75 bp, synthetic construct
  source 1..75: mol_type = other DNA
ttttctcaccataatctttttttccggttgttttttccgggacagacagttggtggcgcgtttttgatttttccg

SEQ ID NO: 265719 - DNA, 75 bp, synthetic construct
  source 1..75: mol_type = other DNA
accttaacttacttaagacctttgatgcgttaatggatgagggaagcgtgactcgggctgcgcagcggctctccc

SEQ ID NO: 265720 - DNA, 75 bp, synthetic construct
  source 1..75: mol_type = other DNA
ggcagcactggaagctattgagcgttaccgtgacaagcatttccctcagggggtgaataccccggcgaaacgcgg

SEQ ID NO: 265721 - DNA, 75 bp, synthetic construct
  source 1..75: mol_type = other DNA
ccggaacagtttgtggaaatcagcgaaacgctggcggcggcgaaaggcatcgccaatggcgaccgtgtcaccgta

SEQ ID NO: 265722 - DNA, 75 bp, synthetic construct
  source 1..75: mol_type = other DNA
cagtgcggcgcgtaactataacggtacctacagcgcccagcggcaggagttggtcgagtccaccgacgggtatct

SEQ ID NO: 265723 - DNA, 75 bp, synthetic construct
  source 1..75: mol_type = other DNA
ctgggacttcgtgtcgccggcgcatcgccgttgcggaccggacggctgcgactccccgccaagcgcttgtgaaag

SEQ ID NO: 265724 - DNA, 75 bp, synthetic construct
  source 1..75: mol_type = other DNA
cacgacgtcgatgacacggttgctgagcactggttcgtaaaagcgcactgttcaccggatggcgaagcgccagcg

SEQ ID NO: 265725 - DNA, 75 bp, synthetic construct
  source 1..75: mol_type = other DNA
caggccagttcgaaagagctggctggcgcaattcagaatacccgaaacagcctcaaagaactgaataagcaggct

SEQ ID NO: 265726 - DNA, 75 bp, synthetic construct
  source 1..75: mol_type = other DNA
tcggctgtcaccagccgggaagattacggacgggaaacacggcgggaataccggctggaccggaacggtcaggtc

SEQ ID NO: 265727 - DNA, 75 bp, synthetic construct
  source 1..75: mol_type = other DNA
tttatgtacggcctgactgagtacccgctggaaggcaacagcgcactgctgaaatcgcttcaggacagcaacatc

SEQ ID NO: 265728 - DNA, 75 bp, synthetic construct
  source 1..75: mol_type = other DNA
aatgttgttattgttcacggcttttttcgctgttctgacaggcttccccgctattttcctttggggtataaaagg

SEQ ID NO: 265729 - DNA, 75 bp, synthetic construct
  source 1..75: mol_type = other DNA
aaaaaaatacgcttctggtgctgtctcatgaatctcgcgcactccaggaagtaaccctggttggcgaggttatcg

SEQ ID NO: 265730 - DNA, 75 bp, synthetic construct
  source 1..75: mol_type = other DNA
tgctgaagtgtctgttaacttattaatgcttacaactctaatcaaaaaaaaggttcctatatttaaaggccaata

SEQ ID NO: 265731 - DNA, 75 bp, synthetic construct
  source 1..75: mol_type = other DNA
taatgtgttaggatatcaaactttactagtgttaaatatggaaagaatatttagtcgattagttttagttggcgg

SEQ ID NO: 265732 - DNA, 75 bp, synthetic construct
  source 1..75: mol_type = other DNA
gtggagacggatgacggatataaggcgcttgtccgcgcttttcagcttcatttccggcagaaaaattatgacggc

SEQ ID NO: 265733 - DNA, 75 bp, synthetic construct
  source 1..75: mol_type = other DNA
aacaaaaagcaacttgcactatcagagtgttaatactaaaaacatttcacgatggtcgttatagatttgtaattg

SEQ ID NO: 265734 - DNA, 75 bp, synthetic construct
  source 1..75: mol_type = other DNA
cgggagcacttggtcgagctgcaaacggtgtttggattcaagcccttcaccatgagtcattaccggcaagccgtg

SEQ ID NO: 265735 - DNA, 75 bp, synthetic construct
  source 1..75: mol_type = other DNA
gattccctggcatcttcttgggcgtcgatgatcctccatttctgcccctgctgcgcatggtggccgcacaactca

SEQ ID NO: 265736 - DNA, 75 bp, synthetic construct
  source 1..75: mol_type = other DNA
cattctattatgcgtcagtgccagggagagttacatatcgcgtctactctcgaccaccatgcgctggttattcta

SEQ ID NO: 265737 - DNA, 75 bp, synthetic construct
  source 1..75: mol_type = other DNA
gccacatccggtattacgcaatggggccattgcccgtgacctggctgcggagatacgtacccgatggagtgaatg

SEQ ID NO: 265738 - DNA, 75 bp, synthetic construct
  source 1..75: mol_type = other DNA
aaagtgtcttttcagggagatgaaagtacacaaaaaactttaaaagaagcatataaagctgtagcagaaacaaag

SEQ ID NO: 265739 - DNA, 75 bp, synthetic construct
  source 1..75: mol_type = other DNA
tttttgaacctgtaccactgcgaccatcgcggcctgccgctggcgcttgtcagcacggaaggggcaacagaatgg

SEQ ID NO: 265740 - DNA, 75 bp, synthetic construct
  source 1..75: mol_type = other DNA
aagagaacccgcaccagctgcagcagctcatccgcctgccgggtcagcagtatgatgaggagtccggcctctatt

SEQ ID NO: 265741 - DNA, 75 bp, synthetic construct
  source 1..75: mol_type = other DNA
cggggataaagagcgtgtatttacgcaaatacgcaaccaattagaaactcaattaggaaatagccatcaacaact

SEQ ID NO: 265742 - DNA, 75 bp, synthetic construct
  source 1..75: mol_type = other DNA
cacagaagaccgctttgcttaccgaggcggagtctgtcatccggccgccggggtgtgcggtcaggctgaacagag

SEQ ID NO: 265743 - DNA, 75 bp, synthetic construct
  source 1..75: mol_type = other DNA
gcgcagttaaagcatctgttacccgcacatctgatggcttcattttcgccgttttttagtcaagcgggacacact

SEQ ID NO: 265744 - DNA, 75 bp, synthetic construct
  source 1..75: mol_type = other DNA
cgataaaacgtatgacttcgttagcgccggagcgattcacattgagccgattggtatctattcgaaaaaagtgaa

SEQ ID NO: 265745 - DNA, 75 bp, synthetic construct
  source 1..75: mol_type = other DNA
tacgagcagtcccgccagtcatttggtattaacgttcttggcacgttgattgttgaagttgaagcagaaaacggc

SEQ ID NO: 265746 - DNA, 75 bp, synthetic construct
  source 1..75: mol_type = other DNA
tattctgcctggtgtgcccactgtcgtcgatggcggcaataacgacggtaatgccaaccgcgctgacggggcctt

SEQ ID NO: 265747 - DNA, 75 bp, synthetic construct
  source 1..75: mol_type = other DNA
ttaatggggtgccagggttaaatcgagaaaactttatttatatcagcaatatttttttaaatataaaacaacgga

SEQ ID NO: 265748 - DNA, 75 bp, synthetic construct
  source 1..75: mol_type = other DNA
gtggagcagccaggggagccgatttatattgggatggattttaacgttggaaagatggcgggaatcgtccatgtg

SEQ ID NO: 265749 - DNA, 75 bp, synthetic construct
  source 1..75: mol_type = other DNA
aacaggcgctgaataccagctaccgcaagggcccgtcatttgtcgactggctgccgtgggtggagtttttgccgg

SEQ ID NO: 265750 - DNA, 75 bp, synthetic construct
  source 1..75: mol_type = other DNA
gtatgaggcgcagatggcgctgaccatggtgtcgatgaccaacatgatcaataacattgccgaacgtgaccagta

SEQ ID NO: 265751 - DNA, 75 bp, synthetic construct
  source 1..75: mol_type = other DNA
ccgatctggatggcgatgaagaggaggagaaacgcgacattctgggagaaatggaaatctctgccaggatgatga

SEQ ID NO: 265752 - DNA, 75 bp, synthetic construct
  source 1..75: mol_type = other DNA
ttctatgaagtaactacagttaatggaactaaactaaaagttgtttcatcttctgcagagagaatgggcgttaca

SEQ ID NO: 265753 - DNA, 75 bp, synthetic construct
  source 1..75: mol_type = other DNA
atttttgggtcgagtgctgttgcacgcaacgatccggcagcaccacgaaagccagcctattccttgcatgctata

SEQ ID NO: 265754 - DNA, 75 bp, synthetic construct
  source 1..75: mol_type = other DNA
cctggttgtggctggccacgcagaacctgaaagactatccgaatgtcgccgagaagatgctgaatatggccgagt

SEQ ID NO: 265755 - DNA, 75 bp, synthetic construct
  source 1..75: mol_type = other DNA
caaaatgttctctatggcattgtggatggcattaatcgtttccccgatccaggccgttatcggtgatgcgcatgg

SEQ ID NO: 265756 - DNA, 75 bp, synthetic construct
  source 1..75: mol_type = other DNA
tggccagggtacagtttgcatttactgtttccttccacattattttcccagcaataaccattggtctggccagtt

SEQ ID NO: 265757 - DNA, 75 bp, synthetic construct
  source 1..75: mol_type = other DNA
cgcgccgccgccgggcacacccgccaggccgctttccgccgccgtcctcgattctcaacataaggcacatcgcta

SEQ ID NO: 265758 - DNA, 75 bp, synthetic construct
  source 1..75: mol_type = other DNA
aaacattccggttccggaaatataaaaagaaaaacgtcctgctgcaaatgatagtttccagaaaacaagtgatat

SEQ ID NO: 265759 - DNA, 75 bp, synthetic construct
  source 1..75: mol_type = other DNA
atgatgaacgttcatgttcgtggggggattatgaaaaataaaatattctggctccggaaatataaagagaataat

SEQ ID NO: 265760 - DNA, 75 bp, synthetic construct
  source 1..75: mol_type = other DNA
tatctggttttttgttttcaactgtgctgtttatttttctctgaagacaataaatataaaagatataatcagcta

SEQ ID NO: 265761 - DNA, 75 bp, synthetic construct
  source 1..75: mol_type = other DNA
atggttccagtaaaccgggactcgggcacgatgagagggcgacgaaccatctttggcggcagggctggtgtgcga

SEQ ID NO: 265762 - DNA, 75 bp, synthetic construct
  source 1..75: mol_type = other DNA
ttgcgcaagaaaacagccagccaaatatcgtccaggtggcaacgaatattctggtgaccatgaatctggtgggca

SEQ ID NO: 265763 - DNA, 75 bp, synthetic construct
  source 1..75: mol_type = other DNA
agattagaaaaaattcagagtagtgaagatttccaactggttaaaatggtggaaaataattacagggagtatctt

SEQ ID NO: 265764 - DNA, 75 bp, synthetic construct
  source 1..75: mol_type = other DNA
tcggcattgcgtatctgtttatctcccacgatatggctgtggtagagcggattagtcatcgtgtggcggtgatgt

SEQ ID NO: 265765 - DNA, 75 bp, synthetic construct
  source 1..75: mol_type = other DNA
gaaattatctttaacggtcagcgaatcgataccttgtcacccggcaaacttcaggcattgcgccgcgatattcag

SEQ ID NO: 265766 - DNA, 75 bp, synthetic construct
  source 1..75: mol_type = other DNA
cacgttccgccagaatgaccggtcacgccaggccagaatacgcagtcagggatattgcagaatactggtgccagt

SEQ ID NO: 265767 - DNA, 75 bp, synthetic construct
  source 1..75: mol_type = other DNA
taaaaaatatcgtccagatatactattagcttgcgaaaaatcgatatcagagatgagttttgatcttgattttat

SEQ ID NO: 265768 - DNA, 75 bp, synthetic construct
  source 1..75: mol_type = other DNA
aatttcgccctgatattttagcagcgtgtaaagagtcgctttccagtgctagtactgatctagattttatcagat

SEQ ID NO: 265769 - DNA, 75 bp, synthetic construct
  source 1..75: mol_type = other DNA
cgtcactgaaaatgagtcaactttcataccaattggcacagttcataccttggaaaatccaggaaagataccatt

SEQ ID NO: 265770 - DNA, 75 bp, synthetic construct
  source 1..75: mol_type = other DNA
agaggtggataccgcggcatggatgccgtcactcacaaccgataaacaaggcaaagcgtatttcacgttcctgat

SEQ ID NO: 265771 - DNA, 75 bp, synthetic construct
  source 1..75: mol_type = other DNA
tcatgaatccagggatagttcctttgattattattgaaattcaaacaggaaaatttatatcagagaaggatgtta

SEQ ID NO: 265772 - DNA, 75 bp, synthetic construct
  source 1..75: mol_type = other DNA
ccttgcagctttttatgcttcgaggcatggtgatgatccctatctattaatattagccgcggaccatgctatcgg

SEQ ID NO: 265773 - DNA, 75 bp, synthetic construct
  source 1..75: mol_type = other DNA
actgggtggttgtcgcgggaacggcaaaagtcactatcgatggtgatatcaaactgcttggtgaaaacgagtcga

SEQ ID NO: 265774 - DNA, 75 bp, synthetic construct
  source 1..75: mol_type = other DNA
taaccatatttgccccatatagtcataagtcatcggaacatcactatatagagcatattagccgcatgaactatc

SEQ ID NO: 265775 - DNA, 75 bp, synthetic construct
  source 1..75: mol_type = other DNA
ggtgcaggaaggccagcaggtcaaggcgggccagaagctgtttgaactggtggcccccgtcccggcggacgagca

SEQ ID NO: 265776 - DNA, 75 bp, synthetic construct
  source 1..75: mol_type = other DNA
aatagaaggaaattttttctatataaaaccatctacctctcatccaggccttcctaaagagagcattttttattt

SEQ ID NO: 265777 - DNA, 75 bp, synthetic construct
  source 1..75: mol_type = other DNA
tcttaatggtgacgagttagcacatacggagtcctatcagtggcgaattgatagcggaatgatcccggaaaaatt

SEQ ID NO: 265778 - DNA, 75 bp, synthetic construct
  source 1..75: mol_type = other DNA
cgggaacttttagcggcagcgaagggacgctgaatacctggtacgtccagccacaggtacaaatcacctggatgg

SEQ ID NO: 265779 - DNA, 75 bp, synthetic construct
  source 1..75: mol_type = other DNA
tggtatcagaacgatgcgaataagaccggcgcttatgttgacagctgggcgctgtataactggtttgataacaac

SEQ ID NO: 265780 - DNA, 75 bp, synthetic construct
  source 1..75: mol_type = other DNA
gtaaaacggttattgtgtttgataataccacatcaccaaaagatggatttgttttcgctgcaccaactaagcatg

SEQ ID NO: 265781 - DNA, 75 bp, synthetic construct
  source 1..75: mol_type = other DNA
tggtgcgcagaatacgatgaatggggcaacctgctgaatgaagagaacccgcatcagctgcagcagcttatccgg

SEQ ID NO: 265782 - DNA, 75 bp, synthetic construct
  source 1..75: mol_type = other DNA
gagtatattgaaggaaccaatgttagatttaattcgaataatatggcgatatattggaatagtagagcatcttta

SEQ ID NO: 265783 - DNA, 75 bp, synthetic construct
  source 1..75: mol_type = other DNA
atgtctgaaggagtttctaaaaattccagatatgaaatcattgcaattctgagagatgaactcaggattcaatct

SEQ ID NO: 265784 - DNA, 75 bp, synthetic construct
  source 1..75: mol_type = other DNA
tgcagggtctgcattccgcaggcgcgctggaggttggccttgccgccgccgacgtgaaccgcacccgcagccaga

SEQ ID NO: 265785 - DNA, 75 bp, synthetic construct
  source 1..75: mol_type = other DNA
ttcctgttgcacagccaatcatcattaacgctggcgggtatcctgtatataacgggcagattgccaaattcgtaa

SEQ ID NO: 265786 - DNA, 75 bp, synthetic construct
  source 1..75: mol_type = other DNA
gttgtggggtgggggggctgcttggtagtggtttgtggttgctagcaaaagtagagttttactttaaaaataaaa

SEQ ID NO: 265787 - DNA, 75 bp, synthetic construct
  source 1..75: mol_type = other DNA
acagcacagggaacccctgcattatacatcgccatgagcaagggaatgaagacgtcgtgttatcttatatatcga

SEQ ID NO: 265788 - DNA, 75 bp, synthetic construct
  source 1..75: mol_type = other DNA
aacgacctgtcccgtggcgcactggttgacgatatcgtctacaccatcgcgctgactgcgattcagtctgcacag

SEQ ID NO: 265789 - DNA, 75 bp, synthetic construct
  source 1..75: mol_type = other DNA
ccgcgggaaggaagtttatatctgtgttgatgtgaactcctgggcgctttcagctgaacgttccggtgtctggta

SEQ ID NO: 265790 - DNA, 75 bp, synthetic construct
  source 1..75: mol_type = other DNA
agggcgaatggtgactaacgaatatatcgtcgatattgccaaccgggatggtcaactgcaactgaacgtaaccga

SEQ ID NO: 265791 - DNA, 75 bp, synthetic construct
  source 1..75: mol_type = other DNA
gtgataacagatgtctggaaatataggggcaaatccaatgactttggtattgaaacaccctcagcgttagataac

SEQ ID NO: 265792 - DNA, 75 bp, synthetic construct
  source 1..75: mol_type = other DNA
gcggcttattgtttgccctatgagcaagatcatgccagtcatacgtttatcacaggtactcagtttgaccaagtc

SEQ ID NO: 265793 - DNA, 75 bp, synthetic construct
  source 1..75: mol_type = other DNA
tggaagccctattctataataaaaagttaataacaaataacgaaagtattaccgaatatgatttttataatgcag

SEQ ID NO: 265794 - DNA, 75 bp, synthetic construct
  source 1..75: mol_type = other DNA
taggaaatatgactcgcgctgttgttgcaggattgttttttattttcctgtggcataaacatccatcagggatac

SEQ ID NO: 265795 - DNA, 75 bp, synthetic construct
  source 1..75: mol_type = other DNA
aacacgaactgcggattgtcgcctggatgtatccacctcatggcaggcgctgtcagataaagacccttcgcaggc

SEQ ID NO: 265796 - DNA, 75 bp, synthetic construct
  source 1..75: mol_type = other DNA
gcttaaagccagcccctcaggaaaaatgtatgcccgcatgcgtgttaaccggggtaacctgcccgccattaagct

SEQ ID NO: 265797 - DNA, 75 bp, synthetic construct
  source 1..75: mol_type = other DNA
aacatctttccctgaacactgccacgttggggcctggcgcgtcgctgcatgatgccgttcagggatgtgtgaaat

SEQ ID NO: 265798 - DNA, 75 bp, synthetic construct
  source 1..75: mol_type = other DNA
atttcccctgcgttcccgaaatctccggcccgcagccggggaatgatgaaaaaagctggcaacgtgattttctgg

SEQ ID NO: 265799 - DNA, 75 bp, synthetic construct
  source 1..75: mol_type = other DNA
ggtaagggacgtaaaggcatcatcatccgcacccgtaagccgggattttttgccatgactaaacgcttcataaaa

SEQ ID NO: 265800 - DNA, 75 bp, synthetic construct
  source 1..75: mol_type = other DNA
gccacgcaggagcaaatcatgctggccggtcaactggcaggtaaagcctgggacaatgccaacgcattgcgtgag

SEQ ID NO: 265801 - DNA, 75 bp, synthetic construct
  source 1..75: mol_type = other DNA
atgtttacccgccgggcccggacctggtcatggctggggcttgatggttgggaggcacaaaacaaagcgctggct

SEQ ID NO: 265802 - DNA, 75 bp, synthetic construct
  source 1..75: mol_type = other DNA
caaaagatctgctggtggacgatcttatcgtggcggtggtgaaggagggggaaagcattatcgtgccgccgaatt

SEQ ID NO: 265803 - DNA, 75 bp, synthetic construct
  source 1..75: mol_type = other DNA
ctgtctgtgctaacgagggtatggttaaatatttaactgagacaatagtttctcatattcttgaaagggaaattt

SEQ ID NO: 265804 - DNA, 75 bp, synthetic construct
  source 1..75: mol_type = other DNA
tcatggacgcttgaggcattcatcgctgacatgaataacggcggcccggcaagcaacgccattaccagcaacatg

SEQ ID NO: 265805 - DNA, 75 bp, synthetic construct
  source 1..75: mol_type = other DNA
ggtggtaatcaacatccagaactacacgtcatcctctgtcgatgcgcaggccggtacggatgctaatggtggcgt

SEQ ID NO: 265806 - DNA, 75 bp, synthetic construct
  source 1..75: mol_type = other DNA
ctcctttatggttcctatctttggtggtcgtcgctggacggcgttcagcaccggtattctgattattccttgcgt

SEQ ID NO: 265807 - DNA, 75 bp, synthetic construct
  source 1..75: mol_type = other DNA
tctatatgccaacctggaaccgccaacaactggcgattcgggcgataaaatcggtcctgcgccaggactacagca

SEQ ID NO: 265808 - DNA, 75 bp, synthetic construct
  source 1..75: mol_type = other DNA
cacggtgaacggcgaaccggcagagcagtggcagtatgatggccacggctggctgacagacatcagccacctgag

SEQ ID NO: 265809 - DNA, 75 bp, synthetic construct
  source 1..75: mol_type = other DNA
tttgggaaatggatttgaaggtgcgttgcttgtttccaagaccatagcagccagcgagttgtcctcttatccaga

SEQ ID NO: 265810 - DNA, 75 bp, synthetic construct
  source 1..75: mol_type = other DNA
atatgaaccgcgcgatcgctatccgtgtagcggaactgaaagaagcgccattggctcaacaaccgaacaagcgcg

SEQ ID NO: 265811 - DNA, 75 bp, synthetic construct
  source 1..75: mol_type = other DNA
gtgcagggcacgatggtactaagcgtcaagttgagccagggaaagaatcctacttcttcaacagtcaaccagtac

SEQ ID NO: 265812 - DNA, 75 bp, synthetic construct
  source 1..75: mol_type = other DNA
accagaaaatccggccttctgggaaaataaaggaaaacatattgcacgaagaaacctctggatatcagtcagttg

SEQ ID NO: 265813 - DNA, 75 bp, synthetic construct
  source 1..75: mol_type = other DNA
ttcccctcagtctgtttaagcagcagattgagtttgaggaagacgacagggacgagctgatcacgctgtacgccc

SEQ ID NO: 265814 - DNA, 75 bp, synthetic construct
  source 1..75: mol_type = other DNA
agaacgccgccgcagaacggatgatgttcatccatcgcaactggcgcggtaaatctgaacctgaggagggctcct

SEQ ID NO: 265815 - DNA, 75 bp, synthetic construct
  source 1..75: mol_type = other DNA
aacaaaaaattcagtcagcctttaaggatgtttccgacacgcttgcgctgcgcgacagccttagccagcaacttg

SEQ ID NO: 265816 - DNA, 75 bp, synthetic construct
  source 1..75: mol_type = other DNA
aaggtgctcgctatgttgctcgttgtgtttgcgggatttatacgtatcgccgagcaaaaaatttcaagaataatt

SEQ ID NO: 265817 - DNA, 75 bp, synthetic construct
  source 1..75: mol_type = other DNA
tgtccgatacgttatcgctgtttcgccgtgattatcccgatgtccatttacaaacccgcgaaatgaacactcgcg

SEQ ID NO: 265818 - DNA, 75 bp, synthetic construct
  source 1..75: mol_type = other DNA
gcaaaagcggaaattgcttcgacaataatagaattattagaaaccagggtaaacaatctttcatacaacgacata

SEQ ID NO: 265819 - DNA, 75 bp, synthetic construct
  source 1..75: mol_type = other DNA
ttgagcacagtgaaaataaaaacaggatgaaagtctttgccggaaccaactttattgatttcaatatgacaggac

SEQ ID NO: 265820 - DNA, 75 bp, synthetic construct
  source 1..75: mol_type = other DNA
tgcgcaggatacgatgaatggggcaacctgctgaatgaagagaacccgcatcagctgcagcagcttatccgcctg

SEQ ID NO: 265821 - DNA, 75 bp, synthetic construct
  source 1..75: mol_type = other DNA
gcggcaactgacattcctgcagcagtgaagggcgccgtactgctggtgtttgcggacatgttcgagcacaggacc

SEQ ID NO: 265822 - DNA, 75 bp, synthetic construct
  source 1..75: mol_type = other DNA
aactagaaaattgctttgagcttgcattggaaaatattataaagcacggcgatacagatattttcccttacccat

SEQ ID NO: 265823 - DNA, 75 bp, synthetic construct
  source 1..75: mol_type = other DNA
atggcgattttcagcgccctgctgttccttaccttaccgggcacaggctccggtaatttcatcgcattttacgcc

SEQ ID NO: 265824 - DNA, 75 bp, synthetic construct
  source 1..75: mol_type = other DNA
ttatccgccgcgagcgtccggaattacagatcctcagttgccatgatgaatatctggtacacactgcttttgacg

SEQ ID NO: 265825 - DNA, 75 bp, synthetic construct
  source 1..75: mol_type = other DNA
cattacttttagcaaaaccgggcgaattagtagttttagaaaacccggaagcccatttgcaccctagaggacaaa

SEQ ID NO: 265826 - DNA, 75 bp, synthetic construct
  source 1..75: mol_type = other DNA
cagccagtgcagccagtgcagccagtgcagccagtgcagcacaacattataggcgacctgctacgtaaatcacgg

SEQ ID NO: 265827 - DNA, 75 bp, synthetic construct
  source 1..75: mol_type = other DNA
aaaaaatggcatctggcaggcagttgcaagggaagtggacaaaaaaccaaatatcgcctcagtgcagccagtgca

SEQ ID NO: 265828 - DNA, 75 bp, synthetic construct
  source 1..75: mol_type = other DNA
tcgtatctcacctagaattgaggctagggcgaatgttgcatttaatgtcataatcccttcacctggacaattaac

SEQ ID NO: 265829 - DNA, 75 bp, synthetic construct
  source 1..75: mol_type = other DNA
atgaacaatgaactccccgatgatattgagctgcttaaagccatgttgcgtaagcaacagagtcggcttcgacag

SEQ ID NO: 265830 - DNA, 75 bp, synthetic construct
  source 1..75: mol_type = other DNA
cgaagtgatcgagaagctcaatgactggccgtcgaaccaagtgcatgaactgctgccctggaacttctcgtctgt

SEQ ID NO: 265831 - DNA, 75 bp, synthetic construct
  source 1..75: mol_type = other DNA
tgatcagagaagccatgctggcgctgctaccgctgattagcggcgtggtgctggtggcgattatttctccggtta

SEQ ID NO: 265832 - DNA, 75 bp, synthetic construct
  source 1..75: mol_type = other DNA
tttcgaaaaaatcctcatcttttgcttatgctgccggggtaatgatcaatccgacaagtaatattacaattaatg

SEQ ID NO: 265833 - DNA, 75 bp, synthetic construct
  source 1..75: mol_type = other DNA
gggaggttttttaaatgcctttgtttctcctcctgccgatacctttgctggctcattaaatggtgttgcaggact

SEQ ID NO: 265834 - DNA, 75 bp, synthetic construct
  source 1..75: mol_type = other DNA
agttcagccagttcagccagttcagccagttcagccagttcagccagttcagccagttcagccagttcagccagt

SEQ ID NO: 265835 - DNA, 75 bp, synthetic construct
  source 1..75: mol_type = other DNA
cagagcagagtttctgtctgccaaagaaatatcatttattaaatcgaatttgacagctgttatgtttgatcatgt

SEQ ID NO: 265836 - DNA, 75 bp, synthetic construct
  source 1..75: mol_type = other DNA
gaagattacgagtttctactaaggttagtccgtgacgttagtaaaaaaagaattatttttgtagataatgtgctt

SEQ ID NO: 265837 - DNA, 75 bp, synthetic construct
  source 1..75: mol_type = other DNA
ggcatttccgttgatgatgctctcaggagtcttgatcgtatctttaaagcagatattcctgctgatcaggtcgcc

SEQ ID NO: 265838 - DNA, 75 bp, synthetic construct
  source 1..75: mol_type = other DNA
gtttatgaactaacaaaaattcttaaggatatttccccagatattgtattttcatattttgtaaagccagtaata

SEQ ID NO: 265839 - DNA, 75 bp, synthetic construct
  source 1..75: mol_type = other DNA
ttcaatgggctggttaactccccggcaggagctggggttgtacgtttcacttctcaaaattatgacaatggtgat

SEQ ID NO: 265840 - DNA, 75 bp, synthetic construct
  source 1..75: mol_type = other DNA
atttcgaagatctacttaatataaatttcactgacgcaaatttaggtgacactattttttacataaagaacaccc

SEQ ID NO: 265841 - DNA, 75 bp, synthetic construct
  source 1..75: mol_type = other DNA
tttcactgacgcaaatttaggtgacactatttttttacataaagaacaccctacccccaaattatataaagatgg

SEQ ID NO: 265842 - DNA, 75 bp, synthetic construct
  source 1..75: mol_type = other DNA
ggggtaacctgcccgccattaagctgggtaccgcacaggtcagactggcccgctcccggcatggcagcaactcac

SEQ ID NO: 265843 - DNA, 75 bp, synthetic construct
  source 1..75: mol_type = other DNA
atgaggcggtccggattaaaaggaccgctcaaagagaaatcgaaaggggaggtaaaagtgatcaataaattactg

SEQ ID NO: 265844 - DNA, 75 bp, synthetic construct
  source 1..75: mol_type = other DNA
acaggacgataactatctggaccatgcccggtcagttgctatcaggatgtttccggtagccagtacactgggtat

SEQ ID NO: 265845 - DNA, 75 bp, synthetic construct
  source 1..75: mol_type = other DNA
gaaaaattagcactaggattagttaatttttcttgttcaacgctggcatcaatcccatctataagctcatgtggg

SEQ ID NO: 265846 - DNA, 75 bp, synthetic construct
  source 1..75: mol_type = other DNA
tatggttaaaattaaaaggttcttgttattatcctgatttcagagtgcgaatagaaaataacactgcaatttctc

SEQ ID NO: 265847 - DNA, 75 bp, synthetic construct
  source 1..75: mol_type = other DNA
taaatatatcactactgatattttcgaagaacatggtttgataaaatatgtgaacttaagtttcgatattgttgc

SEQ ID NO: 265848 - DNA, 75 bp, synthetic construct
  source 1..75: mol_type = other DNA
gttgaatacatttcatggggtgttcccgggaaaacaagactgatgtttgagtcaaaggagcaggcactggaagtt

SEQ ID NO: 265849 - DNA, 75 bp, synthetic construct
  source 1..75: mol_type = other DNA
attgagcacagtgaaaataaaaacaggatgaaagtctttgccggaaccaactttattgatttcaatatgacagga

SEQ ID NO: 265850 - DNA, 75 bp, synthetic construct
  source 1..75: mol_type = other DNA
cgttttgtgaacaaacagaccctgttaagaaacacggtcacggcaaaagtggtcatcagcgttaccgttgtcaga

SEQ ID NO: 265851 - DNA, 75 bp, synthetic construct
  source 1..75: mol_type = other DNA
caaattagtggtgataaagagctactgttcccgggggatcatgacgcaactaaggttatgagtgaaaacacggta

SEQ ID NO: 265852 - DNA, 75 bp, synthetic construct
  source 1..75: mol_type = other DNA
tcagccgcatcggcccggtgattgcgctgttattgattgaagccttacgcgatccgtttgcccgccggaagatcg

SEQ ID NO: 265853 - DNA, 75 bp, synthetic construct
  source 1..75: mol_type = other DNA
tgacagaaactcaaacgacataaaatttaatatttctcttgattttatagagcacaatatagacttactatctag

SEQ ID NO: 265854 - DNA, 75 bp, synthetic construct
  source 1..75: mol_type = other DNA
ttttgaacaggcatgtaaaaaattattagatcagacaaaaccagataatgtttatcctataaatactaatatggg

SEQ ID NO: 265855 - DNA, 75 bp, synthetic construct
  source 1..75: mol_type = other DNA
ggggggaaattggtttttcatcccgacctttacgaaaagcgtagcgatgcttcagtaaaactcaaaccacaggaa

SEQ ID NO: 265856 - DNA, 75 bp, synthetic construct
  source 1..75: mol_type = other DNA
atctttcatttgatgacatattaaaatataagcaagagttcaaaaaaatatgttataaacaacttcaagagttta

SEQ ID NO: 265857 - DNA, 75 bp, synthetic construct
  source 1..75: mol_type = other DNA
aatttgatttagcgcaacaacaactccaacaaattaatgcgtgccacacgaacaccacatatacaaatgcagact

SEQ ID NO: 265858 - DNA, 75 bp, synthetic construct
  source 1..75: mol_type = other DNA
ctgcctaatgaaaaagatataaattatggggtggaaatagaaataccatctggcaaaagaattcgcttatcaaat

SEQ ID NO: 265859 - DNA, 75 bp, synthetic construct
  source 1..75: mol_type = other DNA
gatgataaccggaaaaaggggcttccggttcgtctggtccgccagcgttcccgtctgcgcaaggcccgtcacgat

SEQ ID NO: 265860 - DNA, 75 bp, synthetic construct
  source 1..75: mol_type = other DNA
ccgcatcattgcggcggagatgccaaaagaactggggtatgcactgaaacaacaactgaggttatggctgacccg

SEQ ID NO: 265861 - DNA, 75 bp, synthetic construct
  source 1..75: mol_type = other DNA
agtgaaaatttcattggatacttctgtttcagcagatgaattacgcaggataattgatcgtcttacagaacaggg

SEQ ID NO: 265862 - DNA, 75 bp, synthetic construct
  source 1..75: mol_type = other DNA
caatgaaaagcaaagattcaaaaatgattgattttttattaaaaaatggagcaatattaggcaaacgatttgaga

SEQ ID NO: 265863 - DNA, 75 bp, synthetic construct
  source 1..75: mol_type = other DNA
aaaatatattacgcgtaacaaactcatcttcttctggcataagtgaaaaacatttagatcactgtgctaatactg

SEQ ID NO: 265864 - DNA, 75 bp, synthetic construct
  source 1..75: mol_type = other DNA
tcacaagcttccaggacctattccccagtgttatcagaaatctcatttacagtgatttaggattccatgatacca

SEQ ID NO: 265865 - DNA, 75 bp, synthetic construct
  source 1..75: mol_type = other DNA
ttgcttgcgaaatggatttgcccctatatttccagacacctgtcatcacttaacccattactggcccgctgccgt

SEQ ID NO: 265866 - DNA, 75 bp, synthetic construct
  source 1..75: mol_type = other DNA
gtagctccctaaatatacgaagtttttcgaaatgggatgccaccatgctaattggtcttttggcttcaggagagg

SEQ ID NO: 265867 - DNA, 75 bp, synthetic construct
  source 1..75: mol_type = other DNA
ataatgctattccacctgttttttaccatgagcaccaatcatttttcttagataactttaaagaggttgtggatg

SEQ ID NO: 265868 - DNA, 75 bp, synthetic construct
  source 1..75: mol_type = other DNA
cccccgtcctcacttatcctacgcgttatagccgcaaggcagtaacacgctggatagaggagggagggattaatc

SEQ ID NO: 265869 - DNA, 75 bp, synthetic construct
  source 1..75: mol_type = other DNA
gtttcttcagagagattaacgcttgataattatctcgatgatttacattttgataattctcccttggtgagatta

SEQ ID NO: 265870 - DNA, 75 bp, synthetic construct
  source 1..75: mol_type = other DNA
atgatgatatgttctggggtcacattattgatattgtgggtagtattgaaacagggccgacgagtgcgagtatag

SEQ ID NO: 265871 - DNA, 75 bp, synthetic construct
  source 1..75: mol_type = other DNA
cgtcagcgtccggctgccggaagcaaagcggcaggaacgcacgccgcgtacgttccgccaaaaggtctgggggtg

SEQ ID NO: 265872 - DNA, 75 bp, synthetic construct
  source 1..75: mol_type = other DNA
cggacagggcggaagcttcatggcgttcttcgcagtcttcctggcgctgttcctgaccgctgggctgggtagtgg

SEQ ID NO: 265873 - DNA, 75 bp, synthetic construct
  source 1..75: mol_type = other DNA
cctgtttctttgatatgcaatgaggagcatcgctttttagttgcagagcaattacgagagttaaatttaccatgt

SEQ ID NO: 265874 - DNA, 75 bp, synthetic construct
  source 1..75: mol_type = other DNA
gttctcaatgttcgccctgaatggctttccacgggatccggaccgatgcgtaacgatggccagctaccgcctccc

SEQ ID NO: 265875 - DNA, 75 bp, synthetic construct
  source 1..75: mol_type = other DNA
attaaccttgtttttggctccaggttatgttcatgccaatacgtgggaaataaatgtcacaagaaaagatagtaa

SEQ ID NO: 265876 - DNA, 75 bp, synthetic construct
  source 1..75: mol_type = other DNA
caggaaaacagttgaaatagcaaaagttttgggcgttaacccggaatggctcgcatctggtgtcggtccaatgga

SEQ ID NO: 265877 - DNA, 75 bp, synthetic construct
  source 1..75: mol_type = other DNA
gtacctgtaaagcaatgcgccggagttcctcacgccacggcgctgatggtggttattcctgctctttggccttgc

SEQ ID NO: 265878 - DNA, 75 bp, synthetic construct
  source 1..75: mol_type = other DNA
tacctctacgacccgctgggacggcgaatggcgaaacgggtatggcggcgggagcgtgacctgacggggtggatg

SEQ ID NO: 265879 - DNA, 63 bp, synthetic construct
  source 1..63: mol_type = other DNA
atgttccgtgacactgtcaccgtttctggctgttttttgttgcgcccgcttcggctcccggct

SEQ ID NO: 265880 - DNA, 75 bp, synthetic construct
  source 1..75: mol_type = other DNA
atctgtccgcgataccagtaccggatgcggtggaggtgccggacaccgctgtgctggtcactcagatagtggcga

SEQ ID NO: 265881 - DNA, 75 bp, synthetic construct
  source 1..75: mol_type = other DNA
acactgcttcaaatttcaagatatacaataacaatattatcggatttgctgcacgatacttcactcaaggatctg

SEQ ID NO: 265882 - DNA, 75 bp, synthetic construct
  source 1..75: mol_type = other DNA
gtaaaattgacactgacccggtaaatcctgaaaaccagattcaggtttatgtagagaatgaagacggctctcacg

SEQ ID NO: 265883 - DNA, 75 bp, synthetic construct
  source 1..75: mol_type = other DNA
gttgacttaattggctacaccccgtggggctgcattgacctggtttctgccggaacaggggaaatgaaaaaacgc

SEQ ID NO: 265884 - DNA, 75 bp, synthetic construct
  source 1..75: mol_type = other DNA
attggttctgtggcgtcctgctccggcatggacggagccctgcatcagacgggtgtgattacagtggtgctgaaa

SEQ ID NO: 265885 - DNA, 75 bp, synthetic construct
  source 1..75: mol_type = other DNA
cagttgtcatgggcacggctcagcaccgccggcgcgaaaaatgcgtatcactattttgcacaaagtgctgatcct

SEQ ID NO: 265886 - DNA, 75 bp, synthetic construct
  source 1..75: mol_type = other DNA
ctgcgcaggcagggcaatacttggaaccataaacgtgttcaccggatttactgcctgctgaaactgaattttcgc

SEQ ID NO: 265887 - DNA, 75 bp, synthetic construct
  source 1..75: mol_type = other DNA
acacattttgccgagtctttatatccagataacgaaattattgcagattgcctttatcatctccatttctccagc

SEQ ID NO: 265888 - DNA, 75 bp, synthetic construct
  source 1..75: mol_type = other DNA
tgcgcgaattaaatgccataacccccgcgcccggttttaaccaggtttattatcccggacaggatcaggatatta

SEQ ID NO: 265889 - DNA, 75 bp, synthetic construct
  source 1..75: mol_type = other DNA
catcgaaattgttgatgatatttaccagtatttaatttccgacgcgctttataacacgtcatacgaaacgaaaaa

SEQ ID NO: 265890 - DNA, 75 bp, synthetic construct
  source 1..75: mol_type = other DNA
atgtgcgcttttgattgcagaaattgagcgcattgaccgccagacggagggaagtaacgatgagccgcgcatccc

SEQ ID NO: 265891 - DNA, 75 bp, synthetic construct
  source 1..75: mol_type = other DNA
actatcgtcgaaatttagtgaaagcatgtgcgcttttgattgcagaaattgagcgcattgaccgccagacggagg

SEQ ID NO: 265892 - DNA, 75 bp, synthetic construct
  source 1..75: mol_type = other DNA
atgcgatagagaatctgccaaaaggattccatttgcagtatgaacatagcggtagacatggtaagcacgatgcct

SEQ ID NO: 265893 - DNA, 75 bp, synthetic construct
  source 1..75: mol_type = other DNA
ctccgacggtcaccacgcagcaggacggcacggtggagatcagtgtcaccagccagacggcgggcaccagtacag

SEQ ID NO: 265894 - DNA, 75 bp, synthetic construct
  source 1..75: mol_type = other DNA
accagtcagaccgccggaatcagtgcggtcaccgccagcatcaacaacagcagccagagccggaacgtcaccttt

SEQ ID NO: 265895 - DNA, 75 bp, synthetic construct
  source 1..75: mol_type = other DNA
acgaacgctgccggtggcggcggcggtggcggcggtggtgtgagcgagtccgtcattgacttaacaggtattgac

SEQ ID NO: 265896 - DNA, 75 bp, synthetic construct
  source 1..75: mol_type = other DNA
cgttagattgttagcattaactgagaaggttatctcatctattaaaaatgatgatgataaagctaaattgctcaa

SEQ ID NO: 265897 - DNA, 75 bp, synthetic construct
  source 1..75: mol_type = other DNA
cttctcgcagaggtcaaatcatgggcgaaagagtgtgatcgtctgaccgagcgacacaccaagaatcgcacaaat

SEQ ID NO: 265898 - DNA, 75 bp, synthetic construct
  source 1..75: mol_type = other DNA
tgaaatccggaccagaggctacgaggacgattatcaactcagtattctctgaatgggccagcataaacaatgatt

SEQ ID NO: 265899 - DNA, 75 bp, synthetic construct
  source 1..75: mol_type = other DNA
ggcatgtgggcgcagtcgttcccggatgctgcgctgcacgcctgggcgatgctgccgccggatatcaaaaacatt

SEQ ID NO: 265900 - DNA, 75 bp, synthetic construct
  source 1..75: mol_type = other DNA
tggccggaataacgcagaaagccattgagtgggggctggcagatgatccgcgtcaggaccggcgagaggtactgg

SEQ ID NO: 265901 - DNA, 75 bp, synthetic construct
  source 1..75: mol_type = other DNA
gtggcggtacaacgacacgcagttactttgtgctttcggtcgagatacaacggcgggatacactgccacagtata

SEQ ID NO: 265902 - DNA, 75 bp, synthetic construct
  source 1..75: mol_type = other DNA
ttaaagagtagatatgggaatatcacatatgtaaaaaccagccgcgctcgcaaagaccgtggcggcggaacatgg

SEQ ID NO: 265903 - DNA, 75 bp, synthetic construct
  source 1..75: mol_type = other DNA
ctgaatttaacctcacccagaagcccggcgaggatgccggacagctggcagacagggtgacgaaaaatctgggtg

SEQ ID NO: 265904 - DNA, 75 bp, synthetic construct
  source 1..75: mol_type = other DNA
cgcgaagtatgacaccccacccgctacaaaacaggggcaggaaaaaacggatcctctttctgcgcttcactacgt

SEQ ID NO: 265905 - DNA, 75 bp, synthetic construct
  source 1..75: mol_type = other DNA
gtaacgaaaaatctgggagatattaattttggtcagcgttcccgcatgaccgatggtgatgcattctgggggtga

SEQ ID NO: 265906 - DNA, 75 bp, synthetic construct
  source 1..75: mol_type = other DNA
ttccttcttcaaatattttgatgaattagataacaaagttttttatatggtgaggaagcatatttggctggccaa

SEQ ID NO: 265907 - DNA, 75 bp, synthetic construct
  source 1..75: mol_type = other DNA
gaattggtggtgggataaatgcggctatcacatattctgagaccaagtctttacctacatcgggagtcagcaatt

SEQ ID NO: 265908 - DNA, 75 bp, synthetic construct
  source 1..75: mol_type = other DNA
aatacacaccggcgcgaaaagttcatttttaccactgcgaccaccggggcctgccgctggcgctcatcagcgaag

SEQ ID NO: 265909 - DNA, 75 bp, synthetic construct
  source 1..75: mol_type = other DNA
gttgattgctgcctgccaacgttgccccgcaaaggttgtattagtgactaacgaagtgggggtaatgctgccaac

SEQ ID NO: 265910 - DNA, 75 bp, synthetic construct
  source 1..75: mol_type = other DNA
aaatgtcgtctattccggagaccgacgcacccattaagcaggcgcttgcgcatggattattattacacttaaaaa

SEQ ID NO: 265911 - DNA, 75 bp, synthetic construct
  source 1..75: mol_type = other DNA
attaacaacctggttagcaaaaattacggggggtgggtaatcttgtcattagatgatgaaaaaatagaagtgatt

SEQ ID NO: 265912 - DNA, 75 bp, synthetic construct
  source 1..75: mol_type = other DNA
aggtgatcggtatccgactggatttttcgtacaaccagaactcagaacgttacaaaaaggactacagttgccttc

SEQ ID NO: 265913 - DNA, 75 bp, synthetic construct
  source 1..75: mol_type = other DNA
acatagcctgataaatcaccacctgaatagtgtcattgaacgctattcaaaggtgatcggtatccgactggattt

SEQ ID NO: 265914 - DNA, 75 bp, synthetic construct
  source 1..75: mol_type = other DNA
tgctctggctggaagctgcatcgtccacattacgtgggcagggtggtttcgctatgctacttgaacgttttgacc

SEQ ID NO: 265915 - DNA, 75 bp, synthetic construct
  source 1..75: mol_type = other DNA
atgcgtgactgccattcttcagatgataaagacgtcattgcaattgatggaaaaacgctctgcaactcttatgac

SEQ ID NO: 265916 - DNA, 75 bp, synthetic construct
  source 1..75: mol_type = other DNA
ctttctaatctccttgtatcctccggcgcgcatctgatctaccgggtgttattctttatcctggcacttcttatt

SEQ ID NO: 265917 - DNA, 75 bp, synthetic construct
  source 1..75: mol_type = other DNA
ccgacagcgttaacgtacaggcactgaacatggggcgcattgtcgctgacgtcgatggtgttaatctcgctgaac

SEQ ID NO: 265918 - DNA, 75 bp, synthetic construct
  source 1..75: mol_type = other DNA
gaagaaaatactgctttccgccacgccgctacaaaacagcattcttgagctttacggtctggtttccgtgattga

SEQ ID NO: 265919 - DNA, 75 bp, synthetic construct
  source 1..75: mol_type = other DNA
ttaaacagtcctgtgttgaccggaacgccaacaacgccaactgcgcgacagggaacgaataatacccaaatcgca

SEQ ID NO: 265920 - DNA, 75 bp, synthetic construct
  source 1..75: mol_type = other DNA
gcgaattcccctcatttgggacgcagcgcccttgatgccgtaacgttgatgaccactggcaccaacttcctcaac

SEQ ID NO: 265921 - DNA, 75 bp, synthetic construct
  source 1..75: mol_type = other DNA
tgtcgccagcctggcaaccctgacaaaagtcgggcgggatattcttgcgaaatcgaccgttgctgccgttatcga

SEQ ID NO: 265922 - DNA, 75 bp, synthetic construct
  source 1..75: mol_type = other DNA
gctgctgaatccgcggcaacgcgcgccgagacagcagcaaaacgggcagaggatattgcatccgccgtggcgctg

SEQ ID NO: 265923 - DNA, 75 bp, synthetic construct
  source 1..75: mol_type = other DNA
cgtcctcattgccttcgggaaaggtcacagtaattacatttttatcgttaattacagtaacgttatattcttcct

SEQ ID NO: 265924 - DNA, 75 bp, synthetic construct
  source 1..75: mol_type = other DNA
gcccgccgacgcaggttcgggtgtgccgcgccgtcgcggcagtgggctggccagccgcatcagcgaacagtcgga

SEQ ID NO: 265925 - DNA, 75 bp, synthetic construct
  source 1..75: mol_type = other DNA
agccgtgctctgcgtaactatggcctgcacccggaacaactggatgcccctgcaccacataccgaagtggccagt

SEQ ID NO: 265926 - DNA, 75 bp, synthetic construct
  source 1..75: mol_type = other DNA
agttaccggagaccattacccggacgaaccgcgatgaggtggagcaacatacctacggcactgccagccgggaag

SEQ ID NO: 265927 - DNA, 75 bp, synthetic construct
  source 1..75: mol_type = other DNA
gaagaacgcaccgttaccggcaagctgcgcgtacccttcagaggcaaggaatacgatgtgtctgacgttcctggt

SEQ ID NO: 265928 - DNA, 75 bp, synthetic construct
  source 1..75: mol_type = other DNA
agtgtttcgattacggttggtgccggtggtgcgcctgtgtctggtatttctgtaaacggtaaaaatggtggctcg

SEQ ID NO: 265929 - DNA, 75 bp, synthetic construct
  source 1..75: mol_type = other DNA
agagcagtcggtggacttgttattcttaatgaatcgataatgccttatgaatctgaatatgtaatggcagaactt

SEQ ID NO: 265930 - DNA, 75 bp, synthetic construct
  source 1..75: mol_type = other DNA
agagcaaaaattactcacaaatgacagaactgatttaataaatgaaaaaattaatgagctagctaagactgatga

SEQ ID NO: 265931 - DNA, 75 bp, synthetic construct
  source 1..75: mol_type = other DNA
tgcaaagcaactctgcgagcgtttttcgattcagacattcaaaaataaatttacaggcagtgaaagtttagtcac

SEQ ID NO: 265932 - DNA, 75 bp, synthetic construct
  source 1..75: mol_type = other DNA
gacatgatccagctcactgcctagctcctggtttgttccgtagtctgaagcgtggagagcgcaagcggctcaagc

SEQ ID NO: 265933 - DNA, 75 bp, synthetic construct
  source 1..75: mol_type = other DNA
agacgctgcgcgacaagcgtctggtcgagctcaacatcaacgccatggtggcaggcgccaagtatcgcggcgagt

SEQ ID NO: 265934 - DNA, 75 bp, synthetic construct
  source 1..75: mol_type = other DNA
ggcacacataaaactcggtgaatggttggcccccatcgtcaatggcccggtcaactacactggtgccaagcttga

SEQ ID NO: 265935 - DNA, 75 bp, synthetic construct
  source 1..75: mol_type = other DNA
ggaaatttaaaagaatatctacctcaagagaataaagttgtagattttctactacctcatgatgaagctaacatt

SEQ ID NO: 265936 - DNA, 75 bp, synthetic construct
  source 1..75: mol_type = other DNA
tgctttcctattttcccaccatatagaagactattttgatagagtagtcaattcagtcatagtcaatgaggcagg

SEQ ID NO: 265937 - DNA, 75 bp, synthetic construct
  source 1..75: mol_type = other DNA
acagaacatggcgaccacagccgttgctgaaaccgctggtcgacggcccgcagagcgctgtcgtgacaggaccgg

SEQ ID NO: 265938 - DNA, 75 bp, synthetic construct
  source 1..75: mol_type = other DNA
ataacccaattgcacgtaagtacgttaacttaagtgtagatggtgtagtacggttctatgggtgtatataccaaa

SEQ ID NO: 265939 - DNA, 75 bp, synthetic construct
  source 1..75: mol_type = other DNA
cccaaaaggctttatgattgctgcaacaaatctagataaaagtatagacccagcagtttggcgacgtttcgatga

SEQ ID NO: 265940 - DNA, 75 bp, synthetic construct
  source 1..75: mol_type = other DNA
atgtgtaacgctgacgtaaaattgggcgatctgcttattggcgaaagatgcgcagaaattcgcagccaaagtctt

SEQ ID NO: 265941 - DNA, 75 bp, synthetic construct
  source 1..75: mol_type = other DNA
gccggatacattgagcgcgtctatgatgaaaataacaagccgtgtgggtatgttgctaatgattccgcgataccg

SEQ ID NO: 265942 - DNA, 75 bp, synthetic construct
  source 1..75: mol_type = other DNA
gaacttcatgttcgcaaatcagtagatagccattcaatgacccgtctgttaggcgctaaaaagggcgctacgaag

SEQ ID NO: 265943 - DNA, 75 bp, synthetic construct
  source 1..75: mol_type = other DNA
ctaccgtcaaaaaagcgctgaacgaacaggccgcagccaccacgcagcaattcagcaccatcaaaaacacgctgg

SEQ ID NO: 265944 - DNA, 75 bp, synthetic construct
  source 1..75: mol_type = other DNA
gtgatggttccttcgaaccacaatgggtgaagaaaaatcagacccgtattaccggcatggacaaccagatcctgg

SEQ ID NO: 265945 - DNA, 75 bp, synthetic construct
  source 1..75: mol_type = other DNA
atgggaagacatagatctgaaaactggaacgatgaccatacgccggaattatacgaaactcggtgatttcactct

SEQ ID NO: 265946 - DNA, 75 bp, synthetic construct
  source 1..75: mol_type = other DNA
cgaaaacgttagaattctaaaaggattaatcgaagaatatagacatgccgaaacaatacggaaaaacggcttgtc

SEQ ID NO: 265947 - DNA, 75 bp, synthetic construct
  source 1..75: mol_type = other DNA
aggatttcagactttctggctaagctcgcaatccgcttttcggcagaatggtactgaaccgccccgggtttcctg

SEQ ID NO: 265948 - DNA, 75 bp, synthetic construct
  source 1..75: mol_type = other DNA
ccgcattaacctcgaacatatcaaaagcctctggcctgacagtccgtttaagcgttatggcgacgtgaccgaagt

SEQ ID NO: 265949 - DNA, 75 bp, synthetic construct
  source 1..75: mol_type = other DNA
tagaaggtgagaaaatatgttctttaatcagtaaatattacccagagttttgggatttcgaatccattaattatg

SEQ ID NO: 265950 - DNA, 75 bp, synthetic construct
  source 1..75: mol_type = other DNA
cagcagtgggagcacagagcgggaagaatgctgttgagaataactatctgagtaaagcccagaaagctcaaaaag

SEQ ID NO: 265951 - DNA, 75 bp, synthetic construct
  source 1..75: mol_type = other DNA
ttacatttcgcattatgggaggaagtgatagccacccagcccagaactgaaggccagcatcaggacagtacccca

SEQ ID NO: 265952 - DNA, 75 bp, synthetic construct
  source 1..75: mol_type = other DNA
cacagcaaaacgaaggtagccatattccggcctataccggaagcaatactgccgttcatcacgcagctggtggag

SEQ ID NO: 265953 - DNA, 75 bp, synthetic construct
  source 1..75: mol_type = other DNA
ctttaggttttaagcccgcccgtcaggcaccaccgccaccgacagggcctagtggactaccgccccttgcacagg

SEQ ID NO: 265954 - DNA, 75 bp, synthetic construct
  source 1..75: mol_type = other DNA
ttaaattctgcctctatagagggtaataaactcaaagtcacaggtgatggtagttctcgggttgacctcggtaat

SEQ ID NO: 265955 - DNA, 75 bp, synthetic construct
  source 1..75: mol_type = other DNA
ggtttaaaatctgactctatagagggtaataaactcaaagtcataggtgatggtagttctcgggttgacctcggt

SEQ ID NO: 265956 - DNA, 75 bp, synthetic construct
  source 1..75: mol_type = other DNA
caacacattgttgatgagctggcgatgccggatacagcgttttatgccatggatgcccgaggtcatggtcgctca

SEQ ID NO: 265957 - DNA, 75 bp, synthetic construct
  source 1..75: mol_type = other DNA
ttacatttaatgtttgaaaatcaatacaatgagctggccactgccgttgatgatatcgctgaacgtatacgctcg

SEQ ID NO: 265958 - DNA, 75 bp, synthetic construct
  source 1..75: mol_type = other DNA
gtattgctgaatcatcccgggtggagattgcagacggcctgtcccggcttcttgctgacacctataccctgtata

SEQ ID NO: 265959 - DNA, 75 bp, synthetic construct
  source 1..75: mol_type = other DNA
cgtatcgcagtacggcagattagcgcacaggaggctaaaacaccctcaatggtcattgcatgacatccggcgcac

SEQ ID NO: 265960 - DNA, 75 bp, synthetic construct
  source 1..75: mol_type = other DNA
tttctccttactacgtcgcgttaatccgcctcctgattgtcttcggagccaggacggtagaactgaggttatcgg

SEQ ID NO: 265961 - DNA, 75 bp, synthetic construct
  source 1..75: mol_type = other DNA
tggtgatgaaattaatatcccgcaaaaaggcaaaaactacggctggccgctggcaacctggggaatcaactattc

SEQ ID NO: 265962 - DNA, 75 bp, synthetic construct
  source 1..75: mol_type = other DNA
attcctcttttactaacccattatcttgggcgtctggcaaaacaacatcagcaatatactcttccagccatcggt

SEQ ID NO: 265963 - DNA, 75 bp, synthetic construct
  source 1..75: mol_type = other DNA
ctggacgcgaaaagataccggacaatgggggattgggtttatcgcgcaggatgttaagaaaatcttcccccaggc

SEQ ID NO: 265964 - DNA, 75 bp, synthetic construct
  source 1..75: mol_type = other DNA
actgctcccacacctggctgaagcactgaacagtaatccgggaagcaggaaactgattgttctgcatctgacggg

SEQ ID NO: 265965 - DNA, 75 bp, synthetic construct
  source 1..75: mol_type = other DNA
tgaaagaatatgtttctactttcggagatatagtcatcgcaatagaagacccacctgaaatacctgtccagggtt

SEQ ID NO: 265966 - DNA, 75 bp, synthetic construct
  source 1..75: mol_type = other DNA
ttacatatgtcaatctctaaattgcatgcactggatgatgttactcgcaattacatcattacaatgccatgcttt

SEQ ID NO: 265967 - DNA, 75 bp, synthetic construct
  source 1..75: mol_type = other DNA
tagcaaacaataactttaaagctaacgagatttctggttctgggcttgggatatctccttataaaactgtttttg

SEQ ID NO: 265968 - DNA, 75 bp, synthetic construct
  source 1..75: mol_type = other DNA
atgacccgctgcaggggcgatatatcactcaggatccgattgggctgaaggggggatggaatttttatcagtatc

SEQ ID NO: 265969 - DNA, 75 bp, synthetic construct
  source 1..75: mol_type = other DNA
tctaaagctgatggttttatctgggttaaacgtaagcactattttgcaaaagaactgaaccatcactacttttca

SEQ ID NO: 265970 - DNA, 75 bp, synthetic construct
  source 1..75: mol_type = other DNA
agataaaggaaatctatttgctataatagaagcattgattttaaaatctctagatcaagctaacatattaaagca

SEQ ID NO: 265971 - DNA, 75 bp, synthetic construct
  source 1..75: mol_type = other DNA
tggcagggaaaatcagatgtttttgatgcaaatcataacgtgtttgactataacgtattgcgaaagaattttaat

SEQ ID NO: 265972 - DNA, 75 bp, synthetic construct
  source 1..75: mol_type = other DNA
ttacgctacgtttgattcttgcttttccgttcatgttactgacagctgcagatatcagtatcagcctgtactcat

SEQ ID NO: 265973 - DNA, 75 bp, synthetic construct
  source 1..75: mol_type = other DNA
gctgcaggggaggtatatcactcaggatccgattgggctgaaggggggatggaatttttatcagtatccgctgaa

SEQ ID NO: 265974 - DNA, 75 bp, synthetic construct
  source 1..75: mol_type = other DNA
aattctattcaaggggctatcttcgcattacaacaaatagcattaggcagcgatactgatttgggacttgttcgc

SEQ ID NO: 265975 - DNA, 75 bp, synthetic construct
  source 1..75: mol_type = other DNA
ccctgccccagccgtaccggctgccggggcagcagtatgataaggagtcggggctgtactataaccgtcaccggt

SEQ ID NO: 265976 - DNA, 75 bp, synthetic construct
  source 1..75: mol_type = other DNA
ggaatgctttccgaaagcctctggttcggcggtcatactggttaaagcgatggtgtcatttgggcaaatgttcta

SEQ ID NO: 265977 - DNA, 75 bp, synthetic construct
  source 1..75: mol_type = other DNA
ccactgacaacgcgggcattgcctatttaatttccggtatcggtttggggcgattgatcagtattttattcttcg

SEQ ID NO: 265978 - DNA, 75 bp, synthetic construct
  source 1..75: mol_type = other DNA
atcggcgatcaacagggctggttgcatcgtaaaggtgccacgccggatgacaacggtctggtgattattcccggt

SEQ ID NO: 265979 - DNA, 75 bp, synthetic construct
  source 1..75: mol_type = other DNA
tcatggtttgccggaaggcagtgatgacgcgatgcgctatatcgtggaacatgacgatgcgctggcgtttgctcg

SEQ ID NO: 265980 - DNA, 75 bp, synthetic construct
  source 1..75: mol_type = other DNA
atgttcaaatcgatcatgaccgtatcattgctggccgccgctattgcttctaccagcgcagtggccgcagacaat

SEQ ID NO: 265981 - DNA, 75 bp, synthetic construct
  source 1..75: mol_type = other DNA
cttgcgctgattggcaccgatacgctggcgggcgataactgccagttactgatttccggggccgacgaacaggaa

SEQ ID NO: 265982 - DNA, 75 bp, synthetic construct
  source 1..75: mol_type = other DNA
tgttattgatacacttggattcagtgattctgttttatcaacgctgaaatcactgggtaaggcgagaggtcttat

SEQ ID NO: 265983 - DNA, 75 bp, synthetic construct
  source 1..75: mol_type = other DNA
ccgatttattaattcttggggatggttttttctttcgctatctggaaggagatacagaatctgttgttaaagttc

SEQ ID NO: 265984 - DNA, 75 bp, synthetic construct
  source 1..75: mol_type = other DNA
gccgctggtgcgctatggctggacgccgcgcggcgaactggcggcagtgtatgaccgcagcaatacacaggtgcg

SEQ ID NO: 265985 - DNA, 75 bp, synthetic construct
  source 1..75: mol_type = other DNA
gaagatgcgcatcgacagcaagacatcatggctatcagcttgtcgtcgtgcaggaattgaagatttccgtttcca

SEQ ID NO: 265986 - DNA, 75 bp, synthetic construct
  source 1..75: mol_type = other DNA
gaaaaacattgagtttcgtctgctggatagcgacggtgccaccagcgcgattctggaagcgcaccgatccctggc

SEQ ID NO: 265987 - DNA, 75 bp, synthetic construct
  source 1..75: mol_type = other DNA
tagtaccttgcggatttatgctactggcattcgttattatctggttttatccgctcacggataaaaaattcaaag

SEQ ID NO: 265988 - DNA, 75 bp, synthetic construct
  source 1..75: mol_type = other DNA
ccatcactgcagctggttatatttatcaaaatcgccagggccttaaggtcctgtgcgattggcttgatgcgccga

SEQ ID NO: 265989 - DNA, 75 bp, synthetic construct
  source 1..75: mol_type = other DNA
ccgaagagcttaaggcaatctttcttacctacaatggcctgaatcgtcctgcaatgatcaaaggtatgcccatca

SEQ ID NO: 265990 - DNA, 75 bp, synthetic construct
  source 1..75: mol_type = other DNA
gtcagaaaatatgatcaatggcagaccgatttgtctgtttaaattgcatgaaccggtacaggttgcgcactggta

SEQ ID NO: 265991 - DNA, 75 bp, synthetic construct
  source 1..75: mol_type = other DNA
agaacgtaagcacatcattatcgataacgattcgccggaggccattgccgagctggcggaacatctgaagaaagc

SEQ ID NO: 265992 - DNA, 75 bp, synthetic construct
  source 1..75: mol_type = other DNA
ccgctcacggataaaaaattcaaagaaatcgtggttgaaattgataatcgtaaaaaagtgcagcagcaattaatc

SEQ ID NO: 265993 - DNA, 75 bp, synthetic construct
  source 1..75: mol_type = other DNA
ttacggcaccaccaaagggcagcttcgacaggctattctgtggcaggatctcgatcgcgtgctggcggaaatggg

SEQ ID NO: 265994 - DNA, 75 bp, synthetic construct
  source 1..75: mol_type = other DNA
acatccaaaaaactgacaaaaaccgcgatcaatgaagccctgcgtagaatcagggagtcagggattgataaacca

SEQ ID NO: 265995 - DNA, 75 bp, synthetic construct
  source 1..75: mol_type = other DNA
aagagctgcagcgggtacatcagcatcgctttcatgccgtggcgatgtcggcacacggcaaacccggcatcatgc

SEQ ID NO: 265996 - DNA, 75 bp, synthetic construct
  source 1..75: mol_type = other DNA
ttgcaaagcagggaatggtttgatgccgatgcggtggtgatttctgattttatcgctcagcggttgcctgacgac

SEQ ID NO: 265997 - DNA, 75 bp, synthetic construct
  source 1..75: mol_type = other DNA
gtgaatataaactgcacgtacgctgtgaaagtatcgcttactccgtgcagactatggtggtgaagggcggttcag

SEQ ID NO: 265998 - DNA, 75 bp, synthetic construct
  source 1..75: mol_type = other DNA
aagaaagtcgacagctataccgcaaatatcaaaaatgagaaaaagactttgggtaacaaattctacggtagctgc

SEQ ID NO: 265999 - DNA, 75 bp, synthetic construct
  source 1..75: mol_type = other DNA
catcctggacaaggtggtggagcagaagccggccactatcagccactttgctgatctgatcacctttgtcaaaga

SEQ ID NO: 266000 - DNA, 75 bp, synthetic construct
  source 1..75: mol_type = other DNA
attgagccattcggaacgtaataatgtgcgagctgcgtatattcatacgtctgagcatttagatgagcgcagact

SEQ ID NO: 266001 - DNA, 75 bp, synthetic construct
  source 1..75: mol_type = other DNA
ggctcaaaaatgaagaccccacacctcgtgccgttaagtcgtcaggctttagaactcctcaaagatatcagagaa

SEQ ID NO: 266002 - DNA, 75 bp, synthetic construct
  source 1..75: mol_type = other DNA
actgtgcactggtacctgaacaaccagacctggtggcagcgtgtgctggacggctcctatgctggcgagcgtctt

SEQ ID NO: 266003 - DNA, 75 bp, synthetic construct
  source 1..75: mol_type = other DNA
gccattgatgccgcaaaaattcagcgcgatctgggctgggtaccacaggagacgttcgagagcgggattgagaaa

SEQ ID NO: 266004 - DNA, 75 bp, synthetic construct
  source 1..75: mol_type = other DNA
tcgtcatatcattgaaaataccctggacgaagtccgtgtgatggactgcctgacttacgccggtaacctcgaatc

SEQ ID NO: 266005 - DNA, 75 bp, synthetic construct
  source 1..75: mol_type = other DNA
tcaccactgccggtgcagcaaagctggcagcggcaaccgcgcctggagggcggaaggtcaacattaccacgatgg

SEQ ID NO: 266006 - DNA, 75 bp, synthetic construct
  source 1..75: mol_type = other DNA
tattcaatatcttggtctgagcgatgcaagtggatacgttggacgctggctgaatacccgggttttcacctcatc

SEQ ID NO: 266007 - DNA, 75 bp, synthetic construct
  source 1..75: mol_type = other DNA
cattttttgatgtaacgaaagctggtttttacaatcttaaggatgaagttcaaaaaagcacggatattgtaaata

SEQ ID NO: 266008 - DNA, 75 bp, synthetic construct
  source 1..75: mol_type = other DNA
atgcacctgctgatcaatcccaatggttcaaaatactggcgactccaataccgtttcgggggcaaacagaaagtt

SEQ ID NO: 266009 - DNA, 75 bp, synthetic construct
  source 1..75: mol_type = other DNA
gcacgtcagaaacgcaggctgccacaccaaaggcagtgaaggcggcatatgaccttgcagcaggtaaggcacctg

SEQ ID NO: 266010 - DNA, 75 bp, synthetic construct
  source 1..75: mol_type = other DNA
gcctatgagtgaaaacacggtaaacaaggctttaaggtctatgggctacgacactacggttgaagtatgtggaca

SEQ ID NO: 266011 - DNA, 75 bp, synthetic construct
  source 1..75: mol_type = other DNA
acatatggctgaatatttgactcggaacagtctctcacattcaacttctgtagagagccaaataatgttaacaag

SEQ ID NO: 266012 - DNA, 75 bp, synthetic construct
  source 1..75: mol_type = other DNA
cgcactcgggcgcgtgagatatttgagtttgagtacgataaaaaggcgcttgcagatccttcacttaatttcatt

SEQ ID NO: 266013 - DNA, 75 bp, synthetic construct
  source 1..75: mol_type = other DNA
cattttatggaaagattttaaatagtaatgacaatgaattaatctgtatgatctataggattaatattattttgg

SEQ ID NO: 266014 - DNA, 75 bp, synthetic construct
  source 1..75: mol_type = other DNA
ggaagtggcacattccggagctggcccggcagatttatccgtgggtcagctggctgtaccaggagtattacggtc

SEQ ID NO: 266015 - DNA, 75 bp, synthetic construct
  source 1..75: mol_type = other DNA
agcctgcccgcagacaccggctacccggacccgcgcggggaactggacccggaagccgcccccggcctgctgtat

SEQ ID NO: 266016 - DNA, 75 bp, synthetic construct
  source 1..75: mol_type = other DNA
cagggtgagctgtgggaataccgccacgacgccagcggcaggcggacggaaaaatgctgccggcaaaaagccatc

SEQ ID NO: 266017 - DNA, 75 bp, synthetic construct
  source 1..75: mol_type = other DNA
aaaacatgcgtattcaggaactggctcagaatatccacaaactgattgttcaccacaatctgccggatctgatgt

SEQ ID NO: 266018 - DNA, 75 bp, synthetic construct
  source 1..75: mol_type = other DNA
ccgtcggacgctccgctttctggggtgccccacgcgcgccgatgacggtagcgatttctgccgatggtgggaaaa

SEQ ID NO: 266019 - DNA, 75 bp, synthetic construct
  source 1..75: mol_type = other DNA
acaacaattcgtctattcaggtaacgacgcttgccagcggcgaactggcgctggtgtacaacgcgatgagtgcgg

SEQ ID NO: 266020 - DNA, 75 bp, synthetic construct
  source 1..75: mol_type = other DNA
tccatgatggctcgcctgaaagagctggaagaggaaaaccgccgtctcaaaaagatgtacgccgaagagcggctc

SEQ ID NO: 266021 - DNA, 75 bp, synthetic construct
  source 1..75: mol_type = other DNA
cagccgcccgcgactgttggtcgatgtatttaaacaaaaaccagagtacgaacttagtgaagacgactttgattt

SEQ ID NO: 266022 - DNA, 75 bp, synthetic construct
  source 1..75: mol_type = other DNA
ggcgaatatgctgcaagtgctgcatatggggctgcatgtttgccagttgatgggctacgggcagattaacgatgg

SEQ ID NO: 266023 - DNA, 75 bp, synthetic construct
  source 1..75: mol_type = other DNA
taatctcaccgccgaaaaaattgaaaacaccgggaatatcattgagtgtgcagacttgcaagagacgaccaacgc

SEQ ID NO: 266024 - DNA, 75 bp, synthetic construct
  source 1..75: mol_type = other DNA
cacccaatacgaaaagaaattatcgatcgattcatcgatcagctacaagctatgctcacgcattatgacgaactg

SEQ ID NO: 266025 - DNA, 75 bp, synthetic construct
  source 1..75: mol_type = other DNA
ttaaaagaattggaaaaaagtatcaatccagaaagagaggttttacaatgtatcgttgagcactatcctgggtct

SEQ ID NO: 266026 - DNA, 75 bp, synthetic construct
  source 1..75: mol_type = other DNA
gctactgagcgtaagaacatcgatttagttgaaactttcaactatctcattggcttacatgtgaaatccatcgaa

SEQ ID NO: 266027 - DNA, 75 bp, synthetic construct
  source 1..75: mol_type = other DNA
ttcgttttgtctgcacaaatggcctggtgtgcggaaataattttggcgaaatccgcgttccacataaaggtgata

SEQ ID NO: 266028 - DNA, 75 bp, synthetic construct
  source 1..75: mol_type = other DNA
aaagtacagcgactggttgaacaaaactatcacctcatgagtgaagatgagaagaatgttttttcaaagctttgt

SEQ ID NO: 266029 - DNA, 75 bp, synthetic construct
  source 1..75: mol_type = other DNA
tcagagaaaacaataccatttttgtaacatatggaccaacccaagagaacagcgttgaccctgaaaatccaaatg

SEQ ID NO: 266030 - DNA, 75 bp, synthetic construct
  source 1..75: mol_type = other DNA
aaatgcagaagtgtttgccaatgttgagaaacaattgcgcatgattcaatgtttgcgtgctgttgcgctggaact

SEQ ID NO: 266031 - DNA, 75 bp, synthetic construct
  source 1..75: mol_type = other DNA
tggctgcacggcaccgggtgcagttcaaaaatgatggacattatttttgtggagccggaggaaacagaccagacg

SEQ ID NO: 266032 - DNA, 75 bp, synthetic construct
  source 1..75: mol_type = other DNA
cgtcattatattattaatttcccctttgaatctgacggtaaaaaaaatagagcttccagggaagtcatcttataa

SEQ ID NO: 266033 - DNA, 75 bp, synthetic construct
  source 1..75: mol_type = other DNA
ggccgaaactttactaccctattgtggtaaccgagaaagatcagatacgcgtacctaaaatgtcgtggaatgatt

SEQ ID NO: 266034 - DNA, 75 bp, synthetic construct
  source 1..75: mol_type = other DNA
aacctttagcgatattgaaaagaacctgcgcatgatccagtgcttacgcagtattgcgttggacttgattaaatt

SEQ ID NO: 266035 - DNA, 75 bp, synthetic construct
  source 1..75: mol_type = other DNA
gtgacacctacgccattccctatgccggcgaagaagtcatgctgcactgggccaataaagatcagtactacatca

SEQ ID NO: 266036 - DNA, 75 bp, synthetic construct
  source 1..75: mol_type = other DNA
accgtgcggtaagtacgcgcatccgggcttttatcgatttccttagcgagcatgtaaaaacagctcccggaggag

SEQ ID NO: 266037 - DNA, 75 bp, synthetic construct
  source 1..75: mol_type = other DNA
ttatgcatggtgcatatggtgcgcaacagcctgcgcttcgtgtcatggaaggactacaaagccgtcactcgcgac

SEQ ID NO: 266038 - DNA, 75 bp, synthetic construct
  source 1..75: mol_type = other DNA
ccggggaaactatttacatgctccagatcgctgtagaccggtcgatagttgagtaccagcttgtaaaatcgctag

SEQ ID NO: 266039 - DNA, 75 bp, synthetic construct
  source 1..75: mol_type = other DNA
tcagtaagaaagcaggcattgataacgccacagtcgctatttacggttgtgacaatttcgtgattgataatattg

SEQ ID NO: 266040 - DNA, 75 bp, synthetic construct
  source 1..75: mol_type = other DNA
ggtgctttgggggagtcggggttatggagtgatgacgcaatagaacgccagttgagtcactcagaacgtaacaat

SEQ ID NO: 266041 - DNA, 75 bp, synthetic construct
  source 1..75: mol_type = other DNA
gccgaaggcgatacacctcaaaaggcgatgaaaggaggagatgccatcattattaatccctttaacggtgaagta

SEQ ID NO: 266042 - DNA, 75 bp, synthetic construct
  source 1..75: mol_type = other DNA
gtgtggatcactattgcaccgttcgtgacatttacgtcaaaagacggaaacagttacatcgaaatgccatatacc

SEQ ID NO: 266043 - DNA, 75 bp, synthetic construct
  source 1..75: mol_type = other DNA
tgccttttcgtctgcttttaacccgcacgtcacagctgattgctgtgctttgggaagaatgggatatcagccaga

SEQ ID NO: 266044 - DNA, 75 bp, synthetic construct
  source 1..75: mol_type = other DNA
tctaaataaaacacgagttattgcaaaaataacaatattgagtagtatagtgcatatagtatcaatttatatact

SEQ ID NO: 266045 - DNA, 75 bp, synthetic construct
  source 1..75: mol_type = other DNA
caatatctgctggtttgccagtactgtcagcaataagcgctgttttcgatattgtctggcaggccattaaaacag

SEQ ID NO: 266046 - DNA, 75 bp, synthetic construct
  source 1..75: mol_type = other DNA
cgatggcattcctcagtttcgccgccgtaggagctgtcagcaatatcgtcatggggacatttaagttcatcatga

SEQ ID NO: 266047 - DNA, 75 bp, synthetic construct
  source 1..75: mol_type = other DNA
accgccgtgcaaatgtttaaaacaaccggcgataacatgtcagcggcgttcaccacgctgggtgccagtgcaaaa

SEQ ID NO: 266048 - DNA, 75 bp, synthetic construct
  source 1..75: mol_type = other DNA
gcgttcaatgaggccttcgcgcaggccgacaccgtcaacgtgccagcgagtgtggtttgcgacaatatcaatacg

SEQ ID NO: 266049 - DNA, 75 bp, synthetic construct
  source 1..75: mol_type = other DNA
gggagtcaataaccacaattctgaagaaatcagaagaggaagccaaagccgttaaagtaggggatgtagttcaaa

SEQ ID NO: 266050 - DNA, 75 bp, synthetic construct
  source 1..75: mol_type = other DNA
aagatccctatttgaatagaaccatttttttaaatactgatttaaaaagctatattaaaggctcaattacagcaa

SEQ ID NO: 266051 - DNA, 75 bp, synthetic construct
  source 1..75: mol_type = other DNA
gtcatattgcgccctgtccggggtgccggatgcacatgtctctggcgcaatgcccgggctttttattcgcacatc

SEQ ID NO: 266052 - DNA, 75 bp, synthetic construct
  source 1..75: mol_type = other DNA
ggctgttattctatcttttttcaaggtgtatattgctaatatctatacttagcttttctgggattctttttggac

SEQ ID NO: 266053 - DNA, 75 bp, synthetic construct
  source 1..75: mol_type = other DNA
cgcatccacctcaatgcggacgcggggcctgtgcgtatttcctcactgataaccgatcggcttactgccctacag

SEQ ID NO: 266054 - DNA, 75 bp, synthetic construct
  source 1..75: mol_type = other DNA
ccacgtattaccgtagcccggatgacaacgcgttagctgtagaagtgatcaataacgccggtacgctgcagccta

SEQ ID NO: 266055 - DNA, 75 bp, synthetic construct
  source 1..75: mol_type = other DNA
ctgtgtgagtatccgtgagaacgatgacggtacgtatgccatcactgccgtgcagcatgtaccggagaaagaagc

SEQ ID NO: 266056 - DNA, 75 bp, synthetic construct
  source 1..75: mol_type = other DNA
tgagcggctacggcccagtggtgcagattttcatcggcgggaaagacaagcgtacgctgcgtaacctgaccatta

SEQ ID NO: 266057 - DNA, 75 bp, synthetic construct
  source 1..75: mol_type = other DNA
acagatggacaacagtgctttggcctatacggtccgcggtattcaaatttcctcgggtaacaacccctcgtttgt

SEQ ID NO: 266058 - DNA, 75 bp, synthetic construct
  source 1..75: mol_type = other DNA
ctagtaacaagcgctggagtgaagatcatcgatcgcgcgttcttcgctaccttgagctttatatcttccctcata

SEQ ID NO: 266059 - DNA, 75 bp, synthetic construct
  source 1..75: mol_type = other DNA
acgcctttgccctggtatcggtcgcggcgattattcagcctgacggcagcgggcgcgtcgcgctgggcggagtag

SEQ ID NO: 266060 - DNA, 75 bp, synthetic construct
  source 1..75: mol_type = other DNA
gcgcctcctacgcctttgccctggtatcgatcgcgcctcctacgcctttgccctggtatcggtcgcggcgattat

SEQ ID NO: 266061 - DNA, 75 bp, synthetic construct
  source 1..75: mol_type = other DNA
tcgcaacgggtaaaaatgccaatgttatgtcgcaggaggaatgggaagcgttgcctgcgcttttgtctggattta

SEQ ID NO: 266062 - DNA, 75 bp, synthetic construct
  source 1..75: mol_type = other DNA
gtggtggggccggtggtggttgtcaggtcggttatcccaataatgctgcttgtggtggcggggggatgtctgggg

SEQ ID NO: 266063 - DNA, 75 bp, synthetic construct
  source 1..75: mol_type = other DNA
aaaaagaaagccgtcagtgacattccggggcgagttgccacggcacatggttttcgctcaacattcagggactgg

SEQ ID NO: 266064 - DNA, 75 bp, synthetic construct
  source 1..75: mol_type = other DNA
caacgtgattcgtttcctgtatccactgactatcccggatgcacagttcgatgcggcaatgacaattttgcagaa

SEQ ID NO: 266065 - DNA, 75 bp, synthetic construct
  source 1..75: mol_type = other DNA
ggcaattgctgcggtacgcggtctggggtcaatgattgcggcagagtttaacgacccgcaaacgggtgagccgtc

SEQ ID NO: 266066 - DNA, 75 bp, synthetic construct
  source 1..75: mol_type = other DNA
gcgtatcagattgtgccgtacgaaagctacgtcaccctggcggagaaaatcaacgcccttgccccggtgagcggg

SEQ ID NO: 266067 - DNA, 75 bp, synthetic construct
  source 1..75: mol_type = other DNA
cttctctgatgaggggcggtggtagtgaggactggttgagccagctacgtcccggctcgttccggggcgtgcctt

SEQ ID NO: 266068 - DNA, 75 bp, synthetic construct
  source 1..75: mol_type = other DNA
cggtgcgctatcaacaaccaaagcgcgacattaccccgccttaccctccagccggctccctgagtttcttgcacg

SEQ ID NO: 266069 - DNA, 75 bp, synthetic construct
  source 1..75: mol_type = other DNA
tttttccaggggatcacgacgcggccaaagttatgagtgagaacacagtaaatagcgccttgcgtgcgatggggt

SEQ ID NO: 266070 - DNA, 75 bp, synthetic construct
  source 1..75: mol_type = other DNA
tctgggcgggctgggaggaaaccttctctcggagggtacatcgctaggcattgtggggccttatgggtcatattt

SEQ ID NO: 266071 - DNA, 75 bp, synthetic construct
  source 1..75: mol_type = other DNA
gaaggctcatttgggttcagaaatctagttgccttcacaacggctggagtaacaagctggactgttcctgaagag

SEQ ID NO: 266072 - DNA, 75 bp, synthetic construct
  source 1..75: mol_type = other DNA
acggcgatttattatccgtggctttatcgtccagaacagtctggtatacggcggtggcgacgttatttctcagcg

SEQ ID NO: 266073 - DNA, 75 bp, synthetic construct
  source 1..75: mol_type = other DNA
gctgccgcgcacgcggtgctcaatattatcgacaaagaatcactctgcgaacgcgcgaatcaactgggccagcgt

SEQ ID NO: 266074 - DNA, 75 bp, synthetic construct
  source 1..75: mol_type = other DNA
gacgccagtacagcacgcctacctgacgggccgcatgccggggcagaagcttggcggcgtgggttgccacctgta

SEQ ID NO: 266075 - DNA, 75 bp, synthetic construct
  source 1..75: mol_type = other DNA
tacaacaggacctgtcccgcagacaggttattgtgaacacaaccaaaattagtgctgcggttgcagcatcaagca

SEQ ID NO: 266076 - DNA, 75 bp, synthetic construct
  source 1..75: mol_type = other DNA
tccggctattcctgagttttgtgtagtggcagagtcccatcttaacaaaaatctgacggcaaaatatccgctaca

SEQ ID NO: 266077 - DNA, 75 bp, synthetic construct
  source 1..75: mol_type = other DNA
atggggctaatagctgttaactggagttttgacggtgcaattgcgaggtattattatcgttatgggaaatttaat

SEQ ID NO: 266078 - DNA, 75 bp, synthetic construct
  source 1..75: mol_type = other DNA
taattatatttatttaaaatcactaaatcatctcaacatgataaaaaaggaaaaagaaagtttgctcggattaga

SEQ ID NO: 266079 - DNA, 75 bp, synthetic construct
  source 1..75: mol_type = other DNA
gatcggcgaaaaagaaaaacgctggcggcatacgttgttcctcaaggcgaggctttttgcattaccgatcatcgg

SEQ ID NO: 266080 - DNA, 75 bp, synthetic construct
  source 1..75: mol_type = other DNA
accagtacgatgaactgggcaaccggactgccaccacctttccggacggcagaacgcagcgccatctgtactacg

SEQ ID NO: 266081 - DNA, 75 bp, synthetic construct
  source 1..75: mol_type = other DNA
ttgggctgaaggggggatggaatttttatcagtatccgctgaatccggttcagtatatagattcaatgggactgg

SEQ ID NO: 266082 - DNA, 75 bp, synthetic construct
  source 1..75: mol_type = other DNA
ggcggcgcggcgcgcccgctcggggcgcagatggtggtgcgcgaagatggtcgttactgcggtttgtctctggcg

SEQ ID NO: 266083 - DNA, 75 bp, synthetic construct
  source 1..75: mol_type = other DNA
tatgttcccaccagccacgcgaatgtgcgttttttattgccgaaaaaccgggtgcagagcccgtctggtggtttg

SEQ ID NO: 266084 - DNA, 75 bp, synthetic construct
  source 1..75: mol_type = other DNA
tgacgccgagcgctaaatacgccgatctactgctgccggaaaccagctatctggaagcggaagatctggtggaca

SEQ ID NO: 266085 - DNA, 75 bp, synthetic construct
  source 1..75: mol_type = other DNA
atgctaacggcgaacaaacggtacgcgctatccagacgctacccgcaatcaccggccattttggattgccgggca

SEQ ID NO: 266086 - DNA, 75 bp, synthetic construct
  source 1..75: mol_type = other DNA
actgatgtgatcaaagccttacttaagcatgggcatgatgttgttggtaatttgttaattggagagcaagcgcgc

SEQ ID NO: 266087 - DNA, 75 bp, synthetic construct
  source 1..75: mol_type = other DNA
cgttggaagagaatctggccgccctgcgtcggctgaaagaagattacccagacaaagtattgatcgcctcgatca

SEQ ID NO: 266088 - DNA, 75 bp, synthetic construct
  source 1..75: mol_type = other DNA
atatcgttccgctgagtcgtcaggcgatgaatttgttagaccagttaaagcagattagtggtgataaagagatgc

SEQ ID NO: 266089 - DNA, 75 bp, synthetic construct
  source 1..75: mol_type = other DNA
atgccatcctgtcacagaagaaagtaaattttaattacaaagataaagagtttcgggctgttgagccatacagac

SEQ ID NO: 266090 - DNA, 75 bp, synthetic construct
  source 1..75: mol_type = other DNA
cctggggcgtgaaacactcgacgagtttgatgatctgcttgcggcccatgccggagagaatgagtatctcccatg

SEQ ID NO: 266091 - DNA, 75 bp, synthetic construct
  source 1..75: mol_type = other DNA
agtctgctgtttggcctgctgacgtatctgacaaatctttatttcaagattaaagaagataagcgtaaggctgca

SEQ ID NO: 266092 - DNA, 75 bp, synthetic construct
  source 1..75: mol_type = other DNA
tgcaaactaaaagtgctaacgaaacacctggactctatatctccatgttgtatggattcgatgaaataatcgata

SEQ ID NO: 266093 - DNA, 75 bp, synthetic construct
  source 1..75: mol_type = other DNA
caaaaaagaactggttcgcctaaccctgacagaccccgtgacagggaagtcaggagaagtgaaatcactggtttc

SEQ ID NO: 266094 - DNA, 75 bp, synthetic construct
  source 1..75: mol_type = other DNA
actgggggcgtagcggcagcagtaaggattatcagttgagttattccaacaacttgcgaaggataagctataccc

SEQ ID NO: 266095 - DNA, 75 bp, synthetic construct
  source 1..75: mol_type = other DNA
atgcagaaacagcttgacccgaacgaagtcgctgcacggcgtagccttgcaggcagccgttatgatctggtggat

SEQ ID NO: 266096 - DNA, 75 bp, synthetic construct
  source 1..75: mol_type = other DNA
gaacgagaagctattgaaggagtgaagcattcggaacgtggctcgaaaatgacgtactcctcatttagtgccgct

SEQ ID NO: 266097 - DNA, 75 bp, synthetic construct
  source 1..75: mol_type = other DNA
gccctgagggtgatggggtatgacacaacccgggatgtctgtggtcatgggttccgggcgatggcatgtagtgcg

SEQ ID NO: 266098 - DNA, 75 bp, synthetic construct
  source 1..75: mol_type = other DNA
ccgtgagctacgcgatgaagaacgtaaccgcggtgcagccttcaccagacttctggtcgactggcagcccgactg

SEQ ID NO: 266099 - DNA, 75 bp, synthetic construct
  source 1..75: mol_type = other DNA
aaaacaggtgttcactgccgtacaggcagcttagaaagatacgatcgaatttagtcactgaatacccccgttcac

SEQ ID NO: 266100 - DNA, 75 bp, synthetic construct
  source 1..75: mol_type = other DNA
ctattcaggacccggcaaataccttcaacgttcttggcgtaactggtagctcacgttccgtttatccggtcatgt

SEQ ID NO: 266101 - DNA, 75 bp, synthetic construct
  source 1..75: mol_type = other DNA
tgaaaaaatcaattctgcttctgtctttgctattcagcaccactttccctgtggttgcaggacaggatgttgaca

SEQ ID NO: 266102 - DNA, 75 bp, synthetic construct
  source 1..75: mol_type = other DNA
atgcaaaaagtcaataacgctgccagcgttggtagtggcaaagtgacaaccagcgtactggtcgatgcatggtac

SEQ ID NO: 266103 - DNA, 75 bp, synthetic construct
  source 1..75: mol_type = other DNA
cgccaataatcatgtcggcggtgcacaaaatgtaggaatcgtgatttttggtgatgctgccaacttactgattta

SEQ ID NO: 266104 - DNA, 75 bp, synthetic construct
  source 1..75: mol_type = other DNA
ctgttggagtgggatattttgccagtaatgttagtgcggaagataattatccaggcggaaagacctttactgtga

SEQ ID NO: 266105 - DNA, 75 bp, synthetic construct
  source 1..75: mol_type = other DNA
ccactcaggacccggctaatatatttaatgttcttaccccagcgggcagttctcgttcaatttatccggtgatga

SEQ ID NO: 266106 - DNA, 75 bp, synthetic construct
  source 1..75: mol_type = other DNA
gccctccgggcgcctgcgggtagatttacctgcagccttcggacgacagcgcatccttcctatcctgcttgatat

SEQ ID NO: 266107 - DNA, 75 bp, synthetic construct
  source 1..75: mol_type = other DNA
ctatcggacaagataacgattttgctgtagttaaagatcagcaaaataatgctctgtcaacacaaacaattgctt

SEQ ID NO: 266108 - DNA, 75 bp, synthetic construct
  source 1..75: mol_type = other DNA
gtagaacagaatatctctcttggtgaggtttctgcttctgcacttaaagctaccggtattgcccccgcaaagagc

SEQ ID NO: 266109 - DNA, 75 bp, synthetic construct
  source 1..75: mol_type = other DNA
atgggttcgcccaggtgaagctgttcgcacaagatggtcagatattgatattgaaactggcatgtggaacatccc

SEQ ID NO: 266110 - DNA, 75 bp, synthetic construct
  source 1..75: mol_type = other DNA
tgagttgcgttttgcgcgttgggatgaattcgacttcgataaatctctatggcgcatacctgcaaaacgaaaaga

SEQ ID NO: 266111 - DNA, 75 bp, synthetic construct
  source 1..75: mol_type = other DNA
gacatcacagcgagacagttattattctctgaatgccagttggaatggttcattcacggcgactcgtcacggagc

SEQ ID NO: 266112 - DNA, 75 bp, synthetic construct
  source 1..75: mol_type = other DNA
gaatccgtaaaactggacggcgaaagcaacgccggattcatagtaaccgccatgcgcggggagatcgcccgccgc

SEQ ID NO: 266113 - DNA, 75 bp, synthetic construct
  source 1..75: mol_type = other DNA
gccatcattgatgcattaaaaaaaccggatattgccgttttacttgatgcgtatgagacggaatggtcatgctta

SEQ ID NO: 266114 - DNA, 75 bp, synthetic construct
  source 1..75: mol_type = other DNA
ttcgccaggaagtaaaaaaacttatccacatcaaggcagacagcacgctgcaaagcatgatcaacgccggagaat

SEQ ID NO: 266115 - DNA, 75 bp, synthetic construct
  source 1..75: mol_type = other DNA
agcctgggcaccgtactggtgatgtttcccgcctctttatggatggatcgggcaggcagaaaaacaggattcatt

SEQ ID NO: 266116 - DNA, 75 bp, synthetic construct
  source 1..75: mol_type = other DNA
tgatacttgcgggatcacaggctatctttcagtcgatatcggtactgataatgacaataggcggactggcggggg

SEQ ID NO: 266117 - DNA, 75 bp, synthetic construct
  source 1..75: mol_type = other DNA
ccagacggtcacgatccaggaaggtaaccgccttcttacggtggaaaaaggccacaagatcaccggagtactgaa

SEQ ID NO: 266118 - DNA, 75 bp, synthetic construct
  source 1..75: mol_type = other DNA
aagcgatccggtatataccgcaacaggtaccagtggtatcagtgttgccacgccttcactgacgccactgatgct

SEQ ID NO: 266119 - DNA, 75 bp, synthetic construct
  source 1..75: mol_type = other DNA
aagcaaaagcacaagaagtagatacagaactacttaagcgtagaatttccactggaaaagccatcgcattcacag

SEQ ID NO: 266120 - DNA, 75 bp, synthetic construct
  source 1..75: mol_type = other DNA
ttaaagaaattaagctcattgtatggaaatgtttttgcttttaataatgaggataattcagggccgtcattttcc

SEQ ID NO: 266121 - DNA, 75 bp, synthetic construct
  source 1..75: mol_type = other DNA
acactgtattgcaggaagtgggtaaaaccaaatctgacttgtacgccacaggatgattcccagtatccagggatg

SEQ ID NO: 266122 - DNA, 75 bp, synthetic construct
  source 1..75: mol_type = other DNA
gagttcgactttgataaatctctctggcgtatacctgcaaagcgagaggaaataaaaggtgtgcgttactcgtat

SEQ ID NO: 266123 - DNA, 75 bp, synthetic construct
  source 1..75: mol_type = other DNA
agtcttggcactgtgttagtgatgtttcctgcatcgttatggatgagccggataggcaggaaaaccggctttata

SEQ ID NO: 266124 - DNA, 75 bp, synthetic construct
  source 1..75: mol_type = other DNA
accctctggttgctgcgttaccgccctgacgaaattccgtttctgcgggataattttggtgtccctgaagtcacc

SEQ ID NO: 266125 - DNA, 75 bp, synthetic construct
  source 1..75: mol_type = other DNA
ggatcaacttcatctgggaagccctggacacccaggagctggagcagcgtaagttcgggatacgcacggtgctga

SEQ ID NO: 266126 - DNA, 75 bp, synthetic construct
  source 1..75: mol_type = other DNA
acgggaaatccgccgtcaactggagcgcaacagcacacctgcagtatggcagcctcatctgcctgaagatgcccg

SEQ ID NO: 266127 - DNA, 75 bp, synthetic construct
  source 1..75: mol_type = other DNA
aatcgaaggtgtgcgttactcctatcgtgggatgaagatgaaagaggaacatattgttccattgagcactcaggc

SEQ ID NO: 266128 - DNA, 75 bp, synthetic construct
  source 1..75: mol_type = other DNA
gagtttgatttcgataaatctctctggcgagtacctgcaaaacgagaagaaattaaaggagtgcgttattcgtac

SEQ ID NO: 266129 - DNA, 75 bp, synthetic construct
  source 1..75: mol_type = other DNA
cgctgacgcaggagctcgggtcactgcgggcacgccagatcctggcagaaaactttccccgtggttcagccacct

SEQ ID NO: 266130 - DNA, 75 bp, synthetic construct
  source 1..75: mol_type = other DNA
tgatgaatttgttccaggggtatataagcactataaagggaaatattatctagctataggattagcaagagaaga

SEQ ID NO: 266131 - DNA, 75 bp, synthetic construct
  source 1..75: mol_type = other DNA
cttatggtgccgctactgtggctcgctgtgcgtaaaaaacgtcaggataacgctgagaatgaggtcactttacca

SEQ ID NO: 266132 - DNA, 75 bp, synthetic construct
  source 1..75: mol_type = other DNA
gatccaatattccttcattctgctgtgtattggtatgttctttctggggatttatcaggcgttcgctcagtttta

SEQ ID NO: 266133 - DNA, 75 bp, synthetic construct
  source 1..75: mol_type = other DNA
ctacgcgccggagaaagcagtccgctgggatgggcgcgctgcaatcaaaaaattcaaggagagtttaatgttatc

SEQ ID NO: 266134 - DNA, 75 bp, synthetic construct
  source 1..75: mol_type = other DNA
aatctgaagaaaacgcttctgacttacagcagcttcatttctgccgttcgtccaatgtatgaatccgttatgacc

SEQ ID NO: 266135 - DNA, 75 bp, synthetic construct
  source 1..75: mol_type = other DNA
tttaaacttgaatttaagcgagagtttttgcgctcaaaacatatatgacaataaaattaaggaattaaaaataga

SEQ ID NO: 266136 - DNA, 75 bp, synthetic construct
  source 1..75: mol_type = other DNA
attgatttcaggctccaaaaatgttttatcaaacatactgttatctacaatgaatacgacagattcacaacctag

SEQ ID NO: 266137 - DNA, 75 bp, synthetic construct
  source 1..75: mol_type = other DNA
acacctcaggaaaatacagctgcttctcccgtacagcccaccaatacgctgaacccgataaccaatcaagcgcag

SEQ ID NO: 266138 - DNA, 75 bp, synthetic construct
  source 1..75: mol_type = other DNA
ctggaagaaattcatggcgatataacaaaaaccgacactgcggtaagtaagctggcggcacaacaacagattgat

SEQ ID NO: 266139 - DNA, 75 bp, synthetic construct
  source 1..75: mol_type = other DNA
atgctgagcttgccggagttgggcgcacctcattccgtttagaggacaccacatggacggcgctcgatatgctgg

SEQ ID NO: 266140 - DNA, 75 bp, synthetic construct
  source 1..75: mol_type = other DNA
ttaaaaactgaatgtggctctattgtatattgtgaaagcaatggtaataaatatataattaaccacgaaaataca

SEQ ID NO: 266141 - DNA, 75 bp, synthetic construct
  source 1..75: mol_type = other DNA
ctttactaacttttgttcgttcaagtgaattacgttttgctcgttggaaagaatttgattttgataacgctactt

SEQ ID NO: 266142 - DNA, 75 bp, synthetic construct
  source 1..75: mol_type = other DNA
gggcatcagagtattgcgacgaccatggagtatgtggatgtcagtgttgcatccgcagccggaacgctggagacg

SEQ ID NO: 266143 - DNA, 75 bp, synthetic construct
  source 1..75: mol_type = other DNA
tgcaggggaggtatatcactcaggatccgattggactgaaggggggatggaatttttatcagtatccgttgaatc

SEQ ID NO: 266144 - DNA, 75 bp, synthetic construct
  source 1..75: mol_type = other DNA
gaaacacatggaagttatatacgatcggagagtagattaatagccacttatggtgttaatgacttaatcgtggtt

SEQ ID NO: 266145 - DNA, 75 bp, synthetic construct
  source 1..75: mol_type = other DNA
gggaaaaacactggaagaagaactgtctctgcacacagatctctgtgtagaaagggaattacaactattgacaca

SEQ ID NO: 266146 - DNA, 75 bp, synthetic construct
  source 1..75: mol_type = other DNA
gatgatgcaatggtgggctgactatctagatattaatcgatatcaaaatattacggcctatgattttgctaggat

SEQ ID NO: 266147 - DNA, 75 bp, synthetic construct
  source 1..75: mol_type = other DNA
cgtcagacggggagccacaccggaagactatctttttcaccacaagcgttttgttgtgccggtgtcagaagcaaa

SEQ ID NO: 266148 - DNA, 75 bp, synthetic construct
  source 1..75: mol_type = other DNA
ctgaatttaatcacccaccacagtgccagaacattgaatttgcaggattacggcattgccgccggaaacagcgca

SEQ ID NO: 266149 - DNA, 75 bp, synthetic construct
  source 1..75: mol_type = other DNA
cttataatatcccagataatgtatcggatattgcagaacaacctttgtatatattagttgcttgttggggatttc

SEQ ID NO: 266150 - DNA, 75 bp, synthetic construct
  source 1..75: mol_type = other DNA
cagacatgttttttccggccccaacgaagccattgatctggcagtggtcggcattgtcgatacgctttcacgcta

SEQ ID NO: 266151 - DNA, 75 bp, synthetic construct
  source 1..75: mol_type = other DNA
cggcgacgaagttgccgttgattcagtcggcgcaggcgttggtgaactggtactcctcagcagcggctccagcgc

SEQ ID NO: 266152 - DNA, 75 bp, synthetic construct
  source 1..75: mol_type = other DNA
gtgatatttacacctctttgaatgtgcagaaaatgaaagtaagtgaaccgccccgggtttcctggagagtgtttt

SEQ ID NO: 266153 - DNA, 75 bp, synthetic construct
  source 1..75: mol_type = other DNA
ataaaggtggtgttagtaagacaaccacgacttttaacatggggtggatgctagctaatcttggctataaagttt

SEQ ID NO: 266154 - DNA, 75 bp, synthetic construct
  source 1..75: mol_type = other DNA
gtaaaattgataaacagttagcgaataaaatttttaaacaatatcaccacgagttaataactgaagtaaaaaaca

SEQ ID NO: 266155 - DNA, 75 bp, synthetic construct
  source 1..75: mol_type = other DNA
tcctgaaaaagagcggttgcttgatttcctctggcctgttctggtcagcttcagcgatgtcggtacacacactgt

SEQ ID NO: 266156 - DNA, 75 bp, synthetic construct
  source 1..75: mol_type = other DNA
aaggcattgaacgctgggccgagcgcaaagcgttattaacccatgacgatgtgaaacaacgcgcctggcaaacgc

SEQ ID NO: 266157 - DNA, 75 bp, synthetic construct
  source 1..75: mol_type = other DNA
cactctcgaagaaagactctgtttttgtctctgatttactacgcgaagctaaagccaatgaactggatgaacctc

SEQ ID NO: 266158 - DNA, 75 bp, synthetic construct
  source 1..75: mol_type = other DNA
tgcgtttgagtttgttggctttggctgtttctgccaccttgccaacgtttgcttttgctactgaaaccatgaccg

SEQ ID NO: 266159 - DNA, 75 bp, synthetic construct
  source 1..75: mol_type = other DNA
gactattttgatacagaagaagagttaaaagagtatgttttaaaagctaacttatatcttatcaatgactcttta

SEQ ID NO: 266160 - DNA, 75 bp, synthetic construct
  source 1..75: mol_type = other DNA
caaccgacggtttacctgttggatgtaaggctagcacacaaaattcacgggggatgattcatgaaaatcaggcat

SEQ ID NO: 266161 - DNA, 75 bp, synthetic construct
  source 1..75: mol_type = other DNA
cgtgggatgaagatgaaagaggagcatatcgttccgcttagtcggcaggcgatgattttgttagagcagcttaag

SEQ ID NO: 266162 - DNA, 75 bp, synthetic construct
  source 1..75: mol_type = other DNA
gttgagtcattcagagcgaaataatgtacgagcagcctatattcatacttctgagcatttggatgagcgtcgatt

SEQ ID NO: 266163 - DNA, 75 bp, synthetic construct
  source 1..75: mol_type = other DNA
gcgccagtatgcactgacgatagatgaaatcgcgcataaaacgccgtcaatgtctctgcctgaagcctcagataa

SEQ ID NO: 266164 - DNA, 75 bp, synthetic construct
  source 1..75: mol_type = other DNA
gctgagccattcagaacgtaataacgtgcgtgcagcttatattcatacttctgagcatttggatgaacgacgttt

SEQ ID NO: 266165 - DNA, 75 bp, synthetic construct
  source 1..75: mol_type = other DNA
ttatacctcggcaaacctgagtgcatacagtaacagtattgtggacacgcccacgtactttgcctttgcaaaagg

SEQ ID NO: 266166 - DNA, 75 bp, synthetic construct
  source 1..75: mol_type = other DNA
ccgggaggagaccctgaaaaatgataatgcagacgcaagggcatcaaatgacgcagagctgctgggatacgggca

SEQ ID NO: 266167 - DNA, 75 bp, synthetic construct
  source 1..75: mol_type = other DNA
aataactcactggatgcctggcgaaataaccaggcaaataaaccaaaagcgcataaaaagaccgaagctgaaaaa

SEQ ID NO: 266168 - DNA, 75 bp, synthetic construct
  source 1..75: mol_type = other DNA
gatggttcagtggtggggagattatttagattataataagataacacctatttcgccatatgactatgcgcaaaa

SEQ ID NO: 266169 - DNA, 75 bp, synthetic construct
  source 1..75: mol_type = other DNA
gaaattttatacccgaatgcaaaaagttaacccagcacttaacattacatccggtcaagtcaaaagtactgtact

SEQ ID NO: 266170 - DNA, 75 bp, synthetic construct
  source 1..75: mol_type = other DNA
gataatgcggccctgtttgcccgttcggcagcctcgatgcgtgaatatggttacagtgctgatgatgtgctgaag

SEQ ID NO: 266171 - DNA, 75 bp, synthetic construct
  source 1..75: mol_type = other DNA
tgcggcagcccgggagcagcgacgtgccctggcagaactgaacagccagttgacggaaatccgcgcttcggctgt

SEQ ID NO: 266172 - DNA, 75 bp, synthetic construct
  source 1..75: mol_type = other DNA
ccaagtctgttaaagaaaaagctgaaaagcgaaaacaccagttatagccaaataatcaccacctgccgcatgcgt

SEQ ID NO: 266173 - DNA, 75 bp, synthetic construct
  source 1..75: mol_type = other DNA
gcaaaccttttttcacgcgcagctgcttcaatgcgtgagtttgggtatagctctgacgaagttctgaaaattacc

SEQ ID NO: 266174 - DNA, 75 bp, synthetic construct
  source 1..75: mol_type = other DNA
aatggtctagttccgagctacccctctgggcaagagactgcttaaggagacaattggcttctccctcattggagg

SEQ ID NO: 266175 - DNA, 75 bp, synthetic construct
  source 1..75: mol_type = other DNA
tttggatgaagaattttctaaattgggtgtttctcatataaaaacagttctcaaaccaagagtttctaaggggaa

SEQ ID NO: 266176 - DNA, 75 bp, synthetic construct
  source 1..75: mol_type = other DNA
gaaatctcaaattgtcgccgacgaacgcaccaacagtgtgattgtcagtggtgacccgccagcaaatcaacatta

SEQ ID NO: 266177 - DNA, 75 bp, synthetic construct
  source 1..75: mol_type = other DNA
cgctgacgggcactattccggcaaaccagcagggcgatcagtctgaacgtatcgcgatgctctggttgagtgaaa

SEQ ID NO: 266178 - DNA, 75 bp, synthetic construct
  source 1..75: mol_type = other DNA
gacttaccggtatgtgccgaatcctttaagatggatagatcccttaggattaaataaaggagcttcattatctaa

SEQ ID NO: 266179 - DNA, 75 bp, synthetic construct
  source 1..75: mol_type = other DNA
gcgccgcctgatccgtcggctggactcagaaatggaacgcagcggcaacagccaggtgttctaccctgaacggac

SEQ ID NO: 266180 - DNA, 75 bp, synthetic construct
  source 1..75: mol_type = other DNA
cgtttctgaaaggcgccttgctgctgctcaggctgccttaagtcgtaaccttgcaaaccgtgtttcagctcaaag

SEQ ID NO: 266181 - DNA, 75 bp, synthetic construct
  source 1..75: mol_type = other DNA
tattgctgaaagacggctggcttctgcggaggcagccagagacaggaatctggcaaatcgcgtctccacccagcg

SEQ ID NO: 266182 - DNA, 75 bp, synthetic construct
  source 1..75: mol_type = other DNA
gcgctatctggtggcctatacggagttgcccaaacgcttgattcatttacctcttcggcagtaagtggcgcacta

SEQ ID NO: 266183 - DNA, 75 bp, synthetic construct
  source 1..75: mol_type = other DNA
cttctccgtgcgaaagacgcaatcaaggcgaaattcggcgctcgctggctgccagcgaaggcgaagaacagcgat

SEQ ID NO: 266184 - DNA, 75 bp, synthetic construct
  source 1..75: mol_type = other DNA
ggctgttgccaacggcgtcagttcgattggttctctcttcagtttcggcgcatcttcggcagcgaccgccagtag

SEQ ID NO: 266185 - DNA, 75 bp, synthetic construct
  source 1..75: mol_type = other DNA
acatgcgagataaatctcgcggcatacagcaggctctggaagaaattgaacggcgtcgtaatgatttaattcgcg

SEQ ID NO: 266186 - DNA, 75 bp, synthetic construct
  source 1..75: mol_type = other DNA
caccgacctcatttggaaagcgaactaaaagcaaactctgttgtaactattcaccatgacttaaatgatacagat

SEQ ID NO: 266187 - DNA, 75 bp, synthetic construct
  source 1..75: mol_type = other DNA
ccgattgctgtgccggaaggggcggaaatcactattgctgccgatggtactatctcggcgctgaattctggcgat

SEQ ID NO: 266188 - DNA, 75 bp, synthetic construct
  source 1..75: mol_type = other DNA
tactggcatcaacaggaagtactggtgactcgtatgacaacgcgatggcggagagcatcaatggcctttacaaag

SEQ ID NO: 266189 - DNA, 75 bp, synthetic construct
  source 1..75: mol_type = other DNA
ccaccgggcaactgacgattcaggggcatccggtgattggcgaggcgggaccgattgctgtaccggaaggggcag

SEQ ID NO: 266190 - DNA, 75 bp, synthetic construct
  source 1..75: mol_type = other DNA
tgtttatatgtagtaaatttagtgccttttttgtatttaatgtataatgtgtctttagggaataacatgtttact

SEQ ID NO: 266191 - DNA, 75 bp, synthetic construct
  source 1..75: mol_type = other DNA
atgaatatttataaaaacagcaatgaaaattcattgtcaaataataactgtattgtatattttattcctttgtta

SEQ ID NO: 266192 - DNA, 75 bp, synthetic construct
  source 1..75: mol_type = other DNA
gacgctcgccacagtaacacctctctggcgtggggagctggcgtgcagtttaacccgaccgaatccgtggccgtt

SEQ ID NO: 266193 - DNA, 75 bp, synthetic construct
  source 1..75: mol_type = other DNA
ttcttacaggtcaactatctggtataaaagatgatgaaattgtaaagtcaattcatgattatgacattgtgggac

SEQ ID NO: 266194 - DNA, 75 bp, synthetic construct
  source 1..75: mol_type = other DNA
tactcaagctgtcgcaacaaatccgtatgacgcatatgttttggactggatcatcggtgatgaaacaagctttaa

SEQ ID NO: 266195 - DNA, 75 bp, synthetic construct
  source 1..75: mol_type = other DNA
attcatgattatgacattgtgggaccatacgaaaagccgattaaatcaggcatcatcaaatctaacattgaaaaa

SEQ ID NO: 266196 - DNA, 75 bp, synthetic construct
  source 1..75: mol_type = other DNA
agctgtgggtggctgattttacttacgtcagcacatggcagggcttcgtctatgtggcgtttatcattgatgtgt

SEQ ID NO: 266197 - DNA, 75 bp, synthetic construct
  source 1..75: mol_type = other DNA
atgactaaaaatactcgtttttcccccgaagttcgtcagcgagcgattcgtatggttctggaaagtcaggatgag

SEQ ID NO: 266198 - DNA, 75 bp, synthetic construct
  source 1..75: mol_type = other DNA
ttcagttactggtacatcagttactgcaagtgcattacggcattacgctgagtgataccggattgtccgatgatg

SEQ ID NO: 266199 - DNA, 75 bp, synthetic construct
  source 1..75: mol_type = other DNA
tgcaatttctgttttcactgtcattatgggtgggtaaaaatttacccataggcattgaaatggatactcaagcac

SEQ ID NO: 266200 - DNA, 75 bp, synthetic construct
  source 1..75: mol_type = other DNA
tgctggtctgtcgcaagaagaaaggcgtcatcaagaggggcgttccggtcatcagcgaaaccgccttcaaagacg

SEQ ID NO: 266201 - DNA, 75 bp, synthetic construct
  source 1..75: mol_type = other DNA
gatgatatcagcaagctatctcgaattgacttattatcaggaagagcaggaagtaatttcgatagaataatccat

SEQ ID NO: 266202 - DNA, 75 bp, synthetic construct
  source 1..75: mol_type = other DNA
aatacccgatatacagctaaaaatcatgaaatccatatttatgtagagttttttaaggagcctgtaaaccgtttt

SEQ ID NO: 266203 - DNA, 75 bp, synthetic construct
  source 1..75: mol_type = other DNA
atcaaataaattaagctaccttggtattgggaaaaagatatcctttgatggtgatttttatactgtagatggaat

SEQ ID NO: 266204 - DNA, 75 bp, synthetic construct
  source 1..75: mol_type = other DNA
ctaatgacagtatcagcccgatatttgacaaggagaaagagcagaggcgtctgcagacagtggggcttatcagtg

SEQ ID NO: 266205 - DNA, 75 bp, synthetic construct
  source 1..75: mol_type = other DNA
gaccggcgataccaatgatgaccgcctggcacacagccccggtgaccggatgtacatgctgggcggaatgagtga

SEQ ID NO: 266206 - DNA, 75 bp, synthetic construct
  source 1..75: mol_type = other DNA
tcagttccggagcactggtgtctggatcaccacacatgactggttatgtgaaaggtttatgctccctgcctcgca

SEQ ID NO: 266207 - DNA, 75 bp, synthetic construct
  source 1..75: mol_type = other DNA
actcaagcactcttgccagctactaaaacgtttaaaaaacgcgccagtataaagcaatctaacgaattgaccgaa

SEQ ID NO: 266208 - DNA, 75 bp, synthetic construct
  source 1..75: mol_type = other DNA
ggcattgaaatggatactcaagcactcttgccagctactaaaacgtttaaaaaacgcgccagtataaagcaatct

SEQ ID NO: 266209 - DNA, 75 bp, synthetic construct
  source 1..75: mol_type = other DNA
tttgttattccgctgtgccgtaaatgtcataacgaactgcacgccggggtaaaagattttgaagaaaaacacggc

SEQ ID NO: 266210 - DNA, 75 bp, synthetic construct
  source 1..75: mol_type = other DNA
ggagggatgggaacaaaggctgatgatttgtttgttattccgctgtgccgtaaatgccatagcgaactacacgcc

SEQ ID NO: 266211 - DNA, 75 bp, synthetic construct
  source 1..75: mol_type = other DNA
ccggtgataggcgaggcggggccaattgctgtgccggaaggggcggaaatcactattgctgccgatggcacaatc

SEQ ID NO: 266212 - DNA, 75 bp, synthetic construct
  source 1..75: mol_type = other DNA
ccaaacgttttggaggcgatgaacatggtgaagactatgagaaggtgcgatcggttgccttcacacgtttctacg

SEQ ID NO: 266213 - DNA, 75 bp, synthetic construct
  source 1..75: mol_type = other DNA
atgttttttgatattgccggctcaacaaaacttggaaaaatctatggtccaagtactacatttaatatcaaaaat

SEQ ID NO: 266214 - DNA, 75 bp, synthetic construct
  source 1..75: mol_type = other DNA
ggcaggaggaatcatcactgctattcatgacggcaaagaaaaggttcgaaaagtacaatcaaatggtggcaaaaa

SEQ ID NO: 266215 - DNA, 75 bp, synthetic construct
  source 1..75: mol_type = other DNA
tgcgtacatactggtacagatttaaacaataaacatcaaaagcgtacgccagacctgcactggcctgtggataat

SEQ ID NO: 266216 - DNA, 75 bp, synthetic construct
  source 1..75: mol_type = other DNA
cgtggcaactgctgcgcctgtacgcccgcgacgacggcagcggcgtctttccctcctacaacgaactgcagggct

SEQ ID NO: 266217 - DNA, 75 bp, synthetic construct
  source 1..75: mol_type = other DNA
gtaagcgcagggacaatcagtttcctttcagtaaaaataagcgataatggagtttttttgggaaccactttaagt

SEQ ID NO: 266218 - DNA, 75 bp, synthetic construct
  source 1..75: mol_type = other DNA
tgtcttttatttaatatttcgtggaatattattctgattccaaaatttggtatcatgactgcagtatggggatat

SEQ ID NO: 266219 - DNA, 75 bp, synthetic construct
  source 1..75: mol_type = other DNA
gctccggcagtacgctacaccgcagtggtcagacaacatcttgagcgtcttcatcgtgatgcggtgaagaccgca

SEQ ID NO: 266220 - DNA, 75 bp, synthetic construct
  source 1..75: mol_type = other DNA
tggagtacacccgcgaccgcctgcaccgggaaacgctgcgcagcttcggtcgttatgaactcaccaccgcttaca

SEQ ID NO: 266221 - DNA, 75 bp, synthetic construct
  source 1..75: mol_type = other DNA
tcgatagcgtcgccaagatttatcacatgccgccacccgccttaaaacaggacaaacttgcctttatggctgcga

SEQ ID NO: 266222 - DNA, 75 bp, synthetic construct
  source 1..75: mol_type = other DNA
atggcaggtgatactactaaccgcctggcgggaaccgcctatgtcactgttaacggtgtgacggtaatggtggag

SEQ ID NO: 266223 - DNA, 75 bp, synthetic construct
  source 1..75: mol_type = other DNA
atcacgctgggcgaatacccggctttctcacttgcagaagcgcggctttggcgtgaaaagtgccgctcaatggtg

SEQ ID NO: 266224 - DNA, 75 bp, synthetic construct
  source 1..75: mol_type = other DNA
ggctgattttacttacgtcagcacatggcagggcttcgtctatgtggcgtttatcattgatgtgtttgccggata

SEQ ID NO: 266225 - DNA, 75 bp, synthetic construct
  source 1..75: mol_type = other DNA
tcctgttctggcgtttacctgtgaaaccgcgcaatttgatacccgccatgattgggatactttcattgcactggt

SEQ ID NO: 266226 - DNA, 75 bp, synthetic construct
  source 1..75: mol_type = other DNA
aaatcaaataataaaggattattcgcatctaccaaaaaaagcggaggatgttagaaaaggggcgttttatcactt

SEQ ID NO: 266227 - DNA, 75 bp, synthetic construct
  source 1..75: mol_type = other DNA
cttatttgtaggattttagatttcagattatcaaagctagcagtcacatatggttgtagttacagccgctatgca

SEQ ID NO: 266228 - DNA, 75 bp, synthetic construct
  source 1..75: mol_type = other DNA
ccattatcacttgaactaggagtttcatctatcgcagggcaagtattcatcgaactagggttatctagaattaca

SEQ ID NO: 266229 - DNA, 75 bp, synthetic construct
  source 1..75: mol_type = other DNA
gtacaaccggcgaacaggctgaacgtatcagggtctatgcaaaagcaaacaaactctctgtgaacgccttcttga

SEQ ID NO: 266230 - DNA, 75 bp, synthetic construct
  source 1..75: mol_type = other DNA
acatggcgcggtacaacatggcgtcatcacccagggattgtttcaagccgatcgtcggttgatggatggctacag

SEQ ID NO: 266231 - DNA, 75 bp, synthetic construct
  source 1..75: mol_type = other DNA
atgaccgccaacgactggattctcccttggtttatgttggtgcgcataatgtatattatgttaaatttagtccgc

SEQ ID NO: 266232 - DNA, 75 bp, synthetic construct
  source 1..75: mol_type = other DNA
cgatctcaagcagctgccaaatgcgctcggtcatctggtacgcacctgggaagagaaaggtcgccagctcggtga

SEQ ID NO: 266233 - DNA, 75 bp, synthetic construct
  source 1..75: mol_type = other DNA
gtactgacaacgtgatcgtcatcgattacgccgaaatttcgcaagggctgcacccgtggctggcaccgttcctga

SEQ ID NO: 266234 - DNA, 75 bp, synthetic construct
  source 1..75: mol_type = other DNA
ggctgcaggcttgttgtaacaaatttgaactggctgatttgcttcagattaaagttacatttctgactaatgttt

SEQ ID NO: 266235 - DNA, 75 bp, synthetic construct
  source 1..75: mol_type = other DNA
atggcgaaaaggtggttgtatcttgttgtgcggcagaaagaagaaagccccgtagttaatttttcattaacccac

SEQ ID NO: 266236 - DNA, 75 bp, synthetic construct
  source 1..75: mol_type = other DNA
tatccaaagatatatattatcagcaagagtactcagcattatatgaatgggatggaaaaatatttgaatatttgt

SEQ ID NO: 266237 - DNA, 75 bp, synthetic construct
  source 1..75: mol_type = other DNA
cgaaaaagcgtgaccgtattcaccgcattccggaagatcgcaaaaagaaaaaggcaaacgtaaaccgccattctg

SEQ ID NO: 266238 - DNA, 75 bp, synthetic construct
  source 1..75: mol_type = other DNA
ccatgctcaatattttagtggaaggaagtctatgatggactggtacagtaatttgatatttgaaagactaaaaag

SEQ ID NO: 266239 - DNA, 75 bp, synthetic construct
  source 1..75: mol_type = other DNA
tgttgctgaatatggggtcaactcacggtctggcgatggtcttttccatgctgctggcggcgattatctggaacc

SEQ ID NO: 266240 - DNA, 75 bp, synthetic construct
  source 1..75: mol_type = other DNA
gaattacaattagctcatgctgataaaaataatatccgcggcacttataatcatgcactatatctagataaaaga

SEQ ID NO: 266241 - DNA, 75 bp, synthetic construct
  source 1..75: mol_type = other DNA
ggccgtaataatcacactaagccaatttctaaagaaagtgtatcccaagtaatagaattacttggctataaagga

SEQ ID NO: 266242 - DNA, 75 bp, synthetic construct
  source 1..75: mol_type = other DNA
agcgggctcagccaaaagaaaaagcatattcgctaagcgatggcttgggcctggcgctgctgattgaacccaacg

SEQ ID NO: 266243 - DNA, 75 bp, synthetic construct
  source 1..75: mol_type = other DNA
cagggagccagcgagcgttttgccattgccctgaccggtaccgaaggcggcaggaagagaatggcgtccctggaa

SEQ ID NO: 266244 - DNA, 75 bp, synthetic construct
  source 1..75: mol_type = other DNA
gaacaaaacaaagcgtatcagtccctgttgatcatgaatgggcagcataccgagtttaatcgccttctagggctt

SEQ ID NO: 266245 - DNA, 75 bp, synthetic construct
  source 1..75: mol_type = other DNA
agcagcacagacaacgctgaatactgtcacgttagtggggagtcgtctgttaagtggggcactgggactggttgg

SEQ ID NO: 266246 - DNA, 75 bp, synthetic construct
  source 1..75: mol_type = other DNA
tgcatccagctctcatacgctgattggcgcgattatcgggattggtttaaccaatgcgttgatgaccgggacgtc

SEQ ID NO: 266247 - DNA, 75 bp, synthetic construct
  source 1..75: mol_type = other DNA
gcaaatgagccaaaagaatacgttcgaggccattgcccgcgaatggcatcagacgaaagccgatcgctggtcatt

SEQ ID NO: 266248 - DNA, 75 bp, synthetic construct
  source 1..75: mol_type = other DNA
caggaagagaatggcgtccctggaatccacctatgtgacgttgtcacgtgcaaaggagcatgtccaggtgtacac

SEQ ID NO: 266249 - DNA, 75 bp, synthetic construct
  source 1..75: mol_type = other DNA
gggcattggagaaaacaagaaaagtacgacaaagatgcggagaagtgtttcgttacgcgatcatcactggccgcg

SEQ ID NO: 266250 - DNA, 75 bp, synthetic construct
  source 1..75: mol_type = other DNA
tgaacgggcttgtggccacggtgaaaggcgtgaagcagggcagtgtcagcattgtgggcatgacttctgacggcg

SEQ ID NO: 266251 - DNA, 75 bp, synthetic construct
  source 1..75: mol_type = other DNA
tcattatgttaaccggtgtacgaacgcaagaattgcgtttcgcacactgggagaatatcgattttgagacaaaat

SEQ ID NO: 266252 - DNA, 75 bp, synthetic construct
  source 1..75: mol_type = other DNA
gctctgctgaaagccctcctcagatggtcattgcgccatgagatggtaacggtgaacccggcggcaaacatccct

SEQ ID NO: 266253 - DNA, 75 bp, synthetic construct
  source 1..75: mol_type = other DNA
gccgtgcgctattcgcttgatggatacatcacaagcgctgacggacttggatcgtgggccgcacttggtcaaaga

SEQ ID NO: 266254 - DNA, 75 bp, synthetic construct
  source 1..75: mol_type = other DNA
aaaaggctttaactcagcgtggattgaaacgcagcttgcacacgtcgataagaacgcgattcgcgggacgtataa

SEQ ID NO: 266255 - DNA, 75 bp, synthetic construct
  source 1..75: mol_type = other DNA
ctgtctattggcgtctaccccgatgtttcactggccgacgcgcgcgagaaacgcagcgaagccagaaaaattctc

SEQ ID NO: 266256 - DNA, 75 bp, synthetic construct
  source 1..75: mol_type = other DNA
ccgatgtcggatcaggttgtcgagctctttgagtcacttaaacctattaccgggctatacccactggtattcgtc

SEQ ID NO: 266257 - DNA, 75 bp, synthetic construct
  source 1..75: mol_type = other DNA
cagacagcgctgcggtgaagtattccgtcatgcgattgtgaccggacgcgctgaatacaatccagcacccgatct

SEQ ID NO: 266258 - DNA, 75 bp, synthetic construct
  source 1..75: mol_type = other DNA
aagacgtgatgacccgcaccgtgaaaatcagcggtgtggggcgtccgtatctggcagaggagggcactgaaaccg

SEQ ID NO: 266259 - DNA, 75 bp, synthetic construct
  source 1..75: mol_type = other DNA
caaactcgaaaactacaccggcagtattgtaacccgtgaagctacaaaattgttgatgctcacagggctgaggac

SEQ ID NO: 266260 - DNA, 75 bp, synthetic construct
  source 1..75: mol_type = other DNA
ccatgcgcagtatctggatggaaggaaagagatgatgcagtggtatgcttcgtttataacgaacttgagcatcgc

SEQ ID NO: 266261 - DNA, 75 bp, synthetic construct
  source 1..75: mol_type = other DNA
acattggcaagcgtcccattgcagagataaaaccgatggagttacttgaaactctgcgccgaatggaaaaacgtg

SEQ ID NO: 266262 - DNA, 75 bp, synthetic construct
  source 1..75: mol_type = other DNA
aagtcgaatcatcacggcgcgctgattcaggcgggggcgacgcaggtctatctggaagcttcacgcaacccgttt

SEQ ID NO: 266263 - DNA, 75 bp, synthetic construct
  source 1..75: mol_type = other DNA
tcctctacacgctggcgaatgacggtgcatccattatcaatccggcggtcttaaaggaacatgcagcggatgatg

SEQ ID NO: 266264 - DNA, 75 bp, synthetic construct
  source 1..75: mol_type = other DNA
ttgaacgtttcgcccgaaaacatcggatttccgataaatcgctgcgcaaaatcgtggagcaggccgataaggggg

SEQ ID NO: 266265 - DNA, 75 bp, synthetic construct
  source 1..75: mol_type = other DNA
aaaaagggaacactaaaaaaagccagggaaaaatcgtttatggaaggaagggaatataagcatgtagcccatgac

SEQ ID NO: 266266 - DNA, 75 bp, synthetic construct
  source 1..75: mol_type = other DNA
aagtgccagagagcttacgaacatgccctgttacattatgtgaaccagaagatggggtatttatgaggaattcaa

SEQ ID NO: 266267 - DNA, 75 bp, synthetic construct
  source 1..75: mol_type = other DNA
ggcgacgattctggcgcactatctgcgtgagaacggcattgtgccggagaagtgcgatctcaactccattctgtt

SEQ ID NO: 266268 - DNA, 75 bp, synthetic construct
  source 1..75: mol_type = other DNA
ctgaaggtgcctacgatgatgctattaggcacgccatcacgaaattgagttatttacacggtacttccacggaag

SEQ ID NO: 266269 - DNA, 75 bp, synthetic construct
  source 1..75: mol_type = other DNA
gcgtaaccgggcaggatggttcttacctggcagaactcctgctggaaaaaggatacgaagtacacggtattaagc

SEQ ID NO: 266270 - DNA, 75 bp, synthetic construct
  source 1..75: mol_type = other DNA
ttcgatggtatttcatctatggatgatgactttgatgatagttcctctgaggatgagcccgttgagaatagtcct

SEQ ID NO: 266271 - DNA, 75 bp, synthetic construct
  source 1..75: mol_type = other DNA
tcccaaactacggaaaaatgcgccggtatggtgaaccggtttcaacaacgtttgtagagtcgacaatcaacgaag

SEQ ID NO: 266272 - DNA, 75 bp, synthetic construct
  source 1..75: mol_type = other DNA
tgctcgaagcctatgctgccagacaacccgagcgtgtgctggcgattccttctttaggacaggtgcgctatctca

SEQ ID NO: 266273 - DNA, 75 bp, synthetic construct
  source 1..75: mol_type = other DNA
gaacataactgtcggtattggtcacttgctttcatcaccggagatggcggctggattaccgtttaaccgaactag

SEQ ID NO: 266274 - DNA, 75 bp, synthetic construct
  source 1..75: mol_type = other DNA
ttttaataagtggggatggttttttgataaaaaacgcaatgcttacaacgaatcagcattgcgtaatatcccaag

SEQ ID NO: 266275 - DNA, 75 bp, synthetic construct
  source 1..75: mol_type = other DNA
acacggagctggcgaagctgaagtaccagacagcgctgggtgaactgaaaaccctgtcggagatacagaagcagg

SEQ ID NO: 266276 - DNA, 75 bp, synthetic construct
  source 1..75: mol_type = other DNA
ttccgtgaatgcccgtctgaaacaggcatcacagtcatccgatgaattttcgtcatcacagaaagtgctgatgga

SEQ ID NO: 266277 - DNA, 75 bp, synthetic construct
  source 1..75: mol_type = other DNA
ggctataaattatttattactcccaaatcttctatggctcactcaattggtgataaacgtatctctttttttgga

SEQ ID NO: 266278 - DNA, 75 bp, synthetic construct
  source 1..75: mol_type = other DNA
cgtgcggcggtttatcgtgcgcaacaggcggttgttgctgctcgcggtaccgaaaggcaggccgcagcagaagcg

SEQ ID NO: 266279 - DNA, 75 bp, synthetic construct
  source 1..75: mol_type = other DNA
gtggcgacattacgtgaactgattattaaaatttcggcaaactcccggtcatttcagtcagagatctcccgggct

SEQ ID NO: 266280 - DNA, 75 bp, synthetic construct
  source 1..75: mol_type = other DNA
aggcagcacagctggcgacggagggtatctcagggatggtgaataacatcacggagatgctgaacggaaataaag

SEQ ID NO: 266281 - DNA, 75 bp, synthetic construct
  source 1..75: mol_type = other DNA
gccggtcttacatctgtgcgcgaggcgtcttcccgcacggccccttcggatgctgaaaaagttccggaatggatg

SEQ ID NO: 266282 - DNA, 75 bp, synthetic construct
  source 1..75: mol_type = other DNA
tccggatattagctttgataagcagtcacttgataaattagtttcgtttgcgtgggaaaatgagtatagttttgt

SEQ ID NO: 266283 - DNA, 75 bp, synthetic construct
  source 1..75: mol_type = other DNA
ctttacaacttacgaagatctattattgccccgaaacaacaattgttcatgttttcaataagggatcttataaaa

SEQ ID NO: 266284 - DNA, 75 bp, synthetic construct
  source 1..75: mol_type = other DNA
ttgcaactactgataacattgttcacgaggtttacctggaaggaaagcttattggctacgtaattaaaacagaaa

SEQ ID NO: 266285 - DNA, 75 bp, synthetic construct
  source 1..75: mol_type = other DNA
gttcaatcgtcgccattttaggctatcaggcgggcagtaatggccaggttgtcgttgaaaagggtggcgagtggc

SEQ ID NO: 266286 - DNA, 75 bp, synthetic construct
  source 1..75: mol_type = other DNA
tgatatcgacggcccatcaggcaacgtaaaaacacttgatgaaggtgtcacaaaaatgagtctggtttacatcgg

SEQ ID NO: 266287 - DNA, 75 bp, synthetic construct
  source 1..75: mol_type = other DNA
cggttatgtaacccgctatgaccatgaccgttttggtcaggtgacggcggtgcaccgcgaggaaggcctgagcca

SEQ ID NO: 266288 - DNA, 75 bp, synthetic construct
  source 1..75: mol_type = other DNA
agaaataccagcaataccagataccactgaggtttttgaatgtagtggaaatagcataaaagaaattaggtactt

SEQ ID NO: 266289 - DNA, 75 bp, synthetic construct
  source 1..75: mol_type = other DNA
cctgatggaattaccctgatctccgtaaataataacctgatatcgcatattgactcatttccgccaaaggctaag

SEQ ID NO: 266290 - DNA, 75 bp, synthetic construct
  source 1..75: mol_type = other DNA
aatgaaaaattaggccagatggtcggccccatcctgaattatcttttcccattacttattggatataccgcaggt

SEQ ID NO: 266291 - DNA, 75 bp, synthetic construct
  source 1..75: mol_type = other DNA
ttttgagttagaaaggacaaggatcaaagcgattaataaggttctcttggctaaaaacaagaatgttacccaacc

SEQ ID NO: 266292 - DNA, 75 bp, synthetic construct
  source 1..75: mol_type = other DNA
ttatttgccaattgacagctttagacttttattaagcggtgtgcctgatgatgacgatttatttttgttcatgat

SEQ ID NO: 266293 - DNA, 75 bp, synthetic construct
  source 1..75: mol_type = other DNA
tcccatccttgggaaagacacaaaaacaatatacggtctgcattgacctttgaaaagatccatgaatatattaaa

SEQ ID NO: 266294 - DNA, 75 bp, synthetic construct
  source 1..75: mol_type = other DNA
atgcggctcttgcaactggtgctacaattggcgcagggtatgttatatatagagtgattcgatttataccttcac

SEQ ID NO: 266295 - DNA, 75 bp, synthetic construct
  source 1..75: mol_type = other DNA
ggagcatagcataggagatagcagcacaacttttatgggtaaaaacgtcacaatacataatgatattagacacta

SEQ ID NO: 266296 - DNA, 75 bp, synthetic construct
  source 1..75: mol_type = other DNA
acctgtgtcggtttttctgcaagtcgcaaggatgccctgcaggttgtactgaagggcgttccttacagtgaagtt

SEQ ID NO: 266297 - DNA, 75 bp, synthetic construct
  source 1..75: mol_type = other DNA
gccctgcgttagcgaaaataagaaagtttggtggagtaatgagcggcatggtaatgccgaatctgggtgcctttg

SEQ ID NO: 266298 - DNA, 75 bp, synthetic construct
  source 1..75: mol_type = other DNA
tggttttcaaattgttccggactgaggccaccacaccaactgtgccgccgccaccgattgtaatcacattcgata

SEQ ID NO: 266299 - DNA, 75 bp, synthetic construct
  source 1..75: mol_type = other DNA
acgatccgttgcaggggcggtatatcacccaggatccgatagggctggcggggggattaaacccgtacagttatg

SEQ ID NO: 266300 - DNA, 75 bp, synthetic construct
  source 1..75: mol_type = other DNA
aatatataaagaaaataaaaaaattcaagcaaaaccctaaaagattttttattgactccaggtataaatcactta

SEQ ID NO: 266301 - DNA, 75 bp, synthetic construct
  source 1..75: mol_type = other DNA
gctgtctgaatttaagttattgagagagcaatgtttcaggtggggtaattatactctattgtttgaaaattatga

SEQ ID NO: 266302 - DNA, 75 bp, synthetic construct
  source 1..75: mol_type = other DNA
aaagagtggctggatgacaacggtaagaacatcctctttatggtggatgaagtcggtcagttcattggcaaaaat

SEQ ID NO: 266303 - DNA, 75 bp, synthetic construct
  source 1..75: mol_type = other DNA
ctggcctccttatcattttcctcacggcaagtcatttaagggatttattatcagaacaaatgagcttgaaaggcg

SEQ ID NO: 266304 - DNA, 75 bp, synthetic construct
  source 1..75: mol_type = other DNA
cgaagcccttgagtcagcgccgggaacgtttattagaaaaataaataaaaccagcgttgtgtttgaaactcacgg

SEQ ID NO: 266305 - DNA, 75 bp, synthetic construct
  source 1..75: mol_type = other DNA
gacctggtgcgcatcagcggcccgcgacagacgtgggaatatggctacagcgccacgggcaggctggagagcgtg

SEQ ID NO: 266306 - DNA, 75 bp, synthetic construct
  source 1..75: mol_type = other DNA
cacagtaatgaacttaacttatcaagcctttctttgggttctgtgccgcctcttcctgagtggattgaaatgctt

SEQ ID NO: 266307 - DNA, 75 bp, synthetic construct
  source 1..75: mol_type = other DNA
tttttattggtcacaataagctatcggaaataccagcaataccagacaccgctaaggtttttgattgtagtgaga

SEQ ID NO: 266308 - DNA, 75 bp, synthetic construct
  source 1..75: mol_type = other DNA
ccggactttgttcgggcttatcctatttctcacagtgctgcttcgcatcatcatatcttggaaccaaaaaatttt

SEQ ID NO: 266309 - DNA, 75 bp, synthetic construct
  source 1..75: mol_type = other DNA
ttagaactcgatttcaataaccttacagaatttccacaagtacctgatggaattaccctgatctccgtaaataat

SEQ ID NO: 266310 - DNA, 75 bp, synthetic construct
  source 1..75: mol_type = other DNA
ttggacaagttattaatgatttctctattatatgtacagcaaaaaattacatttccacaatagatttttatattg

SEQ ID NO: 266311 - DNA, 75 bp, synthetic construct
  source 1..75: mol_type = other DNA
atcgagtataataacattgaggctgttcctgcgatacatagcaagttgaaattactttttatagaatgcaatcct

SEQ ID NO: 266312 - DNA, 75 bp, synthetic construct
  source 1..75: mol_type = other DNA
tacccattcggcataaattagagtttatatcgaccaatattgcagagttgctggacaagttaaccaaaattacag

SEQ ID NO: 266313 - DNA, 75 bp, synthetic construct
  source 1..75: mol_type = other DNA
ttgttgaatattgcctggaattataaagatccatatgacccacacccagaagagattgctcgtgaagcaaatggc

SEQ ID NO: 266314 - DNA, 75 bp, synthetic construct
  source 1..75: mol_type = other DNA
tgatgaaaagtttctggggcaataatgcaacagtggaaaataactggggctacgactggctacctaaatgggatc

SEQ ID NO: 266315 - DNA, 75 bp, synthetic construct
  source 1..75: mol_type = other DNA
gactatgtgcgccattacacgaacgccagccttataatacgtgatgactatcagttcaatgacggtctgtttagc

SEQ ID NO: 266316 - DNA, 75 bp, synthetic construct
  source 1..75: mol_type = other DNA
ttggctttcatttgctcaaagatataacggaccaaggcagaaaggatatgatttgaaaatggagagaaattacaa

SEQ ID NO: 266317 - DNA, 75 bp, synthetic construct
  source 1..75: mol_type = other DNA
ggattctgggcgaaaaccgcgaaagataatgccaccctggaacgttatcgtcgggcgctgaatattaaatttaac

SEQ ID NO: 266318 - DNA, 75 bp, synthetic construct
  source 1..75: mol_type = other DNA
accttatttgaaggcgggcctggagggggggtaacatttgacgctattgcattagggaaaaaagttatactatct

SEQ ID NO: 266319 - DNA, 75 bp, synthetic construct
  source 1..75: mol_type = other DNA
tgaaaatcacccccactgccgctcagttgaacacatgattccgcaagtttcagtctccattcatagaaccaacgg

SEQ ID NO: 266320 - DNA, 75 bp, synthetic construct
  source 1..75: mol_type = other DNA
acatagagaaaatatttatggatgaagatagtccatacataaaagaaataaaatctctaggtgtaaacaatcctg

SEQ ID NO: 266321 - DNA, 75 bp, synthetic construct
  source 1..75: mol_type = other DNA
gatcctggtgttgatatgcatatttttctttatagtcattatatttcttcaacttcagaggctgtaactacattg

SEQ ID NO: 266322 - DNA, 75 bp, synthetic construct
  source 1..75: mol_type = other DNA
ttcctgctttgccgaagaaaacggttcaatcgctaactccgggcgttggttacagtggcactgggccgcggcaga

SEQ ID NO: 266323 - DNA, 75 bp, synthetic construct
  source 1..75: mol_type = other DNA
gagcaaacattcattagccgatatataaaattgaataaactcattactttgattaaaagtactgataaagaccag

SEQ ID NO: 266324 - DNA, 75 bp, synthetic construct
  source 1..75: mol_type = other DNA
atcagggacttgttcgcaccttccttaacagaggttcgcggtgcggaagcctgggacttccttaaaataacaggt

SEQ ID NO: 266325 - DNA, 75 bp, synthetic construct
  source 1..75: mol_type = other DNA
gaacgttctttttatttttactttgtagctttattgctacaaatccggctctggcagcgggtgttggtgggcttg

SEQ ID NO: 266326 - DNA, 75 bp, synthetic construct
  source 1..75: mol_type = other DNA
agtcaacaacaactgaactacgctctttcaggcagtttagttgcccattcgcagggtattacgttgggtcaatca

SEQ ID NO: 266327 - DNA, 75 bp, synthetic construct
  source 1..75: mol_type = other DNA
acctgagctacagcatacaacaggggtataacagcgaggggaaaacggctaatggtagcgccagtatggactaca

SEQ ID NO: 266328 - DNA, 75 bp, synthetic construct
  source 1..75: mol_type = other DNA
tctttggagaaaaatgcgtgttattactacgactattttttgccgccgtcttaatgctatggtgcgctcaaactg

SEQ ID NO: 266329 - DNA, 75 bp, synthetic construct
  source 1..75: mol_type = other DNA
atataacagcgaggggaagacggccaatggcagcgccagtatggactacaaaggggcatttgcagatgcccgact

SEQ ID NO: 266330 - DNA, 75 bp, synthetic construct
  source 1..75: mol_type = other DNA
gggctacaactacagcgatagcggtagccaacaacaacttaactacgccctttcaggcagtttagttgcccattc

SEQ ID NO: 266331 - DNA, 75 bp, synthetic construct
  source 1..75: mol_type = other DNA
gcgccattggcagagattattccggatgccagcgtaacctttgatgtgaataaactccgtctggaaatttcagta

SEQ ID NO: 266332 - DNA, 75 bp, synthetic construct
  source 1..75: mol_type = other DNA
tttgatgaagctgaatggcagaaggatgcatccgcattcatgcgatcctgtgatgagctgggtgtacccgctgcg

SEQ ID NO: 266333 - DNA, 75 bp, synthetic construct
  source 1..75: mol_type = other DNA
cagacgctcccagcatcgctgaaatgaagcgctacatgctggcaactatgcaatacccacgcttgcctcgcaaag

SEQ ID NO: 266334 - DNA, 75 bp, synthetic construct
  source 1..75: mol_type = other DNA
ttgctcaattaagcggcattttcagtatagcgtctgttttctgtgtacatagacgtgtacataatgaaagtcatg

SEQ ID NO: 266335 - DNA, 75 bp, synthetic construct
  source 1..75: mol_type = other DNA
tttcaggcggtttagttgcccattcgcacggtattacgttgggtcaatcattgggtgaaacaaatgttttgattg

SEQ ID NO: 266336 - DNA, 75 bp, synthetic construct
  source 1..75: mol_type = other DNA
aaataaacagtattttcgaaaactactcaggaattagagtaatcttcattgtaaaaaatgaagaggactactcct

SEQ ID NO: 266337 - DNA, 75 bp, synthetic construct
  source 1..75: mol_type = other DNA
tgtccgtaccggcggatatgacccgtggagaaggttacgacaccagttatggcgaggtttatcattaccggccac

SEQ ID NO: 266338 - DNA, 75 bp, synthetic construct
  source 1..75: mol_type = other DNA
ggcgagcgccacctgatactgaatgaggtgacaccacagggactccggcccatcgggaaaggcaatgccatcaac

SEQ ID NO: 266339 - DNA, 75 bp, synthetic construct
  source 1..75: mol_type = other DNA
aagctgaagccctggctgccggataaacaccattccggtgtttcatccgttgatgccagaacgcagttcgaggat

SEQ ID NO: 266340 - DNA, 75 bp, synthetic construct
  source 1..75: mol_type = other DNA
atggactatcaagataatatagccctcgagcaagtcgtaacatgggattctgataatatattcacacctaatatc

SEQ ID NO: 266341 - DNA, 75 bp, synthetic construct
  source 1..75: mol_type = other DNA
taagatgggtagagcttctcgctggttaaaaagcgacctggaggagtggttgcaggctaaaattaatgattccag

SEQ ID NO: 266342 - DNA, 75 bp, synthetic construct
  source 1..75: mol_type = other DNA
ggtctgatgtggcaggttccgacgaatgagaatgtttcaggtcagattttccttaactgtatgggacaggcattc

SEQ ID NO: 266343 - DNA, 75 bp, synthetic construct
  source 1..75: mol_type = other DNA
ccacttcatggtggcagtttgccggtcgtccggtagccggtggtgtggggagttacctgttctgtgcttctcagg

SEQ ID NO: 266344 - DNA, 75 bp, synthetic construct
  source 1..75: mol_type = other DNA
ggcgcgggtgaactgcttggcgaagaacaaagtggctcaatggaaactatcggtttctcgctgtatatggagttg

SEQ ID NO: 266345 - DNA, 75 bp, synthetic construct
  source 1..75: mol_type = other DNA
gtttattcaggatttgagtgagcggaaaacgcgtatcgaatgggtacgccagtttatgcgtgaactggaagagaa

SEQ ID NO: 266346 - DNA, 75 bp, synthetic construct
  source 1..75: mol_type = other DNA
aacaccaaggttttaaccagtttgaaaccgcacaggttttagaaaaaaatcactacacaactatgacaaagcagg

SEQ ID NO: 266347 - DNA, 75 bp, synthetic construct
  source 1..75: mol_type = other DNA
tcaaagtcatcgcaggtcagtatcgtttatgaagcggggccctgtggttatggactttatcgccggctggtgaaa

SEQ ID NO: 266348 - DNA, 75 bp, synthetic construct
  source 1..75: mol_type = other DNA
gggggagcgggttaaaaccgatcgccgtgatgccatcagacttgtgcgttcactgcgtgcaggagtgtcaacgcc

SEQ ID NO: 266349 - DNA, 75 bp, synthetic construct
  source 1..75: mol_type = other DNA
aacaaagtggctcaatggaaactatcggtttctcgctgtatatggagttgctggaaaacgccgtcgatgcgctga

SEQ ID NO: 266350 - DNA, 75 bp, synthetic construct
  source 1..75: mol_type = other DNA
acaaaactaaccttgcagtattgagaaatagcagaaaaatgtttaatttagtccctgaccctgatggatacttga

SEQ ID NO: 266351 - DNA, 75 bp, synthetic construct
  source 1..75: mol_type = other DNA
aacatagcgattgatacgtgtaaaaagaaaagtactcaatgtgtcattactgatatgggtagcagtcttcctaaa

SEQ ID NO: 266352 - DNA, 75 bp, synthetic construct
  source 1..75: mol_type = other DNA
gagaagacataaacaaaccgatcagcatcgctgcagccaaccgattcgtaaatagaataaggggagggatggatc

SEQ ID NO: 266353 - DNA, 75 bp, synthetic construct
  source 1..75: mol_type = other DNA
ctgttacatcagccgctgtaatgtccgtatctgcacatgcagattcatcttgggagcgtgctagcaacggcggca

SEQ ID NO: 266354 - DNA, 75 bp, synthetic construct
  source 1..75: mol_type = other DNA
gtgagatgaagaaatactctgtcaaaaatgatgtatctgatatcaatagaagagatttaaaagccacaatcttgt

SEQ ID NO: 266355 - DNA, 75 bp, synthetic construct
  source 1..75: mol_type = other DNA
tccgcgttccggaggccaatgcgcaggttcccaatttaaataatgcttctcaagactgtaaaggcaataatctgg

SEQ ID NO: 266356 - DNA, 75 bp, synthetic construct
  source 1..75: mol_type = other DNA
cataatagggtgtcttacgcttgatggaaaaataaacgaagatatactaaaacatatgacttcattttattatgt

SEQ ID NO: 266357 - DNA, 75 bp, synthetic construct
  source 1..75: mol_type = other DNA
gcacatacacccccgcaggccagttacagagccagcacctgaacagcctggtgtatgaccgtgactacgggtgga

SEQ ID NO: 266358 - DNA, 75 bp, synthetic construct
  source 1..75: mol_type = other DNA
gcgaaacgggtatggcggcgggagcgtgacctgacggggtggatgtcgctgtcgcgtaaaccggaggagacatgg

SEQ ID NO: 266359 - DNA, 75 bp, synthetic construct
  source 1..75: mol_type = other DNA
ggcagcggagggtgacgtggcgggcgcggtgacgggggtgacggacggcgcgggccgccgttttcacctggtgct

SEQ ID NO: 266360 - DNA, 75 bp, synthetic construct
  source 1..75: mol_type = other DNA
attagcatgctaacatttcagttgcgcacaatagccggagccagcattgacattcaacgccaggttgtgtacctg

SEQ ID NO: 266361 - DNA, 75 bp, synthetic construct
  source 1..75: mol_type = other DNA
tattacaactcataatccacgaattctggagctcgccgatcatttttttgacggtatgtcaaagacttgcgtcat

SEQ ID NO: 266362 - DNA, 75 bp, synthetic construct
  source 1..75: mol_type = other DNA
ctgatgaactgattatgaagtcaatagcgacaaccatatgtttcattgagagatacgaccatgagcatcctgcgg

SEQ ID NO: 266363 - DNA, 75 bp, synthetic construct
  source 1..75: mol_type = other DNA
tacgggaagcagcggagaaggcgacgaaaggccggtgggctgttgagttcgacgatgagatttactccactgacg

SEQ ID NO: 266364 - DNA, 75 bp, synthetic construct
  source 1..75: mol_type = other DNA
atggtaagcaatccagaatcattaaacccagaatctttggccaagttacagacgacgctctcaaattattcaata

SEQ ID NO: 266365 - DNA, 75 bp, synthetic construct
  source 1..75: mol_type = other DNA
agcaaaactggatatggcaaaaggggagataacaacccacggaacagaaagttatgccgcttacgctaatggcac

SEQ ID NO: 266366 - DNA, 75 bp, synthetic construct
  source 1..75: mol_type = other DNA
ttgattttactctcccttgctcccaccaggtctggatagcaggaggcatcggcattaccccctttatcgcccagc

SEQ ID NO: 266367 - DNA, 75 bp, synthetic construct
  source 1..75: mol_type = other DNA
aagaacacgttgcgctttgccatcaaaaatttaggggattatacctcgactctggcatcctcgataaaaatcggc

SEQ ID NO: 266368 - DNA, 75 bp, synthetic construct
  source 1..75: mol_type = other DNA
ttcaactattgccagttcactgatttttctgctgaaacgccaggcgggagtgtcacccgtgtgattaacacgtta

SEQ ID NO: 266369 - DNA, 75 bp, synthetic construct
  source 1..75: mol_type = other DNA
taacagtaaagattttgctgtctcaatgaacggtgtgaaattgaacaagacggggcgcgtaatctgggggaaatt

SEQ ID NO: 266370 - DNA, 75 bp, synthetic construct
  source 1..75: mol_type = other DNA
ctgagcagtatcagcgcttattggcacgtctggattatctgacgaagctcgacactaaagcatcaggccagcgta

SEQ ID NO: 266371 - DNA, 75 bp, synthetic construct
  source 1..75: mol_type = other DNA
aaaattctggaatcgggtccttcgcgtgataaagagtttgattcctttgctgtaaaaaaatattttaaatttccg

SEQ ID NO: 266372 - DNA, 75 bp, synthetic construct
  source 1..75: mol_type = other DNA
atccttctgacaatagttctctaagcacagcatatacagctagcgcagtcgtaagtgaatatggctgtgctgtca

SEQ ID NO: 266373 - DNA, 75 bp, synthetic construct
  source 1..75: mol_type = other DNA
cctaagacatcaatcatctgttctccaatgactagtctaaaaactagtattaagactatcacttatttaagtgat

SEQ ID NO: 266374 - DNA, 75 bp, synthetic construct
  source 1..75: mol_type = other DNA
ctcgctggaagcgggttacggctttgccctgaataaatcctttggtctggaagcggcgaaatatacgtggatctt

SEQ ID NO: 266375 - DNA, 75 bp, synthetic construct
  source 1..75: mol_type = other DNA
tgctggcgatgtatttaacacttggctggtgctggatatgcattctggcccgattagtgggattagctaatttat

SEQ ID NO: 266376 - DNA, 75 bp, synthetic construct
  source 1..75: mol_type = other DNA
tatccgttgaatccgatctcaaatatagatccattaggattagaaacactaaaatgcattaagccactgcattca

SEQ ID NO: 266377 - DNA, 75 bp, synthetic construct
  source 1..75: mol_type = other DNA
tggtgatcctgcctcttaccgcttgcaccacctatggcaacaaatccctgaaagacgaatcccaacaaaccgtca

SEQ ID NO: 266378 - DNA, 75 bp, synthetic construct
  source 1..75: mol_type = other DNA
ccggaaattttgattgttgatgaggcgttagctgttggcgatattggcttccagtataaatgctataaacggatg

SEQ ID NO: 266379 - DNA, 75 bp, synthetic construct
  source 1..75: mol_type = other DNA
cgtctcgctggaagcgggttacggttttgccctgaataaatcctttggtctggaagcggcgaaatatacgtggct

SEQ ID NO: 266380 - DNA, 75 bp, synthetic construct
  source 1..75: mol_type = other DNA
ctatagtgcgaaaggcgcaaccgtctcgctggaagcgggttacggctttgccctgaataaatcctttggtctgga

SEQ ID NO: 266381 - DNA, 75 bp, synthetic construct
  source 1..75: mol_type = other DNA
tgaaaccgataatagttgtgtggagaactgtttaaaagggaagtttaaagaggtaaggccgcgttattctgtatt

SEQ ID NO: 266382 - DNA, 75 bp, synthetic construct
  source 1..75: mol_type = other DNA
gagattatccagcagtatagagcggcccatctgtaccctttgatgattattaaaaatctcgtgtggaaacatgcg

SEQ ID NO: 266383 - DNA, 75 bp, synthetic construct
  source 1..75: mol_type = other DNA
caattacttaaagattatgagggcgaacagctgtatcttaatgagttaggatatgtttatggtaatgaagaaaaa

SEQ ID NO: 266384 - DNA, 75 bp, synthetic construct
  source 1..75: mol_type = other DNA
ctaagtggtacttctatcaattacttaagagttatgagggagaacagatgtatcttaatgagttaggatatgttt

SEQ ID NO: 266385 - DNA, 75 bp, synthetic construct
  source 1..75: mol_type = other DNA
gcttatcgaagatcttactcaccttgagaagagtgcaaaagaaatttctttctcaaggaagcttgccaaaattgc

SEQ ID NO: 266386 - DNA, 75 bp, synthetic construct
  source 1..75: mol_type = other DNA
caagcccaagtgatcgccatgcaaaaagaaatacaggaaaagttcagagagcagaacgaaaagttgagagaactg

SEQ ID NO: 266387 - DNA, 75 bp, synthetic construct
  source 1..75: mol_type = other DNA
ctctacctcacctggggcgaaccgccagaactagtaaaagagaagatcgaacaagtgcgggcgaaagctgccgcg

SEQ ID NO: 266388 - DNA, 75 bp, synthetic construct
  source 1..75: mol_type = other DNA
tctgaaaaatcacttagtcacgagacctctgagactgcggtcgcgacattaccagataaatttccctccagtcat

SEQ ID NO: 266389 - DNA, 75 bp, synthetic construct
  source 1..75: mol_type = other DNA
atgcgtttataccggcgcatgggtgttggcgcacaactttagttcatggggtagaaactgggatagtgtagggat

SEQ ID NO: 266390 - DNA, 75 bp, synthetic construct
  source 1..75: mol_type = other DNA
tccctcaccaaattacgctgacgaaaataaactagccgaaacaaatagagtaaaggcctcttatctcattttctg

SEQ ID NO: 266391 - DNA, 75 bp, synthetic construct
  source 1..75: mol_type = other DNA
cgagagcgccaggggattgcccctctgccacaccgattactccagaccagcaacgtatccgcgtgtcagcgccag

SEQ ID NO: 266392 - DNA, 75 bp, synthetic construct
  source 1..75: mol_type = other DNA
tgatggtgttaggtctgcctcaagattcttaagaaggaaagaacgtttatcaggtatgcaaagttttgatgacaa

SEQ ID NO: 266393 - DNA, 75 bp, synthetic construct
  source 1..75: mol_type = other DNA
gttacatatcagcaaaccataacaaaagatttctgtcctaagctagtaaaaatgttcaagcttactccccccgtt

SEQ ID NO: 266394 - DNA, 75 bp, synthetic construct
  source 1..75: mol_type = other DNA
caacccggtaaacacggggaatatcgtagacagtggtgaaccgccccggaaatcctggagactaaactccctgag

SEQ ID NO: 266395 - DNA, 75 bp, synthetic construct
  source 1..75: mol_type = other DNA
ttttacgcagattagaattatataattcaggtatatctgcaattgcagctgaaactggtaatatagaagagaaaa

SEQ ID NO: 266396 - DNA, 75 bp, synthetic construct
  source 1..75: mol_type = other DNA
gctctcgaagcatatctgtcaaaccctgacgcatcaggtataaagttagctattcaacttttactctccatttta

SEQ ID NO: 266397 - DNA, 75 bp, synthetic construct
  source 1..75: mol_type = other DNA
accactggtgctattaccggaggaattccggcaggaacatctttccctcttcaccctgaatgtataaatattttc

SEQ ID NO: 266398 - DNA, 75 bp, synthetic construct
  source 1..75: mol_type = other DNA
cgagaggcattaaacgagttaagtgttgataacgatgatgctcatgcggaaatcatccaaaaaatggaactgcta

SEQ ID NO: 266399 - DNA, 75 bp, synthetic construct
  source 1..75: mol_type = other DNA
tcaggatttaggcgactccgtttccggcaccctgcatgtgcgtattgaagagcagaacggtcaggtgcaggaata

SEQ ID NO: 266400 - DNA, 75 bp, synthetic construct
  source 1..75: mol_type = other DNA
actttctcaaaaatccattgagttgattgaaatagcgcccggagtcgatttgcaaaaaaatattattgaatgcat

SEQ ID NO: 266401 - DNA, 75 bp, synthetic construct
  source 1..75: mol_type = other DNA
ttgctgctgctattggtggcggagcaattgctatacccactcgctgtccggcactgctgcaagcgcaggcgcaca

SEQ ID NO: 266402 - DNA, 75 bp, synthetic construct
  source 1..75: mol_type = other DNA
ggattagaaacactaaaatgcattaagccactgcattcaatgggcggaactggtgaaagaagcggtccagatata

SEQ ID NO: 266403 - DNA, 75 bp, synthetic construct
  source 1..75: mol_type = other DNA
aggctgtacgtgaaagcgatctgttcacatcccttcagactgcgatagctgctcaggaatcctcaacctctgact

SEQ ID NO: 266404 - DNA, 75 bp, synthetic construct
  source 1..75: mol_type = other DNA
tcatgatggagctaatcccgctgatggcaataatgccaccgctgaaccaatcagttcaattgcttcagcgacagg

SEQ ID NO: 266405 - DNA, 75 bp, synthetic construct
  source 1..75: mol_type = other DNA
gttagccaggtcatacgcggccttaacggcttttggcgttgccgcctgtgactcggaagtgctgttggtcgcact

SEQ ID NO: 266406 - DNA, 75 bp, synthetic construct
  source 1..75: mol_type = other DNA
gtttctgaacgaggtcaacaacctgaacaaacgtatgggtgacctgcgtgatatcaacggcgaagccggtgcatg

SEQ ID NO: 266407 - DNA, 75 bp, synthetic construct
  source 1..75: mol_type = other DNA
attcaataatatctacataaccagtggtgatggaactgtccgactgaatgcagaaaatgcactgtctggcggtga

SEQ ID NO: 266408 - DNA, 75 bp, synthetic construct
  source 1..75: mol_type = other DNA
gcgtgctgatgttgccgctggtcgtaagcgcctgcggatcaacgccacctgctccaggtaccgtgcgtgaagcca

SEQ ID NO: 266409 - DNA, 75 bp, synthetic construct
  source 1..75: mol_type = other DNA
tcgggtccttcaaatctacgcggctaccggcgtaactccacacgagctgcgccctgatctctatccaaacccaag

SEQ ID NO: 266410 - DNA, 75 bp, synthetic construct
  source 1..75: mol_type = other DNA
gcaaccgcatcaaagcagcggtaaggggtatgccttgctgcaccgtaaaattatggatgtgccgttttacaagga

SEQ ID NO: 266411 - DNA, 75 bp, synthetic construct
  source 1..75: mol_type = other DNA
actggacgcccgtcgctggtcagagaaacattcatccccgacaacaaagttcggagcttattacggacttttgag

SEQ ID NO: 266412 - DNA, 75 bp, synthetic construct
  source 1..75: mol_type = other DNA
atcaacagttcgcacagtatttttcgctgcaatttccgacaccagaagaaggcaatcgctggtacggaattctgg

SEQ ID NO: 266413 - DNA, 75 bp, synthetic construct
  source 1..75: mol_type = other DNA
gttaatgctttcattgcgttattaatgcaaccgttcttcggtttcatctccgataaatttggtcttaagaaacaa

SEQ ID NO: 266414 - DNA, 75 bp, synthetic construct
  source 1..75: mol_type = other DNA
aagaaatcatcaaccagagcattgcgaacggctggcagggattgtttgaaccgaaaggcatcaagcagccagccc

SEQ ID NO: 266415 - DNA, 75 bp, synthetic construct
  source 1..75: mol_type = other DNA
agcagcaatctcctttggtttcaccagaggaaaattccagacaggaaaatgttgttaataatgctaacggtttcg

SEQ ID NO: 266416 - DNA, 75 bp, synthetic construct
  source 1..75: mol_type = other DNA
tctaatgcatttaagatatgggagaaaaccctgtcaacagatgaagcaaaaaccatttctcgcacggggtttatc

SEQ ID NO: 266417 - DNA, 75 bp, synthetic construct
  source 1..75: mol_type = other DNA
ttttctggggatacgccccggatggtgggataaacctggatttttacacataccaaagacagattagatactcta

SEQ ID NO: 266418 - DNA, 75 bp, synthetic construct
  source 1..75: mol_type = other DNA
cggtagcgttcctatgtggggccagcacggtgattttatcatcgaaagtttcagtggtatgcgagcaagggttaa

SEQ ID NO: 266419 - DNA, 75 bp, synthetic construct
  source 1..75: mol_type = other DNA
aattccgctgcgtgtcggtatcgggtccagcaactacaacgctatcgataacgtcctcaacgaagtcctggaact

SEQ ID NO: 266420 - DNA, 75 bp, synthetic construct
  source 1..75: mol_type = other DNA
cacttgatcccgcaaccaccatgggcaccttaatcgactgcgcccacgccgactcggtgcatagctttattcgtg

SEQ ID NO: 266421 - DNA, 75 bp, synthetic construct
  source 1..75: mol_type = other DNA
gactatgcaaattggctcttctgggggctggtattaataagtatggtttggacatttggtatgatggcaatgcaa

SEQ ID NO: 266422 - DNA, 75 bp, synthetic construct
  source 1..75: mol_type = other DNA
tataatgtacgtagcatttaaaaaaacgggtgtactttcactacccttaataaattttaaaagagcatatgtatc

SEQ ID NO: 266423 - DNA, 75 bp, synthetic construct
  source 1..75: mol_type = other DNA
aaaatgcacgagcgccagagccactcaatggataaccacaccgcgctgagagatcccctcataatttccccaaaa

SEQ ID NO: 266424 - DNA, 75 bp, synthetic construct
  source 1..75: mol_type = other DNA
atggcaaccgatgtaggtttacccgaaggctttgttctcgataatcagcctgataactcacagcttcctgatggc

SEQ ID NO: 266425 - DNA, 75 bp, synthetic construct
  source 1..75: mol_type = other DNA
acattcaaatggagcaatgtcattattaattttaatagtgacatttgcaataatgatcaactatattttttttac

SEQ ID NO: 266426 - DNA, 75 bp, synthetic construct
  source 1..75: mol_type = other DNA
ccatcttgaaaccgcattaaagattaaggcggggcatacgcttggggtaatagatgctatgttaattcatgaaat

SEQ ID NO: 266427 - DNA, 75 bp, synthetic construct
  source 1..75: mol_type = other DNA
aaaaagcctgcgaggacgccatttttgccttgaggtcagactcccgataagtaaccttgatcgtgaggaatacac

SEQ ID NO: 266428 - DNA, 75 bp, synthetic construct
  source 1..75: mol_type = other DNA
aagagaaactagacaatttgcatacaacacttaatggtcttgtattccctgtggaagattttataaaccttgggc

SEQ ID NO: 266429 - DNA, 75 bp, synthetic construct
  source 1..75: mol_type = other DNA
tagatcttgagatggatgctaatgtgcctaaattttactatggatttaacccattcaaaggagcatttggattat

SEQ ID NO: 266430 - DNA, 75 bp, synthetic construct
  source 1..75: mol_type = other DNA
aaaataaaaaaatactggcttcaattatatcattcagagtttttttctcattcttttcattttatgctataggta

SEQ ID NO: 266431 - DNA, 75 bp, synthetic construct
  source 1..75: mol_type = other DNA
gggctatttgcctgtaccggtgttgttgccggtaatatgatggggagcggtattgcattattacctgcgaacctt

SEQ ID NO: 266432 - DNA, 75 bp, synthetic construct
  source 1..75: mol_type = other DNA
gatggcgaccagagttatatccgttttggttttaaaggcgaaacacaaattaacgatctagactggccccctgaa

SEQ ID NO: 266433 - DNA, 75 bp, synthetic construct
  source 1..75: mol_type = other DNA
agacaggtgttctttattaccatgctaactggattggtaacctggcgattggtattaccgctgtatcttatcttt

SEQ ID NO: 266434 - DNA, 75 bp, synthetic construct
  source 1..75: mol_type = other DNA
gaaaagcccgcgtgggcgcaatttttgccttgaggtcaggcttccgataagtaaccttgatcgcgaggaatacac

SEQ ID NO: 266435 - DNA, 75 bp, synthetic construct
  source 1..75: mol_type = other DNA
tcactgggtaaaaccattgcctcaaaagacgtgatgacccgcaccgtgaaaatcagcggtgtggggcgtccgtat

SEQ ID NO: 266436 - DNA, 75 bp, synthetic construct
  source 1..75: mol_type = other DNA
atatttctattacttccgattacagacatgccaggaaagtggaacataaattgtcggatattctactgttgacta

SEQ ID NO: 266437 - DNA, 75 bp, synthetic construct
  source 1..75: mol_type = other DNA
caacatagtaacaacctataatgaaagaattttatttgaaaaaatctgttctattataggccctgcatacgaact

SEQ ID NO: 266438 - DNA, 75 bp, synthetic construct
  source 1..75: mol_type = other DNA
gaacggaaatccgttacgaccgtaaagccaatgccctgtccatcacgctggctgaaggcggcagctataaaatca

SEQ ID NO: 266439 - DNA, 75 bp, synthetic construct
  source 1..75: mol_type = other DNA
tcagtaatcctccggctcccggtgatgcggtcacagtgatatcagaggcgggtgatctgcgcaacggtcgggtgt

SEQ ID NO: 266440 - DNA, 75 bp, synthetic construct
  source 1..75: mol_type = other DNA
tgaaggttcaacgctcggggtggcgaatgccattgatagccagaatctgaaaggtaaggtgaaggtcattggttt

SEQ ID NO: 266441 - DNA, 75 bp, synthetic construct
  source 1..75: mol_type = other DNA
gtgctcaggcagctgatgccttagctgcgcaggtaaataataaagggaaagttgggattatcgcgcacgttgcag

SEQ ID NO: 266442 - DNA, 75 bp, synthetic construct
  source 1..75: mol_type = other DNA
cggacttgaacatgataacaatcgtattttcattgaacatcccgaggatgtattaaggatttcaggtttaatcct

SEQ ID NO: 266443 - DNA, 75 bp, synthetic construct
  source 1..75: mol_type = other DNA
aactgtcgaataaaataggtctgcgtgtttatactgttgtctctgaaatgtcgattgaagcatggataacaaaag

SEQ ID NO: 266444 - DNA, 75 bp, synthetic construct
  source 1..75: mol_type = other DNA
gccacaccagggaggcgttcttttctaacgtatctgcatctattgattataaggatccatcattacaatcaaagt

SEQ ID NO: 266445 - DNA, 75 bp, synthetic construct
  source 1..75: mol_type = other DNA
ctaatgatgggtggataattcctggtgcgtcgtggaaaccgtcacactggatgccgctaccagagcctccacttt

SEQ ID NO: 266446 - DNA, 75 bp, synthetic construct
  source 1..75: mol_type = other DNA
caatggacgcctgcagcgggcagtagcaatgctggggtcatggagatgattaacatcgacttactgacggcaatg

SEQ ID NO: 266447 - DNA, 75 bp, synthetic construct
  source 1..75: mol_type = other DNA
ctgccgctggcgcttatcagcgaagacggcaatacggcgtggagcgcggaatatgatgaatggggcaaccagctt

SEQ ID NO: 266448 - DNA, 75 bp, synthetic construct
  source 1..75: mol_type = other DNA
accccggacggcaaccggagcgagacacagtacgatgcgtggggaaaggcggtcagcaccacgcagggcgggctg

SEQ ID NO: 266449 - DNA, 75 bp, synthetic construct
  source 1..75: mol_type = other DNA
atgaggcggcagggaatagacaaggtcagccagctaaagaaagaatcatggatcttaaaaataacactgtcggta

SEQ ID NO: 266450 - DNA, 75 bp, synthetic construct
  source 1..75: mol_type = other DNA
atagcgacgtgacgctgactgccagctcggaaaatttagttctggatcctaaagggacggcgaaaactaatgagc

SEQ ID NO: 266451 - DNA, 75 bp, synthetic construct
  source 1..75: mol_type = other DNA
gagaaggattatcagttcctgccgtcgaaaaatgaccatttcgtgagcgggaaaatcatacgtacatttagtacc

SEQ ID NO: 266452 - DNA, 75 bp, synthetic construct
  source 1..75: mol_type = other DNA
gaccagcctcacgccggaagcgccgtcattagcgggtgccgctgctgtaggttctacggcatcgggctggacaaa

SEQ ID NO: 266453 - DNA, 75 bp, synthetic construct
  source 1..75: mol_type = other DNA
gaaacatttctgtgcgttttgcctgtcaggtgttcgttgtcagtgaaagttgttatcgctatcagcctgaactga

SEQ ID NO: 266454 - DNA, 75 bp, synthetic construct
  source 1..75: mol_type = other DNA
gattttggctgactgcgggcgtaaaagggaagtgcgttacgtcacgccaaatttctcatcgttaccgttgatgtt

SEQ ID NO: 266455 - DNA, 75 bp, synthetic construct
  source 1..75: mol_type = other DNA
gaggtgatgggcaactatgcgctggcggacggcaaagccaaacaaacgtataaagttacggtgactgatgccaat

SEQ ID NO: 266456 - DNA, 75 bp, synthetic construct
  source 1..75: mol_type = other DNA
atttgaagaaacggagttgggttgggtgccgaaaggatggagtattgttagaactgaagatattgcattaaaaat

SEQ ID NO: 266457 - DNA, 75 bp, synthetic construct
  source 1..75: mol_type = other DNA
gttatttactggtgttaaccgtgcttatttttctggcactcattttacagcatcaaaaacccaatctggttgctg

SEQ ID NO: 266458 - DNA, 75 bp, synthetic construct
  source 1..75: mol_type = other DNA
atgttggcccggctgatgaaacgcaaatagccgagcaaattcagttagtcgaaaatgcgatggcgcagaaaccga

SEQ ID NO: 266459 - DNA, 75 bp, synthetic construct
  source 1..75: mol_type = other DNA
cttgctaacggtaatgagcaaagaccgctggtgctgtctctgcgcgacgccgagggccagccagtcacgggcatg

SEQ ID NO: 266460 - DNA, 75 bp, synthetic construct
  source 1..75: mol_type = other DNA
ccaacgtcaatttttcttacgcgtaaatgaatcaaaatcatcgccgtactatttgattcattattttaggtcaga

SEQ ID NO: 266461 - DNA, 75 bp, synthetic construct
  source 1..75: mol_type = other DNA
gctcccgaaactcatctccggtgagctatccctggaagatcttccggatctcaccaccgatacagaagccgcata

SEQ ID NO: 266462 - DNA, 75 bp, synthetic construct
  source 1..75: mol_type = other DNA
atgagcaccatcctgaaatgggcgggaaataaaaccgccgtaatgtccgaactgaaaaaacaccttcctgctggc

SEQ ID NO: 266463 - DNA, 75 bp, synthetic construct
  source 1..75: mol_type = other DNA
tgtcgataccgcctctttggcatggcgttgatcttgctggccctggcgaggaggttcggatcgtttgtgaacgat

SEQ ID NO: 266464 - DNA, 75 bp, synthetic construct
  source 1..75: mol_type = other DNA
gtattttaatactgcgcctttggattacatggacaaggcggcttattttcttttccttaatcgccattgttatcg

SEQ ID NO: 266465 - DNA, 75 bp, synthetic construct
  source 1..75: mol_type = other DNA
ggttcgttgcatcgcaagctgtgcgaacagcctgaattgctggaacatcgggaagatcccgaactgccggtggaa

SEQ ID NO: 266466 - DNA, 75 bp, synthetic construct
  source 1..75: mol_type = other DNA
caacaaaaggtgccggtaccactctctgggtttacaccggaaccggtgacccctatgccaatccgctttcagacg

SEQ ID NO: 266467 - DNA, 75 bp, synthetic construct
  source 1..75: mol_type = other DNA
actgatttcatgaaagcggtatatttcctgtatctcaatcgtcatggttaccgtgggttatgtcgttataacaag

SEQ ID NO: 266468 - DNA, 75 bp, synthetic construct
  source 1..75: mol_type = other DNA
aagaaatcatcatccagtgggagagcggagagtatgaaccaactatcagtatgcttatcccactggcaaatattc

SEQ ID NO: 266469 - DNA, 75 bp, synthetic construct
  source 1..75: mol_type = other DNA
cttgattcctttgcattaaatattgcaaatttgctaagtgctgtacgcacattccatcttctggattgtgctcgc

SEQ ID NO: 266470 - DNA, 75 bp, synthetic construct
  source 1..75: mol_type = other DNA
tggtgctagtgagttgtcaaaatatattgatttgacagaaagtatagtggcgttgatcgattatctcataaggga

SEQ ID NO: 266471 - DNA, 75 bp, synthetic construct
  source 1..75: mol_type = other DNA
tgttattcgcgtaaatgtgccagaaccacgggaagaaagtattggcgctcgcatcaaaagcgcccgtaaaaacct

SEQ ID NO: 266472 - DNA, 75 bp, synthetic construct
  source 1..75: mol_type = other DNA
cagcatgcttatccccctggcaaacgtcctgggatgcgatccgctttctctgctgagtgaaaaaaacagcgagtc

SEQ ID NO: 266473 - DNA, 75 bp, synthetic construct
  source 1..75: mol_type = other DNA
ttagaaaagttaagagatagctgggatgaaaaggaacggcgtgtacagttaatggagcacattttagatacacaa

SEQ ID NO: 266474 - DNA, 75 bp, synthetic construct
  source 1..75: mol_type = other DNA
cccgaccatcaaggccgagggcagttaagatatcaaaaatccgttatccggtgaaacgcagcaccgctccgctta

SEQ ID NO: 266475 - DNA, 75 bp, synthetic construct
  source 1..75: mol_type = other DNA
ttaggaagcattttcaaaacagcccattcaatcaatccaaatgtttcatttcctttaattgcaatgtatacagtt

SEQ ID NO: 266476 - DNA, 75 bp, synthetic construct
  source 1..75: mol_type = other DNA
ctaatagtgttaaccctttggacggtactggaattgtattaatcgatgaaatagacctccatttacatccatcat

SEQ ID NO: 266477 - DNA, 75 bp, synthetic construct
  source 1..75: mol_type = other DNA
ctaaggctcaaggctggaacgcatgccgcgccgctatgcttcatggggccgaacctgtaagtgaacatgatgagt

SEQ ID NO: 266478 - DNA, 75 bp, synthetic construct
  source 1..75: mol_type = other DNA
atgcaacgcgtgtacaaccattcccgctatattgatgcgaaacgcaatgcgcttgatatgtgggtggagcggttg

SEQ ID NO: 266479 - DNA, 75 bp, synthetic construct
  source 1..75: mol_type = other DNA
tcccggcaggccgctacaaagcaaaagaggtggcggaactttaccattcacgatgggaaatcgaagtcgggttca

SEQ ID NO: 266480 - DNA, 75 bp, synthetic construct
  source 1..75: mol_type = other DNA
cacaaaagaggaatacttcgcacgtaaaaacggcacgtactcaggttcacaacaaaatactggtgcatctgacac

SEQ ID NO: 266481 - DNA, 75 bp, synthetic construct
  source 1..75: mol_type = other DNA
gaaccatctgtagagcgtgaggggccgttctacttcctcttcaccgacaaggatggcgaaaaatacggtcgcgca

SEQ ID NO: 266482 - DNA, 75 bp, synthetic construct
  source 1..75: mol_type = other DNA
ataacacaagagcaatctcaaaaaatcgaacttgagttagagcaatatgtcaatgacgaaaactatcctgttttc

SEQ ID NO: 266483 - DNA, 75 bp, synthetic construct
  source 1..75: mol_type = other DNA
ccactggagaacgtttactgcgcggtctggtttatctgccggaagatcgccagtcatccggactgaatctcgatg

SEQ ID NO: 266484 - DNA, 75 bp, synthetic construct
  source 1..75: mol_type = other DNA
gctggacttgtcgattcccttaccccagggggcgcgttatcaggcctggacacgtaaagagccggttggcgtagt

SEQ ID NO: 266485 - DNA, 75 bp, synthetic construct
  source 1..75: mol_type = other DNA
accgtttggtgggatgaagcagtcaggaacgggccgtgattttggcccggactggctggacggttggtgtgaaac

SEQ ID NO: 266486 - DNA, 75 bp, synthetic construct
  source 1..75: mol_type = other DNA
ggcgcggcagtatggacgcgcgacctctcccgcgcgcaccgcatgagccgtcgcctgaaagccggttccgtcttt

SEQ ID NO: 266487 - DNA, 75 bp, synthetic construct
  source 1..75: mol_type = other DNA
aaaaataatggtgatattgatataattacaagccttattagcgagtcatatgacagttggattcgaaaattaaga

SEQ ID NO: 266488 - DNA, 75 bp, synthetic construct
  source 1..75: mol_type = other DNA
tgtattgaaagtgtcttctatgattcaggctcttgctgctgtaattttgaatttattcccgggtttaatgagtat

SEQ ID NO: 266489 - DNA, 75 bp, synthetic construct
  source 1..75: mol_type = other DNA
cagttaaacatgcttgcgcatattgtcggttgtatcataacttgaacaaatgggacggtttaattcttcttctgc

SEQ ID NO: 266490 - DNA, 75 bp, synthetic construct
  source 1..75: mol_type = other DNA
tgaaaagaaatgcattgatagtattttcagcacagaaagcggtgataggttagatagcaataattatttaaacaa

SEQ ID NO: 266491 - DNA, 75 bp, synthetic construct
  source 1..75: mol_type = other DNA
gctcaagcctggatttaaagaatatttattcggaggctttggggttaagcaaggtgaaatggtagttcttggaga

SEQ ID NO: 266492 - DNA, 75 bp, synthetic construct
  source 1..75: mol_type = other DNA
cggtaaactgttcacgggcctgcccccggacagattccgtgcacagctcgtcctgcaggcgggtcatcaggggac

SEQ ID NO: 266493 - DNA, 75 bp, synthetic construct
  source 1..75: mol_type = other DNA
ttatatgaatttaaatcaaaaaatatagatgatattggaatatttgcattggcaatgtgtaatggagaatcaatt

SEQ ID NO: 266494 - DNA, 75 bp, synthetic construct
  source 1..75: mol_type = other DNA
gtgaacaccagacggtgcatcacccgcagacggaagcactgctctggcagcatgagaccagacatgcgtacaacg

SEQ ID NO: 266495 - DNA, 75 bp, synthetic construct
  source 1..75: mol_type = other DNA
gtatgaccgtcacggcaggctgacaaagaaaaccgacctcatcccggaaggggttatccgcacggatgatgagcg

SEQ ID NO: 266496 - DNA, 75 bp, synthetic construct
  source 1..75: mol_type = other DNA
agcacattactgctggataacaatatgttgatccgcctacgcgctaaaaatatgcttcacgaagtcatggatgtt

SEQ ID NO: 266497 - DNA, 75 bp, synthetic construct
  source 1..75: mol_type = other DNA
ttgccaccgactatcagatggtccggcacccggatatccaccaggcccagtgcctgtaccagacgttccgtgata

SEQ ID NO: 266498 - DNA, 75 bp, synthetic construct
  source 1..75: mol_type = other DNA
gcagctaaagctgtaacactgaataatggtaattatcagctgtcaggctataaatggccccagtcatttggtgtc

SEQ ID NO: 266499 - DNA, 75 bp, synthetic construct
  source 1..75: mol_type = other DNA
tattctgatgagtatcatctatcaagatatggagcaagaaaggcaattgaagggtttggaaatataattatcgat

SEQ ID NO: 266500 - DNA, 75 bp, synthetic construct
  source 1..75: mol_type = other DNA
atattcgttttacctgattctcaaggttggaatagattagatcctcatctaataataacgcaacttttcccaata

SEQ ID NO: 266501 - DNA, 75 bp, synthetic construct
  source 1..75: mol_type = other DNA
tacaggcaaatgttattacaaaattaatggcgatatgtattgttatatgttttgccatgtttatattgttgctta

SEQ ID NO: 266502 - DNA, 75 bp, synthetic construct
  source 1..75: mol_type = other DNA
tgtaatgtcattgtccactttttattttaaaacaccgacctacattaaagttattgcatttgttttacttgcatc

SEQ ID NO: 266503 - DNA, 75 bp, synthetic construct
  source 1..75: mol_type = other DNA
gttggagaaaacacgtcacttaccactcaggaaaaactgcaaatcatcgaagtagcgaaagatgctgctggcgga

SEQ ID NO: 266504 - DNA, 75 bp, synthetic construct
  source 1..75: mol_type = other DNA
atgatttagtgttcgctatggattctgctgagttaatcgataatcacaagtcaggaaatataagtaatgggtata

SEQ ID NO: 266505 - DNA, 75 bp, synthetic construct
  source 1..75: mol_type = other DNA
gaccgatcgagcacaaattttgagagatatcttcttctgtcttgtaacagaagaacagaaaatcgggcttttgcg

SEQ ID NO: 266506 - DNA, 75 bp, synthetic construct
  source 1..75: mol_type = other DNA
tcaataaaaacaacgtatttatctctatcagttttgtgcagatatgttgcattcaggattaccgatctatgactc

SEQ ID NO: 266507 - DNA, 75 bp, synthetic construct
  source 1..75: mol_type = other DNA
ctgggagtatctgatgaggaggtaagagacatacaaaggattttaagtaatccttatggtgtttattttatcgcg

SEQ ID NO: 266508 - DNA, 75 bp, synthetic construct
  source 1..75: mol_type = other DNA
gtatttatgcatgtattacgcaagcgtgcgtgttatcagtggttcataatggagtttggtgaagttccggatact

SEQ ID NO: 266509 - DNA, 75 bp, synthetic construct
  source 1..75: mol_type = other DNA
gggggatgttgatcaattccatcctttacttgcaaacaacagagactgtcataaaagaagaaaaaagatatttaa

SEQ ID NO: 266510 - DNA, 75 bp, synthetic construct
  source 1..75: mol_type = other DNA
gagcatgttatcactggttcatgatggaatttggtcaaataccagatactgatatggaggtattgcttgaaaaaa

SEQ ID NO: 266511 - DNA, 75 bp, synthetic construct
  source 1..75: mol_type = other DNA
tcagttattatcatcaaaatgcgatgaactaatatttgtattgtataacgttcaggcttcaacgcgtgatacaac

SEQ ID NO: 266512 - DNA, 75 bp, synthetic construct
  source 1..75: mol_type = other DNA
gccggaaaatttaaggaacggttattttgacataaatcagataagtcatatcccggaaagcattcttaatctgag

SEQ ID NO: 266513 - DNA, 75 bp, synthetic construct
  source 1..75: mol_type = other DNA
cttaatctccccattgcctgcgtcccttacacagcttaatgtcagctataacagacttattgaactgcctgcttt

SEQ ID NO: 266514 - DNA, 75 bp, synthetic construct
  source 1..75: mol_type = other DNA
tatcccctgaatatattgatgaatcggttatcttaaactacagagcttcactgcctaaatggaaaatgcagaatt

SEQ ID NO: 266515 - DNA, 75 bp, synthetic construct
  source 1..75: mol_type = other DNA
agacgttaagcgtatgggcgatgacgatgttgatcgcgagctgcgcgaaggatttacccgccccggtagtcgttg

SEQ ID NO: 266516 - DNA, 75 bp, synthetic construct
  source 1..75: mol_type = other DNA
tgaaaggggccagtgatgtacagcagactgttagccatatgtctgatgacgatgttgatcgcgagctgcgcgcaa

SEQ ID NO: 266517 - DNA, 75 bp, synthetic construct
  source 1..75: mol_type = other DNA
tcccggaaagcattcttaatctgaggaatgaatgttcaatagatattagtgataacccattgtcatcccatgctc

SEQ ID NO: 266518 - DNA, 75 bp, synthetic construct
  source 1..75: mol_type = other DNA
tgttaacatgttaactggctgtccgggcatttttgcggtttttatctttattattcagtttgttgcgtggaaaaa

SEQ ID NO: 266519 - DNA, 75 bp, synthetic construct
  source 1..75: mol_type = other DNA
taaaatttgccgaagcactggaaaaagctggcatgccagctgaacaggcgcgcgccatttcctccgcaataaaag

SEQ ID NO: 266520 - DNA, 75 bp, synthetic construct
  source 1..75: mol_type = other DNA
aaaactgaactaaaaaatgacattgctgccattgatgcaaaaattgataaactcaccctgcaactgactgtcaga

SEQ ID NO: 266521 - DNA, 75 bp, synthetic construct
  source 1..75: mol_type = other DNA
taatattgttattttcctttcagattagtgcagccattactagcaaggaaagtgaggttgtttcaccattattaa

SEQ ID NO: 266522 - DNA, 75 bp, synthetic construct
  source 1..75: mol_type = other DNA
tcactggacaacatgattgctcagggtaatccggtgccggtgccttacggtgaaatgctggttggttcacgacgg

SEQ ID NO: 266523 - DNA, 75 bp, synthetic construct
  source 1..75: mol_type = other DNA
aaaccgatagctgaagcactggcaggcggtcgctctcttgatgagtttatcatcaaaaaagatgcttccagctct

SEQ ID NO: 266524 - DNA, 75 bp, synthetic construct
  source 1..75: mol_type = other DNA
gtggcagaacgtaaagcagaagccacgaaaggggctagtgatgttgaagagagcgttaagcgtatgggtgatgac

SEQ ID NO: 266525 - DNA, 75 bp, synthetic construct
  source 1..75: mol_type = other DNA
ttctggatttttacttgctgctaaagttatatctgaaaagtttaatatttctcttggctctaatattagtacttc

SEQ ID NO: 266526 - DNA, 75 bp, synthetic construct
  source 1..75: mol_type = other DNA
atgcagtggggatgggcgcacggtttttgtgtggcaaaccctgttgatgtggttggccatttgcttcctcagcag

SEQ ID NO: 266527 - DNA, 75 bp, synthetic construct
  source 1..75: mol_type = other DNA
acaaaatggcgattgagaaggtgcaattgacttatttggatttggtcgtggcgaggtggcgaccctgcattctgc

SEQ ID NO: 266528 - DNA, 75 bp, synthetic construct
  source 1..75: mol_type = other DNA
tatgtttgggatgttctgttattattcttctgctggatgcgcttgcggaatactttcttgtgatgaaagacatga

SEQ ID NO: 266529 - DNA, 75 bp, synthetic construct
  source 1..75: mol_type = other DNA
tggccccggctggaaagccccctttgatatccgcttacagattcatgagcgggaactgatactcaacgacaacgg

SEQ ID NO: 266530 - DNA, 75 bp, synthetic construct
  source 1..75: mol_type = other DNA
acagcagcttccccaggactttattgggggtagtgtgtttggccacggggtttcggtcaaagaaaaagataataa

SEQ ID NO: 266531 - DNA, 75 bp, synthetic construct
  source 1..75: mol_type = other DNA
tacctgaaggttctcctaatattgttttacagcagttatccaatatagtattaatggatgatccctttaaaaaga

SEQ ID NO: 266532 - DNA, 75 bp, synthetic construct
  source 1..75: mol_type = other DNA
gagacaaaccgtctcttattgagcacctgttcccggtacaaaaaatatctgccgagacctttaaagaacgaatgg

SEQ ID NO: 266533 - DNA, 75 bp, synthetic construct
  source 1..75: mol_type = other DNA
gcaataccggttcctgcgaagcgatgacggcggcaagtgtacacgaaatgcggtatcacttgctgttttctgtcc

SEQ ID NO: 266534 - DNA, 75 bp, synthetic construct
  source 1..75: mol_type = other DNA
tatttattagtaaattacctgtggaggatgcgaatattagaaaaaaaatgcatttgaataatatgtttatacatc

SEQ ID NO: 266535 - DNA, 75 bp, synthetic construct
  source 1..75: mol_type = other DNA
atgcagtattgataccgacatacaatgataacctagaaaatatagagaaaacattttccagtatcccatttgatg

SEQ ID NO: 266536 - DNA, 75 bp, synthetic construct
  source 1..75: mol_type = other DNA
attctgttgctgataccattaataataaacaactgaagttaacggcctcatatataccaccaactacatatggaa

SEQ ID NO: 266537 - DNA, 75 bp, synthetic construct
  source 1..75: mol_type = other DNA
ccattaatgccgcagcattagctgcttttaataatggtggtggggaaatattttaccctccaggtgtttatttaa

SEQ ID NO: 266538 - DNA, 75 bp, synthetic construct
  source 1..75: mol_type = other DNA
ataatgttgcagaacatgctctctattcagaggggtatggatcatttcatgataatcaggaacacgcctctgaag

SEQ ID NO: 266539 - DNA, 75 bp, synthetic construct
  source 1..75: mol_type = other DNA
gggttgggccagacggtgaatgtggggagcaaaaaggaaggtggtcatgaccagaaagtgacggtagcgaacgat

SEQ ID NO: 266540 - DNA, 75 bp, synthetic construct
  source 1..75: mol_type = other DNA
cgttagaatcgctgaagttcgcagcgtcattcgatgagagcgcagcacgcctttatcgaagaattacatgcaatt

SEQ ID NO: 266541 - DNA, 75 bp, synthetic construct
  source 1..75: mol_type = other DNA
atgctgttttatcatggttgcagaagtccttatccttattcactctgctggcttgatgaatttgctgagcctgcg

SEQ ID NO: 266542 - DNA, 75 bp, synthetic construct
  source 1..75: mol_type = other DNA
ttaaacacggggtatggcaaaccgtgggggcgcataaacgtatgttgaacatcccgcagcgtgagttcctcggcc

SEQ ID NO: 266543 - DNA, 75 bp, synthetic construct
  source 1..75: mol_type = other DNA
ggcgagcgtacccttattctgtggcgcgattgcgacaagatcggctatgaagaattgaataaatatgccaacaga

SEQ ID NO: 266544 - DNA, 75 bp, synthetic construct
  source 1..75: mol_type = other DNA
cagctacttgtacaactattgatgagtatgaagttgctaatttggaattattgctaaaagaaacgtttacaggat

SEQ ID NO: 266545 - DNA, 75 bp, synthetic construct
  source 1..75: mol_type = other DNA
tccagtttcattatcccccgccgcaggaattaattccgacaccaccttcaaagggattaactccacttcggcgct

SEQ ID NO: 266546 - DNA, 75 bp, synthetic construct
  source 1..75: mol_type = other DNA
ggtgttttaaccggccatatggcacttgttgccgaagcgcttgcttgtaatttttgcccgctaggcattaccggt

SEQ ID NO: 266547 - DNA, 75 bp, synthetic construct
  source 1..75: mol_type = other DNA
cgcgattctggtgttcttgttgggcagatggcgcttgttgccgaagcgctagaatgcaatttttgcccgctgggc

SEQ ID NO: 266548 - DNA, 75 bp, synthetic construct
  source 1..75: mol_type = other DNA
ggcgcgctaactggctatggcgaacttgttgaagtggatgataaattgggcgtagagattcattcttggttatca

SEQ ID NO: 266549 - DNA, 75 bp, synthetic construct
  source 1..75: mol_type = other DNA
gaggattgcagtaaaccagtggcaaaaatgacagacgcagaaaaagagcagtgtggcaaagctggcagcttcact

SEQ ID NO: 266550 - DNA, 75 bp, synthetic construct
  source 1..75: mol_type = other DNA
acatcagcaaagacgaggcactacaacggcaatttactttagatgatgtgtccggcgcagaatttaaccagcaaa

SEQ ID NO: 266551 - DNA, 75 bp, synthetic construct
  source 1..75: mol_type = other DNA
taatttcctattatgattctgctttaatttttttaatgacgtcaaaacatgaaggctaccctttatctctagcac

SEQ ID NO: 266552 - DNA, 75 bp, synthetic construct
  source 1..75: mol_type = other DNA
accgcttgcgtaatggcctgctggtggctgttaacgccgacatgtcactgccgtttgacacgattgaacgcacta

SEQ ID NO: 266553 - DNA, 75 bp, synthetic construct
  source 1..75: mol_type = other DNA
agggcgaaggcaaagggcaactgctgctggatggccgcaacgccgaactggctgcggccatcggcccgaccatct

SEQ ID NO: 266554 - DNA, 75 bp, synthetic construct
  source 1..75: mol_type = other DNA
ggcaggataaagcgttaagtctcgccattgaaacccgcttatttattaacggtgaatatactgctgcggcggaaa

SEQ ID NO: 266555 - DNA, 75 bp, synthetic construct
  source 1..75: mol_type = other DNA
gcgtgattgccgccatcgtgccgtggaacttcccgctgttgctgacttgctggaaactcggcccggcgctggcgg

SEQ ID NO: 266556 - DNA, 75 bp, synthetic construct
  source 1..75: mol_type = other DNA
gtgcgccccggcgagatcgtcggtctggctggcttgctgggatccggacgtaccgaaaccgccgaagtgatcttc

SEQ ID NO: 266557 - DNA, 75 bp, synthetic construct
  source 1..75: mol_type = other DNA
gcttgcgcagtgcgggctgacggtggagcggctggcggcacagatagagccggtttatttgcctgagcgaaaaat

SEQ ID NO: 266558 - DNA, 75 bp, synthetic construct
  source 1..75: mol_type = other DNA
gaggattgcagcaaaccagtggcaaaaatgacagacgcggaaaaagagcagtgcggcaaggctggtagctttact

SEQ ID NO: 266559 - DNA, 75 bp, synthetic construct
  source 1..75: mol_type = other DNA
ccgtttgacacgattgaacgcactatcatgacgtatctcggctttaatgaagagctgaatgaagagcatggcgta

SEQ ID NO: 266560 - DNA, 75 bp, synthetic construct
  source 1..75: mol_type = other DNA
gataccagcggctgcaccggcgagttgccgattagcgccggtaacagcgtcggcctgttcatggtggtcgggggt

SEQ ID NO: 266561 - DNA, 75 bp, synthetic construct
  source 1..75: mol_type = other DNA
cccgttacgacaacgccagacgcaccgcgctccgcacatgctcgcgggatgtgctggtacatggccggagcctgc

SEQ ID NO: 266562 - DNA, 75 bp, synthetic construct
  source 1..75: mol_type = other DNA
aggggccaggcgtggtacatggatatgatgtgcgaagcgcgtggcgcggcggatcttcgttctgcgtcgtcttta

SEQ ID NO: 266563 - DNA, 75 bp, synthetic construct
  source 1..75: mol_type = other DNA
aggggccaagcgtggtatatggatatgatgtgcgaagcgcgtggcgcgcaggatatgccatcgagcactgcattg

SEQ ID NO: 266564 - DNA, 75 bp, synthetic construct
  source 1..75: mol_type = other DNA
ggcttccgtatatcgcaccgcgttgtcgaacaacgatatcgctatggctggtgggcagatcaccgaccagaacac

SEQ ID NO: 266565 - DNA, 75 bp, synthetic construct
  source 1..75: mol_type = other DNA
tgaccaggtaggtcaaaccaatgggcaaaactatgggatgatctttagcggtgatatccgttttacagtgaccgg

SEQ ID NO: 266566 - DNA, 75 bp, synthetic construct
  source 1..75: mol_type = other DNA
tgagaataaatatctccatgaagcgatcgtgcttaacaccaaaactggcctggtcggtatgcctcagcaaaccat

SEQ ID NO: 266567 - DNA, 75 bp, synthetic construct
  source 1..75: mol_type = other DNA
ataaggcgttcaacgaagccgtatcgtccggcagcctggcggcaggatataagcttgccgacgtgcatacacttc

SEQ ID NO: 266568 - DNA, 75 bp, synthetic construct
  source 1..75: mol_type = other DNA
atggtcttatccagctcgatcaggcttcggtgtaccgcgccgcgctcggcaatagcgaaatcgcacagtcgcccg

SEQ ID NO: 266569 - DNA, 75 bp, synthetic construct
  source 1..75: mol_type = other DNA
ttatactggcgacacccgagggcaggcgtggtatatggacctgctttgcctggctaaagggagtaaaagtttact

SEQ ID NO: 266570 - DNA, 75 bp, synthetic construct
  source 1..75: mol_type = other DNA
tgccgatcatggtctataacaaccctccgatttataaaaacgatgtcacccctgatatcctggaaacactagctg

SEQ ID NO: 266571 - DNA, 75 bp, synthetic construct
  source 1..75: mol_type = other DNA
gccttgtgggtatgcctcagcagaccattggtagcggcgttaacgtccgttgcctgattaaccctaacatccgcg

SEQ ID NO: 266572 - DNA, 75 bp, synthetic construct
  source 1..75: mol_type = other DNA
ccccgatgaagtcgggcagatggacggtcgaaattatgggctgattttcgacggggaaatccggtacaccatcac

SEQ ID NO: 266573 - DNA, 75 bp, synthetic construct
  source 1..75: mol_type = other DNA
agatcaggttgggcagacgctaggccagaacttcggggggattttcaacggtgagatccgcttcacaatcaccgg

SEQ ID NO: 266574 - DNA, 75 bp, synthetic construct
  source 1..75: mol_type = other DNA
aaaagtgatttaatagtggattccataagccctattaaagttgcttcttccgaagttgatgggaatattattata

SEQ ID NO: 266575 - DNA, 75 bp, synthetic construct
  source 1..75: mol_type = other DNA
cacaaccactggggaaagaattaagcatcagggtgaggaaataggcactgtactggaaggtgaaattgttctgac

SEQ ID NO: 266576 - DNA, 75 bp, synthetic construct
  source 1..75: mol_type = other DNA
ctcgaagacctataaaggaagcggctttaatgaactgcgtttcgaggatgcgacggacagtgagcaggtgtatat

SEQ ID NO: 266577 - DNA, 75 bp, synthetic construct
  source 1..75: mol_type = other DNA
gcagatacgcccggcgtatgtcatcagcaaagactacaccttcaaataccctgactggccggggcgttttcgcca

SEQ ID NO: 266578 - DNA, 75 bp, synthetic construct
  source 1..75: mol_type = other DNA
tgcggcgtcgtttcggcacatgttttcgaacaaggtgtggatgccgttcgtcaagagctggctcgcttacagtaa

SEQ ID NO: 266579 - DNA, 75 bp, synthetic construct
  source 1..75: mol_type = other DNA
aaatgaaaggggcggggaccacactctggttgtataccggtaacggcgatgcatattcgaatcccttatcagatg

SEQ ID NO: 266580 - DNA, 75 bp, synthetic construct
  source 1..75: mol_type = other DNA
gggctgcaaattgccggataaagtgatggactacctggagcgaagcggacttataagcgtggaggatgttttacg

SEQ ID NO: 266581 - DNA, 75 bp, synthetic construct
  source 1..75: mol_type = other DNA
cagccggaatgtgttgcagtataggatattcagttccttctgcatcagcggccattcgctcgggtctggatcatt

SEQ ID NO: 266582 - DNA, 75 bp, synthetic construct
  source 1..75: mol_type = other DNA
cacccggtgtctggaaaagaaaaaaaaacaataccctcattaccagcttgccagcaatctgggagaaaccggggc

SEQ ID NO: 266583 - DNA, 75 bp, synthetic construct
  source 1..75: mol_type = other DNA
ccagccgccgtcagcaggccttgcaacaggcgttagccgaagaagaaaaagcgcaacctcaactggcggcgctta

SEQ ID NO: 266584 - DNA, 75 bp, synthetic construct
  source 1..75: mol_type = other DNA
tgttatcgtggccagtggcttgattgatgcccatgccggtggcgtggcgctggctggcgctcacccattaggaac

SEQ ID NO: 266585 - DNA, 75 bp, synthetic construct
  source 1..75: mol_type = other DNA
caccagcaagaataaattatcttcttactcatgaacgcgtattatgcaccagcaacagggatggttttattccgg

SEQ ID NO: 266586 - DNA, 75 bp, synthetic construct
  source 1..75: mol_type = other DNA
cacccggtgtctggaaaagaaaaaaaacaataccctcattaccagcttgccagcaatctgggagaaaccggggcg

SEQ ID NO: 266587 - DNA, 75 bp, synthetic construct
  source 1..75: mol_type = other DNA
atgccagtaaagcctaacacgacgaaagataaatttggagatggtctgatgataaaagcagaaaccactccgcag

SEQ ID NO: 266588 - DNA, 75 bp, synthetic construct
  source 1..75: mol_type = other DNA
aagagggtaatgagcagaaagtcacgctggagaaaggggatggcaactggagttccgacaagcctgaactgatcc

SEQ ID NO: 266589 - DNA, 75 bp, synthetic construct
  source 1..75: mol_type = other DNA
gaaatcacagacccggcaggcaacaccagtggtcagggtaaagctacccagtttggcgtggatactgtagctccg

SEQ ID NO: 266590 - DNA, 75 bp, synthetic construct
  source 1..75: mol_type = other DNA
tgctgaaactagttttcaaagaaaataaagttttttctgttgggagaatgtccaataattataatattaaaaact

SEQ ID NO: 266591 - DNA, 75 bp, synthetic construct
  source 1..75: mol_type = other DNA
aaatctcatggtaaacatgcgcttttcccaatttttactgcgagttggcaagctactcgtataaagaataaaggt

SEQ ID NO: 266592 - DNA, 75 bp, synthetic construct
  source 1..75: mol_type = other DNA
tatctttacgcttcgcacttcaccagagcagagtttctgtctgccaaagaaatatcatttattaaatcgaatatg

SEQ ID NO: 266593 - DNA, 75 bp, synthetic construct
  source 1..75: mol_type = other DNA
agttccggcagacaaagtgaagaacaacacagaggtgacggcaacagcgaaagatccgggtggtaatgaaagtgc

SEQ ID NO: 266594 - DNA, 75 bp, synthetic construct
  source 1..75: mol_type = other DNA
cgctatggcaataatgtgagtaactggaaaacacctgcaatggccttaacgttccgggcaaataatttctttggt

SEQ ID NO: 266595 - DNA, 75 bp, synthetic construct
  source 1..75: mol_type = other DNA
tttacaggcagaagtcaagttgccggcaggaacagtggaaggtgcggtcattacactgacagtgactcatccgga

SEQ ID NO: 266596 - DNA, 75 bp, synthetic construct
  source 1..75: mol_type = other DNA
aaaaataccatcgatgacatgaaggtgcgccagcgtgatgtcgctgcactggatgccaaatacaccggagaactg

SEQ ID NO: 266597 - DNA, 75 bp, synthetic construct
  source 1..75: mol_type = other DNA
ctacggttttttctgctatggcatcagttttagttgtggtttcattatattttttcaactataaactatctgagc

SEQ ID NO: 266598 - DNA, 75 bp, synthetic construct
  source 1..75: mol_type = other DNA
ttatttcctttggaattgtgtcaattatggggttgattatgaccccatttttcattaacaattttggctatgaag

SEQ ID NO: 266599 - DNA, 75 bp, synthetic construct
  source 1..75: mol_type = other DNA
aaaacctggcagcagccaggctctgccatcctgaacgtttggctgaccagtatgttgaagcgtaccgtagtggct

SEQ ID NO: 266600 - DNA, 75 bp, synthetic construct
  source 1..75: mol_type = other DNA
caggggtatactgacctgtctgatttggatttaacaagttgtcattttaaaggtgacgttatatcgaaggtgtct

SEQ ID NO: 266601 - DNA, 75 bp, synthetic construct
  source 1..75: mol_type = other DNA
cagtcgattttcaacggtggtgggctgtcgccgttaaataaaatcagtccgacgcatccgccgaaacttgccacg

SEQ ID NO: 266602 - DNA, 75 bp, synthetic construct
  source 1..75: mol_type = other DNA
tggcttatagtgcggcagaaattgctgttacgcatcccgattatgggttcactgatgcggggacaaaaactcacg

SEQ ID NO: 266603 - DNA, 75 bp, synthetic construct
  source 1..75: mol_type = other DNA
atttcaacagcgaacggtaccgcgaaaacgttcgccagctgacgccggcaatcctcgctgtcctgccgattgaat

SEQ ID NO: 266604 - DNA, 75 bp, synthetic construct
  source 1..75: mol_type = other DNA
acgcatcgtctctgatagtgaacaaatttacaagtaaccaagttacttatgaggggcgtaaacaatactatgaag

SEQ ID NO: 266605 - DNA, 75 bp, synthetic construct
  source 1..75: mol_type = other DNA
gattttatcgactgcgataaaatattgtagatatgcgaaagaaaaaaaaattgatgtaatctcgcagaagatatc

SEQ ID NO: 266606 - DNA, 75 bp, synthetic construct
  source 1..75: mol_type = other DNA
gaaatccaggatgcgagattaaaatatatccattgcaatgaattattgtcgatgacagaaaattttaatagagca

SEQ ID NO: 266607 - DNA, 75 bp, synthetic construct
  source 1..75: mol_type = other DNA
tcagatatatttgggaatgaagatctcgatggttatatcaataacattataaaaatgattgatacattgccagat

SEQ ID NO: 266608 - DNA, 75 bp, synthetic construct
  source 1..75: mol_type = other DNA
ataaagagtggatacgcagtgataatatatcacctatatttaaagaagttgacgattatttaagaacatttaacg

SEQ ID NO: 266609 - DNA, 75 bp, synthetic construct
  source 1..75: mol_type = other DNA
caaaacgagtggcgaatgtgttgattttagccaaaatattcttgataccgttgacttctcgcagagtcaacttgg

SEQ ID NO: 266610 - DNA, 75 bp, synthetic construct
  source 1..75: mol_type = other DNA
accgcaaccgtctgctaccagaagacaacgttatggctcgtctggcgcgtatggagaaagaaaccagcgaagcga

SEQ ID NO: 266611 - DNA, 75 bp, synthetic construct
  source 1..75: mol_type = other DNA
ggccaccagatgccaggaatgcagcgagtttataatcattcccgttatctggatgcgaaacgcaatgcgctggat

SEQ ID NO: 266612 - DNA, 75 bp, synthetic construct
  source 1..75: mol_type = other DNA
ctgaaaaagcttgaagaacagaactgcaatttgcgggagaaaatactatcgtttcatctgccaaattcgacgtat

SEQ ID NO: 266613 - DNA, 75 bp, synthetic construct
  source 1..75: mol_type = other DNA
cggcgcagatcgcggatctggtggtcattaaggacggttcagaggcagacggtgcgacggcgaacacgctgcggg

SEQ ID NO: 266614 - DNA, 75 bp, synthetic construct
  source 1..75: mol_type = other DNA
acgtcgcctgaaccagtttcgtacctttgcgcggggctttgacaatgtgcgtcagggcgatgaaatagatgtgcc

SEQ ID NO: 266615 - DNA, 75 bp, synthetic construct
  source 1..75: mol_type = other DNA
atgtggattgggggatcgtttacgtcgtctgaccgccggtatttgcctgataacacaaactatattccctgttat

SEQ ID NO: 266616 - DNA, 75 bp, synthetic construct
  source 1..75: mol_type = other DNA
acggtgcgacggcgaacacgctgcgggcgagggtaaccgatgcattcggtaatgcgcttgccgggcagacggtca

SEQ ID NO: 266617 - DNA, 75 bp, synthetic construct
  source 1..75: mol_type = other DNA
ttttagcggtacggattattggacaagcactcagctcatgggagtacacgagaaatttaatcctgaaactggtat

SEQ ID NO: 266618 - DNA, 75 bp, synthetic construct
  source 1..75: mol_type = other DNA
gcttggttcacagcttcgtatacgagaagttttagtagtggaaggggcggatttacctgtcagtgttttattagt

SEQ ID NO: 266619 - DNA, 75 bp, synthetic construct
  source 1..75: mol_type = other DNA
ggggcagcagtaaacaatcagagagttattccatccacagcggtgctccggtgcaggcaaattctgctatcagga

SEQ ID NO: 266620 - DNA, 75 bp, synthetic construct
  source 1..75: mol_type = other DNA
gaatatgctgcgggcgagagtcaccgatgcgttcggtaatgcgcttgccgggcagacggtcagcgtgttggcggg

SEQ ID NO: 266621 - DNA, 75 bp, synthetic construct
  source 1..75: mol_type = other DNA
aaggtcaccgatgcgttcgggaatgcgctgaatgggcagacggtcagcgtgttggcagacaacggtgcaacggtc

SEQ ID NO: 266622 - DNA, 75 bp, synthetic construct
  source 1..75: mol_type = other DNA
ctggttaccggcctggccgcagctgggcggcaagttggtctatgaacaatattatggcgatgaagtggcgctgtt

SEQ ID NO: 266623 - DNA, 75 bp, synthetic construct
  source 1..75: mol_type = other DNA
gatggcagatatgagcgtacctatatggcctacaaagaaggagaaaacttaaactcatatctacatattaatggt

SEQ ID NO: 266624 - DNA, 75 bp, synthetic construct
  source 1..75: mol_type = other DNA
gtagtggaaggggcggatttacctgtcagtgctttattagttgatgattttggaaatccggtggataacggtctg

SEQ ID NO: 266625 - DNA, 75 bp, synthetic construct
  source 1..75: mol_type = other DNA
agtaccgtagcggatgccagcactgttgaggctaaggtcaatcaaagcagcgatagtaaaacggtgaactttgtt

SEQ ID NO: 266626 - DNA, 75 bp, synthetic construct
  source 1..75: mol_type = other DNA
ttgagcgagaaagaaaaagacaagatttattaatgtctattgaagatcaatatactatactaaaaataatagctg

SEQ ID NO: 266627 - DNA, 75 bp, synthetic construct
  source 1..75: mol_type = other DNA
aaagtacaaacggaattgaaaataattatgaaaaaacagagccaatgctggaaacaataagtgagcttctaactg

SEQ ID NO: 266628 - DNA, 75 bp, synthetic construct
  source 1..75: mol_type = other DNA
tattcctttcaaggttcgcagctttgttgattttattgctaaagcgttaggagatacaccgctgtggggagaaga

SEQ ID NO: 266629 - DNA, 75 bp, synthetic construct
  source 1..75: mol_type = other DNA
tccgcgcgctgcgccacaccgaaatcgactatatcaatggttttctcttacgccgcgcccgcgcgcatgggattg

SEQ ID NO: 266630 - DNA, 75 bp, synthetic construct
  source 1..75: mol_type = other DNA
cactgttaatcctccaaaacaatcaagacagccacgaattagcggcaacagagcaatcacagcggcttattcagc

SEQ ID NO: 266631 - DNA, 75 bp, synthetic construct
  source 1..75: mol_type = other DNA
ttgcgaaaaatatcaggaggtgagtttaatgttacgaaaagcaaacttacagagatatataaaaggtttggtttt

SEQ ID NO: 266632 - DNA, 75 bp, synthetic construct
  source 1..75: mol_type = other DNA
attggtgtgttaccgacctatgcacagattggtgtttttgcccccatcttgctggtgacgctgcgtattattcag

SEQ ID NO: 266633 - DNA, 75 bp, synthetic construct
  source 1..75: mol_type = other DNA
aatacgcttgccgggcaggcggtcagcgtgatggcaggtaacggcgcaacggtcgctccggcggtcaccactcag

SEQ ID NO: 266634 - DNA, 75 bp, synthetic construct
  source 1..75: mol_type = other DNA
agtacagtcaccgcaaccatcaacagcagcagtcagagccggaacgtgacgtttatcgccgatgtcaggacggcg

SEQ ID NO: 266635 - DNA, 75 bp, synthetic construct
  source 1..75: mol_type = other DNA
agatgttccgtaaagaactggaaaacattttgctggacccggcattaagtgcagaactcaaagcagaactttcag

SEQ ID NO: 266636 - DNA, 75 bp, synthetic construct
  source 1..75: mol_type = other DNA
actccagataatcattcatccttagttgttaatcctgttacaaaaatatggagtgctaattttaatttgattttc

SEQ ID NO: 266637 - DNA, 75 bp, synthetic construct
  source 1..75: mol_type = other DNA
gctggtgacgctgcgtattattcaggtgaaccgccccgggtttcctggagagtgttttatctgtgaactcaggct

SEQ ID NO: 266638 - DNA, 75 bp, synthetic construct
  source 1..75: mol_type = other DNA
tgcaattggtgtgtcacctcaagaaatatggccttctaggtattttgaaaaagatggctctccaaaaaatcgtgt

SEQ ID NO: 266639 - DNA, 75 bp, synthetic construct
  source 1..75: mol_type = other DNA
agtggcgtaagaaatgggacgcgatgcatgaccggttcattaaagaggtcgatgcacttcaagccatcaagccta

SEQ ID NO: 266640 - DNA, 75 bp, synthetic construct
  source 1..75: mol_type = other DNA
cggaccatcgccgtcactcgcgctgtctgacagttatcactacaccccgcagcttacgctgaatgtcgacgcagc

SEQ ID NO: 266641 - DNA, 75 bp, synthetic construct
  source 1..75: mol_type = other DNA
atggggcgggagatgttttctacaaacttaatacagagtaattatggtgatttaaatattaaaagcctggctttc

SEQ ID NO: 266642 - DNA, 75 bp, synthetic construct
  source 1..75: mol_type = other DNA
cctgccgctggtggtgacgacaaggacgcgaaaatcactgcgctggaaaccgaaaacgccgatctgaaagcgaag

SEQ ID NO: 266643 - DNA, 75 bp, synthetic construct
  source 1..75: mol_type = other DNA
gtttttctgacggatgccgttgcaattaagacgctggaagaaacggggattcgtgaagtatccgttggatatgag

SEQ ID NO: 266644 - DNA, 75 bp, synthetic construct
  source 1..75: mol_type = other DNA
gccaatctgcacgcgctcggagtgctgatcatcgacgaggttcagaacctcaacgaggcacgctccggtggtgcc

SEQ ID NO: 266645 - DNA, 75 bp, synthetic construct
  source 1..75: mol_type = other DNA
aacgttatgggccgatgatcctcgtcagcagcttgcctatctggcactcaaacgctgggcgcgcctttattgccc

SEQ ID NO: 266646 - DNA, 75 bp, synthetic construct
  source 1..75: mol_type = other DNA
gggagtgtcagaggctatagcgcagggctgtatgccacctggtttgccgatgacatcagtaaaaaaggcgcatac

SEQ ID NO: 266647 - DNA, 75 bp, synthetic construct
  source 1..75: mol_type = other DNA
gacaaacgctatgtgacgtctggcaactggtcggctaatcagcagggaaacagcgacgaagcctatctgctgagc

SEQ ID NO: 266648 - DNA, 75 bp, synthetic construct
  source 1..75: mol_type = other DNA
ggtgacgaggtggcacaaaatagcgatgtgacgctttacgagcaggtgtcttatgtcaataaacaggcttcggcc

SEQ ID NO: 266649 - DNA, 75 bp, synthetic construct
  source 1..75: mol_type = other DNA
atacagatgatgttgttgaaaaagacattatcagaaatacattggaagtggttcttctttttacttccgatgata

SEQ ID NO: 266650 - DNA, 75 bp, synthetic construct
  source 1..75: mol_type = other DNA
gaatcgaattgtacttaattctgattatgatttaatagcgtcattgaattgtcttgattattttggtggtaagtc

SEQ ID NO: 266651 - DNA, 75 bp, synthetic construct
  source 1..75: mol_type = other DNA
ctgacggcaacctcagaccccagctatccccaggcgattaagacttcacgtcctggcgtgggcattgtggtgacc

SEQ ID NO: 266652 - DNA, 75 bp, synthetic construct
  source 1..75: mol_type = other DNA
tgttgtagggcataaacctcttggggccagaacggcagaacttgcaattccagtcaggtgtaacacgggaaacgc

SEQ ID NO: 266653 - DNA, 75 bp, synthetic construct
  source 1..75: mol_type = other DNA
atgccgataatctttggagaatattgcgtgtcattactacgacttttttttgccaccgtcttaatgctatggtgc

SEQ ID NO: 266654 - DNA, 75 bp, synthetic construct
  source 1..75: mol_type = other DNA
tgcttgagcaaaagccacgcttaactgctgatcaggcatgggatgttattcgccaaaccagtcgtcaggatctta

SEQ ID NO: 266655 - DNA, 75 bp, synthetic construct
  source 1..75: mol_type = other DNA
ttgtataaaaagtatgatcttattggcaaccagtacaatgagattctggaaatggcttggcaagaatctgagctt

SEQ ID NO: 266656 - DNA, 75 bp, synthetic construct
  source 1..75: mol_type = other DNA
tattcctgatgatgcagacagtatcgcgcgaatgaatgtctatccggtcagcacgacaggcgtaccaccagaaac

SEQ ID NO: 266657 - DNA, 75 bp, synthetic construct
  source 1..75: mol_type = other DNA
cgcgtgaaatttagcgggttgatatcacgctgcctgctgcaaacacgcttttatctgtatggcattatgaaaggt

SEQ ID NO: 266658 - DNA, 75 bp, synthetic construct
  source 1..75: mol_type = other DNA
catcttgagttcccatgccgctgccaattactatcttcaaattctgaagttatgcaagagttatatattgaaaaa

SEQ ID NO: 266659 - DNA, 75 bp, synthetic construct
  source 1..75: mol_type = other DNA
cccttcatccatcatcacaaaaaaggctaatacaattttgtaatgagatgtcacaaaaaaacaacatctgcatta

SEQ ID NO: 266660 - DNA, 75 bp, synthetic construct
  source 1..75: mol_type = other DNA
cagtcaggtgtaataccggaaacgcagagctggttaatgttaatttgagtctgacggcaaccagtgatcccgatt

SEQ ID NO: 266661 - DNA, 75 bp, synthetic construct
  source 1..75: mol_type = other DNA
ggcattcgctgcggattctccgttagtttatttgggcgacaactggtacaaaattaacgattatcttgccgcaaa

SEQ ID NO: 266662 - DNA, 75 bp, synthetic construct
  source 1..75: mol_type = other DNA
aggtcgatctgggcgacgtatttgcggctaactttcgtgttgtagggcataagcctcttggggccagaacggcag

SEQ ID NO: 266663 - DNA, 75 bp, synthetic construct
  source 1..75: mol_type = other DNA
tactggaagtcagtattgttttaggtattggaacgcttatcgcttttatgaaatttcaggatatgagaaacaatc

SEQ ID NO: 266664 - DNA, 75 bp, synthetic construct
  source 1..75: mol_type = other DNA
ttgaggcagctaaagtcgtcgccgaactctttgctggcaatgcatctccaatggaaacctttggtattacatgga

SEQ ID NO: 266665 - DNA, 75 bp, synthetic construct
  source 1..75: mol_type = other DNA
ttcagagctatcggctaaaagacaacgtcgaggtcgatcttgttattcctgcgggagtggatgacccagacctgt

SEQ ID NO: 266666 - DNA, 75 bp, synthetic construct
  source 1..75: mol_type = other DNA
cgaatatggcaacgactattacatgcctaaacacaagctggtatcaatagttattgacaaccctcctgaaaacag

SEQ ID NO: 266667 - DNA, 75 bp, synthetic construct
  source 1..75: mol_type = other DNA
gtgacgacaataaagttgattgtcaacagcgtcagtaaatccgagcgtgaaagcattatcgccgcgctgcacggg

SEQ ID NO: 266668 - DNA, 75 bp, synthetic construct
  source 1..75: mol_type = other DNA
caaggctggtgaatatctccatttaaatggtcaggcaacgttaaatgcgaaatgtacgcctaatggtctggttgg

SEQ ID NO: 266669 - DNA, 75 bp, synthetic construct
  source 1..75: mol_type = other DNA
cttcaggtagcgtaacaggctatgggctggagaatggtaagatagtcgctattcgcagtgttaacgacgacgaaa

SEQ ID NO: 266670 - DNA, 75 bp, synthetic construct
  source 1..75: mol_type = other DNA
gttctgatccagcacggcggcgggacggagcttgccacgctgagagggcggtcgctgataaccgaagatggcgaa

SEQ ID NO: 266671 - DNA, 75 bp, synthetic construct
  source 1..75: mol_type = other DNA
gaacataaaaaaaatcacattaattctttttttagtagtgattttcatgcaagtgttttcttatttgtttttgcc

SEQ ID NO: 266672 - DNA, 75 bp, synthetic construct
  source 1..75: mol_type = other DNA
gttattggcgaaaccgataaagagaaaaccagcctcgatagcctctggtttttcggtgaagatgacgggcagtca

SEQ ID NO: 266673 - DNA, 75 bp, synthetic construct
  source 1..75: mol_type = other DNA
cgtaaccggccgcgtgcggccgctaactcgcagtacggcgccgcgacccgaaggcgggccgccgttcccgcgcgc

SEQ ID NO: 266674 - DNA, 75 bp, synthetic construct
  source 1..75: mol_type = other DNA
aatacgcgcctcttcgagcaatctggcggttacgttgtgctggatgtctccctgaaaccaaagcaggccagtcag

SEQ ID NO: 266675 - DNA, 75 bp, synthetic construct
  source 1..75: mol_type = other DNA
aaacgcccgcgccggtgggggagcctcggccccggctggaaaatgcctgcggatatccgcttacagctgcgcgat

SEQ ID NO: 266676 - DNA, 75 bp, synthetic construct
  source 1..75: mol_type = other DNA
tatcacttaatcaggctaaagaaatcatatctcaaaataagaaactggctgacttgatttttcttgatatttata

SEQ ID NO: 266677 - DNA, 75 bp, synthetic construct
  source 1..75: mol_type = other DNA
tataaagagaaatgtgatgttttatttaacgcaacaacttattttgtaagcgaggggaataattatcagacagaa

SEQ ID NO: 266678 - DNA, 75 bp, synthetic construct
  source 1..75: mol_type = other DNA
ttaatgccggttgttgatacgctttattttgaacccaatgaggagcgttttagtgtagtctggcgtacaagtata

SEQ ID NO: 266679 - DNA, 75 bp, synthetic construct
  source 1..75: mol_type = other DNA
ctctggcaggagagacaggatgaagcagaagagagcgaaacccgtcagcgcgaacaggatgccatccggacgttt

SEQ ID NO: 266680 - DNA, 75 bp, synthetic construct
  source 1..75: mol_type = other DNA
gctcaggatggcaactctccggtaactccagatggttggattccggtaagcgagcggatgccaaatgataaagac

SEQ ID NO: 266681 - DNA, 75 bp, synthetic construct
  source 1..75: mol_type = other DNA
ttgttggatgattatagtataatttcctatatgactgatgaagaatcgccgattgaaatcaaggtaatgactcca

SEQ ID NO: 266682 - DNA, 75 bp, synthetic construct
  source 1..75: mol_type = other DNA
aatttcgggaatcatttcactcaatgcttacaggagctagaaagctattatctcagcgaatgctcaatgcaatac

SEQ ID NO: 266683 - DNA, 75 bp, synthetic construct
  source 1..75: mol_type = other DNA
taatgaaagctacccattctggaatttcattgattcattaaatggctcaggaacaagtatttcatcttactttaa

SEQ ID NO: 266684 - DNA, 75 bp, synthetic construct
  source 1..75: mol_type = other DNA
cctgtaggctatacaggaactaacgcgcaaaaagcatcctacaaaattgtgttaaagcgttcaggaacagcgcct

SEQ ID NO: 266685 - DNA, 75 bp, synthetic construct
  source 1..75: mol_type = other DNA
agagcgaaactgtgctggcccactccatgctcgccaccatcccggataactctattacgttgtttgataaacttt

SEQ ID NO: 266686 - DNA, 75 bp, synthetic construct
  source 1..75: mol_type = other DNA
tggaagtcagtgccgtttctggtcaggcgatggtgtcggacaatcaggatttaggttttattgtcgccgatcaga

SEQ ID NO: 266687 - DNA, 75 bp, synthetic construct
  source 1..75: mol_type = other DNA
aatgtcgttggccaactccaaaactttattttggttcgaacctaattggaataaacgagtctgattggtctgagt

SEQ ID NO: 266688 - DNA, 75 bp, synthetic construct
  source 1..75: mol_type = other DNA
gtcaggacggcgaagatagcggagctggtcgttagccaggataacgcggtggcagacggtgcgacggcgaacacg

SEQ ID NO: 266689 - DNA, 75 bp, synthetic construct
  source 1..75: mol_type = other DNA
gaaaatattcttgatggcaaaggggatttatttaaaaaacgtacgctgtgggagtttgtccgcgatctttttccc

SEQ ID NO: 266690 - DNA, 75 bp, synthetic construct
  source 1..75: mol_type = other DNA
caacgttacacaacctgtaagtattaatgaaaaattaggttcttatctctttatgcagtcttttgttcaggattg

SEQ ID NO: 266691 - DNA, 75 bp, synthetic construct
  source 1..75: mol_type = other DNA
aaagaatctgttagaaatgtaacatttgaatataaggaacttgcacccatttttgaaggtgttgaagaaaaacaa

SEQ ID NO: 266692 - DNA, 75 bp, synthetic construct
  source 1..75: mol_type = other DNA
caattccgagtcaaaggctaataaaaaatatagaaacgcatttttagagttagagtcgtttttgtctacacttta

SEQ ID NO: 266693 - DNA, 75 bp, synthetic construct
  source 1..75: mol_type = other DNA
gtcttagtgaagatggttcagataaatatatgtttaaccccgatgattatttttctgattatattgaaagaagat

SEQ ID NO: 266694 - DNA, 75 bp, synthetic construct
  source 1..75: mol_type = other DNA
tagaacaacaatggcgatttagtactaagacagacttcaccacaaatgaaaataatgaagttattgtgagtagat

SEQ ID NO: 266695 - DNA, 75 bp, synthetic construct
  source 1..75: mol_type = other DNA
gaattaagtttgttgaatctataataaataaaatgattccgccgccagatggaacaatacttactgaaaatccaa

SEQ ID NO: 266696 - DNA, 75 bp, synthetic construct
  source 1..75: mol_type = other DNA
caggtcagattctgcctgttcgctggctggcacagcacagcagcgaaaaaccggtaacgcacgtttcacgggaag

SEQ ID NO: 266697 - DNA, 75 bp, synthetic construct
  source 1..75: mol_type = other DNA
tttatgggctatctgctaaagctgggtcaatggataattcaaaattcaatgagaagttggctcaattaaatgctt

SEQ ID NO: 266698 - DNA, 75 bp, synthetic construct
  source 1..75: mol_type = other DNA
tgatgctcatggaatggattttttggcaaattcgttcaacaagtctaattatgatgaaatcagggggccggatac

SEQ ID NO: 266699 - DNA, 75 bp, synthetic construct
  source 1..75: mol_type = other DNA
ataaacagccctaaccttgaaggtccggtttttgaaaattgttatttcgaggattgtaaattcaacaacatacag

SEQ ID NO: 266700 - DNA, 75 bp, synthetic construct
  source 1..75: mol_type = other DNA
tcctattattaatacaacaatcaatttatcatcgttgtctaaggatgttttaaattcattaaaatattgtagttt

SEQ ID NO: 266701 - DNA, 75 bp, synthetic construct
  source 1..75: mol_type = other DNA
ataaacagtcctaaccttgaaggtccggtttttgaaaattgttatttcgaggattgtcaattcaacaatatacag

SEQ ID NO: 266702 - DNA, 75 bp, synthetic construct
  source 1..75: mol_type = other DNA
ctgaacgaatggaagcacaagctaaattaccagagctagctaaagagtctggacttaaaccagtatttactatgg

SEQ ID NO: 266703 - DNA, 75 bp, synthetic construct
  source 1..75: mol_type = other DNA
aagcttacaagaaggttatggaagttggtctgaaaaaagaagcatcacaacgagcggcacaattcgttttaggtg

SEQ ID NO: 266704 - DNA, 75 bp, synthetic construct
  source 1..75: mol_type = other DNA
attaaaggcgaggctgaaacgtgatcctttgctggcgttagagcttgttaaccctgaactggatttagtccgcca

SEQ ID NO: 266705 - DNA, 75 bp, synthetic construct
  source 1..75: mol_type = other DNA
gccgaagttcacgcaggaagggcagccaaagctgaagctgcgcggtcatgacgtggaagagtttgtgggcgtggt

SEQ ID NO: 266706 - DNA, 75 bp, synthetic construct
  source 1..75: mol_type = other DNA
atgaacagaccacacccaccagcgcattttacgatgccacctgacccgaagccgtacatcagcataatgcccgcc

SEQ ID NO: 266707 - DNA, 75 bp, synthetic construct
  source 1..75: mol_type = other DNA
tatagctgattgcgaaatacaagataaagatcatgattgttttactattttcgctaaggaaggtgcgaacaagtc

SEQ ID NO: 266708 - DNA, 75 bp, synthetic construct
  source 1..75: mol_type = other DNA
ccgccatgctgctgagtcccccgaccctggccgcgaccacatcaggacagacggatgtcagccgacaggaatcaa

SEQ ID NO: 266709 - DNA, 75 bp, synthetic construct
  source 1..75: mol_type = other DNA
ttttatcaatttaaatcatcttgattttttttctgagttaccgtttgtagttagcctttttactggagtcggatg

SEQ ID NO: 266710 - DNA, 75 bp, synthetic construct
  source 1..75: mol_type = other DNA
cgccacatgggaagagattcttcctgaaattaacgatatcgaacccccagccaccgatgctttcctggctgaagt

SEQ ID NO: 266711 - DNA, 75 bp, synthetic construct
  source 1..75: mol_type = other DNA
ccaacaatgtgggctggaatgataaagcagtccaggaaatcgtccgcatccccaaaacggccaataatcttggca

SEQ ID NO: 266712 - DNA, 75 bp, synthetic construct
  source 1..75: mol_type = other DNA
ggaacttaattagggctatttccacgcttggaaatgtagcaaatacagcagcaggaagaattaattcacgttccg

SEQ ID NO: 266713 - DNA, 75 bp, synthetic construct
  source 1..75: mol_type = other DNA
gaaagcagattcagatgcatatgaaaccagcgctgatatgattttgtctgagctgattagccacggcgaagttga

SEQ ID NO: 266714 - DNA, 75 bp, synthetic construct
  source 1..75: mol_type = other DNA
agatatgagcaagccagagaactatcaatagacttgcttaagaaatggcttgtggagtataaatttagagagtgg

SEQ ID NO: 266715 - DNA, 75 bp, synthetic construct
  source 1..75: mol_type = other DNA
tgattacctgctgggaagggagcgaaaccgggaaggggcaacggtgcttcagggtaatccggaagaagtacggga

SEQ ID NO: 266716 - DNA, 75 bp, synthetic construct
  source 1..75: mol_type = other DNA
ggcgcattacgggcttgataacctggtcattattaatgacaaaaataatctgcaattagccgggccaacgcgcga

SEQ ID NO: 266717 - DNA, 75 bp, synthetic construct
  source 1..75: mol_type = other DNA
gcttgggcgaccaataccgagtcaggttttgaatttcagacctggggtgaaaatagacgtattccggtggatttg

SEQ ID NO: 266718 - DNA, 75 bp, synthetic construct
  source 1..75: mol_type = other DNA
tccgttggcaaagccacagacgcgcgtaacgaggtaaaaaatgccaaagaatcaaagtctgccagcggtaagtga

SEQ ID NO: 266719 - DNA, 75 bp, synthetic construct
  source 1..75: mol_type = other DNA
tctcctgggatggctatatcgaggttggcgggaaccgttacagcgtaccggaaagcctgtgtggccagccggtat

SEQ ID NO: 266720 - DNA, 75 bp, synthetic construct
  source 1..75: mol_type = other DNA
tgagactttttcgcgctggttgaatcagcccgactggggacggggaaatgagaaatcaccgacagaaacggttga

SEQ ID NO: 266721 - DNA, 75 bp, synthetic construct
  source 1..75: mol_type = other DNA
ccgaaacacaaaagagaaataatcaaagccttatagatattatatctagcataagtgagtttaataatataaaag

SEQ ID NO: 266722 - DNA, 75 bp, synthetic construct
  source 1..75: mol_type = other DNA
ccgacgggccagcaacagcagggatagatgatttgggtgaaattttagctaaaatgaaacagagaacatcgagag

SEQ ID NO: 266723 - DNA, 75 bp, synthetic construct
  source 1..75: mol_type = other DNA
atgatcatgttgtcaaattatacggaaaagttatttaaaaaacttgataccagtccatataaaatgtcaattatc

SEQ ID NO: 266724 - DNA, 75 bp, synthetic construct
  source 1..75: mol_type = other DNA
ggtttgcacgaaccgtcgctgaccgggtaatttttatggatcgtggggaaatagtggagcaagctgcacctgatg

SEQ ID NO: 266725 - DNA, 75 bp, synthetic construct
  source 1..75: mol_type = other DNA
gaagttattgccgtaaatgatggttcaacagacaaaacccgtgccatcctggatcgcatggctgcacaaattccc

SEQ ID NO: 266726 - DNA, 75 bp, synthetic construct
  source 1..75: mol_type = other DNA
atggcacaatttaaagttgatgattttctgattgagttaaatttttgctctcagaaagttttaaaaggcttggaa

SEQ ID NO: 266727 - DNA, 75 bp, synthetic construct
  source 1..75: mol_type = other DNA
ggcgctaacgctggcggcggtattcttaccgatcgcggcgaaggttttgtacacgatgatgcatcactggcgcgc

SEQ ID NO: 266728 - DNA, 75 bp, synthetic construct
  source 1..75: mol_type = other DNA
caaaaaaattatcggttgcaatatcacgtggtgttgctgcaatggacgatgccggatttgacgaagaggatttta

SEQ ID NO: 266729 - DNA, 75 bp, synthetic construct
  source 1..75: mol_type = other DNA
gtggaacaaaacagcccggatacgcaacaaaacggaccagaagagcaacagcctgggccagtaatgcaacaggaa

SEQ ID NO: 266730 - DNA, 75 bp, synthetic construct
  source 1..75: mol_type = other DNA
actggcacaatccgttggaaaggcattctctcacgcaacaccccgtcatatcagcccggccgaattcgacaagtt

SEQ ID NO: 266731 - DNA, 75 bp, synthetic construct
  source 1..75: mol_type = other DNA
taaatccaagacacttggaaacgaagcttttaatcgtgagttagcaaagttaaatcaaaatctacgtgaaacact

SEQ ID NO: 266732 - DNA, 75 bp, synthetic construct
  source 1..75: mol_type = other DNA
ttgcgaccgagaagtcatttacctggcgcgatttaaatacgctgggatggccggattttagccaactttggctcg

SEQ ID NO: 266733 - DNA, 75 bp, synthetic construct
  source 1..75: mol_type = other DNA
cccacgcagaagtcgccgcaagcgcagatatggcaaaaatgccatacagaacttttttcataacaatttcccttc

SEQ ID NO: 266734 - DNA, 75 bp, synthetic construct
  source 1..75: mol_type = other DNA
gcaggcactcagttgcgcctgtctcccggcgaaagtatctgcctgccgcccggcctgtatcacagcttttgggcg

SEQ ID NO: 266735 - DNA, 75 bp, synthetic construct
  source 1..75: mol_type = other DNA
caccgatcgcggcgaaggtttcgtccacgatctgacgtcactggcacgcgatgtagccactggcgtacttgcccg

SEQ ID NO: 266736 - DNA, 75 bp, synthetic construct
  source 1..75: mol_type = other DNA
aaatcctgatgccccgatcatctcaataggtgcaatatttttcgatccgcaaaccggagatatgggaccggaatt

SEQ ID NO: 266737 - DNA, 75 bp, synthetic construct
  source 1..75: mol_type = other DNA
attcgaaatgggttaaggggattgaaacctgcgattctgtgaaccagaaccagctagaaacggaacagaacgacc

SEQ ID NO: 266738 - DNA, 75 bp, synthetic construct
  source 1..75: mol_type = other DNA
aaccgatgaacaaaagaaagtagttgatgctttaggttctggcttgattaatagtttaaaagtcttggctggtgt

SEQ ID NO: 266739 - DNA, 75 bp, synthetic construct
  source 1..75: mol_type = other DNA
tgtcgaacaaatggaagctgattgggattcaaacaatctggaggatacctatcgagaggttgatgcgcagataca

SEQ ID NO: 266740 - DNA, 75 bp, synthetic construct
  source 1..75: mol_type = other DNA
aactcaacggctaaattatccacagtgttgggagggaaaagtgtttgttcgatgtatcaaagattaggagttgtt

SEQ ID NO: 266741 - DNA, 75 bp, synthetic construct
  source 1..75: mol_type = other DNA
gcatccgcgtggggaagacgtaccggtggcaggggaaattaaagccgacctgcgcaccgtcagccatattgttac

SEQ ID NO: 266742 - DNA, 75 bp, synthetic construct
  source 1..75: mol_type = other DNA
cccgcgtttacagttgggggtatgagcgagggtacgtgaagggtaacccatgtgcaggtgtaagtaaattcaagg

SEQ ID NO: 266743 - DNA, 75 bp, synthetic construct
  source 1..75: mol_type = other DNA
tgcgatatccacctgatgcaagaagaagatgccgttacgttgggcgcagcaattagcggcgctgttgccagcgga

SEQ ID NO: 266744 - DNA, 75 bp, synthetic construct
  source 1..75: mol_type = other DNA
agacgattaacaatcaggttttcgccttagccgtcgctggctttccagttaatggcctgtgctttgcgggcgaat

SEQ ID NO: 266745 - DNA, 75 bp, synthetic construct
  source 1..75: mol_type = other DNA
actacagcagatcgggcgcattggtggcagctcatccgaagaagctgcaaacgccttgcgccagttaggacaatc

SEQ ID NO: 266746 - DNA, 75 bp, synthetic construct
  source 1..75: mol_type = other DNA
tggtcgtggcgttaaaacgctggctgattattgccgtgagctatccggctggtttaaaacgctgaaatctgattc

SEQ ID NO: 266747 - DNA, 75 bp, synthetic construct
  source 1..75: mol_type = other DNA
tgatgctcagttgcgggtatagctttacatatgcccgcaatctccctgagaaggcaatcctatacagtcaaaatt

SEQ ID NO: 266748 - DNA, 75 bp, synthetic construct
  source 1..75: mol_type = other DNA
gcattacatttctgtaaatcccagccgtctagccgggatgaaatggccaccggcttcattccgggacttactgga

SEQ ID NO: 266749 - DNA, 75 bp, synthetic construct
  source 1..75: mol_type = other DNA
gtgggatggcgaggcgattaacaatcaggttttcaccttcgccttcgcgggcgatgatgcgttgtgcttcatcgg

SEQ ID NO: 266750 - DNA, 75 bp, synthetic construct
  source 1..75: mol_type = other DNA
aaaaacactagagtgtttaagattaaaacggaaattgaggatactttaaagccacttagacagccaagacagcca

SEQ ID NO: 266751 - DNA, 75 bp, synthetic construct
  source 1..75: mol_type = other DNA
gtcagactaatagtctgtattttattatcattgaggatttagttattcgtgtaagccattcctcctacaatggac

SEQ ID NO: 266752 - DNA, 75 bp, synthetic construct
  source 1..75: mol_type = other DNA
tggtcttgagactagaatacgcactaaagaattagaaaatgctgttcgagactatattgcgaagaatccttggct

SEQ ID NO: 266753 - DNA, 75 bp, synthetic construct
  source 1..75: mol_type = other DNA
taaataagattagatcgtcagatgactacgttaaaactgaaagcatggctattgatgtgaccttccgcacaggcc

SEQ ID NO: 266754 - DNA, 75 bp, synthetic construct
  source 1..75: mol_type = other DNA
ccggacggcacggcggagatcagtgtcaccagccagaccgccggaaccagtgtgatcaccgccagcgtcaacaac

SEQ ID NO: 266755 - DNA, 75 bp, synthetic construct
  source 1..75: mol_type = other DNA
gataaagacgggattgccagcgttaaccttgccagtgaccaggcggtaaacagtcttatcaaggccgagatcaat

SEQ ID NO: 266756 - DNA, 75 bp, synthetic construct
  source 1..75: mol_type = other DNA
gatggcggacaacggcgcaacggttgctccgacgatgaccacaaagccggacggcacggtggagatcagtgtcac

SEQ ID NO: 266757 - DNA, 75 bp, synthetic construct
  source 1..75: mol_type = other DNA
gcgtggctgggccgcatggctgactgcgctgtcagacccggatgttgatgccattattcctgttgcttttgacct

SEQ ID NO: 266758 - DNA, 75 bp, synthetic construct
  source 1..75: mol_type = other DNA
atgaatataagaacattatatatagcaatgctgcttatctcgcctgcctgcctggctttgtctgcggatgaacac

SEQ ID NO: 266759 - DNA, 75 bp, synthetic construct
  source 1..75: mol_type = other DNA
gaactttcacgtattgcggttgctactcgaactattgtgatagctgtcagtaacgtccctaatcaggtactcagc

SEQ ID NO: 266760 - DNA, 75 bp, synthetic construct
  source 1..75: mol_type = other DNA
tttgaaaatcatgcattctttgcctgcattgttatagcactttcattattatcagtgttttttatttataaagcc

SEQ ID NO: 266761 - DNA, 75 bp, synthetic construct
  source 1..75: mol_type = other DNA
gtggcaatcgatattttcaacgccgcgacctccacactggtgtcagcgacatcaaccctgccagggacaagggtt

SEQ ID NO: 266762 - DNA, 75 bp, synthetic construct
  source 1..75: mol_type = other DNA
acagatattacttacgactcatacgatcaaaataacccggcggtgattaacgggacagtgaataacactggcggg

SEQ ID NO: 266763 - DNA, 75 bp, synthetic construct
  source 1..75: mol_type = other DNA
cagttaaaaccattgaagaagcaaaagcgcaaagccgccgtgccaaaggtaaacaaagatacgtagccactgaaa

SEQ ID NO: 266764 - DNA, 75 bp, synthetic construct
  source 1..75: mol_type = other DNA
gcatcgtttatgaaatcagcgccgacgttgagccgctgcttcagggcgggaaacaggccattgatgctctggata

SEQ ID NO: 266765 - DNA, 75 bp, synthetic construct
  source 1..75: mol_type = other DNA
cggtaagcagtacatgataccgggcgacaacggcaaggtgatcagcaacaaggaaatgactgccggaggcggtgg

SEQ ID NO: 266766 - DNA, 75 bp, synthetic construct
  source 1..75: mol_type = other DNA
tttcacatttgtactgctttgcatttaaattcgcaaaagaagtctggtttttgaatgaagatgatagaaatgtgt

SEQ ID NO: 266767 - DNA, 75 bp, synthetic construct
  source 1..75: mol_type = other DNA
gtacttacgaccgataatgtcggatgtagaaatgttgttatagaagcgcaaacaggttttttatgcaagacaaaa

SEQ ID NO: 266768 - DNA, 75 bp, synthetic construct
  source 1..75: mol_type = other DNA
agcagctgcctgtagcagtgtctgacgaagtgccagcccctgagccagttaaggccgcagaggaacagtcaattc

SEQ ID NO: 266769 - DNA, 75 bp, synthetic construct
  source 1..75: mol_type = other DNA
agctttaccacatcgcccaggccacagatgatttcggcgcgccgaagttcaacaaagagaccgggaagccagtgc

SEQ ID NO: 266770 - DNA, 75 bp, synthetic construct
  source 1..75: mol_type = other DNA
agctggtggacgcagccaatcaacctgcagaggtggcaaaacttaacatcgccagagcatgcgggacgtgcatgc

SEQ ID NO: 266771 - DNA, 75 bp, synthetic construct
  source 1..75: mol_type = other DNA
gaaggcccggatggaacagcagatgcatgaatggttcgggcgcgttccgaagtacatcatcacgctggctgccga

SEQ ID NO: 266772 - DNA, 75 bp, synthetic construct
  source 1..75: mol_type = other DNA
agttcatcatcacgctggcagccgactactgctcacaatgcagcgaccttgaattctgcgccctggtagagcatg

SEQ ID NO: 266773 - DNA, 75 bp, synthetic construct
  source 1..75: mol_type = other DNA
gaatgtctggagaaaaaaggactgtaccggagagcagctgaacgatgggcaaaagtgatggtacagctaagtgat

SEQ ID NO: 266774 - DNA, 75 bp, synthetic construct
  source 1..75: mol_type = other DNA
ctgcgagcaatgcaacgatctggagttctgcgcactggtagagcatgagctttaccacatcgcccaggctaccga

SEQ ID NO: 266775 - DNA, 75 bp, synthetic construct
  source 1..75: mol_type = other DNA
attatttgggaatgacgaatgatgtgcgcaccgttgtatcccaagccgactgtattgtattgccttcttattatc

SEQ ID NO: 266776 - DNA, 75 bp, synthetic construct
  source 1..75: mol_type = other DNA
gcttaatgagcaatttagtcccgttgatgcgctcaaacaacgccacgccctggaaatgcaacaggctgatgaatt

SEQ ID NO: 266777 - DNA, 75 bp, synthetic construct
  source 1..75: mol_type = other DNA
caaaagggtctatacgggatgggacgtatcaaagtgatcgaacctgttactgttattgcgggggtacgtgatagc

SEQ ID NO: 266778 - DNA, 75 bp, synthetic construct
  source 1..75: mol_type = other DNA
gatgcccaatatgaaattctaatgctacaaaacggtattaagagcaaggcggaaattattgccgaaagcggtcgt

SEQ ID NO: 266779 - DNA, 75 bp, synthetic construct
  source 1..75: mol_type = other DNA
actacagcagatcgggcgcattggtggcagttcatccgaagaagccgcaaacgccttgcgacagttagggcaatc

SEQ ID NO: 266780 - DNA, 75 bp, synthetic construct
  source 1..75: mol_type = other DNA
ggttggtgagcacaactcaccggaactctttcagagtaattccgggcgatcttacatgattcccggtgagaatgg

SEQ ID NO: 266781 - DNA, 75 bp, synthetic construct
  source 1..75: mol_type = other DNA
atcctggaaatcagtaagcggactggcatgaagattgaggataccacgaagctatgggagagccttacttcagcc

SEQ ID NO: 266782 - DNA, 75 bp, synthetic construct
  source 1..75: mol_type = other DNA
ccatttgaaaaatatcgtcgatttagggtgtaagtttgaatcaatttctgtttcctcacaagggaaaaatccact

SEQ ID NO: 266783 - DNA, 75 bp, synthetic construct
  source 1..75: mol_type = other DNA
tgtatgctttttcttttcgctttgcaaaagaggtttggtttctgaatgaggatgatagaaatgtatttctgagaa

SEQ ID NO: 266784 - DNA, 75 bp, synthetic construct
  source 1..75: mol_type = other DNA
tcgcaaatacactctggtcgatatacaatttccgaaaaggattaataaaaagtttaattgaaaaaggatatgatg

SEQ ID NO: 266785 - DNA, 75 bp, synthetic construct
  source 1..75: mol_type = other DNA
gtaccacagtttgcaaatcagcaacgtggtctacctgatattatccatactaaagatttgcttaaagaattggat

SEQ ID NO: 266786 - DNA, 75 bp, synthetic construct
  source 1..75: mol_type = other DNA
gtatcgaatttaatcaatttggtaaaccgattgcatattatttcatgcataagaatccattaaactatacttacg

SEQ ID NO: 266787 - DNA, 75 bp, synthetic construct
  source 1..75: mol_type = other DNA
tgtttggttcactgcaatcgaccacggcgcagcaaatcaacgtctctgacactctgctggtggcagcaaatacca

SEQ ID NO: 266788 - DNA, 75 bp, synthetic construct
  source 1..75: mol_type = other DNA
attgaaagcacgacggaactgactttctccgccagagaccagtttggaaacgcgcttaccgatatcgacaccgct

SEQ ID NO: 266789 - DNA, 75 bp, synthetic construct
  source 1..75: mol_type = other DNA
gacagcaatggcgttaccattggcagcatttcggagataaacccaggggtttacagcgccacggtttcttcgacc

SEQ ID NO: 266790 - DNA, 75 bp, synthetic construct
  source 1..75: mol_type = other DNA
atcatgatttatcccgtagtcatacccgtattggcgttggtgcggaatactggcgcgattatctgaaactgagtg

SEQ ID NO: 266791 - DNA, 75 bp, synthetic construct
  source 1..75: mol_type = other DNA
agccgaacgggactgcaacaactaatgagcaagggcaggctatattcaccgcttctaccactaaagcggcgatat

SEQ ID NO: 266792 - DNA, 75 bp, synthetic construct
  source 1..75: mol_type = other DNA
cagtctcggtgaataaaaatcagaagactgccacggtgaagttcaaagcggatgccaaaaccggtcaggcaagcc

SEQ ID NO: 266793 - DNA, 75 bp, synthetic construct
  source 1..75: mol_type = other DNA
aggctggagccataaaggcaacggcgaatacacggctgttctgcgttcgggaacgcgggcaggcgcgctgaacat

SEQ ID NO: 266794 - DNA, 75 bp, synthetic construct
  source 1..75: mol_type = other DNA
gtttccagacctataatagttatgaagaactatttaataaaatcattttcactaatgacgaatgccaattggtaa

SEQ ID NO: 266795 - DNA, 75 bp, synthetic construct
  source 1..75: mol_type = other DNA
attttttcccagctgacggaggccactcgtaaacttcaggcccggagcgcaaaaggcgccctgactgtgagttta

SEQ ID NO: 266796 - DNA, 75 bp, synthetic construct
  source 1..75: mol_type = other DNA
cgacgtccggctgtatcaccgggacggcaaatcacacattaccctgaaggaaaacggcgtcattgaaattacagg

SEQ ID NO: 266797 - DNA, 75 bp, synthetic construct
  source 1..75: mol_type = other DNA
ataacaggcacctctctgacgggtgacctcaccggtaatgcggacacggccacaaaactgaaaacggggcggaca

SEQ ID NO: 266798 - DNA, 75 bp, synthetic construct
  source 1..75: mol_type = other DNA
tcattggccaaacaaaatgttatgataaaaagagtagggatagggattttagtggtcgaaatgtggaagagttta

SEQ ID NO: 266799 - DNA, 75 bp, synthetic construct
  source 1..75: mol_type = other DNA
tgtatcaaactacccggcttttgttgctttgaatggtagaaataacgctctatttgttgatttttcagaacataa

SEQ ID NO: 266800 - DNA, 75 bp, synthetic construct
  source 1..75: mol_type = other DNA
tgatgtgattgccgatggtcagaaatcttacacgttgacgcttactgcggtggataccgatggcaacccggtgga

SEQ ID NO: 266801 - DNA, 75 bp, synthetic construct
  source 1..75: mol_type = other DNA
gattttagtggtcgtaatgtgaaagagtttatagggttattatcagagcacgatgtattggaaaagtatcaactc

SEQ ID NO: 266802 - DNA, 75 bp, synthetic construct
  source 1..75: mol_type = other DNA
catttcctgtcgcgcttgataggggggatattaatgcaatacaggcaagcaattctatttctgccgggcttgata

SEQ ID NO: 266803 - DNA, 75 bp, synthetic construct
  source 1..75: mol_type = other DNA
cattgcagaatctggcgtggaaagaggtagaaccgtatccgctggatgtgctggtggcagaaagtcaggggatga

SEQ ID NO: 266804 - DNA, 75 bp, synthetic construct
  source 1..75: mol_type = other DNA
cacgttggagagggtagctcaattatttcatgttgtggagttaaaataaatagcacaatccatgaatttctgagg

SEQ ID NO: 266805 - DNA, 75 bp, synthetic construct
  source 1..75: mol_type = other DNA
agtaataaatttaaagtcactgatatgtatcgtgagttcaatgacgaaaaaaaatgctttgaacaaaagtgtagg

SEQ ID NO: 266806 - DNA, 75 bp, synthetic construct
  source 1..75: mol_type = other DNA
aactctctacagaaagatggtgttgagaaaaaaccagagaaaatattatttcttgcctctccagtatttcaggaa

SEQ ID NO: 266807 - DNA, 75 bp, synthetic construct
  source 1..75: mol_type = other DNA
atacagtacagccaactccacctacgatacgattatcaaattattatcttcaaccattactgcgttgtttgattc

SEQ ID NO: 266808 - DNA, 75 bp, synthetic construct
  source 1..75: mol_type = other DNA
taacgatcacattgacggatctggtgcctggctgttcaaagaccctactcaaccgaattcaaatcttaaggctcg

SEQ ID NO: 266809 - DNA, 75 bp, synthetic construct
  source 1..75: mol_type = other DNA
tccataagtcaggatgatattgataaaattaaagataatacaaatatagatattatcgatttcaaaagacgctta

SEQ ID NO: 266810 - DNA, 75 bp, synthetic construct
  source 1..75: mol_type = other DNA
tagttcccttttttctatgcttatacagaaacaaaaaaaagcaatgtcaggtagttctgcatcaaacagtaatgc

SEQ ID NO: 266811 - DNA, 75 bp, synthetic construct
  source 1..75: mol_type = other DNA
tgagcgcatactggcaggacttcagtgaacatatccaaagcaatatgggaaaatggactcactctaataaaaaag

SEQ ID NO: 266812 - DNA, 75 bp, synthetic construct
  source 1..75: mol_type = other DNA
aatgaagactggaaatgccagcatgacatacaacttaacttcgttaaaaacatgctcagaaatttcccaactgag

SEQ ID NO: 266813 - DNA, 75 bp, synthetic construct
  source 1..75: mol_type = other DNA
acgccgaagcctttgtacgcgaactggcacagcgtgtgccgcaacacggagacgcacttatgaccatcgcacaac

SEQ ID NO: 266814 - DNA, 75 bp, synthetic construct
  source 1..75: mol_type = other DNA
caggaagttgtgatgctgcaacacgtgaaggttcggcggaagttgtgctggaatgtgaagggaaaataaaatatc

SEQ ID NO: 266815 - DNA, 75 bp, synthetic construct
  source 1..75: mol_type = other DNA
aatgatcttcttaccacgtgatcgagcaagagctttagccggtttattacagcaagcatctatcacagtagtaag

SEQ ID NO: 266816 - DNA, 75 bp, synthetic construct
  source 1..75: mol_type = other DNA
atatgaatgacatcactgaaattaaccagaagcatcagattatttttctcatcagacatggagaacgatgtgatc

SEQ ID NO: 266817 - DNA, 75 bp, synthetic construct
  source 1..75: mol_type = other DNA
ttaccatttaccttgcgccagcctattcataaaggcatctgttttttcctttacgctcaaaaatatgcctcttta

SEQ ID NO: 266818 - DNA, 75 bp, synthetic construct
  source 1..75: mol_type = other DNA
ctcctcacgatgccacgttcaggcagttcctgacgcaaccggatattgcccgggatttcatggaaatccacctgc

SEQ ID NO: 266819 - DNA, 75 bp, synthetic construct
  source 1..75: mol_type = other DNA
gcattgcggcgacgtgtccaggccgggctgaacaaaggagaagcccgtaatgctctggcccgtgctgtattcatg

SEQ ID NO: 266820 - DNA, 75 bp, synthetic construct
  source 1..75: mol_type = other DNA
aatttctcacgccttcgtcacacgcagccggaagattttccggtagagaaactcgccagttttgcggtgatgcag

SEQ ID NO: 266821 - DNA, 75 bp, synthetic construct
  source 1..75: mol_type = other DNA
ctttggttacaattgattttaaaagttggcaatgaaaaaattcatttcgttgatattccgacagtaaaatataga

SEQ ID NO: 266822 - DNA, 75 bp, synthetic construct
  source 1..75: mol_type = other DNA
gaggttattgcttttgcgattgcagctatcagaaccactgaagcggaacttcgacattcctttcaaagtcgagca

SEQ ID NO: 266823 - DNA, 75 bp, synthetic construct
  source 1..75: mol_type = other DNA
aaatagttcagagtattccgggacttgctaacgaccatcgactatttgttagtttgcgagatcaacttccgctgc

SEQ ID NO: 266824 - DNA, 75 bp, synthetic construct
  source 1..75: mol_type = other DNA
tgatatgttgctgatctcggcagtatgtggggtattgcgttggggaattatgggggcaaccactgagctactgtg

SEQ ID NO: 266825 - DNA, 75 bp, synthetic construct
  source 1..75: mol_type = other DNA
cttgctgagcagaaaatgcaactggaaaaccagctcgcaattgccgcacctaaagttgagtttgccgatcgcgtt

SEQ ID NO: 266826 - DNA, 75 bp, synthetic construct
  source 1..75: mol_type = other DNA
agccttagtttttaaatggcagcagcgagatggtgattttgatattgatgatttgggacagaagtggtctaagtc

SEQ ID NO: 266827 - DNA, 75 bp, synthetic construct
  source 1..75: mol_type = other DNA
caacctgataataaatcccttttcagagagggttgcatagtactggagttgacccaatcaaccttcacaggcatc

SEQ ID NO: 266828 - DNA, 75 bp, synthetic construct
  source 1..75: mol_type = other DNA
cttgatgctgtttggaaacattatccactgcctcttgatatgagaattaaatatgagagatatcttaaacagtca

SEQ ID NO: 266829 - DNA, 75 bp, synthetic construct
  source 1..75: mol_type = other DNA
atccgccgggtgctggagccgctgctggcaaaaataggaattcatcagcaaaccacgctgttacgtcacggtttt

SEQ ID NO: 266830 - DNA, 75 bp, synthetic construct
  source 1..75: mol_type = other DNA
cctgcaggacacggctactgctcgtgctgtttttaatgaattagccaggcgtctcaaaaatttcaatcgtcagga

SEQ ID NO: 266831 - DNA, 75 bp, synthetic construct
  source 1..75: mol_type = other DNA
gcccttcatatcccgttgggactgatgattatcaacgtgtccatttagctatagataaaatcatcaggtcaagat

SEQ ID NO: 266832 - DNA, 75 bp, synthetic construct
  source 1..75: mol_type = other DNA
gtcggttttaacctctttttctcaccgctggtgccgttaactgacgcgctggcgaatacctggcaaaagcagttt

SEQ ID NO: 266833 - DNA, 75 bp, synthetic construct
  source 1..75: mol_type = other DNA
aagagtcaaaaaatcagtcgatggatgatgattcgacagagaaaaaatctatcgatttcataagatcaagacagt

SEQ ID NO: 266834 - DNA, 75 bp, synthetic construct
  source 1..75: mol_type = other DNA
tttatcaatgagccattttttttagatttaaacaatgaagtgataaatatgacaagagatatcggaatttataaa

SEQ ID NO: 266835 - DNA, 75 bp, synthetic construct
  source 1..75: mol_type = other DNA
tttgttggcatttatcataatttgttgtgcaatttggaaatataaatcaactataacggggtttttgcgattaaa

SEQ ID NO: 266836 - DNA, 75 bp, synthetic construct
  source 1..75: mol_type = other DNA
ggtcatcgccaactttgatcgccacgcaatccatcatccgcagacggcacggctgtcacaacaaaagctggatgc

SEQ ID NO: 266837 - DNA, 75 bp, synthetic construct
  source 1..75: mol_type = other DNA
gaaagccgggcgtggcttgcgcagtgcgggctgacggtggagcaactggccagacaggtggagccggaatacaca

SEQ ID NO: 266838 - DNA, 75 bp, synthetic construct
  source 1..75: mol_type = other DNA
gcgtactcaataaaagcgaaggagaaaggctacagaggcgttatttcagttggtagagtgcagaccccggtgctg

SEQ ID NO: 266839 - DNA, 75 bp, synthetic construct
  source 1..75: mol_type = other DNA
gaatcatttaaagttatcgccagaaaaaccaccaacattggttttacatctctgacaggggatgataaagacgat

SEQ ID NO: 266840 - DNA, 75 bp, synthetic construct
  source 1..75: mol_type = other DNA
acaccgcgccagcggtgaagaaagccatcacgtcattgagagacaaccgggaatttcgcggaatgtatttaaagg

SEQ ID NO: 266841 - DNA, 75 bp, synthetic construct
  source 1..75: mol_type = other DNA
cacgctggtggcgcgggcaaacggaacaatcccgccggtttatccccgctggcgcggggaacacgctaacctata

SEQ ID NO: 266842 - DNA, 75 bp, synthetic construct
  source 1..75: mol_type = other DNA
accgtttttgccgggtttattttaaaaccggagccggtttatccccgctggcgcggggaacacggaatatcgttg

SEQ ID NO: 266843 - DNA, 75 bp, synthetic construct
  source 1..75: mol_type = other DNA
ccggtttatccccgctggcgcgggaaactccccctgcgcttgatgaacgacaacaagaatggcggtttatccccg

SEQ ID NO: 266844 - DNA, 75 bp, synthetic construct
  source 1..75: mol_type = other DNA
ccagaaagaattgatgccgcgttatcagggtttgggatcgcttgtgtccctgaagacatggttcaggagtatata

SEQ ID NO: 266845 - DNA, 75 bp, synthetic construct
  source 1..75: mol_type = other DNA
tgcaggtaacatcactattccagtattaattggtggagtacaacgaatagcattgcttcagtggaagacgctatc

SEQ ID NO: 266846 - DNA, 75 bp, synthetic construct
  source 1..75: mol_type = other DNA
ttagtgctaaagatgcaaaaagcacacagaaagcctggaattgtcgtcactccagacagtcaaacgataaaaaaa

SEQ ID NO: 266847 - DNA, 75 bp, synthetic construct
  source 1..75: mol_type = other DNA
ccgcagtcgcgagcgatatcgcgaaagcgctgggcggcaacttcacccggcacgacggctatgccgaatcggcga

SEQ ID NO: 266848 - DNA, 75 bp, synthetic construct
  source 1..75: mol_type = other DNA
gtttatccccgctggcgcggggaacacgggcagcactgcgggcgcgattgttgcggcggcggtttatccccgctg

SEQ ID NO: 266849 - DNA, 75 bp, synthetic construct
  source 1..75: mol_type = other DNA
cataacaaatcatatctagcactcgctatctttgtaattataattgcatcaacaagtcatattcatataaataca

SEQ ID NO: 266850 - DNA, 75 bp, synthetic construct
  source 1..75: mol_type = other DNA
gaatggactctcaaaagctgaaatggctggttatgtagaaaagttaatgccagggcaaagtgcttcaacctctta

SEQ ID NO: 266851 - DNA, 75 bp, synthetic construct
  source 1..75: mol_type = other DNA
gcgaacgcgacaattactgatatgcagatacgccagcgtgatgtcgctgcacttgatgccagatactcgagggaa

SEQ ID NO: 266852 - DNA, 75 bp, synthetic construct
  source 1..75: mol_type = other DNA
cggaagcagaaaaggttgaggtaacttcagaacctattcaaaccgtttcaaccgaattgaatgaacaacctcaga

SEQ ID NO: 266853 - DNA, 75 bp, synthetic construct
  source 1..75: mol_type = other DNA
ctataactatagatgataccttaagtgataacacgtacagttatactgttacggctgaaaaagacggtaaagtta

SEQ ID NO: 266854 - DNA, 75 bp, synthetic construct
  source 1..75: mol_type = other DNA
atggagttttacggcgggaagtcgccgaaaatcgccagtgtgcatcagttcggtctgtcggaagaaaaccggaaa

SEQ ID NO: 266855 - DNA, 75 bp, synthetic construct
  source 1..75: mol_type = other DNA
acgaaacggcgcagtaccagaagcacccaggatgtggaacaggtttattggttacctgacagcgaagatagactc

SEQ ID NO: 266856 - DNA, 75 bp, synthetic construct
  source 1..75: mol_type = other DNA
tggtgtttccgatgggaaattaacaacagatgctgctacagttggccaactgtatcacgaatattcgattgaaaa

SEQ ID NO: 266857 - DNA, 75 bp, synthetic construct
  source 1..75: mol_type = other DNA
actcaggctcaggaaattacggtttcactgagcagtgcttcagatacaggagtaaaaggtgattttatcacccag

SEQ ID NO: 266858 - DNA, 75 bp, synthetic construct
  source 1..75: mol_type = other DNA
gtaatgcaactgggatattgaaaattgatactacatctccaagcctttccggaattaagtttggtgatgggtttg

SEQ ID NO: 266859 - DNA, 75 bp, synthetic construct
  source 1..75: mol_type = other DNA
cgggattgttggagacaaaatcactaacttcaaaaaaatatcgtttacaggaataacagagcctggagcaactat

SEQ ID NO: 266860 - DNA, 75 bp, synthetic construct
  source 1..75: mol_type = other DNA
ttcagacaatataactaacaacgcaaatcccaaaataaccggtgtaacagcaccggatgcttctattactttaat

SEQ ID NO: 266861 - DNA, 75 bp, synthetic construct
  source 1..75: mol_type = other DNA
aaattcctatacgccaggaaaatacgattatgaattaaaaataactcatccatcaggagaaactatcactgacaa

SEQ ID NO: 266862 - DNA, 75 bp, synthetic construct
  source 1..75: mol_type = other DNA
tttagtggcagaacagaagctaatcttatagtcactataactattgcaggaataagttataacgtgatggctgat

SEQ ID NO: 266863 - DNA, 75 bp, synthetic construct
  source 1..75: mol_type = other DNA
atgaaatatatatcattattattgtttatcctgctgttgtgcggctgcaagcagcaggaattactgaaccatctt

SEQ ID NO: 266864 - DNA, 75 bp, synthetic construct
  source 1..75: mol_type = other DNA
atgaaactcatcagtaacgatctgcgcgatggcgataaattgccgcatcgtcatgtctttaacggcatggggtac

SEQ ID NO: 266865 - DNA, 75 bp, synthetic construct
  source 1..75: mol_type = other DNA
cagtctttaccgctaattgcgagctatggcttctgcttaccgcataagggcctgatggaactagtagaatccgtc

SEQ ID NO: 266866 - DNA, 75 bp, synthetic construct
  source 1..75: mol_type = other DNA
ttatcctgctgttgtgcggctgcaagcagcaggaattattgaaccatcttgatcaacagcaagctaatgatgtcc

SEQ ID NO: 266867 - DNA, 75 bp, synthetic construct
  source 1..75: mol_type = other DNA
ctggcgatagtggtaaaactgctttaccaattcatatttctgttcttgcccccttatttccagacaggggttgta

SEQ ID NO: 266868 - DNA, 75 bp, synthetic construct
  source 1..75: mol_type = other DNA
cgtttcatctccacgagcggaaaaagcaaggctatattctgctattgagcagcggttagagcaatctctcaaaat

SEQ ID NO: 266869 - DNA, 75 bp, synthetic construct
  source 1..75: mol_type = other DNA
atgttagtcatcatacttacttatctacagtattaattgttagtgaggatggtagaaagctaattatcaagacta

SEQ ID NO: 266870 - DNA, 75 bp, synthetic construct
  source 1..75: mol_type = other DNA
ccggtaacgaggtgtcgtggaccagtaatctctcctccggaaatgtgctcacaggtattattgttcaggaaacgg

SEQ ID NO: 266871 - DNA, 75 bp, synthetic construct
  source 1..75: mol_type = other DNA
agccctgaagctgttattaaagagattaaagaatggcgagctgctaacggtaagtcaggatttaaacagggctga

SEQ ID NO: 266872 - DNA, 75 bp, synthetic construct
  source 1..75: mol_type = other DNA
gacttaatacttttagatgataacttcattataaaaaatctaaccacgcttgaaaggactatgaaattccatgag

SEQ ID NO: 266873 - DNA, 75 bp, synthetic construct
  source 1..75: mol_type = other DNA
aataccaggaagctgtcagttaccgatacaggacaagttttttttcatcatgccaaacgtatactggaggagctt

SEQ ID NO: 266874 - DNA, 75 bp, synthetic construct
  source 1..75: mol_type = other DNA
ttgtaaccatcgtgaatatggggagttttacagcagcagccgagcatcttcagttgtctaaacaatatgtcagca

SEQ ID NO: 266875 - DNA, 75 bp, synthetic construct
  source 1..75: mol_type = other DNA
catcgggcattatctgaacataaaacactatcaataagttggagtcattaccctggattctcaatctatgttgaa

SEQ ID NO: 266876 - DNA, 75 bp, synthetic construct
  source 1..75: mol_type = other DNA
ggtacaggaactgttaacactgcaggcacactgattctgggtaatgcagatgcccctgtcatgcttgccagcagc

SEQ ID NO: 266877 - DNA, 75 bp, synthetic construct
  source 1..75: mol_type = other DNA
ttcatttatcgtctggctgggatggaaaaacgctgactaaagctggtgaaggtacgctggttctgtcttctgaaa

SEQ ID NO: 266878 - DNA, 75 bp, synthetic construct
  source 1..75: mol_type = other DNA
attactgcagatgaaggcaatggtggcaacggaggcaatggtggtgctgctatatccgggagtaatataacgatc

SEQ ID NO: 266879 - DNA, 75 bp, synthetic construct
  source 1..75: mol_type = other DNA
atgacagattctggagtgatgggaaaaaacccgacagatgtgacgtacttcaggaactaattgattgtggtgata

SEQ ID NO: 266880 - DNA, 75 bp, synthetic construct
  source 1..75: mol_type = other DNA
ttatatgttgtagctcatggcaatacatcagttattggtacaggttcaaaaacaggtccaacattaactcctaga

SEQ ID NO: 266881 - DNA, 75 bp, synthetic construct
  source 1..75: mol_type = other DNA
ggtgcagatgggaacgattatatcgaaggtaattatggtaatgatcgactatacggcgatgatggggatgattat

SEQ ID NO: 266882 - DNA, 75 bp, synthetic construct
  source 1..75: mol_type = other DNA
atatataccgcaacaacatctagtggtagtagtgtaattgctgacgagaagatgttggactacattacttcacaa

SEQ ID NO: 266883 - DNA, 75 bp, synthetic construct
  source 1..75: mol_type = other DNA
agattaagctccacgataaactatccaagaatgatatactaaatatattggctgagcagatgaccatgcttgagg

SEQ ID NO: 266884 - DNA, 75 bp, synthetic construct
  source 1..75: mol_type = other DNA
cgccgcctaacgaagcccataccatcccggttgcgcaattcgatgcggcaatgaaaattttgcaggatgcgctga

SEQ ID NO: 266885 - DNA, 75 bp, synthetic construct
  source 1..75: mol_type = other DNA
gaagggcgcggtgtatcctgcggggatccacattgtgttgcctgaaatcacacaacaggtgtctgagtcgccata

SEQ ID NO: 266886 - DNA, 75 bp, synthetic construct
  source 1..75: mol_type = other DNA
gcagtacgagtgggaatgccatcaaccttaaaggcaacaacacgctgacggccagtaacattactcttaccgggg

SEQ ID NO: 266887 - DNA, 75 bp, synthetic construct
  source 1..75: mol_type = other DNA
gttttttatgaatctcatcagcagggcatacttcgctgggaagatttttatagcattgagtatgaagaagattat

SEQ ID NO: 266888 - DNA, 75 bp, synthetic construct
  source 1..75: mol_type = other DNA
ccttgataacgcatttattgcagagcgtatagtgacagaactgcgtaaggcgaagttgtcccggcagtttttatt

SEQ ID NO: 266889 - DNA, 75 bp, synthetic construct
  source 1..75: mol_type = other DNA
cacgcagggcgggctgacgcgcagtatggaatacgatgctgccggacgggtcatccgtctgaccagtgaaaacgg

SEQ ID NO: 266890 - DNA, 75 bp, synthetic construct
  source 1..75: mol_type = other DNA
ggcgatgtgcaggccggttttgtgcgaagcacgaaagataatgccctgtatgtgaaaattgtccggggcagtaaa

SEQ ID NO: 266891 - DNA, 75 bp, synthetic construct
  source 1..75: mol_type = other DNA
gcggtcaccgccagcatcaacaacagcagccagagccggaacgtgacgtttatcgccgatgtcagcacggcgcag

SEQ ID NO: 266892 - DNA, 75 bp, synthetic construct
  source 1..75: mol_type = other DNA
gcgatgcccgcatggcgttacatgaactgatgatcggacgcgctgtggtttccgtcagcaaggatggcagacagg

SEQ ID NO: 266893 - DNA, 75 bp, synthetic construct
  source 1..75: mol_type = other DNA
ttgaagtggatgataacggctatgtaatgggcagttcagaaaagggagcttatttcagagttcatgccagtaaat

SEQ ID NO: 266894 - DNA, 75 bp, synthetic construct
  source 1..75: mol_type = other DNA
gtgaagggtgaaaccgcagagcggtggcggtacgacgaacgcggctggctgacagacatcagccatctcagcgaa

SEQ ID NO: 266895 - DNA, 75 bp, synthetic construct
  source 1..75: mol_type = other DNA
tcaacaacagcagcctgagccgggacgtgacgtttgttgccgatgtcaggacggcgaagatcgctgatctggtgg

SEQ ID NO: 266896 - DNA, 75 bp, synthetic construct
  source 1..75: mol_type = other DNA
ggacctggtggtcattaaggacggctcagtggctgacggcgcaatggcgaatatgctgcgggcaagggtgaccga

SEQ ID NO: 266897 - DNA, 75 bp, synthetic construct
  source 1..75: mol_type = other DNA
atcagtgcggtcactgccagcatcaacagcagcagtcagagccagagcgtgacgtttgtcgccgatatcaggacg

SEQ ID NO: 266898 - DNA, 75 bp, synthetic construct
  source 1..75: mol_type = other DNA
cggacggcacggtggaaatcagtgtcaccagccagacggcaggcaccagtgcggtcactgccagcattaacagca

SEQ ID NO: 266899 - DNA, 75 bp, synthetic construct
  source 1..75: mol_type = other DNA
aggcaacagtgcaacggtcgctccggcggtcaccacaaatccggacgggacggcggagatcagtgtcaccagtca

SEQ ID NO: 266900 - DNA, 75 bp, synthetic construct
  source 1..75: mol_type = other DNA
ggcagatggcgcgacggcgaacacgctgcgagtgagggtgacggatgcgttcgggaacacgcttgccgggcagac

SEQ ID NO: 266901 - DNA, 75 bp, synthetic construct
  source 1..75: mol_type = other DNA
tgaactgcggcaatatattgaagagatggaaagtgcgcttggcgtgtccggacgccgccgtggtccggcaggagt

SEQ ID NO: 266902 - DNA, 75 bp, synthetic construct
  source 1..75: mol_type = other DNA
taccgccggtccatcgcggggctgaatgtggacggactgaagaaaaacgcgcgggataccagtctgctgaggtat

SEQ ID NO: 266903 - DNA, 75 bp, synthetic construct
  source 1..75: mol_type = other DNA
ggttatccaaaggctggggatgtgtccagaatagaagttaggccttggcgaggtttttctaatattgttattacg

SEQ ID NO: 266904 - DNA, 75 bp, synthetic construct
  source 1..75: mol_type = other DNA
cgcggcctgtataacacttaagaatctggcacaactgcatattaagaagccagaatacccaattacactgcttgc

SEQ ID NO: 266905 - DNA, 75 bp, synthetic construct
  source 1..75: mol_type = other DNA
ggtggccaaatttactgtgccactacagtgaacggcaaaaccgagcagcttgaggtggatacccgaaccacgcta

SEQ ID NO: 266906 - DNA, 75 bp, synthetic construct
  source 1..75: mol_type = other DNA
attatcactactggagatgaacctctggaaatccgtactctgcgtgatcgtaatggcactttcgaaccgcaacag

SEQ ID NO: 266907 - DNA, 75 bp, synthetic construct
  source 1..75: mol_type = other DNA
tttgcccacggtggtgaagcgcatatggtgccaatggataaaacgcttaaagaatttggtgccgatgtgcagtga

SEQ ID NO: 266908 - DNA, 75 bp, synthetic construct
  source 1..75: mol_type = other DNA
gaatttgatatctggaacctcaatgagacatgggcatttcgggaaaaacttatattttgtgaggatgaatcaagt

SEQ ID NO: 266909 - DNA, 75 bp, synthetic construct
  source 1..75: mol_type = other DNA
gatccgttttcgttatcacgacttcgaatttgatatctggaacctcaatgagacatgggcatttcgggaaaaact

SEQ ID NO: 266910 - DNA, 75 bp, synthetic construct
  source 1..75: mol_type = other DNA
aaatctggagaaaaaccagatgaatatcgcctcgtcacagactactggataaaaagactagaggggcgcgagtat

SEQ ID NO: 266911 - DNA, 75 bp, synthetic construct
  source 1..75: mol_type = other DNA
tggcactgtttatcggcttacgcagccgcaaaaaaacgcggcatcactcgctaaaggaaaatgtcgctccgggtg

SEQ ID NO: 266912 - DNA, 75 bp, synthetic construct
  source 1..75: mol_type = other DNA
atgagttgggatgccgtgctctatgatctacgtagtgaaaaaattatcagtaaagataattacttgaccgactta

SEQ ID NO: 266913 - DNA, 75 bp, synthetic construct
  source 1..75: mol_type = other DNA
gaactgacgaaaaaacgttatgaagtatggcatcactacgatgtactgcactaccagtcatcgtcattttctcgt

SEQ ID NO: 266914 - DNA, 75 bp, synthetic construct
  source 1..75: mol_type = other DNA
agcccgtgcacattcccgcactgcgcggaagtgagtgggcgcacctgttacgtgccctggaaaagaagcgggctt

SEQ ID NO: 266915 - DNA, 75 bp, synthetic construct
  source 1..75: mol_type = other DNA
ctgagtatgtccataaaaggctttcttgcgagtaatccacatacaaaaataaatattctttatagcaataagact

SEQ ID NO: 266916 - DNA, 75 bp, synthetic construct
  source 1..75: mol_type = other DNA
agaatcctgaacaggctcggtgcgcaatctggtatcgacgcaggtatggaagtgttctacttctgcgccgacccg

SEQ ID NO: 266917 - DNA, 75 bp, synthetic construct
  source 1..75: mol_type = other DNA
cttactcaactaacaggtaatacacgcgtatattgtcaaaatgcaagcaaattttttagtatctacgattcagga

SEQ ID NO: 266918 - DNA, 75 bp, synthetic construct
  source 1..75: mol_type = other DNA
ctgctgaagaagaaatccgccactgaactgggcgagctggcgaccaatatcaataccatcgcccgtaatgcgcat

SEQ ID NO: 266919 - DNA, 75 bp, synthetic construct
  source 1..75: mol_type = other DNA
ccctgctgcctttaattcagaaaacaggcaatctccagttgcagatgaactttaatctgtctgatcccccaacta

SEQ ID NO: 266920 - DNA, 75 bp, synthetic construct
  source 1..75: mol_type = other DNA
aaaacagacctctattcaaatggtcactttacttaacgcgttacaacctggtggaaaatgcattatcactggtga

SEQ ID NO: 266921 - DNA, 75 bp, synthetic construct
  source 1..75: mol_type = other DNA
tgacgatttattacgttcttcccgatgagcaatatcgcccggatttgctggcttaccgtatgtggggcatagcag

SEQ ID NO: 266922 - DNA, 75 bp, synthetic construct
  source 1..75: mol_type = other DNA
cgcgtcatcaggcggagtatcaaaaccgtggaacagaaaacgatatgattgttttctcaccaacgacaagcgatc

SEQ ID NO: 266923 - DNA, 75 bp, synthetic construct
  source 1..75: mol_type = other DNA
caaaaagaattagcgtacttacaaaatgtaattctttataatgactcgtctcttcgtctggattttttaggttaa

SEQ ID NO: 266924 - DNA, 75 bp, synthetic construct
  source 1..75: mol_type = other DNA
atgatattagtagtgatttagtccgtcgaaaaatgaatgaccttcctgaaagccccataggaaataacctcgaag

SEQ ID NO: 266925 - DNA, 75 bp, synthetic construct
  source 1..75: mol_type = other DNA
tgggggtgttacagcgacacacaaaaaaaatggataccgcttgatgtttctcatggtggtactggtgcggcaact

SEQ ID NO: 266926 - DNA, 75 bp, synthetic construct
  source 1..75: mol_type = other DNA
ggttcgacggcgaacatgctgcgggtgagggtgacggatgcgttcggtaatgtgcttgccggacagacggtcagc

SEQ ID NO: 266927 - DNA, 75 bp, synthetic construct
  source 1..75: mol_type = other DNA
ggtcgctccgactgtcatcacagggcaggacggcacggtggagatcagtgtcaccagccagacggcgggcaccag

SEQ ID NO: 266928 - DNA, 75 bp, synthetic construct
  source 1..75: mol_type = other DNA
ctattactgggaaacccaagaatggtaaagggaatgatgttgtatttaaattcaagattaaaaaatggtttacta

SEQ ID NO: 266929 - DNA, 75 bp, synthetic construct
  source 1..75: mol_type = other DNA
tggtcactgtcagcatcaacaacagtagcctgagccagagcgtgacatttattgccgatgtcaggacggcgaaga

SEQ ID NO: 266930 - DNA, 75 bp, synthetic construct
  source 1..75: mol_type = other DNA
gacaacagcgcaacggtgtctccgacggtcactacagagccggacggcacggtggagatctctgtcaccagtcag

SEQ ID NO: 266931 - DNA, 75 bp, synthetic construct
  source 1..75: mol_type = other DNA
acgttgcgggatgagtttggtaaccctgctttagggctgacatcagaagtcatcgagtcttatattgatagtttc

SEQ ID NO: 266932 - DNA, 75 bp, synthetic construct
  source 1..75: mol_type = other DNA
cgcggccggaggtactggtgcggcaactattgatggtgccagaactaatcttggattaggcagggataacagccc

SEQ ID NO: 266933 - DNA, 75 bp, synthetic construct
  source 1..75: mol_type = other DNA
ctgtcgctaaaaaatttctttagcggagctgagatactgctaaatggtaatgacggcgcggttcaactcaaaaca

SEQ ID NO: 266934 - DNA, 75 bp, synthetic construct
  source 1..75: mol_type = other DNA
caggaatggaagaaattactaacagtagacgatctcaattcatctaccgatcttgctgtcaggtcattaaccaca

SEQ ID NO: 266935 - DNA, 75 bp, synthetic construct
  source 1..75: mol_type = other DNA
ttgccgggcagacggtcagcgtgttggcggataacggcgcaacggtcgctccgacggtcatcacagggcaggacg

SEQ ID NO: 266936 - DNA, 75 bp, synthetic construct
  source 1..75: mol_type = other DNA
ataccatccttccttttgtggaagtcgagtcgctgagtgttaatggtgtaaaattcagggcgacagatggttttc

SEQ ID NO: 266937 - DNA, 75 bp, synthetic construct
  source 1..75: mol_type = other DNA
agaccgccggaatcagtgcggtcactgcaaccatcaacaacagcaccgcgagtcagaatgtgatgtttatcgccg

SEQ ID NO: 266938 - DNA, 75 bp, synthetic construct
  source 1..75: mol_type = other DNA
actgagaacgcgactagacaggttgtaatacatcccaaactgatcgaatggggattccttgattttgtaaaccgc

SEQ ID NO: 266939 - DNA, 75 bp, synthetic construct
  source 1..75: mol_type = other DNA
gaaaaatctcatatcaaatatgatgaggatagtcagcggcactatctccttatcgcggaaggaggacaggggaaa

SEQ ID NO: 266940 - DNA, 75 bp, synthetic construct
  source 1..75: mol_type = other DNA
atttcaaactgtttagctggctgggttggtaacttggcgtacttgcaacaggtggttggtcatgaacaaagcggt

SEQ ID NO: 266941 - DNA, 75 bp, synthetic construct
  source 1..75: mol_type = other DNA
cgcaaggcagcgagaaatcctcttttacctcaacagcagataattattcctgctgaaatcgtggaaactccaccg

SEQ ID NO: 266942 - DNA, 75 bp, synthetic construct
  source 1..75: mol_type = other DNA
aagctggaaaaatcgcaaatcaaatatgatgaagacagccagcgtcattaccttctgattgccgaaggtggacag

SEQ ID NO: 266943 - DNA, 75 bp, synthetic construct
  source 1..75: mol_type = other DNA
ccatgctcaacccgctaaccaaattgctgggggtcatgaaagggatcgccgctattggtggcattgaatccgcta

SEQ ID NO: 266944 - DNA, 75 bp, synthetic construct
  source 1..75: mol_type = other DNA
atgggccacagaaccatacgtcacaccatcacacgcaacgggatttattacgtccgtttccgcttgcccggtaat

SEQ ID NO: 266945 - DNA, 75 bp, synthetic construct
  source 1..75: mol_type = other DNA
atgctgatttgcgttggatccatggcgttatagttcaggcagcgtggtttgtgaaagcatcactggaagcgttgc

SEQ ID NO: 266946 - DNA, 75 bp, synthetic construct
  source 1..75: mol_type = other DNA
cacctcaaaaggacgttgatttgcatcaggtcttgtggagccgctcgcgattaggtgaacgccaaaaagggcagg

SEQ ID NO: 266947 - DNA, 75 bp, synthetic construct
  source 1..75: mol_type = other DNA
gatcgcggaaggagggcagggtaaaaccgagaacgctacaaggcaggtggtgatccatcccagactgatcgattg

SEQ ID NO: 266948 - DNA, 75 bp, synthetic construct
  source 1..75: mol_type = other DNA
gagcgttttatggaggtgctgtttatcgtccttggcgcatcaaccgatgtaacgacgatcaccaagcaggatatt

SEQ ID NO: 266949 - DNA, 75 bp, synthetic construct
  source 1..75: mol_type = other DNA
acaaaaaggagaaagcccaaaactggacgaaggcaatttcacaggccaatgagcgctttatggaagtcatgttca

SEQ ID NO: 266950 - DNA, 75 bp, synthetic construct
  source 1..75: mol_type = other DNA
atgaggtacaaaactcttccatacacgtttcagcgaaacggcaactactacctacaaatccggctttccaatggc

SEQ ID NO: 266951 - DNA, 75 bp, synthetic construct
  source 1..75: mol_type = other DNA
cggtctcgctgctgttaggactctggggcatgctggccaccgccgcgccaaccggatggtggacatggattgcgc

SEQ ID NO: 266952 - DNA, 75 bp, synthetic construct
  source 1..75: mol_type = other DNA
tgacaccctggaacgtcgcgcattactggcggctcaggaagcgctgaatacggcaattgatgcacatgatgatgc

SEQ ID NO: 266953 - DNA, 75 bp, synthetic construct
  source 1..75: mol_type = other DNA
attatcacacatgatttatctctggccgctcaggctgatgaagttattttcatggagcagggaaaaataacggag

SEQ ID NO: 266954 - DNA, 75 bp, synthetic construct
  source 1..75: mol_type = other DNA
agcaagtgaaagaaatacgtgcgtgcaaatcaatgtcacagcgtgaaatggcgagaatgtacggcgtatcaaaag

SEQ ID NO: 266955 - DNA, 75 bp, synthetic construct
  source 1..75: mol_type = other DNA
gaagacgatttgcgttttacagacacgcctgaccatgccggttggatatacaaatgtcgaaaactatataccact

SEQ ID NO: 266956 - DNA, 75 bp, synthetic construct
  source 1..75: mol_type = other DNA
catggtgcgtttgccctcgatgtggaacgtcaggacagtgtgaaattgagatgtttgtgccatctggaaatttag

SEQ ID NO: 266957 - DNA, 75 bp, synthetic construct
  source 1..75: mol_type = other DNA
atgagtctggcagatgaagtggcagagttacgccgcagggtggcggacatggtccgtcgcggcgtggtggacgag

SEQ ID NO: 266958 - DNA, 75 bp, synthetic construct
  source 1..75: mol_type = other DNA
cttcacttccggagattgactcttctgttaaagagtgtgttaaccaagggcaatggacgctcttccgtgcagaag

SEQ ID NO: 266959 - DNA, 75 bp, synthetic construct
  source 1..75: mol_type = other DNA
cagaacctttccctctgtggttcgttggcaggtcatggtgcgggagtctggtataacacaccgattggtcagtgg

SEQ ID NO: 266960 - DNA, 75 bp, synthetic construct
  source 1..75: mol_type = other DNA
agaagcaacgattaagccgggtaatggtattgagcaggcaactcacaggatgaaattaccggaaccgccgcagga

SEQ ID NO: 266961 - DNA, 75 bp, synthetic construct
  source 1..75: mol_type = other DNA
ggcctgtattacaaccgccaccgctattatgacccgctgcaggggcgatatatcactcaggatccgattgggctg

SEQ ID NO: 266962 - DNA, 75 bp, synthetic construct
  source 1..75: mol_type = other DNA
cgtcaaggaagttaacgggagagggggggcgtgccgttggttggcttgaatccgagatcaacgcgtggattagca

SEQ ID NO: 266963 - DNA, 75 bp, synthetic construct
  source 1..75: mol_type = other DNA
atgaagtcagcgttccgatactttctttttttatggattatcacagccagcattaataatgtaaatgctgaaaat

SEQ ID NO: 266964 - DNA, 75 bp, synthetic construct
  source 1..75: mol_type = other DNA
tatagagaaatatgttcggaaattcgtagtgagactctggcgttcctgcttttttctttgtttacgggggggggg

SEQ ID NO: 266965 - DNA, 75 bp, synthetic construct
  source 1..75: mol_type = other DNA
cggatcatgaagaattctccacatataaagcagatccatcccgccccagcctgtataacatggcagctagaattt

SEQ ID NO: 266966 - DNA, 75 bp, synthetic construct
  source 1..75: mol_type = other DNA
ggaaaatcagcaacgcaatcaggacggagaagccagacgtgaacagctacgcaacgatattgcaaaagatgaatg

SEQ ID NO: 266967 - DNA, 75 bp, synthetic construct
  source 1..75: mol_type = other DNA
ctattgaaacccgtctgggtgaggcggaagaagcggtagctatcggggcacctgtcgcgcctccggcaggcgagt

SEQ ID NO: 266968 - DNA, 75 bp, synthetic construct
  source 1..75: mol_type = other DNA
agacatcaatatccaactgccaacatgctttacgtctatccttttgggtgagagcgtaacgcgatcaaccgtaaa

SEQ ID NO: 266969 - DNA, 75 bp, synthetic construct
  source 1..75: mol_type = other DNA
gtgcaatgtttagccgttgtgttcaccgcacctggactttggcttacgcatcgggtatctcaatcaacaaaaaga

SEQ ID NO: 266970 - DNA, 75 bp, synthetic construct
  source 1..75: mol_type = other DNA
gacaaaatggattttggtcagcataaatccgatgaaggcaacagccttcaagcttccagtaacctgaatattgtc

SEQ ID NO: 266971 - DNA, 75 bp, synthetic construct
  source 1..75: mol_type = other DNA
tgactctctggggtaaagtccccgcaacagaattagcaaaagcttcagctggtaagtatcaggggaatgttaccc

SEQ ID NO: 266972 - DNA, 75 bp, synthetic construct
  source 1..75: mol_type = other DNA
acaaactttcaaattacaagctatatgaaaaaagtatatttgatatagaagaaaatgcttatcatttcaaaaagt

SEQ ID NO: 266973 - DNA, 75 bp, synthetic construct
  source 1..75: mol_type = other DNA
atgtttagccattgtgttcaccgcacctggactttggcttacgcatcgggtatctcaatcaacaaaagagttttt

SEQ ID NO: 266974 - DNA, 75 bp, synthetic construct
  source 1..75: mol_type = other DNA
gtttttagtttctgctatttcttctctgtaatttttacactgttttccaactgcttgatgctgacctgcggggtc

SEQ ID NO: 266975 - DNA, 75 bp, synthetic construct
  source 1..75: mol_type = other DNA
ggcgtccatgctgctcggatttctcattcgtccaacgattcagccacaaggggctagccgtcagcaggagagcac

SEQ ID NO: 266976 - DNA, 75 bp, synthetic construct
  source 1..75: mol_type = other DNA
agccaatgcggaagtagaaacccagcgttcggtgatccgtggacgggaagactccctcaccaggctcaactttac

SEQ ID NO: 266977 - DNA, 75 bp, synthetic construct
  source 1..75: mol_type = other DNA
ggaagtgagcaataaaccgctggtcttccctgacgaactgaataaattccccgaacttatcgagtcggaaacggc

SEQ ID NO: 266978 - DNA, 75 bp, synthetic construct
  source 1..75: mol_type = other DNA
gggagagccgccagcaggagagcacggggtggccggcctggctggcgctggttcgccagaactggcgctttctgg

SEQ ID NO: 266979 - DNA, 75 bp, synthetic construct
  source 1..75: mol_type = other DNA
ctgaagggaagcatgcttcaccggctgcattttatgctgggtaaattaccctccacccttaatacaccggtaagc

SEQ ID NO: 266980 - DNA, 75 bp, synthetic construct
  source 1..75: mol_type = other DNA
ccaggggaatattgatctcgctgacctggttaaccgtctgggattgtcgtcattatttgaagaaagggatgacaa

SEQ ID NO: 266981 - DNA, 75 bp, synthetic construct
  source 1..75: mol_type = other DNA
agccgctggcgcagcttaaccgcaccaaaacggaatccgacgtccaggaagcaatgtcgcggctgtacgcggcgc

SEQ ID NO: 266982 - DNA, 75 bp, synthetic construct
  source 1..75: mol_type = other DNA
catggtgggatgtacccgtcgcacagtacaggaacacctgagtaaacgtggttacagactgcagaaatgcggaga

SEQ ID NO: 266983 - DNA, 75 bp, synthetic construct
  source 1..75: mol_type = other DNA
cgaagccgcatccgtcttttgctctctcagggggttattcacgccaaacaaactccactgagtacaaaagaactc

SEQ ID NO: 266984 - DNA, 75 bp, synthetic construct
  source 1..75: mol_type = other DNA
atcaacagcacgatacagatgcacattaacgacgatgcggcgtttcatctctaccaccgccgcaccgcggctgac

SEQ ID NO: 266985 - DNA, 75 bp, synthetic construct
  source 1..75: mol_type = other DNA
cggtgaatataaactgcacgtacgctgtgaaagtatcgcttactccgtgcagactatggtggtgaagggcggttc

SEQ ID NO: 266986 - DNA, 75 bp, synthetic construct
  source 1..75: mol_type = other DNA
ttctctacttccgtttctatcgcctcaatggtgacacgctgcgcaggatccagatccatctgctggataaatatc

SEQ ID NO: 266987 - DNA, 75 bp, synthetic construct
  source 1..75: mol_type = other DNA
ccactaacacagcatattttctttacagtcgccgccgcactgtcgacgacattgtgctgtacgaactgctaccgg

SEQ ID NO: 266988 - DNA, 75 bp, synthetic construct
  source 1..75: mol_type = other DNA
aaaacggctgaagcgggagaaacctgaacctctggcagtacctgaaagccgtaacgaatgctggtcgatggactt

SEQ ID NO: 266989 - DNA, 75 bp, synthetic construct
  source 1..75: mol_type = other DNA
ttataaattgcgcggcatccaaatctccgccgggaatgctgtctcctttgtggcgctgactaacattgagatgaa

SEQ ID NO: 266990 - DNA, 75 bp, synthetic construct
  source 1..75: mol_type = other DNA
taatactcatcttgcttataaattgcgcggcattcaaatctccgctgggaatgccgtttcctttgtggcactgac

SEQ ID NO: 266991 - DNA, 75 bp, synthetic construct
  source 1..75: mol_type = other DNA
cttacgccagggatttcataaccagattatcggtgccaatatcaccaattgtaagttcagcgacttacagggcga

SEQ ID NO: 266992 - DNA, 75 bp, synthetic construct
  source 1..75: mol_type = other DNA
tgaagggattagtatggattgcctggggctggcctcggtgcaggcgaccaccagcggcattattgatgtcaacgg

SEQ ID NO: 266993 - DNA, 75 bp, synthetic construct
  source 1..75: mol_type = other DNA
tcacaccgcgtcttgtgctgcgctacggcgcggctgttgtcggtatcgagaacaccgcttacggcaaagtgatag

SEQ ID NO: 266994 - DNA, 75 bp, synthetic construct
  source 1..75: mol_type = other DNA
gtgctggatgctctggagcaggcgttatgggcccgtcaaccgtccggcacagtccatcacagtgataaaggttct

SEQ ID NO: 266995 - DNA, 75 bp, synthetic construct
  source 1..75: mol_type = other DNA
ttatttgcatagtaaaagcaatgatgacgatgttatcaacggtgatgacacgcaaaaaaactgggagtggagccg

SEQ ID NO: 266996 - DNA, 75 bp, synthetic construct
  source 1..75: mol_type = other DNA
cacaggcacaggtttcccgcgttgccggagccgatctctgggaagagctgatggcgcgtgcaggcaaagaaggga

SEQ ID NO: 266997 - DNA, 75 bp, synthetic construct
  source 1..75: mol_type = other DNA
cagactttccgatacgttcgccatcgtcaaagcgccgggaatggagggagcggcggtgcagggatatcgttacct

SEQ ID NO: 266998 - DNA, 75 bp, synthetic construct
  source 1..75: mol_type = other DNA
ggatgtgcgcggctctgactgcaccatcaaagggctggcgatgagcggctttggcccggtaacgcagatttatat

SEQ ID NO: 266999 - DNA, 75 bp, synthetic construct
  source 1..75: mol_type = other DNA
gttcgaacttcgcaacactcggtggctcttacagcgaatccaccgactaccgccagaccgggcttagcggacgcg

SEQ ID NO: 267000 - DNA, 75 bp, synthetic construct
  source 1..75: mol_type = other DNA
gcattacgagcagagcaatatcagcatgagcgggaacgcgctggcgtcgaaccgactgagctacaccctctccgg

SEQ ID NO: 267001 - DNA, 75 bp, synthetic construct
  source 1..75: mol_type = other DNA
agatgtcgctgtttgaagtgttaatcattctcacgctgggttcagcggcgggagatgtggcgttttatgatgatg

SEQ ID NO: 267002 - DNA, 75 bp, synthetic construct
  source 1..75: mol_type = other DNA
gggatttgccgtcgtggtttcgtttgcttatgtgctggtgaacctggtagtggatttgctctatttgtggattga

SEQ ID NO: 267003 - DNA, 75 bp, synthetic construct
  source 1..75: mol_type = other DNA
ttaccgctacgtcagcgatctgtttcatggtgacctgggaacatccattcgtaccgggcgtccggtgctggaaga

SEQ ID NO: 267004 - DNA, 75 bp, synthetic construct
  source 1..75: mol_type = other DNA
gtgaccttctggagtattttacgccaacgctgctgggggctggtgctcgtggtggcgggcgtctgtgtgataacg

SEQ ID NO: 267005 - DNA, 75 bp, synthetic construct
  source 1..75: mol_type = other DNA
ccagcggcattattgacgtcaacggcgagaaaattccggcattgcgcggtaaccggctcagcgatggtgcgccac

SEQ ID NO: 267006 - DNA, 75 bp, synthetic construct
  source 1..75: mol_type = other DNA
gcaagaagaaagaagaagttgttcgaaaaaatagaagtatttattacaaggattcaaacccattaggaaacaaaa

SEQ ID NO: 267007 - DNA, 75 bp, synthetic construct
  source 1..75: mol_type = other DNA
ttgcaacatctcatcttaccggcattaacgctggcgtttgttcacctggggattgtcgcccgccagatccgctca

SEQ ID NO: 267008 - DNA, 75 bp, synthetic construct
  source 1..75: mol_type = other DNA
tggaaaattatattaccttactcaagcattatgctcatggaagtgtacctcgtcaggttggtgatttcgatacgg

SEQ ID NO: 267009 - DNA, 75 bp, synthetic construct
  source 1..75: mol_type = other DNA
aagctattatctatcaacaacagaatgagcaatcatatccagctcaggaatttcttcttttacaactttgtatgc

SEQ ID NO: 267010 - DNA, 75 bp, synthetic construct
  source 1..75: mol_type = other DNA
gccggtgcgccgggtaaatcaggttacaacgttcctgcaatcctcgaagcattaggcggtgccgacaatattgtc

SEQ ID NO: 267011 - DNA, 75 bp, synthetic construct
  source 1..75: mol_type = other DNA
gacttcccggcactgatgggctttgccgtcgtggtttcatttgcttatgtgctggtcaacctggtggtggatttg

SEQ ID NO: 267012 - DNA, 75 bp, synthetic construct
  source 1..75: mol_type = other DNA
aggatactccatgtctggaatgtgaatcactagaaaaagaatttgaggaaattcagaatgataatgatctatcat

SEQ ID NO: 267013 - DNA, 75 bp, synthetic construct
  source 1..75: mol_type = other DNA
aagtaaaagttattgataacgttattggaaaaatttctgaattatgcccctcaaaaggtcgggttgctgatctta

SEQ ID NO: 267014 - DNA, 75 bp, synthetic construct
  source 1..75: mol_type = other DNA
gaggacattatacggaaagggatccggcagacatccggaggcgcatttcttaatctggagccggaggccgctgaa

SEQ ID NO: 267015 - DNA, 75 bp, synthetic construct
  source 1..75: mol_type = other DNA
tgggagtgctggtttattacagaatgcgctcgggtgccggggataacagcaccatcatcgcggggggcggtgtgt

SEQ ID NO: 267016 - DNA, 75 bp, synthetic construct
  source 1..75: mol_type = other DNA
tgatcgaaatggtgagcgaagggcgtgtggagatgggtattgcctttgaacctgactattgcggccatgtgcatt

SEQ ID NO: 267017 - DNA, 75 bp, synthetic construct
  source 1..75: mol_type = other DNA
gtggagcgcaaatcgtcaccgttgcgatgggatctcccaagcaggagatcttcatgcgtgactgccgtctggtgc

SEQ ID NO: 267018 - DNA, 75 bp, synthetic construct
  source 1..75: mol_type = other DNA
aacaacttgtccagtatcagaaaacagaaaccgtacacgctacaatggcaagttcggctggtgttcttgccgggt

SEQ ID NO: 267019 - DNA, 75 bp, synthetic construct
  source 1..75: mol_type = other DNA
tcgcctgttattaatgacaaatggacgttatccattagctcacaagatttcaataaagaagattggatgccatct

SEQ ID NO: 267020 - DNA, 75 bp, synthetic construct
  source 1..75: mol_type = other DNA
gctcaagtgatggagcttctggtcattccggaaggtcagcgtgtatcaccactggaacagttgaaaaaaggccct

SEQ ID NO: 267021 - DNA, 75 bp, synthetic construct
  source 1..75: mol_type = other DNA
tatgacagtaaggcaacctgccttcagacaagagatgagcaaaaattttccggcgaatgcctcccgttaaaaaaa

SEQ ID NO: 267022 - DNA, 75 bp, synthetic construct
  source 1..75: mol_type = other DNA
tgccgggtgttcaggctctgaaacaaacatcgggtgatttatttcagatggagcaaatcagaaggcagcatccgg

SEQ ID NO: 267023 - DNA, 75 bp, synthetic construct
  source 1..75: mol_type = other DNA
cgttcgtcacaccataagctttctactgcggcgcaggcgttgatggaaacgttaaaaaaaacctatgacgcataa

SEQ ID NO: 267024 - DNA, 75 bp, synthetic construct
  source 1..75: mol_type = other DNA
cctctgccaatttgcggcaatcaagacaaagagtgcgacgggcagtctcctccctcagacaggtgtgtacgatgc

SEQ ID NO: 267025 - DNA, 75 bp, synthetic construct
  source 1..75: mol_type = other DNA
gtctctatcacgctcgcgttgctaacttctgccaacttgcggcaaacaaggataaagagtgtgacgggcagcctc

SEQ ID NO: 267026 - DNA, 75 bp, synthetic construct
  source 1..75: mol_type = other DNA
catcccgtacaacgcatacttccaccagcaggccatatgcctactccaggcatgaactttgacgctgtagagaga

SEQ ID NO: 267027 - DNA, 75 bp, synthetic construct
  source 1..75: mol_type = other DNA
gcctggaataaatatctctctcagagcggaacacaattttctctggcggcctggcgttattcctctcggggttat

SEQ ID NO: 267028 - DNA, 75 bp, synthetic construct
  source 1..75: mol_type = other DNA
gcggattaaatggggaaaaaatttctgactatcatattgatagtgataagccgatgcctggtatctatgatatgg

SEQ ID NO: 267029 - DNA, 75 bp, synthetic construct
  source 1..75: mol_type = other DNA
ttcagcatttaacatcaaccttatataataacaaggtattaaacaatccttatcatttagaaccgcaaaaaatct

SEQ ID NO: 267030 - DNA, 75 bp, synthetic construct
  source 1..75: mol_type = other DNA
gcccggatggttctccattatcgttcggttatgaagttgaagatgaaagcggtaagaatgtgggcttggtaggac

SEQ ID NO: 267031 - DNA, 75 bp, synthetic construct
  source 1..75: mol_type = other DNA
cagcgaaacaacagcaggtggaaacctgacctggcgtgcgccattggcgactattggtggcagctatagccagtc

SEQ ID NO: 267032 - DNA, 75 bp, synthetic construct
  source 1..75: mol_type = other DNA
tttgtttctaactcaaccacttttgataaagacggctatcggtcgaataataccagcctcagcggtgtggcgggg

SEQ ID NO: 267033 - DNA, 75 bp, synthetic construct
  source 1..75: mol_type = other DNA
ttacgtcaaatatcttgcttacgaaatgacgcctacagaactggatgcaaaactaaacatcctgtcaggaagacc

SEQ ID NO: 267034 - DNA, 75 bp, synthetic construct
  source 1..75: mol_type = other DNA
aacacaacatgctgtcaggaaaaccggcatatcactgtgtcggaagtgtatttagctacccccctctgaaagaat

SEQ ID NO: 267035 - DNA, 75 bp, synthetic construct
  source 1..75: mol_type = other DNA
atcaaccccgtatctgtatgacttttgcacctgatgcaaggaagcggttacgtgatgttggcaggcacgttaagt

SEQ ID NO: 267036 - DNA, 75 bp, synthetic construct
  source 1..75: mol_type = other DNA
caattccaactatttccctgacaacttatctattacagatatggttttctggttcgataacaatgccaaaaaact

SEQ ID NO: 267037 - DNA, 75 bp, synthetic construct
  source 1..75: mol_type = other DNA
tatacactttttgatagctatccaaatttaatcactgaatgtaatgacttattcacggattgtatttctattgtt

SEQ ID NO: 267038 - DNA, 75 bp, synthetic construct
  source 1..75: mol_type = other DNA
tatatgctttttggattctgatgatttatgggaaacaacaaaattatcaacccaaattacttatatgcttaagca

SEQ ID NO: 267039 - DNA, 75 bp, synthetic construct
  source 1..75: mol_type = other DNA
ttctgccagaaacagttctgaacattgccgaacttatcgggttccctgctactgtcgaactgattaaggcgctag

SEQ ID NO: 267040 - DNA, 75 bp, synthetic construct
  source 1..75: mol_type = other DNA
ctttttcctttaaaacaacttgttatgaatgaacgaatgctgtccgtaccttcagaccgggggcggcaaactcac

SEQ ID NO: 267041 - DNA, 75 bp, synthetic construct
  source 1..75: mol_type = other DNA
ccgattcactggcaaagggggaggctgaaattattgtcagcaagcagcgtcagggccccacaggcacggtacggg

SEQ ID NO: 267042 - DNA, 75 bp, synthetic construct
  source 1..75: mol_type = other DNA
tgatgacggtttttcttataacgggtgaatcacagaatgtgattaccggaatttatgccagtaaagaatcctgcc

SEQ ID NO: 267043 - DNA, 75 bp, synthetic construct
  source 1..75: mol_type = other DNA
cacaatatgcagagccgcggtcgaaagtcgctatctttacgacccgctgggccgcagggtggcaaaacgggtatg

SEQ ID NO: 267044 - DNA, 75 bp, synthetic construct
  source 1..75: mol_type = other DNA
cgcgcccgtcttcttaaagatactgtaggagaagataacgccagtatcctggtgaagcatttcggcggtgaaaca

SEQ ID NO: 267045 - DNA, 75 bp, synthetic construct
  source 1..75: mol_type = other DNA
agccgtctgtgcagcagacgctggaagaccagatccagcaatccgccgcattcctgacgctgattaacgtcacgc

SEQ ID NO: 267046 - DNA, 75 bp, synthetic construct
  source 1..75: mol_type = other DNA
aagcaatttgatcagatgcatacggatatgattgctaaggcacaaagccaggctgcaaccattgagcgtgttgtt

SEQ ID NO: 267047 - DNA, 75 bp, synthetic construct
  source 1..75: mol_type = other DNA
ctttttagttatgcatcagaggaaatagatagctacataaaacaaatgaatgacaggctttctcaaatcaaggct

SEQ ID NO: 267048 - DNA, 75 bp, synthetic construct
  source 1..75: mol_type = other DNA
atttaccgcgacgaggtctataaccccgattcactggcaaagggggaggctgaaatcattgtcagcaagcagcgt

SEQ ID NO: 267049 - DNA, 75 bp, synthetic construct
  source 1..75: mol_type = other DNA
caatgatgggcactctatgttacaaaagagtttatgagttcttcgaagagcctcgcttcttttcagttgaaaatg

SEQ ID NO: 267050 - DNA, 75 bp, synthetic construct
  source 1..75: mol_type = other DNA
atcgcccaagcagtctggggaaccgcgaggcagctccacagcaactagtactgagagcctccggcaacaaactga

SEQ ID NO: 267051 - DNA, 75 bp, synthetic construct
  source 1..75: mol_type = other DNA
tggcgtgctcggtgtgtccgggcgggatgacctcgggcaacccggtgaacccgctgctgggggcgaaggtgctgc

SEQ ID NO: 267052 - DNA, 75 bp, synthetic construct
  source 1..75: mol_type = other DNA
cctggctggtgtggcactcagaaaactgggctcccccctctacatggaaagaaggtgttgccggtgtcctgatgg

SEQ ID NO: 267053 - DNA, 75 bp, synthetic construct
  source 1..75: mol_type = other DNA
tattccgcaagcctggctggcgtggcactcagaaaactgggctcccccctctacatggaaagaaggtgttgccgg

SEQ ID NO: 267054 - DNA, 75 bp, synthetic construct
  source 1..75: mol_type = other DNA
aaacagacgatcagcttatctgtgggccaaccgattaccccactaaacctcaatctttacgccaacctgctacat

SEQ ID NO: 267055 - DNA, 75 bp, synthetic construct
  source 1..75: mol_type = other DNA
gaaaccgatttcagttccaatattttcgatggtttttcttataccggcgcggcactggcgagtgacgatcgaatg

SEQ ID NO: 267056 - DNA, 75 bp, synthetic construct
  source 1..75: mol_type = other DNA
gtccggacaatggagcccaggtgagcggtaactatcagcacctgagttcagcgggtgagtgggatatttctggta

SEQ ID NO: 267057 - DNA, 75 bp, synthetic construct
  source 1..75: mol_type = other DNA
gtctggggtgatagtcagcattgctcgctccatcttcctgaacatatggaagacaccgcaaatcgactgatttta

SEQ ID NO: 267058 - DNA, 75 bp, synthetic construct
  source 1..75: mol_type = other DNA
atacttgcatcaataaaaaacgacaaactcaagtggattactcaaaaaaattcgcataagtatttattaaaacac

SEQ ID NO: 267059 - DNA, 75 bp, synthetic construct
  source 1..75: mol_type = other DNA
gccacactatatccggaaggaaacattgactttacatcgttgtatttccaggatgaaatgacaatgaaaagctac

SEQ ID NO: 267060 - DNA, 75 bp, synthetic construct
  source 1..75: mol_type = other DNA
catccggtcaatccgctgctgggtgcaaaggtccttcccggtgaaaccgacatcgccctgcccggcccgctgccg

SEQ ID NO: 267061 - DNA, 75 bp, synthetic construct
  source 1..75: mol_type = other DNA
ccttcctgacgcgccagggtcaggttcgctataaacttgctgttggtcagccgcgaacctcaatgtctcatcaaa

SEQ ID NO: 267062 - DNA, 75 bp, synthetic construct
  source 1..75: mol_type = other DNA
tttcaggtttcggccgcctcgacgcccttcctgacgcgccagggtcaggttcgctataaacttgctgttggtcag

SEQ ID NO: 267063 - DNA, 75 bp, synthetic construct
  source 1..75: mol_type = other DNA
tcaatcaatggaataatgagatctgataaaaaggtgtttgagtgtgatgaggttaactatacattactattgaat

SEQ ID NO: 267064 - DNA, 75 bp, synthetic construct
  source 1..75: mol_type = other DNA
cagtggagagacggcggaagtgatctggacagttgattactctctggcacagtataaagcgggcatcaggactga

SEQ ID NO: 267065 - DNA, 75 bp, synthetic construct
  source 1..75: mol_type = other DNA
gacgtttgaccctacgttaccgtggtctccgtacttcactacttttgtcgatgcttggtttggataaagacgcca

SEQ ID NO: 267066 - DNA, 75 bp, synthetic construct
  source 1..75: mol_type = other DNA
acatggtattggagatcatatctttaaagatggcgctcgagtttatcctggtcatactggaagttatatcgattt

SEQ ID NO: 267067 - DNA, 75 bp, synthetic construct
  source 1..75: mol_type = other DNA
tctcagggaagtcaaggtgagccttttaacctgcgtcaggcagagattatcattgggcaaggggtgacgaatgcg

SEQ ID NO: 267068 - DNA, 75 bp, synthetic construct
  source 1..75: mol_type = other DNA
gaaaaaacaggttgagcagttttttcattggctttattccgatgaaatttcgcgtcatctggttctgttgggggg

SEQ ID NO: 267069 - DNA, 75 bp, synthetic construct
  source 1..75: mol_type = other DNA
ttctgcacgtacactttttaccgggcaacaaggtgttgctggggtggagtaaggatttatcctctccctatgacg

SEQ ID NO: 267070 - DNA, 75 bp, synthetic construct
  source 1..75: mol_type = other DNA
gagaaataaaataccaatttgttttatacatgtgttttttctacttttcgtatcttatatgtttacctcatcact

SEQ ID NO: 267071 - DNA, 75 bp, synthetic construct
  source 1..75: mol_type = other DNA
gctacgtgggcattatttgcaaaacccaatggttaccgtcagcatcgcagaatttcgtaaattctatgtctctgg

SEQ ID NO: 267072 - DNA, 75 bp, synthetic construct
  source 1..75: mol_type = other DNA
tcctgtaagcacagtatgtgtatggaaattggatttgcccctatatttccagacacctgttatcacttaacccat

SEQ ID NO: 267073 - DNA, 75 bp, synthetic construct
  source 1..75: mol_type = other DNA
cattctggtatcgcgccatagtgctctctcaataattgaagtgcgtcatctctctttttctgaactgattttctt

SEQ ID NO: 267074 - DNA, 75 bp, synthetic construct
  source 1..75: mol_type = other DNA
ggtgggggtgggctttatcttcgccattccgcaaatctatcagttgccgacggtggtcacctggcggacatctta

SEQ ID NO: 267075 - DNA, 75 bp, synthetic construct
  source 1..75: mol_type = other DNA
gtctgcaactgtggggcaacgtcgcccagcagttgggggacaatggttacagcgatacccagggaatgctgggca

SEQ ID NO: 267076 - DNA, 75 bp, synthetic construct
  source 1..75: mol_type = other DNA
taggtaaagctgccattgaaaaggaaagagaactggcgaggaggcttgaagcatctggaacaaacactgttgagg

SEQ ID NO: 267077 - DNA, 75 bp, synthetic construct
  source 1..75: mol_type = other DNA
gattaatgtgatctcggaaaattcggcgttgcctgtgaatcacggattgggcttctccgttcacattaaagcctc

SEQ ID NO: 267078 - DNA, 75 bp, synthetic construct
  source 1..75: mol_type = other DNA
ggcgatgccgtggtggaagtgattgacgcagtcatcgacctggccccgttgccacaggctgcacgttacgcgctc

SEQ ID NO: 267079 - DNA, 75 bp, synthetic construct
  source 1..75: mol_type = other DNA
gcagggcgtggggacgtttgtcgccgaagcaaaagcctatacaccgatgcttgaggtccataatattgctgatga

SEQ ID NO: 267080 - DNA, 75 bp, synthetic construct
  source 1..75: mol_type = other DNA
actgatttccaggaaacactcactgatatttatgctgactatgttgctaaacaccacgtagcgtatcagcgtaca

SEQ ID NO: 267081 - DNA, 75 bp, synthetic construct
  source 1..75: mol_type = other DNA
tctctgttcaacaaagaaacctctcgtttctcttctgaacacaacgttactaagcgagaacaaggtaaagaatgg

SEQ ID NO: 267082 - DNA, 75 bp, synthetic construct
  source 1..75: mol_type = other DNA
acgctattcgttacagtgttggtatggtcaatgctttccaatatgcaagccctgtagacgatgccaacgtggtgt

SEQ ID NO: 267083 - DNA, 75 bp, synthetic construct
  source 1..75: mol_type = other DNA
tttttgccactcaatagaatcactgctttttattagggtgcttcatggtattaccttcggggttatcacaacggt

SEQ ID NO: 267084 - DNA, 75 bp, synthetic construct
  source 1..75: mol_type = other DNA
gcataatgatggttgtttctggcgcgttgattggtatcgggtatggttccgtgacgccagtttttcagacgcaga

SEQ ID NO: 267085 - DNA, 75 bp, synthetic construct
  source 1..75: mol_type = other DNA
aattgctgggaatataggttcttcaattggtacagaaggatcaggagctataatccaagaacagttaaaaaatca

SEQ ID NO: 267086 - DNA, 75 bp, synthetic construct
  source 1..75: mol_type = other DNA
atgctgagcggtgtccttgtgcgccatttgaacgggtcgtttagtatgaaagaaaaattatggacgaaagatttt

SEQ ID NO: 267087 - DNA, 75 bp, synthetic construct
  source 1..75: mol_type = other DNA
gctggtggagtctatgcgctgcaaatgaagggtaaaagcggtgtcgcgctagtagtggcaaaagaaattcattaa

SEQ ID NO: 267088 - DNA, 75 bp, synthetic construct
  source 1..75: mol_type = other DNA
gggcagcgtaatgatggtcgtttctggcgcgttgattggcatcggttacggttccgtgacgccggtttttcaaac

SEQ ID NO: 267089 - DNA, 75 bp, synthetic construct
  source 1..75: mol_type = other DNA
ggctgaagaggctggcggcaaacttaccctgattgcacatgttggagccatcagtacacgtgatagccagttgct

SEQ ID NO: 267090 - DNA, 75 bp, synthetic construct
  source 1..75: mol_type = other DNA
atgtttcctattcgttttaaacgtccggcgctgctctgtatggcgatgctgacggttgttctgagcggctgcggg

SEQ ID NO: 267091 - DNA, 75 bp, synthetic construct
  source 1..75: mol_type = other DNA
attacgacagtcagcaccggctggtgcactacacgcggacacaatatgcagagccgctggtcgaaagtcgctatc

SEQ ID NO: 267092 - DNA, 75 bp, synthetic construct
  source 1..75: mol_type = other DNA
tactgaaaaggcgttaaatatatattggggacagtatctgaatgaatcattgcttattaaaaatgtacagaactc

SEQ ID NO: 267093 - DNA, 75 bp, synthetic construct
  source 1..75: mol_type = other DNA
gagaccaatcttattcaattaagagacgcaaggctgggcgacaatattgctgcaggtcctaacgatcttattatt

SEQ ID NO: 267094 - DNA, 75 bp, synthetic construct
  source 1..75: mol_type = other DNA
accgttttctgtcagggtgtggggttccagtactcgacaaaacgtttttgaggttggaacgtctgctgcgtatct

SEQ ID NO: 267095 - DNA, 75 bp, synthetic construct
  source 1..75: mol_type = other DNA
tttgatagcaccggtaattctctcgtgtgggcgttgggttcatcagtcggcgtaagtaagatgctatcgctaaaa

SEQ ID NO: 267096 - DNA, 75 bp, synthetic construct
  source 1..75: mol_type = other DNA
taacagggaagcgagaaggccacggcaaagccgtttttccataggctccgcccccctgacaagcatcacgaaatc

SEQ ID NO: 267097 - DNA, 75 bp, synthetic construct
  source 1..75: mol_type = other DNA
gatccttcaactcagcaaaagttcgatttattcaacaaagccgtattcagccttactgacaggagtattactgaa

SEQ ID NO: 267098 - DNA, 75 bp, synthetic construct
  source 1..75: mol_type = other DNA
tatttccaaaaggtgaatgcagatgctatgcatggcaaattttggtccaccgctgcagatacatcaggagacgtg

SEQ ID NO: 267099 - DNA, 75 bp, synthetic construct
  source 1..75: mol_type = other DNA
tcttcgggaccttatgttgtgcccaagctgccgaaaactgtggtgtcgaaagttttgtgcttatctctacggata

SEQ ID NO: 267100 - DNA, 75 bp, synthetic construct
  source 1..75: mol_type = other DNA
ctgtatgaagagttgttgattggcgataacgtctcaataacacagcatccacggattaagacagctaatgaagtc

SEQ ID NO: 267101 - DNA, 75 bp, synthetic construct
  source 1..75: mol_type = other DNA
gtgcgctctcctgttcctgcctttcggtttaccggtgtcactccgctgttatggccgcgtttatctcattccacg

SEQ ID NO: 267102 - DNA, 75 bp, synthetic construct
  source 1..75: mol_type = other DNA
aagcgcaacttatctgccagcaaaagggattccgcgccgcctccaatacgccagttgcgagtaatcgtactctgg

SEQ ID NO: 267103 - DNA, 75 bp, synthetic construct
  source 1..75: mol_type = other DNA
caacaatgctgtctctgatttatcgcagccagactgggaaaccggaacattcagatttggaacgctacatcttga

SEQ ID NO: 267104 - DNA, 75 bp, synthetic construct
  source 1..75: mol_type = other DNA
atggctgatattaaccaacaaccagtttgatgagtttaataacattgcctctcagggtgacagcggttcagcact

SEQ ID NO: 267105 - DNA, 75 bp, synthetic construct
  source 1..75: mol_type = other DNA
gcatcagtggtgggggatataacttccactaaaagtgcatccatcatgttcggccatgatgaaagcaccccatcg

SEQ ID NO: 267106 - DNA, 75 bp, synthetic construct
  source 1..75: mol_type = other DNA
gttgcaaacaaaggttcaacaacatctataggtggggcatacagtattacagcaacacataacaccaaaacccac

SEQ ID NO: 267107 - DNA, 75 bp, synthetic construct
  source 1..75: mol_type = other DNA
ggattgagccacaggctgagctggtttatggttctgtctccggtaaacagtttgctggaaggaccagggaatgca

SEQ ID NO: 267108 - DNA, 75 bp, synthetic construct
  source 1..75: mol_type = other DNA
gtacgtagcggtcagggattttactgctgggatgaatcgcggaagcagtacatccagcagcgtcgggaacatcaa

SEQ ID NO: 267109 - DNA, 75 bp, synthetic construct
  source 1..75: mol_type = other DNA
cctgtcatcggccatatgaatggcgaaatcgcagtggcaggaatgcagcgcactaaggttgcgtccgtgacttta

SEQ ID NO: 267110 - DNA, 75 bp, synthetic construct
  source 1..75: mol_type = other DNA
tcctgcgacgatctcacaatgttacaaaacgcctgccagcgcctgccagcgaattactggaccaactttcacaca

SEQ ID NO: 267111 - DNA, 75 bp, synthetic construct
  source 1..75: mol_type = other DNA
gaaaaggtcagcctggaaatggcactggaagccgaacccgaagccaacctggcactcatttctgtaccgggagac

SEQ ID NO: 267112 - DNA, 75 bp, synthetic construct
  source 1..75: mol_type = other DNA
aacaacgccatttgatgaggttttttacaaaccagaaatgttaaatggttcttttgttcatattgatgactggag

SEQ ID NO: 267113 - DNA, 75 bp, synthetic construct
  source 1..75: mol_type = other DNA
ttgcatggaaggaccagggaatgcatctgtccatgaaggacaaggactacaatccgctgattggccgaactggtg

SEQ ID NO: 267114 - DNA, 75 bp, synthetic construct
  source 1..75: mol_type = other DNA
aagtaataataccccacatcccgcactctatgggcgaattatttcagccagtaatgctctcagtcatactgagag

SEQ ID NO: 267115 - DNA, 75 bp, synthetic construct
  source 1..75: mol_type = other DNA
tcgcagtaggctactttaacgtaggttcttcgattggtgcgatgattgcgccgccgctggtggtatggcaatcgt

SEQ ID NO: 267116 - DNA, 75 bp, synthetic construct
  source 1..75: mol_type = other DNA
gtaaatcaattaattactttgattatacttcagtcaacccaaagaaaaccaattacatattaatatcgccaagtg

SEQ ID NO: 267117 - DNA, 75 bp, synthetic construct
  source 1..75: mol_type = other DNA
tctccgcaggcgacactaccaatctgtatattgaggtgaaggataattacggcaacggtgtaccccagcaggagg

SEQ ID NO: 267118 - DNA, 75 bp, synthetic construct
  source 1..75: mol_type = other DNA
attccacctcaaactcatttacttgggactgctgcataccgggaattctggctggaattcttcagaacaggtaac

SEQ ID NO: 267119 - DNA, 75 bp, synthetic construct
  source 1..75: mol_type = other DNA
tgctaatttattctacagggctgcgtattagcgagctcattagccttaacaggagggatgttgacttaacagaat

SEQ ID NO: 267120 - DNA, 75 bp, synthetic construct
  source 1..75: mol_type = other DNA
ctgactgatgcgaccacaccgtccaacagaagcgatatactcacactgacgggggcatcgactgcaaccggagtc

SEQ ID NO: 267121 - DNA, 75 bp, synthetic construct
  source 1..75: mol_type = other DNA
ccaatcaacaggtgaattttatcggtgatcaaagtactgctgccctgaccctcagtgtgccttcaggtgatatca

SEQ ID NO: 267122 - DNA, 75 bp, synthetic construct
  source 1..75: mol_type = other DNA
atgatataggttcagtattgctatccattgcgcctgaaaatgcatccaaagtgatcatgagagcagaactgtctc

SEQ ID NO: 267123 - DNA, 75 bp, synthetic construct
  source 1..75: mol_type = other DNA
actacagcaggatggaactataccaatagaagcaggtgagtttaaagccaccagtactttccaggtgacctaccc

SEQ ID NO: 267124 - DNA, 75 bp, synthetic construct
  source 1..75: mol_type = other DNA
ctgagcgatggcggtaaagcgattactgatgctgaaggcaaagcgaaagtcacgctgaaaggtacaaaagcaggc

SEQ ID NO: 267125 - DNA, 75 bp, synthetic construct
  source 1..75: mol_type = other DNA
tcgactatcgccgccaccaacagtgatttaagtaccttaaaggcaacggttgaggatggcagtggtaacctgatc

SEQ ID NO: 267126 - DNA, 75 bp, synthetic construct
  source 1..75: mol_type = other DNA
aagctgatttttattcaatggtatattggtcttctaattccgcaggcgcaggccaacaatacattgtatccctgg

SEQ ID NO: 267127 - DNA, 75 bp, synthetic construct
  source 1..75: mol_type = other DNA
ggaaaaccgcagcgataaactcccctacctcgcctattcatggatagaaaatgaggtgatgcttccaattagtag

SEQ ID NO: 267128 - DNA, 75 bp, synthetic construct
  source 1..75: mol_type = other DNA
tgattcagagctacagaatgaattactgtcaaagttaccagaacttccaagtgatataaattgtatattcatccg

SEQ ID NO: 267129 - DNA, 75 bp, synthetic construct
  source 1..75: mol_type = other DNA
ttcttcaggctgcaaggaagcgcctaatgggatggattgatcgagcctttataaatactccaagggctggaagta

SEQ ID NO: 267130 - DNA, 75 bp, synthetic construct
  source 1..75: mol_type = other DNA
aaggcaacccgttgtcccattcatcactgacacaactttttactcgtctaaggagtgcatatccggactacttgc

SEQ ID NO: 267131 - DNA, 75 bp, synthetic construct
  source 1..75: mol_type = other DNA
tatatcgacctcatcggtaagttcgttcaccatgataacgagtacaccgcgaccttcgccggccttggaaccaga

SEQ ID NO: 267132 - DNA, 75 bp, synthetic construct
  source 1..75: mol_type = other DNA
cactgctaaagagttttgcgagggtgtgggacttaaagctgatgaatcccctaatgattttggtaaaaatcatta

SEQ ID NO: 267133 - DNA, 75 bp, synthetic construct
  source 1..75: mol_type = other DNA
aatggttggaaaaacagggtgagcagcatggatttcgcttaataccacaagaggcagatgaattcgcacaatggg

SEQ ID NO: 267134 - DNA, 75 bp, synthetic construct
  source 1..75: mol_type = other DNA
cgccaagagcgtgaagtttaaatatccgcgtcagcgtaaaacggtcgtcgccgatggtgtgggtcagggttataa

SEQ ID NO: 267135 - DNA, 75 bp, synthetic construct
  source 1..75: mol_type = other DNA
gttatactagcagtatcatcacaaaaacagcgactcagatcatcatgttaactggcgtacgcacgcaagaattgc

SEQ ID NO: 267136 - DNA, 75 bp, synthetic construct
  source 1..75: mol_type = other DNA
tggatggcgtgcttgttgattcggaaccggtgtggcgagaagtggagtgcgaatactacctgcgcaattacggct

SEQ ID NO: 267137 - DNA, 75 bp, synthetic construct
  source 1..75: mol_type = other DNA
gaggagtccggcctgtattacaaccgccaccgctattatgacccgctgcaggggaggtatatcactcaggatccg

SEQ ID NO: 267138 - DNA, 75 bp, synthetic construct
  source 1..75: mol_type = other DNA
ggcgaatgaaatgggctacttacatcccggggcatcctgacgctaatgatgggtggataattcctggtgcgtcgt

SEQ ID NO: 267139 - DNA, 75 bp, synthetic construct
  source 1..75: mol_type = other DNA
tcgaattgttcattaaaaatccgcttgataacggacttactcgtggcgaacaaatggaactggcacgaattgcac

SEQ ID NO: 267140 - DNA, 75 bp, synthetic construct
  source 1..75: mol_type = other DNA
tttgtttggcgatgaaaaggcatttcggaaacagtttattcatagtgaaagcgacacagatgaactgaagcagcg

SEQ ID NO: 267141 - DNA, 75 bp, synthetic construct
  source 1..75: mol_type = other DNA
ctttaccgcgaaaactgacaacggacgtgtggtagatggtgaagcttgtaaacgtctgttcaacttgtctgcaat

SEQ ID NO: 267142 - DNA, 75 bp, synthetic construct
  source 1..75: mol_type = other DNA
gcaaaaagtgatggatctcaactcaccccggatcaaccggacacagctggtcgagtcgattaatatggcgaaatt

SEQ ID NO: 267143 - DNA, 75 bp, synthetic construct
  source 1..75: mol_type = other DNA
atggttatgaaacatgagggagcgaaagaatcgggcggagccttacatatgagattccgccagattaaggggagt

SEQ ID NO: 267144 - DNA, 75 bp, synthetic construct
  source 1..75: mol_type = other DNA
gttgtgatagacgatggatcaagtcctgctgcaatagttcctgatggggttaagttggtacgccatgagcaatca

SEQ ID NO: 267145 - DNA, 75 bp, synthetic construct
  source 1..75: mol_type = other DNA
gatgaactacagacggcaccggcagacgttgagctttaccgcgttcctgacgtgaagatgaatgtctacttccgg

SEQ ID NO: 267146 - DNA, 75 bp, synthetic construct
  source 1..75: mol_type = other DNA
tttttttgcattggcgatcaaagtattttggagtaatcataaatcactgctttttaaaactcttgatggagatat

SEQ ID NO: 267147 - DNA, 75 bp, synthetic construct
  source 1..75: mol_type = other DNA
aaggctgacgatagcatgacctttgccaataagatttccggcaatggtacaataagtatcgacagtgggacagtg

SEQ ID NO: 267148 - DNA, 75 bp, synthetic construct
  source 1..75: mol_type = other DNA
accgcccagactcgcgcaatgatcgacaaagccctcgcgctggacgaaaacgaaattaccgccctgatgctgctg

SEQ ID NO: 267149 - DNA, 75 bp, synthetic construct
  source 1..75: mol_type = other DNA
gacagttctgctgatgctggcagtgagccgacattaaaatcagaagaagcaactggctccggtaaaccatctgac

SEQ ID NO: 267150 - DNA, 75 bp, synthetic construct
  source 1..75: mol_type = other DNA
aatgtcgccagactgcctctggatgattcatcattcgaagggtttgactatggtgaatttgaaattcgctggaac

SEQ ID NO: 267151 - DNA, 75 bp, synthetic construct
  source 1..75: mol_type = other DNA
aaataaaagctattgttaaacttattgaaacctggagtaagcctgatttcacttgggattctttatgcgtggctt

SEQ ID NO: 267152 - DNA, 75 bp, synthetic construct
  source 1..75: mol_type = other DNA
ttgcagaacgtttgtcactggtgttccttcgagttgctcatccagaaatttgtgtgtcctcgctaagttcaatgc

SEQ ID NO: 267153 - DNA, 75 bp, synthetic construct
  source 1..75: mol_type = other DNA
caccgatcacgttcctgattgataagattctgtgggtgtctgacaacatcggcaacctgaccaacaaggcactgg

SEQ ID NO: 267154 - DNA, 75 bp, synthetic construct
  source 1..75: mol_type = other DNA
ccggtgacgctggccagcagttcggcaaggcgctggccgcaggcattgattttgtgctggggccgattcagttcc

SEQ ID NO: 267155 - DNA, 75 bp, synthetic construct
  source 1..75: mol_type = other DNA
gaaggcatcaaatccgggctggaaccgcttagcgaagctctgagccgcctttatgaacgcatggggccgctgaaa

SEQ ID NO: 267156 - DNA, 75 bp, synthetic construct
  source 1..75: mol_type = other DNA
aattctgcgggcagctcgcgttacatttaataccacaccatttgccatcattagcgttctggcgctgatcgcttg

SEQ ID NO: 267157 - DNA, 75 bp, synthetic construct
  source 1..75: mol_type = other DNA
aaaagttggagcggccgaactggttgagattatgagtcttgtggttggtcacgaagatgacgcctcccctatcga

SEQ ID NO: 267158 - DNA, 75 bp, synthetic construct
  source 1..75: mol_type = other DNA
ttcaggcattgcaggataaaatccgcgctaatccacaaaacagcgaacaatgggcgttactgggcgagtactatc

SEQ ID NO: 267159 - DNA, 75 bp, synthetic construct
  source 1..75: mol_type = other DNA
gatattgtgagtgagtacatggaatcgccgcaggcaaggaacatggtcaattataagcaggttgaggccatgcta

SEQ ID NO: 267160 - DNA, 75 bp, synthetic construct
  source 1..75: mol_type = other DNA
ctttgatagtttgcgcaatcaacgtaaaaatactattgatagtaaaggatttggtataggtaaactgtcaagaga

SEQ ID NO: 267161 - DNA, 75 bp, synthetic construct
  source 1..75: mol_type = other DNA
cgaattttcaaatgttttgtactccttagtacatcaaaatggtcttaattttgaaaacgaaaagggacttcaaaa

SEQ ID NO: 267162 - DNA, 75 bp, synthetic construct
  source 1..75: mol_type = other DNA
ccagcctgtttgcccgcatgaacgcatctgccgttctggccagcacccgtggcctgcctgcggtggctaccggca

SEQ ID NO: 267163 - DNA, 75 bp, synthetic construct
  source 1..75: mol_type = other DNA
ggccacttggcagcgtcgctggtgcagcttccggttctatcgctgcgatgggtgcaacgctgcgcggtatgggcg

SEQ ID NO: 267164 - DNA, 75 bp, synthetic construct
  source 1..75: mol_type = other DNA
cggacgcgggcggattgtctgccaggataagcccgcgcggagttatatctttccagtatcgctaccgattcaacg

SEQ ID NO: 267165 - DNA, 75 bp, synthetic construct
  source 1..75: mol_type = other DNA
cttaacctctgtatactcattcgtcgtcagcacgaccgagggcgcaaccatgacggcaagcgtcactgacgctaa

SEQ ID NO: 267166 - DNA, 75 bp, synthetic construct
  source 1..75: mol_type = other DNA
aaattcttgtgacaagcaccgaggtcggactgaaaacagtttcagcctctctggcagataaacctactgaagtca

SEQ ID NO: 267167 - DNA, 75 bp, synthetic construct
  source 1..75: mol_type = other DNA
atatacgaccaatcacgacggcaatttttacgcaagctttaccgctacaaaagccggggtttatcaagtgacggc

SEQ ID NO: 267168 - DNA, 75 bp, synthetic construct
  source 1..75: mol_type = other DNA
ttctccacgagcgatatcagcatctctggtaatctgtccatgacaggcaatcccgacaaagacaataaattcgag

SEQ ID NO: 267169 - DNA, 75 bp, synthetic construct
  source 1..75: mol_type = other DNA
catgtcacgctgaaaggtaaaaaagcgggcacgcatacggttaccgcaacgctgggtaataacaataccagtgat

SEQ ID NO: 267170 - DNA, 75 bp, synthetic construct
  source 1..75: mol_type = other DNA
ggcaatgcgatagccaacactgaggtaacatttactctgccggaagatgtgagggcgaacttcacgctgagcgat

SEQ ID NO: 267171 - DNA, 75 bp, synthetic construct
  source 1..75: mol_type = other DNA
aagaacgtactggcaaaacacaccgtctgggtaaaaccggaaggcacggcatccctgaatgtgccgctggataaa

SEQ ID NO: 267172 - DNA, 75 bp, synthetic construct
  source 1..75: mol_type = other DNA
ctgcgtaatgcacaactgtccatgcagggacatgccactgaacatgccatttatcgggatggtggttttgcgtgt

SEQ ID NO: 267173 - DNA, 75 bp, synthetic construct
  source 1..75: mol_type = other DNA
aatggacacaatcagtctttcaataaaattgctgcaactgattcaggcgcagtaataaccaatacgtcgccccaa

SEQ ID NO: 267174 - DNA, 75 bp, synthetic construct
  source 1..75: mol_type = other DNA
atccgatcaaagtttctgaagggatggaatttgtgcaatctgaaccgccccgggaatcctggagactaaactccc

SEQ ID NO: 267175 - DNA, 75 bp, synthetic construct
  source 1..75: mol_type = other DNA
ctgtatccgggaaactggctgaggtcgtggggcagtatgtgaaaaaaggtgatcagatttatttcgagggaatgc

SEQ ID NO: 267176 - DNA, 75 bp, synthetic construct
  source 1..75: mol_type = other DNA
catgccgaaaatcggggatgatttctgtttttattacgaacttaggaaaatataacgaaggtgaactggttggtg

SEQ ID NO: 267177 - DNA, 75 bp, synthetic construct
  source 1..75: mol_type = other DNA
gctgcacggcgtagccttgcaggcagccgttatgatctggtggatcgcaacaacaacatcgttctggaatatcgc

SEQ ID NO: 267178 - DNA, 75 bp, synthetic construct
  source 1..75: mol_type = other DNA
agatgcaaaacgcttacatgaactggaacccaatgcaggcacagaggcccgcatttggttagcaaaaaaatgcct

SEQ ID NO: 267179 - DNA, 75 bp, synthetic construct
  source 1..75: mol_type = other DNA
acccttgaaaataacggtattgccatcactcaggccaatggcgaagcgcatgtcaccctcaaaggtaaaaaagcg

SEQ ID NO: 267180 - DNA, 75 bp, synthetic construct
  source 1..75: mol_type = other DNA
tgcttaacggcaatggctatacgacgacagtcaatattgcgcccgatgccagcaacgcgcaggtcaccctgaaca

SEQ ID NO: 267181 - DNA, 75 bp, synthetic construct
  source 1..75: mol_type = other DNA
tgggcctgcttggtacgactctatacctcaaacaaagaaatctcaggatcttgttttaaatgcgaaacaaaaagc

SEQ ID NO: 267182 - DNA, 75 bp, synthetic construct
  source 1..75: mol_type = other DNA
cggtgatggttgcggtttgtgccattctgggctcactggcgatggggatgatgtttgactcgcgtaatatcccgg

SEQ ID NO: 267183 - DNA, 75 bp, synthetic construct
  source 1..75: mol_type = other DNA
tgtattgacgccattatacctgcttataacgaaggcccgtgtctggcgcagtcactggataatctgctgcgtaac

SEQ ID NO: 267184 - DNA, 75 bp, synthetic construct
  source 1..75: mol_type = other DNA
tggctaatactggtgccagcgacaacaaaactgtgcattttattggcgacacagcggcggcaaaaattatcgagt

SEQ ID NO: 267185 - DNA, 75 bp, synthetic construct
  source 1..75: mol_type = other DNA
agctttatcgctgatccatcgactatcgccgccaccaacagtgatttaagtaccttaaaggcaacggttgaggat

SEQ ID NO: 267186 - DNA, 75 bp, synthetic construct
  source 1..75: mol_type = other DNA
gccagtacttcacagcaaatcgggtctctgctcgccgaagatatgaacagcgagcaagcagcaaatatggcgcgt

SEQ ID NO: 267187 - DNA, 75 bp, synthetic construct
  source 1..75: mol_type = other DNA
gggaaagtaataccaatgagtctggcatcgcgcaggccactctcgcaggcgttgcctttggtgagcagacggtca

SEQ ID NO: 267188 - DNA, 75 bp, synthetic construct
  source 1..75: mol_type = other DNA
gcaaccatgacggcaagcgtcactgacgctaacggcaacccggtagaaggcataaaagttaatttccgcggaacc

SEQ ID NO: 267189 - DNA, 75 bp, synthetic construct
  source 1..75: mol_type = other DNA
gcaacagtgaaagatccttttgataacgtggttaaaaatctgtctgtagtcttccgcacctcccccgcagacacg

SEQ ID NO: 267190 - DNA, 75 bp, synthetic construct
  source 1..75: mol_type = other DNA
acatttacccaaggaaaaacattaaccgtaaaggtaattatgtcggtaataatggtcagcttaatatccgcaccg

SEQ ID NO: 267191 - DNA, 75 bp, synthetic construct
  source 1..75: mol_type = other DNA
aaacattttttcctgatagaaggtgatgcgttacgagagttgaagaacgaaaactctttaagagtttctgtgaaa

SEQ ID NO: 267192 - DNA, 75 bp, synthetic construct
  source 1..75: mol_type = other DNA
ttatgtcggtaataatggtcagcttaatatccgcaccgtattaggtgatgataaatcggctacggacagacttat

SEQ ID NO: 267193 - DNA, 75 bp, synthetic construct
  source 1..75: mol_type = other DNA
gctcgcgggtatcaggagagagcaatcttttattgccctccgaacagcagtgagtgaccaggaaacaaatgtaga

SEQ ID NO: 267194 - DNA, 75 bp, synthetic construct
  source 1..75: mol_type = other DNA
atttgacaagttatcagtcagtgaatgaggaggataacagctcagagggaaattcagaatcaacagaaacgccta

SEQ ID NO: 267195 - DNA, 75 bp, synthetic construct
  source 1..75: mol_type = other DNA
tggatagtattgatgttaacaaaactacaacggatgtaagtatccttaatcgaagtattatcacacctggtaata

SEQ ID NO: 267196 - DNA, 75 bp, synthetic construct
  source 1..75: mol_type = other DNA
cgatgatgcctgtcttcaggatgcgctggagcacactgcttatttcgcgaaagagtacaccaaagtcaacggcat

SEQ ID NO: 267197 - DNA, 75 bp, synthetic construct
  source 1..75: mol_type = other DNA
aagaacttaataagcgtaaattagcgcttgaattattacgtgattggataagacaatttaatccagcaagttata

SEQ ID NO: 267198 - DNA, 75 bp, synthetic construct
  source 1..75: mol_type = other DNA
cgacgctaatttgaatagtgacggaactttctatttcagacgttgctggacgggagcaaaacagtttcgtcttat

SEQ ID NO: 267199 - DNA, 75 bp, synthetic construct
  source 1..75: mol_type = other DNA
gtgataacagatgtctggaaatataggggcaaatccacgccgattgaaatcaaagataataatccgataagtaat

SEQ ID NO: 267200 - DNA, 75 bp, synthetic construct
  source 1..75: mol_type = other DNA
tgcatcaaatatcgattctcaagccaaaatagcactattaagtgttgaactttcaagtgctttggatagtattga

SEQ ID NO: 267201 - DNA, 75 bp, synthetic construct
  source 1..75: mol_type = other DNA
ctctgtcatccctattgacacttatcgctgatgcccgccatgctcaagaagataaattttataaaaagcatggca

SEQ ID NO: 267202 - DNA, 75 bp, synthetic construct
  source 1..75: mol_type = other DNA
gtttatatagttactagattcctagcaaaaagcacatatacatctgaaatatatctacaaacttttataggatgc

SEQ ID NO: 267203 - DNA, 75 bp, synthetic construct
  source 1..75: mol_type = other DNA
aagctgagggctttggtgctggcggaggcggagcctgcgcacctgctggaagtgaggctcaatcgggaggtgacg

SEQ ID NO: 267204 - DNA, 75 bp, synthetic construct
  source 1..75: mol_type = other DNA
gagatcagaaacaacacgttgagcaccttgagccttatggttttacatctgctgcacagaacggtgctgagggcg

SEQ ID NO: 267205 - DNA, 75 bp, synthetic construct
  source 1..75: mol_type = other DNA
gttgaatggctatcacattatagagatcataatcccatacccgatttttctgtacttattaatatctacggtgag

SEQ ID NO: 267206 - DNA, 75 bp, synthetic construct
  source 1..75: mol_type = other DNA
ggtatattactcaggacccgatggggttgaaagggggatggaatttatatcagtatcctttaaatccactacaac

SEQ ID NO: 267207 - DNA, 75 bp, synthetic construct
  source 1..75: mol_type = other DNA
aatatgagtctttaataaaactaccgcaatatcacctaggtaaagaatacgatagaatatcttatttctgggatg

SEQ ID NO: 267208 - DNA, 75 bp, synthetic construct
  source 1..75: mol_type = other DNA
aaaagctgttcgtgtcatggtttcgccaaccaatcctaatcatggatacgtttggcttatattacctattccacc

SEQ ID NO: 267209 - DNA, 75 bp, synthetic construct
  source 1..75: mol_type = other DNA
tgaccatatacacgaccagtattagaatcaatagggtaacctttcctataacggacagtaccatctcttttctta

SEQ ID NO: 267210 - DNA, 75 bp, synthetic construct
  source 1..75: mol_type = other DNA
attttctagggagtttaaaatatcaccattaaaattcaggaggcaaagatattttgattgctcttatctcatgcc

SEQ ID NO: 267211 - DNA, 75 bp, synthetic construct
  source 1..75: mol_type = other DNA
acggggaacctggctcgttcggcctgtaccgtgacctgcaaatggacgtggctggctcatgaaaatcgctgtgat

SEQ ID NO: 267212 - DNA, 75 bp, synthetic construct
  source 1..75: mol_type = other DNA
aagcgcaaggaagagcgagagcgactggatgaagagaaaaaacgcacgcagctgttggccagttatctggctgat

SEQ ID NO: 267213 - DNA, 75 bp, synthetic construct
  source 1..75: mol_type = other DNA
gccaccgccaacaaccgggataaaggcgttaacgagctttcttccgcgcttaaacgtcgtttcaacacggtcatt

SEQ ID NO: 267214 - DNA, 75 bp, synthetic construct
  source 1..75: mol_type = other DNA
gtgtggtcgctttactggtgccgcaacgtgaaattgactggcagcccaccgtgttctgggcgctggcctacagtg

SEQ ID NO: 267215 - DNA, 75 bp, synthetic construct
  source 1..75: mol_type = other DNA
tccgggcttctatctgtatttcccacagcgtcgcaatattgcaccaaagctccgcgccctgattgaccacgtcaa

SEQ ID NO: 267216 - DNA, 75 bp, synthetic construct
  source 1..75: mol_type = other DNA
acttctcagaatcgcggtgacgtcgatagcagaagaatttctttcaggtccgctaatcgcttcgtttgcagcagc

SEQ ID NO: 267217 - DNA, 75 bp, synthetic construct
  source 1..75: mol_type = other DNA
tgtcgacgcgtattttgccctcaccggaaggggtggtgacggcgttctggacgctctccgccagcggcgaactgt

SEQ ID NO: 267218 - DNA, 75 bp, synthetic construct
  source 1..75: mol_type = other DNA
ctggctttcaaaggtacgacagcgttttcagccgttgctacgttcagtgccgggatagcaggagccatcgagccg

SEQ ID NO: 267219 - DNA, 75 bp, synthetic construct
  source 1..75: mol_type = other DNA
gggattcagattatgcgaacatgcaaacgctgattaacagcgacacaaaacgtatatacgttcgctttgttgtta

SEQ ID NO: 267220 - DNA, 75 bp, synthetic construct
  source 1..75: mol_type = other DNA
ttaaacgtcttagcgatcgcctggacgccatccgccaccagcaggccgaactgtcgctggttgaagccgcagaca

SEQ ID NO: 267221 - DNA, 75 bp, synthetic construct
  source 1..75: mol_type = other DNA
cttccagatgtcagtcgatttaaaaatgctcgttttttatttgagagaataccgggtcagcctcttttttatgtt

SEQ ID NO: 267222 - DNA, 75 bp, synthetic construct
  source 1..75: mol_type = other DNA
gttcatgatgatacatcagctctatcagaattactttctgttgcaacagtgatcttacccagcaatagtggacac

SEQ ID NO: 267223 - DNA, 75 bp, synthetic construct
  source 1..75: mol_type = other DNA
gaatacccgccaaccgttatcgacagcattaatgccaaagtcacggcaaaccagaaaaccctgcaacgcgaacag

SEQ ID NO: 267224 - DNA, 75 bp, synthetic construct
  source 1..75: mol_type = other DNA
gtgcatccgatgaccgcactgggtcgtgaaatgggtctgcaagagatgaccgggttctcaaagacagcgttttaa

SEQ ID NO: 267225 - DNA, 75 bp, synthetic construct
  source 1..75: mol_type = other DNA
aatggttaatgataagggtgagcgaaaaacctataatgcggaaaataatggcagaataacaacggccatgaatta

SEQ ID NO: 267226 - DNA, 75 bp, synthetic construct
  source 1..75: mol_type = other DNA
caaactggaaatcgtgactccagcactcttagtaaccagagtgatgaaactgatattctctcaggctcgcagaac

SEQ ID NO: 267227 - DNA, 75 bp, synthetic construct
  source 1..75: mol_type = other DNA
cagcgatcaatatcgactactcaaccgcgaagattaagatctatgccggcaacgatgcccggcttaacaacggga

SEQ ID NO: 267228 - DNA, 75 bp, synthetic construct
  source 1..75: mol_type = other DNA
aatactgatacgcttggcgaagttcgcatcagggctaaaaacgcaaaaggtgaatcaagtggtgattttgttgtt

SEQ ID NO: 267229 - DNA, 75 bp, synthetic construct
  source 1..75: mol_type = other DNA
aaacagcaaattgatcacgcaagcgaaactcgacaagggattaacgattggtggtcaactggctttcaaaggtac

SEQ ID NO: 267230 - DNA, 75 bp, synthetic construct
  source 1..75: mol_type = other DNA
catcaaaattaggtggcgggcggattgatgtgcttggaagtacgtcagattatggcagcatgaattgtaccgttc

SEQ ID NO: 267231 - DNA, 75 bp, synthetic construct
  source 1..75: mol_type = other DNA
caaaacgtttttgaggttgcaacgtctgctgcgtatctgttttatgcgcaaagaacaccagcaggccagttgttt

SEQ ID NO: 267232 - DNA, 75 bp, synthetic construct
  source 1..75: mol_type = other DNA
tggctttcaaaggtacgacagcgttttcagccgttgctacgttcagtgccgggatagcaggagccatcgagccgg

SEQ ID NO: 267233 - DNA, 75 bp, synthetic construct
  source 1..75: mol_type = other DNA
aaccttttctgaccttgccacatttaacgcaggtatggcgggatctatcgagccggaaaccattgacaacaagac

SEQ ID NO: 267234 - DNA, 75 bp, synthetic construct
  source 1..75: mol_type = other DNA
gcgcggcataatctatgctggtcctaacactgattcgcttggcgaagttcgcattagggctaaaaacgcaaaagg

SEQ ID NO: 267235 - DNA, 75 bp, synthetic construct
  source 1..75: mol_type = other DNA
actacggctccccttacggaaacattgactttatcgagatctcggcgcgcggtctgccttcttcgcttactgcgg

SEQ ID NO: 267236 - DNA, 75 bp, synthetic construct
  source 1..75: mol_type = other DNA
ggctaaaatcagcaaaaggaaccgctcatctgtggttcatgaacaacgacggaagcgagcgcggcgttgtttggt

SEQ ID NO: 267237 - DNA, 75 bp, synthetic construct
  source 1..75: mol_type = other DNA
gtcgcccgtgaaacagatgatcgcgttaccgcgctggaagaggaaaacacaacgctacgtcaaaatctggcaaca

SEQ ID NO: 267238 - DNA, 75 bp, synthetic construct
  source 1..75: mol_type = other DNA
atttagtaattagaaaacagtcagggactggcaatcgttttgttttaaagaacgcaggtaatgcagaactaccgt

SEQ ID NO: 267239 - DNA, 75 bp, synthetic construct
  source 1..75: mol_type = other DNA
agtaattacacaagcaatactcgatagcggggtaacggtaggcggcaaaacaacattttctgaccttgccacatt

SEQ ID NO: 267240 - DNA, 75 bp, synthetic construct
  source 1..75: mol_type = other DNA
gggcaggtgggacagtaatcaccacgctgatcctgacgaaggatagttatcctgtcactatcggcgcaggtgggg

SEQ ID NO: 267241 - DNA, 75 bp, synthetic construct
  source 1..75: mol_type = other DNA
aatgttggacgggatattctggctaaaacaagcaaacaggaggttattcattatcttggtttgggagctacaaac

SEQ ID NO: 267242 - DNA, 75 bp, synthetic construct
  source 1..75: mol_type = other DNA
agcctcatatgttaccataatgattttcatgtggttagactggccccctgaatctccagacaaccaatatcactt

SEQ ID NO: 267243 - DNA, 75 bp, synthetic construct
  source 1..75: mol_type = other DNA
agttgaaggttcaatgggggcgtaacagttcttgccgtgcaaattatcgacttccagaggagaaagaagcaactg

SEQ ID NO: 267244 - DNA, 75 bp, synthetic construct
  source 1..75: mol_type = other DNA
ggctcttcaaaaccttggtttgggagatacaagcggatacgtgggacgccggctgagtacccgggctttcgcgtc

SEQ ID NO: 267245 - DNA, 75 bp, synthetic construct
  source 1..75: mol_type = other DNA
cgcaaaaggataagttcggcgcgggtaagaacggttttacccgtggtaacccccagacaggcacgcctgccaccg

SEQ ID NO: 267246 - DNA, 75 bp, synthetic construct
  source 1..75: mol_type = other DNA
ctggagattgcccgttatgccctgaagtacggtctgaccatgccggggaaacaccgccgcaccccgccgtacatg

SEQ ID NO: 267247 - DNA, 75 bp, synthetic construct
  source 1..75: mol_type = other DNA
attgagattgcgcgctatgcgctgcatttcggcctgtcgatgccggaaaatcattcccgcaccacaccttacatg

SEQ ID NO: 267248 - DNA, 75 bp, synthetic construct
  source 1..75: mol_type = other DNA
taatcctccattaagtatgaaagtgccttatactatggtgcaaaaactatttggtgaagatagtggcttgagacc

SEQ ID NO: 267249 - DNA, 75 bp, synthetic construct
  source 1..75: mol_type = other DNA
atgcgtttctcttttttgatctttgtggttgtccggctttgcctgacggattgaaccgccccgggaatcctggag

SEQ ID NO: 267250 - DNA, 75 bp, synthetic construct
  source 1..75: mol_type = other DNA
cgattcaactctatttaaaactctggaacgagcgaacttaacctataacaacgttaaagattaccctacaataag

SEQ ID NO: 267251 - DNA, 75 bp, synthetic construct
  source 1..75: mol_type = other DNA
ctataaaaacaataatagaatttattgaacttggtgtggcgtgtgaaaaaataaaagtaatttttaacagggtaa

SEQ ID NO: 267252 - DNA, 75 bp, synthetic construct
  source 1..75: mol_type = other DNA
agtttaacaattgcgtagtacgcggtacggtctatgcaaatgctggttcatttactggtgcaatcaatgcaacta

SEQ ID NO: 267253 - DNA, 75 bp, synthetic construct
  source 1..75: mol_type = other DNA
atgaatgtttcaagcctaaatattgattctgcaatttcgggacgctacactgtctccgcaccttataaagcgggt

SEQ ID NO: 267254 - DNA, 75 bp, synthetic construct
  source 1..75: mol_type = other DNA
aaatacgcacccggcgcatcaaccaggacagcacaaagcgcgtccccatgttcgtaaaactgcgcaccgcccgct

SEQ ID NO: 267255 - DNA, 75 bp, synthetic construct
  source 1..75: mol_type = other DNA
cgtagcgtggctgatgctggtgatgattggctttaacctctttttctcaccgctggtaccgttgaccgatgcact

SEQ ID NO: 267256 - DNA, 75 bp, synthetic construct
  source 1..75: mol_type = other DNA
tgcggctgcgacagaaatggcgtctttaattctggctaaactggataaggaaaagccgcccgaagagggagggaa

SEQ ID NO: 267257 - DNA, 75 bp, synthetic construct
  source 1..75: mol_type = other DNA
ctggcactgctgacacttctctttgctgtcgccttctgggcgggggcgcacgtagcgtggctgatgctggtgatg

SEQ ID NO: 267258 - DNA, 75 bp, synthetic construct
  source 1..75: mol_type = other DNA
ctgcaatttcgggacggtacactgtccaagcaccttataaagcgggtgccgggattggcgtcctggaaatgttat

SEQ ID NO: 267259 - DNA, 75 bp, synthetic construct
  source 1..75: mol_type = other DNA
ctttattgctgaagagggcctgactgggagcaccggttttgcagtattaacgccaaaacatgaacactttagttc

SEQ ID NO: 267260 - DNA, 75 bp, synthetic construct
  source 1..75: mol_type = other DNA
aaaaacctgaaggcgagctacacgttaacggaaccgcagcttaccgcaccgctgaaaaaaggtcaggttgtcggg

SEQ ID NO: 267261 - DNA, 75 bp, synthetic construct
  source 1..75: mol_type = other DNA
aatttaataacgttatagttaggggtacagtctatgcatctggtggttcatttacgggggccattacggcaacca

SEQ ID NO: 267262 - DNA, 75 bp, synthetic construct
  source 1..75: mol_type = other DNA
cctgccgccatcaacgcgccgtttgtactggcgtgtagaggatgatttgacactggtgcggatgaatacgcagca

SEQ ID NO: 267263 - DNA, 75 bp, synthetic construct
  source 1..75: mol_type = other DNA
tcggagattgaagccggggcgttgtatatggacggtattttgcaggagatcctgccgccatcaacgcgccgtttg

SEQ ID NO: 267264 - DNA, 75 bp, synthetic construct
  source 1..75: mol_type = other DNA
acaactccgcgacaccctcctccccaaactcctctccggagaaattacgttaccggacgccgaggaaatagccaa

SEQ ID NO: 267265 - DNA, 75 bp, synthetic construct
  source 1..75: mol_type = other DNA
gtacttctgagaccactcaatcccccttgccgcttggcctgccgattcagcaaacctccctttccaccttcgcag

SEQ ID NO: 267266 - DNA, 75 bp, synthetic construct
  source 1..75: mol_type = other DNA
atgctgtttaccttcgcattcatcccccaaaatgtatttaggtacatgctttttgacctttcttcctcatgggga

SEQ ID NO: 267267 - DNA, 75 bp, synthetic construct
  source 1..75: mol_type = other DNA
taggtacatgcttttttgacctttcttcctcatggggaattgatgaccgtgatgacctgctgcgcacaattcacc

SEQ ID NO: 267268 - DNA, 75 bp, synthetic construct
  source 1..75: mol_type = other DNA
agtataacttttccgtttctaccccattaaagtatccggcgacattagatattgatcgggtgaatgtaaatttta

SEQ ID NO: 267269 - DNA, 75 bp, synthetic construct
  source 1..75: mol_type = other DNA
tcatggttgtttctgcaatttttctctcagggtgtcagtctaatggtgctgaatatgcggcagatgtgtacgaca

SEQ ID NO: 267270 - DNA, 75 bp, synthetic construct
  source 1..75: mol_type = other DNA
taccaactctgttgccgcaaatcgttacgggagcttttactggaactgctcgccacgcaaaacaaccttcaggaa

SEQ ID NO: 267271 - DNA, 75 bp, synthetic construct
  source 1..75: mol_type = other DNA
gcagcggataaaattgtttatcgtcaggtggtgagtaaatccggtgttgtgaatgaaaactctgtcgtttattcc

SEQ ID NO: 267272 - DNA, 75 bp, synthetic construct
  source 1..75: mol_type = other DNA
tccgtgaccctcaaatggaaatgacgttgacctggagtggtacgcagagtgactttgacgattcggccgtagcca

SEQ ID NO: 267273 - DNA, 75 bp, synthetic construct
  source 1..75: mol_type = other DNA
gctattatgacccgctgcaggggcgatatatcactcaggatccgattggactgaaggggggatggaacctgtatg

SEQ ID NO: 267274 - DNA, 75 bp, synthetic construct
  source 1..75: mol_type = other DNA
aataactggttgagcgaagaagaaagtctatggatccagtcgcgcattcatctacgggctctacgttattatagt

SEQ ID NO: 267275 - DNA, 75 bp, synthetic construct
  source 1..75: mol_type = other DNA
ggattatgtccggatgggttttttaagccgaatgggcgtacttaataactggttgagtgaagaagaaagtctatg

SEQ ID NO: 267276 - DNA, 75 bp, synthetic construct
  source 1..75: mol_type = other DNA
ttccgaagcgatggccgtcacgccaaaagcattaaaagcggtgaatgagaatgcaaatggccgcgttccggcatc

SEQ ID NO: 267277 - DNA, 75 bp, synthetic construct
  source 1..75: mol_type = other DNA
atatgatatagaaaatgtattagccatatttgaagtaaagaaaactcttaataaagatgattttatcgatgcata

SEQ ID NO: 267278 - DNA, 75 bp, synthetic construct
  source 1..75: mol_type = other DNA
caactagcgtcttgtcaaatataaaccataataaaaataaagttggagatgagctttctgatttaataatgtcaa

SEQ ID NO: 267279 - DNA, 75 bp, synthetic construct
  source 1..75: mol_type = other DNA
gggtaatattcaaaacatttatacctggtgaaaacttcaagagtaaagaggcaattgtattccctagtatcgagg

SEQ ID NO: 267280 - DNA, 75 bp, synthetic construct
  source 1..75: mol_type = other DNA
tcaaacgtctcagcgatcgtctggacgccatccgccaccagcaggccgatctgtcgctggttgaagccgcagaca

SEQ ID NO: 267281 - DNA, 75 bp, synthetic construct
  source 1..75: mol_type = other DNA
atgatgtcataaagataaaagaaatggttgccaatggatttcctcagtgtgaagttgctaaattatttggaattc

SEQ ID NO: 267282 - DNA, 75 bp, synthetic construct
  source 1..75: mol_type = other DNA
cccctgctcggtgcaaaggtccttcccggtgaaaccggcatcgccctgcccggcccgctgccgttcatcctctcc

SEQ ID NO: 267283 - DNA, 75 bp, synthetic construct
  source 1..75: mol_type = other DNA
ggaagggggtatccgcacggatgatgagcgcacccaccggtaccattacgacagtcagcaccggctggtgcacta

SEQ ID NO: 267284 - DNA, 75 bp, synthetic construct
  source 1..75: mol_type = other DNA
agtcttgagcaactatctcgtatctcgtcagagttcgaaccatcaaaccaaaagcgcaggaaaatgtctctttaa

SEQ ID NO: 267285 - DNA, 75 bp, synthetic construct
  source 1..75: mol_type = other DNA
aacggtaaggaagaacataaagaaatttataaagctaatttttacgacactagcattggcggttttggcccacac

SEQ ID NO: 267286 - DNA, 75 bp, synthetic construct
  source 1..75: mol_type = other DNA
aaaaaaccttacgaagaaaaagaaaaaagagaaagaaaaaaatacaggttccattagcatgattagaggcataaa

SEQ ID NO: 267287 - DNA, 75 bp, synthetic construct
  source 1..75: mol_type = other DNA
gtgatttattagcatattttaatacggttgaagaactcaaaaatcatccatcaatggaggaatatagaactggat

SEQ ID NO: 267288 - DNA, 75 bp, synthetic construct
  source 1..75: mol_type = other DNA
cggactggtggttgtgcacccaatgaccgcgctgggccgcgaaatgggcctgcaagagatgacagggttctcaaa

SEQ ID NO: 267289 - DNA, 75 bp, synthetic construct
  source 1..75: mol_type = other DNA
aatatgccgaactggaaaaagagaaagccacgctggaagctgaaattgctcgtctgcgtgacgttcacagccaaa

SEQ ID NO: 267290 - DNA, 75 bp, synthetic construct
  source 1..75: mol_type = other DNA
agtcgtggtttccgcccaaaaaaactgctgaatgaaatgattgagcaggcgtaccaggactttgtggcaaatgag

SEQ ID NO: 267291 - DNA, 75 bp, synthetic construct
  source 1..75: mol_type = other DNA
ccccatgcttttattatatgcagcaaaaaatataatcaacaataataaaagagtaaaattcttgtttgtcggcga

SEQ ID NO: 267292 - DNA, 75 bp, synthetic construct
  source 1..75: mol_type = other DNA
cagaggagacgttacccgacaacacccaggactggcactggacggttgtcgataaacaaacgaaagtgtcgaggt

SEQ ID NO: 267293 - DNA, 75 bp, synthetic construct
  source 1..75: mol_type = other DNA
gctgcccaacgccaaatacaaactcaccgcacaaacattacaatggctggcagaggagacgttacccgacaacac

SEQ ID NO: 267294 - DNA, 75 bp, synthetic construct
  source 1..75: mol_type = other DNA
cgcccataggtattcaggtaatgagtctctcatatgtgggtaagccggagtacccgccaaccgttatcgacagca

SEQ ID NO: 267295 - DNA, 75 bp, synthetic construct
  source 1..75: mol_type = other DNA
aattatcttcggctaagtcaattttcgatgatataaaaaacaaatatataacagatcctgaaacaaaacgaaaac

SEQ ID NO: 267296 - DNA, 75 bp, synthetic construct
  source 1..75: mol_type = other DNA
aactgccatgtacccgaaaaactacctacctccctatactatgaaatcgactcgcggtctttttttcaggggtgg

SEQ ID NO: 267297 - DNA, 75 bp, synthetic construct
  source 1..75: mol_type = other DNA
atcgtttttcttttagttgcaaagtgttttatagaaccttcattgttaatagtggcaattatatatggcgtgtca

SEQ ID NO: 267298 - DNA, 75 bp, synthetic construct
  source 1..75: mol_type = other DNA
aactcttttcatattcattgccaggatcgtcgcgggaaggctatttaccgtaaaaatttacccggtcaaagttga

SEQ ID NO: 267299 - DNA, 75 bp, synthetic construct
  source 1..75: mol_type = other DNA
ggtcaaaaacctgtcagaactggataaggaaattgccagtcttacagaggcgacatcattgaacgtagccaaagt

SEQ ID NO: 267300 - DNA, 75 bp, synthetic construct
  source 1..75: mol_type = other DNA
cccactttgtttattaaaggctatttcacaacttattaaaagtaataaaaaaataaaatgtgtttttattggtga

SEQ ID NO: 267301 - DNA, 75 bp, synthetic construct
  source 1..75: mol_type = other DNA
gataagtcgcagctggcgggcaaactggccgaatgttgccaccttcttcgcgtactcggaggcgatccgcaaggt

SEQ ID NO: 267302 - DNA, 75 bp, synthetic construct
  source 1..75: mol_type = other DNA
aaacaagagaaagattgaaggaacttgaaaatagatataaatcattaacgagtgaaactaaagaaaaattcaatg

SEQ ID NO: 267303 - DNA, 75 bp, synthetic construct
  source 1..75: mol_type = other DNA
agtttatcaccaccgactatttgcaacagtgccgtcctgggaggcgcggccactaacgttatggcgcttgaggtt

SEQ ID NO: 267304 - DNA, 75 bp, synthetic construct
  source 1..75: mol_type = other DNA
atgaagattaagaatatagtgattattggcggtcttatttctggcatgtcgataattccattatgtcaggctgca

SEQ ID NO: 267305 - DNA, 75 bp, synthetic construct
  source 1..75: mol_type = other DNA
ctgtatgactcatccgccgctgacgctggcaagccgatcattaacctgtccaacatggacgccgacggcaagccc

SEQ ID NO: 267306 - DNA, 75 bp, synthetic construct
  source 1..75: mol_type = other DNA
atgaaagcgagtccacacaacaataatgtctggggggcgatgtataacacccgtaataatgtcaccactgatgcg

SEQ ID NO: 267307 - DNA, 75 bp, synthetic construct
  source 1..75: mol_type = other DNA
cgttcttcagctgacctatgaatacccgtttgagaaacaggaaaaagctaaaagcgcagctgataaaaaacgcat

SEQ ID NO: 267308 - DNA, 75 bp, synthetic construct
  source 1..75: mol_type = other DNA
agtggcaaagaaacgctgcctaactctcatgttgtgggtgagaaccgcaacatcatcgaggtggaaaccgtcgct

SEQ ID NO: 267309 - DNA, 75 bp, synthetic construct
  source 1..75: mol_type = other DNA
ccggcggtggctgaagacacggctgccgttctggagcagaaaagcggttcagcaatgaatcagttgtttaacacg

SEQ ID NO: 267310 - DNA, 75 bp, synthetic construct
  source 1..75: mol_type = other DNA
gtcatgcagagtgcagccctggtgtcgcaggcgcagacggtcggaaaactgctggatcaggtcatccggcagaat

SEQ ID NO: 267311 - DNA, 75 bp, synthetic construct
  source 1..75: mol_type = other DNA
tggagtctgtatgcgtatccgctgaatccggtgaatggtattgatccattagggttaagtcctgcagatgtagcg

SEQ ID NO: 267312 - DNA, 63 bp, synthetic construct
  source 1..63: mol_type = other DNA
atggcccccgtgatgttgtcaggtgcatacctgcaacgtgcgggggttttctctctccagcaa

SEQ ID NO: 267313 - DNA, 75 bp, synthetic construct
  source 1..75: mol_type = other DNA
atgacgctgtgttatatcgggaaagcggctcgcaaaaacgcacagatttgtaggcatgataagacgcgccagcgt

SEQ ID NO: 267314 - DNA, 75 bp, synthetic construct
  source 1..75: mol_type = other DNA
aagttctgctgatgtgcagcgtatcaaccgggatttgagtgatgccatggaacaacaggtgctggatctgtccgc

SEQ ID NO: 267315 - DNA, 75 bp, synthetic construct
  source 1..75: mol_type = other DNA
aagcgccctggtacaggtatgtctccttatttatattggaatttaataaatgaagtttctgaaaatgattattta

SEQ ID NO: 267316 - DNA, 75 bp, synthetic construct
  source 1..75: mol_type = other DNA
ccagaatcgcaaaaatcctctgcgttttacgctctttttccgcaacagtctgaagcccataatcacctcagttaa

SEQ ID NO: 267317 - DNA, 75 bp, synthetic construct
  source 1..75: mol_type = other DNA
gggtcgcgggttcgagtcccgtccgttccgccacttattaagaagcctcgagttaacgctcgaggttttttttcg

SEQ ID NO: 267318 - DNA, 75 bp, synthetic construct
  source 1..75: mol_type = other DNA
ttatcattcaaaagagttgggtgtatttctaaaaaaaatcattcatgagaggactgtcgaaattgagagaaacgc

SEQ ID NO: 267319 - DNA, 75 bp, synthetic construct
  source 1..75: mol_type = other DNA
tgatattgatgctggactcgctttttatcgaaataaggatagtgttttagcatctttcattaataaaaaaacagg

SEQ ID NO: 267320 - DNA, 75 bp, synthetic construct
  source 1..75: mol_type = other DNA
tattaaaggtatgaaccataccgatgttgctattaattatttcagtatcaatggctatggcggacaaaatatagt

SEQ ID NO: 267321 - DNA, 75 bp, synthetic construct
  source 1..75: mol_type = other DNA
ttttaatgttgatattggtgactggagagatatctcgatttcgacgtcattcaatacaacccattacgaagataa

SEQ ID NO: 267322 - DNA, 75 bp, synthetic construct
  source 1..75: mol_type = other DNA
aacacctcgctgtacggcggcctgctgctttctggtgatgactaccattctgccgcaatgggtatcgggcaaaat

SEQ ID NO: 267323 - DNA, 75 bp, synthetic construct
  source 1..75: mol_type = other DNA
tccacaaattagcggtattgcacagaccaatgccacggtgacgatcagtcaatcaggccgcgtcatttaccagaa

SEQ ID NO: 267324 - DNA, 75 bp, synthetic construct
  source 1..75: mol_type = other DNA
ctgacgatcgcggccactggcagcccgtacgaccgggaagcgactccgcgctggctatggggatgataagctgga

SEQ ID NO: 267325 - DNA, 75 bp, synthetic construct
  source 1..75: mol_type = other DNA
tggtggaaggtggggatttgtttggtgaaggccacgttgatggtctgagagctatccacgatcccactacaccgc

SEQ ID NO: 267326 - DNA, 75 bp, synthetic construct
  source 1..75: mol_type = other DNA
caactgtttaccgtggtctggggtgagcaaagctgcattattcatctgccagaacgtctggaagacacgaccaaa

SEQ ID NO: 267327 - DNA, 75 bp, synthetic construct
  source 1..75: mol_type = other DNA
cggggctgcatttcctgtggaactaaaacggcgttcgcctggcatgctggccattatcgaactacggcagcagct

SEQ ID NO: 267328 - DNA, 75 bp, synthetic construct
  source 1..75: mol_type = other DNA
gatcgatgccagcgactggccggtcaaaggcttgccggatgtggtgctggccgataagggcgaactgaatggcac

SEQ ID NO: 267329 - DNA, 75 bp, synthetic construct
  source 1..75: mol_type = other DNA
cgacagtgccgcccacttttgattctctgctggcaaaacttatcgtctgggcgccatcgcgcgaaatggcgcttg

SEQ ID NO: 267330 - DNA, 75 bp, synthetic construct
  source 1..75: mol_type = other DNA
cctggaatccgaacacccgtaccgaggtgagcaccctctgcatcagccagttccgctacagcgcacaaatccgcc

SEQ ID NO: 267331 - DNA, 75 bp, synthetic construct
  source 1..75: mol_type = other DNA
attctaatgaatatcccggtttgttttcagcgatacagcataaacaacaaaatgttgtagagacggtttatcttg

SEQ ID NO: 267332 - DNA, 75 bp, synthetic construct
  source 1..75: mol_type = other DNA
aatcgaaagataaccgcgaaattatcgatattgctgagctgaatgcagaactgaaaactacggtcagcaaaatcg

SEQ ID NO: 267333 - DNA, 75 bp, synthetic construct
  source 1..75: mol_type = other DNA
tacagacttgatgccagtctgaccttgcccgagttcacccagatcatcattgccggcatcctctaccacaacaac

SEQ ID NO: 267334 - DNA, 75 bp, synthetic construct
  source 1..75: mol_type = other DNA
cgctttcagtggggggaattaataaacgtgaagcccataatgctatgcgggttgctctgatatttggcgtaacca

SEQ ID NO: 267335 - DNA, 75 bp, synthetic construct
  source 1..75: mol_type = other DNA
tctggctgataaatacaaccccggactgaatgctgccagttatgaagtttataataaattcgctattagccggag

SEQ ID NO: 267336 - DNA, 75 bp, synthetic construct
  source 1..75: mol_type = other DNA
cctctttctcagggagtttagtctccaggatttccggggcggttcacggcgcgcctggcggactgattttccaga

SEQ ID NO: 267337 - DNA, 75 bp, synthetic construct
  source 1..75: mol_type = other DNA
ttgtttcacgtaaaatacccaaatcacatttttttaaaagtaatggcatatcttctctatttataacaaaaaaga

SEQ ID NO: 267338 - DNA, 75 bp, synthetic construct
  source 1..75: mol_type = other DNA
ccaagtggggtcgtgcttaacagtattcttttcaattatgacggtcgagtatatggtagcgatgagagccgtatg

SEQ ID NO: 267339 - DNA, 75 bp, synthetic construct
  source 1..75: mol_type = other DNA
ccattgaagaactgattgcctgttcactggcagataaatactgtcccggactgaatgcagccagttatgaagttt

SEQ ID NO: 267340 - DNA, 75 bp, synthetic construct
  source 1..75: mol_type = other DNA
gaacggggcgattttgtttttattccgttaggttcgcaccatcaaagtttttatgagtttggtgccacgcgctga

SEQ ID NO: 267341 - DNA, 75 bp, synthetic construct
  source 1..75: mol_type = other DNA
tgatgcagtggtacgccgactatctggacagtctggaacggggcgggacgctgatacatggcgcatttggcaaag

SEQ ID NO: 267342 - DNA, 75 bp, synthetic construct
  source 1..75: mol_type = other DNA
gcacagccaaaccatgtccagaccgcaaaacaccgcccaaactgacagacggcgaagggctatatcttgaggtgc

SEQ ID NO: 267343 - DNA, 75 bp, synthetic construct
  source 1..75: mol_type = other DNA
tgaaccgcctggaacagagaaaaccggcgggtctgcgctacgatccgcaagcacaatcgctggtgtgcctgccca

SEQ ID NO: 267344 - DNA, 75 bp, synthetic construct
  source 1..75: mol_type = other DNA
ccatgcgtcaggctgatgatttacggacgttctcttgaggcgcaggcaaccgcgagtcttgcagcagccacaggc

SEQ ID NO: 267345 - DNA, 75 bp, synthetic construct
  source 1..75: mol_type = other DNA
actgggcatcaatatcgaaggtcagaaagaactgccgggtatgtgtgaaccgccccgggtttcctggagagtgtt

SEQ ID NO: 267346 - DNA, 75 bp, synthetic construct
  source 1..75: mol_type = other DNA
acagttactgaccctgaggcatgtgaagaatttcagacagaaggtaattactatttaggtgattgctatataact

SEQ ID NO: 267347 - DNA, 75 bp, synthetic construct
  source 1..75: mol_type = other DNA
atgaaatacagcaccaaaatactggatatggggattctgctggaaatggaatcacttttaaatactcatggtggt

SEQ ID NO: 267348 - DNA, 75 bp, synthetic construct
  source 1..75: mol_type = other DNA
ggcaaactttacccttgaaaataacggtattgccatcactcaggccaatggcgaagcgcatgtcacgctcaaagg

SEQ ID NO: 267349 - DNA, 75 bp, synthetic construct
  source 1..75: mol_type = other DNA
aaaaagtcagcgtgtatatttccactcataatagacttgaaagattgaaaagagcgatacagtctgttttgaacc

SEQ ID NO: 267350 - DNA, 75 bp, synthetic construct
  source 1..75: mol_type = other DNA
tgctggggcaaattgccaccgcagtaggaccgctggataaaccctttacgcgtaccgatctgcataagcaggcct

SEQ ID NO: 267351 - DNA, 75 bp, synthetic construct
  source 1..75: mol_type = other DNA
tgctggcgtggcagtggagtttgctgttctgcatcaccggcgccattgtctgcgcctccaaacttgcctttatgg

SEQ ID NO: 267352 - DNA, 75 bp, synthetic construct
  source 1..75: mol_type = other DNA
tatccgcatcccgtatgccacggacccggcaggcaaccgcctgcccgacccggagctgcacccggacatcaccct

SEQ ID NO: 267353 - DNA, 75 bp, synthetic construct
  source 1..75: mol_type = other DNA
caaacaacttgaaagtattgcccgcagtcgtggtctccacccaaaaaaactgctgaatgaaatgattgagcaggc

SEQ ID NO: 267354 - DNA, 75 bp, synthetic construct
  source 1..75: mol_type = other DNA
ccagaatcccggcgttatggagctggaagcgatcaacaaatggaacggcacgctgccgcaatacatgaccagtaa

SEQ ID NO: 267355 - DNA, 75 bp, synthetic construct
  source 1..75: mol_type = other DNA
caaacagcttgaaagtattgcccgtagtcgtggtctcctcccaaaaaaactgctgaatgaaatgattgagcaggc

SEQ ID NO: 267356 - DNA, 75 bp, synthetic construct
  source 1..75: mol_type = other DNA
caaacaccttgaaagtattgcccggagtcgtggtctccccccaaaaaaactgctgaatgaaatgattgagcaggc

SEQ ID NO: 267357 - DNA, 75 bp, synthetic construct
  source 1..75: mol_type = other DNA
caaacatcttgaaagtattgcccgtagtcgtggtctccgcccaaaaaaactgctgaatgaaatgattgagcaggc

SEQ ID NO: 267358 - DNA, 75 bp, synthetic construct
  source 1..75: mol_type = other DNA
agcgaaccttgatatccgcatcccgtatgccacggacccggcgggcaaccgcctgcccgacccggagctgcaccc

SEQ ID NO: 267359 - DNA, 75 bp, synthetic construct
  source 1..75: mol_type = other DNA
ccggcaccggctggtgcactacacgcggacacaatatgcagagccgctggtcgaaagtcgctatctttacgaccc

SEQ ID NO: 267360 - DNA, 75 bp, synthetic construct
  source 1..75: mol_type = other DNA
ggtatgaccgtcacggcagactgacggagaaaaccgacctcatcccggaaggggttatccgcacggatgatgagc

SEQ ID NO: 267361 - DNA, 75 bp, synthetic construct
  source 1..75: mol_type = other DNA
attttttcctgacactacttatggtggggggatatctgttattgctgtttattgtcctcgtcctttcctttagtc

SEQ ID NO: 267362 - DNA, 75 bp, synthetic construct
  source 1..75: mol_type = other DNA
taggaaaaggagaactagggaaagatacgagcataggtaaacaacatgagccatcgatttatacagtaagagttt

SEQ ID NO: 267363 - DNA, 75 bp, synthetic construct
  source 1..75: mol_type = other DNA
ttttattataaaagttaaaatacacatggctcctcataaatctatacctttaggaaaaggagaactagggaaaga

SEQ ID NO: 267364 - DNA, 75 bp, synthetic construct
  source 1..75: mol_type = other DNA
acaggcagatgcgattcgcacaaaagcccaggccgaagccgatgctattcgtttacgcggtgaagctctgcgcca

SEQ ID NO: 267365 - DNA, 75 bp, synthetic construct
  source 1..75: mol_type = other DNA
cgctcaccagcggtgagtttgcggtactgaaggcattggtcagccatccgcgtgagccgctctcccgcgataagc

SEQ ID NO: 267366 - DNA, 75 bp, synthetic construct
  source 1..75: mol_type = other DNA
agttcaaacttaacctcggtacgcgcgaaatgttccgcgaagacgagccgatgccgctcaccagcggtgagtttg

SEQ ID NO: 267367 - DNA, 75 bp, synthetic construct
  source 1..75: mol_type = other DNA
gtgtgcccgaccagagccattcagcttaccaataactttgaactgaccgtcaccaataaagccgatctctatacc

SEQ ID NO: 267368 - DNA, 75 bp, synthetic construct
  source 1..75: mol_type = other DNA
aattgctcgcctgtttataagcgtgagtttaaagaaaaatcaccggatgctttatttttatatgaagataaattg

SEQ ID NO: 267369 - DNA, 75 bp, synthetic construct
  source 1..75: mol_type = other DNA
cgcaatgatgtattagaatctgataatgcaactttgaaggaatcaattgaagttttaactactgataatgatact

SEQ ID NO: 267370 - DNA, 75 bp, synthetic construct
  source 1..75: mol_type = other DNA
tatttcccgcacagatcaattttatgttgagactataagaaattataacataataaataaaggcatttttgatgt

SEQ ID NO: 267371 - DNA, 75 bp, synthetic construct
  source 1..75: mol_type = other DNA
taaatagtcctcaaggtggttcagcattaacaaatacatatggttctttgtttacacaatcaacgggtggtttac

SEQ ID NO: 267372 - DNA, 75 bp, synthetic construct
  source 1..75: mol_type = other DNA
tgatgtttttaataaatattttgaaaatatcaataaaatccatattgacactttgttgttttttaatacatatta

SEQ ID NO: 267373 - DNA, 75 bp, synthetic construct
  source 1..75: mol_type = other DNA
attcaaggacagccaatggcaccgatggtcaggcgtacatggacaacaatggcaactggctttgcggtgcgcaaa

SEQ ID NO: 267374 - DNA, 75 bp, synthetic construct
  source 1..75: mol_type = other DNA
ataacaactaacgcctgggtttatgcaaacaggtttgctattaacagcagtaatggtatgtggattcagatgcgc

SEQ ID NO: 267375 - DNA, 75 bp, synthetic construct
  source 1..75: mol_type = other DNA
tgcaccacaaaaccgcgaaatgttgcgggcgcaagcgagcgtctgcccggaatgcaaacaacgcgcgacgctgat

SEQ ID NO: 267376 - DNA, 75 bp, synthetic construct
  source 1..75: mol_type = other DNA
tgatcaatcgcttgagatcatctcagtcatctttcattttcactatcaatgggacgaaagcgatcttaaacagcg

SEQ ID NO: 267377 - DNA, 75 bp, synthetic construct
  source 1..75: mol_type = other DNA
ttcaccaaaaggtgttgagtatcagataaagtcatctccgcttaaaagtgatgacttgcataaaaggtttgaagc

SEQ ID NO: 267378 - DNA, 75 bp, synthetic construct
  source 1..75: mol_type = other DNA
gcgtgattccgccgaatgatagccaggcgctggtagaggcgatgaatgagctctggaataacgaggaaacctcca

SEQ ID NO: 267379 - DNA, 75 bp, synthetic construct
  source 1..75: mol_type = other DNA
ccggaagttgtgcgtgagctggcgcgtatcgtgctggcatcactggaagcagagcctgttgcttatattttcaaa

SEQ ID NO: 267380 - DNA, 75 bp, synthetic construct
  source 1..75: mol_type = other DNA
atgagaagagtactctttagctgtttctgcgggttactgtggagttccagtggatgggcagctgaccctttggga

SEQ ID NO: 267381 - DNA, 75 bp, synthetic construct
  source 1..75: mol_type = other DNA
cggctggagggatgtcctccgggttcagttgcgattttatttacgggaacgccggcatccgataccaacctgctg

SEQ ID NO: 267382 - DNA, 75 bp, synthetic construct
  source 1..75: mol_type = other DNA
atctaaatcacttacaattaaagatgtgcataatgacatcaataaagaaagtaacagtgggatattttgcactac

SEQ ID NO: 267383 - DNA, 75 bp, synthetic construct
  source 1..75: mol_type = other DNA
tgtgatattgctgatgggcagcattggtgaatttgcctctttcaccctcgaagagagactcatgcttatccgcga

SEQ ID NO: 267384 - DNA, 75 bp, synthetic construct
  source 1..75: mol_type = other DNA
gtttggttattgcactggagtatcacgcaatgcgggtggcgagttaagcgaaagtgaatgtcgaacaattgacga

SEQ ID NO: 267385 - DNA, 75 bp, synthetic construct
  source 1..75: mol_type = other DNA
atgatattctgagaatctcgtcttttctgaatcgtcaggcatacagtgagtcttttcgtataaataaaattgaaa

SEQ ID NO: 267386 - DNA, 75 bp, synthetic construct
  source 1..75: mol_type = other DNA
gcgaagtcggtagccaagcggtaaaaaacatacattacttgattagtaatgataaaaatttacaatttgccaatt

SEQ ID NO: 267387 - DNA, 75 bp, synthetic construct
  source 1..75: mol_type = other DNA
gataaaatatactgggaatttacaagagaagggtctttatcaaaaattgatagtgactctggtatcattacatca

SEQ ID NO: 267388 - DNA, 75 bp, synthetic construct
  source 1..75: mol_type = other DNA
tatttttggccttgtccgtgagcgtccgatcgacattcacaaagatcccgtagcactgaacaaatatatctgcga

SEQ ID NO: 267389 - DNA, 75 bp, synthetic construct
  source 1..75: mol_type = other DNA
gcacaggtaatatttgccgttcccctatgggggaacgctatttacggaaggtacttcctggaaaaataattgact

SEQ ID NO: 267390 - DNA, 75 bp, synthetic construct
  source 1..75: mol_type = other DNA
taagaagagtgacgaagcattcgagtcagtatatgaactcattgtccagagcagtaatagttgggttgatagatt

SEQ ID NO: 267391 - DNA, 75 bp, synthetic construct
  source 1..75: mol_type = other DNA
gagaagcgtctgggaatgcggctgtgccagcgcggaagggcggggttctctctcactgacgaagggcgtgaaata

SEQ ID NO: 267392 - DNA, 75 bp, synthetic construct
  source 1..75: mol_type = other DNA
ctcggtaaccagctccgtcaggaggagtcccgcagcgtgcacatccctgagcttgcggcaccggatgtggcctca

SEQ ID NO: 267393 - DNA, 75 bp, synthetic construct
  source 1..75: mol_type = other DNA
gaagttggataaaacaaataaaatatatttcaacggaaatcttttccgacgagactccactcaaaaaataaaagc

SEQ ID NO: 267394 - DNA, 75 bp, synthetic construct
  source 1..75: mol_type = other DNA
gataagcgcattcatgaccacggcggcggcaaactttgccacgctgacagaacgggagattgctgaagcggaaca

SEQ ID NO: 267395 - DNA, 75 bp, synthetic construct
  source 1..75: mol_type = other DNA
attgggtgttagatgtaaaaatgaatgaagatgccagccggataagaagaggaaacgcagccgaaataatatctg

SEQ ID NO: 267396 - DNA, 75 bp, synthetic construct
  source 1..75: mol_type = other DNA
atatttcagtgatccctgatatacgacaacaaggaaaggttaaacataaattatctgctattttgtttctcaccg

SEQ ID NO: 267397 - DNA, 75 bp, synthetic construct
  source 1..75: mol_type = other DNA
ggatgacacggaccagcttgataatgtccggttgttgaaactgattgagcgaattggcaaagggcggttcgccca

SEQ ID NO: 267398 - DNA, 75 bp, synthetic construct
  source 1..75: mol_type = other DNA
ttactgattttgaccttaaactgctgaggatttttaaaacggtggcggagtgcgggagtttttccgccgccgaaa

SEQ ID NO: 267399 - DNA, 75 bp, synthetic construct
  source 1..75: mol_type = other DNA
aactgtgactgccaccatacctttcatcttaaaaacactcaccggtgtggtcctggtcgctcatgctgatgtgac

SEQ ID NO: 267400 - DNA, 75 bp, synthetic construct
  source 1..75: mol_type = other DNA
tttagtacgcaggagataagtcatggaagaaaagaaacacgtttgcatattgtcagtaacgtaacgcctgaactt

SEQ ID NO: 267401 - DNA, 75 bp, synthetic construct
  source 1..75: mol_type = other DNA
aacctccgggcctcggtcggtcagtccttcctgaccgacaaatacccgcagaagttctctctctcaagcggcagg

SEQ ID NO: 267402 - DNA, 75 bp, synthetic construct
  source 1..75: mol_type = other DNA
tctgcgctgctcacgaaatcctgaacaatacgttagtgatgagatcgacgtgatcccggcaacgggtaaaccacg

SEQ ID NO: 267403 - DNA, 75 bp, synthetic construct
  source 1..75: mol_type = other DNA
caactgataaaatttggcgctattggtttgaatgcaattatcttttcccccctgctgatagctgctgatacagga

SEQ ID NO: 267404 - DNA, 75 bp, synthetic construct
  source 1..75: mol_type = other DNA
attacctttgtgtcccctgaacctcaagagatgcctgatatctgcaaaactgaatcattatttaatcttgagcgt

SEQ ID NO: 267405 - DNA, 75 bp, synthetic construct
  source 1..75: mol_type = other DNA
gccattgtgttatatagcggtgaatttttctgccggataacaaccagagatggctggcacataatgattattcca

SEQ ID NO: 267406 - DNA, 75 bp, synthetic construct
  source 1..75: mol_type = other DNA
tagaattaattgtgaagaatgataatattacaaatattcaatgtttagtttttggacaaagtataccagaacaaa

SEQ ID NO: 267407 - DNA, 75 bp, synthetic construct
  source 1..75: mol_type = other DNA
taactggtctgaagaaaaagtcgcgtcagaatatataaagttatacgaaaatattctaaatagcaaaaatcataa

SEQ ID NO: 267408 - DNA, 75 bp, synthetic construct
  source 1..75: mol_type = other DNA
ctgctcttagatatgctgctggagctttcagtaggaatctttcagtaaaagtttttgcgggacacgtaaaccttg

SEQ ID NO: 267409 - DNA, 75 bp, synthetic construct
  source 1..75: mol_type = other DNA
tcgatggcaagataatgatgaggcagggcattatagttatctactaaaatatcatggggttaggattatttattg

SEQ ID NO: 267410 - DNA, 75 bp, synthetic construct
  source 1..75: mol_type = other DNA
cctgaagcatatccgcctttccggtgcgccgtcctcgttctccgtgccggtggagccggtgcttcgtgcctgtat

SEQ ID NO: 267411 - DNA, 75 bp, synthetic construct
  source 1..75: mol_type = other DNA
atgacaaacgatttatatattaacggtaaaaaggttgatagcttcggtgactggtcgccaacgactgaacatcca

SEQ ID NO: 267412 - DNA, 75 bp, synthetic construct
  source 1..75: mol_type = other DNA
ttgccacgctgacagaatgggagattgccgaagcggaacaggttacaaccatcaacgttaaaagcgctggagaat

SEQ ID NO: 267413 - DNA, 75 bp, synthetic construct
  source 1..75: mol_type = other DNA
gtggacggcccgcagagcgccgtcgtgacgggaccggcaggcgaggaaatcttctgtgatgaacatggccgcgtg

SEQ ID NO: 267414 - DNA, 75 bp, synthetic construct
  source 1..75: mol_type = other DNA
gttaggaatatttcatattcaaggtatgctgatgatattacattttctacagatgagaagaatatactttttgag

SEQ ID NO: 267415 - DNA, 75 bp, synthetic construct
  source 1..75: mol_type = other DNA
ttgtatctacaactgcttttgttgcaaaaggaaaaattggtaatagtattacagtattggctgctattattactg

SEQ ID NO: 267416 - DNA, 75 bp, synthetic construct
  source 1..75: mol_type = other DNA
tttgagtatagaatcggattttaaagtaaacccatttagtattctttctattgtgaatttaatgatatttgttat

SEQ ID NO: 267417 - DNA, 75 bp, synthetic construct
  source 1..75: mol_type = other DNA
gatgaaagaaacaggcacaggcaacattactgttaaggataagaactccgttatcactaatctcggaactaatct

SEQ ID NO: 267418 - DNA, 75 bp, synthetic construct
  source 1..75: mol_type = other DNA
agctggggaggcgactattcgcgagggtgggctgattacggctgaaaatacgattatcggtggcaatgccaccgg

SEQ ID NO: 267419 - DNA, 75 bp, synthetic construct
  source 1..75: mol_type = other DNA
tttaaatgaatctaaaactgtattcacgtctaaagctcataatagacatgtgacaggtgtgacattaacagttga

SEQ ID NO: 267420 - DNA, 75 bp, synthetic construct
  source 1..75: mol_type = other DNA
atgttgaagaattatcccgcctgctgaagaacgttgctctgagtgtgataaacctttttattcttgatgatgtca

SEQ ID NO: 267421 - DNA, 75 bp, synthetic construct
  source 1..75: mol_type = other DNA
tgaactggagatgtctaccgagattgcacgtctcaaacgccagctggcagaacgggatgaagagctggctatcct

SEQ ID NO: 267422 - DNA, 75 bp, synthetic construct
  source 1..75: mol_type = other DNA
cgttgaccaggctcgtgactgccgcgatgtatcggtagttgaaataaatcaagaaccttatttcgccaatattaa

SEQ ID NO: 267423 - DNA, 75 bp, synthetic construct
  source 1..75: mol_type = other DNA
ttttgcttgtggctggatgtacgaacaaacacacagataacgcattccagatggattacccggttgatgcctctc

SEQ ID NO: 267424 - DNA, 75 bp, synthetic construct
  source 1..75: mol_type = other DNA
ggcaactggcgagagctgaagcacatgggaatggccttcgagctgattagcaagtcttccctgttcggcaccaga

SEQ ID NO: 267425 - DNA, 75 bp, synthetic construct
  source 1..75: mol_type = other DNA
caagtcttccctgttcgccaccagaggcgatcagccatggctgacactcgactggatcctgaatccgaagaactg

SEQ ID NO: 267426 - DNA, 75 bp, synthetic construct
  source 1..75: mol_type = other DNA
aacctcaatattagcgatggcggtaagtttgtatcgcaaaatattacttttttgggcgataaagcaagcggtatc

SEQ ID NO: 267427 - DNA, 75 bp, synthetic construct
  source 1..75: mol_type = other DNA
ggcatccggtgtgacgccgacgcgtccgcaggataacgacacctttacccgtctgacccgtaacgacgagaaaga

SEQ ID NO: 267428 - DNA, 75 bp, synthetic construct
  source 1..75: mol_type = other DNA
cgacaaatggaacagtctgctgaaggtgaatcgctactggctggcgatccagcagggcgatgctgcactgaaagc

SEQ ID NO: 267429 - DNA, 75 bp, synthetic construct
  source 1..75: mol_type = other DNA
tgatggtgaatccgctgaagttgtggctgaagttaaaaccccactcaagcaggaacaattgtggatgtggcgcga

SEQ ID NO: 267430 - DNA, 75 bp, synthetic construct
  source 1..75: mol_type = other DNA
agttgattttaaaaaaacagttccacattacagaaatcaggaattcgattctgaaattttcctcggagcattaag

SEQ ID NO: 267431 - DNA, 75 bp, synthetic construct
  source 1..75: mol_type = other DNA
tgacactggtgaggctgaacatgaagaaattaaagctacacagacgcagtcagagcagttgtggatgtggcgtga

SEQ ID NO: 267432 - DNA, 75 bp, synthetic construct
  source 1..75: mol_type = other DNA
tgatctggcattacgacaaagacctgagtgagtactcactgggtcagggcggttactacagcccgcaggaatacc

SEQ ID NO: 267433 - DNA, 75 bp, synthetic construct
  source 1..75: mol_type = other DNA
gcgcttgatcgggccagaacggcgtcccttcaggccacgccccacgacgggcgttattttttcgactatccgcgt

SEQ ID NO: 267434 - DNA, 75 bp, synthetic construct
  source 1..75: mol_type = other DNA
agattggcaattgagttctgctctgataaaaattatatccgtagagatatcggagcatttatactcgggcaaata

SEQ ID NO: 267435 - DNA, 75 bp, synthetic construct
  source 1..75: mol_type = other DNA
tcccgtcacgcattcccttaacagcctgtttaacctgataaagctccctccgcagttcctgtacttcgttgttat

SEQ ID NO: 267436 - DNA, 75 bp, synthetic construct
  source 1..75: mol_type = other DNA
aaaattaccttacaaataaggctgttgaatttcaatttgtaaataagtttatagatgatgataaattatataaca

SEQ ID NO: 267437 - DNA, 75 bp, synthetic construct
  source 1..75: mol_type = other DNA
aacgaagcggattataaagtcagtcacagtggaatcagtctgagcggtggtggcagcttcggggataaatttcag

SEQ ID NO: 267438 - DNA, 75 bp, synthetic construct
  source 1..75: mol_type = other DNA
actttaaaaccttgttaaatgccagttttccactgggtaatctgaatctgttctcaggccttaatggcatgggaa

SEQ ID NO: 267439 - DNA, 75 bp, synthetic construct
  source 1..75: mol_type = other DNA
ctgcacaagattgtcgctgagttaggcgaaaacgcgtacgcgctgcaactcgatctcttcaataatcagcaagtc

SEQ ID NO: 267440 - DNA, 75 bp, synthetic construct
  source 1..75: mol_type = other DNA
gaacaacagtaatactaccacccaccgcatgtcgtggaacgataccctggatgaacgaaacagttggggaatgtc

SEQ ID NO: 267441 - DNA, 75 bp, synthetic construct
  source 1..75: mol_type = other DNA
caccatctcattggcagcctatcgcttctccgatcgccattttcacagctacgctaactacattgatcacaaata

SEQ ID NO: 267442 - DNA, 75 bp, synthetic construct
  source 1..75: mol_type = other DNA
tcattaatccggcatgtggtgatcactctaccgatggacaaagtatagctcaattattaaaaaatgaatttagta

SEQ ID NO: 267443 - DNA, 75 bp, synthetic construct
  source 1..75: mol_type = other DNA
aacaatttgaactgttggctattagagacactgctaatgtaatggctgaggcaggttttactccaattatagagc

SEQ ID NO: 267444 - DNA, 75 bp, synthetic construct
  source 1..75: mol_type = other DNA
ggatatgaggtagccatggtatcagttgatgatatatcaaatttaaaaaatgcgtaccctgcattcttcctagac

SEQ ID NO: 267445 - DNA, 75 bp, synthetic construct
  source 1..75: mol_type = other DNA
gattccccatttgataaatggttgcgtggagatgagaatgcgctgacggcgcaacagaaaaaaggctatcaatta

SEQ ID NO: 267446 - DNA, 75 bp, synthetic construct
  source 1..75: mol_type = other DNA
aaagcattgcgctgcgatgcagactggctgatgaatggcggcgcatttatgccgttggcagaagtgaacagcagg

SEQ ID NO: 267447 - DNA, 75 bp, synthetic construct
  source 1..75: mol_type = other DNA
gaatgacgactaccccgtgattaatagcgatcaacagccattaactattatcggcgtgatgattgaacaccgtat

SEQ ID NO: 267448 - DNA, 75 bp, synthetic construct
  source 1..75: mol_type = other DNA
agacgttttgcgcgccatacgtaacctgaaatgctccgacgacttcaccctgcgcaattttgcgcccattgattt

SEQ ID NO: 267449 - DNA, 75 bp, synthetic construct
  source 1..75: mol_type = other DNA
aatataaagcgttagacatgacagagcacgctttaaaggtggcaatcagaacgatagaccgccacgcgggggaag

SEQ ID NO: 267450 - DNA, 75 bp, synthetic construct
  source 1..75: mol_type = other DNA
ctttaggcctgttacggcgcgaatacatcattctgattgagatcgcactgtcagcgttatcgctgttgctttgcg

SEQ ID NO: 267451 - DNA, 75 bp, synthetic construct
  source 1..75: mol_type = other DNA
cgcctgctggtgggggggatgcgcgctggagtattgcagcgggcaatattcgtaacgatgccgaacatgttgtgc

SEQ ID NO: 267452 - DNA, 75 bp, synthetic construct
  source 1..75: mol_type = other DNA
agagaataacgtcattagaaataaagttgggagtaattatgcgacgggagtatattttaaattgtatgatgataa

SEQ ID NO: 267453 - DNA, 75 bp, synthetic construct
  source 1..75: mol_type = other DNA
accagttaattgagatgccggaaaacccggacagcgagcggtttattcgcttcgctgatttttgccgcgatccgc

SEQ ID NO: 267454 - DNA, 75 bp, synthetic construct
  source 1..75: mol_type = other DNA
accataaatggcggcgttaagctgaacaaccaacttaaattggagttaccgtggcgagaaaaagctgaactgcat

SEQ ID NO: 267455 - DNA, 75 bp, synthetic construct
  source 1..75: mol_type = other DNA
tgaaatttataaagttttcacactaataaaatataaaactgacaaccttcaaaggttaactggtaaagataaaga

SEQ ID NO: 267456 - DNA, 75 bp, synthetic construct
  source 1..75: mol_type = other DNA
acatcgttttgaaaagtgcagttatgtgccgaatgaagactatattcatagtaatagttggtctgaacttgctca

SEQ ID NO: 267457 - DNA, 75 bp, synthetic construct
  source 1..75: mol_type = other DNA
ggcagtccaggccgcgctgataaagcagcccgaaaaacagtggcactgatggtctggcgattgtgctgttgtgtt

SEQ ID NO: 267458 - DNA, 75 bp, synthetic construct
  source 1..75: mol_type = other DNA
cacactattacggtgaacgccgccgggaacgccgaaaacaccgttaaaaatatcgctttcaactatatcgtgagg

SEQ ID NO: 267459 - DNA, 75 bp, synthetic construct
  source 1..75: mol_type = other DNA
gacatgcgaaaatgggcggctatgacccagaaggcgcgaaacgctctacagggagtaaaaggatggagttcgctc

SEQ ID NO: 267460 - DNA, 75 bp, synthetic construct
  source 1..75: mol_type = other DNA
agttgaagctgaaagggccgcagaaatgtgtctctttcaccttcggggacatcgtgcaatgggcgaatatgagcc

SEQ ID NO: 267461 - DNA, 75 bp, synthetic construct
  source 1..75: mol_type = other DNA
tggtagtcgccattgcgttaacgatttgggtgtggatcctcctgcttttctggtggttcccggacgcgatgcagt

SEQ ID NO: 267462 - DNA, 75 bp, synthetic construct
  source 1..75: mol_type = other DNA
taatagcgccatatattaatttatttagagccgaccttagcttctctaaacttgatttaattaactttgaacatg

SEQ ID NO: 267463 - DNA, 75 bp, synthetic construct
  source 1..75: mol_type = other DNA
attctaaactagatatggtatgtgtacgagtcgataacgcctcatttgtaggtatttatgggaaaatgaaaaaag

SEQ ID NO: 267464 - DNA, 75 bp, synthetic construct
  source 1..75: mol_type = other DNA
gccactattaatcagctcgccattgagcgcgatgttttaaattgtcgggtaattattgcccgtagcttaagcgaa

SEQ ID NO: 267465 - DNA, 75 bp, synthetic construct
  source 1..75: mol_type = other DNA
tggctattcggcaagtgagttatcagatgaagcgctaaaagcccgtgtaacgtgctctaagagcgttagcgttaa

SEQ ID NO: 267466 - DNA, 75 bp, synthetic construct
  source 1..75: mol_type = other DNA
acacatttaaattcaaggggataaaaattgagtctgatgatagcatgttatcatcagagtttgtagactactcgc

SEQ ID NO: 267467 - DNA, 75 bp, synthetic construct
  source 1..75: mol_type = other DNA
gactggtttggtgacatttgttacataaattgtcaggtatctttagggcaattggttgattttaaggctaaaaat

SEQ ID NO: 267468 - DNA, 75 bp, synthetic construct
  source 1..75: mol_type = other DNA
cttctgttcccgatgaaaacaataaagataaaatggacaataatgccagtataacgataaatgttatctgggggg

SEQ ID NO: 267469 - DNA, 75 bp, synthetic construct
  source 1..75: mol_type = other DNA
cgaagatgatgaaggattagtggtttcacctcagcgttttgttctttcgccgcaaagcaaacatattgttcggtt

SEQ ID NO: 267470 - DNA, 75 bp, synthetic construct
  source 1..75: mol_type = other DNA
atggggcgaaactgccacctgttcgaaatgacgcgcaaatgggcttacagggcgattcgtcagggatggccagca

SEQ ID NO: 267471 - DNA, 75 bp, synthetic construct
  source 1..75: mol_type = other DNA
atccagttcagtagcgtggattatacggggatgcttacggtcaccgctcctgggttatttctgcaacgtctcagt

SEQ ID NO: 267472 - DNA, 75 bp, synthetic construct
  source 1..75: mol_type = other DNA
aattttccattgctcaaaaaagatggaaaaacgagctagctcgcaaaactattgattatgatccatacagacctc

SEQ ID NO: 267473 - DNA, 75 bp, synthetic construct
  source 1..75: mol_type = other DNA
cagctggcagtgctatgcgccacggaagcagttcgctgacccggttgaccggccagtctgctatgacgccaagca

SEQ ID NO: 267474 - DNA, 75 bp, synthetic construct
  source 1..75: mol_type = other DNA
ctgacagaacgggagattgccgaagcggaacaggtgacaaccatcaacgttaaaaacggagagcatacagcatga

SEQ ID NO: 267475 - DNA, 75 bp, synthetic construct
  source 1..75: mol_type = other DNA
gtgttggttttcatttatattgctcatcatctgtagttgaagaaatggacaagtatgtaaccgatacccttaaag

SEQ ID NO: 267476 - DNA, 75 bp, synthetic construct
  source 1..75: mol_type = other DNA
caccttaaaggtggcaatcagaacgatagaccgccacacgcgggaaggatacgcgaaggaacatcccgaactgat

SEQ ID NO: 267477 - DNA, 75 bp, synthetic construct
  source 1..75: mol_type = other DNA
tatcaaatacccattccttgccccagcgccccggaaaaatcccttgccatccagtctgaaatcgttcggattctg

SEQ ID NO: 267478 - DNA, 75 bp, synthetic construct
  source 1..75: mol_type = other DNA
gatatgcagccaaagccatggattcaggagatgcccgtttcgtgagaattactgacataaataaagacgggaagc

SEQ ID NO: 267479 - DNA, 75 bp, synthetic construct
  source 1..75: mol_type = other DNA
tgtaaaacctcataatattttgttaccacgatattgctatcattttttgatgaatatgcaacaacaactccatga

SEQ ID NO: 267480 - DNA, 75 bp, synthetic construct
  source 1..75: mol_type = other DNA
ggctcttgtattctgattattcccggtggtgggtatagaagaattgtttatggccgggaagggatatctgtagca

SEQ ID NO: 267481 - DNA, 75 bp, synthetic construct
  source 1..75: mol_type = other DNA
atcgagttacgtcaaaaacaatacgaatactatcgtgatttactgctcagtttcccaaaacctgaaactgtcagt

SEQ ID NO: 267482 - DNA, 75 bp, synthetic construct
  source 1..75: mol_type = other DNA
tactggcactttgcacaaagtgattttttttgggaacaggctaataaattagtatctggtggtgggcaaccacag

SEQ ID NO: 267483 - DNA, 75 bp, synthetic construct
  source 1..75: mol_type = other DNA
atggctaatattgagtattataattttatttggtgtggggattaaaaaaccttctcatatgtttgctcttttgaa

SEQ ID NO: 267484 - DNA, 75 bp, synthetic construct
  source 1..75: mol_type = other DNA
agggcttgcgattcagggcggtattagagctgctaaggaaggtgcgaataagcggggaaattcttctcggctgac

SEQ ID NO: 267485 - DNA, 75 bp, synthetic construct
  source 1..75: mol_type = other DNA
gtattttttcctcagaaaagcaaatgtatttatttagcattaagacaatatggtatatcaggaaaaactgttatc

SEQ ID NO: 267486 - DNA, 75 bp, synthetic construct
  source 1..75: mol_type = other DNA
ggaacactggttaagggtgtcgataaaaatcatcgaccgcaacgccggggaaggatatgcgaaagcacatcccga

SEQ ID NO: 267487 - DNA, 75 bp, synthetic construct
  source 1..75: mol_type = other DNA
tttgaggctcagaccggaagatatgacgtttatcttcggtcatgtattgaaagagaatattgtgttggtgatatt

SEQ ID NO: 267488 - DNA, 75 bp, synthetic construct
  source 1..75: mol_type = other DNA
taaatctacatacaggtatgctttaggaatggctgggatggggatattggcttcggttgcaacacaaattgacaa

SEQ ID NO: 267489 - DNA, 75 bp, synthetic construct
  source 1..75: mol_type = other DNA
taaggttttactccctcaagggttatggtgcggacattaaatggattccagacgttatggttcccgttgccagga

SEQ ID NO: 267490 - DNA, 75 bp, synthetic construct
  source 1..75: mol_type = other DNA
ctttaaaggaaattacaccactccatcagtcgccaatttcaaaaaaactcgcggcatgtatgaggggctttgttt

SEQ ID NO: 267491 - DNA, 75 bp, synthetic construct
  source 1..75: mol_type = other DNA
cttaatacttaatgggacgcatcatataaacaaaatatcttctttaataggaatatcaagcacatcatatttcat

SEQ ID NO: 267492 - DNA, 75 bp, synthetic construct
  source 1..75: mol_type = other DNA
aaaatccgcttgtacggtattgatgcccccgaaagtaagcaggcctttggacaaaaggctaaacaagcgttgagc

SEQ ID NO: 267493 - DNA, 75 bp, synthetic construct
  source 1..75: mol_type = other DNA
atgttaaaaagtctatggaagagtgagatagatagtttcccatttaatcatttcttttgtgattcctgtattagt

SEQ ID NO: 267494 - DNA, 75 bp, synthetic construct
  source 1..75: mol_type = other DNA
cgctggatgcgcaaaaagcaacgccgccgaagctggaaggaaaatcgccagacagcccggaaatgaaagacttcc

SEQ ID NO: 267495 - DNA, 75 bp, synthetic construct
  source 1..75: mol_type = other DNA
gcagacgaaggcaaagtgaaagaagcacaggccgtcgcagagcaactgaaaacgacccgcaacgcctatcacaag

SEQ ID NO: 267496 - DNA, 75 bp, synthetic construct
  source 1..75: mol_type = other DNA
ggcccccgccatacaacagacagcgggtgacctggcagagtggtttaaaggaggaggcattaaaaaggttgtgtc

SEQ ID NO: 267497 - DNA, 75 bp, synthetic construct
  source 1..75: mol_type = other DNA
gcggaggcattaaaaaggttgtgtcttttctgagggacacgctgtatccggcggccctgaagttcggcgaaggcg

SEQ ID NO: 267498 - DNA, 75 bp, synthetic construct
  source 1..75: mol_type = other DNA
tatcagaacggctgtaccgtgcacagggtatcgatacaaaaacattactaggacataaagtccaggcaaccaccg

SEQ ID NO: 267499 - DNA, 75 bp, synthetic construct
  source 1..75: mol_type = other DNA
tgccagatgaccgtaatgatcagcgtgacgtcctcaaaacgcttgccgcaaatggggtagaaagagcacgtttca

SEQ ID NO: 267500 - DNA, 75 bp, synthetic construct
  source 1..75: mol_type = other DNA
gcaaaaagcacagcgcattcaggcattcaaaggtgccggtaaaggtctgttccggcgcggtctggggatcgccgg

SEQ ID NO: 267501 - DNA, 75 bp, synthetic construct
  source 1..75: mol_type = other DNA
agtgaccacggtgacgaaaaacaattcagcctttaatggtgataacagccttctggatgggggacttgtctggtg

SEQ ID NO: 267502 - DNA, 75 bp, synthetic construct
  source 1..75: mol_type = other DNA
cttggctttattttgctggcggtttgcggcaccaacctgttcacctcgtcggtaatgacggtaatggcaaaaagt

SEQ ID NO: 267503 - DNA, 75 bp, synthetic construct
  source 1..75: mol_type = other DNA
ctcattcagcaaaaccacgaagcagtaaaatccattcaggctgagccgtatggacacctcacaccaccaactctc

SEQ ID NO: 267504 - DNA, 75 bp, synthetic construct
  source 1..75: mol_type = other DNA
acaatttaaatcagcattccttaaactcattcagcaaaaccacgaagcagtaaaatccattcaggctgagccgta

SEQ ID NO: 267505 - DNA, 75 bp, synthetic construct
  source 1..75: mol_type = other DNA
atgtataacgatgaacataaatataccgcctgcatgcaggccatgaatgaacaatttaaatcagcattccttaaa

SEQ ID NO: 267506 - DNA, 75 bp, synthetic construct
  source 1..75: mol_type = other DNA
gaaaaaaagaatcagtggatttgatggttctgttatcaccgagcccagctacaatgttatcgggatccccgtgca

SEQ ID NO: 267507 - DNA, 75 bp, synthetic construct
  source 1..75: mol_type = other DNA
ctgaaacataatatcaacgcatgggttaatgaagaattaagtcctccctgcttatgggattctcgttacgcatgt

SEQ ID NO: 267508 - DNA, 75 bp, synthetic construct
  source 1..75: mol_type = other DNA
gaaaaccaagcggtaattgttgagacgctgaaaacagccaacatgatgaaaaacaacaatctggcaagagcgata

SEQ ID NO: 267509 - DNA, 75 bp, synthetic construct
  source 1..75: mol_type = other DNA
atgaaagtatcagttccaggcatgccggttacacttttaaatatgagcaagaacgatatttataagatggtgagc

SEQ ID NO: 267510 - DNA, 75 bp, synthetic construct
  source 1..75: mol_type = other DNA
cgcagcattaaagaagtcggagataagcggctgcaaaccaatacagcgcgtaatggctgggatgttaacgatccg

SEQ ID NO: 267511 - DNA, 75 bp, synthetic construct
  source 1..75: mol_type = other DNA
cgaattgtgctgacggggcatccgcaggcgaacctaaaccgggaatggcaggtggtggcaagtgaactgcacggc

SEQ ID NO: 267512 - DNA, 75 bp, synthetic construct
  source 1..75: mol_type = other DNA
ggaattattcaatgaactcaaaacatgcgcaaaaaatccggatgagatggtcgcaaagggcaatatgcgctgggt

SEQ ID NO: 267513 - DNA, 75 bp, synthetic construct
  source 1..75: mol_type = other DNA
ttgttactttggtaaaaaaacaataatagataaaaaagccctttacttggaacctgggtggaatgctaacctgga

SEQ ID NO: 267514 - DNA, 75 bp, synthetic construct
  source 1..75: mol_type = other DNA
tggaacctgggtggaatgctaacctggacggtgctaccttggatggcactaacctggacggtactgacgcaatta

SEQ ID NO: 267515 - DNA, 75 bp, synthetic construct
  source 1..75: mol_type = other DNA
tatgcttttcaatatggtgaagatttacaagggatgttcaagaatgaaaaatatgaatatatgtcctgctttgta

SEQ ID NO: 267516 - DNA, 75 bp, synthetic construct
  source 1..75: mol_type = other DNA
tggtgcaggcacgttcaggctcatcgagtcaccatatatatcatctacctacacaattgatggttctcttaaata

SEQ ID NO: 267517 - DNA, 75 bp, synthetic construct
  source 1..75: mol_type = other DNA
gactacagaatttacagtagatgagaataaagacattattgttagtagagtatttaaaataaatattaactcgaa

SEQ ID NO: 267518 - DNA, 75 bp, synthetic construct
  source 1..75: mol_type = other DNA
tttctgctcgtccaacgaaccgtgagatcggacaggggatcaatttccctgaagatggtgatgcgaggcatgcga

SEQ ID NO: 267519 - DNA, 75 bp, synthetic construct
  source 1..75: mol_type = other DNA
ccattaccgggcgcaggcgggtttcgctgattgcggaggggcgacgctgtgagcgcctggctccctgccggttac

SEQ ID NO: 267520 - DNA, 75 bp, synthetic construct
  source 1..75: mol_type = other DNA
gggatttttttgaggtgatgtgtttgctaatagaggaatatgaaaaaaacattatcccattgagccaccatcccc

SEQ ID NO: 267521 - DNA, 75 bp, synthetic construct
  source 1..75: mol_type = other DNA
cctcattcaggaaatcaaaagaagagttcgcaaaacattataaagaaaagtattttaatgaatactgtccatttc

SEQ ID NO: 267522 - DNA, 75 bp, synthetic construct
  source 1..75: mol_type = other DNA
gccgctcggtgcggctgtttaatgtgatcgatgacttcaatcgtgaagcgctgtgcatcgaggtggatttctcct

SEQ ID NO: 267523 - DNA, 75 bp, synthetic construct
  source 1..75: mol_type = other DNA
aagataaaagtaaataatcataatatccccttgagtaaggaagaagaagtaactgtttctgtaatggcgccgttt

SEQ ID NO: 267524 - DNA, 75 bp, synthetic construct
  source 1..75: mol_type = other DNA
ccagaggtaataaatgaaaatataggaagtatagagagtatagataaaacggttcgagttcttaatgatgaatca

SEQ ID NO: 267525 - DNA, 75 bp, synthetic construct
  source 1..75: mol_type = other DNA
gaattaaatgataatgatgaaaaaggaaaagtcaaaatcgaaaatgatatagagaaaatagataaaattattgaa

SEQ ID NO: 267526 - DNA, 75 bp, synthetic construct
  source 1..75: mol_type = other DNA
tccaagaaaatattttccaaaatatgaagactcattataatataaatgacgatatagataatcatctaaaactta

SEQ ID NO: 267527 - DNA, 75 bp, synthetic construct
  source 1..75: mol_type = other DNA
ggtggctgaacacgaagggcatatcgccttattcacacttgatgaaatccatctgattcagcctttgcaggagac

SEQ ID NO: 267528 - DNA, 75 bp, synthetic construct
  source 1..75: mol_type = other DNA
agagagattggagaaagagtatcaacaagaaaatacacttaatgatgtagttcaaaatatcaggagttggctaaa

SEQ ID NO: 267529 - DNA, 75 bp, synthetic construct
  source 1..75: mol_type = other DNA
gtaaacgctgcgctgtccggagcaaggtccgtgcagattgccgaagaagaacaaccaaattttgatgcaatctga

SEQ ID NO: 267530 - DNA, 75 bp, synthetic construct
  source 1..75: mol_type = other DNA
agactctaacctagtcgctgcgtatttatttgataatggctcagtcaatgaaatgcagaagtcaaatgaagggat

SEQ ID NO: 267531 - DNA, 75 bp, synthetic construct
  source 1..75: mol_type = other DNA
atgtatctgctcggtaaagtggaccggtgtacggtatacctgatcaataataatatgtatcagccgcgacagcac

SEQ ID NO: 267532 - DNA, 75 bp, synthetic construct
  source 1..75: mol_type = other DNA
agatacatcaaaaatatactctgtaaaccaagatcccaatgtgggtaagccggttggtgcatatctgtttatgca

SEQ ID NO: 267533 - DNA, 75 bp, synthetic construct
  source 1..75: mol_type = other DNA
tctttgttggttaagctgggtagcttcaatcttgatgatgaaggaaaaaaatatcaacttaatggtgaagctata

SEQ ID NO: 267534 - DNA, 75 bp, synthetic construct
  source 1..75: mol_type = other DNA
accggctggctgtcaggctgtcactgatactcagccgtctggtggcaggggaaacgctgagtgtgcgtaagcttg

SEQ ID NO: 267535 - DNA, 75 bp, synthetic construct
  source 1..75: mol_type = other DNA
ggtggcagaacatgaagggcatatcgccgtattcacactggatgaaatccatctgattcagcccctgcaggagac

SEQ ID NO: 267536 - DNA, 75 bp, synthetic construct
  source 1..75: mol_type = other DNA
accgatgacggcttcacttacccgtctacgctatgcccaggaacaatgcgcaaagctggttttctactccccaga

SEQ ID NO: 267537 - DNA, 75 bp, synthetic construct
  source 1..75: mol_type = other DNA
gctcctatagcaaattacatagactggcttaatgaaattaaggttaataggaaaaataaaaatggccaatttcat

SEQ ID NO: 267538 - DNA, 75 bp, synthetic construct
  source 1..75: mol_type = other DNA
agtactcacagtgattattttgtcaaggaaatcaatagcttaatgatgcttcatggcgtttctgaaaatatgatt

SEQ ID NO: 267539 - DNA, 75 bp, synthetic construct
  source 1..75: mol_type = other DNA
tttgactgggttattgatgaagagtcattaacatcaagtgtttatgaaaaaaaactggatgttagcctcgtcata

SEQ ID NO: 267540 - DNA, 75 bp, synthetic construct
  source 1..75: mol_type = other DNA
gtgcatacattaataggtttgttcacattaggtgatgtcgcgcaaattcgaaaagggttgactgttattcagggt

SEQ ID NO: 267541 - DNA, 75 bp, synthetic construct
  source 1..75: mol_type = other DNA
tacgacttccactacccgaataatgtaaatttccgcagcgcggcgcaagttgcgtttcatatcatgctggcacac

SEQ ID NO: 267542 - DNA, 75 bp, synthetic construct
  source 1..75: mol_type = other DNA
cgcgtgaatcaatggcgcagtcctggcctgctcaacacatgcatttgcttaccgatgaattaattaaagatgaag

SEQ ID NO: 267543 - DNA, 75 bp, synthetic construct
  source 1..75: mol_type = other DNA
ggcggaacgtggagcccgttctctcagaaggctgcgccgatttctgctgctgttggcactccaaccggtcgataa

SEQ ID NO: 267544 - DNA, 75 bp, synthetic construct
  source 1..75: mol_type = other DNA
accgaacgcagaggcagtccagttttatcatagctacttcgatgagatgatcgccaacggtatcgagccgatgat

SEQ ID NO: 267545 - DNA, 75 bp, synthetic construct
  source 1..75: mol_type = other DNA
gtctgacaggatccaggcagctgtcatgcgtaaacagaacgaaatgcggcaacgttacggaatacaacaggaaag

SEQ ID NO: 267546 - DNA, 75 bp, synthetic construct
  source 1..75: mol_type = other DNA
tgagcgcctgggttacttcgactacacgtttgacgacgagaacgattctctcggcgaccgcgtgcaggcgatctg

SEQ ID NO: 267547 - DNA, 75 bp, synthetic construct
  source 1..75: mol_type = other DNA
atgaagactgacgagtacaaaatgacgtacgaagctactcttccgggcggttatgacggcgttcaggtgtcatac

SEQ ID NO: 267548 - DNA, 75 bp, synthetic construct
  source 1..75: mol_type = other DNA
gtcaacagcatcaaaccgaacacagataacacggtatctctgactgtcgcagagtacagcgacgccatctatcaa

SEQ ID NO: 267549 - DNA, 75 bp, synthetic construct
  source 1..75: mol_type = other DNA
actacaaccaggtgccgggaacgcaacagacgttcacctaccatcagggtacgccgcacaaatcatcgagcgaag

SEQ ID NO: 267550 - DNA, 75 bp, synthetic construct
  source 1..75: mol_type = other DNA
gaagatgatgagctggcgtttgagctatgtgaactggacaccgtccagatattcgaccagcccaagggcatcatt

SEQ ID NO: 267551 - DNA, 75 bp, synthetic construct
  source 1..75: mol_type = other DNA
cgtacatcaactaccgcgtgctgaacggcgctatcgtcgagcaggaagcggagaacccgaacataatcgagatag

SEQ ID NO: 267552 - DNA, 75 bp, synthetic construct
  source 1..75: mol_type = other DNA
atgtgcagcccggctatcgctctcgttggcgccagtgtcgctttaagtggcgtttcagcatacaaccagtaccag

SEQ ID NO: 267553 - DNA, 75 bp, synthetic construct
  source 1..75: mol_type = other DNA
tcgcgccgaattcgaccaatgggtcgcaaaagcgaaacagtcgccgaacaccatgtctgacatggctgcgttcga

SEQ ID NO: 267554 - DNA, 75 bp, synthetic construct
  source 1..75: mol_type = other DNA
aaactgacggcagcagatcacggcatcaccggctttaaaccggtcattctgttcaagtcgaataagattgcgata

SEQ ID NO: 267555 - DNA, 75 bp, synthetic construct
  source 1..75: mol_type = other DNA
gcagcgagaagctgctgtttaacaagctgaagcaatttgatgaaccggggctgttccacgataactaccagacgc

SEQ ID NO: 267556 - DNA, 75 bp, synthetic construct
  source 1..75: mol_type = other DNA
gtctttacaaagaacatccggcctatgattatggactggaacttcagaaatttgtgaagttccttggtgaaaatg

SEQ ID NO: 267557 - DNA, 75 bp, synthetic construct
  source 1..75: mol_type = other DNA
tcaacaatgcacagtctggtcatcggacagatcaagacggatgagaaatctaatgagattacagctatcccagaa

SEQ ID NO: 267558 - DNA, 75 bp, synthetic construct
  source 1..75: mol_type = other DNA
gattaagacggatgagaaatccaatgagattacagccattcctgaacttcttaacatgctggatattaaaggaaa

SEQ ID NO: 267559 - DNA, 75 bp, synthetic construct
  source 1..75: mol_type = other DNA
gacaaatccggaatatagatttgctgggcatacagatattttcattacctggatttataaacttacattgaattt

SEQ ID NO: 267560 - DNA, 75 bp, synthetic construct
  source 1..75: mol_type = other DNA
gcgctgactacggttaataacgctcagcgtgaagcatatggctttcaggttcaggctgaaaactacaaagctcag

SEQ ID NO: 267561 - DNA, 75 bp, synthetic construct
  source 1..75: mol_type = other DNA
gactgctccacttcaggcatacggcgcttaccagatgggcggcggaacgtggtcaccattcactcaaagcaaagc

SEQ ID NO: 267562 - DNA, 75 bp, synthetic construct
  source 1..75: mol_type = other DNA
ggctggcctggcaatcacagttggctaagttaagacagcgttttgcgtcaactataacggaaatcgttatggttg

SEQ ID NO: 267563 - DNA, 75 bp, synthetic construct
  source 1..75: mol_type = other DNA
attatctggtctggcagattttatttaaccagacggtgacgtttggtatggatccctttgccacggataacctgc

SEQ ID NO: 267564 - DNA, 75 bp, synthetic construct
  source 1..75: mol_type = other DNA
aacgcaaggcgataaagccggatatttttatccgttcggcagccgccgatctgacgcattggctcgacgggcaga

SEQ ID NO: 267565 - DNA, 75 bp, synthetic construct
  source 1..75: mol_type = other DNA
atgaccttcgccagtaaaagtttactgctggcagccgtgtttgccgccgttctgtccggggtgttgtggcacagg

SEQ ID NO: 267566 - DNA, 75 bp, synthetic construct
  source 1..75: mol_type = other DNA
ggcatacgggatatcaatgcccaggttacatataataataagagcaattaacttaatttatttgtttataatgcg

SEQ ID NO: 267567 - DNA, 75 bp, synthetic construct
  source 1..75: mol_type = other DNA
ggcgttagcaaagctggaggatgaagggaagatcgtcaaagaggcagcgacaaggagcgggattaatattgttgc

SEQ ID NO: 267568 - DNA, 75 bp, synthetic construct
  source 1..75: mol_type = other DNA
accattatgacttgaccggaaaactcacgcagagtgaagatgaggggcttatcaccctctggcattacgatgcgt

SEQ ID NO: 267569 - DNA, 75 bp, synthetic construct
  source 1..75: mol_type = other DNA
tttaatgagttctctgcgtatattctacaaatgaagttagcaattaataaacttgattctgaattaaataaactt

SEQ ID NO: 267570 - DNA, 75 bp, synthetic construct
  source 1..75: mol_type = other DNA
gaaaccgaccagcgttggcggcgattccttacaacagcccttcttctggaccggtgaattctcatggggttggct

SEQ ID NO: 267571 - DNA, 75 bp, synthetic construct
  source 1..75: mol_type = other DNA
tgcgctaatttattattactggtggggttcggagaccgctatcgcgctcgaatttgatgccaatggtagcaaaat

SEQ ID NO: 267572 - DNA, 75 bp, synthetic construct
  source 1..75: mol_type = other DNA
gtggaagccctcgccacgctgcgtccggcgtttgatccagtaaacggtacggtaacggcgggcacatcttctgca

SEQ ID NO: 267573 - DNA, 75 bp, synthetic construct
  source 1..75: mol_type = other DNA
aaattgatgaagtgaaagttgttagatatatagaaccggaaagaaaagttgatggagtgtactcccggataattt

SEQ ID NO: 267574 - DNA, 75 bp, synthetic construct
  source 1..75: mol_type = other DNA
gatataaggggactatcgacgagttggcgctacatgcgttcggcaaggtcggcaaagatggtaagctacatggcg

SEQ ID NO: 267575 - DNA, 75 bp, synthetic construct
  source 1..75: mol_type = other DNA
gcttaacagctacatgaaaggtagccgggatgttagcacagaacaactaaataacatgctgacattgcttggcgt

SEQ ID NO: 267576 - DNA, 75 bp, synthetic construct
  source 1..75: mol_type = other DNA
gaacgcgacaaccagcaaaaggcacagcagatcgcagcactgaaagctgagattgatatgttgaaaaaacagtta

SEQ ID NO: 267577 - DNA, 75 bp, synthetic construct
  source 1..75: mol_type = other DNA
catcgcggaagatgcgcactatgtctaccgccacgatgaatacggcaggctggcggagaagacggacctcatccc

SEQ ID NO: 267578 - DNA, 75 bp, synthetic construct
  source 1..75: mol_type = other DNA
agctgctgaaggctatcgcccgacgtccgggggcgctgcgttctctgtcgcacatcctgccgctggccggaattt

SEQ ID NO: 267579 - DNA, 75 bp, synthetic construct
  source 1..75: mol_type = other DNA
tgcgtagtgccattcgtgaactaattgacagcaaagctatttcaggcgcagctctggcgcgtgaaaccggcacct

SEQ ID NO: 267580 - DNA, 75 bp, synthetic construct
  source 1..75: mol_type = other DNA
tcggtaaaattgacactgacccggtaaatcctgaaaaccagattcaggtttatgtggaaaacgaagacggctctc

SEQ ID NO: 267581 - DNA, 75 bp, synthetic construct
  source 1..75: mol_type = other DNA
agatgaacgctaaagtgtttgaagatggcattatccaggtcggcagcgtcattcagatgcctgatatctacgaca

SEQ ID NO: 267582 - DNA, 75 bp, synthetic construct
  source 1..75: mol_type = other DNA
cccgctaccgcaacgatcaacacgacgaagttcgtgctgaacgacaacgaagcgctggtcgtaggtccgttcttt

SEQ ID NO: 267583 - DNA, 75 bp, synthetic construct
  source 1..75: mol_type = other DNA
ccagttttaccagccgggggaagtgatacccaccatcaacgaagggtacggtttcgacgacgtggatggccagga

SEQ ID NO: 267584 - DNA, 75 bp, synthetic construct
  source 1..75: mol_type = other DNA
acaaaagaaccagcgataaaaggttttttctctcaaagagaaaaagagagaaaactggaatatgatgcttcggca

SEQ ID NO: 267585 - DNA, 75 bp, synthetic construct
  source 1..75: mol_type = other DNA
aaagcggtcagcaccacgcagggcgggctgacgcgcagtatggagtatgacgcggcaggacgtgtcgccacgctg

SEQ ID NO: 267586 - DNA, 75 bp, synthetic construct
  source 1..75: mol_type = other DNA
ggcggtccactacggctatgacgataaaggccgtctgaccagtgagcgccagacggtgaagaacccggagacggg

SEQ ID NO: 267587 - DNA, 75 bp, synthetic construct
  source 1..75: mol_type = other DNA
tcaagtaatttggattttatagttcgagcccctgactcttcggctattggtaactcaacagttgacgtgtctgta

SEQ ID NO: 267588 - DNA, 75 bp, synthetic construct
  source 1..75: mol_type = other DNA
gttccgttctgtatttattcacaaatatctaaccctgagtcaaacacaccagaaattatgagtgtagctgcgttt

SEQ ID NO: 267589 - DNA, 75 bp, synthetic construct
  source 1..75: mol_type = other DNA
gatcgtattatgagcgaataatagagcttgattgcgtcggtcaggctttaatctctttctatgaaaaacttccag

SEQ ID NO: 267590 - DNA, 75 bp, synthetic construct
  source 1..75: mol_type = other DNA
agaatcgctgtttataaaagcgttgagagaatgaatgtaaaaaatagcgttatgctcaacaattttattgtgtat

SEQ ID NO: 267591 - DNA, 75 bp, synthetic construct
  source 1..75: mol_type = other DNA
ttgtgtctggaaaatataacaattgaaccacacggacgggcaacattatcatcttataatgctaaattctatact

SEQ ID NO: 267592 - DNA, 75 bp, synthetic construct
  source 1..75: mol_type = other DNA
tttcgttactgataccattctactcaaatatttttaactcacgattggtttatagttcatctttaacttcagttt

SEQ ID NO: 267593 - DNA, 75 bp, synthetic construct
  source 1..75: mol_type = other DNA
caactgcgcttattctcttttctgcgcagggcgttgcggaacaaaccacgcagccggttgttacttcctgtggca

SEQ ID NO: 267594 - DNA, 75 bp, synthetic construct
  source 1..75: mol_type = other DNA
ttgatgtttatgaaaatgaaccggcaaaaaatggccatcctttttttgcactttcaaattgtatagtttctgatc

SEQ ID NO: 267595 - DNA, 75 bp, synthetic construct
  source 1..75: mol_type = other DNA
tgtttccaatgtacctgattatggttcagatgcagtagctgagtatgctcttggcctgatgctggcatcaagtcg

SEQ ID NO: 267596 - DNA, 75 bp, synthetic construct
  source 1..75: mol_type = other DNA
cgtatacctgttcttgttttttggggaaatgaacgcagatggacaattgttaacggtctggaagtggtgagtgtc

SEQ ID NO: 267597 - DNA, 75 bp, synthetic construct
  source 1..75: mol_type = other DNA
atgggacccgccagcaccaatcacgagacgagctaatagcccaactggtcgctatgaaactgtcgcctaaccgtt

SEQ ID NO: 267598 - DNA, 75 bp, synthetic construct
  source 1..75: mol_type = other DNA
tcagaaaaaacaatgaaacctaaagccaccggtaaaaatgccattgctttaggaggtaacgccagagcagaaaaa

SEQ ID NO: 267599 - DNA, 75 bp, synthetic construct
  source 1..75: mol_type = other DNA
cgaaacatctactgtcggatactggaaatcagtgactgcatcgcttgtcgatactgtgttgttttctatgttttt

SEQ ID NO: 267600 - DNA, 75 bp, synthetic construct
  source 1..75: mol_type = other DNA
gttccgtgaatggaatatataatataaaggttcatctacatcagataaaattaggcctgttgaaattaatggaca

SEQ ID NO: 267601 - DNA, 75 bp, synthetic construct
  source 1..75: mol_type = other DNA
tggttttatttcaatggtcgtcatgtatatcgcatgttaccttgcagttaattcaggcaacttgtcgatagtaac

SEQ ID NO: 267602 - DNA, 75 bp, synthetic construct
  source 1..75: mol_type = other DNA
ctttcagtccgtgacctgctgcctcacatgcaggggatgcgcaaggcagatatcatcaggcgactggaaaatgaa

SEQ ID NO: 267603 - DNA, 75 bp, synthetic construct
  source 1..75: mol_type = other DNA
cattgggcaaagcctcaatttaaccgtcgtggcggaaggggtcgaaaccaaagagcaatttgagattaatcacag

SEQ ID NO: 267604 - DNA, 75 bp, synthetic construct
  source 1..75: mol_type = other DNA
gcgattagcaacaaccaattgaaactggtatatcagccgcagatctttgcggagaccggtgaactgtacggaatt

SEQ ID NO: 267605 - DNA, 75 bp, synthetic construct
  source 1..75: mol_type = other DNA
cacaaatgaaaaaatctggattaaagcgtcgattagcccggtttatgacccgctcgcccatctacaaaacctggt

SEQ ID NO: 267606 - DNA, 75 bp, synthetic construct
  source 1..75: mol_type = other DNA
gtagtggcagaaggtgtggaaacgaaagaacagtttgggatgttacgcaagatccactgccccgtgattcagggc

SEQ ID NO: 267607 - DNA, 75 bp, synthetic construct
  source 1..75: mol_type = other DNA
ttcgcagtaatcaactgcctaatcaggtgtctgatgcaatgcacgcctggggtattgacggccaccagctgacgg

SEQ ID NO: 267608 - DNA, 75 bp, synthetic construct
  source 1..75: mol_type = other DNA
tagtcagcctgccggtaacagaaatcaaaattgataaaagttttgtcgatcgttgtctgactgaaaaacgcattc

SEQ ID NO: 267609 - DNA, 75 bp, synthetic construct
  source 1..75: mol_type = other DNA
tgagtcaatgctggaagcaacagaagatgatcgtcatccggggtgcctggtatttgccggcatgaaattaccgga

SEQ ID NO: 267610 - DNA, 75 bp, synthetic construct
  source 1..75: mol_type = other DNA
cagaagatgatcgtcatccgggttgtccggtatttgccggtatggaattaccggaaggtgcagtcgttactgagt

SEQ ID NO: 267611 - DNA, 75 bp, synthetic construct
  source 1..75: mol_type = other DNA
aatatcatcacatgtggtttttcaacgttgttaccctatataaggcaacaaccattggcaatgcagcaacgattt

SEQ ID NO: 267612 - DNA, 75 bp, synthetic construct
  source 1..75: mol_type = other DNA
caaaattgacaaaagttttgtcgatcgttgtctgaccgaaaaacgcatccttgccttacttgaagccattaccag

SEQ ID NO: 267613 - DNA, 75 bp, synthetic construct
  source 1..75: mol_type = other DNA
ttgacggccaccagctgacggtagaaatcacggaaagcatgatgatggaacacgataccgaaatctttaagcgca

SEQ ID NO: 267614 - DNA, 75 bp, synthetic construct
  source 1..75: mol_type = other DNA
ctcgacgacttgcgtcacctggagtcagtggtgaccaataaaatcagcgagatagaagcagatttagaaaagctg

SEQ ID NO: 267615 - DNA, 75 bp, synthetic construct
  source 1..75: mol_type = other DNA
atgatactttggtctttgaaaaaagaaaccgatatccgccgtggaaggcattgtgttttcctgaggcatgttcac

SEQ ID NO: 267616 - DNA, 75 bp, synthetic construct
  source 1..75: mol_type = other DNA
tggtcaggtggaaaaccgcgccttatatccccgccctgaaggacggggttttacggcgcaccggataaatttggt

SEQ ID NO: 267617 - DNA, 75 bp, synthetic construct
  source 1..75: mol_type = other DNA
cggcgacccggaccagccgattattatggggcgtacctaccaccatgaaaaccgcacacccggcagcctgccggg

SEQ ID NO: 267618 - DNA, 75 bp, synthetic construct
  source 1..75: mol_type = other DNA
aaggtggggatcattcgtgcgctgacggtgggtgtggcttaccagacgacggtaggcggcattatgaatacctcg

SEQ ID NO: 267619 - DNA, 75 bp, synthetic construct
  source 1..75: mol_type = other DNA
atgatactttggtctgtgaaaaaagaaaccgatatccgacgaggaaggcattgtgttttcctgaggcatgttcac

SEQ ID NO: 267620 - DNA, 75 bp, synthetic construct
  source 1..75: mol_type = other DNA
atgatactttggtctctgaaaaaagaaaccgatatccggcggggaaggcattgtgttttcctgaggcatgttcac

SEQ ID NO: 267621 - DNA, 75 bp, synthetic construct
  source 1..75: mol_type = other DNA
cgaaagccctacccaccgcgattgcccgcagagctaacgaacagcatgaggccaaaaagccgtatcaaattcgcc

SEQ ID NO: 267622 - DNA, 75 bp, synthetic construct
  source 1..75: mol_type = other DNA
gctgcattcgcaattaaagagatgtatccggaggttgaatggatacaggtcgataatgccagcgctgcatttcac

SEQ ID NO: 267623 - DNA, 75 bp, synthetic construct
  source 1..75: mol_type = other DNA
gcgcagaaggagttccccgtcgggctacggtctctgttaatacgggaatacggcgacgatacagcgcagctaaaa

SEQ ID NO: 267624 - DNA, 75 bp, synthetic construct
  source 1..75: mol_type = other DNA
tgcttaatacgagatacacgtattactcatttaaaattatacaatatgtatatggttaaagttattcccaatgca

SEQ ID NO: 267625 - DNA, 75 bp, synthetic construct
  source 1..75: mol_type = other DNA
ccagatggacgatggcagtactacatgtctaatacgcgaggaaagaattcaaaaatataataatatagataataa

SEQ ID NO: 267626 - DNA, 75 bp, synthetic construct
  source 1..75: mol_type = other DNA
gccaaaaagccgtatcaaattcgcctgctgacgggggcgtcaatcagcgccgccgctgacgggggcgtcaatcag

SEQ ID NO: 267627 - DNA, 75 bp, synthetic construct
  source 1..75: mol_type = other DNA
ggcaacaatcagatgattgcggttaccaacaatcagatacagacggtgggcgttaaccagatagagacggtgggc

SEQ ID NO: 267628 - DNA, 75 bp, synthetic construct
  source 1..75: mol_type = other DNA
aattatttaagatgggtaaagcaccttatcttgacacggaaataaaaggaaataatctagataaaatgagaaata

SEQ ID NO: 267629 - DNA, 75 bp, synthetic construct
  source 1..75: mol_type = other DNA
ttttcttcaagcaggccatggatagcggcctgctgcacatgccgttttaccagtcagtcacggttgagatatttg

SEQ ID NO: 267630 - DNA, 75 bp, synthetic construct
  source 1..75: mol_type = other DNA
tcctgaaaattcattcctaaatatcttgctaatacaaacacgccgggcactggcagccaataccggcgtcttttt

SEQ ID NO: 267631 - DNA, 75 bp, synthetic construct
  source 1..75: mol_type = other DNA
gcgctatatctgaccacggagatgttgacggccggcctggcctgcagtgtgagcgtgtttatctttctgtttatt

SEQ ID NO: 267632 - DNA, 75 bp, synthetic construct
  source 1..75: mol_type = other DNA
ttgacagtgcgggtaatctgcgggctggcggggggctgtggtggaccctgtttctgcagtgtcattcatggtggc

SEQ ID NO: 267633 - DNA, 75 bp, synthetic construct
  source 1..75: mol_type = other DNA
ttatttttctcgcctatggattagcattacccgcgttctcttctgacactgcaactttaaccattaatggcagaa

SEQ ID NO: 267634 - DNA, 75 bp, synthetic construct
  source 1..75: mol_type = other DNA
taatgacggtttccctggtattatcagtgactctttctgctttaccgggtaaagcatcaacggttagcgcagaaa

SEQ ID NO: 267635 - DNA, 75 bp, synthetic construct
  source 1..75: mol_type = other DNA
gcgtgctgattaaagacgaccagaaccgcaatatgtttgaacgcggcagcgcgcagattatgccgttctttaaaa

SEQ ID NO: 267636 - DNA, 75 bp, synthetic construct
  source 1..75: mol_type = other DNA
gcgtattctcccggcggctggggattcaggtgctgaagaaccgtcatcagccctgtccggtctgtggcgggagtg

SEQ ID NO: 267637 - DNA, 75 bp, synthetic construct
  source 1..75: mol_type = other DNA
cccacagcagctgcgatggcgtatggcctgcatacccaacaaaatacccgttcgctggtgtttagatctcggtgg

SEQ ID NO: 267638 - DNA, 75 bp, synthetic construct
  source 1..75: mol_type = other DNA
cgttgttgttcgtcgccgcgcacagccagtataagaacctgctgacactggcagagctgttcctggtggggttga

SEQ ID NO: 267639 - DNA, 75 bp, synthetic construct
  source 1..75: mol_type = other DNA
ccggatatgaaggaaccagagcaaaactgggcgataattattccattaatggattcaatattggcgtgggttatt

SEQ ID NO: 267640 - DNA, 75 bp, synthetic construct
  source 1..75: mol_type = other DNA
ctcgatgacttgcgtcacctggagtcagtggtaaccaataagatcagtgagattgaagcggatctggaaaagctg

SEQ ID NO: 267641 - DNA, 75 bp, synthetic construct
  source 1..75: mol_type = other DNA
gtgaaccgggtgctggagcgcgatctgttctacgcaattgatatgccatttgagcagtcggtgcatgacaccctg

SEQ ID NO: 267642 - DNA, 75 bp, synthetic construct
  source 1..75: mol_type = other DNA
cacaaccagcaagtctttatctcccttactatattgatcaagataacggttgggggaaggttttagattcattta

SEQ ID NO: 267643 - DNA, 75 bp, synthetic construct
  source 1..75: mol_type = other DNA
taagttatatgattgctaattttggttactttatagtaaagaaagattggctattaatcaaagctatatttaatg

SEQ ID NO: 267644 - DNA, 75 bp, synthetic construct
  source 1..75: mol_type = other DNA
aatgagcggcgagaagatgatgtactcaacggtgaagaattcgatacattcagtcaggaaatgaccgatattatc

SEQ ID NO: 267645 - DNA, 75 bp, synthetic construct
  source 1..75: mol_type = other DNA
aaaggaaatgattttattcgttacacctggaaattcacaacaattatttccgatgaaagtgacacgattgaaaac

SEQ ID NO: 267646 - DNA, 75 bp, synthetic construct
  source 1..75: mol_type = other DNA
ccacgtcagcgcaaaacggtagtcgctgatggtgtgggtcaaggttataaagaagtacaggaaatcagcccgaac

SEQ ID NO: 267647 - DNA, 75 bp, synthetic construct
  source 1..75: mol_type = other DNA
ctgctggcacaaggtaaagcctcttacgtccatatcggacatgggcgttccggcagctttcgtcagggcgttttt

SEQ ID NO: 267648 - DNA, 75 bp, synthetic construct
  source 1..75: mol_type = other DNA
aattgccaaatatgctttctgggaccttgatgctaatacaatcaatcagctaccagaaaatatccacaaacgtcg

SEQ ID NO: 267649 - DNA, 75 bp, synthetic construct
  source 1..75: mol_type = other DNA
atctcaatgctgcaaattcaaaacgtaaagcttaattactctcacctctcccctgaagataagttcgaaacctat

SEQ ID NO: 267650 - DNA, 75 bp, synthetic construct
  source 1..75: mol_type = other DNA
gcagaaaggtttaaatgaggatttgaatgaatttatgaaacttcgtgtaaaagtttttgattggctagccaagat

SEQ ID NO: 267651 - DNA, 75 bp, synthetic construct
  source 1..75: mol_type = other DNA
gtcagatttatctgcgagcttacagaacatgagtcttggcttaacaaatccgaaaagttaaggctcatcaagcag

SEQ ID NO: 267652 - DNA, 75 bp, synthetic construct
  source 1..75: mol_type = other DNA
ggcatccctaaaggcgtctccgatgtttttggctccggtgttatgcccgtttatgtcgtgaacatgggcaaaggt

SEQ ID NO: 267653 - DNA, 75 bp, synthetic construct
  source 1..75: mol_type = other DNA
attacccacaaccctacagaaaatgcagggtgaaatccgcgtgatccttgagggtggcggtggccgtgttaaaag

SEQ ID NO: 267654 - DNA, 75 bp, synthetic construct
  source 1..75: mol_type = other DNA
tcagcctcgcgaccagctcacgctgtgtcagcgtttccgtcgccgtttctcccgttttgtggtccaggtaacgga

SEQ ID NO: 267655 - DNA, 75 bp, synthetic construct
  source 1..75: mol_type = other DNA
actcccgcacagcacgcattcgaacgggtcacgactcaggaactgtttcaccatttgtgcatagcacactttcgc

SEQ ID NO: 267656 - DNA, 75 bp, synthetic construct
  source 1..75: mol_type = other DNA
agaaggtgtggaaacgaagtggcagtgggaatggctcaaatcccgtaacgtcagactttttcagggatactattt

SEQ ID NO: 267657 - DNA, 75 bp, synthetic construct
  source 1..75: mol_type = other DNA
caatcatatttttagaaaatattaaagttaaaaaaacaaatgcaaacaagtctataaatacacatgattataaaa

SEQ ID NO: 267658 - DNA, 75 bp, synthetic construct
  source 1..75: mol_type = other DNA
atggctaagaaaacagtagttcgttctgcgataactggtcagtttgttaagcccattgaagctaaaagacatcct

SEQ ID NO: 267659 - DNA, 75 bp, synthetic construct
  source 1..75: mol_type = other DNA
gagcgccagaaggccgccagagaggccgagcgcggccgtgaggcttggacgctagggcagggcatgaaaaagccc

SEQ ID NO: 267660 - DNA, 75 bp, synthetic construct
  source 1..75: mol_type = other DNA
acgaatttacccaaaaaaacctgcgtaatatggggttactcatgcaggcttttggtgttgatggtcagaccgctg

SEQ ID NO: 267661 - DNA, 75 bp, synthetic construct
  source 1..75: mol_type = other DNA
tcggtaaacaaattgccattgtaactgccggagtaatcgcggcacgcaaagcctttcaaataggtaaaggtacat

SEQ ID NO: 267662 - DNA, 75 bp, synthetic construct
  source 1..75: mol_type = other DNA
taaaactaactcttttgataatacagcgatatcgttagtaactaatgctatcgacgatatgatcaatagcattta

SEQ ID NO: 267663 - DNA, 75 bp, synthetic construct
  source 1..75: mol_type = other DNA
ctaccagtttcaaagataagtctcttgaagtagagtcatattttgtcgacaagtcaatatggaatgtccatattg

SEQ ID NO: 267664 - DNA, 75 bp, synthetic construct
  source 1..75: mol_type = other DNA
ttgttaaaatcttcagaggaagttgaagtttttatcaaaatttttgaaagttgggtaacaaaattaccgtcaata

SEQ ID NO: 267665 - DNA, 75 bp, synthetic construct
  source 1..75: mol_type = other DNA
ggattgttgtatccggtactgctaaagtttcactaggtagtgaagttaaactattagtttctaatgagtctatat

SEQ ID NO: 267666 - DNA, 75 bp, synthetic construct
  source 1..75: mol_type = other DNA
cttctgcgatggataatgtggccattaccgccgatgaacagaccaactcgttggtcattaccgctgaccagcccg

SEQ ID NO: 267667 - DNA, 75 bp, synthetic construct
  source 1..75: mol_type = other DNA
agacattatttagttgaaaaaatgtttgaaacacattctttggatatgaataattctgttttggcaagccctgag

SEQ ID NO: 267668 - DNA, 75 bp, synthetic construct
  source 1..75: mol_type = other DNA
gttcacttatttactacataaacaattggaatttacttccattgatctgtttactcagtggttgtcacttttatc

SEQ ID NO: 267669 - DNA, 75 bp, synthetic construct
  source 1..75: mol_type = other DNA
caccttaccgggcgccggtgccgtgtgggaatccacccaccttgccgggcgccggtgctgtgtggaaatccgccc

SEQ ID NO: 267670 - DNA, 75 bp, synthetic construct
  source 1..75: mol_type = other DNA
cgtgtggaaatccgcccaccttgccgggcgccggtgctgtgtggaaatccgcccaccttgccgggcgccggtgcc

SEQ ID NO: 267671 - DNA, 75 bp, synthetic construct
  source 1..75: mol_type = other DNA
ggtgccgtgtgggaatccgcccaccttgccgggcgtcggtgccgtgtgggaatccgcccaccttgccgggcgccg

SEQ ID NO: 267672 - DNA, 75 bp, synthetic construct
  source 1..75: mol_type = other DNA
aagtatgatagggattttacaatcttaataaatgaaaaaaatattggacaaattaaaagcatcgataaggcatat

SEQ ID NO: 267673 - DNA, 75 bp, synthetic construct
  source 1..75: mol_type = other DNA
tacttctcatgggatttgccacgcggaaacagaggtaacagcactgggcaggatgcttttagtggtatagacgta

SEQ ID NO: 267674 - DNA, 75 bp, synthetic construct
  source 1..75: mol_type = other DNA
ctatggacattatggtgaaaatgctatgttttataaaacattctttttcggatacagagaaagtctctccggaag

SEQ ID NO: 267675 - DNA, 75 bp, synthetic construct
  source 1..75: mol_type = other DNA
aattgtaagccagcatctgggtaaaacaattctgattgatccctcggttcaaggaaccatttccgtacgcagcaa

SEQ ID NO: 267676 - DNA, 75 bp, synthetic construct
  source 1..75: mol_type = other DNA
tcttataaagacaagggtgaaagcgtaaaagagaaagattcgccagggatgcaaaactataattacattattggc

SEQ ID NO: 267677 - DNA, 75 bp, synthetic construct
  source 1..75: mol_type = other DNA
ggatggaggggccggctgcggcgtttcagacctgggaacaactgatttttaagctgctggcggcagaagaagagt

SEQ ID NO: 267678 - DNA, 75 bp, synthetic construct
  source 1..75: mol_type = other DNA
cgcaggagcactccaaaaagcgcctggcaagaacatttcgttgcagcccggaggtcagaaaacgcctcagcccac

SEQ ID NO: 267679 - DNA, 75 bp, synthetic construct
  source 1..75: mol_type = other DNA
cttactggatgtattaaaaaatataaatagttatgatgactcagtttttatatctagtctgatatatttgatttc

SEQ ID NO: 267680 - DNA, 75 bp, synthetic construct
  source 1..75: mol_type = other DNA
ttgcgcaacattacatttaaagataaagtatccaaccaaaaatattattcaggtcttattaatgcggggtataac

SEQ ID NO: 267681 - DNA, 75 bp, synthetic construct
  source 1..75: mol_type = other DNA
cgaaaggaggttactatagttatgataatggtgccgacactggagatattcctcataaccaaagagttattggct

SEQ ID NO: 267682 - DNA, 75 bp, synthetic construct
  source 1..75: mol_type = other DNA
ttctgcgtggttacgaaaaaatccgagactgggagcagccgcctgcctgggcggcatctcaggacacaaatccgg

SEQ ID NO: 267683 - DNA, 75 bp, synthetic construct
  source 1..75: mol_type = other DNA
cctataaattctggcgtcgttgccgtcgtgatggccttggtaaacgtatttacctgtttaagggcgacagcatcc

SEQ ID NO: 267684 - DNA, 75 bp, synthetic construct
  source 1..75: mol_type = other DNA
aacgggtgcaatgaggtaattaatcgagggtacgcactcggtgtggctttagaacgacgtgtgaattatgcaaat

SEQ ID NO: 267685 - DNA, 75 bp, synthetic construct
  source 1..75: mol_type = other DNA
gaaatggcgaccaaacaccgcacatgaggcaccgccgactaccggcatattatcgttgtttaatcgtggtgaccg

SEQ ID NO: 267686 - DNA, 75 bp, synthetic construct
  source 1..75: mol_type = other DNA
gtcgtaacgacaataacgttcacgaccgcaccttccgggccggtaactatctcaaactgggctggccgtcagtca

SEQ ID NO: 267687 - DNA, 75 bp, synthetic construct
  source 1..75: mol_type = other DNA
gacgtaatgataacaacgttcatgataaatattttctgtcaggcagttttctgaagattggctggccgtcaatta

SEQ ID NO: 267688 - DNA, 75 bp, synthetic construct
  source 1..75: mol_type = other DNA
taaccgcctggacggaacgcgaagcgcgtaaccgttgcccgtccggttgtgttgctgtatttgccgcccgtattc

SEQ ID NO: 267689 - DNA, 75 bp, synthetic construct
  source 1..75: mol_type = other DNA
ttgcaaatgaaaccttctgtagatattcttcatgtactatctccatcagcatccactgctaaccatatcaatttt

SEQ ID NO: 267690 - DNA, 75 bp, synthetic construct
  source 1..75: mol_type = other DNA
aatcactcaaaaaacgcagagacagaacagagccgaaatataaagcgttagacatgacagagcacgccttaaagg

SEQ ID NO: 267691 - DNA, 75 bp, synthetic construct
  source 1..75: mol_type = other DNA
gctggcagccattagtccagctgttcccggcggagcttatcagtcgaccggcaccttacagacgttaaacacagc

SEQ ID NO: 267692 - DNA, 75 bp, synthetic construct
  source 1..75: mol_type = other DNA
gtgcaccttgaattcgccgattttgacagtgacccttccctctcagctctgttgaccgattttcgcatagcagag

SEQ ID NO: 267693 - DNA, 75 bp, synthetic construct
  source 1..75: mol_type = other DNA
agccaagctcaggaaaaaagtacccggactgattcctcctgaatatattacagcggctattaaatatgtcgtatc

SEQ ID NO: 267694 - DNA, 75 bp, synthetic construct
  source 1..75: mol_type = other DNA
ctacatcctcagctacagcgagctgtattcgaaaaactctttcacactcctgaagaaacccaagctctgattgta

SEQ ID NO: 267695 - DNA, 75 bp, synthetic construct
  source 1..75: mol_type = other DNA
tgaccctatgggattattgcagacttgggatgatgccagatctggagcatgtacggggggagtttgtggtgttct

SEQ ID NO: 267696 - DNA, 75 bp, synthetic construct
  source 1..75: mol_type = other DNA
tggggtgatattgccactgacctgcttgaatcggcagcggaaaaagcagtaccactggcgaaggcctggggaacg

SEQ ID NO: 267697 - DNA, 75 bp, synthetic construct
  source 1..75: mol_type = other DNA
gccgattcagcccgcgtcgttaatgaggcgcgcccgcattccgatttaccgtcaaaagctgcgatgctgccgctt

SEQ ID NO: 267698 - DNA, 75 bp, synthetic construct
  source 1..75: mol_type = other DNA
gcagacgatagtgcgtgcgccgagcgatggttatgtgacccaggtgctgattcgtccgggtacctatgccgcgtc

SEQ ID NO: 267699 - DNA, 75 bp, synthetic construct
  source 1..75: mol_type = other DNA
tggcaatttcaccaaaattgttcagcgtgtcccggtacggattgcatttgacgacgcaaaggaattaaagcaact

SEQ ID NO: 267700 - DNA, 75 bp, synthetic construct
  source 1..75: mol_type = other DNA
atggacgatttgaggcgcttaataataaaggagaatatatttttatcagaaatagtgtcccgggattgagttcag

SEQ ID NO: 267701 - DNA, 75 bp, synthetic construct
  source 1..75: mol_type = other DNA
aaactaactcctgggaatattaattggctcaataatcgatcttatgaagagtgtaagactgcatttgaaaagatt

SEQ ID NO: 267702 - DNA, 75 bp, synthetic construct
  source 1..75: mol_type = other DNA
gggggaaatatccgtgatgccacaaaggcgctgaacacgcggatttactttgatcaggatggcaccctgagccgt

SEQ ID NO: 267703 - DNA, 75 bp, synthetic construct
  source 1..75: mol_type = other DNA
cagacgtactgttggggggcgtatgatgggcacatgggagtgggcggatgtggagctgaaaagcggcgccgatac

SEQ ID NO: 267704 - DNA, 75 bp, synthetic construct
  source 1..75: mol_type = other DNA
ccgcacacctgcaacccgaaattccatctgcattatggcgatctgacagatacctccaacctgacgcgcattttg

SEQ ID NO: 267705 - DNA, 75 bp, synthetic construct
  source 1..75: mol_type = other DNA
agacgcctggccaacggcaatacctccgtcatgacggtggcggccgatctgggctatgccaacgccagccatttc

SEQ ID NO: 267706 - DNA, 75 bp, synthetic construct
  source 1..75: mol_type = other DNA
ccgtcatgacggtggcggccgatctggctatgccaacgccagccatttctctgccgccttccagaaacagtttgg

SEQ ID NO: 267707 - DNA, 75 bp, synthetic construct
  source 1..75: mol_type = other DNA
ggatgtggcggtggccattgcggaggcagacggcgaaattgagccggaagagcgcaaggtgctggaagagattgc

SEQ ID NO: 267708 - DNA, 75 bp, synthetic construct
  source 1..75: mol_type = other DNA
ttgctgaattgctggagagccgggtggcgattatcgctgagtcgctaggattgccgatcgcctggcctaacatcg

SEQ ID NO: 267709 - DNA, 75 bp, synthetic construct
  source 1..75: mol_type = other DNA
aggttttgtaccggctggaaaaagaaacctatccatttatacctaaagcgacgaaagcgcgtgacgttatccccg

SEQ ID NO: 267710 - DNA, 75 bp, synthetic construct
  source 1..75: mol_type = other DNA
acaagccatcatttattaccggcaacactttgcgttgagcccatcttttattgcgcgtgatattcgtcgtacctg

SEQ ID NO: 267711 - DNA, 75 bp, synthetic construct
  source 1..75: mol_type = other DNA
ttgttcgcgtatttcttatccagccaaaagaaattttagatcccctgatgccagatgctgatgtttttgctgcag

SEQ ID NO: 267712 - DNA, 75 bp, synthetic construct
  source 1..75: mol_type = other DNA
tttttattatattgttgtttggtatttctccgttttccatagctacaggttctgaaacactattcgataatgggt

SEQ ID NO: 267713 - DNA, 75 bp, synthetic construct
  source 1..75: mol_type = other DNA
catatcctctgaaaagaaaatgtcccacaggtacagatagagttgctgcttatcatactcacggtgcagatagtc

SEQ ID NO: 267714 - DNA, 75 bp, synthetic construct
  source 1..75: mol_type = other DNA
ctgatgctgccggggaaaggcgtaacgaaaaaacagcctccgttaccggatagcaagaaggctgaatgcagttta

SEQ ID NO: 267715 - DNA, 75 bp, synthetic construct
  source 1..75: mol_type = other DNA
tggagatactcgaaggccagcgggcagaagcgaaacaactacgtaagcaggccagaagagcgcacaggaacaacg

SEQ ID NO: 267716 - DNA, 75 bp, synthetic construct
  source 1..75: mol_type = other DNA
attaggcgggacgttcaacgaccgatgctgacagggatcgccttacccggcagtatctcgccactcactggcctg

SEQ ID NO: 267717 - DNA, 75 bp, synthetic construct
  source 1..75: mol_type = other DNA
aggtggatttgttgatctgaactgtggttggtattgtcaggatgctttactgaactggtattgtaataaaaacaa

SEQ ID NO: 267718 - DNA, 75 bp, synthetic construct
  source 1..75: mol_type = other DNA
ctgatgctgccggggaaaggcgtaacgaaaaaacagcctccgttaccggagagcaaggaggctgaatgtagttta

SEQ ID NO: 267719 - DNA, 75 bp, synthetic construct
  source 1..75: mol_type = other DNA
ctgatgctgccggggaaaggcgtaacgaaaaaacagcctccgttaccggagagcaagtaggctgaatgaagttta

SEQ ID NO: 267720 - DNA, 75 bp, synthetic construct
  source 1..75: mol_type = other DNA
ttgtcgcggtcgtcggtcgcagcggtgcgggtaagtcgacgctgattaagctgattgccgggttgtatttcccca

SEQ ID NO: 267721 - DNA, 75 bp, synthetic construct
  source 1..75: mol_type = other DNA
gccggaacagttctctcagcactacagaattttacggggattgctttatcaggcatggctcttgatgaattgctg

SEQ ID NO: 267722 - DNA, 75 bp, synthetic construct
  source 1..75: mol_type = other DNA
tttatcaggcatggctcttgatgaattgctgagaaaacaacgggaaggagaggatataagtcagaatgatattgc

SEQ ID NO: 267723 - DNA, 75 bp, synthetic construct
  source 1..75: mol_type = other DNA
ttaaaactgctggggatctgcctgtgcttttttctgttgtccggctggtatggtgatgccctgctggcgttcggg

SEQ ID NO: 267724 - DNA, 75 bp, synthetic construct
  source 1..75: mol_type = other DNA
acctaaaaaaagcgttatcgattcatagtgatgaatttcgcccatacggaaacgtaatttctgcaataaatgtag

SEQ ID NO: 267725 - DNA, 75 bp, synthetic construct
  source 1..75: mol_type = other DNA
actgagtatcgtcgccagattgggcttgtcgatcaggatgtagcactgtttagtagtgatattgcagaaaacatt

SEQ ID NO: 267726 - DNA, 75 bp, synthetic construct
  source 1..75: mol_type = other DNA
gtcaggaaaattaggtatggcagactttggggtgttggggggggttaatcattatattctaattgtctctgttga

SEQ ID NO: 267727 - DNA, 75 bp, synthetic construct
  source 1..75: mol_type = other DNA
tttctctggcagcatgaccattcccgcccggtggggcagtgtacggtgcgccgggtcagcgaagggctggaatca

SEQ ID NO: 267728 - DNA, 75 bp, synthetic construct
  source 1..75: mol_type = other DNA
atatttctattatccccgattacagacaagcctggaaaggggaacataaattatcggatattctactgttgacta

SEQ ID NO: 267729 - DNA, 75 bp, synthetic construct
  source 1..75: mol_type = other DNA
gagtgttcgctggtggcagggaaaacttcgggtattctcccgtcgctggcgtgaacatctgcttatagctatggg

SEQ ID NO: 267730 - DNA, 75 bp, synthetic construct
  source 1..75: mol_type = other DNA
gaaaacgtcattgctcagttggctaatttgcaaactcatccatcggtgcgcctggcgctcgaagaggggcggatc

SEQ ID NO: 267731 - DNA, 75 bp, synthetic construct
  source 1..75: mol_type = other DNA
cactttttatctcctgctccgacagccgtctggtccctgagctggtgacgcaacgtgagcctggcgatctgttcg

SEQ ID NO: 267732 - DNA, 75 bp, synthetic construct
  source 1..75: mol_type = other DNA
actcattatggctaatgtccgatcaaaccgcagaaatcgcggggcagatctccccgcctctctctcttgatggct

SEQ ID NO: 267733 - DNA, 75 bp, synthetic construct
  source 1..75: mol_type = other DNA
cacgctgacagagcgggagattgcggaagctgaacaggtgacaaccatcaacgttaaaaccggagagcagactgc

SEQ ID NO: 267734 - DNA, 75 bp, synthetic construct
  source 1..75: mol_type = other DNA
tgagacatcagtggcgtccgggagtcggtggttttgtcgatctgaattgtggatggtactgtcaggatgcattac

SEQ ID NO: 267735 - DNA, 75 bp, synthetic construct
  source 1..75: mol_type = other DNA
tatatgtgatttttataatgttgtcgggagaatagaggaaacattggtcattaataaatataaagttaaacactt

SEQ ID NO: 267736 - DNA, 75 bp, synthetic construct
  source 1..75: mol_type = other DNA
aacgaccagttgatcatcctccggatctttgtataaggatccctgttcagctggaactgaattttggggaggaga

SEQ ID NO: 267737 - DNA, 75 bp, synthetic construct
  source 1..75: mol_type = other DNA
gctatccgtttttaaatctcacctgggctgtttcaacgctttgccttctgaattacaaccagaactttttgcaag

SEQ ID NO: 267738 - DNA, 75 bp, synthetic construct
  source 1..75: mol_type = other DNA
tttcattgcaggtcattaacggcagtgagctggaaagcggacgggcggcgcgctgtctgttcacacagcagggaa

SEQ ID NO: 267739 - DNA, 75 bp, synthetic construct
  source 1..75: mol_type = other DNA
gtagattacttcttcagcaacccagcattgcgctttagaggtgttgttgttcctgataaagagcaactggaccat

SEQ ID NO: 267740 - DNA, 75 bp, synthetic construct
  source 1..75: mol_type = other DNA
gatgtacgaccatgaccattattattacgacaaagcgggcaacctgctgacggacgagtatcagagcgcggtgat

SEQ ID NO: 267741 - DNA, 75 bp, synthetic construct
  source 1..75: mol_type = other DNA
cgcggtctgctggcgctccacgtagatgaagagaaacgggagacgcgctggcattataccgcggagggatggatt

SEQ ID NO: 267742 - DNA, 75 bp, synthetic construct
  source 1..75: mol_type = other DNA
tgccgcatcagaattaggaatgatggttgtagatggactttcctatacaggcgtaagaaggttcgatggtaaata

SEQ ID NO: 267743 - DNA, 75 bp, synthetic construct
  source 1..75: mol_type = other DNA
tgagcagggaatcaatcgcagtttcaatgattgtaggaagagataattgtgcttttgaccctgacagaggtaact

SEQ ID NO: 267744 - DNA, 75 bp, synthetic construct
  source 1..75: mol_type = other DNA
agcatctcagtcatctttactacggcagcgggcatctgctccagacggcactggacggtatcacggtcagtgaat

SEQ ID NO: 267745 - DNA, 75 bp, synthetic construct
  source 1..75: mol_type = other DNA
cgatgcttatgaacaggctttacgttatgacgacgaagatcagtggcaagaagaggaagaagagcagccaatcaa

SEQ ID NO: 267746 - DNA, 75 bp, synthetic construct
  source 1..75: mol_type = other DNA
accggactgggcacagcgggaaacgtggctcgtcttcccgcaggagcgttctggtgaaacggtatcccggaactg

SEQ ID NO: 267747 - DNA, 75 bp, synthetic construct
  source 1..75: mol_type = other DNA
gcgtacggaagctgaccgctgggcgctggcagaagagcagaaatatgagatgctggagaatgagtaccctcagag

SEQ ID NO: 267748 - DNA, 75 bp, synthetic construct
  source 1..75: mol_type = other DNA
tgggactgccggagacggtaaatcatcccggtaaacagcaggaccgttacacgtggaacgcgctggggttactga

SEQ ID NO: 267749 - DNA, 75 bp, synthetic construct
  source 1..75: mol_type = other DNA
ggccaggtgatacgggagacggacccggaagggcgcgtcacgcgctacgggtatgatgaacaggggctggcggtc

SEQ ID NO: 267750 - DNA, 75 bp, synthetic construct
  source 1..75: mol_type = other DNA
gttagagattaggattgcagaggataacaacgatcgttctcttaccgtaatctccttatatcgacccataacggg

SEQ ID NO: 267751 - DNA, 75 bp, synthetic construct
  source 1..75: mol_type = other DNA
gaaaatgggggtgttcaacacatagctcacatgattttcatagagtaattggaagattaaatgagacgctagtta

SEQ ID NO: 267752 - DNA, 75 bp, synthetic construct
  source 1..75: mol_type = other DNA
agcgcctggcggtgtgtctggctgattatcctgatgcaagtgtacttgatatggctgcggagcagggcatgccag

SEQ ID NO: 267753 - DNA, 75 bp, synthetic construct
  source 1..75: mol_type = other DNA
gtacatgcatccgggcgagatttacagcgcctggcggtgcgtctggctgattatcctgatgcaagtgtacttgat

SEQ ID NO: 267754 - DNA, 75 bp, synthetic construct
  source 1..75: mol_type = other DNA
atagttcaggttgtttctcaactaggaagtgatgtgttgatttttaaaagaattagcaaaaatacaaaatcaggt

SEQ ID NO: 267755 - DNA, 75 bp, synthetic construct
  source 1..75: mol_type = other DNA
tgtccgctacatgcttcaaccatccggcgatggttacctgctgccggactggtatggcgcagagccgcgccgaca

SEQ ID NO: 267756 - DNA, 75 bp, synthetic construct
  source 1..75: mol_type = other DNA
ttttaattttttatcctcacagatattgagtaattatatttataatgatatttttactgtcccaattactttgac

SEQ ID NO: 267757 - DNA, 75 bp, synthetic construct
  source 1..75: mol_type = other DNA
ctacgacgatgattatctgcacctgatcctgtgggatgaggacgatctggagatcgtcggggcgtatcgctttat

SEQ ID NO: 267758 - DNA, 75 bp, synthetic construct
  source 1..75: mol_type = other DNA
ggcggtgaatatgatgccagccatttacgacctgaacgcagacgccgggatattcttctggaagaggttctgagg

SEQ ID NO: 267759 - DNA, 75 bp, synthetic construct
  source 1..75: mol_type = other DNA
cagatggaaagccagatggaggcggaatacatcccggagcggaggctgcatctttaccactgtgaccaccgggga

SEQ ID NO: 267760 - DNA, 75 bp, synthetic construct
  source 1..75: mol_type = other DNA
tgaagcatcagtggcgtccgggaattggtggttttgttgacctgaactgtgggtggtattgtcaggatgcactga

SEQ ID NO: 267761 - DNA, 75 bp, synthetic construct
  source 1..75: mol_type = other DNA
atgccagttagccgttatctctgcattttcataaacgttggtttgggagaagcggcaaaacggggggtgggaaca

SEQ ID NO: 267762 - DNA, 75 bp, synthetic construct
  source 1..75: mol_type = other DNA
tgtctaccattagatttgacgaagctaaatgtttatttgctaatgggttataccatggtgcctattatctttgtg

SEQ ID NO: 267763 - DNA, 75 bp, synthetic construct
  source 1..75: mol_type = other DNA
cggctggcgatggcgaacaacatcgagggcgcaatgattgagcgatacggcgtcgaacagggtacggaaaacgcc

SEQ ID NO: 267764 - DNA, 75 bp, synthetic construct
  source 1..75: mol_type = other DNA
cctgtctggcgcttggcctgatgttgtgcaataccgcacaggccaatgaccataaaatactcggcgttattgcca

SEQ ID NO: 267765 - DNA, 75 bp, synthetic construct
  source 1..75: mol_type = other DNA
gttaccggaaaacgtgacagaaataaaaccggacggggagttctgccggtgggatggttcatcatgggttaagga

SEQ ID NO: 267766 - DNA, 75 bp, synthetic construct
  source 1..75: mol_type = other DNA
gactatgaaaattcaagtaggtgcgaacgatggtgaaaccattgagattgcccttgataaaattgatgctaaaac

SEQ ID NO: 267767 - DNA, 75 bp, synthetic construct
  source 1..75: mol_type = other DNA
acggacaaagccagataaaaagttttgcggatgctgcggcagcggcaaaagcggagcttaagctgatcgcagaga

SEQ ID NO: 267768 - DNA, 75 bp, synthetic construct
  source 1..75: mol_type = other DNA
ccgccaatgttgatggtaaggctgttgaattcactatttcggggagtactgatacatcaggtactagtgcaaccg

SEQ ID NO: 267769 - DNA, 75 bp, synthetic construct
  source 1..75: mol_type = other DNA
acagtgttagtaaatctgagcgtgaaagcattatcgccgcgctgcacgggcagtcgattttcaatggcggcgggc

SEQ ID NO: 267770 - DNA, 75 bp, synthetic construct
  source 1..75: mol_type = other DNA
ttcgatgacttctaccgggcgtatcgccgcaatgctatagctggtgccgcagtgacgcgcatggttgacggttgc

SEQ ID NO: 267771 - DNA, 75 bp, synthetic construct
  source 1..75: mol_type = other DNA
acgtaacactttcctgaccgaccgaatcaccgcgctactcgagcgcttctggacgctgggcatcattgacccgcc

SEQ ID NO: 267772 - DNA, 75 bp, synthetic construct
  source 1..75: mol_type = other DNA
cacggaaggggcaacagaatggtgcgcagaatacgatgaatggggcaacctgctgaatgaagagaacccgcatca

SEQ ID NO: 267773 - DNA, 75 bp, synthetic construct
  source 1..75: mol_type = other DNA
gcggcaaattttgccacgctgacagagcgggagattgccgaagcggaacaggtaacaacaatcaacgttaaaacc

SEQ ID NO: 267774 - DNA, 75 bp, synthetic construct
  source 1..75: mol_type = other DNA
aacaccatcgtcttcttaagttcctctgcctccagctacattgtcggccagaccatcgttatcgatggcggcctg

SEQ ID NO: 267775 - DNA, 75 bp, synthetic construct
  source 1..75: mol_type = other DNA
caacagtattgttgacgggctgatgatgatttacccggatcccgcgccagattcgggagtctgtgaagcgttgga

SEQ ID NO: 267776 - DNA, 75 bp, synthetic construct
  source 1..75: mol_type = other DNA
aaacgaaaaaaggctatgtggaaaatgcttcagcaaacgtgcatatccctcccatcaccaaagccactcctgaag

SEQ ID NO: 267777 - DNA, 75 bp, synthetic construct
  source 1..75: mol_type = other DNA
gaccggaaaactcacgcagagtgaagacgaggggcttatcaccctctggcactacgatgcgtcggaccgcatcac

SEQ ID NO: 267778 - DNA, 75 bp, synthetic construct
  source 1..75: mol_type = other DNA
ccgggtgatcttgtccgggtcacgaagattataaacggcggacaaaacgggattaataaccggcgcgctcgcttc

SEQ ID NO: 267779 - DNA, 75 bp, synthetic construct
  source 1..75: mol_type = other DNA
agttattaactaactctggctttatatacagcacaactctattattctcattagaatgcatgaagcttagaagac

SEQ ID NO: 267780 - DNA, 75 bp, synthetic construct
  source 1..75: mol_type = other DNA
agctgtgaaatctcaaccagcaataacttgtggcttgatattggacgtaacagtgaacttggtctggtcgtccag

SEQ ID NO: 267781 - DNA, 75 bp, synthetic construct
  source 1..75: mol_type = other DNA
tttttattctcccaagtatgaaaaatgctgggccagtaaatgtatgcttgacaataataaataatctaccttcag

SEQ ID NO: 267782 - DNA, 75 bp, synthetic construct
  source 1..75: mol_type = other DNA
ccagcaccgcctggtgttccacacgcggatacagcatggcgagccactggtcgagagccgctacctctacgaccc

SEQ ID NO: 267783 - DNA, 75 bp, synthetic construct
  source 1..75: mol_type = other DNA
acgcaggccatcaacttgatcggcgaacacaaaccctcaatcccggaccggacaatggcggcgctagcctgtatc

SEQ ID NO: 267784 - DNA, 75 bp, synthetic construct
  source 1..75: mol_type = other DNA
tcgcaatcagggaaagtttttccccgaagtgcatgaagatgcctttgactacctgacgatgctgatccagcaatg

SEQ ID NO: 267785 - DNA, 75 bp, synthetic construct
  source 1..75: mol_type = other DNA
gaccaaaacgttccggcgatgacctggttaagactggtggtaaccgatgacgccgctctgactacagcagaaaaa

SEQ ID NO: 267786 - DNA, 75 bp, synthetic construct
  source 1..75: mol_type = other DNA
tgcccgtttgcccggtacaagccactttccaacgcgaagacggcattgtggtggtcgacaacacacgctgcgtgg

SEQ ID NO: 267787 - DNA, 75 bp, synthetic construct
  source 1..75: mol_type = other DNA
gtaccgtcagttgcgccattgaaaaccagacgccacagggcgaatttcgtaccctcgtcaaccagtatcaagtac

SEQ ID NO: 267788 - DNA, 75 bp, synthetic construct
  source 1..75: mol_type = other DNA
tttccgcacctcccgtaacacccgccgtcgtcaaatccgcattcagcactgcacaaatagatcaatgggtcgcgc

SEQ ID NO: 267789 - DNA, 75 bp, synthetic construct
  source 1..75: mol_type = other DNA
aaatcattcttaatcaaaaaaacgaaggtaatcaatttcgccacagacataacaatacagctaactcttatattt

SEQ ID NO: 267790 - DNA, 75 bp, synthetic construct
  source 1..75: mol_type = other DNA
actctatacgaataagtggtgctatgcggaaagctatgagatggcccgtgcggagagtctacaggaggggccatg

SEQ ID NO: 267791 - DNA, 75 bp, synthetic construct
  source 1..75: mol_type = other DNA
gaaaagcacatgagcctgttgagttacaaatgttggcagagaaagtagatgagccacccgtaaaatttttctttt

SEQ ID NO: 267792 - DNA, 75 bp, synthetic construct
  source 1..75: mol_type = other DNA
ggtagatggtattcctaatgaaaaaccttcggagataaatataaaaatgaaagtaatttctcagttcatggggac

SEQ ID NO: 267793 - DNA, 75 bp, synthetic construct
  source 1..75: mol_type = other DNA
cgagaaccttgatcgatttagtcgagcagaaccaattaaagccgctaatctattcctcaatttgattactgccgg

SEQ ID NO: 267794 - DNA, 75 bp, synthetic construct
  source 1..75: mol_type = other DNA
ctcgcgtcagttcgagaggacaagctaaagatggttatggcatgtcgagacagcaaacaatgctgcgagattacg

SEQ ID NO: 267795 - DNA, 75 bp, synthetic construct
  source 1..75: mol_type = other DNA
gcctggaatgccgggattcagttcagtcccgtagagacggtggttattgaccttgcttatgaaggttccggcagt

SEQ ID NO: 267796 - DNA, 75 bp, synthetic construct
  source 1..75: mol_type = other DNA
ataatgccgtcgggcgttttggtcgcgtgtcagaggtggcgtcccgcgtggccggtcagctgtcgggtgagggga

SEQ ID NO: 267797 - DNA, 75 bp, synthetic construct
  source 1..75: mol_type = other DNA
ctgctgtcgccggattatcaggacattgacgacacgcggccgatttttgactgggaacagatcatccgtaaaaaa

SEQ ID NO: 267798 - DNA, 75 bp, synthetic construct
  source 1..75: mol_type = other DNA
tgctgacagagcatcgtctgccctggctggggaagctgctgagcgccgatacgccgctgaacccggtgcggccat

SEQ ID NO: 267799 - DNA, 75 bp, synthetic construct
  source 1..75: mol_type = other DNA
gatatatcatgtgtttctttttgggatctcgcctagcatatgctgaaaatatagacggcaacactaccattagtg

SEQ ID NO: 267800 - DNA, 75 bp, synthetic construct
  source 1..75: mol_type = other DNA
cgccagttgaaggcagcagcaaagcggctgcatacgctacaggctggaatgcctgccgcgccgccatgcttcagg

SEQ ID NO: 267801 - DNA, 75 bp, synthetic construct
  source 1..75: mol_type = other DNA
ccctgctgcgaccggcggtggagctgaacactgccgtggtggcggcaacggcggccggtgtctgtgtgactgcgc

SEQ ID NO: 267802 - DNA, 75 bp, synthetic construct
  source 1..75: mol_type = other DNA
tcgccttattatatcaatttaagctcattaattctgggcggacgtcccgtgaaaagcgataatatgatgatgatt

SEQ ID NO: 267803 - DNA, 75 bp, synthetic construct
  source 1..75: mol_type = other DNA
gatgaaaagcgctctctacatgcgtacttaacgtggcagcttcataccccagccaatatgacgggaatgaaaagc

SEQ ID NO: 267804 - DNA, 75 bp, synthetic construct
  source 1..75: mol_type = other DNA
tcccttcagagatcgttaatgaaagcgcagaaaaaatattaagctcattcaaacgctgggctgatgaggcgatcc

SEQ ID NO: 267805 - DNA, 75 bp, synthetic construct
  source 1..75: mol_type = other DNA
gaaatgccccgaagattaaaagaacttgaaaagctgaaaaatattccctattcggaggtcagatcacttcgccgt

SEQ ID NO: 267806 - DNA, 75 bp, synthetic construct
  source 1..75: mol_type = other DNA
aatgataccgctgcaattttgtgtgccgcaccactgttgaaatctccattgacatcttatttcaggaaatatctc

SEQ ID NO: 267807 - DNA, 75 bp, synthetic construct
  source 1..75: mol_type = other DNA
ttcctgcgcatcattttcttctgcgtggcgtttgtgatcggcctgctgaccgccgacctgtttaccgcgctggtc

SEQ ID NO: 267808 - DNA, 75 bp, synthetic construct
  source 1..75: mol_type = other DNA
cttttcgggggcaaatttcaggggcaaaaattagattttcaggggcaattattggcatttcaggggcaaaaatga

SEQ ID NO: 267809 - DNA, 75 bp, synthetic construct
  source 1..75: mol_type = other DNA
atcttaaaaaagaagcccgcgattacgtcgctatcttactggagatgtatctcctgtgccccacgcttcgtaatc

SEQ ID NO: 267810 - DNA, 75 bp, synthetic construct
  source 1..75: mol_type = other DNA
acctgcacaagcatttacagttccggaagtggggaaacgtcaattagacgaaatcaatcggatccgctacgaact

SEQ ID NO: 267811 - DNA, 75 bp, synthetic construct
  source 1..75: mol_type = other DNA
atatgtatgaattgtggcagatatgtccaagttaattctgtcgataaaaaaggtgatacatactttcgttgtggt

SEQ ID NO: 267812 - DNA, 75 bp, synthetic construct
  source 1..75: mol_type = other DNA
aactatataaaacacatacaaaatatagttttgttgattttgaacacttggatgaagtcctacgtcttattgttt

SEQ ID NO: 267813 - DNA, 75 bp, synthetic construct
  source 1..75: mol_type = other DNA
taaattaattgaaaccgatgagccagcgatccttgatgacattgtacgagctacgaatagacaatctaaagttga

SEQ ID NO: 267814 - DNA, 75 bp, synthetic construct
  source 1..75: mol_type = other DNA
tatttctgacgatgaattcaaagcattattcgaagagatatctcgcctgagaatcgtatttcaggcaagcggttc

SEQ ID NO: 267815 - DNA, 75 bp, synthetic construct
  source 1..75: mol_type = other DNA
tataaatttcactaatccagcaataatatttaccgggaggaaagtaagcacaactcttcgggaaacatcaagaga

SEQ ID NO: 267816 - DNA, 75 bp, synthetic construct
  source 1..75: mol_type = other DNA
atgatccagacatgtttcagcagaaactaaatcagattgacggggtatcgtatttaggaggtggtaattatacag

SEQ ID NO: 267817 - DNA, 75 bp, synthetic construct
  source 1..75: mol_type = other DNA
tgacatcaaattcatttgaatctgtagctggagacgcagttataggtattgattcatctgctaaaaatggtgtga

SEQ ID NO: 267818 - DNA, 75 bp, synthetic construct
  source 1..75: mol_type = other DNA
acgatgtggcagaagtccgctgcaatttgtgcggcggttattacaaagccgacgatccggaaagtcacgaatgcg

SEQ ID NO: 267819 - DNA, 75 bp, synthetic construct
  source 1..75: mol_type = other DNA
gtgtttttgttgagccagcaggcgacaaatttttatgattttgcctgttatgccaaagcgaaactgaacgttgag

SEQ ID NO: 267820 - DNA, 75 bp, synthetic construct
  source 1..75: mol_type = other DNA
atcaaactgagtaacgtcaggctgctgaaaggaaaacagacggtaacagtaactgcaggcctgatgggttatgtg

SEQ ID NO: 267821 - DNA, 75 bp, synthetic construct
  source 1..75: mol_type = other DNA
aggcgatcaccgttaccaataaccagatccagaacattggcgttaatcagatacagacggttggtgtcaaccagg

SEQ ID NO: 267822 - DNA, 75 bp, synthetic construct
  source 1..75: mol_type = other DNA
aaggcgaaataatttttgaagataaaccagtctccttttctgatccgttaagtgcgcaaaacgtaggtattacta

SEQ ID NO: 267823 - DNA, 75 bp, synthetic construct
  source 1..75: mol_type = other DNA
cgtgtccctgatgacaccttcccatatgcacttcctcctttagttgctgtaatgaaaatctccatgattgccgtc

SEQ ID NO: 267824 - DNA, 75 bp, synthetic construct
  source 1..75: mol_type = other DNA
tgaaggttagctggaaaccgctgctcgtcgtcgtggtactgacaggctgcggaatatggttcggcaccttcatca

SEQ ID NO: 267825 - DNA, 75 bp, synthetic construct
  source 1..75: mol_type = other DNA
tgaaacgtcacgcagccgatcccgtggtgggaaaaagactgtcgtctgtgctgcaggaggcacaggcgcaggcgg

SEQ ID NO: 267826 - DNA, 75 bp, synthetic construct
  source 1..75: mol_type = other DNA
tgaaggacagtacccggcacgaatggaagccattaagggatatttccccggcgacctcgttccgtatggtgctta

SEQ ID NO: 267827 - DNA, 75 bp, synthetic construct
  source 1..75: mol_type = other DNA
ggctgtgcctggatatttcagcatttgcattgggttacgtcacaaaagtctccaggtgcgtttgtcttcgctttg

SEQ ID NO: 267828 - DNA, 75 bp, synthetic construct
  source 1..75: mol_type = other DNA
gggtactgctgaaccgtgttgatacctcagcggcacccgaaatagagtggcctacgcaaccgggggagcgggcca

SEQ ID NO: 267829 - DNA, 75 bp, synthetic construct
  source 1..75: mol_type = other DNA
ggcatttctggggcaaatctggagcggcattaccactaccgccactggcgtctgggagggaattaaaaccaccgt

SEQ ID NO: 267830 - DNA, 75 bp, synthetic construct
  source 1..75: mol_type = other DNA
cgtatgaccggcgttttacagtccatcggcgcatggatgaaggccaacccgcagctaaccgccacgctggtgaaa

SEQ ID NO: 267831 - DNA, 75 bp, synthetic construct
  source 1..75: mol_type = other DNA
cggcggtggagctttatagcgcccccgcggccctgctggcggcagtatggtgcgttatcgcaccgcagacgttcc

SEQ ID NO: 267832 - DNA, 75 bp, synthetic construct
  source 1..75: mol_type = other DNA
atgaataagtgggttatccggtttgaaaacccagacagtgagtttaagagtgtgataaatggaggaacgacagaa

SEQ ID NO: 267833 - DNA, 75 bp, synthetic construct
  source 1..75: mol_type = other DNA
tacattaaccatactcctgatggaccccttctggttgaccagcctgattactcgccagaagaactcattgcacag

SEQ ID NO: 267834 - DNA, 75 bp, synthetic construct
  source 1..75: mol_type = other DNA
cagaggaagccgagaaggtagcagaagatgcactgaaggcagcaggcgatgtgatcgaccagccgaaacacgatg

SEQ ID NO: 267835 - DNA, 75 bp, synthetic construct
  source 1..75: mol_type = other DNA
atggctgaaaagcaggttaaagattacgaaaagtttgttgtgcgtttccctgacgggatgcgagatgctatagct

SEQ ID NO: 267836 - DNA, 75 bp, synthetic construct
  source 1..75: mol_type = other DNA
gaaaacggcattagaattggctgaggtacaccagaattataaaatagttgaatggctatcacattatagagatca

SEQ ID NO: 267837 - DNA, 75 bp, synthetic construct
  source 1..75: mol_type = other DNA
gtattgagatgttcgaatcggtagacagcccgttgcgcagcattacccaacgtatgaccggcgttttacagtcca

SEQ ID NO: 267838 - DNA, 75 bp, synthetic construct
  source 1..75: mol_type = other DNA
ggcagaaatctccgccgcatttgagaagcaagggatcggcggtgtcggcaacgtgaagaaaatgtcctacatcaa

SEQ ID NO: 267839 - DNA, 75 bp, synthetic construct
  source 1..75: mol_type = other DNA
ttcactacgtctaataccgacctgcagatgctgggtgaaaccatgaaatacgttggcccggctgcgcaggcggca

SEQ ID NO: 267840 - DNA, 75 bp, synthetic construct
  source 1..75: mol_type = other DNA
gggcggcatggaagcagcaaggccacgccatcagtgaagtgcgctaccagtggcagggcatggcgctgtcggcga

SEQ ID NO: 267841 - DNA, 75 bp, synthetic construct
  source 1..75: mol_type = other DNA
gtctatatccgcgatgaacagggcagactggcagaaaaacaccgcccggacggtagcgtatggcgctatgcgcgg

SEQ ID NO: 267842 - DNA, 75 bp, synthetic construct
  source 1..75: mol_type = other DNA
gcagcgatggtaattggttcccgctgggcatctgaaaccgggcagattgtagaaggctcacctaatgtttttttt

SEQ ID NO: 267843 - DNA, 75 bp, synthetic construct
  source 1..75: mol_type = other DNA
ttgtatggaatcaaagattcgaatatcatgttcaagggtgggaaatttgaaataaaaaaagagacttcagggaag

SEQ ID NO: 267844 - DNA, 75 bp, synthetic construct
  source 1..75: mol_type = other DNA
ggaacccggaagcgtgcggtaacccgattacttatgacggcggcacgctgctggatctgaatcgtcatgagctga

SEQ ID NO: 267845 - DNA, 75 bp, synthetic construct
  source 1..75: mol_type = other DNA
cagatatgggagctatcaaactggatagaagatattgaatctgatgttcgctatgtaggagacggacttgttgaa

SEQ ID NO: 267846 - DNA, 75 bp, synthetic construct
  source 1..75: mol_type = other DNA
acacaaaggtatcacattacttagattggatgtttttgatgacagaacaagcgaatgtctttctgaagagattaa

SEQ ID NO: 267847 - DNA, 75 bp, synthetic construct
  source 1..75: mol_type = other DNA
actgacgataagctggtggggcttgttgatgatttatcctatgaaggatggatgattgctatcgacaaggcggtt

SEQ ID NO: 267848 - DNA, 75 bp, synthetic construct
  source 1..75: mol_type = other DNA
cgcgctgaacttgaagcatataaagaaaatacgccagcggcacttaatgaggcgtttaaacactgggatttagct

SEQ ID NO: 267849 - DNA, 75 bp, synthetic construct
  source 1..75: mol_type = other DNA
aaaaaaagttattttaataaggaaatcagaaatctaataaaaaataatatttatcctgagctatacaatgagcaa

SEQ ID NO: 267850 - DNA, 75 bp, synthetic construct
  source 1..75: mol_type = other DNA
tcgattaatagaaaaatcagcttactgctcaactgaaaacacgatgaccaataaatttgatgttgtcggtgatgc

SEQ ID NO: 267851 - DNA, 75 bp, synthetic construct
  source 1..75: mol_type = other DNA
tcaaccaggaaatatacccacagctatatactcctgaaatattttatgaggcctgcagaaacctccagtcatttt

SEQ ID NO: 267852 - DNA, 75 bp, synthetic construct
  source 1..75: mol_type = other DNA
tggtatggcgatcccgttcgctatggcaatgcaagcacttgtaattttcttgttcacatcattttcaccagtgat

SEQ ID NO: 267853 - DNA, 75 bp, synthetic construct
  source 1..75: mol_type = other DNA
ggcgagccactggtcgagagccgctacctctacgacccgctgggacggcgaatggcaaaacgggtctggcggcgg

SEQ ID NO: 267854 - DNA, 75 bp, synthetic construct
  source 1..75: mol_type = other DNA
agcttcacgccgctcatcagaatcgaaacagagaatggcgaacaggcgaaggcgcggcaccggagcctggcggag

SEQ ID NO: 267855 - DNA, 75 bp, synthetic construct
  source 1..75: mol_type = other DNA
gaatgttcaggatgtatgtcgtttatgttattgcgtttattatcctctttttattgttcttctgttcagcggtga

SEQ ID NO: 267856 - DNA, 75 bp, synthetic construct
  source 1..75: mol_type = other DNA
cgtttaaagaagccgctgatggtcgcgttctgccctgcctgacgcctgaagtcgcggacgcgataggcctcaaaa

SEQ ID NO: 267857 - DNA, 75 bp, synthetic construct
  source 1..75: mol_type = other DNA
cggaatacacaccggcgcgaaaagttcatttttaccactgcgaccaccggggcctgccgctggcgctcatcagcg

SEQ ID NO: 267858 - DNA, 75 bp, synthetic construct
  source 1..75: mol_type = other DNA
ggtttcgatattttgaaatcgctgcgtatccgttcgcgagggatcaacttcatcgcctgcccgacctgttcgcgt

SEQ ID NO: 267859 - DNA, 75 bp, synthetic construct
  source 1..75: mol_type = other DNA
cactttgtgtacctgcgatctttactacacatgctaccactaactatccacttttcataccggacaacatcagta

SEQ ID NO: 267860 - DNA, 75 bp, synthetic construct
  source 1..75: mol_type = other DNA
cattgtctggtccagtaaaaaaagcatggtatttcaggagatattattatcttttgaaatattttctttttaagg

SEQ ID NO: 267861 - DNA, 75 bp, synthetic construct
  source 1..75: mol_type = other DNA
gctttttcagcagtttactacggaacccaggcagccgattttattatcagatatttaccagaaaaagttattgat

SEQ ID NO: 267862 - DNA, 75 bp, synthetic construct
  source 1..75: mol_type = other DNA
tggcgtgtcgggagtgacagcaaatgacctccgcactgccgaagccatggtcagaagccgtgaagagaatgaatt

SEQ ID NO: 267863 - DNA, 75 bp, synthetic construct
  source 1..75: mol_type = other DNA
caggagtttgatgttatcggtacggttaacgcgctggagcaacgcctggaagatatcatcactccgatggacgtt

SEQ ID NO: 267864 - DNA, 75 bp, synthetic construct
  source 1..75: mol_type = other DNA
ggccagccagacgctgactgattatctgacggaagacggcagcaacctgtactcctgtattgtcggtatgcagtg

SEQ ID NO: 267865 - DNA, 75 bp, synthetic construct
  source 1..75: mol_type = other DNA
tgctgtcggaaatcttcccgaatgctattcgtggtaaagcgctggcaatcgcggtggcggcccagtggctggcga

SEQ ID NO: 267866 - DNA, 75 bp, synthetic construct
  source 1..75: mol_type = other DNA
agttggcagcatcacccgattaccttagtcgctacattaggtggtttattatttggctacgacaccgccgttatt

SEQ ID NO: 267867 - DNA, 75 bp, synthetic construct
  source 1..75: mol_type = other DNA
tggctgatgtcacgcggtaagcaagaacaagcggaaggcatcctgcgcaaaattatgggcaacgctttggcagcc

SEQ ID NO: 267868 - DNA, 75 bp, synthetic construct
  source 1..75: mol_type = other DNA
ggcacccggatcagcactctggaaaatcaggtaagcgaactggttgcacttgtcgggcagttaacaggaagcgaa

SEQ ID NO: 267869 - DNA, 75 bp, synthetic construct
  source 1..75: mol_type = other DNA
aaatgaacgggtacacctacacacttaaggaaaacggactgccttacgctggtgttattgcacaggaagcaatgg

SEQ ID NO: 267870 - DNA, 75 bp, synthetic construct
  source 1..75: mol_type = other DNA
aggaagaatttgttaacgagaaagccagacggttttcttatatgaagactatgtattctgtatgtccagaagcgt

SEQ ID NO: 267871 - DNA, 75 bp, synthetic construct
  source 1..75: mol_type = other DNA
atttttctatgtttataaattgaaatattactttcgttcgggggtaatgtttgatattccattttttatttattt

SEQ ID NO: 267872 - DNA, 75 bp, synthetic construct
  source 1..75: mol_type = other DNA
aaaggatggagtagccatctattcattattactgtagctgaattattatatcgatatagaaatcagaggataaac

SEQ ID NO: 267873 - DNA, 75 bp, synthetic construct
  source 1..75: mol_type = other DNA
taccgaactggatgtacttcctgatggtgtgaatattgatggtggatggtattaccaggacggcgaagtgctgcc

SEQ ID NO: 267874 - DNA, 75 bp, synthetic construct
  source 1..75: mol_type = other DNA
ccggaagtgttcaaaacgctgggggccagcacggatatcgcgctgttgcagaccattattgtcggagttatcaac

SEQ ID NO: 267875 - DNA, 75 bp, synthetic construct
  source 1..75: mol_type = other DNA
ccaattgcataaattgtctacaattactgaaaataatgttaattttataacaggtatacaacatccaaatttaga

SEQ ID NO: 267876 - DNA, 75 bp, synthetic construct
  source 1..75: mol_type = other DNA
attgatgatattattactaacataagtagtaatgatgaattcaaaacctttgtagataaacagatatatagtatt

SEQ ID NO: 267877 - DNA, 75 bp, synthetic construct
  source 1..75: mol_type = other DNA
tggggaagaacaattgaaaatggaacgacgcaggaatggaagaaattactaacagtagacgatctcaattcatct

SEQ ID NO: 267878 - DNA, 75 bp, synthetic construct
  source 1..75: mol_type = other DNA
gaatcgctacgcaatgcgatgatggaacaggcactggaaaccggaaagcagcaagatgtgctggagctggcgtaa

SEQ ID NO: 267879 - DNA, 75 bp, synthetic construct
  source 1..75: mol_type = other DNA
atgacatacgatagtgaatacggatcacacgtatccctatatcgggatagaataaaacaggttattgatgactcc

SEQ ID NO: 267880 - DNA, 75 bp, synthetic construct
  source 1..75: mol_type = other DNA
ccgttctttcaacccagaatagactctggtgcaatatctcgttttacaagtgcattaaaagcaaagcttgagcac

SEQ ID NO: 267881 - DNA, 75 bp, synthetic construct
  source 1..75: mol_type = other DNA
aaaaattgagtttgttcttggtaagaaaataattaatctttatgaaatagacgatctctgtgcaaaaagaataat

SEQ ID NO: 267882 - DNA, 75 bp, synthetic construct
  source 1..75: mol_type = other DNA
ttggatgtttttgatgacagaacaagcgaatgtctttctgaagaaattaagatatatcaagaatgctatgaaaaa

SEQ ID NO: 267883 - DNA, 75 bp, synthetic construct
  source 1..75: mol_type = other DNA
ataataaataaaacaagacaaaatgagttagtaaaagtattttgcgagtataaaacagagttcttaattttgttt

SEQ ID NO: 267884 - DNA, 75 bp, synthetic construct
  source 1..75: mol_type = other DNA
atcataacgctaaaccggatatttgggactattttaaagctatggggattggttggttgaaaacgatcattcctt

SEQ ID NO: 267885 - DNA, 75 bp, synthetic construct
  source 1..75: mol_type = other DNA
ataaacaagaagttaaaagagaatacaaggagcaagaaggaaatccagaaattaagtctaaacgcagagagcgca

SEQ ID NO: 267886 - DNA, 75 bp, synthetic construct
  source 1..75: mol_type = other DNA
gatgctgacggtcagtggggcgcatttaaccctaaagctggtagatggcaaccgctcgcagttgcgcaaggtggc

SEQ ID NO: 267887 - DNA, 75 bp, synthetic construct
  source 1..75: mol_type = other DNA
ggccgcacgatacggtgcatgtgtttgtcagcgataacccggatgaacagattctggaagatgccggtggtaatc

SEQ ID NO: 267888 - DNA, 75 bp, synthetic construct
  source 1..75: mol_type = other DNA
gcaattgaaatctgatgtcagtaatagccgtttgatgattgccaaccctactcacattgccatagggatatactt

SEQ ID NO: 267889 - DNA, 75 bp, synthetic construct
  source 1..75: mol_type = other DNA
ttttgctggtttgtatgtttacaacaatacttgtttcatggtttcaaagtaaaatgcaattagcaactgaagcta

SEQ ID NO: 267890 - DNA, 75 bp, synthetic construct
  source 1..75: mol_type = other DNA
cgatcaaaccagatactctggttgccgaccttacggtagctcagcagcagatggtagaaattgccaaggccattt

SEQ ID NO: 267891 - DNA, 75 bp, synthetic construct
  source 1..75: mol_type = other DNA
cgcattcgaggcgtatcaaaatgcgaaactggacgcggaatttgatgccatcatgcaacgtcatgaacacacaat

SEQ ID NO: 267892 - DNA, 75 bp, synthetic construct
  source 1..75: mol_type = other DNA
gcagacgcacgggtatttgtcgaaggccgctggcagtttgatgatgataagctcaatacgttgcatcatttaggt

SEQ ID NO: 267893 - DNA, 75 bp, synthetic construct
  source 1..75: mol_type = other DNA
taaagtccagcgcgtgaaaattttcgtctatgccttctgtggattattaacggggattgcaggtgtcattctggc

SEQ ID NO: 267894 - DNA, 75 bp, synthetic construct
  source 1..75: mol_type = other DNA
actacggataatatgacaaatgctatggagttagccctaaaaatgagtggggttggacctggtgatgaagtttta

SEQ ID NO: 267895 - DNA, 75 bp, synthetic construct
  source 1..75: mol_type = other DNA
acgcctccattctgggcggcaaagtctatattggagataacgtcacgataggtgcacatgcattggttttgcatg

SEQ ID NO: 267896 - DNA, 75 bp, synthetic construct
  source 1..75: mol_type = other DNA
aaaggtggttactggcggaaaattgctggcaaaattgagcgaaaaatccttgatagttatgacgttaaaatccca

SEQ ID NO: 267897 - DNA, 75 bp, synthetic construct
  source 1..75: mol_type = other DNA
gaatggcaaaaaaccagaggctagagctctactgctccttggggaaaatgcggccgggaaaagtaccattctcga

SEQ ID NO: 267898 - DNA, 75 bp, synthetic construct
  source 1..75: mol_type = other DNA
atctacaacgtcaaattcaagtcagtgagaaaggtaaaaatactgggatcatctctctttcacttgaaggtgatg

SEQ ID NO: 267899 - DNA, 75 bp, synthetic construct
  source 1..75: mol_type = other DNA
aaaccgatccggcttggggctgcatctgtcggttggcgctctacctctgtagacgagtggatcgcctctcgggtg

SEQ ID NO: 267900 - DNA, 75 bp, synthetic construct
  source 1..75: mol_type = other DNA
atctcgtctcaactccggacaaccgacggtaggtgtgggttatgaactggaagctattgccgcggtagtgattgg

SEQ ID NO: 267901 - DNA, 75 bp, synthetic construct
  source 1..75: mol_type = other DNA
tcttatcgatgcgtgcagaaatcagcaagcaaaaaatttatggtgtgtttctgtttatactggcgttcgccctgg

SEQ ID NO: 267902 - DNA, 75 bp, synthetic construct
  source 1..75: mol_type = other DNA
tgccagtaccttcctcgcaggaatatcaggactatctgcgtagtgaaagtagtttgtggcctcagtggccgccaa

SEQ ID NO: 267903 - DNA, 75 bp, synthetic construct
  source 1..75: mol_type = other DNA
tcttcatgttaatataccagatagttaactatctggttccacttgcattgactccatatttagttagaattttgg

SEQ ID NO: 267904 - DNA, 75 bp, synthetic construct
  source 1..75: mol_type = other DNA
atggcctcacctgaactcgaaaactatgagcgcaggctgcaacaacttcttgatacctccccggtacagccgctg

SEQ ID NO: 267905 - DNA, 75 bp, synthetic construct
  source 1..75: mol_type = other DNA
cgctgggtgtttacttcggtctgattaacggcggttacgccagcctgattgcctggttacccgccttctatattg

SEQ ID NO: 267906 - DNA, 75 bp, synthetic construct
  source 1..75: mol_type = other DNA
cggttccttgctggcattgatgacgcttgggcaagccgcaggggcattgctgatgcctgctatggctcgccatca

SEQ ID NO: 267907 - DNA, 75 bp, synthetic construct
  source 1..75: mol_type = other DNA
acgcggattacaccaatacctttgttaacatggatgcaaagaacactttgctgtccacgcttaatgttttcaatg

SEQ ID NO: 267908 - DNA, 75 bp, synthetic construct
  source 1..75: mol_type = other DNA
ttcagagcggttgattggcttatatactgggttagctccattatatagtgggatatttaagtcaataaaagaaca

SEQ ID NO: 267909 - DNA, 75 bp, synthetic construct
  source 1..75: mol_type = other DNA
aatcagtatcggtattgtgcaaaacataaatttaaacaaaagcattatatggcaggcatttttaattatttaaag

SEQ ID NO: 267910 - DNA, 75 bp, synthetic construct
  source 1..75: mol_type = other DNA
atgacctgtacacatctgattttgaggaatttatgcgtttaccatacaaacatgtggagaatgttatattagaaa

SEQ ID NO: 267911 - DNA, 75 bp, synthetic construct
  source 1..75: mol_type = other DNA
gggcttgagcttgatcctgatgatgattcacaggttcttaaagcgattggtggcggtcgcctgcttaatattgtc

SEQ ID NO: 267912 - DNA, 75 bp, synthetic construct
  source 1..75: mol_type = other DNA
ttcaagagtagaattgcaaattgttttaatgctactgatataatagttgattcattgccaaaagaggatgtaatt

SEQ ID NO: 267913 - DNA, 75 bp, synthetic construct
  source 1..75: mol_type = other DNA
gctcccgttgcaaaagcagaagctaaacctgaaacacctgcgcaaccggtggtcgatgaacaagcggttttcgac

SEQ ID NO: 267914 - DNA, 75 bp, synthetic construct
  source 1..75: mol_type = other DNA
cccggagacaggccgtcccgttgaactgacgtaccggggcatgcgtgttctggtgccatcaccactggcgacagc

SEQ ID NO: 267915 - DNA, 75 bp, synthetic construct
  source 1..75: mol_type = other DNA
aatgccggtggagtttgaaccgccacgcgtggcgattgtggtagataaatcgacatggaccagggagttgattga

SEQ ID NO: 267916 - DNA, 75 bp, synthetic construct
  source 1..75: mol_type = other DNA
aagaatggcaaggtcgacgagtagttggcatggttggtgatcgattacactatgagattggtggctgtgcgagag

SEQ ID NO: 267917 - DNA, 75 bp, synthetic construct
  source 1..75: mol_type = other DNA
gactacagggttggttcgttatagcgttcttttaccttatgctaaacaaaggcacgtcactactgatcggttgat

SEQ ID NO: 267918 - DNA, 75 bp, synthetic construct
  source 1..75: mol_type = other DNA
ccatgaaaccacacagtttgaaattgagtctgttatcgcccgctgccgttttcataaggaacaggtgaagtccaa

SEQ ID NO: 267919 - DNA, 75 bp, synthetic construct
  source 1..75: mol_type = other DNA
ctggaaacggttgaaagtacgctggcccgcgccctgttcaaacaggaagcgaaagcggctaagactgacgacggt

SEQ ID NO: 267920 - DNA, 75 bp, synthetic construct
  source 1..75: mol_type = other DNA
accagagcgatgaaaaaactcaggcaactgacgcggttaatctcttcaaacagttgaaaaaagatgtacgcgcca

SEQ ID NO: 267921 - DNA, 75 bp, synthetic construct
  source 1..75: mol_type = other DNA
gttcggctcccctgtcagcacataccaggccgccaggctggtgggtaatgtgctgggtcttgtcgacgcaacatc

SEQ ID NO: 267922 - DNA, 75 bp, synthetic construct
  source 1..75: mol_type = other DNA
atctgccggtggtgaaatttatcacgccaaatattatcggttgcctgctgtggccgccgttctacttcctgccgg

SEQ ID NO: 267923 - DNA, 75 bp, synthetic construct
  source 1..75: mol_type = other DNA
gcaaggccatcctcagattcagtcctccagattatcaggctgccgtagcgcgtggcgaagcggctttgccaacca

SEQ ID NO: 267924 - DNA, 75 bp, synthetic construct
  source 1..75: mol_type = other DNA
gatagttgggtattcgattattcaggcagccgctgctatgcccacttccgacgggataaaatcagcaaccaatta

SEQ ID NO: 267925 - DNA, 75 bp, synthetic construct
  source 1..75: mol_type = other DNA
cgtcaaaaaagaagtcgatgaactaatcgctatttcagacagtgtaggtaattcccgaaatccgctcattttaat

SEQ ID NO: 267926 - DNA, 75 bp, synthetic construct
  source 1..75: mol_type = other DNA
tgaaatggcttcgttgttacgcgatggcaaaagtttcagtcacagcgaagtgcgcaatgcagctatccttgggtt

SEQ ID NO: 267927 - DNA, 75 bp, synthetic construct
  source 1..75: mol_type = other DNA
tggctgggctggcgttttaaaaagccgttgcatcgctggtcatttctgaagaaaaacaaagcactactcgataaa

SEQ ID NO: 267928 - DNA, 75 bp, synthetic construct
  source 1..75: mol_type = other DNA
cccgcgccctgttccaacagaaagcgaaagcggcaaagaccaatgacggcgacgtcgatttcaacgtggtgtttg

SEQ ID NO: 267929 - DNA, 75 bp, synthetic construct
  source 1..75: mol_type = other DNA
atatattattcgcgacgagctgatcaaactctcaactattttgagcgaaaaaaaatacgatatgttcactgttga

SEQ ID NO: 267930 - DNA, 75 bp, synthetic construct
  source 1..75: mol_type = other DNA
gagtgcggagagtgaggcatggcttgcgcagtgcgggctgacggcggaacagatggccgcgcaactggaggcgga

SEQ ID NO: 267931 - DNA, 75 bp, synthetic construct
  source 1..75: mol_type = other DNA
gagttgggctgatatcggcgttatcggctggctggtggatggcgcagcgatcgtcaatcaggtggcgttatgccg

SEQ ID NO: 267932 - DNA, 75 bp, synthetic construct
  source 1..75: mol_type = other DNA
ttacgacgaaacgtttccaaagcccgtcagactcggtgctgcctccgttggatgtcgttccacttccgttgatga

SEQ ID NO: 267933 - DNA, 75 bp, synthetic construct
  source 1..75: mol_type = other DNA
ggtcgtgaagaagataaatttaattgctatggcattccggttgtgagaggcccggtatttggtttgcctctggtc

SEQ ID NO: 267934 - DNA, 75 bp, synthetic construct
  source 1..75: mol_type = other DNA
gttggtttgtttaaaagacttaatggctttgattcccgattctttatgtattgtgaagatgtggatatctgttac

SEQ ID NO: 267935 - DNA, 75 bp, synthetic construct
  source 1..75: mol_type = other DNA
tcaagagttaattaaaaacaataaatttatagctcttgagatatcagaaaactaccctgatttaagcgatgagga

SEQ ID NO: 267936 - DNA, 75 bp, synthetic construct
  source 1..75: mol_type = other DNA
ttaaaaaagttatgtccgaatatcatcgctgaaggcgtcgaaaacattgattgtcataagttatcaaaagggata

SEQ ID NO: 267937 - DNA, 75 bp, synthetic construct
  source 1..75: mol_type = other DNA
attttggaagtggtaacgccaccatgaaagcattaattaaaaataaatatcatgcaataaaacttgataagtcat

SEQ ID NO: 267938 - DNA, 75 bp, synthetic construct
  source 1..75: mol_type = other DNA
tgctcggttttatgcctcgtgctgatgtaaaacgaataatgcgcaaaagtaattgtgtctttatattaagtcgta

SEQ ID NO: 267939 - DNA, 75 bp, synthetic construct
  source 1..75: mol_type = other DNA
attaatgcaagaacgcccctccatctccgttgacaccctattggcaacgctgggtattgatcgccaaacactaca

SEQ ID NO: 267940 - DNA, 75 bp, synthetic construct
  source 1..75: mol_type = other DNA
acgccataaaacttgacaaattattttttcaggaaaatatagacaaaccatattttgaggaaattattaataatt

SEQ ID NO: 267941 - DNA, 75 bp, synthetic construct
  source 1..75: mol_type = other DNA
agagcgtcagacgcagcgggcaggctgcgggggcagcagccgatgccgtaccggaaagcgtggaccgcaaagcga

SEQ ID NO: 267942 - DNA, 75 bp, synthetic construct
  source 1..75: mol_type = other DNA
cagaccggtggtgccacatcttccccggcagatcaccacggtttatccgtcagagccgctgactgtttcaccggt

SEQ ID NO: 267943 - DNA, 75 bp, synthetic construct
  source 1..75: mol_type = other DNA
agctagaaaaattaaatcctccggaaaatttacgtataacaatagaaaaatttggctggaagaaaaaactatcac

SEQ ID NO: 267944 - DNA, 75 bp, synthetic construct
  source 1..75: mol_type = other DNA
ttttgtggggcaggctaataatacaaccattaacgggggcagacagtcaattcatgacggagggatttccacagg

SEQ ID NO: 267945 - DNA, 75 bp, synthetic construct
  source 1..75: mol_type = other DNA
tacgataatcgacagtggcaatcaggacgtttatacaggtggtatcagcaatggaacgacaattaagggtggtaa

SEQ ID NO: 267946 - DNA, 75 bp, synthetic construct
  source 1..75: mol_type = other DNA
gaaatcctttatcaatggtgcgcaaaaaaacttaatgaatggctgaacaagtctgaacgtgacacgccagaccag

SEQ ID NO: 267947 - DNA, 75 bp, synthetic construct
  source 1..75: mol_type = other DNA
tggcaaaatcgaccagcatcgctgggtgctgaaaatggcgctctggagtttgccgttgccgtggattgcgattga

SEQ ID NO: 267948 - DNA, 75 bp, synthetic construct
  source 1..75: mol_type = other DNA
ttccctttaaagctggtcacattgaggattgggttctaaaagccttacctgttttaacattcaataaagagcgat

SEQ ID NO: 267949 - DNA, 75 bp, synthetic construct
  source 1..75: mol_type = other DNA
aaaggatgagcttactgactggtatcttgacctgttgtcaggtctatcggcggatgttaagatcaaattaatgca

SEQ ID NO: 267950 - DNA, 75 bp, synthetic construct
  source 1..75: mol_type = other DNA
tatgacagcgaagattaccaggaaggaatgaacgctttcctcgaaaaacgtaaacctaatttcgttggtcattaa

SEQ ID NO: 267951 - DNA, 75 bp, synthetic construct
  source 1..75: mol_type = other DNA
ctggcaatatccctttaaaaatagggtatgtatggaacatgaaggtattttatcgtcctgcagagataagcaaca

SEQ ID NO: 267952 - DNA, 75 bp, synthetic construct
  source 1..75: mol_type = other DNA
cgattcattaacaaaacggaacagacctacctagtttctggcgcaatatatgaatctttcccagacgggacaaaa

SEQ ID NO: 267953 - DNA, 75 bp, synthetic construct
  source 1..75: mol_type = other DNA
ggtgaaaccactggttgccgcctctgataccctgcctgcagtgctgctctctgtgttggtgtgccaggttctctg

SEQ ID NO: 267954 - DNA, 75 bp, synthetic construct
  source 1..75: mol_type = other DNA
accagtagccatctggcgcagggaacagaactcaccgttacgctaaacggcaaaacctacacgaccagcgtaggc

SEQ ID NO: 267955 - DNA, 75 bp, synthetic construct
  source 1..75: mol_type = other DNA
gccgctggtcgagtatacgcgggacaggctgcaccgggagacggtgcgcagctttggcagcatggcaggcagtaa

SEQ ID NO: 267956 - DNA, 75 bp, synthetic construct
  source 1..75: mol_type = other DNA
caggcggtgactccttaaacacaaaggaggctgccataatggctactacccctacccaaaaaccgcaatttatct

SEQ ID NO: 267957 - DNA, 75 bp, synthetic construct
  source 1..75: mol_type = other DNA
ggctcaggaatacaacgtgattgcatcctcaatgaagatcgatatgatatcaatttttcacattccagccacatg

SEQ ID NO: 267958 - DNA, 75 bp, synthetic construct
  source 1..75: mol_type = other DNA
atggagactgtttttgacgcactgaaagcgatgggaaaagccacgtcggtagagctggctgcgcgcttgatatca

SEQ ID NO: 267959 - DNA, 75 bp, synthetic construct
  source 1..75: mol_type = other DNA
agaacttgctgcgcgacttgatatcagtcgtgaaaaagtgctgaacgaactatgggaactgaaaaaaggctggtt

SEQ ID NO: 267960 - DNA, 75 bp, synthetic construct
  source 1..75: mol_type = other DNA
cacaaccaaaggtcatgcacacgggcgttacagggtaatcgatggtgatgttttcattcgtcatggttactccta

SEQ ID NO: 267961 - DNA, 75 bp, synthetic construct
  source 1..75: mol_type = other DNA
cagtgcaatcacagatcacacaaaccacgccttacacagtcataactcacactcacggtaggtatccagtcattg

SEQ ID NO: 267962 - DNA, 75 bp, synthetic construct
  source 1..75: mol_type = other DNA
tctggatggcaaacctgtcagttaaccaggcagcaatggcggcgggctcagcgatccctcacatctacgttcagg

SEQ ID NO: 267963 - DNA, 75 bp, synthetic construct
  source 1..75: mol_type = other DNA
gcgaagctcgccgcacgctggcgcgggatcacgtctgtttctttgcaggccgtatccgtctggaggtggcagcat

SEQ ID NO: 267964 - DNA, 75 bp, synthetic construct
  source 1..75: mol_type = other DNA
cactacgcacatcaaatcagcggcctcgtccgtactgtatctatggtggcgttagtggggctacgttcgcgtagg

SEQ ID NO: 267965 - DNA, 75 bp, synthetic construct
  source 1..75: mol_type = other DNA
atgccaccggtatatgctcgtcaagctctgctcatcgccgatttcaggagtggcgagatgccggagtatttgaac

SEQ ID NO: 267966 - DNA, 75 bp, synthetic construct
  source 1..75: mol_type = other DNA
ctatgaactcagagattgttcagatactggaagatgccttgaatgcagaaaatacactcggggaaatagcagata

SEQ ID NO: 267967 - DNA, 75 bp, synthetic construct
  source 1..75: mol_type = other DNA
ctcaggctgaacagccacaacagccacaacagccacaacagccacaacagccacaacagccacaacagtcacaac

SEQ ID NO: 267968 - DNA, 75 bp, synthetic construct
  source 1..75: mol_type = other DNA
taattcatgacaagctgattaatgctgatgtatttatgtttatggcccagcatgatggtattgcgaaaggtaatt

SEQ ID NO: 267969 - DNA, 75 bp, synthetic construct
  source 1..75: mol_type = other DNA
ggcgcggcaggatggcgagctgccgtcgagctgaaacggcaaaatgtcgatgtaatggtagcctccagcaaagcc

SEQ ID NO: 267970 - DNA, 75 bp, synthetic construct
  source 1..75: mol_type = other DNA
agtgagttttgctgtcacttagcactgaacgagcagataacgttatcttataatggggttgttataacggcacca

SEQ ID NO: 267971 - DNA, 75 bp, synthetic construct
  source 1..75: mol_type = other DNA
cgaggataagcctatgatttttatttctcaggtggagtttgaaaataataaaactatggctgaacatctttcttc

SEQ ID NO: 267972 - DNA, 75 bp, synthetic construct
  source 1..75: mol_type = other DNA
taatgaataaccaattaagcgaaatatgttcagactccattgtttcaatggttaaaaaaggagtgcgaagattca

SEQ ID NO: 267973 - DNA, 75 bp, synthetic construct
  source 1..75: mol_type = other DNA
agttaatatctaatatatccaacgagatagttttattacgcaacatcaaagaaaaccattctaaaaatcatcaaa

SEQ ID NO: 267974 - DNA, 75 bp, synthetic construct
  source 1..75: mol_type = other DNA
tttataaaaaattatcgttagaaatctctttgctcgtattatttctactcttaataaatgtcatcataaaatttc

SEQ ID NO: 267975 - DNA, 75 bp, synthetic construct
  source 1..75: mol_type = other DNA
agatgtttttcacatgtatttcagcattttctgagcaaacagggttcttatctctgttggttaaaagcatcaact

SEQ ID NO: 267976 - DNA, 75 bp, synthetic construct
  source 1..75: mol_type = other DNA
tgaattcatcattcatcattaacatcgatggaaaaaaaataaaagcaaataaaaatcatgcttttctaacagata

SEQ ID NO: 267977 - DNA, 75 bp, synthetic construct
  source 1..75: mol_type = other DNA
atgcgtataaaaattattattcctctgttttttttatttgtctgcagaaccgtttctgcagactgttttgagcag

SEQ ID NO: 267978 - DNA, 75 bp, synthetic construct
  source 1..75: mol_type = other DNA
ttgccgaccagcagaaactgttggcatcaaacgagcaaaaacagatcgtccgcgacaacgggcaggataccgcca

SEQ ID NO: 267979 - DNA, 75 bp, synthetic construct
  source 1..75: mol_type = other DNA
gcaccatggaaaaaagatgaacttactgattggtatctagacctgctgtcagatctaccgacgaatgttcaaatg

SEQ ID NO: 267980 - DNA, 75 bp, synthetic construct
  source 1..75: mol_type = other DNA
catcgcgtgccgtcgaatctcactacccgtctgcgccagctggaaacagaactgggggttgatctgtttattcgc

SEQ ID NO: 267981 - DNA, 75 bp, synthetic construct
  source 1..75: mol_type = other DNA
tcgccttttatggtgttaatgcagcagggcggccagctaaaagatatgttcggtgggattggcccggcgatcaaa

SEQ ID NO: 267982 - DNA, 75 bp, synthetic construct
  source 1..75: mol_type = other DNA
ttacgttgttcatatgttgacccagctgatttttcaagaggactagcctctaacttgaattttttggctccgaat

SEQ ID NO: 267983 - DNA, 75 bp, synthetic construct
  source 1..75: mol_type = other DNA
taaaaaccatgcagggtgtggtgatgcgttcctgccttattcatacatagctctgatgaatcccctaatgatttt

SEQ ID NO: 267984 - DNA, 75 bp, synthetic construct
  source 1..75: mol_type = other DNA
ctttaatgcccaaaccccctctggaatcacatggtttggaatccatttttcccaaaagaactccagcaaaggtcg

SEQ ID NO: 267985 - DNA, 75 bp, synthetic construct
  source 1..75: mol_type = other DNA
aatacgctgcattagaaattctgtggcacgataacccagaccgcactgcccagtaccagcgtattcaggttgatc

SEQ ID NO: 267986 - DNA, 75 bp, synthetic construct
  source 1..75: mol_type = other DNA
cgtcatgcccgccagttgttgcgcggtaaagagcttattcccgtgcacattgaagcccggctgaatacttcgtca

SEQ ID NO: 267987 - DNA, 75 bp, synthetic construct
  source 1..75: mol_type = other DNA
cgtcatgcccgccagttgttgcgcggtaaagagcttatccccgtgcatattgaagcccggatgaatacttcgtca

SEQ ID NO: 267988 - DNA, 75 bp, synthetic construct
  source 1..75: mol_type = other DNA
atggcaggcaacggcgcaacggttgccccaacggtgattacagagccggacggcacggcggagatcagtgtcacc

SEQ ID NO: 267989 - DNA, 75 bp, synthetic construct
  source 1..75: mol_type = other DNA
acagcagctaaagatggaactagtggtacatatcaggcagcgcagaaagcaggtaatttagcaggggcaggtggt

SEQ ID NO: 267990 - DNA, 75 bp, synthetic construct
  source 1..75: mol_type = other DNA
tggcaaaaccgtcctctggatgcgatttatcccattgtttaccttgactgtattgtcctgaaagtacggcaggac

SEQ ID NO: 267991 - DNA, 75 bp, synthetic construct
  source 1..75: mol_type = other DNA
agttgaaagaaagtagcctgacattgacgcatgagcagcgttgccaggtatgccaccagctgcgccatcggatta

SEQ ID NO: 267992 - DNA, 75 bp, synthetic construct
  source 1..75: mol_type = other DNA
taaaggaaagctggccagaattaagtttccctggatcacatgctgatattggtggcggttatgacccactggaag

SEQ ID NO: 267993 - DNA, 75 bp, synthetic construct
  source 1..75: mol_type = other DNA
agagctatttgaattactatacgaatattcattggttgaataagttgtaccataaagactcagaaataaatgcga

SEQ ID NO: 267994 - DNA, 75 bp, synthetic construct
  source 1..75: mol_type = other DNA
cgatacgccaccacataaaatgctgggacgtaacgaagacaccccaacccgacctatgtacaatattccatttat

SEQ ID NO: 267995 - DNA, 75 bp, synthetic construct
  source 1..75: mol_type = other DNA
tttcagaaagaacaataaatttaaatgaatatgaaactgcaattaacatcatcaatgagcatgttgcaaaagaaa

SEQ ID NO: 267996 - DNA, 75 bp, synthetic construct
  source 1..75: mol_type = other DNA
gacgcatgagcagcgttgccaggtatgccaccagctgcgccatcggattaagtcgatggtggggatctctaccga

SEQ ID NO: 267997 - DNA, 75 bp, synthetic construct
  source 1..75: mol_type = other DNA
cgaccagatcccgctggatcaaatgtcggtttcgatgactatgaacggggcagtcctgccagtactggcgtttta

SEQ ID NO: 267998 - DNA, 75 bp, synthetic construct
  source 1..75: mol_type = other DNA
agtccgataaatcagccgccgaattcgacgctatcgttgcgcaaacgaaccagttcctcaccgaaaacggtcgcc

SEQ ID NO: 267999 - DNA, 75 bp, synthetic construct
  source 1..75: mol_type = other DNA
agcataatgaaaacctgttggcagccgccgttaacgccgcgcgtgttcgtgcgacgctgggcgaaatctccgatg

SEQ ID NO: 268000 - DNA, 75 bp, synthetic construct
  source 1..75: mol_type = other DNA
catagtgcatacccactcgcgccacgccaccatctggtcgcaggccggacttgatctccccgcctggggcactac

SEQ ID NO: 268001 - DNA, 75 bp, synthetic construct
  source 1..75: mol_type = other DNA
atgtcattatcacgtctgcctttttttaacaaagacgcctattaccatctgggaaactatgagcgctctgacacc

SEQ ID NO: 268002 - DNA, 75 bp, synthetic construct
  source 1..75: mol_type = other DNA
ccgcaacacctatatttacccgccaaaaccgtcaatgcgtattatcgccgacatcatcgcctggtgttccggcaa

SEQ ID NO: 268003 - DNA, 75 bp, synthetic construct
  source 1..75: mol_type = other DNA
agtacattaaccgtaaatacagtctggctgattttatccatacctggtcggatttggctggtttacgttatgata

SEQ ID NO: 268004 - DNA, 75 bp, synthetic construct
  source 1..75: mol_type = other DNA
cagcgttttcaggggtgggttacgtccattccgcctgacggggtgagcgaaattgatcgccgggaagtgaagtcc

SEQ ID NO: 268005 - DNA, 75 bp, synthetic construct
  source 1..75: mol_type = other DNA
tggagactttccgccgcgcgctggagctggctgcctgtgaacggtccgctaagccggcaccgtccgtctggcatg

SEQ ID NO: 268006 - DNA, 75 bp, synthetic construct
  source 1..75: mol_type = other DNA
cggatgttgatgagcttgtgaaggtaccccagttcactctgaactggggtgagtctccgcaagaagtcatcgatc

SEQ ID NO: 268007 - DNA, 75 bp, synthetic construct
  source 1..75: mol_type = other DNA
ttgggactacatgttaagaatgttgacacaaagaatattaaaactatagagcataattataatggtgttattttt

SEQ ID NO: 268008 - DNA, 75 bp, synthetic construct
  source 1..75: mol_type = other DNA
cgtttttatcaagataataacttatcagaagcgtacttaaattattttttgactagcaactatcacaaaaaggaa

SEQ ID NO: 268009 - DNA, 75 bp, synthetic construct
  source 1..75: mol_type = other DNA
gcacctgccggacagttcccggtcagtgaatgctggttttcttcctctgattcttgccgcctttatgggaaccag

SEQ ID NO: 268010 - DNA, 75 bp, synthetic construct
  source 1..75: mol_type = other DNA
taaccctgtggaccctgttacgacgcaggatatcattgagggtataaataacaatgtattaaaatacaaagaagt

SEQ ID NO: 268011 - DNA, 75 bp, synthetic construct
  source 1..75: mol_type = other DNA
tagcgttatgttacaaacggtcgttaaaaaagcgctgaccaaatatgatttcaaagttgaaatggaacataccgc

SEQ ID NO: 268012 - DNA, 75 bp, synthetic construct
  source 1..75: mol_type = other DNA
atgaaagatacaattaatattctgtttgtctgtggttacggtgtaggcagtagcgttatgttacaaacggtcgtt

SEQ ID NO: 268013 - DNA, 75 bp, synthetic construct
  source 1..75: mol_type = other DNA
atattgcagagaagatacaaaaacagggaggtaattatttatttgctgtaaaaggacataaggagcggattaata

SEQ ID NO: 268014 - DNA, 75 bp, synthetic construct
  source 1..75: mol_type = other DNA
gaaacacaattctttgaaatactcgatcccatctctggcaatgtcatcgaatatgctttaccacatgatctctac

SEQ ID NO: 268015 - DNA, 75 bp, synthetic construct
  source 1..75: mol_type = other DNA
atggatgagatattatatctgaatggaaaaagggtcaggttaagaacatgtaaccatgttttttctgaacgtctt

SEQ ID NO: 268016 - DNA, 75 bp, synthetic construct
  source 1..75: mol_type = other DNA
aacgtttctagtggtgttgtttctaacggagttgtctcttccggagaaacacaggttgtttattcaaatggtcaa

SEQ ID NO: 268017 - DNA, 75 bp, synthetic construct
  source 1..75: mol_type = other DNA
atggacaaacttaaaattaagtttgactccttatcttctcacgatattacctttgtcggcattgttcagactgcc

SEQ ID NO: 268018 - DNA, 75 bp, synthetic construct
  source 1..75: mol_type = other DNA
ctttacatggaaagcctgactgcggaagagcgtgagattatcaaggcgggtagtttgattaacttcaataaaaac

SEQ ID NO: 268019 - DNA, 75 bp, synthetic construct
  source 1..75: mol_type = other DNA
ggggggcttctggctgttacatcaggcagcacagcaaccgatacaaccgtaaactcagccggtcgtttaagaatc

SEQ ID NO: 268020 - DNA, 75 bp, synthetic construct
  source 1..75: mol_type = other DNA
acggcggcatggtcaatgtgtctggtggttccgtgtcaggagcaagcgtaaacctgaatggcaggttaaacgttt

SEQ ID NO: 268021 - DNA, 75 bp, synthetic construct
  source 1..75: mol_type = other DNA
aacccaactgagtgggggggcgcagaacgtctcttctggcggcagtgccattgctgctgaagtgtactctggtgg

SEQ ID NO: 268022 - DNA, 75 bp, synthetic construct
  source 1..75: mol_type = other DNA
gcgtgagcaggcggcgagctgccagcgtgtgattggcggtctggcgaatattgccgaggaatacgcgactaaacg

SEQ ID NO: 268023 - DNA, 75 bp, synthetic construct
  source 1..75: mol_type = other DNA
gctggaaaatcagcgtctggcggggaatgtcagtgagctgacagaggtgtttgcgcgcattaagcagattgctgg

SEQ ID NO: 268024 - DNA, 75 bp, synthetic construct
  source 1..75: mol_type = other DNA
ttcgaagatcctcgacgaggtgaccaccaccgacgaattgattccttccggtgaaacctcttcgtatcgttcaaa

SEQ ID NO: 268025 - DNA, 75 bp, synthetic construct
  source 1..75: mol_type = other DNA
acggattaagtattcgccacaccacgcgcaacttcccgaaccgcgaaggtctaagccagctaatgggcagatgtc

SEQ ID NO: 268026 - DNA, 75 bp, synthetic construct
  source 1..75: mol_type = other DNA
ccgatttccgtaacagcgttgacgtgatgaccacggaaaccacctgtttaagctccgtctggcaaactgatgaag

SEQ ID NO: 268027 - DNA, 75 bp, synthetic construct
  source 1..75: mol_type = other DNA
gcggcgctggataatccgggtacgacgtttaaaggttatgtgatccatgaagatgcgccggtaacggaaattacg

SEQ ID NO: 268028 - DNA, 75 bp, synthetic construct
  source 1..75: mol_type = other DNA
gtctggatgggggttactccggatacacatcaggaagataacggaacagtggtacagggcacagggaaaaataat

SEQ ID NO: 268029 - DNA, 75 bp, synthetic construct
  source 1..75: mol_type = other DNA
ctggagctaccatgcgttgttctggctggcgatagggatgttgggtattgcgatgatttgcctgctgtttattaa

SEQ ID NO: 268030 - DNA, 75 bp, synthetic construct
  source 1..75: mol_type = other DNA
gagctggcccaccggctggatgtggacgaacgcaccatccgtaagtggaaatccggccagacacggatggtgtac

SEQ ID NO: 268031 - DNA, 75 bp, synthetic construct
  source 1..75: mol_type = other DNA
tgatccactcgctggtcaaaaccaatgcttttaacctttacaccctggccagcacagagagctggcagaggcctt

SEQ ID NO: 268032 - DNA, 75 bp, synthetic construct
  source 1..75: mol_type = other DNA
cgaacaattttaaaaatttacactgtccgtccgctattgcattgtaaatggaacatcatgaaccccggcgactta

SEQ ID NO: 268033 - DNA, 75 bp, synthetic construct
  source 1..75: mol_type = other DNA
cagacatcatagctgcgctacataagaaaggtttgtcacttgcctcactgagtagggctaacggtctttcaagca

SEQ ID NO: 268034 - DNA, 75 bp, synthetic construct
  source 1..75: mol_type = other DNA
gctggcctgcacgctttttgcgtggaatcgcaactacttcattctgctctcaacgggcgtacttctgagtagttt

SEQ ID NO: 268035 - DNA, 75 bp, synthetic construct
  source 1..75: mol_type = other DNA
aaagtttctgggaaaaagaatatcgaatggagtgtgataacagattttgggggggagggtaataagtattatgat

SEQ ID NO: 268036 - DNA, 75 bp, synthetic construct
  source 1..75: mol_type = other DNA
ggtgcattactgacagttgaaaactcacatgagtatccaatattggtacaaacaagaattatagatgaggataga

SEQ ID NO: 268037 - DNA, 75 bp, synthetic construct
  source 1..75: mol_type = other DNA
tagtttctatatttgttttctgtatagtaacaccttctttcgcaaatgaaaagttagagataaaagcaaaagaat

SEQ ID NO: 268038 - DNA, 75 bp, synthetic construct
  source 1..75: mol_type = other DNA
tgtaaatctggtgtatatagatgacttttgttctgacatattaaagctattagaaggagcgaacgaaactggtta

SEQ ID NO: 268039 - DNA, 75 bp, synthetic construct
  source 1..75: mol_type = other DNA
atgtatatcgatgatgtaatagccaaattcatcgaacacgtaaaggaaagtaatattaaaaaagaagatattacc

SEQ ID NO: 268040 - DNA, 75 bp, synthetic construct
  source 1..75: mol_type = other DNA
atatcggcgtaatttcaacccagtgatgacgccggaagatgaaccagactggaagaatatggataaacgttattc

SEQ ID NO: 268041 - DNA, 75 bp, synthetic construct
  source 1..75: mol_type = other DNA
ccgatattttcaatgctgttggtaatacctctgcattaattccattcaccattcaggtgatgctgccaacttact

SEQ ID NO: 268042 - DNA, 75 bp, synthetic construct
  source 1..75: mol_type = other DNA
gactggtttttaagcccgcagggacaacaattggtagaggatgtggggtatgtgccgctgtataaaacgttatta

SEQ ID NO: 268043 - DNA, 75 bp, synthetic construct
  source 1..75: mol_type = other DNA
atctcacaacgtttgatcaatatgggttttttggattatttgaatagcaaaaaggcagatactaatttgttcccc

SEQ ID NO: 268044 - DNA, 75 bp, synthetic construct
  source 1..75: mol_type = other DNA
aatctcaccattcgcggtcagggggtggtgaaaaatcagggacgagaatttgtctgccgaccgggtgatattttg

SEQ ID NO: 268045 - DNA, 75 bp, synthetic construct
  source 1..75: mol_type = other DNA
cgggaacaaggtttaccgctgccggaacagtatcgcattggctatcgtcgcaacctgggttcatggcccttacgg

SEQ ID NO: 268046 - DNA, 75 bp, synthetic construct
  source 1..75: mol_type = other DNA
aacttaccaactattcttaccaccagttttgaaaccggtcctaacggcccattagggaaggtgcgaataagcggg

SEQ ID NO: 268047 - DNA, 75 bp, synthetic construct
  source 1..75: mol_type = other DNA
gtgaacaaagccgcttatgcattctgcctgggcgcaatggcgaacggcgtttacggcccgtttgccattttcgcc

SEQ ID NO: 268048 - DNA, 75 bp, synthetic construct
  source 1..75: mol_type = other DNA
tgctttccttgatgcagatgatgagtggtgcactaataagttagaagtgcaagtatcagctatgttagaaaatgg

SEQ ID NO: 268049 - DNA, 75 bp, synthetic construct
  source 1..75: mol_type = other DNA
gccgttccaattggtgcacatgcacactccgttgctattggtccacacggacacaccatcaccgttaacgctgcg

SEQ ID NO: 268050 - DNA, 75 bp, synthetic construct
  source 1..75: mol_type = other DNA
tattgttggtctgaactgcggtcgctgggattacatcttcagctatatcaaaacgttgaaaaactatcccgatcg

SEQ ID NO: 268051 - DNA, 75 bp, synthetic construct
  source 1..75: mol_type = other DNA
ctgttggcaaagggcagcggtccctatttctatctgccgaaaacccagtcctggcaggaagcggcctggtggagc

SEQ ID NO: 268052 - DNA, 75 bp, synthetic construct
  source 1..75: mol_type = other DNA
catccctcgcccgcactcccatgactggggaatctatcaggaaattgatcatgttctggatcccctcgaaaaaaa

SEQ ID NO: 268053 - DNA, 75 bp, synthetic construct
  source 1..75: mol_type = other DNA
ctcggggtatccatgagcaagccgcacttatggcaggaggcgcggggcactggtggagacacagctaaactgggc

SEQ ID NO: 268054 - DNA, 75 bp, synthetic construct
  source 1..75: mol_type = other DNA
ttacggagattcgccatcactattgcgatgcgtttatggatggcaaggcgggagaacgggcggcgattgtgattg

SEQ ID NO: 268055 - DNA, 75 bp, synthetic construct
  source 1..75: mol_type = other DNA
ccatcggcattaacttaattggtgactatacccatgctgacttaggcacaggcagcaccattaagggaaggtgcg

SEQ ID NO: 268056 - DNA, 75 bp, synthetic construct
  source 1..75: mol_type = other DNA
gaacaaaaagcccgacgacccacgcggccccccgtgcatcgaaagagcgcaggctggcatcgaaagcacaaaaat

SEQ ID NO: 268057 - DNA, 75 bp, synthetic construct
  source 1..75: mol_type = other DNA
tacgacgcgaacaacatctacttggcagcgaactacggtgaaacccgtaacgctacgccgatcactaataaattt

SEQ ID NO: 268058 - DNA, 75 bp, synthetic construct
  source 1..75: mol_type = other DNA
gccaccgtcggtcgcaatgttggttttgacgatcaactctatttctcgcgagtatttaaaaaatgcaccggggcc

SEQ ID NO: 268059 - DNA, 75 bp, synthetic construct
  source 1..75: mol_type = other DNA
cttagccaaagagacgtggaaccacgccgactggaatcgtttttaccaaagcattttgtgttatagccactacag

SEQ ID NO: 268060 - DNA, 75 bp, synthetic construct
  source 1..75: mol_type = other DNA
tcaccagtgggtctattttcgcccccgcgcctactggcaggagtggctaaactggcccgctatttttgctaatac

SEQ ID NO: 268061 - DNA, 75 bp, synthetic construct
  source 1..75: mol_type = other DNA
gcagaatggctacgtgatttatcagtctgccgttccacaaggtgcttttgagatcaccgatctcaacaccgccag

SEQ ID NO: 268062 - DNA, 75 bp, synthetic construct
  source 1..75: mol_type = other DNA
tgcttgtttttatggctaacagcgaaccggttgatatggtaacgggtatttatgacagcaaggaggaatgcattg

SEQ ID NO: 268063 - DNA, 75 bp, synthetic construct
  source 1..75: mol_type = other DNA
tggcgtgattgtcattaaggcacaggaataccgcaatcaggagctcaaccgcgaagcggcgctggcccggctggt

SEQ ID NO: 268064 - DNA, 75 bp, synthetic construct
  source 1..75: mol_type = other DNA
gatggtccgggaaaaaaaggactgctacatctgagtgccgataatggtcagcgtgctgcggcaattgtcagggaa

SEQ ID NO: 268065 - DNA, 75 bp, synthetic construct
  source 1..75: mol_type = other DNA
ctacgccaaactgtatccattagacaagatgggctatgtacaaaaataacattcaccgcagaagaaaccaatttt

SEQ ID NO: 268066 - DNA, 75 bp, synthetic construct
  source 1..75: mol_type = other DNA
cggaaagtaatccgtttggtctggccctggactgctatgacgggctgcctcagcgtctggaagcggcggagcaga

SEQ ID NO: 268067 - DNA, 75 bp, synthetic construct
  source 1..75: mol_type = other DNA
ggtcgtcgcggatcgttaacctgcaacctcaccattcatggcgtgcaggggcatgtagcctacccgcatctggct

SEQ ID NO: 268068 - DNA, 75 bp, synthetic construct
  source 1..75: mol_type = other DNA
attgaaggtgcggcccactggatgtcggacggtaagttagttgtggttgatggttgtggctgtgaatgtggttgt

SEQ ID NO: 268069 - DNA, 75 bp, synthetic construct
  source 1..75: mol_type = other DNA
agttacatttaaagaaaaaacaaaacgaatttttagttataagcaacaaaaaataattttaaaagaaagccgaat

SEQ ID NO: 268070 - DNA, 75 bp, synthetic construct
  source 1..75: mol_type = other DNA
aaaactttttacataataaaaaattggttcaaaaacttgttgaagagagtaatctctctaaagaagatacagtat

SEQ ID NO: 268071 - DNA, 75 bp, synthetic construct
  source 1..75: mol_type = other DNA
aacccgtcaaaacttgaggctgtaatgattttggcaggtaaacaaaacacatccattgatatgacagaaacttat

SEQ ID NO: 268072 - DNA, 75 bp, synthetic construct
  source 1..75: mol_type = other DNA
agaccagcaattagaccgcttagaagcaactgtatttggctttgatgagaagaacatttatgtgctcggtcatga

SEQ ID NO: 268073 - DNA, 75 bp, synthetic construct
  source 1..75: mol_type = other DNA
tggggcttgattatgtcccttggaattttcaatgtgaaccaatggatgtagcacaggatcgcagtactaagaagg

SEQ ID NO: 268074 - DNA, 75 bp, synthetic construct
  source 1..75: mol_type = other DNA
gaaaatcggaagcgtattgctattttccgatcagataattccacagcgattcaaaaatgcaattgatgaattcag

SEQ ID NO: 268075 - DNA, 75 bp, synthetic construct
  source 1..75: mol_type = other DNA
aattcatgcgctctccgcctacctgacgccatcctgtcgggagattctggagaatgatgcccgccgtcgcagtga

SEQ ID NO: 268076 - DNA, 75 bp, synthetic construct
  source 1..75: mol_type = other DNA
aaataaaaatgaagaaccaacacccacaacgacaaaaccagcaaaacgtaggcgtactggtatgggtagtaattg

SEQ ID NO: 268077 - DNA, 75 bp, synthetic construct
  source 1..75: mol_type = other DNA
atactaaatatagcaaggaagctataaataaaaatgaagaaccaacacccacaacgacaaaaccagcaaaacgta

SEQ ID NO: 268078 - DNA, 75 bp, synthetic construct
  source 1..75: mol_type = other DNA
cttatccgcagcgaggatgaggggctggtcacccactggtactatgacgaagcagaccgcctcacgcaccgcacc

SEQ ID NO: 268079 - DNA, 75 bp, synthetic construct
  source 1..75: mol_type = other DNA
ggcttagggcggttcagaactatgaatatttgacttatcataaatatcttccaaaatcatcattactaacattgc

SEQ ID NO: 268080 - DNA, 75 bp, synthetic construct
  source 1..75: mol_type = other DNA
aaatattcaaaattgtggttggtgaaaatgaaaattatcttaaagatgtgatgatgcaactggaagcgaagaata

SEQ ID NO: 268081 - DNA, 75 bp, synthetic construct
  source 1..75: mol_type = other DNA
gtatacctggttggaatagtaaagaattacctgcctttcattttcccgatcgtgatttttcaggactaactattt

SEQ ID NO: 268082 - DNA, 75 bp, synthetic construct
  source 1..75: mol_type = other DNA
cagtagtgcaacagacagtgattcagaagaactggctgccaccccaaaggcaataaaggcgttagcaaaaaaaat

SEQ ID NO: 268083 - DNA, 75 bp, synthetic construct
  source 1..75: mol_type = other DNA
tttggtgacctcacctggcagcacgggatgactaatacgctgacatttaacagtggctcgcgtatcgctgatggc

SEQ ID NO: 268084 - DNA, 75 bp, synthetic construct
  source 1..75: mol_type = other DNA
tttcgaagaaataatatcataccataacatagttaacataagaattttaatgaggtgtttaaatactgcacttcc

SEQ ID NO: 268085 - DNA, 75 bp, synthetic construct
  source 1..75: mol_type = other DNA
ctccggtaaggaggcggttttcagcgtggggtctgatgtgccggttctgtcatcagtatcatggcaggataaggt

SEQ ID NO: 268086 - DNA, 75 bp, synthetic construct
  source 1..75: mol_type = other DNA
acagggctttcatttctgccggatgtgtttggttcagactctgatgaacgggcgaaaaccgatatcatcgtcgtt

SEQ ID NO: 268087 - DNA, 75 bp, synthetic construct
  source 1..75: mol_type = other DNA
tgaaagggatgcctggtactgccaaaggtgctcgtttacggctggagaagctggctgctatacacccgggaatta

SEQ ID NO: 268088 - DNA, 75 bp, synthetic construct
  source 1..75: mol_type = other DNA
ccaacatttacgcccgcacgatggattacgtggaggatgtggcttttgcggagtgcctggagatttttatgaaag

SEQ ID NO: 268089 - DNA, 75 bp, synthetic construct
  source 1..75: mol_type = other DNA
ttttgggcgtggcgtggacaaggagaaacgttagcctttgccgggcataccgacgtggtgccgcctggcgatact

SEQ ID NO: 268090 - DNA, 75 bp, synthetic construct
  source 1..75: mol_type = other DNA
aacccaccgtgacgcaggatgtgataggtctggatatcgttcagcagctgagcaactttgcaaaaacggatacgg

SEQ ID NO: 268091 - DNA, 75 bp, synthetic construct
  source 1..75: mol_type = other DNA
tttttccatcaactaccagagaaatgatattttcattctttttttctgttatgaagatgtcatctgatgttgcgg

SEQ ID NO: 268092 - DNA, 75 bp, synthetic construct
  source 1..75: mol_type = other DNA
tctatggcaaaaacttttgcgattcaacctcattaaaaagtttaagagcctgtcaattaaataatattaaattag

SEQ ID NO: 268093 - DNA, 75 bp, synthetic construct
  source 1..75: mol_type = other DNA
gccatcgcatttgttatttgcgggctgatagtctggttgtttttgccatcaatacaaagaaatattcctgtcgtt

SEQ ID NO: 268094 - DNA, 75 bp, synthetic construct
  source 1..75: mol_type = other DNA
tgtatcccgacttgaacccggacaagaaaaagtattacgtattcttcacacgaagggaatgtcattacccgacga

SEQ ID NO: 268095 - DNA, 75 bp, synthetic construct
  source 1..75: mol_type = other DNA
catgatgacaacagcttaaaattatttgcttcgctgttaatttcactttcatattctagtgcctacacagattta

SEQ ID NO: 268096 - DNA, 75 bp, synthetic construct
  source 1..75: mol_type = other DNA
atggacggtaaacacgttttcgccctggcctttgccatcgctgcggcaatcgctgttaacgtcgccttgttcggc

SEQ ID NO: 268097 - DNA, 75 bp, synthetic construct
  source 1..75: mol_type = other DNA
cgcgataaaaacattccgatccgtattggcgttaacgccggatcgctggaaaaagatctgcaagaaaagtatggc

SEQ ID NO: 268098 - DNA, 75 bp, synthetic construct
  source 1..75: mol_type = other DNA
aggaaaaagaagtaacatcatttggtgaggaacatgttattccagagactattggtggtaattatattataaata

SEQ ID NO: 268099 - DNA, 75 bp, synthetic construct
  source 1..75: mol_type = other DNA
gcccagttggcgaaagagaatctattacgggtgcgaaatggtaaaagccgctattcgataatcaaactggacgcg

SEQ ID NO: 268100 - DNA, 75 bp, synthetic construct
  source 1..75: mol_type = other DNA
agcagccggttaatcagatccaacagattgtgcatctctttgcctggcaccttctacaggcgccatcgttgaacg

SEQ ID NO: 268101 - DNA, 75 bp, synthetic construct
  source 1..75: mol_type = other DNA
ggctctttaaagcaataatttcgcataacttattatatatcatgctactaagcgcctttttattccggccagcat

SEQ ID NO: 268102 - DNA, 75 bp, synthetic construct
  source 1..75: mol_type = other DNA
tcgctcaccaatacgcgcgaacaggtcacactgaaccgctggcagatgcacgtttctggtttactggctcaggtg

SEQ ID NO: 268103 - DNA, 75 bp, synthetic construct
  source 1..75: mol_type = other DNA
ctgaagaaaatggggcattcagttctgcttgtctgcagggagaacagcaaaattgcttttgaagccagggtaatg

SEQ ID NO: 268104 - DNA, 75 bp, synthetic construct
  source 1..75: mol_type = other DNA
cggtatacacgccggcgcgaaaaattcacctgtaccactgcgaccatcgcggcctgccgctggcccttatcagca

SEQ ID NO: 268105 - DNA, 75 bp, synthetic construct
  source 1..75: mol_type = other DNA
gaacatcatcaaccttgaatggcaacaaataaatatgcagcgccgggtggcatggataaacccggaagtgaggta

SEQ ID NO: 268106 - DNA, 75 bp, synthetic construct
  source 1..75: mol_type = other DNA
agttcatcatgcagtaagcactcaaaattggggacaaagctcatataaatatgtagacaggatgacaaaggggga

SEQ ID NO: 268107 - DNA, 75 bp, synthetic construct
  source 1..75: mol_type = other DNA
atgacgacgatgtacaaaaagtttatcataacgtcgcaaatctctaatgatattttaaagaaatctgtctttatg

SEQ ID NO: 268108 - DNA, 75 bp, synthetic construct
  source 1..75: mol_type = other DNA
atggcgttgcagaggcaggccctgcgaccaactacggcgcagacatatcaacactggtacaggaaattgaggcag

SEQ ID NO: 268109 - DNA, 75 bp, synthetic construct
  source 1..75: mol_type = other DNA
acccgttcctttgagcgggcgaataaagtcgccggtgaactgcgtattttcatgaaaggagatcactcaataact

SEQ ID NO: 268110 - DNA, 75 bp, synthetic construct
  source 1..75: mol_type = other DNA
tgctggccgtggccgggctgctctggatgcggcacgaaaacaccagtctgacccgttcctttgagcgggcgaata

SEQ ID NO: 268111 - DNA, 75 bp, synthetic construct
  source 1..75: mol_type = other DNA
tcatatttatatcctgaaaaaactacgcaaaactaaaaaagttccagaaaacatatgtcatatattcagagaaga

SEQ ID NO: 268112 - DNA, 75 bp, synthetic construct
  source 1..75: mol_type = other DNA
tgagaaatttggtaatctcgagctgatctttgtggaaagcggcggcgacaacctgagtgcgaccttcagccccga

SEQ ID NO: 268113 - DNA, 75 bp, synthetic construct
  source 1..75: mol_type = other DNA
caatttttagcaaagttcagtgatgttgatatattttatccagaagatctatttgatgatcttttggctggtcaa

SEQ ID NO: 268114 - DNA, 75 bp, synthetic construct
  source 1..75: mol_type = other DNA
tattattaatgatctagttaaaatgcgatgtatagaagttaatgataatataatatggttgcgtgaatgggtcag

SEQ ID NO: 268115 - DNA, 75 bp, synthetic construct
  source 1..75: mol_type = other DNA
tgcagccgaaccaaaattaatattttttgcggcgttaagtatttggaataagatttggtgtcattcgtctataga

SEQ ID NO: 268116 - DNA, 75 bp, synthetic construct
  source 1..75: mol_type = other DNA
gagtatattacagtcaactcattaggtcgacgtggtggaaaatcaagaaagttaggtaattttgttcttaattgg

SEQ ID NO: 268117 - DNA, 75 bp, synthetic construct
  source 1..75: mol_type = other DNA
cccgttctgcggaaatccggaagtacaactcattgaggtgaaatattttctggatggcgatgatggttattacgt

SEQ ID NO: 268118 - DNA, 75 bp, synthetic construct
  source 1..75: mol_type = other DNA
tcgccgcatcatgcacgaagaattccgtaacgcgctggttaacgccgcctctgccgacgctatcgccagcctgct

SEQ ID NO: 268119 - DNA, 75 bp, synthetic construct
  source 1..75: mol_type = other DNA
gccgttttctctaccggtctgggctttagttttgccattccccacagcaaatcagaacacattgagcaatccacc

SEQ ID NO: 268120 - DNA, 75 bp, synthetic construct
  source 1..75: mol_type = other DNA
gctgtttctgttccgttcattaaaacaaccttctctcacatcgctctgttacataatgtcatgcagaatctcatc

SEQ ID NO: 268121 - DNA, 75 bp, synthetic construct
  source 1..75: mol_type = other DNA
cgtgagtattcagggaaaggttatatcgccagagtggaaggtttactatctttgtcggaacttgattttggctaa

SEQ ID NO: 268122 - DNA, 75 bp, synthetic construct
  source 1..75: mol_type = other DNA
cagacgcaattagttaacggtacttttatatattggctgaatttaaatacgccaggtaatctacgtgggattact

SEQ ID NO: 268123 - DNA, 75 bp, synthetic construct
  source 1..75: mol_type = other DNA
gtattctaaaataagggagatttaccaggaagagtatgagcaatatatcgcgaattcaatttccccagataaatt

SEQ ID NO: 268124 - DNA, 75 bp, synthetic construct
  source 1..75: mol_type = other DNA
tgatttaagtgtatttagtaaagaaacagattctctaaaccgcagatgggtaaaattgcctaaactccctgagtt

SEQ ID NO: 268125 - DNA, 75 bp, synthetic construct
  source 1..75: mol_type = other DNA
aagcggattacggcctggtgctgctggcgcatcagcaaaatattcttgtccagatgcttggggatctgccggtcg

SEQ ID NO: 268126 - DNA, 75 bp, synthetic construct
  source 1..75: mol_type = other DNA
gatgaccgtttaggattcagtgctaatccatttatggtagataaaaccgaacaacttagacaggaattagagcaa

SEQ ID NO: 268127 - DNA, 75 bp, synthetic construct
  source 1..75: mol_type = other DNA
gtgaaatgtataattcagctattggttatgaagatccaaataaagatttaaaagatgtcactggtgctattggtg

SEQ ID NO: 268128 - DNA, 75 bp, synthetic construct
  source 1..75: mol_type = other DNA
aagaagtaggtttgactatggaacaaatagccgaccagcagaaagatataaaggatcgcttaggagatgcattaa

SEQ ID NO: 268129 - DNA, 75 bp, synthetic construct
  source 1..75: mol_type = other DNA
cagagccagcacctgaacagcctgctgtctgaccgcgattacacctggaacgacaacggcgaactcatccgcatc

SEQ ID NO: 268130 - DNA, 75 bp, synthetic construct
  source 1..75: mol_type = other DNA
gatcggcacgctcaacggcatgattggctttaccagtctcgataaacgtgaagaacgcaccttgttgaaatatct

SEQ ID NO: 268131 - DNA, 75 bp, synthetic construct
  source 1..75: mol_type = other DNA
agcaaaacatatcatgtaatgcccatgttattaatttcaccgatcatacaaaaatggatcaatatttttcgttaa

SEQ ID NO: 268132 - DNA, 75 bp, synthetic construct
  source 1..75: mol_type = other DNA
gtcaatttaccgttgccgttaaaggaagagactgtgcgcacggtgttgggacgttacgcgctgcagccgcaaaat

SEQ ID NO: 268133 - DNA, 75 bp, synthetic construct
  source 1..75: mol_type = other DNA
tatattcatatgttgcccatgattgcattataggggactatgttaccttcgctccgggtgttaaatgtaatggaa

SEQ ID NO: 268134 - DNA, 75 bp, synthetic construct
  source 1..75: mol_type = other DNA
accgctgaaatctcaacagtcgctggcgcaactattcgcactggcccttttgaaacggttgtattatttaaaatt

SEQ ID NO: 268135 - DNA, 75 bp, synthetic construct
  source 1..75: mol_type = other DNA
caaccttatgtgtttaacaaatatacagaatatgccgatttcaccagcgatatgttgatttacgaaaaaagatat

SEQ ID NO: 268136 - DNA, 75 bp, synthetic construct
  source 1..75: mol_type = other DNA
tatataacaaagaattctcctcatctttaactttaaataatttattacatattactctaactgatacccatctag

SEQ ID NO: 268137 - DNA, 75 bp, synthetic construct
  source 1..75: mol_type = other DNA
tccgagagtgataacaataaaatagcacacgctttgcgttttgcagatatattttcacattcttcaaaagaaaat

SEQ ID NO: 268138 - DNA, 75 bp, synthetic construct
  source 1..75: mol_type = other DNA
attatcgagagtgttacctctgcatttagagagttcggagggtttgagaaagagttactaccaaagaatgaagat

SEQ ID NO: 268139 - DNA, 75 bp, synthetic construct
  source 1..75: mol_type = other DNA
atgattattgagagaatagaatgtgagaaaagtaaacgcagattgagagccttgttttttgttggcttattattg

SEQ ID NO: 268140 - DNA, 75 bp, synthetic construct
  source 1..75: mol_type = other DNA
acatcaataaaagttgcagctatggatatcccagttcaaattacaggtgagatactggtgccaccttgtcaaatt

SEQ ID NO: 268141 - DNA, 75 bp, synthetic construct
  source 1..75: mol_type = other DNA
gaattgaaaagtaaatttacaagtgttacgtatcttgaatatcttgaaaatagatccttggctgtgatttataac

SEQ ID NO: 268142 - DNA, 75 bp, synthetic construct
  source 1..75: mol_type = other DNA
taccggcaatttagcgaccaatgtgctgctggaaaatggcggtaatttattggtattagcaggtaccgaagcccg

SEQ ID NO: 268143 - DNA, 75 bp, synthetic construct
  source 1..75: mol_type = other DNA
tactcagatctattctggtggtacgcaaattgttgattacaccagctcctcggatgttattgaagtttattccgg

SEQ ID NO: 268144 - DNA, 75 bp, synthetic construct
  source 1..75: mol_type = other DNA
cgttcctgccgggccaaataacccgctaggacgttacgcactgcgcctcgcgcatggtaatggcgaatacctcat

SEQ ID NO: 268145 - DNA, 75 bp, synthetic construct
  source 1..75: mol_type = other DNA
cagaatcttaataattatggcatagccacaggcaccaatatcaacagcggaacgcaaaatatcaaaagcggtggg

SEQ ID NO: 268146 - DNA, 75 bp, synthetic construct
  source 1..75: mol_type = other DNA
cttattgaatctggtggatatcaagatgtaggaaggcataacaattatgtggggcaggctaataatacaaccatt

SEQ ID NO: 268147 - DNA, 75 bp, synthetic construct
  source 1..75: mol_type = other DNA
atggcggccttcactcatgatgttattggtgtggtaaacgatgagactgtagatggtgtccaaaaagtagatgaa

SEQ ID NO: 268148 - DNA, 75 bp, synthetic construct
  source 1..75: mol_type = other DNA
aaaagcggcctctatgaagatggcgtgcgcaaagaccgtctggacaacaacgatatgatcgaccagctggaagcg

SEQ ID NO: 268149 - DNA, 75 bp, synthetic construct
  source 1..75: mol_type = other DNA
atgactggctcgggaacacgggaagaaacacaacatacagtgtcatgtcagcggagcgggacaccacatcctgtg

SEQ ID NO: 268150 - DNA, 75 bp, synthetic construct
  source 1..75: mol_type = other DNA
ctaatacaggttgtgatgctaatgtcattggtcgcaaagatccgacatatgaagctcgagatgtcgagattacta

SEQ ID NO: 268151 - DNA, 75 bp, synthetic construct
  source 1..75: mol_type = other DNA
tgattgtccagaaggaggctaaaacagatagcaccagacttaataatggtggcgttctggaggttcaggacggtg

SEQ ID NO: 268152 - DNA, 75 bp, synthetic construct
  source 1..75: mol_type = other DNA
gacttcagcgccagcggcccgaaccagaagtgggcgggtgacatcacgtacttgcgtaccgatgagggctggttg

SEQ ID NO: 268153 - DNA, 75 bp, synthetic construct
  source 1..75: mol_type = other DNA
acgggaacgccggtgaaagtgatcaacgaaccggtgaaatattccgtggaacctaacgggatgcgttatgttgaa

SEQ ID NO: 268154 - DNA, 75 bp, synthetic construct
  source 1..75: mol_type = other DNA
ccgctttaaaagtaacgacttacgatttgacggtgagcggtacgaatagtgaaggtgcattctccatccacaata

SEQ ID NO: 268155 - DNA, 75 bp, synthetic construct
  source 1..75: mol_type = other DNA
tcatgccgcgtcacccctgcgatgagattaaagaaccattgcgtaaaagcaatcctgaaacaactcggtttgagt

SEQ ID NO: 268156 - DNA, 75 bp, synthetic construct
  source 1..75: mol_type = other DNA
tcatgccgcgtcaccccagcgaagagattaaagaaccattacgtaaagccattctgaaacaactcggtttgagtt

SEQ ID NO: 268157 - DNA, 75 bp, synthetic construct
  source 1..75: mol_type = other DNA
atcctactgatttcgctgggagcgtttttaatggaaattgtctttttggtggtaatggtatggtgatagatgcaa

SEQ ID NO: 268158 - DNA, 75 bp, synthetic construct
  source 1..75: mol_type = other DNA
aatcgaattatcagaagccattaacgccgctgatattccgccattcccgctttgcagtccacgctgacctggtaa

SEQ ID NO: 268159 - DNA, 75 bp, synthetic construct
  source 1..75: mol_type = other DNA
gcactgctcttaattgtgtaagtggcccagcttttttaaaagatgtaactgttgagaatttaaggaccggtgata

SEQ ID NO: 268160 - DNA, 75 bp, synthetic construct
  source 1..75: mol_type = other DNA
gtgaaacaaagcgagttcagacgttggctcgaatctcagggcgtcgatgtagcgaatggcagcaaccatttaaaa

SEQ ID NO: 268161 - DNA, 75 bp, synthetic construct
  source 1..75: mol_type = other DNA
ctgaaccagagataatatttttacatgccgatcttcagcaatacttaagccaaagttgcggtgcatttgtgtgca

SEQ ID NO: 268162 - DNA, 75 bp, synthetic construct
  source 1..75: mol_type = other DNA
cggataattcagatgatctcctgttcaaaaagctattctccccgtcaaaattaatgacaattatcggtgatgata

SEQ ID NO: 268163 - DNA, 75 bp, synthetic construct
  source 1..75: mol_type = other DNA
gcaacaggtattaataactggaagggttactataaagcaattcatctgatgccgggatgctgggggcaaggtaaa

SEQ ID NO: 268164 - DNA, 75 bp, synthetic construct
  source 1..75: mol_type = other DNA
ttataatacagatatatataaaataggaagcacaacagtaggaggggaaacaacaggaaataggttcataaatag

SEQ ID NO: 268165 - DNA, 75 bp, synthetic construct
  source 1..75: mol_type = other DNA
ctatattccttagaacttctcttgttagtattacaggaaatgttttctactataaaggtgctacaaatccttcag

SEQ ID NO: 268166 - DNA, 75 bp, synthetic construct
  source 1..75: mol_type = other DNA
aaattgattttcaacatcgactgacaaacagaaattgttatttagataaatatggcgattcactaataaatactt

SEQ ID NO: 268167 - DNA, 75 bp, synthetic construct
  source 1..75: mol_type = other DNA
attgttgaaattctattaattgacaaaaataacattccactggttgaggaattcatagaaaacctccctagagat

SEQ ID NO: 268168 - DNA, 75 bp, synthetic construct
  source 1..75: mol_type = other DNA
atggcaaagcggtttcatcaaaccgatgtcaacggcggaatgagcgccacgcagctacctgctccaacacgcgac

SEQ ID NO: 268169 - DNA, 66 bp, synthetic construct
  source 1..66: mol_type = other DNA
atgactacttcccctttcattctcgaatatcacgataatgatagagataatcattatcaattgatt

SEQ ID NO: 268170 - DNA, 75 bp, synthetic construct
  source 1..75: mol_type = other DNA
aattaggcttctaggtcaagagaaagtttattgggtagaaatagaaggctttgatgagttaatggcagaactagc

SEQ ID NO: 268171 - DNA, 75 bp, synthetic construct
  source 1..75: mol_type = other DNA
tctcaaaattaaaaaaacacactctaacacatgacatatcgtcattaataaacgagctatcccaaagtgatttag

SEQ ID NO: 268172 - DNA, 75 bp, synthetic construct
  source 1..75: mol_type = other DNA
aaattgccaatgaaagtttagggaaaataaaaaactacaaggagaaagatgttctactaattaacaaagaggttg

SEQ ID NO: 268173 - DNA, 75 bp, synthetic construct
  source 1..75: mol_type = other DNA
atgggaagcccctctctgtattctgcccgtaaaacagccctggcgttggcagtcgccttaagtttcgcctggcaa

SEQ ID NO: 268174 - DNA, 75 bp, synthetic construct
  source 1..75: mol_type = other DNA
ttcgcgtctctgtaccgacgatggacgcggcagaagcgttcaagctcatcaagcagcaggttaacgtgccgctgg

SEQ ID NO: 268175 - DNA, 75 bp, synthetic construct
  source 1..75: mol_type = other DNA
acgaatggatactgatgacatttgtctacctgagcgattcgaaaaacaaataaagatgtttattcgtaatccgga

SEQ ID NO: 268176 - DNA, 75 bp, synthetic construct
  source 1..75: mol_type = other DNA
taatatagatcctttaggattagaaacactaaaatgcattaagccactgcattcaatgggcggaactggtgaaag

SEQ ID NO: 268177 - DNA, 75 bp, synthetic construct
  source 1..75: mol_type = other DNA
ccaacgtcagtaccgaacgccgggagttagtggtgcgctggatcagtacagtgggtaactatgactacatttttg

SEQ ID NO: 268178 - DNA, 75 bp, synthetic construct
  source 1..75: mol_type = other DNA
ggcgtttgcgctggaaaacaaaccggttgaccagccgcgcaaagccgacgtcattatgctcgacggcaaacatat

SEQ ID NO: 268179 - DNA, 75 bp, synthetic construct
  source 1..75: mol_type = other DNA
aatgagttatcccaaaatgacttagacgatcaaaagatccctgaagaaaatttcaagaatttgttatacattgac

SEQ ID NO: 268180 - DNA, 75 bp, synthetic construct
  source 1..75: mol_type = other DNA
tggatttcgatgctcgaagtgtcatcacatttgagggtgaacgccataatgccctgcacgatgcgcgttaccagg

SEQ ID NO: 268181 - DNA, 75 bp, synthetic construct
  source 1..75: mol_type = other DNA
gtgattttacgccgttcatatgaacggcaggagatcccctgcccgtggcgttacaccaatgatcgtgatgtaaga

SEQ ID NO: 268182 - DNA, 75 bp, synthetic construct
  source 1..75: mol_type = other DNA
ctacagattaactgtgctgcggagttaggggctggagatggtgttctgacccgacatctgttaagcagactcaaa

SEQ ID NO: 268183 - DNA, 75 bp, synthetic construct
  source 1..75: mol_type = other DNA
aggatgatgagtctgatgcaattgatttatatggtaaatctaagttcttgggtgaagttgaatataatgggcatt

SEQ ID NO: 268184 - DNA, 75 bp, synthetic construct
  source 1..75: mol_type = other DNA
agtggggttttatccagcaagttggcctaaactgattgagaaaatgaatgatgaatacaataaattcttccgtta

SEQ ID NO: 268185 - DNA, 75 bp, synthetic construct
  source 1..75: mol_type = other DNA
atacgcctaattcaacggatctatatggtaaatcaaaatgtcttggtgaagtcaattacggtaaacatttaactc

SEQ ID NO: 268186 - DNA, 75 bp, synthetic construct
  source 1..75: mol_type = other DNA
taaagaaaacgacataaattcagttttagcacataacaattcaaaaggtgatgcagccatgtgtgcattcttttt

SEQ ID NO: 268187 - DNA, 75 bp, synthetic construct
  source 1..75: mol_type = other DNA
taaaatccgatattgcatctttaaacagtgatttcaaaaaagcgatagaacttcttgatgaagcttatgataaag

SEQ ID NO: 268188 - DNA, 75 bp, synthetic construct
  source 1..75: mol_type = other DNA
agcagaattgctattcttcatctggaaaatcatgacgagggattaataacctttgatgaaatacataacctaatt

SEQ ID NO: 268189 - DNA, 75 bp, synthetic construct
  source 1..75: mol_type = other DNA
tcgtttctaaaaaaacatggaaagatcttttcagaaaaatttcccaaaatagcaagacggctaggttttcaaaat

SEQ ID NO: 268190 - DNA, 75 bp, synthetic construct
  source 1..75: mol_type = other DNA
cttacgattaaagacgtaaatttaacacataataaaaatgatgcagcttggcatttgaaaattaaaatgaaagct

SEQ ID NO: 268191 - DNA, 75 bp, synthetic construct
  source 1..75: mol_type = other DNA
cgttaaagatttagctgattatataaaaatcaaatcaggtacatcacctaactattcactttttcttggtgctgg

SEQ ID NO: 268192 - DNA, 75 bp, synthetic construct
  source 1..75: mol_type = other DNA
acacctgcgaacgcctgtcgtgccagtgcagaaaattccctgcgaagcaggacagaaattgtgaagccaggggga

SEQ ID NO: 268193 - DNA, 75 bp, synthetic construct
  source 1..75: mol_type = other DNA
caaagatgtagcgccagacatacttgtattgcccgtcaacgtatatcatgcggattttaaaattaaaatcaataa

SEQ ID NO: 268194 - DNA, 75 bp, synthetic construct
  source 1..75: mol_type = other DNA
cttttaactatgtttccggcgaaataacatttgaaatcgacatgtgtacaaatcttaaccacaatgaattggagc

SEQ ID NO: 268195 - DNA, 75 bp, synthetic construct
  source 1..75: mol_type = other DNA
tacattgccacctacccattgccaatagatagcgcaacacataaaaaagtcaaaaaattaagaccagtctgcatc

SEQ ID NO: 268196 - DNA, 75 bp, synthetic construct
  source 1..75: mol_type = other DNA
ccagatgaaagcatatattacgaaacaggacgactactggggagacgatgccgacgttacccatgatgatgcctt

SEQ ID NO: 268197 - DNA, 75 bp, synthetic construct
  source 1..75: mol_type = other DNA
ttgcaacattgttggggaatagaaaatataaaaaatttaattatttggattttattgattcaatgaaaaaagatc

SEQ ID NO: 268198 - DNA, 75 bp, synthetic construct
  source 1..75: mol_type = other DNA
gataatgcaccaagatataatgaaagagctactttttttgaaagcatatctcatgaaaattttgagaaggcattg

SEQ ID NO: 268199 - DNA, 75 bp, synthetic construct
  source 1..75: mol_type = other DNA
ccttttactgccacgccgccagtatcgcgtattgatgccaaacgtgggcaaacaatcaaattaatgtacacagcc

SEQ ID NO: 268200 - DNA, 75 bp, synthetic construct
  source 1..75: mol_type = other DNA
atggtggtgtctatgatatggataacatcagcgtggtaacacctaaaaggcatattgatattcaccgaggtaaat

SEQ ID NO: 268201 - DNA, 75 bp, synthetic construct
  source 1..75: mol_type = other DNA
tttccgaaagaaagtgggcagaagccggtttatgtatcagtgacagatgttcttaccccagcacaggtaaaacaa

SEQ ID NO: 268202 - DNA, 75 bp, synthetic construct
  source 1..75: mol_type = other DNA
gttccccgcgtcagcggggataaaccgcagacccagcgtgccgcccagcgcccgcgagcgtgttccccgcgtcag

SEQ ID NO: 268203 - DNA, 75 bp, synthetic construct
  source 1..75: mol_type = other DNA
gttggttagatactggagatgacaacgctgaaccaggcagtattactgtcccctttaccgctacgccaccagtat

SEQ ID NO: 268204 - DNA, 75 bp, synthetic construct
  source 1..75: mol_type = other DNA
ttctggtttaacgtactggaagttccaccaaaaccagatgcagaaaaggtcgcgaatcaaagtctgctgcaactg

SEQ ID NO: 268205 - DNA, 75 bp, synthetic construct
  source 1..75: mol_type = other DNA
tgaaggctcgctactgctgtgggtgctgctgatgagcggctggacctttgcggtggcgatttttagtcagcgtat

SEQ ID NO: 268206 - DNA, 75 bp, synthetic construct
  source 1..75: mol_type = other DNA
gtgagtcactgggctacattcaaacaaacagcaacaaatttatgggtgacccttcggcacgacattctcgcgctg

SEQ ID NO: 268207 - DNA, 75 bp, synthetic construct
  source 1..75: mol_type = other DNA
gtattgagtggggcttaggctttggcccaattgaaaatatgactcgccttgccgagaaacttggggcgtttgtta

SEQ ID NO: 268208 - DNA, 75 bp, synthetic construct
  source 1..75: mol_type = other DNA
taaggctgagttttatcgtcgttttattgatgtatttgaagataaccttaatttgtcacctgttcgatttcctga

SEQ ID NO: 268209 - DNA, 75 bp, synthetic construct
  source 1..75: mol_type = other DNA
ttgattatcgcctttattagcacgctggcgttgtcgttgctgttgccgtggctgttcgaaagcaaagtcgtggcg

SEQ ID NO: 268210 - DNA, 75 bp, synthetic construct
  source 1..75: mol_type = other DNA
cctgtcatttgtctgttactgatgatgttgttgttcctgctactgctactgctactgctactgctactgctactg

SEQ ID NO: 268211 - DNA, 75 bp, synthetic construct
  source 1..75: mol_type = other DNA
aagaccgcgcgccggtggcgctgaaaggggccgcgctcacgcgccgcccctttcattgcgcggacgttctgctgt

SEQ ID NO: 268212 - DNA, 75 bp, synthetic construct
  source 1..75: mol_type = other DNA
tttgttattccggcttgttttataatgtctatatcctatacggcattgaatagatatataaatattgctcaggca

SEQ ID NO: 268213 - DNA, 75 bp, synthetic construct
  source 1..75: mol_type = other DNA
gcatcggttacaaagtgcgtttcagcgatcacgtaagtgataacacgatggtcaagctgatgaccgacggtatcc

SEQ ID NO: 268214 - DNA, 75 bp, synthetic construct
  source 1..75: mol_type = other DNA
tgttgctggatcgcaagcagggtaagtgggttcattaccgcttatcaccgcatattccatcatgggccgcgaaaa

SEQ ID NO: 268215 - DNA, 75 bp, synthetic construct
  source 1..75: mol_type = other DNA
aaattccaagccaagttgaaaggtggcgctactgaaggtgacttcaaatctgtagcatctttcgcagtggcttat

SEQ ID NO: 268216 - DNA, 75 bp, synthetic construct
  source 1..75: mol_type = other DNA
caactgacagatttaaaccagaagtctccagccccgcacgcagatgaccgtgattttagtacggcgctggaaaat

SEQ ID NO: 268217 - DNA, 75 bp, synthetic construct
  source 1..75: mol_type = other DNA
taagatttatgaatgttataggggataatttcgatgattttgacctccttcccggagttactctaataagagata

SEQ ID NO: 268218 - DNA, 75 bp, synthetic construct
  source 1..75: mol_type = other DNA
aaagctactgttacaggaggcggagagggtatcgcaacgctgatccccgtattgaatggtgttcatcaggcgggt

SEQ ID NO: 268219 - DNA, 75 bp, synthetic construct
  source 1..75: mol_type = other DNA
tacctaaactggccgcaacacatcatttagataacgaacaagtgtataaattcctgagtgccaaaaatagaacgt

SEQ ID NO: 268220 - DNA, 75 bp, synthetic construct
  source 1..75: mol_type = other DNA
ggtcaattcttcgttatgtaaaaaagcgtcagtggatacatattttaatgttatggaagttaatttaattattta

SEQ ID NO: 268221 - DNA, 75 bp, synthetic construct
  source 1..75: mol_type = other DNA
cacctcatccatcaccgaaaaaaattggcttttacaccattggcgataaaagcatttacctgtatgacctacgcc

SEQ ID NO: 268222 - DNA, 75 bp, synthetic construct
  source 1..75: mol_type = other DNA
ttgtgaagccattcaatattctaaaaccacaggtttcttagatggttttttctataagaaaggaattccactcct

SEQ ID NO: 268223 - DNA, 75 bp, synthetic construct
  source 1..75: mol_type = other DNA
cagccatgcttctgccggatccatacgtggtccggcgttttttttcgccgggggattcactggctgcgtctgctg

SEQ ID NO: 268224 - DNA, 75 bp, synthetic construct
  source 1..75: mol_type = other DNA
ctttagcagcatgtgcaacatctgcgtttgccgaaccgaccgcagtacttaaagttaccgggattctgaccaact

SEQ ID NO: 268225 - DNA, 75 bp, synthetic construct
  source 1..75: mol_type = other DNA
tcttatgccggtgtgttagggagaggtggggttacttctgcggacggggagctgctttcgctttttgccgacggg

SEQ ID NO: 268226 - DNA, 75 bp, synthetic construct
  source 1..75: mol_type = other DNA
gttattctggatggtcattatcgccttcaggctgcgattgaagaaggtactcccccctcatttctggtactcagt

SEQ ID NO: 268227 - DNA, 75 bp, synthetic construct
  source 1..75: mol_type = other DNA
taatgattttgttacattgctgcacagtaataatatccacgatattccttctttactggatggcagtgatgtatc

SEQ ID NO: 268228 - DNA, 75 bp, synthetic construct
  source 1..75: mol_type = other DNA
gccagtagcaggaggtgtgggtgcaatccctcagattgcatttactggctatgatggaacccctgtagagttaaa

SEQ ID NO: 268229 - DNA, 75 bp, synthetic construct
  source 1..75: mol_type = other DNA
actcaaggaggcgacggtgctgcagatttccgttggatgacagttgcggaaactggtacaaaaatcccttatgca

SEQ ID NO: 268230 - DNA, 75 bp, synthetic construct
  source 1..75: mol_type = other DNA
aatcccaaaaccggtgcggactggcaacttcgcagacagcaaaaacatgtggtaacaccggggcagaatgaaaaa

SEQ ID NO: 268231 - DNA, 75 bp, synthetic construct
  source 1..75: mol_type = other DNA
cctcaaaaacaccatcatacactaaatcagtaagttggcagcatcaccgtctttccgaaacgtttgctgtgatga

SEQ ID NO: 268232 - DNA, 75 bp, synthetic construct
  source 1..75: mol_type = other DNA
gggattatcaggaaccgttggaagccgggatcagtttaactatggggtcaacctgagttatcagcatcagggaaa

SEQ ID NO: 268233 - DNA, 75 bp, synthetic construct
  source 1..75: mol_type = other DNA
aacaggggcgtaattaaaaacaaccctctggagtcgctcagacgttccgatgtggggatggcttccaaaatgaaa

SEQ ID NO: 268234 - DNA, 75 bp, synthetic construct
  source 1..75: mol_type = other DNA
aacttggagacgtcagtgcccctacagaggatggggtaaaagtcggtaatgcaataaaaaatgcaactattgagg

SEQ ID NO: 268235 - DNA, 75 bp, synthetic construct
  source 1..75: mol_type = other DNA
catgtgacagacattaccaaaggtgcgacttacccggtgctgattgacagcattgcggtggaagtgaacaacaca

SEQ ID NO: 268236 - DNA, 75 bp, synthetic construct
  source 1..75: mol_type = other DNA
aggccatgatgcagtggtggtcggattatctggatgtgtgccgcgaggggtatgttgcgccgtacatttatgccc

SEQ ID NO: 268237 - DNA, 75 bp, synthetic construct
  source 1..75: mol_type = other DNA
aagaatgccgctttcggaaagtttagacacattattagttatgggacagttatttgaaagtgaatataacagaat

SEQ ID NO: 268238 - DNA, 75 bp, synthetic construct
  source 1..75: mol_type = other DNA
ccggtcttttagattttgaacttatacgaagagatgaggtttggtttactgaaaaaaataaaagtggaatttcga

SEQ ID NO: 268239 - DNA, 75 bp, synthetic construct
  source 1..75: mol_type = other DNA
caattgatgacggcccataaagataaaaatggtgatgatgtatattttgaactcaaccaggaatcagatggtaca

SEQ ID NO: 268240 - DNA, 75 bp, synthetic construct
  source 1..75: mol_type = other DNA
ctggctctgctgagagaaaacgggctgcttaccgaccggcgggacggaaaatggatccactatcgtctgtcgcct

SEQ ID NO: 268241 - DNA, 75 bp, synthetic construct
  source 1..75: mol_type = other DNA
gaacttcctgaaaaccatcttgaactggtgaaagccagaatgcttctgcgcaaacaggaaattaaacatgcgcga

SEQ ID NO: 268242 - DNA, 75 bp, synthetic construct
  source 1..75: mol_type = other DNA
gtgcaaaacagatctgatgcgcgtgataaaacagatatccgagatactttgctggggattgaatttatccttgga

SEQ ID NO: 268243 - DNA, 75 bp, synthetic construct
  source 1..75: mol_type = other DNA
tggaaaacggtgtcttttatgctgcggagagtgaacaaaacaagagactggaagatgatctcatagaacgaagtt

SEQ ID NO: 268244 - DNA, 75 bp, synthetic construct
  source 1..75: mol_type = other DNA
gttgaaccagacattagaataaatatttcaaccaattacagcaccaattcagacaccgccagctcaacaaataaa

SEQ ID NO: 268245 - DNA, 75 bp, synthetic construct
  source 1..75: mol_type = other DNA
tcatcgccgttatgggcgcgactgtaggcgcagctgcaattgctgctctgactacatccggcaacatccgcgtag

SEQ ID NO: 268246 - DNA, 75 bp, synthetic construct
  source 1..75: mol_type = other DNA
ggtgaggctggaagtggaaaaacctggctggcgcagcaactgcaaaaagataaacatcgccgtgtgattacttta

SEQ ID NO: 268247 - DNA, 75 bp, synthetic construct
  source 1..75: mol_type = other DNA
tacagactgccataatatccgtgattataaaaagggcgttgttccggttcttggggaactttatcaggaagatgt

SEQ ID NO: 268248 - DNA, 75 bp, synthetic construct
  source 1..75: mol_type = other DNA
tgctcgccagttccaccgacgccagcaaggctctagaggcactgacgaagaactctggcgtggatgcactcctca

SEQ ID NO: 268249 - DNA, 75 bp, synthetic construct
  source 1..75: mol_type = other DNA
aatcagcggcggcgtcggaatggcgcagcgtcggtacgcacagcctgcgatttcatcagagcatcgtacagatgc

SEQ ID NO: 268250 - DNA, 75 bp, synthetic construct
  source 1..75: mol_type = other DNA
atactgatgcagtatttgcaagaagtgtaagaggcgggaaaattgaaagaggatatacaagttttgagaataact

SEQ ID NO: 268251 - DNA, 75 bp, synthetic construct
  source 1..75: mol_type = other DNA
tcaaaaaatataagcaaaatgggaggcatcttctatcgcttcagatcgatttggtctccttatattgtttaaagc

SEQ ID NO: 268252 - DNA, 75 bp, synthetic construct
  source 1..75: mol_type = other DNA
cgatgggcaggaactaaagacagtatcatacgaacgctttctaatcctggaatggctcataagcttgcaactgag

SEQ ID NO: 268253 - DNA, 75 bp, synthetic construct
  source 1..75: mol_type = other DNA
aggggcttgagcgcctcgaagatattatttctcaggctatggttgttcttaaacctttttcagcctggttgctca

SEQ ID NO: 268254 - DNA, 75 bp, synthetic construct
  source 1..75: mol_type = other DNA
ttgatcaatataaaaaacaggttggttattcactatttaagaacgatatactatgaacaaaattatatacatcct

SEQ ID NO: 268255 - DNA, 75 bp, synthetic construct
  source 1..75: mol_type = other DNA
cacggtgaccatcagcgccaccattaccgatagcgcaggcaacagcagcacgcagacgcacaacgtacaggtgaa

SEQ ID NO: 268256 - DNA, 75 bp, synthetic construct
  source 1..75: mol_type = other DNA
aaattaaaatcctgaacaagcagggaatgagtggttgggcgattgccagagaacaggggatctcccgcaatacgg

SEQ ID NO: 268257 - DNA, 75 bp, synthetic construct
  source 1..75: mol_type = other DNA
acgccagacttaatggtttcacagcccgctatgacgatcctgtatggcagtttatgtacccgcctgacggatacc

SEQ ID NO: 268258 - DNA, 75 bp, synthetic construct
  source 1..75: mol_type = other DNA
atctatgaacgtgaagggtggcgggttgagtcgcagctcaccctggcaaaaggcgtgtatttgtcagcgacttat

SEQ ID NO: 268259 - DNA, 75 bp, synthetic construct
  source 1..75: mol_type = other DNA
ttcaatatcggagaaaaaagaagtctggcatggtcatttggtggtgttaccctgaacgccagattgcctgttgac

SEQ ID NO: 268260 - DNA, 75 bp, synthetic construct
  source 1..75: mol_type = other DNA
tttctaaattaatatcaattgttatgccggtgtacaatgtccaagattatattgttgaggctatcgattctatta

SEQ ID NO: 268261 - DNA, 75 bp, synthetic construct
  source 1..75: mol_type = other DNA
aacagtcgggcagcgtgttcctgatccgcaacaccaacacggtgagctacggcacttcgctacacctgcgcatca

SEQ ID NO: 268262 - DNA, 75 bp, synthetic construct
  source 1..75: mol_type = other DNA
acctttgcgggcgacgatgtggtgaatgcagtggaacacggctcatcgctggtgatcagcggcaccaccaccgcg

SEQ ID NO: 268263 - DNA, 75 bp, synthetic construct
  source 1..75: mol_type = other DNA
ggcaactccaccacgtcgaacagcggcggtagcgccacggtgggcggggcggtgacggggtatctttcgctcaac

SEQ ID NO: 268264 - DNA, 75 bp, synthetic construct
  source 1..75: mol_type = other DNA
gactttgaacggcagataaccccaacgttgatccgtaagggctggcttgccgaccgtgccaggctggtcgccgat

SEQ ID NO: 268265 - DNA, 75 bp, synthetic construct
  source 1..75: mol_type = other DNA
atgccgaaagctgatgttgatctggggtacgccatcgggttaaagcccgaagaagcgatagcctactttgagtcg

SEQ ID NO: 268266 - DNA, 75 bp, synthetic construct
  source 1..75: mol_type = other DNA
gggcggcacttttgcgacaactaacgtggtcacgctgacgggcgtgcacaccgacctcgccaccttgctggcgaa

SEQ ID NO: 268267 - DNA, 75 bp, synthetic construct
  source 1..75: mol_type = other DNA
tttcccggcgatcataatccgtacaagccaatgagcgaaaacacaaccaaccgggcgctgcgcctgatggggtat

SEQ ID NO: 268268 - DNA, 75 bp, synthetic construct
  source 1..75: mol_type = other DNA
accaaacatctccagcaggggattgagagcgaccatttccgggtgaagaagaacatgccgaagatcggcggtttc

SEQ ID NO: 268269 - DNA, 75 bp, synthetic construct
  source 1..75: mol_type = other DNA
tgcctacagtcgaatgagtggttacaccgtcaagcattggcaagcctggtgcgggtatctgcccactacgaggtc

SEQ ID NO: 268270 - DNA, 75 bp, synthetic construct
  source 1..75: mol_type = other DNA
cacaatggtgtgaggcatcaatacaatggaaagatgttgaacatcctacggtgatcgcttatcaacgcgataaca

SEQ ID NO: 268271 - DNA, 75 bp, synthetic construct
  source 1..75: mol_type = other DNA
tgaattacggcaatttatacgttggttaatacgtctacgtaaaaaacatccacaatggtgtgaggcatcaataca

SEQ ID NO: 268272 - DNA, 75 bp, synthetic construct
  source 1..75: mol_type = other DNA
agccaatgagcgaaaacacaaccaaccgggcgctgcgcctgatggggtatgacacgaaaactgaaatctgcgggc

SEQ ID NO: 268273 - DNA, 75 bp, synthetic construct
  source 1..75: mol_type = other DNA
gtaaccaggagcgggaatttgatacccaggtggggctggcgttggggctgtttgagccggcgctggtggtgatga

SEQ ID NO: 268274 - DNA, 75 bp, synthetic construct
  source 1..75: mol_type = other DNA
cgtactttgatacttatgaagggcaggatggtcgtttatatttagaaagacgtgaaagacaatttatcggtagag

SEQ ID NO: 268275 - DNA, 75 bp, synthetic construct
  source 1..75: mol_type = other DNA
attcttgatgtttgcgatcgggattcgattaatacagtaattagtaagatatattctgatgaaggtagaatagat

SEQ ID NO: 268276 - DNA, 75 bp, synthetic construct
  source 1..75: mol_type = other DNA
aggactcgcttttggctgccatcaacaaaccggaagagatgccggattatctcttccgtcaactcggttttaatc

SEQ ID NO: 268277 - DNA, 75 bp, synthetic construct
  source 1..75: mol_type = other DNA
ttgcgcctgttcccaccgatgatgctgtacatgatcgcctccggcgaacagagcggtgaactggaaaccatgctt

SEQ ID NO: 268278 - DNA, 75 bp, synthetic construct
  source 1..75: mol_type = other DNA
ccaggtggggctggcgttggggctgtttgagccggcgctggtggtgatgatggcgggcgtggtgctgtttatcgt

SEQ ID NO: 268279 - DNA, 75 bp, synthetic construct
  source 1..75: mol_type = other DNA
tgcgtcaagcatccctgcggcggaatgtcttacgatgaggcgatccccgagttcaaccgagccatcgcagaagcc

SEQ ID NO: 268280 - DNA, 75 bp, synthetic construct
  source 1..75: mol_type = other DNA
gtggtgtgcttgaagagattatgagtatttcagatagttcacttagaaaacgtcttgggtatgaggttttaagct

SEQ ID NO: 268281 - DNA, 75 bp, synthetic construct
  source 1..75: mol_type = other DNA
ttattcattatttaaggactatatactatgaaaaaatcatatacatcctgccgggagcatttttgctgcgattca

SEQ ID NO: 268282 - DNA, 75 bp, synthetic construct
  source 1..75: mol_type = other DNA
tggctggattctccggtggtctatcaacaagatgaagaaacgataacggcgcttaaggcaatggtcccaatgtgg

SEQ ID NO: 268283 - DNA, 75 bp, synthetic construct
  source 1..75: mol_type = other DNA
tcaaaaaatataagccaaatgggaggcatcttctatctcttcagatggatttagtctccatatattgtttaaagc

SEQ ID NO: 268284 - DNA, 75 bp, synthetic construct
  source 1..75: mol_type = other DNA
ggataacgttggcgtcatagctagttttttgtggttggttgagaatgttggagattatgactattacgctttttg

SEQ ID NO: 268285 - DNA, 75 bp, synthetic construct
  source 1..75: mol_type = other DNA
taataatctttatggcagtgagtttcggataagaggtattaatgagaattttgttgggatggattttacctgtga

SEQ ID NO: 268286 - DNA, 75 bp, synthetic construct
  source 1..75: mol_type = other DNA
gttaaaagaaatagaacgtcgctatggcgtgaaagtgctgtacgcctgcgaatcaggcagccgcggctggggatt

SEQ ID NO: 268287 - DNA, 75 bp, synthetic construct
  source 1..75: mol_type = other DNA
aatcaggcagccgcggctggggatttgcctcgcccgatagcgactacgatgtacggtttttgtatgtccatccac

SEQ ID NO: 268288 - DNA, 75 bp, synthetic construct
  source 1..75: mol_type = other DNA
ttgccgagttactggcgggaagcgagcttgatgcaccgttacgtgcagaaatagacgaactgctggaacgtaaac

SEQ ID NO: 268289 - DNA, 75 bp, synthetic construct
  source 1..75: mol_type = other DNA
gctggccgtacgctgggttgaagcgggaaaaggcgtgccgccaatgcgctttgccgagttactggcgggaagcga

SEQ ID NO: 268290 - DNA, 75 bp, synthetic construct
  source 1..75: mol_type = other DNA
accacgcgatgttatcgaactgcccatcgacgacgagctggatgtttcaggttgggagtggcgcaaggcgctggg

SEQ ID NO: 268291 - DNA, 75 bp, synthetic construct
  source 1..75: mol_type = other DNA
agaaaaacttccgcggatatttgcagggcgatgaagttcgactgaaaaaatacttttacgtgctgcgtccgctgc

SEQ ID NO: 268292 - DNA, 75 bp, synthetic construct
  source 1..75: mol_type = other DNA
tgatggtaataacacagggtccgttcagcttatgtcatctgcgacaggagcctattttggcggactgggaaaaac

SEQ ID NO: 268293 - DNA, 75 bp, synthetic construct
  source 1..75: mol_type = other DNA
ttagtttgggacttattgctctggcggtgggtaatgcatatgctgaacagtttattcagcacgatgaatataaac

SEQ ID NO: 268294 - DNA, 75 bp, synthetic construct
  source 1..75: mol_type = other DNA
aggtacaaacagatcattcagagacggcggagttaagcaagccacagctacgcatggtcgatctcaacttattaa

SEQ ID NO: 268295 - DNA, 75 bp, synthetic construct
  source 1..75: mol_type = other DNA
cgcaagcatggcaatgtgcggagcggatcgccatttttattggtttgcagtatcaacgtaaaatctcacccgcag

SEQ ID NO: 268296 - DNA, 75 bp, synthetic construct
  source 1..75: mol_type = other DNA
atgcggtaatggacaagcgccccctgcgggcgctttccttcgtgatggcacttctgttagcaggatgtatgtttt

SEQ ID NO: 268297 - DNA, 75 bp, synthetic construct
  source 1..75: mol_type = other DNA
tggattgccttatcatataggcggaaaaattccgttacggcagtcgctgattctgaaaaccccggaggattttaa

SEQ ID NO: 268298 - DNA, 75 bp, synthetic construct
  source 1..75: mol_type = other DNA
ggtgggtaatgcatatgctgaacagtttattcagcacgatgaatataaacatgctgtggcaataaaaagatggaa

SEQ ID NO: 268299 - DNA, 75 bp, synthetic construct
  source 1..75: mol_type = other DNA
acggcttacggggtgaacggcttcacggctgaccatctggcggccctgcgctaccacggcgtgaagcgggtgctc

SEQ ID NO: 268300 - DNA, 75 bp, synthetic construct
  source 1..75: mol_type = other DNA
tggatgagctgaaacgccacgtctccctgctgtcgctggcacagtcgcagggccataagttcaaaaagcatggtg

SEQ ID NO: 268301 - DNA, 75 bp, synthetic construct
  source 1..75: mol_type = other DNA
atactggacaggaagtaagaaaccagaactagcccatgagcgtaaacctagattaatatggttacctccggtacc

SEQ ID NO: 268302 - DNA, 75 bp, synthetic construct
  source 1..75: mol_type = other DNA
tgcagtatcaacgtaaaatttcacccgcagagattatgtttttagccataaatatagagcgcgtgcgcaaagaac

SEQ ID NO: 268303 - DNA, 75 bp, synthetic construct
  source 1..75: mol_type = other DNA
atgtttgattaccaagtttccaaacatccacattttgatgaagcctgtcgtgcattcgcactgcgccacaatctg

SEQ ID NO: 268304 - DNA, 75 bp, synthetic construct
  source 1..75: mol_type = other DNA
gggtcgcaccctggatgaaatgccgccacagacgcgcaaactgctgttgctgatacaggcgatggtcagagagat

SEQ ID NO: 268305 - DNA, 75 bp, synthetic construct
  source 1..75: mol_type = other DNA
gcgtggcgaaaattcgtttcgatttggctcaggagggcattaccccggaacggtgggcgctcgaagcgctggcgc

SEQ ID NO: 268306 - DNA, 75 bp, synthetic construct
  source 1..75: mol_type = other DNA
tgttctggaatattttatttatgcacttactgttcttcgtctttattttgtttatcgccgcgccctgatgcgtca

SEQ ID NO: 268307 - DNA, 75 bp, synthetic construct
  source 1..75: mol_type = other DNA
cagcgtatgatttgttgttaaggcctgttctggaatattttatttatgcacttactgttcttcgtctttattttg

SEQ ID NO: 268308 - DNA, 75 bp, synthetic construct
  source 1..75: mol_type = other DNA
tcactggacaatggtattaaagatattagtcagaatatagcttcttctttgcctgatggggatttccctttaggg

SEQ ID NO: 268309 - DNA, 75 bp, synthetic construct
  source 1..75: mol_type = other DNA
ctgggactgggcagtatttcgattggcgaaccgttcttcaacaccatgtttacctggctgatggtgccgtttgcg

SEQ ID NO: 268310 - DNA, 75 bp, synthetic construct
  source 1..75: mol_type = other DNA
ttcgaacattatgaagacataattgcagtaaaagaaaatggcctgattgatgtctatcaagttaagacaaagtct

SEQ ID NO: 268311 - DNA, 75 bp, synthetic construct
  source 1..75: mol_type = other DNA
ctgaccttatatttgaactggaggatcgccctccctttcatcaggctctcgttggtgccattacccatctgttgg

SEQ ID NO: 268312 - DNA, 75 bp, synthetic construct
  source 1..75: mol_type = other DNA
gtggctgccggcggcagttttacctttggctccatgaccggctcaggttacatcgctgcctcccgggataagatg

SEQ ID NO: 268313 - DNA, 75 bp, synthetic construct
  source 1..75: mol_type = other DNA
ctgaaagacactgcagcggctgttaccgcatgggcgtcaacgtggcgcatcccgcaatttaaaacggttggcctg

SEQ ID NO: 268314 - DNA, 75 bp, synthetic construct
  source 1..75: mol_type = other DNA
gatggcgacgaaagaggagccgcgcgaaaccgttttcaggcaaaacaccttaaccggggcggtgctgcggggtat

SEQ ID NO: 268315 - DNA, 75 bp, synthetic construct
  source 1..75: mol_type = other DNA
aggctgtcgggcgcgaaagacctcttacacgtgacgagatgcgtcaggtgcaaggtgttttatccacgattaacc

SEQ ID NO: 268316 - DNA, 75 bp, synthetic construct
  source 1..75: mol_type = other DNA
agaacagcacgctgacggcatcagaagcgaattaaaaaaacagaatccaaagcacaaatcgtctttctggttttc

SEQ ID NO: 268317 - DNA, 75 bp, synthetic construct
  source 1..75: mol_type = other DNA
gtctggtggatatggcagcgcaggcgggtaaattgctcgactactcggctcacgcctgggagtcgtttaccgcca

SEQ ID NO: 268318 - DNA, 75 bp, synthetic construct
  source 1..75: mol_type = other DNA
aaatctgatagaagatgctgtaaaagataagttgtttaataaggtttttgcctacatttttatttcatttttaat

SEQ ID NO: 268319 - DNA, 75 bp, synthetic construct
  source 1..75: mol_type = other DNA
gcgttttattttcagttaagcccgaccgcagattcagagagggaaaaaaactgaataaagcactgaagattttaa

SEQ ID NO: 268320 - DNA, 75 bp, synthetic construct
  source 1..75: mol_type = other DNA
aaagggtagattgatttctgttgttgtttttgtttcggctttgttgttatttattgcaatttatttcgatgaaat

SEQ ID NO: 268321 - DNA, 75 bp, synthetic construct
  source 1..75: mol_type = other DNA
atgaacggtaaaaaactttatatctcggacgtcacgttgcgtgacggtatgcacgccattcgtcatcagtattcg

SEQ ID NO: 268322 - DNA, 75 bp, synthetic construct
  source 1..75: mol_type = other DNA
tatgcgtctgcgtcctatcctgatgacctctctcgcctttattctcggcgtattaccgctagctatcagtaacgg

SEQ ID NO: 268323 - DNA, 75 bp, synthetic construct
  source 1..75: mol_type = other DNA
atggcaacagtaatccgctggtgggcgctgatgcttattattgcctgtagtctgctcgcaggctgcggtctgacg

SEQ ID NO: 268324 - DNA, 75 bp, synthetic construct
  source 1..75: mol_type = other DNA
caaaaatatatagacggtgatctagactaccttccatttttaccaaatgaaaacatgttccctgcattgtccatg

SEQ ID NO: 268325 - DNA, 75 bp, synthetic construct
  source 1..75: mol_type = other DNA
atgagcactgattcatcaatagaaaaggaaaatgaaaaatcatccgcccaaaatctgatagaagatgctgtaaaa

SEQ ID NO: 268326 - DNA, 75 bp, synthetic construct
  source 1..75: mol_type = other DNA
tcagcgccaccaagttgcaaactaatggtgcagtctctggcgttaaaactgatgtaccaattgccttagaaggct

SEQ ID NO: 268327 - DNA, 75 bp, synthetic construct
  source 1..75: mol_type = other DNA
ctggtagctgcgacgaaagattcagtagtcacattgccaaatgtcagcgccaccaagttgcaaactaatggagca

SEQ ID NO: 268328 - DNA, 75 bp, synthetic construct
  source 1..75: mol_type = other DNA
tatttctggttttatcgtgagcgtcactggaaatggggagacgatacaccgccaccgacgctggagggaaatccg

SEQ ID NO: 268329 - DNA, 75 bp, synthetic construct
  source 1..75: mol_type = other DNA
acggtaaaaagcggtgggttgcgttatggcgctgaaatggcgtgcattatgcgcgctgctcaattcctgtatctg

SEQ ID NO: 268330 - DNA, 75 bp, synthetic construct
  source 1..75: mol_type = other DNA
cggtggcttcaaccgcttcaccggcattctggatgtggtcgaagcgcgtatccgtaagcgtgtgccggacaaaat

SEQ ID NO: 268331 - DNA, 75 bp, synthetic construct
  source 1..75: mol_type = other DNA
cacaatatgtcgctgtgggataaatgggaagagatcctgcgcaacaacgatgaagatggtcaggttctggcgcag

SEQ ID NO: 268332 - DNA, 75 bp, synthetic construct
  source 1..75: mol_type = other DNA
tatcaatggtgctttatatctgttcacagatcaatgatataaaagaaaaaaatcaatttaaacggtcagaaaagc

SEQ ID NO: 268333 - DNA, 75 bp, synthetic construct
  source 1..75: mol_type = other DNA
aaagtcgagataacattcctgcacagatcctcaaggaactcccttcatggagtatctatgtttcagccgaaaatc

SEQ ID NO: 268334 - DNA, 75 bp, synthetic construct
  source 1..75: mol_type = other DNA
ggtgatatcaacccagatttaattaacctgtatcgccagataacccgctggcctgatgcggtgatcgacgctgct

SEQ ID NO: 268335 - DNA, 75 bp, synthetic construct
  source 1..75: mol_type = other DNA
caccatcgcaaaaaacgaacagagagcacgaaaatatggcgctcgagcatgaatcagaaagattcgcaccatgcg

SEQ ID NO: 268336 - DNA, 75 bp, synthetic construct
  source 1..75: mol_type = other DNA
aaccgacaaagcggccccccagttgctggtggcaacagataagcccacgacaaaaggcgagccgctgatcagcga

SEQ ID NO: 268337 - DNA, 75 bp, synthetic construct
  source 1..75: mol_type = other DNA
taagcgtactcaacgagtctatggtcagatctttagcgtctctggcgtagttgcggcgtttcgtcgtcgcgcgct

SEQ ID NO: 268338 - DNA, 75 bp, synthetic construct
  source 1..75: mol_type = other DNA
aaatctgatggtgttttcaataataaagaggctattgaaaaagccctacaatatgcttatattaatggattaagt

SEQ ID NO: 268339 - DNA, 75 bp, synthetic construct
  source 1..75: mol_type = other DNA
atacttttaaggttattggaagaataaatcctgatgacgaaataaaattgaatcgtcatgaaggggttgttgtta

SEQ ID NO: 268340 - DNA, 75 bp, synthetic construct
  source 1..75: mol_type = other DNA
gcagaaaagttcgattgtaatgttttggtttctaagtatgataaagactttttattcacaccgaaaaccgatgtt

SEQ ID NO: 268341 - DNA, 75 bp, synthetic construct
  source 1..75: mol_type = other DNA
aaaaggcgctccccattctgtgtctggcgcaacggttgattactcagccataaatgattttggcggtggaattga

SEQ ID NO: 268342 - DNA, 75 bp, synthetic construct
  source 1..75: mol_type = other DNA
tccagttggcatttcgcacccgaatcaaacttttttatcgcccggaaggtttaagtgggaatccttctgaagctc

SEQ ID NO: 268343 - DNA, 75 bp, synthetic construct
  source 1..75: mol_type = other DNA
ggcaataacccattacttgttcaaagttggctggataccggcgatgacaatgctgagcctggcagtattaccgtc

SEQ ID NO: 268344 - DNA, 75 bp, synthetic construct
  source 1..75: mol_type = other DNA
tgtcgccagcggaaagcgttatccgttagacgtcaaaatgatcgcgccacgcagtgaagatgccatcacagttaa

SEQ ID NO: 268345 - DNA, 75 bp, synthetic construct
  source 1..75: mol_type = other DNA
ctcaccggaataccttccgatgctccggctgcactgaagtggtcgtggacaacatccggcggcaaagtggcgctt

SEQ ID NO: 268346 - DNA, 75 bp, synthetic construct
  source 1..75: mol_type = other DNA
aaaaggcgctccccgttctgtgtctggtgcaacagttgattactccgccattaatgattttggcggtggcattga

SEQ ID NO: 268347 - DNA, 75 bp, synthetic construct
  source 1..75: mol_type = other DNA
caccagtccttattcagtgcgtgatacacagtatgccaatcaggcaaccgaaaaactgacggtggcaacccagga

SEQ ID NO: 268348 - DNA, 75 bp, synthetic construct
  source 1..75: mol_type = other DNA
atgaaggttaaattatggacgacaaacaattgcaggctctggctaacgaactggccaaaaatctcaaaacccctg

SEQ ID NO: 268349 - DNA, 75 bp, synthetic construct
  source 1..75: mol_type = other DNA
tcattaaaggctacctgggggggaaacatttgcagcataaaatttcgtatagaagatcaaaaatcagtgggccca

SEQ ID NO: 268350 - DNA, 75 bp, synthetic construct
  source 1..75: mol_type = other DNA
cgggaagttcaggccgatggaactctttgtgatagatattatgagcaagaatgtctgttgactgatttgtctttt

SEQ ID NO: 268351 - DNA, 75 bp, synthetic construct
  source 1..75: mol_type = other DNA
tggcgctgacaacaccacacaccttccggcacagcaatatcatgcacatgctctatcaccgccagccccggaaag

SEQ ID NO: 268352 - DNA, 75 bp, synthetic construct
  source 1..75: mol_type = other DNA
cgaagtgctgaacctgatgaatatattctttcgcattgatgcttttatatcggaatcgttcatcctctcgggtca

SEQ ID NO: 268353 - DNA, 75 bp, synthetic construct
  source 1..75: mol_type = other DNA
gggaataatccgttactcgttcagagctggctggatactggcgacgatagtgctgaaccagggagtattactgtc

SEQ ID NO: 268354 - DNA, 75 bp, synthetic construct
  source 1..75: mol_type = other DNA
gctgacatgacagtgaaaggtctgagcactgcatctgctggtgcaacgattgaatataccgccattaatgacttc

SEQ ID NO: 268355 - DNA, 75 bp, synthetic construct
  source 1..75: mol_type = other DNA
atgtttcccttggttaaaaaaacggttggtgcattatttgtgagtactctgttagccagtgcgccagcatttgct

SEQ ID NO: 268356 - DNA, 75 bp, synthetic construct
  source 1..75: mol_type = other DNA
atgtttcccttggttaaaaaaacggttagtgcattatttgtgagtactctgttagccagtgcaccagcatttgct

SEQ ID NO: 268357 - DNA, 75 bp, synthetic construct
  source 1..75: mol_type = other DNA
tcagcggttgcgggatacagccaaaaggctggtcaatgcctatgagtcttcactggcgttgccggaactgcaatg

SEQ ID NO: 268358 - DNA, 75 bp, synthetic construct
  source 1..75: mol_type = other DNA
tggcaagactatgatatgtggtttcgtatgattaaaaaatttggaccatgttacaggttaaatgacgctacctat

SEQ ID NO: 268359 - DNA, 75 bp, synthetic construct
  source 1..75: mol_type = other DNA
aacatttattgctccagctgtagtaattatgttgatagctgtctcaaaaatgggaattaatgcttggtgttcatt

SEQ ID NO: 268360 - DNA, 75 bp, synthetic construct
  source 1..75: mol_type = other DNA
acttttttatcgcccaagtggattaaaaggtgaacccgctgaagcaccagccaaactgacgtggaagttaaataa

SEQ ID NO: 268361 - DNA, 75 bp, synthetic construct
  source 1..75: mol_type = other DNA
tgagtgaagaaaccttctacataaaaggcatgagtggtaaagcaagttctgccaaagtgcatttcttcgccataa

SEQ ID NO: 268362 - DNA, 75 bp, synthetic construct
  source 1..75: mol_type = other DNA
aaccattaaattgatgtacacggcttcttcgcctctgccaaaagacagagaaagtgttttctggtttaacgtact

SEQ ID NO: 268363 - DNA, 75 bp, synthetic construct
  source 1..75: mol_type = other DNA
aaagcgtctactggtttaacgtgctggaagtgccgcctaagccgaaagatgctgaggctgacaaaaacttgttac

SEQ ID NO: 268364 - DNA, 75 bp, synthetic construct
  source 1..75: mol_type = other DNA
gatattgtcatttccggtacacgtatcatttatgatgccaataaaaaagatgtcagcatacggctggaaaataaa

SEQ ID NO: 268365 - DNA, 75 bp, synthetic construct
  source 1..75: mol_type = other DNA
ggaagtgccgcctaagccgaaagatgccgagtcagacaaaaacttattacagctggctttccgtacccgtatcaa

SEQ ID NO: 268366 - DNA, 75 bp, synthetic construct
  source 1..75: mol_type = other DNA
agacgttcctgttcatttagcgatgctgatttccatctgatgaacaccggtgatcccatctctatcagcgccact

SEQ ID NO: 268367 - DNA, 75 bp, synthetic construct
  source 1..75: mol_type = other DNA
gggagctcgtcgctcagtactaatatttatttttggcctagttgtagtacttttttacgccatcattgccagtcc

SEQ ID NO: 268368 - DNA, 75 bp, synthetic construct
  source 1..75: mol_type = other DNA
aaagcattcaatgggttaaaagatccagaaagaaattactgggcaaaagaacaaataactggctctccagaagag

SEQ ID NO: 268369 - DNA, 75 bp, synthetic construct
  source 1..75: mol_type = other DNA
aacgagagtgaactggcagccttgtacgcctgtgtggaagcggcaaaatgtagcaatcaatcgccaatgcacatt

SEQ ID NO: 268370 - DNA, 75 bp, synthetic construct
  source 1..75: mol_type = other DNA
ctcgttctgatactccgtattcaaaagggcctgcgggccctttacgctcagaacgtgcccatactttaggtaagt

SEQ ID NO: 268371 - DNA, 75 bp, synthetic construct
  source 1..75: mol_type = other DNA
actgtacccatgcgcctgaagatggaatgagaattccggtggcgaaagccgcaggtaaatatggctggtttaaat

SEQ ID NO: 268372 - DNA, 75 bp, synthetic construct
  source 1..75: mol_type = other DNA
tcgcccacgtaaaatccgcaatttattgattatcgcctttatctctacgctggtgctgtctctgctgttgccgtg

SEQ ID NO: 268373 - DNA, 75 bp, synthetic construct
  source 1..75: mol_type = other DNA
gatgggcaatgattttgcaacgtgctggtggaactcacttcattgctgacgcagtggcgcagtctgcaaatggcg

SEQ ID NO: 268374 - DNA, 75 bp, synthetic construct
  source 1..75: mol_type = other DNA
tgtctgaaaagacagagcttgagatagcaaaacagacgcttaaaaacagtaaaaatccggcagagcgtgaaaaag

SEQ ID NO: 268375 - DNA, 75 bp, synthetic construct
  source 1..75: mol_type = other DNA
cgtggatttccatccctttagtgaacatcgcctgctctgccgcttcactcagcgcaataagctcttctgctgtca

SEQ ID NO: 268376 - DNA, 75 bp, synthetic construct
  source 1..75: mol_type = other DNA
gatgtcgatggctacggctggtattgttgttgggggaactcgcgttattttttatggtgacaaacctgataccac

SEQ ID NO: 268377 - DNA, 75 bp, synthetic construct
  source 1..75: mol_type = other DNA
acaacattatcagcgccgcagaacataacgccgcgctggtactgagcgggacttcgaatgctgaagccgggcaaa

SEQ ID NO: 268378 - DNA, 75 bp, synthetic construct
  source 1..75: mol_type = other DNA
aatcagttttcaagaccattcaaagcaattataagagatctgctggcgtgggcagcagaaaacggtgacccacga

SEQ ID NO: 268379 - DNA, 75 bp, synthetic construct
  source 1..75: mol_type = other DNA
aggtccacagggtgctaccggccccagaggaccacaaggggaaaaaggggataaaggtgaccccggcccggcagg

SEQ ID NO: 268380 - DNA, 75 bp, synthetic construct
  source 1..75: mol_type = other DNA
agacacggggccacagggtattcccgggccaaaaggcgataccggcgagcgggggccaaagggtgagcgtggtga

SEQ ID NO: 268381 - DNA, 75 bp, synthetic construct
  source 1..75: mol_type = other DNA
gcgcgcgacggtaaaccagagacggtgctgtatgcggaaaaacgttattacaacaccgcgggttcaatgatgacc

SEQ ID NO: 268382 - DNA, 75 bp, synthetic construct
  source 1..75: mol_type = other DNA
ataccaccaggaccttttcaaattgaagattttaatctctccggttataccggtgatatggtcgtgactattcga

SEQ ID NO: 268383 - DNA, 75 bp, synthetic construct
  source 1..75: mol_type = other DNA
aacagtgccatgttgattttagcctgccactggataaaaagcagtccggccccgtgacggaggcgatgatgctat

SEQ ID NO: 268384 - DNA, 75 bp, synthetic construct
  source 1..75: mol_type = other DNA
atgcaactgagaaaaagcttattattaccatcactgcttgtttttatcagcaaccgtgcagtaggcggagattat

SEQ ID NO: 268385 - DNA, 75 bp, synthetic construct
  source 1..75: mol_type = other DNA
gcaagctggcacaggtggcgtatggagtgctgaagtcaggcgtgccgttcgatgcgtcacggcataatccggtag

SEQ ID NO: 268386 - DNA, 75 bp, synthetic construct
  source 1..75: mol_type = other DNA
caatgaaaatattgaatgggctttccgtagaaaaaacttttgtataaaacaaatttcatcacataagaaaaatca

SEQ ID NO: 268387 - DNA, 75 bp, synthetic construct
  source 1..75: mol_type = other DNA
cagtggcaggatgcggaatccgggctgtgctataaccggttccggtattacgagccggaaaccggaatgtacctg

SEQ ID NO: 268388 - DNA, 75 bp, synthetic construct
  source 1..75: mol_type = other DNA
cagtgtcactgctgtcacttacggcttccttcaggttcatgatggcaggcagtgggttacggtgaaacatgaata

SEQ ID NO: 268389 - DNA, 75 bp, synthetic construct
  source 1..75: mol_type = other DNA
gctggcgcatttctggtgctggtcaatgctttcgtggtgaatgactttactgtcacctatgttgccagcaactcc

SEQ ID NO: 268390 - DNA, 75 bp, synthetic construct
  source 1..75: mol_type = other DNA
atggtggatttgctgggctggggtgtaaaccggcttgagcgcgaagcatgggacgcggtgggctcattaacggat

SEQ ID NO: 268391 - DNA, 75 bp, synthetic construct
  source 1..75: mol_type = other DNA
atgcccccgtgtcttttttcacagggggctgagatggcaacaaaagaagaaaatcagaaacgtcttcgtgaactg

SEQ ID NO: 268392 - DNA, 75 bp, synthetic construct
  source 1..75: mol_type = other DNA
acacgccggcgcgaaaaatccccctgtaccactgcgaccatcgcggcctgccgctggcccttatcagtaaggaag

SEQ ID NO: 268393 - DNA, 75 bp, synthetic construct
  source 1..75: mol_type = other DNA
ggcacaagaaattaacgccgaatatggtgaaggaacagcgtatagttttggtgctgacgccaccagcgagcaaag

SEQ ID NO: 268394 - DNA, 75 bp, synthetic construct
  source 1..75: mol_type = other DNA
aagattttatctaccttgcctttctcttggactttcattctctctaatttattgttatgtcacagcttccccatt

SEQ ID NO: 268395 - DNA, 75 bp, synthetic construct
  source 1..75: mol_type = other DNA
gaaagaatatacttttctttactattggcctatcgctgctgactattatgggcattctaggtgtggacacttatt

SEQ ID NO: 268396 - DNA, 75 bp, synthetic construct
  source 1..75: mol_type = other DNA
ttacacaacaatcaagtgttaaacatctcaaccaagaaccaattactccacaagtattacctccgcagggaaaag

SEQ ID NO: 268397 - DNA, 75 bp, synthetic construct
  source 1..75: mol_type = other DNA
cgcctgaaagaggctgtgcgacctgctgaggccgaaattaagcgtttcgttgatgcatgtgacgagcttcgcgac

SEQ ID NO: 268398 - DNA, 75 bp, synthetic construct
  source 1..75: mol_type = other DNA
cgccgccgccaggaagaggcagaagccgcccgtttggtcgaagagcagcgcaaagctgaagaagaagcgcgccga

SEQ ID NO: 268399 - DNA, 75 bp, synthetic construct
  source 1..75: mol_type = other DNA
gctcaccagccacaccagcttaacccgcgaacaggctatcgaagtgctcaccgcactgaaagatgacctgatccc

SEQ ID NO: 268400 - DNA, 75 bp, synthetic construct
  source 1..75: mol_type = other DNA
tggcgaacagaacgttgttgcctggtatggtttccggccagtgtgcatttaagctccgcactttctctccggtgg

SEQ ID NO: 268401 - DNA, 75 bp, synthetic construct
  source 1..75: mol_type = other DNA
agtgcctgcaagtaatggggtattgcccggagacaggtcgtcccgttgagctggcgttacggggtatgcgtgttc

SEQ ID NO: 268402 - DNA, 75 bp, synthetic construct
  source 1..75: mol_type = other DNA
cgtgatgatcggctgaaacaggaagcggcagaacaagcccgccgcgatgccgaagcaaaggcaaaagccgaaatt

SEQ ID NO: 268403 - DNA, 75 bp, synthetic construct
  source 1..75: mol_type = other DNA
ttattccatgtgcactgctgctgagtgcctgtaccaccgtcacgccagcttataaagataacggcccccacaccg

SEQ ID NO: 268404 - DNA, 75 bp, synthetic construct
  source 1..75: mol_type = other DNA
gcttcgctctaaggatcatgagcgattaattaatactatgcagcttcctcttaatgaggcattgttatgggagta

SEQ ID NO: 268405 - DNA, 75 bp, synthetic construct
  source 1..75: mol_type = other DNA
gataaaaataagcgcttggcttttgagttatataatgctagctaaagcaatgactaaagaatttatcattaccga

SEQ ID NO: 268406 - DNA, 75 bp, synthetic construct
  source 1..75: mol_type = other DNA
aaaaactggcgcagatgctggcaggtcagcagggaatgtcagttgagcaggcaaaaacattactggcagcggcac

SEQ ID NO: 268407 - DNA, 75 bp, synthetic construct
  source 1..75: mol_type = other DNA
gggaattatctggcgaaatcaaagttgaaagaacagtctcatcatctaaatctttacctatatggaaatctgaag

SEQ ID NO: 268408 - DNA, 75 bp, synthetic construct
  source 1..75: mol_type = other DNA
atatatctacaacctatctgatgatagttactacagccttaagtacctattacttaccaaggctgtcagaaatca

SEQ ID NO: 268409 - DNA, 75 bp, synthetic construct
  source 1..75: mol_type = other DNA
tgttgtcggttgtatattagcaatattttctaacttcttttctcttaaaatattagatgatgtccagtatcaatt

SEQ ID NO: 268410 - DNA, 75 bp, synthetic construct
  source 1..75: mol_type = other DNA
tgggagctgtttgtctgtgttcttcttatacactagctcaatggagcccaccgggatacgattttaatggtggga

SEQ ID NO: 268411 - DNA, 75 bp, synthetic construct
  source 1..75: mol_type = other DNA
tgggccttggatgacgaatctttagaagacagttttgcattaactcctgaaataagggaattaaaaaaaagattg

SEQ ID NO: 268412 - DNA, 75 bp, synthetic construct
  source 1..75: mol_type = other DNA
gtgaacttggtgtaccagtgagtgataagtttacacaagattgggcttatgaactgcctgaaaaatatcgaacta

SEQ ID NO: 268413 - DNA, 75 bp, synthetic construct
  source 1..75: mol_type = other DNA
atcgacagcccgggcggtcaggctgccggggcgtttgactgtgctgacatgatttaccgtctgcgggaacagaag

SEQ ID NO: 268414 - DNA, 75 bp, synthetic construct
  source 1..75: mol_type = other DNA
tcacttttaagataaaagtgaatgcacttttaaaatttgtatcagagggacaagagaagtattccgggctctata

SEQ ID NO: 268415 - DNA, 75 bp, synthetic construct
  source 1..75: mol_type = other DNA
ggtcggggaatcgacggtaatcaggctgtcgaaggatggcatcaccatcgtgggcggttctgttttcatcaacta

SEQ ID NO: 268416 - DNA, 75 bp, synthetic construct
  source 1..75: mol_type = other DNA
agtccagaccttccctggttctggcgcacgggggacgagaaatgtcagatgcattccgacactccatctggcaac

SEQ ID NO: 268417 - DNA, 75 bp, synthetic construct
  source 1..75: mol_type = other DNA
aaaatttattgcatggattttcgctactcatgacatcggcaaatttgcacggggctttcaaaaatatgcactgtt

SEQ ID NO: 268418 - DNA, 75 bp, synthetic construct
  source 1..75: mol_type = other DNA
tgggcgaaggattctaaaaaagccactattcataaagatgccgccgtttttgaaagtgaaatttatgaatacctc

SEQ ID NO: 268419 - DNA, 75 bp, synthetic construct
  source 1..75: mol_type = other DNA
gtctggccggtaacgtacaggccgcaccggtggtacagaaacccgtacaggttcctgtttcgcctgatgcacagg

SEQ ID NO: 268420 - DNA, 75 bp, synthetic construct
  source 1..75: mol_type = other DNA
aggaaattttgctggccgtggaggaaagcaaaattgcgctgacgccggatggcattcagctacaggtcggggaat

SEQ ID NO: 268421 - DNA, 75 bp, synthetic construct
  source 1..75: mol_type = other DNA
cgttgagggtcgggctgggttatgacgtcaaagtcggaaataacgttaccttcaccgttggtaaaacgaaaaagg

SEQ ID NO: 268422 - DNA, 75 bp, synthetic construct
  source 1..75: mol_type = other DNA
agttcgtgctggatccgtgtggcacaggcgtgggcaggcaccggttttggccacctggcgataccgcgtgtgggt

SEQ ID NO: 268423 - DNA, 75 bp, synthetic construct
  source 1..75: mol_type = other DNA
aacaaccatgctgagaccattggcaacaatcagatgattgcggttaccaacaatcagatacagacggtgggcgtt

SEQ ID NO: 268424 - DNA, 75 bp, synthetic construct
  source 1..75: mol_type = other DNA
ttccggcaacatgccgcgatttaataccatcagtatcagcggttaccatcagtatcagcggttaccacatgggtg

SEQ ID NO: 268425 - DNA, 75 bp, synthetic construct
  source 1..75: mol_type = other DNA
cactgtactgggcggtcacaacgggtggcttcgacagtgaaacagtacaggacgtcatgctgggagcagtggaac

SEQ ID NO: 268426 - DNA, 75 bp, synthetic construct
  source 1..75: mol_type = other DNA
tcagacgaaccgatgactggaaggacggccgccgcagccgtcctacggatgatacggatgtgcttcgccgtatac

SEQ ID NO: 268427 - DNA, 75 bp, synthetic construct
  source 1..75: mol_type = other DNA
attcctgttaccccggatgataaagcatggcaggaaagtattaagaccgctctcgcgttaagcatagctggcgtt

SEQ ID NO: 268428 - DNA, 75 bp, synthetic construct
  source 1..75: mol_type = other DNA
caggctgctgccgcctgggagcgcagccatgattatgtggcgttgctggttgatgtacagaggacgctgatgaaa

SEQ ID NO: 268429 - DNA, 75 bp, synthetic construct
  source 1..75: mol_type = other DNA
gtccaatcttcgaacaaattaagcctttcctcgaaaaggccatgacaacgtacaatgatgttcttttccctggag

SEQ ID NO: 268430 - DNA, 75 bp, synthetic construct
  source 1..75: mol_type = other DNA
agttatatttttcttaaaagaatatatagcttattccgacataccaattgagacaaaacatataattgataatat

SEQ ID NO: 268431 - DNA, 75 bp, synthetic construct
  source 1..75: mol_type = other DNA
cacgaagaagcactggtgatgaacaagatgttcgatgaccagcgcgccgcgcagatcgaagcagaccacgaaatg

SEQ ID NO: 268432 - DNA, 75 bp, synthetic construct
  source 1..75: mol_type = other DNA
atgagcgaagtaacggacttaactgtcatcgaaatcaagccggagcaggcgccagtgctttacgtagccggcggc

SEQ ID NO: 268433 - DNA, 75 bp, synthetic construct
  source 1..75: mol_type = other DNA
aagcggaagcccgggcggaacgcgaaaaagccgcggcggttgaagccgagcgcctgaaggccaaacaggccgaag

SEQ ID NO: 268434 - DNA, 75 bp, synthetic construct
  source 1..75: mol_type = other DNA
ctgataaagatgtggatttatataataaaaaaatgagattgcactgtaattacaaaaacaatgcaattacagtga

SEQ ID NO: 268435 - DNA, 75 bp, synthetic construct
  source 1..75: mol_type = other DNA
gacggtggatgtggagtcgacttatcaggattaccttccacaactatgcaaggaagcggtacctcttgagttgaa

SEQ ID NO: 268436 - DNA, 75 bp, synthetic construct
  source 1..75: mol_type = other DNA
ataataaaggagactattgatgctagtgattattatgtgattatcattgggcataagtatgggtccgtttctaaa

SEQ ID NO: 268437 - DNA, 75 bp, synthetic construct
  source 1..75: mol_type = other DNA
tttaagtgtggttgtttttgaatcaatatcagcttctctaaaaagagcattctgggcattaaataaaatgaaagt

SEQ ID NO: 268438 - DNA, 75 bp, synthetic construct
  source 1..75: mol_type = other DNA
taagagagatgcgaataaactcatacatattttaagtccaagacttaaaacgtttggtgctaatataggtgatat

SEQ ID NO: 268439 - DNA, 75 bp, synthetic construct
  source 1..75: mol_type = other DNA
gccattggtgtcgtggcgctggtggtgttaattcgccatccgctgatgccggtatatatcgatatcttgcgcaaa

SEQ ID NO: 268440 - DNA, 75 bp, synthetic construct
  source 1..75: mol_type = other DNA
gcggatgcgaacaggctgtatacgctggcaaaatgatgaacatcagggtggctctcggatatgtttgctggatgt

SEQ ID NO: 268441 - DNA, 75 bp, synthetic construct
  source 1..75: mol_type = other DNA
gcaagaataaccggcagtggtgatctggcttttgatagtcagaaaggccagacagtcacattgtcagatgcagat

SEQ ID NO: 268442 - DNA, 75 bp, synthetic construct
  source 1..75: mol_type = other DNA
cttgatcctgccgctatccataccccggggatttttgttaatcgcgtcattcaggggcaatttgaaaaacgcatt

SEQ ID NO: 268443 - DNA, 75 bp, synthetic construct
  source 1..75: mol_type = other DNA
gctggaaagccgactggtacggcaacgtgatttatcgtcataccgcgcaaaacttcaacccactgatggcggctg

SEQ ID NO: 268444 - DNA, 75 bp, synthetic construct
  source 1..75: mol_type = other DNA
aaatagtaatgtcaggcggtggtgagaatggcattatttttaatgggacacgtacaggtaaagagtttaacttct

SEQ ID NO: 268445 - DNA, 75 bp, synthetic construct
  source 1..75: mol_type = other DNA
gaaaagatagtttgcttcagattggtggagctcatttaggaggattgacttcaacacaaaatggaggcagtggcg

SEQ ID NO: 268446 - DNA, 75 bp, synthetic construct
  source 1..75: mol_type = other DNA
agcgataaacttgtcgttaaaggaaatacatccggcataaccagcgtcagggtgacaaatgcgggtggctccggt

SEQ ID NO: 268447 - DNA, 75 bp, synthetic construct
  source 1..75: mol_type = other DNA
gaaattcaggtagatactgataggctgagcaatgaccggcctcagccagatatgcatattcctttattgcaacag

SEQ ID NO: 268448 - DNA, 75 bp, synthetic construct
  source 1..75: mol_type = other DNA
atgatgattttactggcgactggcatgttattgaaaatggtattttatctcagtccttgtcatcaaccactaccc

SEQ ID NO: 268449 - DNA, 75 bp, synthetic construct
  source 1..75: mol_type = other DNA
ggagaaataaaaacaggtgtagaggggcaaattaccccaaatcttagcctttggggtaatgttggtattcaagct

SEQ ID NO: 268450 - DNA, 75 bp, synthetic construct
  source 1..75: mol_type = other DNA
gtcgtcgcttcttatgttggcgagaatgctttgtttgaaaaacaggtgcttaacggcgaactggaggcgattctc

SEQ ID NO: 268451 - DNA, 75 bp, synthetic construct
  source 1..75: mol_type = other DNA
ctcttcttggactctgcaaaagtgaaaaagtttttctgtgggaacaccttataaaacgtgattcaccaatggatg

SEQ ID NO: 268452 - DNA, 75 bp, synthetic construct
  source 1..75: mol_type = other DNA
ctggtaaaacgacttttgaaggatccgcggctggttttttacagcgttttgatccttacatgttcgttattgact

SEQ ID NO: 268453 - DNA, 75 bp, synthetic construct
  source 1..75: mol_type = other DNA
tgtcggggttggcaaagaaggtgatgtgtatttgtggacacattttataaaagagaagatttatcttgatgaatc

SEQ ID NO: 268454 - DNA, 75 bp, synthetic construct
  source 1..75: mol_type = other DNA
atgtatctcaccgctgccatcgcatttgttgtttgcggactgatagtctggttgtttttgccatcaatacaaaga

SEQ ID NO: 268455 - DNA, 75 bp, synthetic construct
  source 1..75: mol_type = other DNA
ttcagtgtacgggaattcgtttgcgagcagaactgataatattcattttgccttctcttaactatttatctcttg

SEQ ID NO: 268456 - DNA, 75 bp, synthetic construct
  source 1..75: mol_type = other DNA
accctatgaatttattcttactcaatcctttatttttgagtcacccacaaaaaccctgaagaatatcgattcgca

SEQ ID NO: 268457 - DNA, 75 bp, synthetic construct
  source 1..75: mol_type = other DNA
atgcgttcgtcgagaaagctcaacagccagtggaagtcagccatgaactcacctggcttggtgagaatatggagc

SEQ ID NO: 268458 - DNA, 75 bp, synthetic construct
  source 1..75: mol_type = other DNA
gcgcgttttaacacggcactggaagccagcctgcaggcatggcagcagaaacaccacgcggtcattctggtgtcg

SEQ ID NO: 268459 - DNA, 75 bp, synthetic construct
  source 1..75: mol_type = other DNA
ggtgccgctgacggatgccagttttgtgcgtcagatggaaagctggatggtgaccacccgcccccgccggcggga

SEQ ID NO: 268460 - DNA, 75 bp, synthetic construct
  source 1..75: mol_type = other DNA
ctggctgtgttggcggttatggcgcagcggcaaggtaactgatcgtttaagtcattatttgtcgcgcggtcattt

SEQ ID NO: 268461 - DNA, 75 bp, synthetic construct
  source 1..75: mol_type = other DNA
tagcaaccccagcttattgcttcactctttatcatgataaagagtacaaagagaaaaacatggatgtggagttct

SEQ ID NO: 268462 - DNA, 75 bp, synthetic construct
  source 1..75: mol_type = other DNA
tcgagctggcggtaaaagaagagccgctctactggggcgtttctcagccggacgatccgcgtgaactgattgagc

SEQ ID NO: 268463 - DNA, 75 bp, synthetic construct
  source 1..75: mol_type = other DNA
aaggtgatgactatattcatctagtaaaaaacgaaaataatacatatgagttgaatttcagggcgaaatacgcgg

SEQ ID NO: 268464 - DNA, 75 bp, synthetic construct
  source 1..75: mol_type = other DNA
ttactcgtaatactggtgatgcaaatgatgttggttttgctgtcttttatggacaagaggctagtaccggcaacc

SEQ ID NO: 268465 - DNA, 75 bp, synthetic construct
  source 1..75: mol_type = other DNA
cagtattatcttctctttttatgagtgcagggaatgcagcggaagtggagaatgcaatgggtacgttaattatta

SEQ ID NO: 268466 - DNA, 75 bp, synthetic construct
  source 1..75: mol_type = other DNA
ttttggccgaaatcccgcgaatttaacatttttaaaagaaactgatttagttgacctgacaccgggttcatcgcc

SEQ ID NO: 268467 - DNA, 75 bp, synthetic construct
  source 1..75: mol_type = other DNA
cagatacccagcacgtgaatgtctattttgagatggctggaaaaatagttgaacacctagacaaagcaaccgcga

SEQ ID NO: 268468 - DNA, 75 bp, synthetic construct
  source 1..75: mol_type = other DNA
caatgctggtggaacaaaatcgttttagtcgccagctgtattacgcgctgcatgcatttgaaattaccatcccgc

SEQ ID NO: 268469 - DNA, 75 bp, synthetic construct
  source 1..75: mol_type = other DNA
ttactcgaacaaaaatattccatgatcaaataaaaaaacacatatcttcaggaaagatatccgcaattaacgcaa

SEQ ID NO: 268470 - DNA, 75 bp, synthetic construct
  source 1..75: mol_type = other DNA
ggaggcactatgccgcaattaactgcaacggaagccgccgcgcaggagaaccagcgagtgatggggatcctgaca

SEQ ID NO: 268471 - DNA, 75 bp, synthetic construct
  source 1..75: mol_type = other DNA
ccattggcgtgatgatgagccatgtcagctatgccggtcatctggcgcaggccggtgttgatatcacgctgattt

SEQ ID NO: 268472 - DNA, 75 bp, synthetic construct
  source 1..75: mol_type = other DNA
ggtcgcgtctttgcgcgcgaatggcaaaagctgaatattggtacggtgatcattactgccgcactggtcgcgttt

SEQ ID NO: 268473 - DNA, 75 bp, synthetic construct
  source 1..75: mol_type = other DNA
gctttactaatgaacctgcatattcaggggatttgcttctagtcgctcgtgtcggtgcatatgctggattggtta

SEQ ID NO: 268474 - DNA, 75 bp, synthetic construct
  source 1..75: mol_type = other DNA
gcccgggcaatccggaaaaatcccttgccatccagtctgaaatcgttcggattctggataaattcgacaccctga

SEQ ID NO: 268475 - DNA, 75 bp, synthetic construct
  source 1..75: mol_type = other DNA
tgcgtgttaaatgctcaagaaatttttaaaacaccaatatcacttctgaagcaatcgttaatactcatacctatt

SEQ ID NO: 268476 - DNA, 75 bp, synthetic construct
  source 1..75: mol_type = other DNA
agcgtatccagtcagagctggcgcggataaaacaccagtttggttatgcactgctgtttgacgcgcattctattg

SEQ ID NO: 268477 - DNA, 75 bp, synthetic construct
  source 1..75: mol_type = other DNA
tcatgctgttcagctagaaatggcccagtgctgctatatggatgagaagagctttgcttatcttccggagaaagg

SEQ ID NO: 268478 - DNA, 75 bp, synthetic construct
  source 1..75: mol_type = other DNA
tatcagaccatcgcggacatgggggccagcacgttatgcgcccgctattcccgctatgtggtggatatcaatcgc

SEQ ID NO: 268479 - DNA, 75 bp, synthetic construct
  source 1..75: mol_type = other DNA
gttcggaggggtgactggtaatattgataatcagggaactttatcacccggtgatgataccggtataacccgcag

SEQ ID NO: 268480 - DNA, 75 bp, synthetic construct
  source 1..75: mol_type = other DNA
ggggcatgtactaatggtctttgcggcacactatccgctatgataggtccagataaatttgattctatagatagc

SEQ ID NO: 268481 - DNA, 75 bp, synthetic construct
  source 1..75: mol_type = other DNA
aggggcgatatatcactcaggatccgattggactgaaggggggatggaacctgtatggatatcaattgaatccga

SEQ ID NO: 268482 - DNA, 75 bp, synthetic construct
  source 1..75: mol_type = other DNA
agcttgatgtgagtagaaaccggctgtgcagcctgcctgtcctgcccgccgggctgaagcaccttaatgtgggtg

SEQ ID NO: 268483 - DNA, 75 bp, synthetic construct
  source 1..75: mol_type = other DNA
tttcggaagaaatccagctaacctaacttttctaaaagaaacggacttaattaacctgacgcctgattccgattc

SEQ ID NO: 268484 - DNA, 75 bp, synthetic construct
  source 1..75: mol_type = other DNA
gatcctgatagaggacctcttcatagaactcttgagcttcaactcataatcaatacgttaaagcaagacaacagt

SEQ ID NO: 268485 - DNA, 75 bp, synthetic construct
  source 1..75: mol_type = other DNA
aatgggaagataacagccaaaaacccaggaaagtccaccattgtcttaacagataaaagtaaaaataccctcact

SEQ ID NO: 268486 - DNA, 75 bp, synthetic construct
  source 1..75: mol_type = other DNA
tcgaaacgggatgttcttctcttaaatagcgatgttgaagtcgctaataaatggctggaacgtatctatgatgca

SEQ ID NO: 268487 - DNA, 75 bp, synthetic construct
  source 1..75: mol_type = other DNA
ataaatcttgaattaggtccgctgcgttctccgacgtatctttttactggttatttcgatttttctggtgtcaat

SEQ ID NO: 268488 - DNA, 75 bp, synthetic construct
  source 1..75: mol_type = other DNA
caccagggaagagtacgacgctgttatggacgatgacgatcgccgttggcaggaaatgattgagcgcgaaaaatc

SEQ ID NO: 268489 - DNA, 75 bp, synthetic construct
  source 1..75: mol_type = other DNA
ttactcctgaagagagtgtctcaattgaattaaatttaccatcggatgatggtaaaaagacggaaaaaatagggc

SEQ ID NO: 268490 - DNA, 75 bp, synthetic construct
  source 1..75: mol_type = other DNA
tactagatctggtagtgaatattcatcctttaaagttatttatgatggttgccacttacatgatatattgttagc

SEQ ID NO: 268491 - DNA, 75 bp, synthetic construct
  source 1..75: mol_type = other DNA
actttgatgcacattgtcctcacgcatttcgcgcttttgcaggtattgatggtgctgtttttgatgtgtgtaatc

SEQ ID NO: 268492 - DNA, 75 bp, synthetic construct
  source 1..75: mol_type = other DNA
cgttcctctcctgtttatggctttcccgggcgtccccctggcggggcgggctgtcgtgaacggagccagcggagc

SEQ ID NO: 268493 - DNA, 75 bp, synthetic construct
  source 1..75: mol_type = other DNA
ttgattttgttaatctgaagcttaaagttactaaacaagcacaaaaaattcttgagaattttttaaagaggggcg

SEQ ID NO: 268494 - DNA, 75 bp, synthetic construct
  source 1..75: mol_type = other DNA
tataaaattcacctttgatggaaatgttatagggggaaattcaaaagtcactaagtatagtgactactttgaggg

SEQ ID NO: 268495 - DNA, 75 bp, synthetic construct
  source 1..75: mol_type = other DNA
ggcgcgtcgcccgttacccttcccgtttgtgatgtgtccggaatgttttttcctgatgttatgtttctgtggtta

SEQ ID NO: 268496 - DNA, 75 bp, synthetic construct
  source 1..75: mol_type = other DNA
ttgaatagctctgaagacgatttgcttgaagtggcgtggtatttgtcgaagtacggtaaatatcaaccacccgca

SEQ ID NO: 268497 - DNA, 75 bp, synthetic construct
  source 1..75: mol_type = other DNA
catataaagccgtgggctgcctgcgagaatgggaatgaacggcttgatccttttaatggaattatattggctgcg

SEQ ID NO: 268498 - DNA, 75 bp, synthetic construct
  source 1..75: mol_type = other DNA
taagtaaagagtttgtcaaagtaacaattgatgacaaggtaataaagggaaattcaaaagttaataattgtaatg

SEQ ID NO: 268499 - DNA, 75 bp, synthetic construct
  source 1..75: mol_type = other DNA
caaagtattctagagaacttttttaaacggggtggaaaaaaaatcacaatagaaattgtccacagggaatctaat

SEQ ID NO: 268500 - DNA, 75 bp, synthetic construct
  source 1..75: mol_type = other DNA
gtaaactcaacattgttgtcgaaggaacatttcgtaatgccgctacgccgctacaaacattaaaaaaactcaaag

SEQ ID NO: 268501 - DNA, 75 bp, synthetic construct
  source 1..75: mol_type = other DNA
aacctgcaggtggcgtaaaagaactattttccggcatctataaatcacgcacgtttatgttatggggactatggc

SEQ ID NO: 268502 - DNA, 75 bp, synthetic construct
  source 1..75: mol_type = other DNA
tacaaagcgacatcgggcaatccccgccagtgtgcaagattccacccggctggagcacagcctggcaacgcttgc

SEQ ID NO: 268503 - DNA, 75 bp, synthetic construct
  source 1..75: mol_type = other DNA
ggccgctggcttgacacggttttgctgcaaatgaaacttggtgaagggaatagtactctgccagaagattcagat

SEQ ID NO: 268504 - DNA, 75 bp, synthetic construct
  source 1..75: mol_type = other DNA
tgaagtagtagatgaagatgggttactttggctggaaggaaggcagaatcaggatggatggatctggcagggtaa

SEQ ID NO: 268505 - DNA, 75 bp, synthetic construct
  source 1..75: mol_type = other DNA
tcgtcgggccgaaaatcaatctcaatagcggcggtagtccgggaacgccggtgacgacgctgcaaccggcggtac

SEQ ID NO: 268506 - DNA, 75 bp, synthetic construct
  source 1..75: mol_type = other DNA
tctcagtcaatatgctgtgcccaaacttccacaggagccttttgacaaagctgccttcctggcaaattacgcgag

SEQ ID NO: 268507 - DNA, 75 bp, synthetic construct
  source 1..75: mol_type = other DNA
ctagatgccgttccaaaagaagtaggtcttatctattttgaaactgagagatttgaagttgacccagagatggac

SEQ ID NO: 268508 - DNA, 75 bp, synthetic construct
  source 1..75: mol_type = other DNA
cccgcatgatgttattgaaggcatggaatccgtaaaactggacggtgaaagcaacgccggattcatagtaaccgc

SEQ ID NO: 268509 - DNA, 75 bp, synthetic construct
  source 1..75: mol_type = other DNA
gccccggacagtcgtttccggtcgtggcagtgatgccccttgcggcgaaggttctcaaaaaggtgatggtgaata

SEQ ID NO: 268510 - DNA, 75 bp, synthetic construct
  source 1..75: mol_type = other DNA
acccttcgtacgactgcaatcagcgaagcggcctatgccgttacccgattgcctgcgccaacaacttccgcggtg

SEQ ID NO: 268511 - DNA, 75 bp, synthetic construct
  source 1..75: mol_type = other DNA
tatacgaagttgggtttgttgcactgaccccggcatctggaggtgctgcgcgtgtaactggattatgcagctaca

SEQ ID NO: 268512 - DNA, 75 bp, synthetic construct
  source 1..75: mol_type = other DNA
gaggctggtaaacgccagatgatgaaatatggcaataacgtcatttgtgtaacaacaactcaccagctcccggcc

SEQ ID NO: 268513 - DNA, 75 bp, synthetic construct
  source 1..75: mol_type = other DNA
acagattacatggttacaggtgctggcttatcttccggtggaagcgttattacgtcatctcctgttttgccaggc

SEQ ID NO: 268514 - DNA, 75 bp, synthetic construct
  source 1..75: mol_type = other DNA
cctgataagagaactattgcacggattttgtcttctggagaaggaaaaattggttttaattatccgcacattatc

SEQ ID NO: 268515 - DNA, 75 bp, synthetic construct
  source 1..75: mol_type = other DNA
gccttttgcggggatgcccggagcgcaggccacggcgcgacagaggcggcgcgaccggaacggtcgctgcaagcc

SEQ ID NO: 268516 - DNA, 75 bp, synthetic construct
  source 1..75: mol_type = other DNA
gccttttgccgggatgccgggagcgcaggccacggcgcgacagaggcggcgcgaccggaacggtcgctgcaagcc

SEQ ID NO: 268517 - DNA, 75 bp, synthetic construct
  source 1..75: mol_type = other DNA
atttcacgttgacaggtcgtattgatgaatactcaactattgcagtaaaaggtcgggcattaaacgaggcttcgc

SEQ ID NO: 268518 - DNA, 75 bp, synthetic construct
  source 1..75: mol_type = other DNA
atcaactcaaggcaatacaagcacaatggcagcgtcgagctaaaactcaacaactagttgctacggagaatgtgc

SEQ ID NO: 268519 - DNA, 75 bp, synthetic construct
  source 1..75: mol_type = other DNA
attcctactcgcccacatgaaatttacgaagagtttttcggcacatctaaaaacaaagctaaaaagatatacgat

SEQ ID NO: 268520 - DNA, 75 bp, synthetic construct
  source 1..75: mol_type = other DNA
acgacgtgaagcgcggtttgcgaaacggcgttgctccttacataccagcggccttttgcggggatgcccggagcg

SEQ ID NO: 268521 - DNA, 75 bp, synthetic construct
  source 1..75: mol_type = other DNA
acgacgtgaagcgcggtttgcgaaacggcgttgctccttacataccagcggccttttgccgggatgccgggagcg

SEQ ID NO: 268522 - DNA, 75 bp, synthetic construct
  source 1..75: mol_type = other DNA
gtacagttggcttacgtcttcgggaacggcaacagcgacaatgacgcacttgatgacggcatgatggccagctac

SEQ ID NO: 268523 - DNA, 75 bp, synthetic construct
  source 1..75: mol_type = other DNA
tgccccttacatcccggcggccttttgccgggatgccgggagcgcaggccacggcgcgacagaggcggcgcgacc

SEQ ID NO: 268524 - DNA, 75 bp, synthetic construct
  source 1..75: mol_type = other DNA
acgacgtgaagcgcggtttgcgaaacggcgttgctccttacataccggcggccttttgctgggatgcctggagcg

SEQ ID NO: 268525 - DNA, 75 bp, synthetic construct
  source 1..75: mol_type = other DNA
acgacgtgaagcgcggtttgcgaaacggcgttgctccttacatacctgcggccttttgcagggatgcctggagcg

SEQ ID NO: 268526 - DNA, 75 bp, synthetic construct
  source 1..75: mol_type = other DNA
tcacttatccagcgtgtagaaaacggcactgaaaagatagcgctcaattgccttctgctactcatcatcacgggt

SEQ ID NO: 268527 - DNA, 75 bp, synthetic construct
  source 1..75: mol_type = other DNA
ttaatcgaagtattatcacgcctggtaataatattctggttaataatactggaggtggcttaaacataatttcgt

SEQ ID NO: 268528 - DNA, 75 bp, synthetic construct
  source 1..75: mol_type = other DNA
taatgagatacaatgttttaatgatgtctgtattaatgatagtgtcatttctttgtgtatataatataaaactta

SEQ ID NO: 268529 - DNA, 75 bp, synthetic construct
  source 1..75: mol_type = other DNA
tctggacagcttggggttaagttcaatgagagatggtggtgagttttttataccgttaacgacagctagcagact

SEQ ID NO: 268530 - DNA, 75 bp, synthetic construct
  source 1..75: mol_type = other DNA
gatggatttcgtttgagaacgatgggcgtttattaattagtaatgagctggatattagtgttaaagatcagtttt

SEQ ID NO: 268531 - DNA, 75 bp, synthetic construct
  source 1..75: mol_type = other DNA
acaggcacaacgtgactgtcttgctattcagcaggataaaagtattgaagataccgtacgcgagcagctgattgc

SEQ ID NO: 268532 - DNA, 75 bp, synthetic construct
  source 1..75: mol_type = other DNA
aggcttttgccttgttttatcctcgatttggagcgggcaaaactgccagcgagtttcacaatagtctgaaaaata

SEQ ID NO: 268533 - DNA, 75 bp, synthetic construct
  source 1..75: mol_type = other DNA
acattgccagataatgcaatgatattgaaatccgttctggccgtaaaactggtgggtgatgctgccaacttactg

SEQ ID NO: 268534 - DNA, 75 bp, synthetic construct
  source 1..75: mol_type = other DNA
gccaggtgataccaacctagccaactacaaggggcgttgtgttaagattcagaaattagtaaaccatcacgcctt

SEQ ID NO: 268535 - DNA, 75 bp, synthetic construct
  source 1..75: mol_type = other DNA
tctcgctattgctgaaatttcagaccacttacaagccatgttgatggggcgtgttgatattactcaaaataaaca

SEQ ID NO: 268536 - DNA, 75 bp, synthetic construct
  source 1..75: mol_type = other DNA
ctgaccaaaatagagaataatgtagacctgaataaattcactactatatgcacagacgttctatcccccctcgtc

SEQ ID NO: 268537 - DNA, 75 bp, synthetic construct
  source 1..75: mol_type = other DNA
tgtcaataaagatagcggatatttctgaagagataattcagcaagcaatattatctgctatgagcatatataaat

SEQ ID NO: 268538 - DNA, 75 bp, synthetic construct
  source 1..75: mol_type = other DNA
cacagacgttctatcccccctcgtcaccagacataataaacaaaaaaccaaaacgacattctacccttcgcaaaa

SEQ ID NO: 268539 - DNA, 75 bp, synthetic construct
  source 1..75: mol_type = other DNA
aataaaaaaatgattatggaaaaatatgaactctacttagctgaagaaaaagaaggtaaaacaagtttacatgcc

SEQ ID NO: 268540 - DNA, 75 bp, synthetic construct
  source 1..75: mol_type = other DNA
tgaagctaatggtgttgtttcgactgctgctggagcttatcaatttttatacggaacatggagaaatttgcaacg

SEQ ID NO: 268541 - DNA, 75 bp, synthetic construct
  source 1..75: mol_type = other DNA
tctgtacgattatgtctttgtggatgaagcgcaagattatggagtttatttcatgcgtctttgcacaaaactagc

SEQ ID NO: 268542 - DNA, 75 bp, synthetic construct
  source 1..75: mol_type = other DNA
gtagccagtcacacattaatttcaaaacggatgattacacgactaaactaattaagtatatattataccgttatg

SEQ ID NO: 268543 - DNA, 75 bp, synthetic construct
  source 1..75: mol_type = other DNA
tggcagcaggtgtaattgccgatgtccatgctctgcgacagcgtgcattatctgctgtgcgtggtgtgaaaatca

SEQ ID NO: 268544 - DNA, 75 bp, synthetic construct
  source 1..75: mol_type = other DNA
aatttctggtcagcaagtgggggatgttgtcgtaatccaggcggcaccacatcatgtgcatggacatatggcgat

SEQ ID NO: 268545 - DNA, 75 bp, synthetic construct
  source 1..75: mol_type = other DNA
ttccgccgcaactgatgggggcgatgccgggcgaaaaaagtgcgtttggtgatgtggagaaggccgcgcgggttt

SEQ ID NO: 268546 - DNA, 75 bp, synthetic construct
  source 1..75: mol_type = other DNA
cgacagtggcggcaggagcattcactttgagccgctgtttcccggcgagataagctacagccgcagcgagtcgtt

SEQ ID NO: 268547 - DNA, 75 bp, synthetic construct
  source 1..75: mol_type = other DNA
aaatgataaaacatttcgtaatcttgaaatattcggagacagcggctctggagcatacttatatgataacaaact

SEQ ID NO: 268548 - DNA, 75 bp, synthetic construct
  source 1..75: mol_type = other DNA
gaagcatgtaaagtgttcgggcacgattttttaaattttccagaggctcaagttgaatcacgaggaactttagat

SEQ ID NO: 268549 - DNA, 75 bp, synthetic construct
  source 1..75: mol_type = other DNA
aaaattgtcgttatattttagacgtcaatgattttaactttgaaggagaatacaataaattactgaatcgtctcg

SEQ ID NO: 268550 - DNA, 75 bp, synthetic construct
  source 1..75: mol_type = other DNA
tgggtgattttgtcacgacaggcaaggcaaattttcgttctttcgctacttccgtgatttcggatcttagtcgaa

SEQ ID NO: 268551 - DNA, 75 bp, synthetic construct
  source 1..75: mol_type = other DNA
ccgatgatgaatgccccttctgtgaagttcgttgctgctatggttgcttatattaccgccctttccttgatggcc

SEQ ID NO: 268552 - DNA, 75 bp, synthetic construct
  source 1..75: mol_type = other DNA
agaaactggaacgatggtatggagacgaattaattttaccacttacgacatgcaattttggggggtgaaacctga

SEQ ID NO: 268553 - DNA, 75 bp, synthetic construct
  source 1..75: mol_type = other DNA
accttgtattcgtctggaaccagtatggatatgcggcttgttcaggttagaggatatcagtttgggtttcagatt

SEQ ID NO: 268554 - DNA, 75 bp, synthetic construct
  source 1..75: mol_type = other DNA
ccagttatcagacagtcaatttttgaatgtgcttatatcggatgcttctcttatgtgccgttctctggcgtaatg

SEQ ID NO: 268555 - DNA, 75 bp, synthetic construct
  source 1..75: mol_type = other DNA
tattctgatagctcagtcgctgatcatgcatggcgttatcggacgggcgaaggttcgtaagttgcaaaagcacga

SEQ ID NO: 268556 - DNA, 75 bp, synthetic construct
  source 1..75: mol_type = other DNA
gctattaacgtcattcagtcctgctgtgacgaggacgtttctgaactgacaggatggcatgagccatcacgcact

SEQ ID NO: 268557 - DNA, 75 bp, synthetic construct
  source 1..75: mol_type = other DNA
agtgcctgattggtactggagacagtgaatacttcttccgcccatcattccgtaacatgactcggatcggcgaac

SEQ ID NO: 268558 - DNA, 75 bp, synthetic construct
  source 1..75: mol_type = other DNA
atgattaaaatggcggaacatctgaaaggttactggccgaatcaactgagtttctcagaatcatgcggaatggtg

SEQ ID NO: 268559 - DNA, 75 bp, synthetic construct
  source 1..75: mol_type = other DNA
ctgttgatttaaccacagagaaattcgttaccgcgatccgaaatcactggcatgtggagaataagttacactggc

SEQ ID NO: 268560 - DNA, 75 bp, synthetic construct
  source 1..75: mol_type = other DNA
ttttattaacgtgtctgggatcatcatccgcctatgcggataacgctctgattttacaaactgattttagcctga

SEQ ID NO: 268561 - DNA, 75 bp, synthetic construct
  source 1..75: mol_type = other DNA
atgatagggaagaaagtgatagtatatgacgaaggttttgaaggggattttatgaatgaatattttgatacactt

SEQ ID NO: 268562 - DNA, 75 bp, synthetic construct
  source 1..75: mol_type = other DNA
tcgaggtggatgagcagatcaacgcgcgtctgcaggcgctgaccggcagtaagggcgtattcgtattgcgcgtga

SEQ ID NO: 268563 - DNA, 75 bp, synthetic construct
  source 1..75: mol_type = other DNA
tgcaatcgcagcgcgatattctgttgcaactgttaaccggcgattttcccgatctgcacatcctgcagcaacgag

SEQ ID NO: 268564 - DNA, 75 bp, synthetic construct
  source 1..75: mol_type = other DNA
tcaacctgatgctgatcaggtgtttgctctaaatttttccctgccgctcaatctgttgctccccagaagtaatga

SEQ ID NO: 268565 - DNA, 75 bp, synthetic construct
  source 1..75: mol_type = other DNA
acaccggagactctgcgtgtctgggttcgccagcatgagcgggataccgggggcggtgatggtgggctcaccacc

SEQ ID NO: 268566 - DNA, 75 bp, synthetic construct
  source 1..75: mol_type = other DNA
tgcgtgttaacgatatagttattggaaaagttaaaggggataagcctgtcctgcatcctggtgctaaaaatcatt

SEQ ID NO: 268567 - DNA, 75 bp, synthetic construct
  source 1..75: mol_type = other DNA
taataaaggtcaatcctgccttcacccgaagcgcaatgatataaagtgcgcggagatcctttttaactcaggagt

SEQ ID NO: 268568 - DNA, 75 bp, synthetic construct
  source 1..75: mol_type = other DNA
atgattgaagcaggcatagaaataaacctcacagaccgttatggtaataacgcactgttctgtaacactaaccca

SEQ ID NO: 268569 - DNA, 75 bp, synthetic construct
  source 1..75: mol_type = other DNA
cagcgataacggcagtcaacaacaactgaactacgctctttcaggcagtttagttgcccattcacagggcattac

SEQ ID NO: 268570 - DNA, 75 bp, synthetic construct
  source 1..75: mol_type = other DNA
actggcaccgcgtgcggtgtggcccacagattccgcatcggttgtcaggcaaaaacagcagacaaatctggtggc

SEQ ID NO: 268571 - DNA, 75 bp, synthetic construct
  source 1..75: mol_type = other DNA
aaatacgccgggaatatgatgaattgggccgtctgattcaggaaactgcccctgacggcgatatcacccgctacc

SEQ ID NO: 268572 - DNA, 75 bp, synthetic construct
  source 1..75: mol_type = other DNA
acccgcccgcagaaagaagagaatacgcagacagtagaggaggctacagacaaaaaagggcagacactgaatcgc

SEQ ID NO: 268573 - DNA, 75 bp, synthetic construct
  source 1..75: mol_type = other DNA
acctgaagtaactaaccccctaatgggtaactcgttgaatgcaattattgatttttgcaaaaagggtgctctttt

SEQ ID NO: 268574 - DNA, 75 bp, synthetic construct
  source 1..75: mol_type = other DNA
ttcaggttttctccttaagctttcaggtatggaagggggcgggtttcatttatgggggatgagtagtataggaaa

SEQ ID NO: 268575 - DNA, 75 bp, synthetic construct
  source 1..75: mol_type = other DNA
tatctcggcgcattgggcagctatcgaacccacacgttacgtctgcaaaagctccacgagctgggatggtccagg

SEQ ID NO: 268576 - DNA, 75 bp, synthetic construct
  source 1..75: mol_type = other DNA
ataattaatgaacctcagcaacgtggctcatcttatagagtgatagaatcgatagaaaatactgattttatttat

SEQ ID NO: 268577 - DNA, 75 bp, synthetic construct
  source 1..75: mol_type = other DNA
atgctcagccgaatggtgatcatgaagtacatgacacgaccaacggatgctcttacatgccagccttagagaacc

SEQ ID NO: 268578 - DNA, 75 bp, synthetic construct
  source 1..75: mol_type = other DNA
cggatgacaggctgttttttcagctgacgtcattacgtacagaactgaaccgggatattcaggcccgtctggttc

SEQ ID NO: 268579 - DNA, 75 bp, synthetic construct
  source 1..75: mol_type = other DNA
ccctgtatgttgaacatgcagatgtggcggtattgctggtaaggaagtcggaactgctgcgccattttactgaag

SEQ ID NO: 268580 - DNA, 75 bp, synthetic construct
  source 1..75: mol_type = other DNA
agactatcacttatttaagtgatattggttgtctggagattcaggggtccagtctaccagaaatgttaaatggct

SEQ ID NO: 268581 - DNA, 75 bp, synthetic construct
  source 1..75: mol_type = other DNA
aggtcggtgcggataacaaacatgaactcgatggccttgacctcttcaccggggtgaccatgacctataccgaca

SEQ ID NO: 268582 - DNA, 75 bp, synthetic construct
  source 1..75: mol_type = other DNA
cagcaggaaaaagatggcaaatctgtctggacgctgaccgggtataaaacggtggcaaatgctgatgctgcgaaa

SEQ ID NO: 268583 - DNA, 75 bp, synthetic construct
  source 1..75: mol_type = other DNA
ctaaagacctgtttacggtcacaaccgatcccgccttttttgagctggaagccattcatgattacctttcgcaat

SEQ ID NO: 268584 - DNA, 75 bp, synthetic construct
  source 1..75: mol_type = other DNA
gacttatatcctagcgaagaagaaaatgtacaaaatatctacagaaaattcagaagtggtgatcatgatgcagga

SEQ ID NO: 268585 - DNA, 75 bp, synthetic construct
  source 1..75: mol_type = other DNA
cagattagtgaaataacagaatctagctggatgtcatcggaagaacaacatacaaaacaaattcaggctctcgag

SEQ ID NO: 268586 - DNA, 75 bp, synthetic construct
  source 1..75: mol_type = other DNA
gcagacctgctgtggtgagctttctcttcaggcggatcagatccgcctgacacatgccatcgaaacgctgaaatc

SEQ ID NO: 268587 - DNA, 75 bp, synthetic construct
  source 1..75: mol_type = other DNA
ctaaacgcattgttttttttatatatttatttgtaatccagttttcaaacgaaagtcagttaaaaaatctgcctg

SEQ ID NO: 268588 - DNA, 75 bp, synthetic construct
  source 1..75: mol_type = other DNA
aatacacaaaacctaaagtgaaatctggagaagagttaaagtatattataccgaatataactaacaaggaagggc

SEQ ID NO: 268589 - DNA, 75 bp, synthetic construct
  source 1..75: mol_type = other DNA
taaattaataagaaaagataatgaaataaagattgacgaccctaaatttgatttgttcatcaattatcataaacg

SEQ ID NO: 268590 - DNA, 75 bp, synthetic construct
  source 1..75: mol_type = other DNA
cagccactcggacacctcaccaaattgttttgctaccaaacctcatgggtggcaacggggcgctactatagggag

SEQ ID NO: 268591 - DNA, 75 bp, synthetic construct
  source 1..75: mol_type = other DNA
cattctggtgctgatttccgacctctacgaaggtggtgtggaacgcaatctgttgcaacgcgccagtgagttgat

SEQ ID NO: 268592 - DNA, 75 bp, synthetic construct
  source 1..75: mol_type = other DNA
cgatctgctacaggcgggcggcattgggttacttaatgctgtcgaacgctatgacgccctacaaggaacggcatt

SEQ ID NO: 268593 - DNA, 75 bp, synthetic construct
  source 1..75: mol_type = other DNA
cgacagcgcattcggcgggttcaacaacaccgatttcatcgttgtcggcgggcgccctggcatggggaaaactat

SEQ ID NO: 268594 - DNA, 75 bp, synthetic construct
  source 1..75: mol_type = other DNA
ggtacaattttcatagataaaaactggaacattgatatggatatattcgaaaaatcaaaagttgaaccttttgtt

SEQ ID NO: 268595 - DNA, 75 bp, synthetic construct
  source 1..75: mol_type = other DNA
aaaaagcaaactgatacctttttttgaaaaaagaaatatatataattcatttgagtggttagattctccattttt

SEQ ID NO: 268596 - DNA, 75 bp, synthetic construct
  source 1..75: mol_type = other DNA
cgtgcactggagcatgctcggtgataaccaaaaattgttccgctggcgctgccgtgccgccacctacgccaactg

SEQ ID NO: 268597 - DNA, 75 bp, synthetic construct
  source 1..75: mol_type = other DNA
atgccgggaagcgaccccgtcaataacggtgatttgagtgtagatattcgcaggcttgagcacgcgctcaccgcc

SEQ ID NO: 268598 - DNA, 75 bp, synthetic construct
  source 1..75: mol_type = other DNA
ctggacgctggcggcatccgctggctggaccgacgacaaccgcgcgtatcttctgccggatggtcatatcatcgg

SEQ ID NO: 268599 - DNA, 75 bp, synthetic construct
  source 1..75: mol_type = other DNA
cttacgctcggctcgatcctgcccatgcgttcgacggactattcgtacccacgaagggcaagccgcgcggacgtt

SEQ ID NO: 268600 - DNA, 75 bp, synthetic construct
  source 1..75: mol_type = other DNA
cgtgttagcctggattattaatctttatggtattgcgatgccgccatcgccgggacaaaccatcggctataccgc

SEQ ID NO: 268601 - DNA, 75 bp, synthetic construct
  source 1..75: mol_type = other DNA
tgatgtcgccgtattcgcttatgtcgaagaagataaagcagtcactgcggtggcgggcgatctgattcgcgttgt

SEQ ID NO: 268602 - DNA, 75 bp, synthetic construct
  source 1..75: mol_type = other DNA
gagcacagtgcggactatggcactgagcacatcaccaccgggatcgacatgtcgttagagactatccagtcgatt

SEQ ID NO: 268603 - DNA, 75 bp, synthetic construct
  source 1..75: mol_type = other DNA
ccgcattacaaagcattgtgtcgcgcaatgttgatccgctggaagcggcggtaattaccgtcggcagcattgttg

SEQ ID NO: 268604 - DNA, 75 bp, synthetic construct
  source 1..75: mol_type = other DNA
gattcgcaggtactagatttaatcagcctgttctcacaaatgcccctgctggcatttatgataacgaacatactt

SEQ ID NO: 268605 - DNA, 75 bp, synthetic construct
  source 1..75: mol_type = other DNA
tataacggggcaactttggtatcaacaatatcaactcctggtgtttatgagtttctcctcgtaggggcaaaatac

SEQ ID NO: 268606 - DNA, 75 bp, synthetic construct
  source 1..75: mol_type = other DNA
actccatcaactgccgttggttgctcttcctctcccgtttgacgaaagccagcaaaaaaagctggaagttccttt

SEQ ID NO: 268607 - DNA, 75 bp, synthetic construct
  source 1..75: mol_type = other DNA
attgatgtcgggcatggtggctggagccttccagtcttccgctcaccgtgaacttctccctgatctttggtcgag

SEQ ID NO: 268608 - DNA, 75 bp, synthetic construct
  source 1..75: mol_type = other DNA
aaggcggcttcgataatgcgcaaagtagctataagttcttgctcggcgaaaaactgttatcagcagagctaaaag

SEQ ID NO: 268609 - DNA, 75 bp, synthetic construct
  source 1..75: mol_type = other DNA
tagcttcgaggagcaatgtttttttcatgcttcaggtcttgttgttgccccaataaatgttggagcattctccta

SEQ ID NO: 268610 - DNA, 75 bp, synthetic construct
  source 1..75: mol_type = other DNA
ttagtgacagccgggaaggtggtaaggactacttactgcggccttccttctcagcgatgatgaaggttggtgaac

SEQ ID NO: 268611 - DNA, 75 bp, synthetic construct
  source 1..75: mol_type = other DNA
aagctgacccagcattaaataattttcgttatatgtggaacatccgtaagcgtcaacggagcaccgtattgacgc

SEQ ID NO: 268612 - DNA, 75 bp, synthetic construct
  source 1..75: mol_type = other DNA
aagctggtgtgtttgataatgaactagcatccggtggaaatgtttttgacagcacaactgaatacagagacgcag

SEQ ID NO: 268613 - DNA, 75 bp, synthetic construct
  source 1..75: mol_type = other DNA
cgcacacgatcttgtcgggtgaaactcctgatgtagaaacaactaaatgggcttgtgtaggcctgcttaatgggc

SEQ ID NO: 268614 - DNA, 75 bp, synthetic construct
  source 1..75: mol_type = other DNA
tgattcaagccacatgatcagtactcttcagcagttcaatactgaagccgatgcaatgacgtacatacaggggca

SEQ ID NO: 268615 - DNA, 75 bp, synthetic construct
  source 1..75: mol_type = other DNA
aatggcaacgagttattttttcagaaattatagatttaacattaagatataaacaaagtaaaaatattcaattag

SEQ ID NO: 268616 - DNA, 75 bp, synthetic construct
  source 1..75: mol_type = other DNA
gaaattactcaagcaattaatttcattttcagaccacagttcatgggctaaagacaatttatcaagacttaatac

SEQ ID NO: 268617 - DNA, 75 bp, synthetic construct
  source 1..75: mol_type = other DNA
tatcacaagcaattgcaaacctcctgtaatattatccaaaatgcaaacggaactaattgataataatgaacattt

SEQ ID NO: 268618 - DNA, 75 bp, synthetic construct
  source 1..75: mol_type = other DNA
agatatcgaagctgacttatctaaattagctgatcatattatcattgttttagaaagttattcatctttcacgga

SEQ ID NO: 268619 - DNA, 75 bp, synthetic construct
  source 1..75: mol_type = other DNA
tcgcagtcattgaggacggcgcacagcagcagagcagtaatgccaggggggcggctgacgcacgtatcatgatga

SEQ ID NO: 268620 - DNA, 75 bp, synthetic construct
  source 1..75: mol_type = other DNA
cgatactccagcagaattacagattccggcaaattacaaaggaaatattaagattgaaatgcaaattgaagatga

SEQ ID NO: 268621 - DNA, 75 bp, synthetic construct
  source 1..75: mol_type = other DNA
tgccgccggtggagtggctgacgtatggcagcggttatcttgcggggatgaagctgggcggaacaccgctggtcg

SEQ ID NO: 268622 - DNA, 75 bp, synthetic construct
  source 1..75: mol_type = other DNA
tgactgaacagcgcggttttgacggccggacgcaacgttaccagtatgacctgaccggaaaactcacgcagagtg

SEQ ID NO: 268623 - DNA, 75 bp, synthetic construct
  source 1..75: mol_type = other DNA
atacacaaatttaacggcaaatatacagaactgtttgatgcgctttttgttgagttatatactcttaacgtccat

SEQ ID NO: 268624 - DNA, 75 bp, synthetic construct
  source 1..75: mol_type = other DNA
gcgacggaaaactgctggtggattcacaaaacagatcgacccttttttatgatcagcgcacgctgagtggcgtca

SEQ ID NO: 268625 - DNA, 75 bp, synthetic construct
  source 1..75: mol_type = other DNA
gcgatggaaaattactggtggactcgcaaaacaggtccacccttttttatgaccaacgtacgctcggcgcagtga

SEQ ID NO: 268626 - DNA, 75 bp, synthetic construct
  source 1..75: mol_type = other DNA
atatcactgcttgcaccctatgatgaatggtatttcaatttttttaccctaattccctaccagcagaagttacct

SEQ ID NO: 268627 - DNA, 75 bp, synthetic construct
  source 1..75: mol_type = other DNA
aattcaaaatcagaaaaattagacggaatattgagtatagtttcagagattctgacagatattttgatttgttta

SEQ ID NO: 268628 - DNA, 75 bp, synthetic construct
  source 1..75: mol_type = other DNA
tggtgtcgtgattgaggacaccgacggggggccgatgatgcggctccgtctccgtggcgcatcgctggatatctg

SEQ ID NO: 268629 - DNA, 75 bp, synthetic construct
  source 1..75: mol_type = other DNA
tgctgactgacggtatgggtaatacgcatggcgtaaaactaggcaccgttaagtctgaccaacagatcgcagccg

SEQ ID NO: 268630 - DNA, 75 bp, synthetic construct
  source 1..75: mol_type = other DNA
tgacaagcccaatattcgcctgacggataagcagattctgatagaaacggtttcaggtgaaaaaatggaaatgtg

SEQ ID NO: 268631 - DNA, 75 bp, synthetic construct
  source 1..75: mol_type = other DNA
acaacttcggcgaggtattccgggagtggattacctggctgatacggaaccgacaggaggcagaaaacactatcc

SEQ ID NO: 268632 - DNA, 75 bp, synthetic construct
  source 1..75: mol_type = other DNA
tcaagggggcggcgagcccgtacctggcgagtaaaggcctggagctttacgcgacgacgttcctggttttggagg

SEQ ID NO: 268633 - DNA, 75 bp, synthetic construct
  source 1..75: mol_type = other DNA
atgagtggttctacgtgaatcccgctgcgttcagggggcacatcgcaaagggccacaacgacagacaggccgccg

SEQ ID NO: 268634 - DNA, 75 bp, synthetic construct
  source 1..75: mol_type = other DNA
tacagacttctagaacaggttgaaaaagacattaaggactataatgatttaaacgtatcattagcacgttctgaa

SEQ ID NO: 268635 - DNA, 75 bp, synthetic construct
  source 1..75: mol_type = other DNA
cagcacaccaatcgcaggccataatggaccgggttggaaattagtaaacaccggggataacattaatcttgacat

SEQ ID NO: 268636 - DNA, 75 bp, synthetic construct
  source 1..75: mol_type = other DNA
caatgcaaaaactgggtactcttaatattcaattaaccggttctcatgcaggggtctatgtttcaggagatgata

SEQ ID NO: 268637 - DNA, 75 bp, synthetic construct
  source 1..75: mol_type = other DNA
atggtatttcaatttttttaccctaattccctaccagcagaagttacctatgtggagttattagataccgatgga

SEQ ID NO: 268638 - DNA, 75 bp, synthetic construct
  source 1..75: mol_type = other DNA
ttgataaaaaagtgtatgaaacctggataacgctggcgggagacgtctggagattgatgctcacaccttattcac

SEQ ID NO: 268639 - DNA, 75 bp, synthetic construct
  source 1..75: mol_type = other DNA
ttgataaaaaagtgtatgaaacctggataacgctggcgggagacgtctggatattgatgctcacaccttatgcac

SEQ ID NO: 268640 - DNA, 75 bp, synthetic construct
  source 1..75: mol_type = other DNA
acataacctattattaattaatgattttttaagccagtcacaatctaccaactttacagtatcacacaaacaaca

SEQ ID NO: 268641 - DNA, 75 bp, synthetic construct
  source 1..75: mol_type = other DNA
ggattgcatctgaatggcaaatgaaacgggagatgctttcaccagcctatacaactcgctggtctgaactaccag

SEQ ID NO: 268642 - DNA, 75 bp, synthetic construct
  source 1..75: mol_type = other DNA
acgacggtttatccccgctggcgcggggaactcttgaacgttataactcccctacgatgttgtcccggtttatcc

SEQ ID NO: 268643 - DNA, 75 bp, synthetic construct
  source 1..75: mol_type = other DNA
taagccagtcacaatctaccaactttatagtatcacacaaacaacacatccattatgttaaagagcacttaatcc

SEQ ID NO: 268644 - DNA, 75 bp, synthetic construct
  source 1..75: mol_type = other DNA
ggctccggtttatccccgctggcgcggggaactcgacagaacggcctcagtagtctcgtcaggctccggtttatc

SEQ ID NO: 268645 - DNA, 75 bp, synthetic construct
  source 1..75: mol_type = other DNA
ctggcgcggggaacactctaaacataacctattattaattaatgattttttaagccagtcacaatctaccaactt

SEQ ID NO: 268646 - DNA, 75 bp, synthetic construct
  source 1..75: mol_type = other DNA
tgaaaaatataaaacagctaacaatgtatattttaatatcattggtacgttaagcgacagtgaattaaataaaat

SEQ ID NO: 268647 - DNA, 75 bp, synthetic construct
  source 1..75: mol_type = other DNA
gaattttttcatggcttgctgataatttccctgatttacaatattttaaacttcagctattagatgccagtaatc

SEQ ID NO: 268648 - DNA, 75 bp, synthetic construct
  source 1..75: mol_type = other DNA
caactaatcgataatcttattaaaggattactgcaaactatgccatatgccagcaatataagtattgcggtatta

SEQ ID NO: 268649 - DNA, 75 bp, synthetic construct
  source 1..75: mol_type = other DNA
tatccccgctggcgcggggaactcactaaacttaatgatggccgttacagcgtggacggtttatccccgctggcg

SEQ ID NO: 268650 - DNA, 75 bp, synthetic construct
  source 1..75: mol_type = other DNA
atgcggcccttttcggtttatccccgctggcgcggggaactcttttaccgtaacgcagcacaagacacgctccgc

SEQ ID NO: 268651 - DNA, 75 bp, synthetic construct
  source 1..75: mol_type = other DNA
agcaccaccgccaccccggtttatccccgctggcgcggggaactccaaacaggtcgacatgtttggctaacagct

SEQ ID NO: 268652 - DNA, 75 bp, synthetic construct
  source 1..75: mol_type = other DNA
ccggtttatccccgctggcgcggggaacacaatcgtgtgtaaattcgcggcggctccactggcggtttatccccg

SEQ ID NO: 268653 - DNA, 75 bp, synthetic construct
  source 1..75: mol_type = other DNA
ttttgtaataacaaatttaattgaagcgaatgattactacaaagaaatacatgtatattccgatgtatacaaatg

SEQ ID NO: 268654 - DNA, 75 bp, synthetic construct
  source 1..75: mol_type = other DNA
tgagaagcccgcaaaaacatgacgaagttaataaacaattaggtaaactgctcgatcagtacataagggtctatt

SEQ ID NO: 268655 - DNA, 75 bp, synthetic construct
  source 1..75: mol_type = other DNA
acaacctctatattgtggcgatcagtctcggcgttggcatgactccgacgctctctcacgatttcttttctaagt

SEQ ID NO: 268656 - DNA, 75 bp, synthetic construct
  source 1..75: mol_type = other DNA
atcgcagtgatggcctgactgtcactgaccttgagcatatcagccagagtatcggcgatatcctgcgtacccccg

SEQ ID NO: 268657 - DNA, 75 bp, synthetic construct
  source 1..75: mol_type = other DNA
acgattatcccggctccccctgctataaagttaaaaccgggcatggtggcatattgctgcaccgatacatcccgg

SEQ ID NO: 268658 - DNA, 75 bp, synthetic construct
  source 1..75: mol_type = other DNA
ataaaagactatcctatggcatatattaaggttcgatttgataattttatagaattacttcgttggggcgctatt

SEQ ID NO: 268659 - DNA, 75 bp, synthetic construct
  source 1..75: mol_type = other DNA
aggctatcgttttatcgcttcttatggcacgtcgtacaaggcacctaatcttgggcaactgtatggtttctacgg

SEQ ID NO: 268660 - DNA, 75 bp, synthetic construct
  source 1..75: mol_type = other DNA
tgggaaggcgcgtttgaaggcttaaccgctggggtgaactggcgtatttccggatatcgtaacgatgtcagtgac

SEQ ID NO: 268661 - DNA, 75 bp, synthetic construct
  source 1..75: mol_type = other DNA
gttgggaattcatcgaaggttatcgcttcattgcttcctacgggacatcttataaggcaccaaatctggggcaac

SEQ ID NO: 268662 - DNA, 75 bp, synthetic construct
  source 1..75: mol_type = other DNA
gaaggcctggttattctgattatagtatatgtgatttttataaggtggcaggacgaatagaggatacactgatta

SEQ ID NO: 268663 - DNA, 75 bp, synthetic construct
  source 1..75: mol_type = other DNA
gtctgtataacctggtggcgcaaaaaatgggtgccagctacaccacctacgcggcgggggcggtgctgatcgccg

SEQ ID NO: 268664 - DNA, 75 bp, synthetic construct
  source 1..75: mol_type = other DNA
gctgctgcagatgatcccgcagttttctgcgctgattgcgatctttgtcctgtcgcaactgcttggcctgattaa

SEQ ID NO: 268665 - DNA, 75 bp, synthetic construct
  source 1..75: mol_type = other DNA
gaagctttgcgcatccttgaattaatgaaatcaataagtgggcatagagaatgggttttccccagcataaaagcg

SEQ ID NO: 268666 - DNA, 75 bp, synthetic construct
  source 1..75: mol_type = other DNA
tagggatcatgtcatctatatcaataccaatagtttggatgaagctgtctgggtcaaacaagcactggaaaaaaa

SEQ ID NO: 268667 - DNA, 75 bp, synthetic construct
  source 1..75: mol_type = other DNA
gcttacaggcagttttgaggtaataatcactaccgaccctgatctggttgtaacaatcagagaattaacagcaca

SEQ ID NO: 268668 - DNA, 75 bp, synthetic construct
  source 1..75: mol_type = other DNA
ccaatatatgatgaaaatggtgctatgatattctcaggttgcgaagccggtgatggttactctttaagatatgat

SEQ ID NO: 268669 - DNA, 75 bp, synthetic construct
  source 1..75: mol_type = other DNA
gcgtagctcaaatccttgatttaatggcttcattaaacataactgagttctcatggttttcaactatagcacctt

SEQ ID NO: 268670 - DNA, 75 bp, synthetic construct
  source 1..75: mol_type = other DNA
aagactgaaaggactcattcggcgatataagcttaaaaatgccgtgatgagcaagggaaatgacaaagctcgtta

SEQ ID NO: 268671 - DNA, 75 bp, synthetic construct
  source 1..75: mol_type = other DNA
gccgatcattatggggcgcacctaccaccaggaaaaccgcaccccggcagcctgccgggaacaaagacgcagatg

SEQ ID NO: 268672 - DNA, 75 bp, synthetic construct
  source 1..75: mol_type = other DNA
tgtataacaaacacgactggcttgatgagcagaaagaagcttatgagctatacgcagaaaagattttctggcacg

SEQ ID NO: 268673 - DNA, 75 bp, synthetic construct
  source 1..75: mol_type = other DNA
gagctggggcgcgaacgcacgattgctatgagcctgccggaatttgagcagtcactgtttatggcagcgcaaccc

SEQ ID NO: 268674 - DNA, 75 bp, synthetic construct
  source 1..75: mol_type = other DNA
atggcgcaacatataaaatcccacaattctgaagccgtcccgcccactaaacaggggcggcgttttcgtacgcct

SEQ ID NO: 268675 - DNA, 75 bp, synthetic construct
  source 1..75: mol_type = other DNA
aaaacacgatcaccgcgaaaccgtaaaaaatgaccagacggtcacgatccaggaaggtaaccgccttcttacggt

SEQ ID NO: 268676 - DNA, 75 bp, synthetic construct
  source 1..75: mol_type = other DNA
cccggcatacccggagagcctgcccgctgcgccactggtgcggtacacgtatacggaagccggtgaactgctggc

SEQ ID NO: 268677 - DNA, 75 bp, synthetic construct
  source 1..75: mol_type = other DNA
agttaaacaataatacaatgtcgcttaatagtgacagttttacgttagctggtaataatacagcagtggaaaaaa

SEQ ID NO: 268678 - DNA, 75 bp, synthetic construct
  source 1..75: mol_type = other DNA
gcgctggttgaggggctggggcggcgtgatctgcggcggtacggcgcggggtatgaaagttcgtttgtctatcat

SEQ ID NO: 268679 - DNA, 75 bp, synthetic construct
  source 1..75: mol_type = other DNA
atcgccttcttctggccggaagccggggcggcgcacagtgaagcggttatgaataccgagctggggtggctgtcc

SEQ ID NO: 268680 - DNA, 75 bp, synthetic construct
  source 1..75: mol_type = other DNA
tgcaacaaggctgaagaacaggttatcggagcgcttctcggaagtcgggctggtcctgaatgcagggaaaacgaa

SEQ ID NO: 268681 - DNA, 75 bp, synthetic construct
  source 1..75: mol_type = other DNA
ataacattatttctacaaaacaacatttctttagcagtaagctgtttaagtatgtaatgcttttttttctttttg

SEQ ID NO: 268682 - DNA, 75 bp, synthetic construct
  source 1..75: mol_type = other DNA
ccgctgacgcggggaactctgattttggtggcgggggggactgggggaatacggtttatccccgctggcgcgggg

SEQ ID NO: 268683 - DNA, 75 bp, synthetic construct
  source 1..75: mol_type = other DNA
cgcccgaatggcagatgaagcgtgagatgttatcaccggcatacactacccgccggaacgaactaccggtggcca

SEQ ID NO: 268684 - DNA, 75 bp, synthetic construct
  source 1..75: mol_type = other DNA
gcgccatcctggatttaaacacatcatcaatgcaggtggcgaaaaagtatcctgagtgctctgccgctgctggag

SEQ ID NO: 268685 - DNA, 75 bp, synthetic construct
  source 1..75: mol_type = other DNA
cgcagtacgggtatccatttaccgggaacattgcgcagtacttgggctggattgaaaaactgatagtcagagagc

SEQ ID NO: 268686 - DNA, 75 bp, synthetic construct
  source 1..75: mol_type = other DNA
tactggggatatccacggtgcaaggagaggagtttcatattatgccttccccgcgtcaacaggtaagcctagcgg

SEQ ID NO: 268687 - DNA, 75 bp, synthetic construct
  source 1..75: mol_type = other DNA
gaagtagcaattcttctcgtgtccaacaaactattggatgggagttggcgactcagatacgtaagcaaacagcca

SEQ ID NO: 268688 - DNA, 75 bp, synthetic construct
  source 1..75: mol_type = other DNA
gagcagttcagttagcgccagcggaggaagtcaggggtttgcttcattctcacgagctggccgcatggcaagcca

SEQ ID NO: 268689 - DNA, 75 bp, synthetic construct
  source 1..75: mol_type = other DNA
aaaccagagccgatagcgctgagcagcaggtaaacgcagcacaggcgatcacctccaacgttctgaccaccatga

SEQ ID NO: 268690 - DNA, 75 bp, synthetic construct
  source 1..75: mol_type = other DNA
cgtttagtgtagtcatgacaaaagatcctggtgcggcctgtactgagcaattcaatattttagggagctttttca

SEQ ID NO: 268691 - DNA, 75 bp, synthetic construct
  source 1..75: mol_type = other DNA
gacgattgcactgatgaggaattagacgatcgtgactttattacttcagttgttgatcgggctatttttcatttc

SEQ ID NO: 268692 - DNA, 75 bp, synthetic construct
  source 1..75: mol_type = other DNA
tcagaaacagtgtatattaatgaaaataatgagagctacctgaaagctcagtttgaaaattatctcaacgtgata

SEQ ID NO: 268693 - DNA, 75 bp, synthetic construct
  source 1..75: mol_type = other DNA
ctgaccttgataatataggttgggttatggggtggggggttgtaaggaatgccccgtggcatttagtcggtgttt

SEQ ID NO: 268694 - DNA, 75 bp, synthetic construct
  source 1..75: mol_type = other DNA
caacctcaaaggaagagattaaaatacttacagacacttctaaattaatttatgatttgttcggggttaaatcgg

SEQ ID NO: 268695 - DNA, 75 bp, synthetic construct
  source 1..75: mol_type = other DNA
aaggaaaagattaaaatatatacagacacttctaaattaatttatgatttattcggggttaaatcggagaaataa

SEQ ID NO: 268696 - DNA, 75 bp, synthetic construct
  source 1..75: mol_type = other DNA
ctggatactttaataaaacactcaattcaaatcaattcgaaaataaagatgcaaccaaagataaattggatgatg

SEQ ID NO: 268697 - DNA, 75 bp, synthetic construct
  source 1..75: mol_type = other DNA
cgcctctaccgatgcaccgtgcagcgcattgtctgttatctacaccgatgagggtgagtttgaccgctatctgct

SEQ ID NO: 268698 - DNA, 75 bp, synthetic construct
  source 1..75: mol_type = other DNA
tggcgcaactggatattaaagaagatattccggcgaaaatgcggattgtcgcagaagcatcttgtgcagaaggtg

SEQ ID NO: 268699 - DNA, 75 bp, synthetic construct
  source 1..75: mol_type = other DNA
cgcaacgccagatgaagtgtatgcagcattgctggtggctgaccagtacggccaacgtttcctgcaagagtggga

SEQ ID NO: 268700 - DNA, 75 bp, synthetic construct
  source 1..75: mol_type = other DNA
ggcatatccagacatttcactaagcaatttgaattcagcagacctcatcggcgagctggacgttcgccagcatca

SEQ ID NO: 268701 - DNA, 75 bp, synthetic construct
  source 1..75: mol_type = other DNA
tccgttctcgtggcgattttagcccccgttgccctcacaggcgacaaaggcgctcagatggcattagtgaccacg

SEQ ID NO: 268702 - DNA, 75 bp, synthetic construct
  source 1..75: mol_type = other DNA
taaaacagatgaggctgcagacagagttattgatcatttgattggatttgcccctatatttccagacatctgtta

SEQ ID NO: 268703 - DNA, 75 bp, synthetic construct
  source 1..75: mol_type = other DNA
cactttttttatattttttaatttcgttatttctattattgttatcagtagtaagtattatttgcaaaagtaaga

SEQ ID NO: 268704 - DNA, 75 bp, synthetic construct
  source 1..75: mol_type = other DNA
cagcggctggcgagcatctactttcccaggccagagactggctgagctggctggaaagtatgccaagcgagctgc

SEQ ID NO: 268705 - DNA, 75 bp, synthetic construct
  source 1..75: mol_type = other DNA
ctatgggcaagtgatccgcgtcagcagctcgcttatctcgcggtaaagcgctgggctcgcttgtactgccctgat

SEQ ID NO: 268706 - DNA, 75 bp, synthetic construct
  source 1..75: mol_type = other DNA
cgcccggttgggatttaaaggatgaggccggtgtaggaattcgtgtgtgggcaacgatgaaaggcgaggatgagc

SEQ ID NO: 268707 - DNA, 75 bp, synthetic construct
  source 1..75: mol_type = other DNA
acgacaaaacatccccagaaatgagaaaataccttaaaagcatcaacgagtgtatgttccttatgaaaaacatag

SEQ ID NO: 268708 - DNA, 75 bp, synthetic construct
  source 1..75: mol_type = other DNA
tagctttaatagttgcaatctggcatgagataaaccgatttccagcaaccgggaagagcttactgtctttacagc

SEQ ID NO: 268709 - DNA, 75 bp, synthetic construct
  source 1..75: mol_type = other DNA
gcggccacaaaaggacagatggacaacgccattgcagatgctgtacgggtgtcggggatgccctgcgcggtgaga

SEQ ID NO: 268710 - DNA, 75 bp, synthetic construct
  source 1..75: mol_type = other DNA
attagcatcccaaaaagaatattacagcgatttagttgcgttggttgatcttgggcattcattcgggctttgttg

SEQ ID NO: 268711 - DNA, 75 bp, synthetic construct
  source 1..75: mol_type = other DNA
aagggcgggactcgcacaacctgaataaagcgggtatgaaaaaccagttgatcgccaccagcaaaaatggctatg

SEQ ID NO: 268712 - DNA, 75 bp, synthetic construct
  source 1..75: mol_type = other DNA
ttaggttgtaccctgtttactttataatccttactctggctatatacctcaactatgaggcaatatatacatcat

SEQ ID NO: 268713 - DNA, 75 bp, synthetic construct
  source 1..75: mol_type = other DNA
ttatctggcctgcggtgcgtgacggtaaggtatccattacccgctcgcaactggcaatgctcctcgataagctgg

SEQ ID NO: 268714 - DNA, 75 bp, synthetic construct
  source 1..75: mol_type = other DNA
tggaggatattttacttttagagatgatgatagagagtgtgttttgttttttttgaattatggtgataatttttc

SEQ ID NO: 268715 - DNA, 75 bp, synthetic construct
  source 1..75: mol_type = other DNA
ttcgactagtactaatattaggtctagttttttttatgaatgcacaagcatctgaaaatacgagggtattttctc

SEQ ID NO: 268716 - DNA, 75 bp, synthetic construct
  source 1..75: mol_type = other DNA
cactttcccggctctgtgctgacggactaccgaatactgaagaactacatcaaaaccataggcggtgctgtatga

SEQ ID NO: 268717 - DNA, 75 bp, synthetic construct
  source 1..75: mol_type = other DNA
cgtgtgggtcaggaggtgattgtggacttcctcaacggcgacccggatcagccgatcattatggggcgcacttac

SEQ ID NO: 268718 - DNA, 75 bp, synthetic construct
  source 1..75: mol_type = other DNA
tccagagcatgacagttacgcaatttgtgaaaagagtcacggcagagaagaaatccgtattcatattgtttgcga

SEQ ID NO: 268719 - DNA, 75 bp, synthetic construct
  source 1..75: mol_type = other DNA
caggggaatttatgccatgaccaacagccagatcgacctcacgagcgatctggtcattgatatgagtacacccga

SEQ ID NO: 268720 - DNA, 75 bp, synthetic construct
  source 1..75: mol_type = other DNA
cctggcgttggttacaataaaaaatatggtatgtcggtccctgagcatcctgcaaaccggattttttatgtcaga

SEQ ID NO: 268721 - DNA, 75 bp, synthetic construct
  source 1..75: mol_type = other DNA
gtaatcagtggcgaagccccacggcagagcaggtatttcgtcattatcctgagcttgctgtccgttccgctggca

SEQ ID NO: 268722 - DNA, 75 bp, synthetic construct
  source 1..75: mol_type = other DNA
cagcctcagctgaaagcggtgccggtaaaacagagcggggtgcaactgacgccgtcggagtttaacgccacgatg

SEQ ID NO: 268723 - DNA, 75 bp, synthetic construct
  source 1..75: mol_type = other DNA
atgaaatagacaccgacgataagttatggactatccctgcctcacgtatgaagatgaaacgggaacacataatcc

SEQ ID NO: 268724 - DNA, 75 bp, synthetic construct
  source 1..75: mol_type = other DNA
cggtcaattgtcgatctcaccggaagttcatacgtctttctcgcgccggtcattggtgcgctgggtacttttgtc

SEQ ID NO: 268725 - DNA, 75 bp, synthetic construct
  source 1..75: mol_type = other DNA
gaccgtgggcgtggcgtatcagacgacggtaggtggcattatgaacacctcggtggcactgatgcagtcctcgca

SEQ ID NO: 268726 - DNA, 75 bp, synthetic construct
  source 1..75: mol_type = other DNA
tttttcttcgggataaaaaggacgctgaacagtgagcggaccgacatgatgacgggtggtgagcgtggttttccc

SEQ ID NO: 268727 - DNA, 75 bp, synthetic construct
  source 1..75: mol_type = other DNA
cggtgaagctaaaactgatgctcgtgacgctgccatcattgccgaagctgcccgtaccctgcctcacgcgctacg

SEQ ID NO: 268728 - DNA, 75 bp, synthetic construct
  source 1..75: mol_type = other DNA
tagaaatttagatactgctcgtcctgatgaaacattttgggtcattaggaaaaaggataaattatcgttcattga

SEQ ID NO: 268729 - DNA, 75 bp, synthetic construct
  source 1..75: mol_type = other DNA
gcaacaaaggttttgcctggtgctgatttaagaacatatgttgattttaaaaacagtacggatcatgttgattca

SEQ ID NO: 268730 - DNA, 75 bp, synthetic construct
  source 1..75: mol_type = other DNA
acggcctgctggcagaatactatgcaaaaacagatattgacggtgatgtcatcactcacaaagatgacagaatga

SEQ ID NO: 268731 - DNA, 75 bp, synthetic construct
  source 1..75: mol_type = other DNA
accttaaaaacgcaactataacgttgaatgtcataatgcctgaaactaaatttactttattgaatgtaaccaaat

SEQ ID NO: 268732 - DNA, 75 bp, synthetic construct
  source 1..75: mol_type = other DNA
aaggcggggaagattccgtggaaaatgctatagcattgtgtcctaattgccataggcaagctcattatggtgctt

SEQ ID NO: 268733 - DNA, 75 bp, synthetic construct
  source 1..75: mol_type = other DNA
gattgcggagtgcgtgattaataaattatgtccgtcgcataccgttgttttattttcctatccagatgaggatga

SEQ ID NO: 268734 - DNA, 75 bp, synthetic construct
  source 1..75: mol_type = other DNA
tgggtgacgaaaatcaaatttatgcgtcttcacagatgagtcgttcgggagagcagggtaataactatcaggttt

SEQ ID NO: 268735 - DNA, 75 bp, synthetic construct
  source 1..75: mol_type = other DNA
ttttcattgcaatatttttaatttctggctgctcaacatccgggaaccaacaaattaaaaatgaaactgcacaaa

SEQ ID NO: 268736 - DNA, 75 bp, synthetic construct
  source 1..75: mol_type = other DNA
gaagaagcccaacatgaaatggctgctgaagcggggattaatcccataagcgctaacttaagggttgtggtatta

SEQ ID NO: 268737 - DNA, 75 bp, synthetic construct
  source 1..75: mol_type = other DNA
ctggaaatcgaatttaaaggagaaacggtcagcaagtggtcgttctcggaaaataaaagcaggatgaatacgggt

SEQ ID NO: 268738 - DNA, 75 bp, synthetic construct
  source 1..75: mol_type = other DNA
cgttggctttgaaagcggtgggctggctgcggcgcacgcggtgcataacggcctgactgcaatccctgatgccca

SEQ ID NO: 268739 - DNA, 75 bp, synthetic construct
  source 1..75: mol_type = other DNA
tggcgaccacagccgttgctgaaaccgctggtggacggcccgcagagcgctgtcgtgacgggaccggcaggcgag

SEQ ID NO: 268740 - DNA, 75 bp, synthetic construct
  source 1..75: mol_type = other DNA
ttctagtaactgcaccttcaagaaaaaatcacccaaaaaataatgtattgtatgattttatattgcaacaagatg

SEQ ID NO: 268741 - DNA, 75 bp, synthetic construct
  source 1..75: mol_type = other DNA
gcgggtgaaatttaactgggaccgctataacccgtcaaaccaggacagttcatgctggatccgtgtggcacaggc

SEQ ID NO: 268742 - DNA, 75 bp, synthetic construct
  source 1..75: mol_type = other DNA
cgctgaataaccactttgcggtaataccggcagaccggacatggcggccacagccgttgctgaaaccgctggtgg

SEQ ID NO: 268743 - DNA, 75 bp, synthetic construct
  source 1..75: mol_type = other DNA
aaacaaaattataaagaatgaaaaagtaaaacttatcaatccgtcaagtagcgagatgcttctaccaaactgtgg

SEQ ID NO: 268744 - DNA, 75 bp, synthetic construct
  source 1..75: mol_type = other DNA
gccgatcattatggggcgcacctaccaccaggaaaaccgcacacccggcagcctgccgggaacaaagacgcagat

SEQ ID NO: 268745 - DNA, 75 bp, synthetic construct
  source 1..75: mol_type = other DNA
gagctgcgtgcgggagcggtgagtgcggagagtgaggcatggcttgcgcagtgcgggctgacggcggaacagatg

SEQ ID NO: 268746 - DNA, 75 bp, synthetic construct
  source 1..75: mol_type = other DNA
acctgacgatatggcagggcgatgacgtacagcgccgggggaaaggtgtggtgacctggtttgaactgggggaga

SEQ ID NO: 268747 - DNA, 75 bp, synthetic construct
  source 1..75: mol_type = other DNA
ctgtctggcaaccaagggagcagaggccggaggtaattgacaggagccttgcgccgggttacgtatgttctcccc

SEQ ID NO: 268748 - DNA, 75 bp, synthetic construct
  source 1..75: mol_type = other DNA
atgtatttacatatcagaaagtatcaactcgtaaatgcgagatggcgtgatgtcattgatctgacagattatgaa

SEQ ID NO: 268749 - DNA, 75 bp, synthetic construct
  source 1..75: mol_type = other DNA
ttggtgaaccgctttttgaattcaatcagcttcccacagagcattctgagcagcattatctcagcggatttggcg

SEQ ID NO: 268750 - DNA, 75 bp, synthetic construct
  source 1..75: mol_type = other DNA
tagttggttcccaatcaataattatgcctaatataaccttaaaagaaggcactgcagttggtgctaactcattaa

SEQ ID NO: 268751 - DNA, 75 bp, synthetic construct
  source 1..75: mol_type = other DNA
aagcctgacagcatcgctatttccacacctgacagcttcaccgtcaccgttggcgggacagttttttcactgacc

SEQ ID NO: 268752 - DNA, 75 bp, synthetic construct
  source 1..75: mol_type = other DNA
agggatatcccatatgttttgccgcaagtgactatccccttatttggccctcaatatattcgttaccctatgcag

SEQ ID NO: 268753 - DNA, 75 bp, synthetic construct
  source 1..75: mol_type = other DNA
aacaggaaggccagcaccaggactaccagcgcacgcagtatgaagtgtatgactaccccggacgtttcaagggtg

SEQ ID NO: 268754 - DNA, 75 bp, synthetic construct
  source 1..75: mol_type = other DNA
tttaaccgcttctcacaatttgcttctttttcatcgtctagtgcaccttcggtcaccgcaccattcagggcagaa

SEQ ID NO: 268755 - DNA, 75 bp, synthetic construct
  source 1..75: mol_type = other DNA
ccatgaactcagaacatctttacaggcaatagtgtctatcattgatgtcgtaaccaataatctgagtggagggat

SEQ ID NO: 268756 - DNA, 75 bp, synthetic construct
  source 1..75: mol_type = other DNA
tagctgatataaaaccgctaactaaaaccgttacaaatcttgctgatatggctgaaatagcacaaaggaatgacg

SEQ ID NO: 268757 - DNA, 75 bp, synthetic construct
  source 1..75: mol_type = other DNA
atgagtggcgcaggagctatagaagtagacaaaaatttgaccttcaggattcgtggattaaataatattcatgtc

SEQ ID NO: 268758 - DNA, 75 bp, synthetic construct
  source 1..75: mol_type = other DNA
cgtttagcgtagtcatgaccaaagatccgggtgcggcctgtactgagcagtttaatattttagggagttttttca

SEQ ID NO: 268759 - DNA, 75 bp, synthetic construct
  source 1..75: mol_type = other DNA
cttgactgctttgttaatgttgatctggaaccagctgatggcgttgtcgactttggtaaaataaattcccgaaca

SEQ ID NO: 268760 - DNA, 75 bp, synthetic construct
  source 1..75: mol_type = other DNA
ctggggctggatgacgaggcgctcagcgtggaatggtcaatcggcggctatgagctgctggtgctgcggcagatc

SEQ ID NO: 268761 - DNA, 75 bp, synthetic construct
  source 1..75: mol_type = other DNA
ggatgtgataaacaaccatgctgagaccattggcaacaatcagatgattgcggttaccaacaatcagatacagac

SEQ ID NO: 268762 - DNA, 75 bp, synthetic construct
  source 1..75: mol_type = other DNA
gcacaaatccgcccttcttccgtggtgaccaaagactacacctttaaacgccccggctgggccggacgttttgat

SEQ ID NO: 268763 - DNA, 75 bp, synthetic construct
  source 1..75: mol_type = other DNA
ggcggagaaaccgctcgccacctcagtacgcgagtgcgagcttatcgtggagatggcgcaacagcgcggcctgct

SEQ ID NO: 268764 - DNA, 75 bp, synthetic construct
  source 1..75: mol_type = other DNA
cagcagctaacgccaccgggcgtatcggcgacggcgcgcccgcgctgtggtttgataatattcgcggctttaccg

SEQ ID NO: 268765 - DNA, 75 bp, synthetic construct
  source 1..75: mol_type = other DNA
aaccatcgtcgaaatcgacaccgtgaactttattgaaaatatcgacggcaaagaccgtctggctggcgcacgtcg

SEQ ID NO: 268766 - DNA, 75 bp, synthetic construct
  source 1..75: mol_type = other DNA
atggttctgcgggccagacgtttgattcgggttctcagggtcagattgttacgctcaatgtgctgagtaaaaatc

SEQ ID NO: 268767 - DNA, 75 bp, synthetic construct
  source 1..75: mol_type = other DNA
gtgcttttggtgctttcgaggttacagcgacttcatataatgttgatgtagctgcaaaattacaacatgcagcta

SEQ ID NO: 268768 - DNA, 75 bp, synthetic construct
  source 1..75: mol_type = other DNA
tccgtatatgactcacgctcaagtgatggtgcatccatggatttggtaacaaaagcaatccaggaatcggttaga

SEQ ID NO: 268769 - DNA, 75 bp, synthetic construct
  source 1..75: mol_type = other DNA
aaacaggttacgccatctttaaaaggaattggtaagcggttaggactcggtactgatcaaactgtacgccgccac

SEQ ID NO: 268770 - DNA, 75 bp, synthetic construct
  source 1..75: mol_type = other DNA
atggaatatctggttaacgttgttccttcaggtgaagttatcgacagcacgctattgccaccaaatctgctgaat

SEQ ID NO: 268771 - DNA, 75 bp, synthetic construct
  source 1..75: mol_type = other DNA
ttcgggttctcagggtcagattgttacgctcaatgtgctgagtaaaaatcttaccagtcagatgatcttacccag

SEQ ID NO: 268772 - DNA, 75 bp, synthetic construct
  source 1..75: mol_type = other DNA
aaattttgataccattggtacaaactttagttcgcgacaatgtaaagctaaataatgatgtgtataaagaactga

SEQ ID NO: 268773 - DNA, 75 bp, synthetic construct
  source 1..75: mol_type = other DNA
aaaatacaaaatctagcgcgtacagatagtaggattaaaataatatataataaggaaaatcagaaaattgtaaaa

SEQ ID NO: 268774 - DNA, 75 bp, synthetic construct
  source 1..75: mol_type = other DNA
cggacggagcattcactttgagccgctgctgccgggggggggcggtgtacagccgcagcgagtcaatgtggctgg

SEQ ID NO: 268775 - DNA, 75 bp, synthetic construct
  source 1..75: mol_type = other DNA
ggtaaggaatatacttcaaccatagagaaatcaggagtttctcaaacttatgtaaaacccaattacaagattggc

SEQ ID NO: 268776 - DNA, 75 bp, synthetic construct
  source 1..75: mol_type = other DNA
ggtaatccatacgacccaaacacgataggctctcgctttggagaagttcgccgctcaataattaagtcaggaata

SEQ ID NO: 268777 - DNA, 75 bp, synthetic construct
  source 1..75: mol_type = other DNA
ccaataaatttgatgttgtcttttcttactgcggaaataatgtaaaggaatttatacttttattaccctataata

SEQ ID NO: 268778 - DNA, 75 bp, synthetic construct
  source 1..75: mol_type = other DNA
taaagggatgacgaacatttatattgtcctaccgtatacaccagaagcgaagtcagaagccccggaagaagcgcc

SEQ ID NO: 268779 - DNA, 75 bp, synthetic construct
  source 1..75: mol_type = other DNA
aaataatcttggcgtcataatggatttacgcgtcgtagcgtcagatccctcaatcaatattatcgacaaaataaa

SEQ ID NO: 268780 - DNA, 75 bp, synthetic construct
  source 1..75: mol_type = other DNA
ggctggtgattgatgacattgataatcaggcgctgataaccccactgaccccagaacaaaatcaacaacgcttca

SEQ ID NO: 268781 - DNA, 75 bp, synthetic construct
  source 1..75: mol_type = other DNA
gtgactcagcctgtgaaagcagagaaaccccgccggaaccgattttcaccggagtttaaatggagactggttcag

SEQ ID NO: 268782 - DNA, 75 bp, synthetic construct
  source 1..75: mol_type = other DNA
gatgcaagatatctttttagcgacagaggtgacttcaggcaccggtttaccgactggccggatgggggcgttgtg

SEQ ID NO: 268783 - DNA, 75 bp, synthetic construct
  source 1..75: mol_type = other DNA
ttaaagactatctgggcgcggacaatgcttcggctcttctcaggcccgctgaactgcgggtcggtgaggcggtcg

SEQ ID NO: 268784 - DNA, 75 bp, synthetic construct
  source 1..75: mol_type = other DNA
gacgcagacggatatctcatcaccgacttatggaaagcgggtaaaaaggtaaccgtcaaaatacaccgtctcgtt

SEQ ID NO: 268785 - DNA, 75 bp, synthetic construct
  source 1..75: mol_type = other DNA
tggcaaaggtatttaccctgggttatgtggattttagcaaacgctccaacgaagcgggtagaaagatgatgactc

SEQ ID NO: 268786 - DNA, 75 bp, synthetic construct
  source 1..75: mol_type = other DNA
gagggctcatcgcaataacgtcgggagtggttacgcttgttgctttctttcttccacagtacgtacccgagcaaa

SEQ ID NO: 268787 - DNA, 75 bp, synthetic construct
  source 1..75: mol_type = other DNA
aggttgccgccgcgctgctggagattgagcgtcaggtcagtgattttagcgaccgccccaatgatattgggctta

SEQ ID NO: 268788 - DNA, 75 bp, synthetic construct
  source 1..75: mol_type = other DNA
atcaacatacctttaaggcgattaatcaacgtaacggagagcgcaacaacgcgtttctcaccattggagtgcact

SEQ ID NO: 268789 - DNA, 75 bp, synthetic construct
  source 1..75: mol_type = other DNA
atatcatgtatcggtcttgccagaagaaacaaagaaattcttgggggtagaagagcgctcagttatacctgactc

SEQ ID NO: 268790 - DNA, 75 bp, synthetic construct
  source 1..75: mol_type = other DNA
ttttatttaaaatcaattcgttacttgattttccgtggttaatcacaaaaaagtaccagatgtatttttcaataa

SEQ ID NO: 268791 - DNA, 75 bp, synthetic construct
  source 1..75: mol_type = other DNA
tattgagcaggacattcagcgttacggcaaccagtacccgcagttttgcgcgtctccagttgatgagctaaaaat

SEQ ID NO: 268792 - DNA, 75 bp, synthetic construct
  source 1..75: mol_type = other DNA
ggtaccgcattgtcaaaagctggtatctcattgaacagaatgtcagaagatattgatataaagctcgtgccaaca

SEQ ID NO: 268793 - DNA, 75 bp, synthetic construct
  source 1..75: mol_type = other DNA
agcagacaatatcggtggtgtgtattacaaatccgcgcagatttatatcaatggctcatggcgcaccgtatccgg

SEQ ID NO: 268794 - DNA, 75 bp, synthetic construct
  source 1..75: mol_type = other DNA
gctgggtccatgcgccgggaaatcgtatcgttcgcaaaactgccgttgaacgtgatcgccagaacgcttggacac

SEQ ID NO: 268795 - DNA, 75 bp, synthetic construct
  source 1..75: mol_type = other DNA
attcatttcaagaccctgactttcaggaacttctcggcggaattgatattactcttgttataaggttttttaatt

SEQ ID NO: 268796 - DNA, 75 bp, synthetic construct
  source 1..75: mol_type = other DNA
acgagcggcgtataaaattattgctggtgcagtcagctcagaaatgtaccgtcaacaatgtggcgggcataataa

SEQ ID NO: 268797 - DNA, 75 bp, synthetic construct
  source 1..75: mol_type = other DNA
taccggtgaaaactggtcacgttttttcgttttaataccgcgtggcagtggggagaacgtgaagaacaggcggta

SEQ ID NO: 268798 - DNA, 75 bp, synthetic construct
  source 1..75: mol_type = other DNA
acccaccggtaccattacgacagtcagcaccggctggtgcactacacgcggacacaatatgcagagccgctggtc

SEQ ID NO: 268799 - DNA, 75 bp, synthetic construct
  source 1..75: mol_type = other DNA
cagaccatgctcgcagagaaacttcagctctccactgccgtgaaggaaatgcgtttctatggcgtgtcgggagtg

SEQ ID NO: 268800 - DNA, 75 bp, synthetic construct
  source 1..75: mol_type = other DNA
tgatagttatcccgatgactcatcagttttctatcgctatgacagttttgtagcgaaccacaaaaatgtaaaaga

SEQ ID NO: 268801 - DNA, 75 bp, synthetic construct
  source 1..75: mol_type = other DNA
ggtaatgtcatcatggcagccaagacggcaggtattgatcctgcaacgtattttgtttatcaccaattacctgtc

SEQ ID NO: 268802 - DNA, 75 bp, synthetic construct
  source 1..75: mol_type = other DNA
ttgtaaccggactggttatttttatgctggcgaaaggatataaacctcagccagtattattattgggtgggttat

SEQ ID NO: 268803 - DNA, 75 bp, synthetic construct
  source 1..75: mol_type = other DNA
acaccaaataacacctatctaaaatataatcccaaagctaaagggaatggagttacaattatcaggcaagggagt

SEQ ID NO: 268804 - DNA, 75 bp, synthetic construct
  source 1..75: mol_type = other DNA
agccgggtactggaatcttacagaaatacaagagcaagagaggatatatattctgccacattctcaatacctttg

SEQ ID NO: 268805 - DNA, 75 bp, synthetic construct
  source 1..75: mol_type = other DNA
agttagagagcaatctggccgagctgcgtggcggcagcgattacgcgcaacgtaaaatcaagatagccgctgctc

SEQ ID NO: 268806 - DNA, 75 bp, synthetic construct
  source 1..75: mol_type = other DNA
tgccgggaactggcatagcgtcgccatttatttgctggctggatgtctgatttccgcaatgaccgctttgttgat

SEQ ID NO: 268807 - DNA, 75 bp, synthetic construct
  source 1..75: mol_type = other DNA
gccttatctgatattcctgcatcggaaggttctgatctagaagtaactgtgacagaggataatggagccgttcaa

SEQ ID NO: 268808 - DNA, 75 bp, synthetic construct
  source 1..75: mol_type = other DNA
ctatagtaagaccactttttgggataagaaagatgaatcttatgcaaacctgaactatgactcttcattatttgg

SEQ ID NO: 268809 - DNA, 75 bp, synthetic construct
  source 1..75: mol_type = other DNA
aggagttatagtacgtttgacgatgctatggaaccagggcagagttattcttccggaaagagaaaaaacgacttt

SEQ ID NO: 268810 - DNA, 75 bp, synthetic construct
  source 1..75: mol_type = other DNA
gcccttatcagcaaggaagggacaacagaatggtgcgcagaatacgatgaatggggcaacctgctgaatgaagag

SEQ ID NO: 268811 - DNA, 75 bp, synthetic construct
  source 1..75: mol_type = other DNA
taattgcagaccatgacaagccgcagccgtcaggctgcctactcggctccctcatcctctggacagaacgaggcg

SEQ ID NO: 268812 - DNA, 75 bp, synthetic construct
  source 1..75: mol_type = other DNA
aatccagttattccagataaagattataaggatgtgggcaaatttatatttccttgcgctaaaaatgatatgatc

SEQ ID NO: 268813 - DNA, 75 bp, synthetic construct
  source 1..75: mol_type = other DNA
ttgctggctgccgcttcccgttggtgcgggtcagcgcctctttccggaggtggcctttcagcagaccgagcgggt

SEQ ID NO: 268814 - DNA, 75 bp, synthetic construct
  source 1..75: mol_type = other DNA
atggcgactaacgattttaaacccttcgctactggtagcggggcaaacgtattatcacaggctgattatgaagcg

SEQ ID NO: 268815 - DNA, 75 bp, synthetic construct
  source 1..75: mol_type = other DNA
aggggcggtatatcactcaggatccgattgggctgaaggggggatggaacctgtatacatatccgctgagcccgg

SEQ ID NO: 268816 - DNA, 75 bp, synthetic construct
  source 1..75: mol_type = other DNA
attcgtgagattgaagatttactgtagagataaaaacaagggccggggaatttcattcggcccatattctcttta

SEQ ID NO: 268817 - DNA, 75 bp, synthetic construct
  source 1..75: mol_type = other DNA
tttcattcggcccatattctctttattgctgtgcgaaatcagactattacggctcaaacgggcgtctctggaact

SEQ ID NO: 268818 - DNA, 75 bp, synthetic construct
  source 1..75: mol_type = other DNA
accatcatacactaaatcagtaagttggcagcatcaccaaagccgtcatagagataatgagcaagccatcttttg

SEQ ID NO: 268819 - DNA, 75 bp, synthetic construct
  source 1..75: mol_type = other DNA
gaacattgacaaccctgaagtcaaagccgacatcattcggaagatgaaatatctccaacagatacataaccgcac

SEQ ID NO: 268820 - DNA, 75 bp, synthetic construct
  source 1..75: mol_type = other DNA
gcatttaccctgacacaggacagtccacgcgttgatgtccaaacttttattgattggcacgaacctaatgtttct

SEQ ID NO: 268821 - DNA, 75 bp, synthetic construct
  source 1..75: mol_type = other DNA
atgcacagtgagatccgtgcataccacgaagatgcaggttttttcgcggcctgggattttgcttcaaattatcgt

SEQ ID NO: 268822 - DNA, 75 bp, synthetic construct
  source 1..75: mol_type = other DNA
agcgcattgaggccttgtttcaagagcatcaacgccgcttcaacctacgacaggaaatcaccaccgacgaggtgc

SEQ ID NO: 268823 - DNA, 75 bp, synthetic construct
  source 1..75: mol_type = other DNA
catacagcgtaaaaatgaagtggttaatttttacgtaataagaattttcataatcttgcggatatgcccaatatc

SEQ ID NO: 268824 - DNA, 75 bp, synthetic construct
  source 1..75: mol_type = other DNA
caacaactgggacggccggaacgattctctgcctcccatccttgacgctgcgactgcaggttcaggcctgaagat

SEQ ID NO: 268825 - DNA, 75 bp, synthetic construct
  source 1..75: mol_type = other DNA
tacgaaagccgctgaatgcaatgacgccactgcctggtataacctggccattatgtatcactacggagaaggaag

SEQ ID NO: 268826 - DNA, 75 bp, synthetic construct
  source 1..75: mol_type = other DNA
caagcgatgtactggtatctgaaggctgccgctcaggggagcgtcggcgcttacgtcaacatcggttatatgtat

SEQ ID NO: 268827 - DNA, 75 bp, synthetic construct
  source 1..75: mol_type = other DNA
aaaatcagaagaaaggtgaacgcagaatcaccgattgaaatttctgagataaaagcttatttttcggatatttca

SEQ ID NO: 268828 - DNA, 75 bp, synthetic construct
  source 1..75: mol_type = other DNA
aatggactttagacgctacgggtgaagttggacgctcatcagtaaattctgtttatatgattatatgtcctgcga

SEQ ID NO: 268829 - DNA, 75 bp, synthetic construct
  source 1..75: mol_type = other DNA
attgctcgctatagatttgctatatctgaatactcttcaacagaggaccacattgacgaagtgtttcgacgcata

SEQ ID NO: 268830 - DNA, 75 bp, synthetic construct
  source 1..75: mol_type = other DNA
gcttgagaatgcattggtagcacttgctctggccccaacccgacaaaatattcgaacgacactccttttgctcga

SEQ ID NO: 268831 - DNA, 75 bp, synthetic construct
  source 1..75: mol_type = other DNA
cttgcttgaaaatgcgctggttacgcttgtcagagagccttcccggcataatactcgctctgcactacagcatct

SEQ ID NO: 268832 - DNA, 75 bp, synthetic construct
  source 1..75: mol_type = other DNA
gcggagagggaagccggtgcacaggtgatgcgtgagactgaacagcagatttaccgtcagttgactgacgaggta

SEQ ID NO: 268833 - DNA, 75 bp, synthetic construct
  source 1..75: mol_type = other DNA
atgataccggcgctctgctctccctgggcagggaaatgttccgcctcgaaattctggaggacattgcccgggata

SEQ ID NO: 268834 - DNA, 75 bp, synthetic construct
  source 1..75: mol_type = other DNA
gccaaagctgcctgcatttctcaaagaacttaatgctgataataacaggctttctgtgataccagaacttcctga

SEQ ID NO: 268835 - DNA, 75 bp, synthetic construct
  source 1..75: mol_type = other DNA
gtggctgatttatcgcgcttcgaaaaagggcaaaaaatcactcctggcgtttatcgtgttgatatcgctctgaat

SEQ ID NO: 268836 - DNA, 75 bp, synthetic construct
  source 1..75: mol_type = other DNA
acaacggcgcggacacgcggcacatccaggcgatcctcggccatgagaagctggagacgacgcagatctacacga

SEQ ID NO: 268837 - DNA, 75 bp, synthetic construct
  source 1..75: mol_type = other DNA
agaatctcaaattgtagcagaattattgattcatatgagaagtctaactcaagttatgattggagaagcaattgc

SEQ ID NO: 268838 - DNA, 75 bp, synthetic construct
  source 1..75: mol_type = other DNA
caggcagccctgagcactgccgcccgtggctgggtggatccctctgaatgggacgaaggcgtccccgccgcgctg

SEQ ID NO: 268839 - DNA, 75 bp, synthetic construct
  source 1..75: mol_type = other DNA
gaagccaacgacctgagggctgatgatgataacggctggcagatgacgtacaacaaacgccagcgcctccagtta

SEQ ID NO: 268840 - DNA, 75 bp, synthetic construct
  source 1..75: mol_type = other DNA
gaaaggcgttgttgcgtgtctgacgtcagataacctggaggcgatgggggtcaacattgccgcgtttccggcgtt

SEQ ID NO: 268841 - DNA, 75 bp, synthetic construct
  source 1..75: mol_type = other DNA
ggtggagcaacgcgtctgcgcgtttcctcgcaaagtctgaaacgtgcgtggcgcacttctgcactttttgaacag

SEQ ID NO: 268842 - DNA, 75 bp, synthetic construct
  source 1..75: mol_type = other DNA
aaagcgcggtgaacgagaagctgaaagcggagctgatgcgggaatataacagccgctattttaacgtgccggtac

SEQ ID NO: 268843 - DNA, 75 bp, synthetic construct
  source 1..75: mol_type = other DNA
tgcgataacgaccggaaaaaacatcattgagggcgaaggcatagaacgctatgaaatcgactggaagataccggg

SEQ ID NO: 268844 - DNA, 75 bp, synthetic construct
  source 1..75: mol_type = other DNA
gtggcggaaacagcgttattttgctttctgccacgttatctcaacagcagcgcgacaaactcgtcgctgcctttg

SEQ ID NO: 268845 - DNA, 75 bp, synthetic construct
  source 1..75: mol_type = other DNA
ttacctcccggaaaaactgtcgacacgtctggctgaggagtctgtttccctgtggctggctacctgtattgacgg

SEQ ID NO: 268846 - DNA, 75 bp, synthetic construct
  source 1..75: mol_type = other DNA
tacctgtattgacggtgtggtgaagccttatgccaccggtgctcacgcatgggaaatgagcgttgtcagagtgcg

SEQ ID NO: 268847 - DNA, 75 bp, synthetic construct
  source 1..75: mol_type = other DNA
tgtcttcataaaaaataaccaaagccaaaaaaataatttagagaaaaaaataaacaggttttttgggttaattca

SEQ ID NO: 268848 - DNA, 75 bp, synthetic construct
  source 1..75: mol_type = other DNA
acaaatctgtaaaaacaaaaacagtttacatcatcgaccaattaaaaagaccagaggaaatagaactcctacgaa

SEQ ID NO: 268849 - DNA, 75 bp, synthetic construct
  source 1..75: mol_type = other DNA
tgcaaaaaaaaggtagcttattagattcaaattcaaatgaatcacctatgcaaacaattattacacgtcagtctc

SEQ ID NO: 268850 - DNA, 75 bp, synthetic construct
  source 1..75: mol_type = other DNA
aagacatacacgacccaatctatgacattgagctatacgcagatcaggcaggttgccccgcaaacgtcatgatta

SEQ ID NO: 268851 - DNA, 75 bp, synthetic construct
  source 1..75: mol_type = other DNA
tgtcggcgttttgttctcctatggttggcagccaggtacagcgcgataaagggtacgaaaccagcacaatcaaac

SEQ ID NO: 268852 - DNA, 75 bp, synthetic construct
  source 1..75: mol_type = other DNA
caattcctcgacagttacagaacgtatgaagatattgttgctcagcgttttttaaaagacgtggcaaaagtagaa

SEQ ID NO: 268853 - DNA, 75 bp, synthetic construct
  source 1..75: mol_type = other DNA
ttgctgataagtctgaaggatttggaatgagtgtcactgcaagtgagttaagatggttatacaggcaccgacata

SEQ ID NO: 268854 - DNA, 75 bp, synthetic construct
  source 1..75: mol_type = other DNA
aatattctggatggtaatggggcattatttaaaaaacgtacactgtgggagtttattctcgatctttttcccgga

SEQ ID NO: 268855 - DNA, 75 bp, synthetic construct
  source 1..75: mol_type = other DNA
atattctcaacctgaccgctccatggcaggttaaatttctttctcttgatgaaaacgccggttctgttaccgtca

SEQ ID NO: 268856 - DNA, 75 bp, synthetic construct
  source 1..75: mol_type = other DNA
caaacgttatccggctcagcaagagcatcagtaaacactctttgcgttcatttttgcactgtgcagaatgtgtct

SEQ ID NO: 268857 - DNA, 75 bp, synthetic construct
  source 1..75: mol_type = other DNA
cacatctgcgctggaactggtcgccatggtgcaatcggtgccggaagctgatcgtgcggtggtaaattttggtaa

SEQ ID NO: 268858 - DNA, 75 bp, synthetic construct
  source 1..75: mol_type = other DNA
atagatgatgaaatacgaacttaccaggatattgttcaaaattatagtcgggagaaaaaatataaaaagtataaa

SEQ ID NO: 268859 - DNA, 75 bp, synthetic construct
  source 1..75: mol_type = other DNA
tggtagggcacaacatatcattaacaatatgataggaagtgacagaattaactttgttgaatctgtcataaaaga

SEQ ID NO: 268860 - DNA, 75 bp, synthetic construct
  source 1..75: mol_type = other DNA
caagtaaagggcgtttttacctaatgccaccgaaagtttttggacagcaagaccatcgctattttgatgggccta

SEQ ID NO: 268861 - DNA, 75 bp, synthetic construct
  source 1..75: mol_type = other DNA
tgggatgttgtcatatggtaaagaaaattttattgccatgagtcatacgaaaagcgagttaattggagggaaacg

SEQ ID NO: 268862 - DNA, 75 bp, synthetic construct
  source 1..75: mol_type = other DNA
ttttttatttatattgtgtgtgtttttttttctgtatatagtagctgtgtattgtggctttagttatgttttttc

SEQ ID NO: 268863 - DNA, 75 bp, synthetic construct
  source 1..75: mol_type = other DNA
atgcagccaacaataaacagaagaaaggagattcgaaagattgacttcggtcttctgaaacatctgttcgccgtc

SEQ ID NO: 268864 - DNA, 75 bp, synthetic construct
  source 1..75: mol_type = other DNA
gaacgttaaaacaacaaattttcttgagtgtgccaataacattcttggggataatttctattatcatcagtcacc

SEQ ID NO: 268865 - DNA, 75 bp, synthetic construct
  source 1..75: mol_type = other DNA
ttctggcaaaacaaaaacaacgaatctcccgttgttgagaataataactctccccgatgtgaactgcacctggca

SEQ ID NO: 268866 - DNA, 75 bp, synthetic construct
  source 1..75: mol_type = other DNA
tatattacgcggaaagttaagggagtaacgcagactaacgcaataacaacagacgattgcgacgcgtttttataa

SEQ ID NO: 268867 - DNA, 75 bp, synthetic construct
  source 1..75: mol_type = other DNA
gatttttcatctgttgttggaagtgcggtaacaacacataaaattactaaaacggtcactattgagtgtgaaaac

SEQ ID NO: 268868 - DNA, 75 bp, synthetic construct
  source 1..75: mol_type = other DNA
tacaggtcccgagcacagaaccgtaggatggataaggcgttttacgctgcacccggcaaccgttgtcggaaccga

SEQ ID NO: 268869 - DNA, 75 bp, synthetic construct
  source 1..75: mol_type = other DNA
acagccgcagagcgtattaattgccgaggggctggcgacggccctgtccgttcacctgatgcgcccggacgcgct

SEQ ID NO: 268870 - DNA, 75 bp, synthetic construct
  source 1..75: mol_type = other DNA
aggaacagaagtcattatttttgcgggtagtgatgcctgggcacacgcgaaacaatggcaggaacatgatgcgcg

SEQ ID NO: 268871 - DNA, 75 bp, synthetic construct
  source 1..75: mol_type = other DNA
aactggatcaccacgcacaacggcattgagtacacgccaccagcaccaggggagaacatccgcgataacgcgcca

SEQ ID NO: 268872 - DNA, 75 bp, synthetic construct
  source 1..75: mol_type = other DNA
atttgatcgttactattggcaaggaggtcaaagcactcaacaacgcaaccttcagtaaagattacgaaaaaacta

SEQ ID NO: 268873 - DNA, 75 bp, synthetic construct
  source 1..75: mol_type = other DNA
gatggctggcgactgtttccggaaacgaagtttcagctctcagaacgacgccgccggcaaagtgaactgaatgat

SEQ ID NO: 268874 - DNA, 75 bp, synthetic construct
  source 1..75: mol_type = other DNA
attgttactgatagtaatggatttgctattgttggcggtttgagcacatacaggaaaaatgacatttatttagag

SEQ ID NO: 268875 - DNA, 75 bp, synthetic construct
  source 1..75: mol_type = other DNA
tcgtctgttgtcactttacgttgatgacagtgttcctgatcccaccacatttggtgaagttcgtcagcgggcctg

SEQ ID NO: 268876 - DNA, 75 bp, synthetic construct
  source 1..75: mol_type = other DNA
agcaaaacctgctgtactacgccagtctggcaaatttctataccgtttacgatctccgcaacctgaaaccggagc

SEQ ID NO: 268877 - DNA, 75 bp, synthetic construct
  source 1..75: mol_type = other DNA
caatagatttggtcgatgggagaaatattacaacattcaactccgcggcgcgctcttatcagcaatcaatcacct

SEQ ID NO: 268878 - DNA, 75 bp, synthetic construct
  source 1..75: mol_type = other DNA
aagtgaccaccgccgccgctggtaactggccttatgtgctggctggcctgtctatcgacgtgcctgattcatcac

SEQ ID NO: 268879 - DNA, 75 bp, synthetic construct
  source 1..75: mol_type = other DNA
ttccgttcaaccccgagcgacgcgccgtgatggaggccattgcagaggttgaacgcaggcagtcacgcggcgcgg

SEQ ID NO: 268880 - DNA, 75 bp, synthetic construct
  source 1..75: mol_type = other DNA
ggctcattactgaacgcttacgccgtagccaggaactgttgggatccagtcagttgcccgttgagcggatagcgg

SEQ ID NO: 268881 - DNA, 75 bp, synthetic construct
  source 1..75: mol_type = other DNA
ggcctcaacaatcttttgacactttatggcggtacgattttaaccgataactataatgcaataacgttaggaaat

SEQ ID NO: 268882 - DNA, 75 bp, synthetic construct
  source 1..75: mol_type = other DNA
ggtgatttttgttggtcctgcgcgaacagggaagaccattggtctgatcgatggatggattgtctatatgaaccg

SEQ ID NO: 268883 - DNA, 75 bp, synthetic construct
  source 1..75: mol_type = other DNA
cctttccaaacgtatgaaggatcaggaactggtattgcgattctgggcgttctatcgctttgattatttagaccc

SEQ ID NO: 268884 - DNA, 75 bp, synthetic construct
  source 1..75: mol_type = other DNA
attaagcgaattcagcacaatgagatcgacatgaataccgattttcagcgccatgcggagttatgggataaccgc

SEQ ID NO: 268885 - DNA, 75 bp, synthetic construct
  source 1..75: mol_type = other DNA
ggctgaacgcggaacgccttcagagaagtcaggagttactggaaacgacaaacattagtattgaacgtgtatccg

SEQ ID NO: 268886 - DNA, 75 bp, synthetic construct
  source 1..75: mol_type = other DNA
tctgctatagctaaccgggtggcaagaagaatggttgttccaccttaccgggaaggtggccaggcccagtttatt

SEQ ID NO: 268887 - DNA, 75 bp, synthetic construct
  source 1..75: mol_type = other DNA
tgatcaccgaagggttcagtacatttcatgtctccgttccattaatcctgttcggggagatactggaagggaagg

SEQ ID NO: 268888 - DNA, 75 bp, synthetic construct
  source 1..75: mol_type = other DNA
taaatatttagtgcaaacgactactcgctttagcgtagccgcatggcgttatgcttcacaggattatagaacatt

SEQ ID NO: 268889 - DNA, 75 bp, synthetic construct
  source 1..75: mol_type = other DNA
tactcttccgtgcccaacatgctgcaaccaggtgtttcaaatttcgattttatcgccggacgcagtaagatatat

SEQ ID NO: 268890 - DNA, 75 bp, synthetic construct
  source 1..75: mol_type = other DNA
tggcgttatgcttcacaggcttatagaacattcagcgaccatcttcaccaaaatgataaaaacaatcatcagagt

SEQ ID NO: 268891 - DNA, 75 bp, synthetic construct
  source 1..75: mol_type = other DNA
ttgaaatgtcaaagaatatttctgccaaaaacagtaatctttcttcgtggcaaaaccattctcttaccatgtgat

SEQ ID NO: 268892 - DNA, 75 bp, synthetic construct
  source 1..75: mol_type = other DNA
accatgttcctgttgggcacagaggctctgggcgcaatggttgccaacgaagccagccgtccgctgacctttggt

SEQ ID NO: 268893 - DNA, 75 bp, synthetic construct
  source 1..75: mol_type = other DNA
ctgaccattgagcctaccgttaaaaatcagtcattacctttagcggtttcttatgtgggtgaaacacctgaaggt

SEQ ID NO: 268894 - DNA, 75 bp, synthetic construct
  source 1..75: mol_type = other DNA
catgcttaccgttatgtgatgaaaccgacgttacctattcgtcgcgatagcccgaaaaaggcaattaccttgatt

SEQ ID NO: 268895 - DNA, 75 bp, synthetic construct
  source 1..75: mol_type = other DNA
ttccaggactacacagatgaagacatgcggaagcttggcactattgacgtggcgctggaactgtatagcaccaac

SEQ ID NO: 268896 - DNA, 75 bp, synthetic construct
  source 1..75: mol_type = other DNA
tgaggaggtggaaattatcaacccactttatagtggtgaatctaaaaaaccatatataaatcgtgttacaaataa

SEQ ID NO: 268897 - DNA, 75 bp, synthetic construct
  source 1..75: mol_type = other DNA
ttgaaatgattgtcactctggctattatgggagtggcaatgatatctgttattaaatataaagagaaagaagcag

SEQ ID NO: 268898 - DNA, 75 bp, synthetic construct
  source 1..75: mol_type = other DNA
cgaagcgctggttatctcatgcaccaaaatgaaggacgcggaggaactcaaagaagccgcatatgacttacgcgt

SEQ ID NO: 268899 - DNA, 75 bp, synthetic construct
  source 1..75: mol_type = other DNA
ttactttcagagaatttcgaactactggaggactggagcgagcaactaccccgacttaaagaaacctgggaacgc

SEQ ID NO: 268900 - DNA, 75 bp, synthetic construct
  source 1..75: mol_type = other DNA
aaaaaagaaatctaccacttgtatttcagacagaaagaacagattgcgctctttcatgtatcgttatggttgcta

SEQ ID NO: 268901 - DNA, 75 bp, synthetic construct
  source 1..75: mol_type = other DNA
ttcacgttctactggtagtgttgaaggtggaaaaagtaggctatctgtagctgatgcaattaccagagtaatgat

SEQ ID NO: 268902 - DNA, 75 bp, synthetic construct
  source 1..75: mol_type = other DNA
ttaagacaacttatccaagttctgaatttgtaattttaggaggttttgagagtaataatcctttctcattacaaa

SEQ ID NO: 268903 - DNA, 75 bp, synthetic construct
  source 1..75: mol_type = other DNA
tatgacgagtggggaaacctgctgggcgaaaccagcgcgcagcacctgcaacagccgtaccgtctgccgggacag

SEQ ID NO: 268904 - DNA, 75 bp, synthetic construct
  source 1..75: mol_type = other DNA
caataaggcggtactgaccgatcccgcctttgcctacatgtggaccggattcgttaaggttatcgccgtccactc

SEQ ID NO: 268905 - DNA, 75 bp, synthetic construct
  source 1..75: mol_type = other DNA
gcaaaggcgttgcaggcgatggatttaagcaccatcaccgataaaaccacatataacgccattaactggccggag

SEQ ID NO: 268906 - DNA, 75 bp, synthetic construct
  source 1..75: mol_type = other DNA
atactggttttaccgcaatgatgaatttgtttttgattacaaattaaaagcagaagacgagcgtgataccctgtt

SEQ ID NO: 268907 - DNA, 75 bp, synthetic construct
  source 1..75: mol_type = other DNA
gaatagttcaacgatcactgtgctatctaatcgtgaagtgaccatattacgttatctggttagcggattatctaa

SEQ ID NO: 268908 - DNA, 75 bp, synthetic construct
  source 1..75: mol_type = other DNA
gccatcgagtcgctgaacagcgtaatccggcatgccatcaaaaaacgcaaggtgttcccgacggatgactcagtg

SEQ ID NO: 268909 - DNA, 75 bp, synthetic construct
  source 1..75: mol_type = other DNA
attctttctgctggtatctctttgccatgcagataaaattttatgtttttcattatttggctgttgtctttatta

SEQ ID NO: 268910 - DNA, 75 bp, synthetic construct
  source 1..75: mol_type = other DNA
attctttctgctggtatctctttgccatgtagataaaattttatgtttttcattatttggttgttgtctttatta

SEQ ID NO: 268911 - DNA, 75 bp, synthetic construct
  source 1..75: mol_type = other DNA
gaagacgcagctgccttgaagacggttatcgcagccttgagaacaaaaaattcagcgactacacagacgaagacc

SEQ ID NO: 268912 - DNA, 75 bp, synthetic construct
  source 1..75: mol_type = other DNA
tttcagggaagcccgatggggatgcttgacctggcagatcgggtaaataaccacgaaatcgccatcatagacaat

SEQ ID NO: 268913 - DNA, 75 bp, synthetic construct
  source 1..75: mol_type = other DNA
tatgagcaggggacgcagatggccctgcttgaactggcagacaaaatcaataatcacgaagtagccatcatcgac

SEQ ID NO: 268914 - DNA, 75 bp, synthetic construct
  source 1..75: mol_type = other DNA
tttttgtttacatatcaaatgcatacaccgaaaaagcattatacaaagctaaatcaaaaggcgtgctggctataa

SEQ ID NO: 268915 - DNA, 75 bp, synthetic construct
  source 1..75: mol_type = other DNA
gctcgcctcacgctttggcgtgcgtatgccctcggcgtatgttcccagctctgagctgcgattgctgcggcgggc

SEQ ID NO: 268916 - DNA, 75 bp, synthetic construct
  source 1..75: mol_type = other DNA
agtaccgtcgcgaggtcctggccactgagggtgacgagattgaatatctgacggatatcgaacttcgtgaagcct

SEQ ID NO: 268917 - DNA, 75 bp, synthetic construct
  source 1..75: mol_type = other DNA
tgctggtgagcgtgttccaggcggtaacgcagattaacgaacagaccctgagctttttgccgaggctgattgtca

SEQ ID NO: 268918 - DNA, 75 bp, synthetic construct
  source 1..75: mol_type = other DNA
atgttgaccgtagacgtagccgccgacattgtcgcgagcggcataaaagtggtgattttgctggtttccgtgctg

SEQ ID NO: 268919 - DNA, 75 bp, synthetic construct
  source 1..75: mol_type = other DNA
caaacagcaaaaagcacctgatggcacgccgtatcaggcacgaaaacgccagccgctgagggcaaaaaaaggacg

SEQ ID NO: 268920 - DNA, 75 bp, synthetic construct
  source 1..75: mol_type = other DNA
gttgatgtagaagattgcaatgtttcttcaaataacattgggattgcaaacgttgttgattcaaagcttacctta

SEQ ID NO: 268921 - DNA, 75 bp, synthetic construct
  source 1..75: mol_type = other DNA
gattggtgataaagcaaatgtcaccctgactaaatccagttcaatgaacaatacaactctgactatcgagaaagg

SEQ ID NO: 268922 - DNA, 75 bp, synthetic construct
  source 1..75: mol_type = other DNA
ggtggaatttaccggcaaagtgcaacgtattgcgcagattcatcagctcggactcaaagaccggcctaaccctca

SEQ ID NO: 268923 - DNA, 75 bp, synthetic construct
  source 1..75: mol_type = other DNA
gacaatcctccagtaccgcctgatgacgataatggcggcaacacaccggatgatggtggcaatacccctgacgat

SEQ ID NO: 268924 - DNA, 75 bp, synthetic construct
  source 1..75: mol_type = other DNA
aggatcccgatggttgtacaattatcaatacacgtacaatgggtaatattggcctggctattattggtgatcaaa

SEQ ID NO: 268925 - DNA, 75 bp, synthetic construct
  source 1..75: mol_type = other DNA
cgtttcccctctcgctgaatatgtcggcggaaaactgatgcctggtttcgttgtctgtgatttttctctcggctt

SEQ ID NO: 268926 - DNA, 75 bp, synthetic construct
  source 1..75: mol_type = other DNA
caaacagcaaaaagcgcctgatggcacgccgtatcaggcgcgaaaacgccagccgctcagagcgaagaaagggcg

SEQ ID NO: 268927 - DNA, 75 bp, synthetic construct
  source 1..75: mol_type = other DNA
acaccttacgccgcccgaaaacgccagccggtaaaagccaaaacaggccgggttaagcgggaaatgttcgctaag

SEQ ID NO: 268928 - DNA, 75 bp, synthetic construct
  source 1..75: mol_type = other DNA
acgccgtatgtaccgagaaaaaaccagccagtgcgaaataagaaaggccggataaagcgggaaatgtttgtgaaa

SEQ ID NO: 268929 - DNA, 75 bp, synthetic construct
  source 1..75: mol_type = other DNA
gcatcacaaagaatatttgactctctaatattgaataatccgggactagcattagatataacaatgatagcttct

SEQ ID NO: 268930 - DNA, 75 bp, synthetic construct
  source 1..75: mol_type = other DNA
ttaatatcgaggctcaatcaggatatagaccatggactatagattctggtatcggattgcttcccttttcagaat

SEQ ID NO: 268931 - DNA, 75 bp, synthetic construct
  source 1..75: mol_type = other DNA
attcaatggcgcaaagatccttgaactggatggtcggcaaccagccgatgaaattctgcaagcgtcactacgcgc

SEQ ID NO: 268932 - DNA, 75 bp, synthetic construct
  source 1..75: mol_type = other DNA
tttcaaatatgaagaaagatttaaagacgaaactaacgaagatattcagtcaggcgaatcaggcgataattccac

SEQ ID NO: 268933 - DNA, 75 bp, synthetic construct
  source 1..75: mol_type = other DNA
agacagtgccagtcaccagttttctttatattgatattattatttattatcgagtttattaatatttgtttgccg

SEQ ID NO: 268934 - DNA, 75 bp, synthetic construct
  source 1..75: mol_type = other DNA
cgctggagcaaacagttacgtgactgggaactcattcaggcagtttatctaaatccagaaaaagaagcggcataa

SEQ ID NO: 268935 - DNA, 75 bp, synthetic construct
  source 1..75: mol_type = other DNA
agcagacgttcgttgatacgtactcgaaagtggctcactgtaaactttacgtcaccaaaacaccgattaccgcgg

SEQ ID NO: 268936 - DNA, 75 bp, synthetic construct
  source 1..75: mol_type = other DNA
tgttgatgcaacttattatctattttgcttttttaactctggggactaaattaagtgtgtataggttatttatac

SEQ ID NO: 268937 - DNA, 75 bp, synthetic construct
  source 1..75: mol_type = other DNA
cgttcgcaagctggttaaagaaaagatcaacgagttccaaaaagcgtttcgccacttgtttaccggctcagagaa

SEQ ID NO: 268938 - DNA, 75 bp, synthetic construct
  source 1..75: mol_type = other DNA
tgtttggcgagctttatccgagtaaagacgttgtcgcgatcgatcatagtgaatttcgcgtcatggagccgcgca

SEQ ID NO: 268939 - DNA, 75 bp, synthetic construct
  source 1..75: mol_type = other DNA
gacctatctgcaccagatgccgatgtttttaagtgggtagtcgagaataaaatcacaccactgcgtaagagcgac

SEQ ID NO: 268940 - DNA, 75 bp, synthetic construct
  source 1..75: mol_type = other DNA
catggaagcaagaagcacagaaaaactattcaggccctatcgtcgttggtcatgaaaatatgacgattaccattc

SEQ ID NO: 268941 - DNA, 75 bp, synthetic construct
  source 1..75: mol_type = other DNA
aaacatcatgctttgaggtcggcggaatatatacagtaggtcaccttactggtgatgaacttaacacgcaataca

SEQ ID NO: 268942 - DNA, 75 bp, synthetic construct
  source 1..75: mol_type = other DNA
aactaaaataataaaaaaggcattatctgaaatagagagaaaatatggtgatagggttcaaattatattaccaga

SEQ ID NO: 268943 - DNA, 75 bp, synthetic construct
  source 1..75: mol_type = other DNA
acctgctggcaaccgatggtgaccgcgtctggaacatggcaatcaacaaagagacgcagcagctcgacgaagaaa

SEQ ID NO: 268944 - DNA, 75 bp, synthetic construct
  source 1..75: mol_type = other DNA
ggcgatgtcatagtagtcgcacgtggagttggtggttccggtgatgttaaaatcgtcaataagaaatcgtacctg

SEQ ID NO: 268945 - DNA, 75 bp, synthetic construct
  source 1..75: mol_type = other DNA
tccagacaacatcaattggtgatggaacaactatctggcagtttgttgtgatactaaaaggtgctgtaattggta

SEQ ID NO: 268946 - DNA, 75 bp, synthetic construct
  source 1..75: mol_type = other DNA
cgagaaattcgctcgaacagtagtcaaaaagggtgcgtctattggagcaaatgcaacgattttgcccggcttaac

SEQ ID NO: 268947 - DNA, 75 bp, synthetic construct
  source 1..75: mol_type = other DNA
taaaaactgtaaaaatcggtctaaatacaaccatttggcaatacagcattatttttgaaggcgctgtaattggta

SEQ ID NO: 268948 - DNA, 75 bp, synthetic construct
  source 1..75: mol_type = other DNA
taccgggttatattgcgcagggtgtgttcgctatattgattatagctttaacacaatcatctgtaatggcgagca

SEQ ID NO: 268949 - DNA, 75 bp, synthetic construct
  source 1..75: mol_type = other DNA
cgagtgggtaagcaatacaggatttaccgctcaggtcatgatgaatattgctgtaaatacaaacacctcagacgc

SEQ ID NO: 268950 - DNA, 75 bp, synthetic construct
  source 1..75: mol_type = other DNA
taccgcgcttcgtgctctgctgttaagccgcaagaatccgtttggtgatatcaaatcggatggcacggtgaaaac

SEQ ID NO: 268951 - DNA, 75 bp, synthetic construct
  source 1..75: mol_type = other DNA
aaagcagaagtttgatacacttgcatatattaatcagcgagttgctaaaatagacccaatttccagcctggcctt

SEQ ID NO: 268952 - DNA, 75 bp, synthetic construct
  source 1..75: mol_type = other DNA
ttccggaggagatatttcagcagctcatcaaggctatctgtatagcacagaaaagtctataagcttagcgggact

SEQ ID NO: 268953 - DNA, 75 bp, synthetic construct
  source 1..75: mol_type = other DNA
cgcggggaactggacgcggaagccgaccccggcctgctgtatgcaggacagtggcaggatgcggaatccgggctg

SEQ ID NO: 268954 - DNA, 75 bp, synthetic construct
  source 1..75: mol_type = other DNA
agccaatcgtgatgaattaccgtttggactggataccaacagtgccatttggcttcaggcgttcaagttggcgct

SEQ ID NO: 268955 - DNA, 75 bp, synthetic construct
  source 1..75: mol_type = other DNA
tcagcactgcgacagcgttgtccgtgaggcttttacccggtcaaaacagcgttacggtgcaccacgcctgacgga

SEQ ID NO: 268956 - DNA, 75 bp, synthetic construct
  source 1..75: mol_type = other DNA
ggcatacttcgcgaagcgccagaaattgaagtatgtctttattgaaaaacatcatgctgagttcagcatcaaggc

SEQ ID NO: 268957 - DNA, 75 bp, synthetic construct
  source 1..75: mol_type = other DNA
ggctgcgttggcagcagctaaacttgcgaagatcccgaaaccaccaagccaggcagtatatgaagtgttcaaaaa

SEQ ID NO: 268958 - DNA, 75 bp, synthetic construct
  source 1..75: mol_type = other DNA
tcagactggaatgataaatttgacaggggatatttaaaaggtaaacgcatgtactcaagaatattcatcaaacac

SEQ ID NO: 268959 - DNA, 75 bp, synthetic construct
  source 1..75: mol_type = other DNA
cagaagtgggcgggagacatcacttacttaggggttccgcgcccatttcctccaaaagttccaccatttgaatta

SEQ ID NO: 268960 - DNA, 75 bp, synthetic construct
  source 1..75: mol_type = other DNA
ggagcaggatttttacgccagtggccctgaccagaagtgggcgggaacatcacttacttacgtacagatgaaggc

SEQ ID NO: 268961 - DNA, 75 bp, synthetic construct
  source 1..75: mol_type = other DNA
gcacagcatgtttgcctgtcgccgtcgcgtctgtcgcatctgttccgccagcagttaggaattagcgtcttaagc

SEQ ID NO: 268962 - DNA, 75 bp, synthetic construct
  source 1..75: mol_type = other DNA
aaaggaagataacgtgttacagggtcttcctgatatgctgatgatccccaaaactgtagaagatgagttccctaa

SEQ ID NO: 268963 - DNA, 75 bp, synthetic construct
  source 1..75: mol_type = other DNA
gatatcgcccgaaccaataaagaaacaaagcaagagatgtggttacgaaacgtcggtcagatagatataccttct

SEQ ID NO: 268964 - DNA, 75 bp, synthetic construct
  source 1..75: mol_type = other DNA
gcatatggatttataggtttttctggtgtgtttttagtagctaaagccaaatatttctttgataaaatatttggc

SEQ ID NO: 268965 - DNA, 75 bp, synthetic construct
  source 1..75: mol_type = other DNA
gagaaattgaaaacctggaaacacggcttaatcctaacccggcaaaccgggttgcaaccttacgtcgtcgtattt

SEQ ID NO: 268966 - DNA, 75 bp, synthetic construct
  source 1..75: mol_type = other DNA
atcagggacgagaatttgtctgccgaccgggtgatattttgctgttcccgcctggagagattcatcactacggtc

SEQ ID NO: 268967 - DNA, 75 bp, synthetic construct
  source 1..75: mol_type = other DNA
ctttcggcctgccggctttgctttacagggagccatggataaggtcggatttatcagatgtcggtcttacctgtt

SEQ ID NO: 268968 - DNA, 75 bp, synthetic construct
  source 1..75: mol_type = other DNA
cgtggcagggttcaggaaagcgacgaggccgtggagcatatccgctgccgatatcgctcgctggtatcgatgtgc

SEQ ID NO: 268969 - DNA, 75 bp, synthetic construct
  source 1..75: mol_type = other DNA
tttttcagcagccggtgccgcccgatgtgcaggggcaaccacttgcgaaaacggtcagccacgatgaaccggtac

SEQ ID NO: 268970 - DNA, 75 bp, synthetic construct
  source 1..75: mol_type = other DNA
agtcatcctgtttacctctttctcaggaagtttagtctccaggattcccggggcggttcagcgcgcgttgagaat

SEQ ID NO: 268971 - DNA, 75 bp, synthetic construct
  source 1..75: mol_type = other DNA
tgcgtgaaaatgaatttgtcacatcattgtcgtatctgaaagaggccggacttaaggctggtttttctgcttttg

SEQ ID NO: 268972 - DNA, 75 bp, synthetic construct
  source 1..75: mol_type = other DNA
aaaactcccgacgagtcttaatctgtgagcaattgctggatttgatccacggtgagaccactgaggtatttgatc

SEQ ID NO: 268973 - DNA, 75 bp, synthetic construct
  source 1..75: mol_type = other DNA
acagctccgctacatatgactgcaaccttgcaggataaaaatggcaacccattaaaagataaagaaatcaccttc

SEQ ID NO: 268974 - DNA, 75 bp, synthetic construct
  source 1..75: mol_type = other DNA
ctacagactggaaagaaaccgcagatggcgtctataaggcgacctataccgcctataccaaaggcagtggactta

SEQ ID NO: 268975 - DNA, 75 bp, synthetic construct
  source 1..75: mol_type = other DNA
atgaaaaacgtaaactaccaccccaacgaacatgagcgctatgctgactttatcgagcaaatgttaaaagcgctg

SEQ ID NO: 268976 - DNA, 75 bp, synthetic construct
  source 1..75: mol_type = other DNA
gatgccttattacaacgaagttgccaataatccgttgtttatctggaacccgcgcagtggtgtaaaaggagagcg

SEQ ID NO: 268977 - DNA, 75 bp, synthetic construct
  source 1..75: mol_type = other DNA
gtgacattggagtcatcaataaatattgttagcttaattgataagataaaagaaacaagtcaatgccttggagaa

SEQ ID NO: 268978 - DNA, 75 bp, synthetic construct
  source 1..75: mol_type = other DNA
atactgcttaacggtaaaagcgatacgaaaatcgtcaatattgtgcccgataccagcaacgcgcaggtcaccctg

SEQ ID NO: 268979 - DNA, 75 bp, synthetic construct
  source 1..75: mol_type = other DNA
cggcgacagggtatgggcgtgtacataaacaacaaatcgacgaatttcttgctgctgcgtttgcagatattcagc

SEQ ID NO: 268980 - DNA, 75 bp, synthetic construct
  source 1..75: mol_type = other DNA
tggatagctgccagaaacgtgaaccgcagcctctcaaacctgcaattcactcttttagcgctaactggtatgggt

SEQ ID NO: 268981 - DNA, 75 bp, synthetic construct
  source 1..75: mol_type = other DNA
attgctggaaaggctgggccatactcctccggcagaagcagaaaaagcttattatgcttctatcggaaacaatga

SEQ ID NO: 268982 - DNA, 75 bp, synthetic construct
  source 1..75: mol_type = other DNA
ccccagactggcacacctgccaccgatctggatgatgactactttgatatgttgcaggaagaactctgcagcgtg

SEQ ID NO: 268983 - DNA, 75 bp, synthetic construct
  source 1..75: mol_type = other DNA
atgatgccttttattcttatctgtctgaatatgttattaagcaacgtcttccgatatttttgggcatggaggata

SEQ ID NO: 268984 - DNA, 75 bp, synthetic construct
  source 1..75: mol_type = other DNA
tcaacggggaaagagtacccccgccatacttaccgccgcgccatttcgcggattaccacaacgctgagagcactt

SEQ ID NO: 268985 - DNA, 75 bp, synthetic construct
  source 1..75: mol_type = other DNA
atctgcaatataaaaatgtcatagaccctggttaccttcttaaaggtcatggcgtacatacgtatgagcatatta

SEQ ID NO: 268986 - DNA, 75 bp, synthetic construct
  source 1..75: mol_type = other DNA
ataataaatttaaaaaagttcattatatgattcgtgggcttaaagatgctatctttggtaatttgggtgatatca

SEQ ID NO: 268987 - DNA, 75 bp, synthetic construct
  source 1..75: mol_type = other DNA
tatttaatccaagtgatgagaatattaaacatcttgagtatctagcaaaaaatgatatcacgttagctgttgtag

SEQ ID NO: 268988 - DNA, 75 bp, synthetic construct
  source 1..75: mol_type = other DNA
tacgtatcgttcgaagcaccaagttccatattattaagcccgggagcgttggccgtacatcccacaagatcattg

SEQ ID NO: 268989 - DNA, 75 bp, synthetic construct
  source 1..75: mol_type = other DNA
gtggttctgactctggaaaaacatacatatattatttgattcgatatttattagggagtgaaaaactaaaaaata

SEQ ID NO: 268990 - DNA, 75 bp, synthetic construct
  source 1..75: mol_type = other DNA
agaatggtatatgaacggtcatatcggagaactggataaattagttccccatcttattacggagcataaaatata

SEQ ID NO: 268991 - DNA, 75 bp, synthetic construct
  source 1..75: mol_type = other DNA
actgaaagccgcaattgcttcactggttgccaatacggtgcctacagcgtttggggcggtaggtattccggtttc

SEQ ID NO: 268992 - DNA, 75 bp, synthetic construct
  source 1..75: mol_type = other DNA
tttgacctgccggatgagccaacaggcgatgccgcgccttcatggctgactgagccgacgccacagattaacggg

SEQ ID NO: 268993 - DNA, 75 bp, synthetic construct
  source 1..75: mol_type = other DNA
tttgacctgccggatgagccaacaggccatggcgcgccttcatggctgactgagccgacgccacagattaacggg

SEQ ID NO: 268994 - DNA, 75 bp, synthetic construct
  source 1..75: mol_type = other DNA
tttgacctgccggaagagccaacaggccatgtcgcgccttcatggctgactgagccgacgccacagattaacggg

SEQ ID NO: 268995 - DNA, 75 bp, synthetic construct
  source 1..75: mol_type = other DNA
aatactttcctgctacaaaatgatactttttatcagcttcgcataaaaccaaacgctctcgaactgattaaataa

SEQ ID NO: 268996 - DNA, 75 bp, synthetic construct
  source 1..75: mol_type = other DNA
cacatcgctggatgaaagataagtttgtgcgctgggataacccgccgacgctggacggtatgaccgggcacgccg

SEQ ID NO: 268997 - DNA, 75 bp, synthetic construct
  source 1..75: mol_type = other DNA
tgctggccgacaaaaacgaaaaaatcgactcgctttccacaaaactggagaagaaatcccgtattcagccgcctg

SEQ ID NO: 268998 - DNA, 75 bp, synthetic construct
  source 1..75: mol_type = other DNA
cggattaacggcgaccttcatggtagctattgctatgaaccctgcaatcagagaaaaatgcgattaattctgagc

SEQ ID NO: 268999 - DNA, 75 bp, synthetic construct
  source 1..75: mol_type = other DNA
ggttctatctggctactgggatgctgaaattccatcggacgagataaaaggtgaatggacttctgccgataaaaa

SEQ ID NO: 269000 - DNA, 75 bp, synthetic construct
  source 1..75: mol_type = other DNA
cggattaacaacgaccttcatggtagctattgctatgaaccctgcaatcagagaaaaatgcgattaattctgcga

SEQ ID NO: 269001 - DNA, 75 bp, synthetic construct
  source 1..75: mol_type = other DNA
tttgacctgccggaagagccaacaggctatgccgcgccttcatggctgactgagccgacgccacagattaacggg

SEQ ID NO: 269002 - DNA, 75 bp, synthetic construct
  source 1..75: mol_type = other DNA
ctgaagatgatggagacctagttgaattagctgatggcggtacgatcgccggtatgagccttgatgatattgatc

SEQ ID NO: 269003 - DNA, 75 bp, synthetic construct
  source 1..75: mol_type = other DNA
atctggtgctggtggcggaagtaaatgacgattacgacccttccaaagcgatcgactgcaataatgttccggtta

SEQ ID NO: 269004 - DNA, 75 bp, synthetic construct
  source 1..75: mol_type = other DNA
gctgatgaagtccctaccgctggaagcagccgatcgcgtgatggacatacaacagcgcgcaatgcaggcggttat

SEQ ID NO: 269005 - DNA, 75 bp, synthetic construct
  source 1..75: mol_type = other DNA
gacggaaaagtatggttgagcactcttgaaacgtgccgagcatatgaagaccctctacaaggtgatagaggtgaa

SEQ ID NO: 269006 - DNA, 75 bp, synthetic construct
  source 1..75: mol_type = other DNA
gtgctgctcgatgagcctggcgcgggtacgccggaggatggcgtgggcatcttcgttaactctgaaggtgatgag

SEQ ID NO: 269007 - DNA, 75 bp, synthetic construct
  source 1..75: mol_type = other DNA
atggctgcagaacgtcagccacaaagacgggaaagtgacgggcgatatgtacgttaaccgccagtacgccgaatc

SEQ ID NO: 269008 - DNA, 75 bp, synthetic construct
  source 1..75: mol_type = other DNA
cccccagcaaatggtgtacggagagagtcctcattgcatcaacagggctaaagcctggcaccatcgagcgggcca

SEQ ID NO: 269009 - DNA, 75 bp, synthetic construct
  source 1..75: mol_type = other DNA
cttgcgcttataaaaaatgccatacgaggaaacgacaatcctgatagatttaatattaataattcctcagttgct

SEQ ID NO: 269010 - DNA, 75 bp, synthetic construct
  source 1..75: mol_type = other DNA
caaagtcgttcagcgtctacctgtgcgtatcgaactggaccagaaacagctggagcaatacccgctgcgcattgg

SEQ ID NO: 269011 - DNA, 75 bp, synthetic construct
  source 1..75: mol_type = other DNA
gtgcagctcattgggcataattcctacgaacaaatccgcgcaacattattatcaatgattgactggaatgaagaa

SEQ ID NO: 269012 - DNA, 75 bp, synthetic construct
  source 1..75: mol_type = other DNA
aattagccaatatttttaataaaaaacataaagaacacatggatgatcctctgttccatctaatccgaagcaata

SEQ ID NO: 269013 - DNA, 75 bp, synthetic construct
  source 1..75: mol_type = other DNA
taacccgccgacgctggacggcatgaccggacacgccggatgtttgccaaactgcaaatgctggtctgaagtaca

SEQ ID NO: 269014 - DNA, 75 bp, synthetic construct
  source 1..75: mol_type = other DNA
aacgcactcgatggcgctgcactcgatggtctttatgcgcagtgccagacctctgtcggcctgaatggtgcattc

SEQ ID NO: 269015 - DNA, 75 bp, synthetic construct
  source 1..75: mol_type = other DNA
aagccatctggcctgacagcttcgtctatcgcgacggagagcaatatttcaaacaaaagtacctgattgacgatg

SEQ ID NO: 269016 - DNA, 75 bp, synthetic construct
  source 1..75: mol_type = other DNA
ccagcagatgcagaagaaagatggcggcggcgacccgggccaggctcaaattaactctgacgtgatcaccgcggc

SEQ ID NO: 269017 - DNA, 75 bp, synthetic construct
  source 1..75: mol_type = other DNA
ttgcgttaagtcagttgcttgctcctttaattcctttcgccagtcgatacgccgttgcttcgacagggatcattg

SEQ ID NO: 269018 - DNA, 75 bp, synthetic construct
  source 1..75: mol_type = other DNA
atggaacatatttctgttattcccgattacagacaagcctggaaagtggaacataaattatcggatattctactg

SEQ ID NO: 269019 - DNA, 75 bp, synthetic construct
  source 1..75: mol_type = other DNA
acagcaacaaaagaagcactaacgtttacctgacggcctcactggttgataaagcccggagtatggacatgaacc

SEQ ID NO: 269020 - DNA, 75 bp, synthetic construct
  source 1..75: mol_type = other DNA
aaattaaagaataaaaatgaaaatattcaattgctacttacattagaaaaaaaatttcatccagatcaaattgca

SEQ ID NO: 269021 - DNA, 75 bp, synthetic construct
  source 1..75: mol_type = other DNA
gtggtacaaaactggccgctgctctggttgacgacaaacttaatatttctgcccggcgtgagatccccacgccgg

SEQ ID NO: 269022 - DNA, 75 bp, synthetic construct
  source 1..75: mol_type = other DNA
taccctgaggtttactatgtcccggtagctcccgctgtatatcgccataattcggggatgttgggagcaacgatg

SEQ ID NO: 269023 - DNA, 75 bp, synthetic construct
  source 1..75: mol_type = other DNA
cgcctcctcaatctataaagcgtatggcgataacccggataactcaaacggtattattggcagtaactcttcggg

SEQ ID NO: 269024 - DNA, 75 bp, synthetic construct
  source 1..75: mol_type = other DNA
gctcctgcgctatcagcgtcgctattgggcaactcgcttacagcaaatgcggcaagcggtgtaggtgtagagatc

SEQ ID NO: 269025 - DNA, 75 bp, synthetic construct
  source 1..75: mol_type = other DNA
atgtatagctcacatcagaaacctacaccatcagatattggagcgctgccaacgactggagggactatttcaggt

SEQ ID NO: 269026 - DNA, 75 bp, synthetic construct
  source 1..75: mol_type = other DNA
atgaaagtaagaaacccagaacagattagtatctctgctagtaataccactaaagatccaggccttactaattct

SEQ ID NO: 269027 - DNA, 75 bp, synthetic construct
  source 1..75: mol_type = other DNA
aatcagcaggtttggcgcgtgagatctataaaatgcttgcgcgaaagcatgagtttctcatctgcgataacattc

SEQ ID NO: 269028 - DNA, 75 bp, synthetic construct
  source 1..75: mol_type = other DNA
ggaacgcaagaagtggcaaccatccagccgcatcagttccggtgaacgggccaagcgccaggcagtgaagcgcgg

SEQ ID NO: 269029 - DNA, 75 bp, synthetic construct
  source 1..75: mol_type = other DNA
ggttcagcagggtttcagtacagcggcgtacatttctatgagcgtagagagtcacagaagtacaagaaattcgtt

SEQ ID NO: 269030 - DNA, 75 bp, synthetic construct
  source 1..75: mol_type = other DNA
aggaggggcttcagactgttctcaatggcggaaatgtctccgggactcacattagcggaggtgagcagaacattt

SEQ ID NO: 269031 - DNA, 75 bp, synthetic construct
  source 1..75: mol_type = other DNA
cgatcattaatggtggggaacaatacatttccagtgggggaagtgctattaacactattcttgatggctaccaga

SEQ ID NO: 269032 - DNA, 75 bp, synthetic construct
  source 1..75: mol_type = other DNA
gtggtggatttgcccctatatttccagacatctgttatcacttaacccattacaagcccgctgccgcagatattc

SEQ ID NO: 269033 - DNA, 75 bp, synthetic construct
  source 1..75: mol_type = other DNA
ctgtatatgtattgaaaacattaaaacaattggattgttacttggataaatggcataatgaattatgtgggcggc

SEQ ID NO: 269034 - DNA, 75 bp, synthetic construct
  source 1..75: mol_type = other DNA
caaaaaaatcatccgccacgtaagcctgtatatgtattgaaaacattaaaacaattggattgttacttggataaa

SEQ ID NO: 269035 - DNA, 75 bp, synthetic construct
  source 1..75: mol_type = other DNA
aatgtggagctggaaaaatggctgtgttacggcattgaacatatccaggactggtcggcaaacctggtacgcgat

SEQ ID NO: 269036 - DNA, 75 bp, synthetic construct
  source 1..75: mol_type = other DNA
atgcgtggaactcaatcctgagtacgtaatgatcgggaagagggtactaccagaggcagaatggatcactggtaa

SEQ ID NO: 269037 - DNA, 75 bp, synthetic construct
  source 1..75: mol_type = other DNA
cctgaaattttagcatgggattttgtacttgatgctgactgtactggtgactgtattgaactatgtgctggtatc

SEQ ID NO: 269038 - DNA, 75 bp, synthetic construct
  source 1..75: mol_type = other DNA
cctgagatgcttgcatgggatttcatacttgatgctggctgtactggtaaatgtattgaactatgtgctggtatc

SEQ ID NO: 269039 - DNA, 75 bp, synthetic construct
  source 1..75: mol_type = other DNA
aatatctgaaattatgcgggtggcttttttctttctttgcactgatgagcacagagatacagggctaaatattct

SEQ ID NO: 269040 - DNA, 75 bp, synthetic construct
  source 1..75: mol_type = other DNA
aaggataactactggcataaggacgatagcgcctggagtgacgaggtggatcggaaggacaagagttttgcagga

SEQ ID NO: 269041 - DNA, 75 bp, synthetic construct
  source 1..75: mol_type = other DNA
gcaggattttactattcggcatggtgtttctgctgttatctggttgtgataataaactggaagaattaaaactgg

SEQ ID NO: 269042 - DNA, 75 bp, synthetic construct
  source 1..75: mol_type = other DNA
accaggcagaaagcgttaagcgcgcctgcatgcccccagtagcaaagcacagccagaccaaaaccaaccagccac

SEQ ID NO: 269043 - DNA, 75 bp, synthetic construct
  source 1..75: mol_type = other DNA
accaggccgaaagcgttaagcgcgccagtctgccgccaatagcaaagcacagccagaccaaaaccaaccagccaa

SEQ ID NO: 269044 - DNA, 75 bp, synthetic construct
  source 1..75: mol_type = other DNA
ctgcacagcttgacgcccgccagccggttgcggctctgaccactcttcagaccgacaccgtaaccgtgccggata

SEQ ID NO: 269045 - DNA, 75 bp, synthetic construct
  source 1..75: mol_type = other DNA
gacaaaaacagtgaagttctttgttgcagtaatatttggtatccagtatatcgtcctcatcaagcagatttgtaa

SEQ ID NO: 269046 - DNA, 75 bp, synthetic construct
  source 1..75: mol_type = other DNA
ataaagcgccggctcgtgaaaaagccctgaaactgctggagcgtgtcgggctttctgctcacgccaataagtttc

SEQ ID NO: 269047 - DNA, 75 bp, synthetic construct
  source 1..75: mol_type = other DNA
aaagggggatatggtgtgtatattttcgtagccaacgcgcgtacaagtggtagttcaaattccgatttatcggta

SEQ ID NO: 269048 - DNA, 75 bp, synthetic construct
  source 1..75: mol_type = other DNA
cgtgcttgtgtcaggtattctgtgcgcattcactaaaaaaacgcgtaacttcgccagttttactcgcgggtgctg

SEQ ID NO: 269049 - DNA, 75 bp, synthetic construct
  source 1..75: mol_type = other DNA
cagcatttatcttgaagatacccccagggctgtggggctcattgcattaatggagccagacacgtcagaaaaata

SEQ ID NO: 269050 - DNA, 75 bp, synthetic construct
  source 1..75: mol_type = other DNA
cagccggggatgcctcattgggacacgctcaagatctggatgctacagcaccctgagctacgtcagacaatcgag

SEQ ID NO: 269051 - DNA, 75 bp, synthetic construct
  source 1..75: mol_type = other DNA
tgcgtccgaagtggaaccctccggccattgaacacctgcgcaataacgagtttccctggttttccccggtgattg

SEQ ID NO: 269052 - DNA, 75 bp, synthetic construct
  source 1..75: mol_type = other DNA
atgtcgttgcgcctgccagatggaatgccaataattcaccatatcctattcttcagaattggaaagctattcatg

SEQ ID NO: 269053 - DNA, 75 bp, synthetic construct
  source 1..75: mol_type = other DNA
gcgagacaatctcaaggatcaatacaatgaggaagccttccagtttcatgattgtaatgccaaacatttcacctg

SEQ ID NO: 269054 - DNA, 75 bp, synthetic construct
  source 1..75: mol_type = other DNA
aaagataaagatggtgatggtgttcatattaataatggttcaagcggtggcggtgatttcgtttttaaaacagat

SEQ ID NO: 269055 - DNA, 75 bp, synthetic construct
  source 1..75: mol_type = other DNA
cgtgtatgtggatggcgttgccgcctcgatggcatctgtgattgcgatggccggtgatacggtcattatgccgga

SEQ ID NO: 269056 - DNA, 75 bp, synthetic construct
  source 1..75: mol_type = other DNA
accctgaagacggccctgatggttgacggaaagaaagtggcaatcagcgccagacagcagggtgaggatatggtg

SEQ ID NO: 269057 - DNA, 75 bp, synthetic construct
  source 1..75: mol_type = other DNA
atgaaaaagaaaatgatgatagctggcctgctgtttactgcattcggttttcagtgtgttcaggcaaatgaatac

SEQ ID NO: 269058 - DNA, 75 bp, synthetic construct
  source 1..75: mol_type = other DNA
tttcgcgcctgccggcaggcacgtgaagcatcagagtatttactgacgctgcggacttcgcaggcgcgggtcgca

SEQ ID NO: 269059 - DNA, 75 bp, synthetic construct
  source 1..75: mol_type = other DNA
gccgtcagagttgaccgaatcagctatattattacgtgatatccaaatatatttggagtcaccatcttcgaattt

SEQ ID NO: 269060 - DNA, 75 bp, synthetic construct
  source 1..75: mol_type = other DNA
gttattcgattcttatttcagagataataagctttattttattaattttttggacgataaaaaataatttattga

SEQ ID NO: 269061 - DNA, 75 bp, synthetic construct
  source 1..75: mol_type = other DNA
tcaataacgatccgaatttcagcacaactatcaacaatgccctggctctcaaagcgcctttggcaagccctgcat

SEQ ID NO: 269062 - DNA, 75 bp, synthetic construct
  source 1..75: mol_type = other DNA
atccaataccttggtttaagagaactcggtaccagcggtgaaaagatccccctgttgagtacggctaacacatgg

SEQ ID NO: 269063 - DNA, 75 bp, synthetic construct
  source 1..75: mol_type = other DNA
ctgaatgagcttgcagcagcattgggcaatgacccgaactttgcgacaaccatgacaaatgcgctggcagggaaa

SEQ ID NO: 269064 - DNA, 75 bp, synthetic construct
  source 1..75: mol_type = other DNA
caaaccctacctgaccccagacgggcttactcccctcggcgtagagatgcgggatgatgtaaaagtgccggggct

SEQ ID NO: 269065 - DNA, 75 bp, synthetic construct
  source 1..75: mol_type = other DNA
ctgaccccagacgggcttactcccctcggcgaagagatgcgggataatgtaaaagtgccggggctcactgttgtg

SEQ ID NO: 269066 - DNA, 75 bp, synthetic construct
  source 1..75: mol_type = other DNA
agaatacgcatcacttcgttgtaaaatctttgaatggtgcgatgaatatcttgagaaaacatgtacgaaaagtaa

SEQ ID NO: 269067 - DNA, 75 bp, synthetic construct
  source 1..75: mol_type = other DNA
aagcatcctcggcacgattttgcaggaaaacggggtgaccgaatggagaccgctgttcagcgagcctcatccttc

SEQ ID NO: 269068 - DNA, 75 bp, synthetic construct
  source 1..75: mol_type = other DNA
catggagtacatgttcagagaaagataagttaattctcaagcaactagctggctatacagactattctcaagttg

SEQ ID NO: 269069 - DNA, 75 bp, synthetic construct
  source 1..75: mol_type = other DNA
atcccccgtgagcaggcattactgcgcgagcacgaggtgattgtctttcagcatcctctttatacctatagctgc

SEQ ID NO: 269070 - DNA, 75 bp, synthetic construct
  source 1..75: mol_type = other DNA
aagcatcctcggcacgattttgcaggaaaacggggtgaccgattggaggccgctgttcagcgagccgcatccttc

SEQ ID NO: 269071 - DNA, 75 bp, synthetic construct
  source 1..75: mol_type = other DNA
aagcatcctcggcacgattttgcaggaaaacggggtgaccgattggagcccgctgttcagcgagccccatccttc

SEQ ID NO: 269072 - DNA, 75 bp, synthetic construct
  source 1..75: mol_type = other DNA
aagcatcctcggcacgattttgcaggaaaacggggtgaccgattggagaccgctgttcagcgagccacatccttc

SEQ ID NO: 269073 - DNA, 75 bp, synthetic construct
  source 1..75: mol_type = other DNA
gaaacacgcggctcaggggctggaagagaagaaacaaatcctgtatctgctggggcctgtgggtggggtaaatca

SEQ ID NO: 269074 - DNA, 75 bp, synthetic construct
  source 1..75: mol_type = other DNA
gcacagggatacagggttaaatattcttgatatcgccgctaactatgctgacttcgtaacggaagcagcgttaag

SEQ ID NO: 269075 - DNA, 75 bp, synthetic construct
  source 1..75: mol_type = other DNA
gcatgtggccggataaccgtatcgccccgtgacgcgcactatctttaccggtatgaccgtcacggcaggctgaca

SEQ ID NO: 269076 - DNA, 75 bp, synthetic construct
  source 1..75: mol_type = other DNA
gggctttcgaatttaacaccagcaaatcattatgctgtagttgcaagcctcagaggacaagccatcatcatagat

SEQ ID NO: 269077 - DNA, 75 bp, synthetic construct
  source 1..75: mol_type = other DNA
atgcatcatattaaaacagccgcagatcttaattgttttttaaattcaatggttgccgtttcgcagccaactgtt

SEQ ID NO: 269078 - DNA, 75 bp, synthetic construct
  source 1..75: mol_type = other DNA
aatggtatggtcactttcaggtgctgaccaactgctcaaccgaagtgaaaaaaggcgaagtggtggtggtttgtg

SEQ ID NO: 269079 - DNA, 75 bp, synthetic construct
  source 1..75: mol_type = other DNA
aagcatcctcggcacgattttgcaggaaaacggggtgaccgactggagcccgctgttcagcgagcctcatccttc

SEQ ID NO: 269080 - DNA, 75 bp, synthetic construct
  source 1..75: mol_type = other DNA
cgggagattgatgctgaactagaaaatttatcatccctttatcagataaaaatagaatcattagcactaccaact

SEQ ID NO: 269081 - DNA, 75 bp, synthetic construct
  source 1..75: mol_type = other DNA
actacttcattgaatacactggatccattaatacttaatcaggaattagtgcaaatcatttcaaataaaaaaaat

SEQ ID NO: 269082 - DNA, 75 bp, synthetic construct
  source 1..75: mol_type = other DNA
cattaatacttaatcaggaattagtgcaaatcatttcaaataaaaaaaatcgatggtctctatacctatccgatg

SEQ ID NO: 269083 - DNA, 75 bp, synthetic construct
  source 1..75: mol_type = other DNA
tgactacggcgcacgggcaacccgggcaaacttcacgctggattttgtgcattaccgggagcaaatcaacgcccg

SEQ ID NO: 269084 - DNA, 75 bp, synthetic construct
  source 1..75: mol_type = other DNA
tataaaggcttagatgagttggtatcaccaaaacatagccgatttaaggattactgtgcgtactttgttaatata

SEQ ID NO: 269085 - DNA, 75 bp, synthetic construct
  source 1..75: mol_type = other DNA
gcatcacaagaaaattgaagctctgggagttagcctcctggagttcgtcgtatacacagggcggcttaatcgccg

SEQ ID NO: 269086 - DNA, 75 bp, synthetic construct
  source 1..75: mol_type = other DNA
gcatcacaagaaaattgaagctctgggagtcagcctcctggagttcgtcgtcaaaactggccgccttaacgggcg

SEQ ID NO: 269087 - DNA, 75 bp, synthetic construct
  source 1..75: mol_type = other DNA
aagcatcctcggcacgattttgcaggaaaacggggtgaccgagtggaggccgctgttcagcgagcctcatccttc

SEQ ID NO: 269088 - DNA, 75 bp, synthetic construct
  source 1..75: mol_type = other DNA
tctgcgtgtgtgggttcgtcagcatgagcgggataccgggagtggtgatggtggactcaccaccgctgaacgtca

SEQ ID NO: 269089 - DNA, 75 bp, synthetic construct
  source 1..75: mol_type = other DNA
taaagtatttacgcttagaggcggaactctaaatatcaatattcctgggcgtagcgctcttcttttagggaaaac

SEQ ID NO: 269090 - DNA, 75 bp, synthetic construct
  source 1..75: mol_type = other DNA
atatcactttaaccgctgcgcatgttgctgcttttgccagaagagcaacggatacgtatgccgatgcggatgggg

SEQ ID NO: 269091 - DNA, 75 bp, synthetic construct
  source 1..75: mol_type = other DNA
aggttacattacgtattcgtacctggtggggcatcgtcatttgtttttcactggtgatttcaggtccacgctgga

SEQ ID NO: 269092 - DNA, 75 bp, synthetic construct
  source 1..75: mol_type = other DNA
ttaaatgagaaaaagttttatcgcgatatgatcaagctcgctgattctgaataccgtaagcatctgaaaaagtaa

SEQ ID NO: 269093 - DNA, 75 bp, synthetic construct
  source 1..75: mol_type = other DNA
cctgcgcgccgtggcattgtattatgtgcgggtgataaaacggggttaaatgagaaaaagttttatcgcgatatg

SEQ ID NO: 269094 - DNA, 75 bp, synthetic construct
  source 1..75: mol_type = other DNA
tggtttatcattctatattttttgtttttttaggagaatatctttcttattatatgagagaaatgctcctttcat

SEQ ID NO: 269095 - DNA, 75 bp, synthetic construct
  source 1..75: mol_type = other DNA
gacctgatgaaaattgaatatgtgtaccagagtgcggaacagttacgtaatgccgatgcgttaaccctgcaggca

SEQ ID NO: 269096 - DNA, 75 bp, synthetic construct
  source 1..75: mol_type = other DNA
acatccacacgcattatattcaatgaaaaagggaataagggctcctcagtatcatttgtaaataacacaaacaaa

SEQ ID NO: 269097 - DNA, 75 bp, synthetic construct
  source 1..75: mol_type = other DNA
gatggcgttattgatacacatgacgggaaccatgctgacggctacgaaaaggtctgcgctgtcaccaaggctgcc

SEQ ID NO: 269098 - DNA, 75 bp, synthetic construct
  source 1..75: mol_type = other DNA
tggtactaattctgccaaagtaaatcttacattacgtggagatagtcgttctgaagatcctgaatctcgctatct

SEQ ID NO: 269099 - DNA, 75 bp, synthetic construct
  source 1..75: mol_type = other DNA
cccaagactcagttttaataattcaacgaaacagactctgttatggctggttgctattaagtaaatatctttcca

SEQ ID NO: 269100 - DNA, 75 bp, synthetic construct
  source 1..75: mol_type = other DNA
ggtcgaaagcttcaatgactctcatgttgaaagagatgtccaaccttatcaatgatgagggggtaatgactccaa

SEQ ID NO: 269101 - DNA, 75 bp, synthetic construct
  source 1..75: mol_type = other DNA
gttcccacttaaagcccttatgactttacttggtgtgatccttcttatttctgccatcaaaactttcaaacacac

SEQ ID NO: 269102 - DNA, 75 bp, synthetic construct
  source 1..75: mol_type = other DNA
tgccgaaactcaaggatcatttccgtcgccagcgcgaggcgttctatgaggctgagtcactgcgcgtcttcgcac

SEQ ID NO: 269103 - DNA, 75 bp, synthetic construct
  source 1..75: mol_type = other DNA
ctgctgagagggcattacgcccaacattatcccctctattttcatactcccttccgttatcgaaccttgagaact

SEQ ID NO: 269104 - DNA, 75 bp, synthetic construct
  source 1..75: mol_type = other DNA
tgggaatgctaagtggggaagagaaagaatactgtttttctatagctcaattttttgttctaccttcatacactg

SEQ ID NO: 269105 - DNA, 75 bp, synthetic construct
  source 1..75: mol_type = other DNA
ttaacttctactaatacaccatggaaagatgttaataccaataatgcaggtgtatgtttcgatttatcaactgaa

SEQ ID NO: 269106 - DNA, 75 bp, synthetic construct
  source 1..75: mol_type = other DNA
ccagttcagtgatttcagcattgaaaaatgccaaagtttggcatctggcattaatctacggcaccatccagatat

SEQ ID NO: 269107 - DNA, 75 bp, synthetic construct
  source 1..75: mol_type = other DNA
ctggagtcgctggcgctggtcggtttgattctacccggtacggtgctgatggcggggctgggggcgctgattggc

SEQ ID NO: 269108 - DNA, 75 bp, synthetic construct
  source 1..75: mol_type = other DNA
aaccgcctgcccgacccggagctgcacccggacagcaccctcagcatgtggccggataaccgtatcgcccgtgac

SEQ ID NO: 269109 - DNA, 75 bp, synthetic construct
  source 1..75: mol_type = other DNA
atgaagataatacaaaaaaaatcatttaaattttcacaatacagaatacagaattctggaggatggtgctacggg

SEQ ID NO: 269110 - DNA, 75 bp, synthetic construct
  source 1..75: mol_type = other DNA
ttttctttggcctttgcctttttgctcacatgttctttccggccttatcccctgattctgtggataaccgtatcg

SEQ ID NO: 269111 - DNA, 75 bp, synthetic construct
  source 1..75: mol_type = other DNA
attttccaagattgtccgtcggaatcaattgattttgcggttatggaaaaacaaaaaattgcattgttcgtccag

SEQ ID NO: 269112 - DNA, 75 bp, synthetic construct
  source 1..75: mol_type = other DNA
tatctgatggaagagctgttgtgattgatggatgtaaatgtctgtgtgggtgtaaggttatatccagtgcaccgg

SEQ ID NO: 269113 - DNA, 75 bp, synthetic construct
  source 1..75: mol_type = other DNA
gtctatatggctaaggaaggtgcgaataagcaggtcatttcttcccaagctgactcgctgattaaaatttcgcgg

SEQ ID NO: 269114 - DNA, 75 bp, synthetic construct
  source 1..75: mol_type = other DNA
cgacaaaaacaggcgcaggaactgatcgattatactttcagtgagcgtcagaaagtcagtgcgcgcttacaaact

SEQ ID NO: 269115 - DNA, 75 bp, synthetic construct
  source 1..75: mol_type = other DNA
agttagttaaaacgcttttacaggacgtcgcacgggagcgagggcacgcgcttacggcaagaataaataaaacag

SEQ ID NO: 269116 - DNA, 75 bp, synthetic construct
  source 1..75: mol_type = other DNA
caaagcgggaacccgtacgcgtaaaaattgacgggtttgtatataggatttggattcttgtaaaaaataacgatt

SEQ ID NO: 269117 - DNA, 75 bp, synthetic construct
  source 1..75: mol_type = other DNA
catgtgttgattaccgatctctccatgcctggcgataagtacggcgatggcattaccttaatcaagtacatcagc

SEQ ID NO: 269118 - DNA, 75 bp, synthetic construct
  source 1..75: mol_type = other DNA
gatggttatcgtgtctggggtaatgactccaacttattgatagtgttttatgttcagataatgcccgatgacttt

SEQ ID NO: 269119 - DNA, 75 bp, synthetic construct
  source 1..75: mol_type = other DNA
cggcctacttgctggcctcggaagtgagtgcccttcttttctatatgccggatcagcgtcaccatatgctgttcg

SEQ ID NO: 269120 - DNA, 75 bp, synthetic construct
  source 1..75: mol_type = other DNA
gcagatgctacaggacccgtggggccgtcgctacctgatgatcgctcagcagttcggtagcctgtggggcttgtc

SEQ ID NO: 269121 - DNA, 75 bp, synthetic construct
  source 1..75: mol_type = other DNA
cggataacgcccaactggaactgaaatataaaaaaggcaaaacgccgctcagtcatcgtcgctggccatcaactt

SEQ ID NO: 269122 - DNA, 75 bp, synthetic construct
  source 1..75: mol_type = other DNA
tatttgcagcttatcgcagaatataaggaagaaataaaatttgcttcctctttgcaagaggatttacgtaaagaa

SEQ ID NO: 269123 - DNA, 75 bp, synthetic construct
  source 1..75: mol_type = other DNA
atctctcctttgcggttggtggcgtcgatcgtcacatctttgccaaatacgccgccggtattgatgccgtgcgtg

SEQ ID NO: 269124 - DNA, 75 bp, synthetic construct
  source 1..75: mol_type = other DNA
ggcgtaccgtctgcgacgagctgggcgttcttggcaagcccgccaataccaaagtcggcatcactattgataccg

SEQ ID NO: 269125 - DNA, 75 bp, synthetic construct
  source 1..75: mol_type = other DNA
gtcatgatgcagggcaaaagagaggattgagtaattttaaaacgcctagcaacaagtcaaaattgtttattacag

SEQ ID NO: 269126 - DNA, 75 bp, synthetic construct
  source 1..75: mol_type = other DNA
atgttgagaccaaaggaaaacgtacttattctatgaataacgatatgagtgatttatataatgtaatatcacggg

SEQ ID NO: 269127 - DNA, 75 bp, synthetic construct
  source 1..75: mol_type = other DNA
catacattagatacaattgcttgtattcgcgctgaggctaaattaaataaaccatctattgagccgggcaataac

SEQ ID NO: 269128 - DNA, 75 bp, synthetic construct
  source 1..75: mol_type = other DNA
tcttgatagcttttcagatgctttatcacgtccattttttagtttgaacctacctgataaattgcttctggatat

SEQ ID NO: 269129 - DNA, 75 bp, synthetic construct
  source 1..75: mol_type = other DNA
cgggagagcagcgtgcaattggtgaacgtatgcttgtaaagtcagttaatggttatggttgtattggttatggtg

SEQ ID NO: 269130 - DNA, 75 bp, synthetic construct
  source 1..75: mol_type = other DNA
gttgtgcccattgggcttggttttggtgcgctgtttgcgctggcaataacggcgctgtggatctggcaacgccgt

SEQ ID NO: 269131 - DNA, 75 bp, synthetic construct
  source 1..75: mol_type = other DNA
taatgataggcatcccggtcgtgcccattggcattggcttcggtgcgctgtttgcgctggcaataacggcgctgt

SEQ ID NO: 269132 - DNA, 75 bp, synthetic construct
  source 1..75: mol_type = other DNA
gcgacccgggccgccggggatacacaaaacacatgctgcgtctgcggcgggccggagagataaacggagaacatg

SEQ ID NO: 269133 - DNA, 75 bp, synthetic construct
  source 1..75: mol_type = other DNA
ggggtgctcccgaagaggtgcgggaactcatcgatgcgacgccgtttgcgaaaaaatacacctcgggggttctgt

SEQ ID NO: 269134 - DNA, 75 bp, synthetic construct
  source 1..75: mol_type = other DNA
tcatggcccaactgtcatgatcaccagtttcgatgagcaatcccagcggcgtaacattatggcagcagcctggtc

SEQ ID NO: 269135 - DNA, 75 bp, synthetic construct
  source 1..75: mol_type = other DNA
tcaagattgaaaatttcaagccatttgaaaatacatctattgattttcgatctgcctccatgattaccttggatg

SEQ ID NO: 269136 - DNA, 75 bp, synthetic construct
  source 1..75: mol_type = other DNA
ttaacgtcgatattgtggcgaaagtgtatcgcttcccgaatgaaggcgaaacgttagtggccagggaaactacca

SEQ ID NO: 269137 - DNA, 75 bp, synthetic construct
  source 1..75: mol_type = other DNA
agtgtttttattggaaatggttacgaaacacggattatttttgatcagcaatatccagatagtctgattaagtgg

SEQ ID NO: 269138 - DNA, 75 bp, synthetic construct
  source 1..75: mol_type = other DNA
catcatatttcagccctggtatcagtagggctcgtcacacaaaaccgggagagtcgaacgctcatgtgtgtctct

SEQ ID NO: 269139 - DNA, 75 bp, synthetic construct
  source 1..75: mol_type = other DNA
cactaaaagagctgggtcacccgacccgtttgttcatattcaaacatcttgtaaaagctggagaacaaggtttgc

SEQ ID NO: 269140 - DNA, 75 bp, synthetic construct
  source 1..75: mol_type = other DNA
gtgcagctaagaacgcaaagcttgtaaatttactaaatgctcatgcagagttgctgcggcgacaccaagaatgtg

SEQ ID NO: 269141 - DNA, 75 bp, synthetic construct
  source 1..75: mol_type = other DNA
aacaacgccatttaatgaggttttttacaaaccagaaatgttaaatggttcttttgttcatatcgacaactggga

SEQ ID NO: 269142 - DNA, 75 bp, synthetic construct
  source 1..75: mol_type = other DNA
actgggcgtcgagaacgacatcgctctgctgaattatctctcttctgtgacgttaagcccggcagataaagagta

SEQ ID NO: 269143 - DNA, 75 bp, synthetic construct
  source 1..75: mol_type = other DNA
tgcctggagataaatacggtgacgggatcaccttgatcaaatacatcaagcgccatttcccaagcctgtcgatca

SEQ ID NO: 269144 - DNA, 75 bp, synthetic construct
  source 1..75: mol_type = other DNA
ctggtgctgcctatggcgcttcagccgggagcatcctaaacggcatgttgaatgcctacagccccgagcagtgga

SEQ ID NO: 269145 - DNA, 75 bp, synthetic construct
  source 1..75: mol_type = other DNA
aagatcaaataataagcgagtcacttaatcaaataattcaaatgattcctgttgatgaaccgatgggaaacttta

SEQ ID NO: 269146 - DNA, 75 bp, synthetic construct
  source 1..75: mol_type = other DNA
atgcgtgatgatcgttttaattccctgaaacaggaattttccggcgtgtcttatgatgcgggtgatgcgctttta

SEQ ID NO: 269147 - DNA, 75 bp, synthetic construct
  source 1..75: mol_type = other DNA
ttaaacaagtatatctgtttcaaatatgcatcgacgagatttccaaccaaacttccagcgttgcaccttgattgg

SEQ ID NO: 269148 - DNA, 75 bp, synthetic construct
  source 1..75: mol_type = other DNA
gctatttgaatttagtcactctgcaccgttttatgtgtccagggcgattaaccaagccattctcaatttcagccc

SEQ ID NO: 269149 - DNA, 75 bp, synthetic construct
  source 1..75: mol_type = other DNA
gcagccgctgctatgcccacttccgtcaggataaaatcagtaaccaattaataaaatatatttgctttcgttatg

SEQ ID NO: 269150 - DNA, 75 bp, synthetic construct
  source 1..75: mol_type = other DNA
aaactcaatctgcaaaatgatctttcatattttcctgtgccattctttgatccgcgagataaccgtactaataca

SEQ ID NO: 269151 - DNA, 75 bp, synthetic construct
  source 1..75: mol_type = other DNA
tgatgaaatggtttcagaagcgaaactaaaacttgagtataccccatcgccgtcgttactccctgtccagtcaca

SEQ ID NO: 269152 - DNA, 75 bp, synthetic construct
  source 1..75: mol_type = other DNA
acaactggggaagaaaacgctggcggaaataactcttaacccattgtatttttctgattttaatcgcttgcgcct

SEQ ID NO: 269153 - DNA, 75 bp, synthetic construct
  source 1..75: mol_type = other DNA
ggtactctacatccaacaatgtgagagagctgttgcgacaggcgatgtatgagcaagcaatggtgacttcctcca

SEQ ID NO: 269154 - DNA, 75 bp, synthetic construct
  source 1..75: mol_type = other DNA
gtattagcgggaccgcaaatagtgccggtgcgcaccaacacaagagttccggtgcatttggtggcacgaacacga

SEQ ID NO: 269155 - DNA, 75 bp, synthetic construct
  source 1..75: mol_type = other DNA
ttatatgattattttgtatctggttatttaagaagcgaaatatgtgatatgcatggggtttcgcaaagtaattta

SEQ ID NO: 269156 - DNA, 75 bp, synthetic construct
  source 1..75: mol_type = other DNA
catatcttaatctacttaccagtaagcattcgatgatttaccttagtagaggaggggtgggccatgaccattttt

SEQ ID NO: 269157 - DNA, 75 bp, synthetic construct
  source 1..75: mol_type = other DNA
gtacctatgtttttggcgattcagcatattctcgcggcttagattattatcgccacccgccagggcaagttttgc

SEQ ID NO: 269158 - DNA, 75 bp, synthetic construct
  source 1..75: mol_type = other DNA
atcaaaagcggggctttggtcaggacctactatgtgatttttttgaacatgtaaaaataattcaccaggcattac

SEQ ID NO: 269159 - DNA, 75 bp, synthetic construct
  source 1..75: mol_type = other DNA
cggcgcaccaatcccgtggccatcagataccgttccgtctggttatgccctgatgcaggggcagacttttgacaa

SEQ ID NO: 269160 - DNA, 75 bp, synthetic construct
  source 1..75: mol_type = other DNA
ccggcgctcacgagagatatgaggaaaaaggtgcaatagagcactggagaaagctggttatcgcctaccgagcag

SEQ ID NO: 269161 - DNA, 75 bp, synthetic construct
  source 1..75: mol_type = other DNA
cataattttcgtagtgttaatatctcaaattatttttctctactacacaggtattggtaaagttactgttaatgt

SEQ ID NO: 269162 - DNA, 75 bp, synthetic construct
  source 1..75: mol_type = other DNA
ttttatcattcatgatgttatatattcttactagtcttatttcagtttatcaaacattgaatcaagatttatttc

SEQ ID NO: 269163 - DNA, 75 bp, synthetic construct
  source 1..75: mol_type = other DNA
gctgcgcccaattcgattttatgaatctgaacgacgtaattttctcggaacattattcagtgaaggtggtttacc

SEQ ID NO: 269164 - DNA, 75 bp, synthetic construct
  source 1..75: mol_type = other DNA
gggtaaaatgtacttcctggctaagtaactttgtgaatcttagagggttgagacaaccggatggacgtcctcttt

SEQ ID NO: 269165 - DNA, 75 bp, synthetic construct
  source 1..75: mol_type = other DNA
attctgggctcactggcgatggggatgatgtttgactcgcgtaatatcccggatgacttaatgactaacggtcag

SEQ ID NO: 269166 - DNA, 75 bp, synthetic construct
  source 1..75: mol_type = other DNA
aacagcccgatagagtggagatgttcgaggaagctatccaacgctttgacgaatggcgagcaacgccaaacttca

SEQ ID NO: 269167 - DNA, 75 bp, synthetic construct
  source 1..75: mol_type = other DNA
atgatggttgttaataaattggcttttgcgctggggttactattgactggcaactatgcacttgctcatgggcat

SEQ ID NO: 269168 - DNA, 75 bp, synthetic construct
  source 1..75: mol_type = other DNA
tgtggagtgctaatccactcaatacgctgaaaattgcgtggaatgcatccgatgagcaggggctttcttactttt

SEQ ID NO: 269169 - DNA, 75 bp, synthetic construct
  source 1..75: mol_type = other DNA
cgggcatcaagaacatcgccagcgccacggcgacgagcaacgccctgccgggcttctcggtcaaagatggggatc

SEQ ID NO: 269170 - DNA, 75 bp, synthetic construct
  source 1..75: mol_type = other DNA
cgcgggcgtcagcaccagcaaatccatcgatgtgaccgtgaccccgtcgaacgacccggtaagcgtggccgacgc

SEQ ID NO: 269171 - DNA, 75 bp, synthetic construct
  source 1..75: mol_type = other DNA
cccgcaagccttactggcgctcgccccgctccaggatcatttaccgcgactgcaacgataacgattgagatagta

SEQ ID NO: 269172 - DNA, 75 bp, synthetic construct
  source 1..75: mol_type = other DNA
tctgccactcgaacgccagcgggcgattgcaaatctggtatacggaggccgctttggcaacaagtcggctggtga

SEQ ID NO: 269173 - DNA, 75 bp, synthetic construct
  source 1..75: mol_type = other DNA
cggctggtatcagcgccgggctttctgcacgctggtttccgcacattgatgcggcaatgaaagaattcggcatta

SEQ ID NO: 269174 - DNA, 75 bp, synthetic construct
  source 1..75: mol_type = other DNA
gcggcgatgaaggaattcggcattacagcaccagcggatcaggcaatgtttatcgctcaggtaggccatgagtcg

SEQ ID NO: 269175 - DNA, 75 bp, synthetic construct
  source 1..75: mol_type = other DNA
tgtcagttcacaggatggcgttacgcaaagtaccgggatatttgttttataatgacctcatccgacccatcaaaa

SEQ ID NO: 269176 - DNA, 75 bp, synthetic construct
  source 1..75: mol_type = other DNA
gttgtggctgacgccgttgatttctgccgtcggcgtggtggcgctggtggtgttaattcgccacccgttgatgcc

SEQ ID NO: 269177 - DNA, 75 bp, synthetic construct
  source 1..75: mol_type = other DNA
gccacagacaaattggccaacaactcaattaccaccaggatatacttgtgcagaaccctatttattcccagacat

SEQ ID NO: 269178 - DNA, 75 bp, synthetic construct
  source 1..75: mol_type = other DNA
cggcgctacccagacgctggccccggtgagcgaagacaccagcgccgcagcgattaccggcgacaccattgccaa

SEQ ID NO: 269179 - DNA, 75 bp, synthetic construct
  source 1..75: mol_type = other DNA
cagccacttctcgctgaataaatccgtacagcctgcgcccgtgctggaaaacgcgccggaacgtccgccgcttaa

SEQ ID NO: 269180 - DNA, 75 bp, synthetic construct
  source 1..75: mol_type = other DNA
tcgatcagccgtattcgccgggtctgtttatcctgcccgcaatctacggcttgtacagcgaccagttctctcgca

SEQ ID NO: 269181 - DNA, 75 bp, synthetic construct
  source 1..75: mol_type = other DNA
ctacaccctgagcgacggcaacgacggcggcaccgccacgggcgaactgcgcctgctggtgaaccccgtagccga

SEQ ID NO: 269182 - DNA, 75 bp, synthetic construct
  source 1..75: mol_type = other DNA
atgagtagaatcaataaacagttaaatcattcgaataagaccatttacacatccgtatttattgaaagaatttca

SEQ ID NO: 269183 - DNA, 75 bp, synthetic construct
  source 1..75: mol_type = other DNA
gcatgatcagtaaaggcttgtttgaaatggctacgtcgattcgctatggcgaaaactacagtttgaacaccattc

SEQ ID NO: 269184 - DNA, 75 bp, synthetic construct
  source 1..75: mol_type = other DNA
ttaaatacaattaaaaagctgctacacagatttaagttcgacaaaccactagattatgagatcaaaggttacgga

SEQ ID NO: 269185 - DNA, 75 bp, synthetic construct
  source 1..75: mol_type = other DNA
atattaccgtcacgccggtgcaggacgcccatgacgacagccggacagcccatgcgggcgccccggtcacggtcg

SEQ ID NO: 269186 - DNA, 75 bp, synthetic construct
  source 1..75: mol_type = other DNA
tacggtgccgacggtgacctaccgggtggttgatggccgcaccaacggcgcgaccacggcgcagttgaagataac

SEQ ID NO: 269187 - DNA, 75 bp, synthetic construct
  source 1..75: mol_type = other DNA
attggcagccgcaccgacgccaacgccctgctgctggatgcaacggccaaagtccgctttgtacctgccgctgac

SEQ ID NO: 269188 - DNA, 75 bp, synthetic construct
  source 1..75: mol_type = other DNA
aaagatgacagcgccaccacccacgcaggcgtgccggtgacgattgatgcgatcggcaacgaccgcttcgttaac

SEQ ID NO: 269189 - DNA, 75 bp, synthetic construct
  source 1..75: mol_type = other DNA
gcgcacgatgattttacgtggactgcggaagacactaccctgacgcgcagcgccgccaccgggttgctggctaac

SEQ ID NO: 269190 - DNA, 75 bp, synthetic construct
  source 1..75: mol_type = other DNA
cgccacggtttatctgacgttgaccaacagcgcgccgacgctgccccactggacagcgattaacggtgaagactc

SEQ ID NO: 269191 - DNA, 75 bp, synthetic construct
  source 1..75: mol_type = other DNA
tttccggactggatgcggcccgtcagatgatgcgcctgcagaaagaaggcgatcgtgccctgaatatccgtccgg

SEQ ID NO: 269192 - DNA, 75 bp, synthetic construct
  source 1..75: mol_type = other DNA
gcgtgcggcgaaggcaacgattggtgacctggtctacaaggtgctgacggataacccgaaactgtccgacggtaa

SEQ ID NO: 269193 - DNA, 75 bp, synthetic construct
  source 1..75: mol_type = other DNA
tattctgctggatgtgtcgaacaaggggctgatccagggctgggaggaatcagaagaaaccttccagaagtggac

SEQ ID NO: 269194 - DNA, 75 bp, synthetic construct
  source 1..75: mol_type = other DNA
aagcaaagcgcgttggtctgaatggtttttcaaagctggataaagtaccggaaggcgcggaatataaatacatca

SEQ ID NO: 269195 - DNA, 75 bp, synthetic construct
  source 1..75: mol_type = other DNA
tgggaaaaccggtcattatgccggaaaactccttcatgatgattcataaaccatttggctttacgggcggtgatg

SEQ ID NO: 269196 - DNA, 75 bp, synthetic construct
  source 1..75: mol_type = other DNA
caattcaccgggtggcgatgtctttgaaggcatcgccatttttaatgcactgaaaacacatggtgcgtccattac

SEQ ID NO: 269197 - DNA, 75 bp, synthetic construct
  source 1..75: mol_type = other DNA
ggcggctgggggattaccgctcagcagttcgtctccgactgtaaggaagccggggtgtttgaggccagcgccgtc

SEQ ID NO: 269198 - DNA, 75 bp, synthetic construct
  source 1..75: mol_type = other DNA
cctaatgaaagcacacgtaaagcactggctgaaacactgcagtcagactcagcggccgcttacttcgaccaggtg

SEQ ID NO: 269199 - DNA, 75 bp, synthetic construct
  source 1..75: mol_type = other DNA
cttgttcgcgccgaaaggtgttcgacctgagacgttactccgacaggttaacaccgtctcgttaccggatagtgc

SEQ ID NO: 269200 - DNA, 75 bp, synthetic construct
  source 1..75: mol_type = other DNA
taacgatctgtttgccatgttcggtggtcgctatcagacgcttcaggcacagtgcgtggctgatcctgactgttc

SEQ ID NO: 269201 - DNA, 75 bp, synthetic construct
  source 1..75: mol_type = other DNA
ggataaagtcgaatcggtactgttgccagcctatgcgcagaaaaccggaaaaaccaccgatgaaattgccgccat

SEQ ID NO: 269202 - DNA, 75 bp, synthetic construct
  source 1..75: mol_type = other DNA
cctggcttatggtccataaaccgtggggcggtataaccggggattctgacgatatgcgggattatgctgactggc

SEQ ID NO: 269203 - DNA, 75 bp, synthetic construct
  source 1..75: mol_type = other DNA
tgttaatccctgcttatgccagaaaaacgggcaaatcagcacaggaaattaccgccatgctggaggatgaaacct

SEQ ID NO: 269204 - DNA, 75 bp, synthetic construct
  source 1..75: mol_type = other DNA
aaagcggtggcagaaaataccaccaagccgtacagcgatatcgcatttgctgaaaaaattacgccggttcgtact

SEQ ID NO: 269205 - DNA, 75 bp, synthetic construct
  source 1..75: mol_type = other DNA
atccgctgtgaagaacgtctggcgctgtcggtaaaacgcccggaggcgtttgtctatggctcctttacagcacct

SEQ ID NO: 269206 - DNA, 75 bp, synthetic construct
  source 1..75: mol_type = other DNA
gagcctccgacgttttccctgacgccggacgggaaactgacagcccgtaatgcggatatcagcgggaatattaat

SEQ ID NO: 269207 - DNA, 75 bp, synthetic construct
  source 1..75: mol_type = other DNA
aacatgggacatacctattaattccagaatcaaaggtgttcttcaatccacaaactaataatgtggttgtaattg

SEQ ID NO: 269208 - DNA, 75 bp, synthetic construct
  source 1..75: mol_type = other DNA
gttgcagtccaccgttgatgccgaaatgcgctacgggctgaagtatgcagaagagcaggaaattctcttcggtga

SEQ ID NO: 269209 - DNA, 75 bp, synthetic construct
  source 1..75: mol_type = other DNA
atgtctgatgtaaatgagatcctgaaaaaagtcagcgccagcattgaagaggcgaccggaaaattcaacgcgaaa

SEQ ID NO: 269210 - DNA, 75 bp, synthetic construct
  source 1..75: mol_type = other DNA
ggcatttactggcagttgtcgtccctgccggagggagtgacgctggcagaggaaggcaacgacatgctgatgtcc

SEQ ID NO: 269211 - DNA, 75 bp, synthetic construct
  source 1..75: mol_type = other DNA
tagtgcagtatttacaaaattggataataacatttactctcttgaggttgatagtttttgtttataccgagatta

SEQ ID NO: 269212 - DNA, 75 bp, synthetic construct
  source 1..75: mol_type = other DNA
gattttcatcgacaaaacctatacccctacagttggatcgctggctgatcgtaaaaagccgtgagagttggttat

SEQ ID NO: 269213 - DNA, 75 bp, synthetic construct
  source 1..75: mol_type = other DNA
gtatcgcgatgattaacccggagaacggcaacaccacgccgctgtttgtggcgcaggggaatcagctgttcatga

SEQ ID NO: 269214 - DNA, 75 bp, synthetic construct
  source 1..75: mol_type = other DNA
accgtcagccagagcacggaggaaaacgccaggcagatagcgcaggtccgccagtacgtggatgacaaagggagt

SEQ ID NO: 269215 - DNA, 75 bp, synthetic construct
  source 1..75: mol_type = other DNA
acttattcttcgcaatacgatgcggtgtatggtgcatacaagacgaaatccgcaaaaaaaatcttctttgtgccg

SEQ ID NO: 269216 - DNA, 75 bp, synthetic construct
  source 1..75: mol_type = other DNA
cgacggcgtactgatcaactacatcgccatttgtctggcttcggcacgtaaaaaacagggtaaagatgcgctggt

SEQ ID NO: 269217 - DNA, 75 bp, synthetic construct
  source 1..75: mol_type = other DNA
accggatgagacaaagccggtattacttcgtttttatgacccaaggaatatatgggattttctttctgttctgtc

SEQ ID NO: 269218 - DNA, 75 bp, synthetic construct
  source 1..75: mol_type = other DNA
actggaaaaattccgtcagcagggttttacacctgagcaggtgattcgacacagcatcgccaatgaataccaggg

SEQ ID NO: 269219 - DNA, 75 bp, synthetic construct
  source 1..75: mol_type = other DNA
gacaaggatgcggtggaaggagagtcagaggggttgctggcttcagagaaactcaaaaaagcttttatcaccgat

SEQ ID NO: 269220 - DNA, 75 bp, synthetic construct
  source 1..75: mol_type = other DNA
acgctcgaaaaatgtcatgcagtacttggtttgcagatgcctgatgaatttgctcaacgatttactcatatagcg

SEQ ID NO: 269221 - DNA, 75 bp, synthetic construct
  source 1..75: mol_type = other DNA
tattgacagaattctggtctcgtgcacccaaggtatttccagacagctctatcggatggacgttgagttcttcaa

SEQ ID NO: 269222 - DNA, 75 bp, synthetic construct
  source 1..75: mol_type = other DNA
gcctgcgatccgctgtcttatctgggctgtaatgacgcgctgatcgaggaaaccgtggcggctttcgacgattac

SEQ ID NO: 269223 - DNA, 75 bp, synthetic construct
  source 1..75: mol_type = other DNA
tagtgcaactgggtgcagcgctgaaaggcatggcgctggagcaccggcacacggtgatggtggccagaaccaact

SEQ ID NO: 269224 - DNA, 75 bp, synthetic construct
  source 1..75: mol_type = other DNA
gcagcgttcatgtttgtgacgctcgtagagtcctacgtgatcatcaacgcatctgtgctgttctttggctttggt

SEQ ID NO: 269225 - DNA, 75 bp, synthetic construct
  source 1..75: mol_type = other DNA
atcaccttttaggcctggaagtgtatatatggtaagtgatgcagttatcgcaaaattatcaccacatacaaaaag

SEQ ID NO: 269226 - DNA, 75 bp, synthetic construct
  source 1..75: mol_type = other DNA
ttataggaatgccttcgcaactcttcactatggctcgttcttttaaagccgtagctaatggtaaaatttatatcg

SEQ ID NO: 269227 - DNA, 75 bp, synthetic construct
  source 1..75: mol_type = other DNA
tgttgcatgtgaccaggatgaagccagacagatttgcacagcatcaaatgcacctgctgcgcgtggcagacgata

SEQ ID NO: 269228 - DNA, 75 bp, synthetic construct
  source 1..75: mol_type = other DNA
agctcaacgatatggattcgggaacgaactttccttgtcttatgctgcagcacctgatcgccttgcgcgagggtt

SEQ ID NO: 269229 - DNA, 75 bp, synthetic construct
  source 1..75: mol_type = other DNA
cgcggtgagcccattgcgctggctacgtatggcgaactcttcagcattgatcgccagaccatcattaacgatgac

SEQ ID NO: 269230 - DNA, 75 bp, synthetic construct
  source 1..75: mol_type = other DNA
aatcggaaacctggctcagcggcgctgaagctgtggaaaagggctttgcagactccctcgaacccgaattacagg

SEQ ID NO: 269231 - DNA, 75 bp, synthetic construct
  source 1..75: mol_type = other DNA
gcaaacggtcagtgctggtacgaaatccgtgcacaggcaaccggacgggtggaaattttcctctatgacgtgatt

SEQ ID NO: 269232 - DNA, 75 bp, synthetic construct
  source 1..75: mol_type = other DNA
tatctggcggtactgcagcggaattttgtaattctgcggtggttgcgttgcaggctgctggcctggatgtctgtc

SEQ ID NO: 269233 - DNA, 75 bp, synthetic construct
  source 1..75: mol_type = other DNA
tctgccagcgtgcccggtgcagatgcgaacagcggcattattaacccgattcagaattttgccacggttctgtca

SEQ ID NO: 269234 - DNA, 75 bp, synthetic construct
  source 1..75: mol_type = other DNA
cagggcgtaaagccatgttgctgcaaaagtccggtagccgccgcctgaatattcgtccggcctttatgctgacac

SEQ ID NO: 269235 - DNA, 75 bp, synthetic construct
  source 1..75: mol_type = other DNA
aggagttgctcgactgcatttccaagcttcgggatgatgtaaatgcccttactgtcgcattttcatatctggcat

SEQ ID NO: 269236 - DNA, 75 bp, synthetic construct
  source 1..75: mol_type = other DNA
atcttgtgctattcgcaaaatctatggtaactctttaggcattccttcgaacaagatgcaagaaaagacaaaatg

SEQ ID NO: 269237 - DNA, 75 bp, synthetic construct
  source 1..75: mol_type = other DNA
cattaatacttaatcaggaattagtgcaaatcatttcaaataaaaaaatcgatggtctctatacctatccgatgg

SEQ ID NO: 269238 - DNA, 75 bp, synthetic construct
  source 1..75: mol_type = other DNA
gctatatactctaactatctggagaaaatgaaaacaaggcatgaagctgttttacgtttcttttcaagaattata

SEQ ID NO: 269239 - DNA, 75 bp, synthetic construct
  source 1..75: mol_type = other DNA
caaatagataacgatttaggcctgaatatcatctatttcctgcaacatggtcactggagggtaaatgaacatagt

SEQ ID NO: 269240 - DNA, 75 bp, synthetic construct
  source 1..75: mol_type = other DNA
ctaaaaaggtaatcgaccgctatgaagctacattcgatataaaagtacaaaaagactgtccgatagaagctattg

SEQ ID NO: 269241 - DNA, 75 bp, synthetic construct
  source 1..75: mol_type = other DNA
tggaagtggacggcctgccgccggaagcttttgcggtggtttcctttcatctgaaccagtcactctcttcgctct

SEQ ID NO: 269242 - DNA, 75 bp, synthetic construct
  source 1..75: mol_type = other DNA
aatggtgactcactgttgattaactggaactgtgcagcctcgaaatccccaccgaagacccctgatgaaaagcag

SEQ ID NO: 269243 - DNA, 75 bp, synthetic construct
  source 1..75: mol_type = other DNA
gctggtgctgacgaaggacggacaaatttttctcaacggcacaaaaattcatttgcagggtaaggagcaggttaa

SEQ ID NO: 269244 - DNA, 75 bp, synthetic construct
  source 1..75: mol_type = other DNA
taccgctccgtaattatctgtaccttcttgctgggtattattcagaccttcggtacggtgtgggctattccttta

SEQ ID NO: 269245 - DNA, 75 bp, synthetic construct
  source 1..75: mol_type = other DNA
gttacctttttcacccaatgccgcaacgttaggcttcgtcttctgtacttttggcaccattttttcgatggggat

SEQ ID NO: 269246 - DNA, 75 bp, synthetic construct
  source 1..75: mol_type = other DNA
ccagccgctgtatgacctggtgggtttcaagccacagacgtcagtgaaggaaggcgtgaaaaacttcgtcgagtg

SEQ ID NO: 269247 - DNA, 75 bp, synthetic construct
  source 1..75: mol_type = other DNA
taactaacgataaaataagaattatgagcgaaagcaaagaggatattaaacactattctctgatggattttatga

SEQ ID NO: 269248 - DNA, 75 bp, synthetic construct
  source 1..75: mol_type = other DNA
tgatcatgttattaaccaatctgttgcaataattccagcacttccgaaagaacagctattgatgttaaaaggatc

SEQ ID NO: 269249 - DNA, 75 bp, synthetic construct
  source 1..75: mol_type = other DNA
tcagtgccacttcgaagaaaatcgtgttctgcggcacattaactgcgggcagtttaaaaacagaaattaccgacg

SEQ ID NO: 269250 - DNA, 75 bp, synthetic construct
  source 1..75: mol_type = other DNA
acgtgtcatcagtctgactaacgagaacggcagccacagcgacttcagctacgatgcgctggaccggctggtaca

SEQ ID NO: 269251 - DNA, 75 bp, synthetic construct
  source 1..75: mol_type = other DNA
gcagagcgccgtcgtgacgggaccggcaggcgaggaaatcttctgtgatgaacatggccgcgtgcgggtgaaatt

SEQ ID NO: 269252 - DNA, 75 bp, synthetic construct
  source 1..75: mol_type = other DNA
gcgtgcgggtgaagttcaactgggaccgttataacccggcagaccaagacagttcgtgctggatccgtgtggcac

SEQ ID NO: 269253 - DNA, 75 bp, synthetic construct
  source 1..75: mol_type = other DNA
atgtctgaaatcacagtctcccgtccggaagtggtcaacggacatacggacgttatctgctcaacctcagtcagc

SEQ ID NO: 269254 - DNA, 75 bp, synthetic construct
  source 1..75: mol_type = other DNA
ctggtcaaatgtgacagatggggatttgggctgaactggggctggcaacgtgaccgactggcagacattgagcgc

SEQ ID NO: 269255 - DNA, 75 bp, synthetic construct
  source 1..75: mol_type = other DNA
atcactttcaagcgactggatctggtggataagatgaatgatatcgtggcgaagcactttccgtcagcgttatca

SEQ ID NO: 269256 - DNA, 75 bp, synthetic construct
  source 1..75: mol_type = other DNA
acgctcaggctcgtgatcagtggtacagaaatcttgggggggagaacattcctgcagtcagcgaagccaacattc

SEQ ID NO: 269257 - DNA, 75 bp, synthetic construct
  source 1..75: mol_type = other DNA
cggtaaatgtactcaggcagcattggctctggctgaactgtgctacaacaccctgcaggaagaaggcgaaaaagc

SEQ ID NO: 269258 - DNA, 75 bp, synthetic construct
  source 1..75: mol_type = other DNA
gccgattgcacaagagctgggaatggacccagtacatttcggtattatgatggtggccaacctttgtattgggct

SEQ ID NO: 269259 - DNA, 75 bp, synthetic construct
  source 1..75: mol_type = other DNA
cgtgtcttccgctctgccggtgtctcactgcactggcacaacattaatgctgataccaatgaagcccagcgtctg

SEQ ID NO: 269260 - DNA, 75 bp, synthetic construct
  source 1..75: mol_type = other DNA
tcctcatgttagccagcgccttcggcatccatggccaacacatcacccggaaagaccaggttgaagcggcactcg

SEQ ID NO: 269261 - DNA, 75 bp, synthetic construct
  source 1..75: mol_type = other DNA
tgccgcgcatcatggctgaagcattcgacgttgccagctcaggtcgtcctggtccggttctggtcgatatcccaa

SEQ ID NO: 269262 - DNA, 75 bp, synthetic construct
  source 1..75: mol_type = other DNA
ttcaggaagtggatattctggggttgtcgttagcctgcaccaagcacagtttcctggtgcaatcactggaagagt

SEQ ID NO: 269263 - DNA, 75 bp, synthetic construct
  source 1..75: mol_type = other DNA
cggccggaactctcaggatgaaaggtgaactgacaccggcgttattacagacacttatccgcgaaatgaaagaga

SEQ ID NO: 269264 - DNA, 75 bp, synthetic construct
  source 1..75: mol_type = other DNA
gcaatggcggctatcggttatgcccgtgctaccggtaaaactggcgtatgtatcgccacgtctggtccgggcgca

SEQ ID NO: 269265 - DNA, 75 bp, synthetic construct
  source 1..75: mol_type = other DNA
ctgtacgttggcggtggcgtgggcatggcgcaggcagttccggctttgcgtgaatttctcgctgccacaaaaatg

SEQ ID NO: 269266 - DNA, 75 bp, synthetic construct
  source 1..75: mol_type = other DNA
aatatcctcgttggaagaagatcagattctctttaatcccgatgaggcgcagcgtctatttgaggaggctggagt

SEQ ID NO: 269267 - DNA, 75 bp, synthetic construct
  source 1..75: mol_type = other DNA
gagatgataggcaatgatgagattgtgttcgagacttttcatgataaaaaaatcccgatcacatttaagctatct

SEQ ID NO: 269268 - DNA, 75 bp, synthetic construct
  source 1..75: mol_type = other DNA
aatcctttctgattctaaagtcacgcatggtatacaaattgctgatgtgatagctgcggccagcatttatgtgct

SEQ ID NO: 269269 - DNA, 75 bp, synthetic construct
  source 1..75: mol_type = other DNA
caaaaccgccattttttctctggtgaggcgatttcaccaggtattcactgactggcctctttccggtgaatattc

SEQ ID NO: 269270 - DNA, 75 bp, synthetic construct
  source 1..75: mol_type = other DNA
gcttcggcggcgtggacatggtgatcagcggcaatgtgccgcagggtgccgggttaagttcttccgcttcactgt

SEQ ID NO: 269271 - DNA, 75 bp, synthetic construct
  source 1..75: mol_type = other DNA
taaatgtcgttattataatgatactatggatgtcattgataataaagcgactcatcgccatgatgacatccctta

SEQ ID NO: 269272 - DNA, 75 bp, synthetic construct
  source 1..75: mol_type = other DNA
tgcatcttcattttcagggaaattaccggccaaaggtaaaattccaaatcttgaaaataatttgcttatgattac

SEQ ID NO: 269273 - DNA, 75 bp, synthetic construct
  source 1..75: mol_type = other DNA
cattttcacttgtaaatatttcttctatttatggtgtcgtggcaccaaaattcgaaatatacgaaaatactaaaa

SEQ ID NO: 269274 - DNA, 75 bp, synthetic construct
  source 1..75: mol_type = other DNA
tgtcataaaaataaattataattctgttatttttactatttattttaatgatgatgatgattttattaaagtgta

SEQ ID NO: 269275 - DNA, 75 bp, synthetic construct
  source 1..75: mol_type = other DNA
tctcgggccttagataaaatcagagcattcattcattatctgcatgaaaataaaacagtttttacacttaaaagc

SEQ ID NO: 269276 - DNA, 75 bp, synthetic construct
  source 1..75: mol_type = other DNA
tgaaaaaaactgttggtaagggcaagcccagatacactctggtttctcgacctcaatgggatattaaatcaatcg

SEQ ID NO: 269277 - DNA, 75 bp, synthetic construct
  source 1..75: mol_type = other DNA
atgccccgcttaactttgatgaggaatcttctgttcaaaaagctctgaaccagactcaatctatcctgcaaatga

SEQ ID NO: 269278 - DNA, 75 bp, synthetic construct
  source 1..75: mol_type = other DNA
tgaccatatgaacgccgatcagctggcgctgctggcttatctggaaagccgtgattgtgctctgctggatcttga

SEQ ID NO: 269279 - DNA, 75 bp, synthetic construct
  source 1..75: mol_type = other DNA
tgttgcgcgggattatttgccctttcagcacctctgcaaatattgttactgcaaaacgcaaaaggcggagagtta

SEQ ID NO: 269280 - DNA, 75 bp, synthetic construct
  source 1..75: mol_type = other DNA
atatcgaagcacttggcggacaagccttgtattacacgggcgatgttcgggaattgagagatcttcgcgcagcag

SEQ ID NO: 269281 - DNA, 75 bp, synthetic construct
  source 1..75: mol_type = other DNA
tgaatttctcactgccacaaaaatgcctgctacctgcacgctgaaagggctgggcgcagttgaagcggattatcc

SEQ ID NO: 269282 - DNA, 75 bp, synthetic construct
  source 1..75: mol_type = other DNA
cctgcacctggtatctgataacggtgcatcattagaggaggttgaggcccaaccgtacggtaagaggaaaattat

SEQ ID NO: 269283 - DNA, 75 bp, synthetic construct
  source 1..75: mol_type = other DNA
gataagtggacgaagctggcttttgaagtggacaacattatcgtcaaagcggtggcagaaaactccctgaacccc

SEQ ID NO: 269284 - DNA, 75 bp, synthetic construct
  source 1..75: mol_type = other DNA
gaacaactggcagcacaaggccaggttctggatgggctggcgtttgactgtatgcgcactgcttttttaactcgt

SEQ ID NO: 269285 - DNA, 75 bp, synthetic construct
  source 1..75: mol_type = other DNA
ctgaagtcatctgggagaagatcctggcatcccatcgcagggattggcttgctgcgaacggtctgctgacatccg

SEQ ID NO: 269286 - DNA, 75 bp, synthetic construct
  source 1..75: mol_type = other DNA
tggacgtttcagggaatagtggcctggagttgcgctggcaaaaaattcccctacagaacgacttagcttttttcc

SEQ ID NO: 269287 - DNA, 75 bp, synthetic construct
  source 1..75: mol_type = other DNA
gttactctttaacagtggaaaaaagcgcgtcgggcttcgttgcggtggtggagaaatgcgacagggacaggtgat

SEQ ID NO: 269288 - DNA, 75 bp, synthetic construct
  source 1..75: mol_type = other DNA
gtggacagcaaaaccggaaaaccaaagtttagtgctgccgaactggtaggcgcactcgcaggaatcacagagcta

SEQ ID NO: 269289 - DNA, 75 bp, synthetic construct
  source 1..75: mol_type = other DNA
ctgacactgcacctgttcatccgttccagcgaactgcgtttcgcccgctggagcgagatcgatttcaggcacaaa

SEQ ID NO: 269290 - DNA, 75 bp, synthetic construct
  source 1..75: mol_type = other DNA
ttcaaatcaatacgaaattaaagatgcgagcaaagaaaaaataaaggatatatataataaatcggttgattatgc

SEQ ID NO: 269291 - DNA, 75 bp, synthetic construct
  source 1..75: mol_type = other DNA
gttaaggcaaaaatttcaaagtttagcatggtaactattatttttgctttcgcaattcttctgtgtcaggttata

SEQ ID NO: 269292 - DNA, 75 bp, synthetic construct
  source 1..75: mol_type = other DNA
agaaaagctcaatttgcccccgttaagggaggatcagggaattccgccacgatgggcgctctgttatttggaggc

SEQ ID NO: 269293 - DNA, 75 bp, synthetic construct
  source 1..75: mol_type = other DNA
tgtgctgaatccaatggtaacgctgccgacacgctgatgctgtgtgcctcctgggtcgcccagacggatctttcg

SEQ ID NO: 269294 - DNA, 75 bp, synthetic construct
  source 1..75: mol_type = other DNA
gagcaagagattatggctagagtacctttcggggatatcgaaattatgacggaaagctatcacgacaagccttca

SEQ ID NO: 269295 - DNA, 75 bp, synthetic construct
  source 1..75: mol_type = other DNA
cgattctaaccaggtgaaagttaatgacgatggcaaatttaataatgatgtggctggagcccgtggcgtttatca

SEQ ID NO: 269296 - DNA, 75 bp, synthetic construct
  source 1..75: mol_type = other DNA
ctataccctgggggcttatgccggttgggagcatcagaacggtgcctatgttgatggagtggtgaaagttgaccg

SEQ ID NO: 269297 - DNA, 75 bp, synthetic construct
  source 1..75: mol_type = other DNA
atgacgaggctgaatatgtagttgataagaaaacagggaaaggcatatggaagggcggtgattctggtattaaca

SEQ ID NO: 269298 - DNA, 75 bp, synthetic construct
  source 1..75: mol_type = other DNA
aaagtcaaaatcgaaaatatcattgatatctgcgagggtggtcttgcctacgatggtgctcttcttgtgagtgca

SEQ ID NO: 269299 - DNA, 75 bp, synthetic construct
  source 1..75: mol_type = other DNA
catcctgtcttttgccaaagctcatatagccgggtgggattccctgaatgaaattatcaccaagattgctaaaca

SEQ ID NO: 269300 - DNA, 75 bp, synthetic construct
  source 1..75: mol_type = other DNA
aaggagctgcttgatccaaccaagtcagaggaatgcgcaagcagcctctttcaactgatccctctggttatccgg

SEQ ID NO: 269301 - DNA, 75 bp, synthetic construct
  source 1..75: mol_type = other DNA
cgcgcgccgcagccgtgtggaatgggaaaacagacagcgcaaaaagaggggctggataccctgggtatggatgaa

SEQ ID NO: 269302 - DNA, 75 bp, synthetic construct
  source 1..75: mol_type = other DNA
taaggatttgattgcctatatcagtactttcaccaccttatcgcccggtgacgtgatattaacaggctctccggg

SEQ ID NO: 269303 - DNA, 75 bp, synthetic construct
  source 1..75: mol_type = other DNA
atgactctcagaacttttcccgtgttgcacgttctctccgactctctgtttgcggaccgttttaaccgtatcgat

SEQ ID NO: 269304 - DNA, 75 bp, synthetic construct
  source 1..75: mol_type = other DNA
ttaatccggcattaacccacggtattgctcatgaagtcggctcgattgaagtgggaaaactggcggatctggtgc

SEQ ID NO: 269305 - DNA, 75 bp, synthetic construct
  source 1..75: mol_type = other DNA
atgtggggctgacccgcgcacgggatgaggtgcatatgctgtattccggttttgttgatggtcgctacggcccta

SEQ ID NO: 269306 - DNA, 75 bp, synthetic construct
  source 1..75: mol_type = other DNA
ctgggtgacatcgccattctgtacaaggactaccgtgccggtgatgtggtggccgatgcggtgaccgctggcggt

SEQ ID NO: 269307 - DNA, 75 bp, synthetic construct
  source 1..75: mol_type = other DNA
gcgctggcggattggacctcgggttaaaacaatctggacttgatatcatttgggcaaatgatatctatgaagatg

SEQ ID NO: 269308 - DNA, 75 bp, synthetic construct
  source 1..75: mol_type = other DNA
tcttactcaggaaacacttttcagctccaaatctcaggataaacatgcgcttttccccatttttactgcgagttg

SEQ ID NO: 269309 - DNA, 75 bp, synthetic construct
  source 1..75: mol_type = other DNA
tgagttgcaggtaaagctgttaaaccgtagcacacgcagcattggcctgaccgaagccggtagaatttactacta

SEQ ID NO: 269310 - DNA, 75 bp, synthetic construct
  source 1..75: mol_type = other DNA
tcttccttttacggttctttgtgaggtacataagaactggtataaaacgccaaatgcagcgccacgtgtttttga

SEQ ID NO: 269311 - DNA, 75 bp, synthetic construct
  source 1..75: mol_type = other DNA
tcaggcgtcccattatcagtgcttcaggaaatgggcggatgggagtccatagaaatggttcgtaggtatgctcac

SEQ ID NO: 269312 - DNA, 75 bp, synthetic construct
  source 1..75: mol_type = other DNA
cgaattgttcgttgccccccgtggcacaatcaagtacaccctagatggttcagaagcacgtaatggtgaaaccta

SEQ ID NO: 269313 - DNA, 75 bp, synthetic construct
  source 1..75: mol_type = other DNA
cagaccatattactattggtatcgacaaccaagaaccaatagaattacctgcgaactataaagacaaagtgatct

SEQ ID NO: 269314 - DNA, 75 bp, synthetic construct
  source 1..75: mol_type = other DNA
aagcgcttaccctcaagcgtagcgatgagacgcgtaccgtacagcaagatacgcaaccggtgaaaagtgtcaaaa

SEQ ID NO: 269315 - DNA, 75 bp, synthetic construct
  source 1..75: mol_type = other DNA
gcatagaaaattctcttgaagtcatcccgcatgatgggcgtctacaggttaagttaaaggacctagtcgtcgcag

SEQ ID NO: 269316 - DNA, 75 bp, synthetic construct
  source 1..75: mol_type = other DNA
gattacagtgtgttgcaacgagcattaagcgcagaagtcgatctctattgccaacaaatggctaaagttctggca

SEQ ID NO: 269317 - DNA, 75 bp, synthetic construct
  source 1..75: mol_type = other DNA
gttttagtagtatatcgtactttgtgtacctatttaggcagtattataattgtacaccatgtgaatatgcaaaac

SEQ ID NO: 269318 - DNA, 75 bp, synthetic construct
  source 1..75: mol_type = other DNA
actcataaacaatataaattctgaaaatcatatccatccagaattcagagaggctgtctatttctcgttattgtc

SEQ ID NO: 269319 - DNA, 75 bp, synthetic construct
  source 1..75: mol_type = other DNA
atgacagctcgctacatcgcaattgactggggatcgaccaatctgcgcgcctggctttatcagggcgactactgc

SEQ ID NO: 269320 - DNA, 75 bp, synthetic construct
  source 1..75: mol_type = other DNA
agcggttatctggtgaaaagccgcagtctgttcagcggaaaagggctccccggagacagcccgtttatcacattt

SEQ ID NO: 269321 - DNA, 75 bp, synthetic construct
  source 1..75: mol_type = other DNA
ttcccggtaacagcaataccagtagtgctgagacaaccgccccggaaaccgcacgccagccggaacatctgccgg

SEQ ID NO: 269322 - DNA, 75 bp, synthetic construct
  source 1..75: mol_type = other DNA
gtcgattatcgaaaacctgaccctggcgcaggtgaaagtgcttaaacgcgataaagcgccggctcgtgaaaaagc

SEQ ID NO: 269323 - DNA, 75 bp, synthetic construct
  source 1..75: mol_type = other DNA
ttataataacagccatgctgacgaacaccacacaggcaaaaacatcattatcctataagattgatgacctggaat

SEQ ID NO: 269324 - DNA, 75 bp, synthetic construct
  source 1..75: mol_type = other DNA
agctgctgaagctgcgtatcgaactgctggtgaacttgaattcaacccagaacgttatggcaagaatacatcgcc

SEQ ID NO: 269325 - DNA, 75 bp, synthetic construct
  source 1..75: mol_type = other DNA
tctctctgcatcgccatcttgttaacgggtatccctcgtcaacgctgttgttcatcaatatcaaagataaagaaa

SEQ ID NO: 269326 - DNA, 75 bp, synthetic construct
  source 1..75: mol_type = other DNA
ccgcttacagatacgcgatgaaggcctgatactcaacgacagcggcggcaggagcattcactttgagccgctgtt

SEQ ID NO: 269327 - DNA, 75 bp, synthetic construct
  source 1..75: mol_type = other DNA
gagcgtgacctgacggggtggatgtcgctgtcgcgtaaaccggaggagacatggtacggctgggacggcgacagg

SEQ ID NO: 269328 - DNA, 75 bp, synthetic construct
  source 1..75: mol_type = other DNA
gcggaaaacggtgtgctcaccatcagcggcgagcgcaaactggaaaaagaggagcagggcaagaagttccaccgc

SEQ ID NO: 269329 - DNA, 75 bp, synthetic construct
  source 1..75: mol_type = other DNA
cagttgttacctgagggagcgactgcctggctggccactgtaccgggggcattacagaatctggcgggagcggtc

SEQ ID NO: 269330 - DNA, 75 bp, synthetic construct
  source 1..75: mol_type = other DNA
gaaaattgcataaaagatattattattgagcacgcagaaaactatcatccagcatttggtcgatatgcggaaaaa

SEQ ID NO: 269331 - DNA, 75 bp, synthetic construct
  source 1..75: mol_type = other DNA
aaaacgcagcgccgcagcctggcggatgcgcttcagcagtccggcggcgaagacggtggcagtgtggtgttcccg

SEQ ID NO: 269332 - DNA, 75 bp, synthetic construct
  source 1..75: mol_type = other DNA
ggcctgccgctggcccttatcagcaaggaagggacaacagaatggtgcgcagaatacgatgaatggggcaacctg

SEQ ID NO: 269333 - DNA, 75 bp, synthetic construct
  source 1..75: mol_type = other DNA
agagagttcaagatcgaccatatcgtagatatctgcgaaggggcgcttgcatataatgcaacgctcgttgtaggt

SEQ ID NO: 269334 - DNA, 75 bp, synthetic construct
  source 1..75: mol_type = other DNA
catttcactattatctttaacccgccgccactctttagcttctacagacttatggaaggtgcgaacaagtccctg

SEQ ID NO: 269335 - DNA, 75 bp, synthetic construct
  source 1..75: mol_type = other DNA
taatttactgttggctccggcaatcgacaccgttaatagattacctatcctgctctatcagagccaatttgcaga

SEQ ID NO: 269336 - DNA, 75 bp, synthetic construct
  source 1..75: mol_type = other DNA
aggccaccgtgtcgctgtccactacggctacgacgataagggccgcctgacgggcgaacggcagacggtggagaa

SEQ ID NO: 269337 - DNA, 75 bp, synthetic construct
  source 1..75: mol_type = other DNA
aactggtcagcggaaagttatggcagccgggaatgtcttcaccgggcgaggcatttcgttttcgctacagacagc

SEQ ID NO: 269338 - DNA, 75 bp, synthetic construct
  source 1..75: mol_type = other DNA
tgacagcagacggagaatgcttacaggaaacgcaggtgctgattgataatgatcattctcaaagaaaacatgagg

SEQ ID NO: 269339 - DNA, 75 bp, synthetic construct
  source 1..75: mol_type = other DNA
gaccgactgctcaaccgaagtgaaaaaaggcgaagtggtggtggtttgcggcccgtctggctccggcaaatcaac

SEQ ID NO: 269340 - DNA, 75 bp, synthetic construct
  source 1..75: mol_type = other DNA
tctcccagccatttaatgcttcattctggagtttctcgttcggcgtatctgcactggcaaccaccggtttgcatc

SEQ ID NO: 269341 - DNA, 75 bp, synthetic construct
  source 1..75: mol_type = other DNA
tatcagccgtaccgtctgccagggcagcagcatgatgaggaatcagggctgtactataaccgtcaccggtactac

SEQ ID NO: 269342 - DNA, 75 bp, synthetic construct
  source 1..75: mol_type = other DNA
atgacttcacgagatcagggtattaattctgaactatctaatcgaacgatacaatttaaggaaaaaatccataat

SEQ ID NO: 269343 - DNA, 75 bp, synthetic construct
  source 1..75: mol_type = other DNA
gcaaaaaaaccttctcaccagaaagcgaagattatctgaaaaatcctgtgttctgggaaaaaaatgaacaatggc

SEQ ID NO: 269344 - DNA, 75 bp, synthetic construct
  source 1..75: mol_type = other DNA
tctctccaggttgacaggaattcatctttttctttgcaaacaaatggaatagagcaactttctacaaagaaagtc

SEQ ID NO: 269345 - DNA, 75 bp, synthetic construct
  source 1..75: mol_type = other DNA
cttgctgtttttgcttttgttaccgtggtcattctgacagccgttttatcaaaggtgttttcatcatcgggaaag

SEQ ID NO: 269346 - DNA, 75 bp, synthetic construct
  source 1..75: mol_type = other DNA
gtattagttctgaactatctgataacacaataaaaattaaggaaaaaatccataatggtagccatacagagtaca

SEQ ID NO: 269347 - DNA, 75 bp, synthetic construct
  source 1..75: mol_type = other DNA
tgacaggaatccctctctttctttgcaaacaaatggaacagagcaattttctacaaagaaaattctcaatatgac

SEQ ID NO: 269348 - DNA, 75 bp, synthetic construct
  source 1..75: mol_type = other DNA
tgaatattgctaactccactattgatgatgactatgaagcactttactttactttactgattactacaaagatgg

SEQ ID NO: 269349 - DNA, 75 bp, synthetic construct
  source 1..75: mol_type = other DNA
gaaccacgactacactgatggtacaaatggcaatgctaaccagcttgatattgctaattcagtaattcacggctc

SEQ ID NO: 269350 - DNA, 75 bp, synthetic construct
  source 1..75: mol_type = other DNA
gcactcaagtcagtggtgaagtaagagatctagtaattcttcttgaaactgatggaaaaacggtgtctgattatt

SEQ ID NO: 269351 - DNA, 75 bp, synthetic construct
  source 1..75: mol_type = other DNA
gctacaaacagccttactcctgatgcaacatatgaaaacatgatcttacccagcaatagtggacacgcggctaag

SEQ ID NO: 269352 - DNA, 75 bp, synthetic construct
  source 1..75: mol_type = other DNA
cgttttgatgcagatggtaataatctgggtggatatgattttttagactggccccctgaatctccagacaaccaa

SEQ ID NO: 269353 - DNA, 75 bp, synthetic construct
  source 1..75: mol_type = other DNA
tattaccaacaactcccgtgtagctggcattgcgctgtctgaaggcaatacaagcaacacaacttatactagcga

SEQ ID NO: 269354 - DNA, 75 bp, synthetic construct
  source 1..75: mol_type = other DNA
aggaaaataaaggagtcactctgccagcagaaaacgaagatgataccggatatgcacaaagtaatagcgatgccc

SEQ ID NO: 269355 - DNA, 75 bp, synthetic construct
  source 1..75: mol_type = other DNA
gccggcctgtcggcgctgatccataacaagccgctcaaggtgatgggcaaagcgctgtacgacatcgaagggtta

SEQ ID NO: 269356 - DNA, 75 bp, synthetic construct
  source 1..75: mol_type = other DNA
gccgcctctcagagcgcagcggcagcaaagaaatcagaaacagcagcggcatcgtccaggaacgcggcgaaaaca

SEQ ID NO: 269357 - DNA, 75 bp, synthetic construct
  source 1..75: mol_type = other DNA
ttgagcgcgtacgtggacgattacatcctaccgtgcaaggactgcgtctgtttgaagaagtgcaacgatcctggt

SEQ ID NO: 269358 - DNA, 75 bp, synthetic construct
  source 1..75: mol_type = other DNA
tctggccttaattcaacatagtctgcgtcataatgcgccggaaggggtggtattacgtgaattgccgtggatgaa

SEQ ID NO: 269359 - DNA, 75 bp, synthetic construct
  source 1..75: mol_type = other DNA
gccgttctacatcaccctggaaaaagggggcgtgaacgccttctcctcgatgcccatcgatgcgaagtattatcg

SEQ ID NO: 269360 - DNA, 75 bp, synthetic construct
  source 1..75: mol_type = other DNA
cctttgcccgccatgcgccgaaagaacaccatctggtgttcaagcatcacccgatggatcgtggtcaccgctatt

SEQ ID NO: 269361 - DNA, 75 bp, synthetic construct
  source 1..75: mol_type = other DNA
ttaaaaccgtggtggaagagggttcctttttggcgagcttcgcaaaaattgtgctgtacacaatcgacggtgact

SEQ ID NO: 269362 - DNA, 75 bp, synthetic construct
  source 1..75: mol_type = other DNA
ttgaaccagtcactctcttcgctcttttccctcgatctctctctggtcagccagcagtttctctcccttgaattt

SEQ ID NO: 269363 - DNA, 75 bp, synthetic construct
  source 1..75: mol_type = other DNA
caggccaagtttttcggctctgatgttaataagatgtttggtgttcagcggggatttcggcaggctggtcttaac

SEQ ID NO: 269364 - DNA, 75 bp, synthetic construct
  source 1..75: mol_type = other DNA
aagatagcaacaatgacaatcggcacatcacaccccggcggtgacatgtgttccgggagtagtggaccttgctct

SEQ ID NO: 269365 - DNA, 75 bp, synthetic construct
  source 1..75: mol_type = other DNA
attaatttaactccagaaagcaaaaaaacgttgatgagtgaacaccgtaacaatattcaggtagcaattgatgct

SEQ ID NO: 269366 - DNA, 75 bp, synthetic construct
  source 1..75: mol_type = other DNA
atgtgtcgggtacctggtgtatccaggagcggttattacgaccgggtacagcatgaaccctcaggtgatgagcgg

SEQ ID NO: 269367 - DNA, 75 bp, synthetic construct
  source 1..75: mol_type = other DNA
gttatcttcatgtcgaacagcaaaaaacaggaacccggattgccatccctctggctctgcgttgcgataaattaa

SEQ ID NO: 269368 - DNA, 75 bp, synthetic construct
  source 1..75: mol_type = other DNA
tcccggttccccgaaaaaaacgtccaggtaccggagaaaataatcacaggcaaaaatccggaagccgcagctgcg

SEQ ID NO: 269369 - DNA, 75 bp, synthetic construct
  source 1..75: mol_type = other DNA
acatagctcttttgctggatttgtatgtaggtgtgtattgcttatcttacctagaaattgcaaaataatctattg

SEQ ID NO: 269370 - DNA, 75 bp, synthetic construct
  source 1..75: mol_type = other DNA
ctggatggttcaagacggcgagcctcagcgatttatatccgtacaggccttgatataatgattaccgatgaactt

SEQ ID NO: 269371 - DNA, 75 bp, synthetic construct
  source 1..75: mol_type = other DNA
gcgtacgctgacttatgagtttagccgtatgtcaaaagtggttcaggatgaactggacaaagctatcaacgaggt

SEQ ID NO: 269372 - DNA, 75 bp, synthetic construct
  source 1..75: mol_type = other DNA
ccagttgaagaggaagttattgcttctgaaattgaagctggtgaagttaaagaatcagaaatcccgaacattgaa

SEQ ID NO: 269373 - DNA, 75 bp, synthetic construct
  source 1..75: mol_type = other DNA
cggaagttgttaaaaacattgatgatgaacgagtgcgcttaatagctgggcctggccgttcaggcgtttcggaag

SEQ ID NO: 269374 - DNA, 75 bp, synthetic construct
  source 1..75: mol_type = other DNA
aatttgaattgatgtttaagaaaaatcaatgggcacaaagcgaattggaaaaatatggattcaacaaggcaaatt

SEQ ID NO: 269375 - DNA, 75 bp, synthetic construct
  source 1..75: mol_type = other DNA
atctggataactataaggatgtggttttatctggtatggatccctttgtgcactatcagaaaatcggacgccttc

SEQ ID NO: 269376 - DNA, 75 bp, synthetic construct
  source 1..75: mol_type = other DNA
aaagagacattcatgaccttaggaaaggccacgtcacgcctattgttgaagcgtgatttcggcaacgtgtttccg

SEQ ID NO: 269377 - DNA, 75 bp, synthetic construct
  source 1..75: mol_type = other DNA
atgacgcaagcagcttggacccgcgatggtcggccggtggatgcggcttctattcccggcgccgagtgggaggcg

SEQ ID NO: 269378 - DNA, 75 bp, synthetic construct
  source 1..75: mol_type = other DNA
acttggaaaaaatgatataaacaaaaataacttcgccgcaataaatagagacattaaaaacgattatgaaaacac

SEQ ID NO: 269379 - DNA, 75 bp, synthetic construct
  source 1..75: mol_type = other DNA
ggcactgaccagggagtccctgaaatccattatccagacgattaagtttcagcagttctttccctgtattggtat

SEQ ID NO: 269380 - DNA, 75 bp, synthetic construct
  source 1..75: mol_type = other DNA
ttgttaacattcttttcggtttttcagacagcgttgctgcgttctatatcctgtatagccttaatgctattctcc

SEQ ID NO: 269381 - DNA, 75 bp, synthetic construct
  source 1..75: mol_type = other DNA
aaagacgatggaactgactcgatggctaatgttgataaatatgaaaacccatttcgtaaagagttgggcttgcca

SEQ ID NO: 269382 - DNA, 75 bp, synthetic construct
  source 1..75: mol_type = other DNA
atgaatgaaatgcttggtaaattaaatatagcattgaatgaaacgaatttatatccaactaatgatatgtttcgg

SEQ ID NO: 269383 - DNA, 75 bp, synthetic construct
  source 1..75: mol_type = other DNA
gtaagctgtacgggatcggaccggtatgcagtgaactgcatattgccccgtcaacgtattaccactgtcagcaac

SEQ ID NO: 269384 - DNA, 75 bp, synthetic construct
  source 1..75: mol_type = other DNA
aatatcaatgaactgttggaatttctcagaattcgatatgagtatcttgatgttattgctgataggattgaaacg

SEQ ID NO: 269385 - DNA, 75 bp, synthetic construct
  source 1..75: mol_type = other DNA
tgtcacgccgtatgttattgccgggaaaagtgtacgtatcaccgtttgtgtgaacaatgaactggcagactatcc

SEQ ID NO: 269386 - DNA, 75 bp, synthetic construct
  source 1..75: mol_type = other DNA
agtcgttaaccgcctcgcaggatgatttgcaagccgagcctgaccaggttgatccggcctttgccgaactggtcg

SEQ ID NO: 269387 - DNA, 75 bp, synthetic construct
  source 1..75: mol_type = other DNA
atggatgacaacgttgattcaatgggggggaaaatccgctttactggccgtgtagtgaaagctacctgtaaggtc

SEQ ID NO: 269388 - DNA, 75 bp, synthetic construct
  source 1..75: mol_type = other DNA
gcagggacggcaggagtgggagcgccgccttgcggctctgattacacgacgacgggggcatcccgggtatcggct

SEQ ID NO: 269389 - DNA, 75 bp, synthetic construct
  source 1..75: mol_type = other DNA
atttaagcctgatgaataactcttgtctggaaaaaatacttctcctgaccgacccatcaaagcgtggacaagcct

SEQ ID NO: 269390 - DNA, 75 bp, synthetic construct
  source 1..75: mol_type = other DNA
cagggttaccactttaacgtaacaaccgtggcggcaagcctgcgccgtcaggggctgagggcaaacgcctcccgg

SEQ ID NO: 269391 - DNA, 75 bp, synthetic construct
  source 1..75: mol_type = other DNA
cgttttatcttttgcaaccattattgcttttatcttaaaaaaatgccgtccgcaacgcgactggcaagaacttca

SEQ ID NO: 269392 - DNA, 75 bp, synthetic construct
  source 1..75: mol_type = other DNA
aaaggacgagtttatatttcatcccaaaatcactcttttgaatgttcgcttacagacattgagtttattgcaaaa

SEQ ID NO: 269393 - DNA, 75 bp, synthetic construct
  source 1..75: mol_type = other DNA
ccggatgcggcgtgaacgccttatccggcctacgaatggcgcaagaatctgtaggcctgataagcgtagcgcatc

SEQ ID NO: 269394 - DNA, 75 bp, synthetic construct
  source 1..75: mol_type = other DNA
gccggatgcggcgtgaacgccttatccggcctacgagtggcgcgagaatctgtaggcctgataagcgtagcgcat

SEQ ID NO: 269395 - DNA, 75 bp, synthetic construct
  source 1..75: mol_type = other DNA
aaagttaatctccgatttgcatccgcagctaaaaggcatcgttgatctgccgttgcagccgatgtcggatatcag

SEQ ID NO: 269396 - DNA, 75 bp, synthetic construct
  source 1..75: mol_type = other DNA
acctttccagctgattggatcatccagtgcgcacttgaaaccggagcttcattaatgtggctaacaaccggtaat

SEQ ID NO: 269397 - DNA, 75 bp, synthetic construct
  source 1..75: mol_type = other DNA
tcccaaagcacaatggcgaacagatatgctcgtgataccttccctgccgactgggtcataatctgcagcatggaa

SEQ ID NO: 269398 - DNA, 75 bp, synthetic construct
  source 1..75: mol_type = other DNA
gcagcgtaaaaacctacatgacaggctttatcctgtcgatcattctgacggtgattccgttctggatggtgatga

SEQ ID NO: 269399 - DNA, 75 bp, synthetic construct
  source 1..75: mol_type = other DNA
ccaccatgaaaaccggtgcgacggatggcgggcgctacaacgtgatgggcggcgggcgtccggttgtcgcgctgt

SEQ ID NO: 269400 - DNA, 75 bp, synthetic construct
  source 1..75: mol_type = other DNA
aacggcccgcagctggctgatctggtgaaactgctgggcgaacgctgcaagacgctgaaagagatggcacagagc

SEQ ID NO: 269401 - DNA, 75 bp, synthetic construct
  source 1..75: mol_type = other DNA
cggtcggtgagctgccttcgccgggtagcctgtattttcaacgttttggcggtttgaatattgagcaggaggtgt

SEQ ID NO: 269402 - DNA, 75 bp, synthetic construct
  source 1..75: mol_type = other DNA
attacctgttcgatggtcatgtcatcggcatgtttattttcccgtcgattatcgcgctgattgttggttttatcg

SEQ ID NO: 269403 - DNA, 75 bp, synthetic construct
  source 1..75: mol_type = other DNA
cggcctgaccggtaccaaccgtacccgcatcatgtgcctgagtttgttctggcacttcctggatgtagtttggat

SEQ ID NO: 269404 - DNA, 75 bp, synthetic construct
  source 1..75: mol_type = other DNA
accgttggtacggttgtatgacaaaggcgttccggcgctgaaaaacgtcatcgggctgccgttctgcgatatcgg

SEQ ID NO: 269405 - DNA, 75 bp, synthetic construct
  source 1..75: mol_type = other DNA
gattacctgccgtctgaaaccgggcgtgacccaggtgcaagtagcacaagtgttgcaacaggcatatgcgcataa

SEQ ID NO: 269406 - DNA, 75 bp, synthetic construct
  source 1..75: mol_type = other DNA
cattacctgccgcctgaaaccgggtgtgacccaggcgcaagtcgcgcaagcgttacagcgggcgtatgcgcataa

SEQ ID NO: 269407 - DNA, 75 bp, synthetic construct
  source 1..75: mol_type = other DNA
aagcgttatgtacaggcgctgggcggttccgcgcgcgtgatcaacctggcacaggaagcgaataagcaaggggat

SEQ ID NO: 269408 - DNA, 75 bp, synthetic construct
  source 1..75: mol_type = other DNA
gatgagccggtcgatgaaaaggcggggtatgccatttgccgcacggtcagttttgacgggtgggattatgttatc

SEQ ID NO: 269409 - DNA, 75 bp, synthetic construct
  source 1..75: mol_type = other DNA
agtcagcctgattgcatggatgaaatacattcaggcgctgaacgcggtcgacacctccacggcaccgagtatcga

SEQ ID NO: 269410 - DNA, 75 bp, synthetic construct
  source 1..75: mol_type = other DNA
cgcgatacatttcctgcagattgggtagttatctgctcaatggaaacaggagcatcaattaaatggctagcattt

SEQ ID NO: 269411 - DNA, 75 bp, synthetic construct
  source 1..75: mol_type = other DNA
gccgagtccgccacctggcgcggtttctacctgaccggcgcgaaagagctgcgcgaaggggtgcataagttcagc

SEQ ID NO: 269412 - DNA, 75 bp, synthetic construct
  source 1..75: mol_type = other DNA
ccgagtacctgaacgaaacgctggatatgtggggtaacgacgcggaagtcctgtttatgccgcacacctggccgg

SEQ ID NO: 269413 - DNA, 75 bp, synthetic construct
  source 1..75: mol_type = other DNA
tattaaaaggtgcggcggcacaggctatccagtgcgccaacattcgtttcggctatgcggaaacgcagtctctta

SEQ ID NO: 269414 - DNA, 75 bp, synthetic construct
  source 1..75: mol_type = other DNA
gcattattgcgccaaccaaaactatcgtcagaactggcgagaagatgattatcgacggcctggagtttgacttcc

SEQ ID NO: 269415 - DNA, 75 bp, synthetic construct
  source 1..75: mol_type = other DNA
gaagctaacgcgtccttctatatcagtcgcgacgacctgcacgctgtcctgaccggacaagcgaaaatggctgac

SEQ ID NO: 269416 - DNA, 75 bp, synthetic construct
  source 1..75: mol_type = other DNA
ccggcgctgaaagcgctttgtaccgccgagaacgctactcacacactgcataatttctacaccctgcgcggcgcg

SEQ ID NO: 269417 - DNA, 75 bp, synthetic construct
  source 1..75: mol_type = other DNA
gacagggccgacttttcggcctttatggaaaggaatggctattatgatgacgagtcgatgcaggatgatattctt

SEQ ID NO: 269418 - DNA, 75 bp, synthetic construct
  source 1..75: mol_type = other DNA
tatggatagcactggctattatgatgacgagtcgatgcaggatgatattcttattgacgtgataggtaacgtgta

SEQ ID NO: 269419 - DNA, 75 bp, synthetic construct
  source 1..75: mol_type = other DNA
tcttaaacatgttctacggcggcaagatgaaaggtatgccaccgaagctgatgagcgatgatggcaaacatatcg

SEQ ID NO: 269420 - DNA, 75 bp, synthetic construct
  source 1..75: mol_type = other DNA
catcaacagcccgagcatgggtctggttgagaaaccgctgatgaacaccactaacgccatcctgattatcatgct

SEQ ID NO: 269421 - DNA, 75 bp, synthetic construct
  source 1..75: mol_type = other DNA
gacagggccgacttttcggcctttatggagagcagtggctattatgatgacgagtcgatgcaggatgatattctt

SEQ ID NO: 269422 - DNA, 75 bp, synthetic construct
  source 1..75: mol_type = other DNA
gacagggccgacttttcggcctttatggacagtattggctattatgatgacgagtcgatgcaggatgatattctt

SEQ ID NO: 269423 - DNA, 75 bp, synthetic construct
  source 1..75: mol_type = other DNA
tcttgaaaagctgggcgttgagtacaagattgttgaagagaacacttacggtatcgtgaaagagaagattccgga

SEQ ID NO: 269424 - DNA, 75 bp, synthetic construct
  source 1..75: mol_type = other DNA
atgtcgcaaaatcaagaaattagtaagaaagaacaatacaacctgaacaaattacaaaaacgtctgcgtcgtaac

SEQ ID NO: 269425 - DNA, 75 bp, synthetic construct
  source 1..75: mol_type = other DNA
gccgcctggcaaactgcgggattatggcgcggatctcaccctgaagaagctaccacgcctggactgtatctgccg

SEQ ID NO: 269426 - DNA, 75 bp, synthetic construct
  source 1..75: mol_type = other DNA
cctcgaaaagctgggcgttgagtacaagattgtcgaagaaaacacttacgggatcgtaaaagagaagatccctga

SEQ ID NO: 269427 - DNA, 75 bp, synthetic construct
  source 1..75: mol_type = other DNA
gacagctataccatgctggagattctgcgcaatttgcagcaaagcgcgccaatcagtttctcattggtggccgtt

SEQ ID NO: 269428 - DNA, 75 bp, synthetic construct
  source 1..75: mol_type = other DNA
agaaagaacaatacaatctcaacaaattgcaaaaacgcctgcgccgcaacgtaggcgaagccattgctgacttca

SEQ ID NO: 269429 - DNA, 75 bp, synthetic construct
  source 1..75: mol_type = other DNA
tcgctgaagttgcgaaggaacaaggcgttaaaccttgccgtccgctgtctactgcagtggtatccgcgcagattg

SEQ ID NO: 269430 - DNA, 75 bp, synthetic construct
  source 1..75: mol_type = other DNA
attcagcaaggctttgaagcggcgaaaaatatcggcactcagccagtggcgacctgccccccctgccgcagacgt

SEQ ID NO: 269431 - DNA, 75 bp, synthetic construct
  source 1..75: mol_type = other DNA
ccagcctcgaccaacaaaatcgccctgctgttgccgctgaatggccaggcagcggtatttggtcgcactattcag

SEQ ID NO: 269432 - DNA, 75 bp, synthetic construct
  source 1..75: mol_type = other DNA
tgttttggcagccctgattttcgccggttgtggcacccatactcccgatcagtccactgcttatatgcagggcac

SEQ ID NO: 269433 - DNA, 75 bp, synthetic construct
  source 1..75: mol_type = other DNA
gagacgaaaaaattctggccgcacgactttacgctgttagcgcatttccgcgtgggtaaaacctgtgaaatcgat

SEQ ID NO: 269434 - DNA, 75 bp, synthetic construct
  source 1..75: mol_type = other DNA
atgaccctacgcaagattctggcactcacctgcctgctgttgccgatgatggcttccgcacatcagttcgaaacc

SEQ ID NO: 269435 - DNA, 75 bp, synthetic construct
  source 1..75: mol_type = other DNA
tgataaagatcagtttagctacaaaacctggaacagcgcgcagttagtgggaaaagtgcgagtactgcaacatat

SEQ ID NO: 269436 - DNA, 75 bp, synthetic construct
  source 1..75: mol_type = other DNA
tctggaggggacgttaagaagggcgcgtgaagagtatgaggaaaagaagattcttcttctagggaatttttatgc

SEQ ID NO: 269437 - DNA, 75 bp, synthetic construct
  source 1..75: mol_type = other DNA
gctgatgaacaccaccaacgcaatcctgatcatcatgctcagcgttgcaactctgaccaccgttatctgtaaagt

SEQ ID NO: 269438 - DNA, 75 bp, synthetic construct
  source 1..75: mol_type = other DNA
cgttctttatcccgggaactctgggtgttgctctggccgtttgcttcggcttcctgctgggcagcgtgatgctgt

SEQ ID NO: 269439 - DNA, 75 bp, synthetic construct
  source 1..75: mol_type = other DNA
ggccggccacccatgtccgccaccggcccgagcagaccctgctgtaccaactggttgagcgtcattaccccgagt

SEQ ID NO: 269440 - DNA, 75 bp, synthetic construct
  source 1..75: mol_type = other DNA
ttcctgtcctaaaagataaagctatgaataggtcaaacgaagacgatattgaaaaaaccaaatcactgatttcga

SEQ ID NO: 269441 - DNA, 75 bp, synthetic construct
  source 1..75: mol_type = other DNA
ttgaaaaagccaaatcgctgatttcgacaggtgcagagatagctggcgctgcagttggcggtgcaattggctttt

SEQ ID NO: 269442 - DNA, 75 bp, synthetic construct
  source 1..75: mol_type = other DNA
gtgcagttactccaccatcaccaaatggacgccgcgtcgtaagcgcgggacgttcctcggtttctggaacatttc

SEQ ID NO: 269443 - DNA, 75 bp, synthetic construct
  source 1..75: mol_type = other DNA
atcgcgttgattgtcggttttatcggcctgcgttacggcagcgactccccggaatcttatggcctcggcaaagcg

SEQ ID NO: 269444 - DNA, 75 bp, synthetic construct
  source 1..75: mol_type = other DNA
tcacaaccttggcggtgcaggcgcagcaggtgtggcgctgttcggcgcaaattacctgttcgatggccatgtcat

SEQ ID NO: 269445 - DNA, 75 bp, synthetic construct
  source 1..75: mol_type = other DNA
ccggactgagcacgtatgagaaagagctggcgctgatgggcgaggattatcaggacattttccgccagcaggtca

SEQ ID NO: 269446 - DNA, 75 bp, synthetic construct
  source 1..75: mol_type = other DNA
gtgctctgggtaaaggagaagtaaatacccagagtggacgaacctacgtcggactccagaacgaatacaacggca

SEQ ID NO: 269447 - DNA, 75 bp, synthetic construct
  source 1..75: mol_type = other DNA
ggtctgaaaccaccggcatgggccgctgccgcttttgaggctggactgaaaaaatcaaacgaggaggagcaagat

SEQ ID NO: 269448 - DNA, 75 bp, synthetic construct
  source 1..75: mol_type = other DNA
ggcgggtttggtgggcagctgcgaggctggaatccgccgagtgaaagtgcagatgccgcactcctacccaactat

SEQ ID NO: 269449 - DNA, 75 bp, synthetic construct
  source 1..75: mol_type = other DNA
ttcgccgcgctggatatcgccgcgattggttgtatctgcctgatggcgatagtggcggtgatggaagaacgcaaa

SEQ ID NO: 269450 - DNA, 75 bp, synthetic construct
  source 1..75: mol_type = other DNA
tgattgccgatggcacgccagtatttggtctcactggttgggccggtactttcgccgcgctggatactgccgcaa

SEQ ID NO: 269451 - DNA, 75 bp, synthetic construct
  source 1..75: mol_type = other DNA
cacggatatgaccaagtggcagatctttgtcgaatatgtactgaaaaacaaagtgatctggctgctgtgcttcgc

SEQ ID NO: 269452 - DNA, 75 bp, synthetic construct
  source 1..75: mol_type = other DNA
cggactctcacgtccggtgtggatagcgcaggcgtatcagcagcagatagcggagagtcgcaggccggaagagga

SEQ ID NO: 269453 - DNA, 75 bp, synthetic construct
  source 1..75: mol_type = other DNA
tcgccgccggtcttggcgtttcctacgaacagttgtcccgtgattactcgaaggtcagttactcaagtgcccgcg

SEQ ID NO: 269454 - DNA, 75 bp, synthetic construct
  source 1..75: mol_type = other DNA
gaataacgtgacactgggcggtgtcaaaattccgcaccttttccctggtgatgatctgaaactacagactgcgca

SEQ ID NO: 269455 - DNA, 75 bp, synthetic construct
  source 1..75: mol_type = other DNA
gtggccattgatattgcttatgaaggctccggcagtggtgactggcgcactgacggtttcatcgtgggtgtcggt

SEQ ID NO: 269456 - DNA, 75 bp, synthetic construct
  source 1..75: mol_type = other DNA
ttttcttggcattggagaggaagaggcccgggcgttctcccgtgaagttgaggcggcctggaaagaatttgcgga

SEQ ID NO: 269457 - DNA, 75 bp, synthetic construct
  source 1..75: mol_type = other DNA
gaacctattagccttaaagctaaccatatggcgttattaaattgtgaaaataatattatcgacgtctcctctctt

SEQ ID NO: 269458 - DNA, 75 bp, synthetic construct
  source 1..75: mol_type = other DNA
atgtgaacggtgttccgcttcgtgagagtctcagctacaacggtggcggcgcaggatttggcgggcaaatggcgg

SEQ ID NO: 269459 - DNA, 75 bp, synthetic construct
  source 1..75: mol_type = other DNA
ttatagccaaataatcaccacctgccgcatgcgttatgccgtaaatgaattaatgatggacggtaaaaatatctc

SEQ ID NO: 269460 - DNA, 75 bp, synthetic construct
  source 1..75: mol_type = other DNA
atgtgtatctaccttaacttaatgattttgataaaaatcattaggggattcatcagcactttggttgctcatatt

SEQ ID NO: 269461 - DNA, 75 bp, synthetic construct
  source 1..75: mol_type = other DNA
cgatggcgcgatctgaacctgtgtgtggtggttgtagcggcgctgtttgcgctgaaaatcatcctggtggattag

SEQ ID NO: 269462 - DNA, 75 bp, synthetic construct
  source 1..75: mol_type = other DNA
tattgaaagtacttctggtgtggcggtcggtggtcgcacggggctgactgcggttgtggtcggcgttatgttcct

SEQ ID NO: 269463 - DNA, 75 bp, synthetic construct
  source 1..75: mol_type = other DNA
tgtgttgatgacttcaagtctggcgcgcgttaactgggatgattttaccgaatcggtgcccgcatttattaccac

SEQ ID NO: 269464 - DNA, 75 bp, synthetic construct
  source 1..75: mol_type = other DNA
gccagattcaggttgaaggcctgcgccgtttgcgcgaaatcctgcaaacgcaggggctgaatatcgaagcgctgt

SEQ ID NO: 269465 - DNA, 75 bp, synthetic construct
  source 1..75: mol_type = other DNA
gcaacgtatccgcgagctggaaaagcaggttcgccgcctggaggaacaaaatacgatattaaaaaagctactgca

SEQ ID NO: 269466 - DNA, 75 bp, synthetic construct
  source 1..75: mol_type = other DNA
gatatcggcctttccacaatgacaagatgggtcaaacaactgcgtgatgagcgtcagggcaaaacaccaaaagcc

SEQ ID NO: 269467 - DNA, 75 bp, synthetic construct
  source 1..75: mol_type = other DNA
ggacagcctgattgcgtggatgaaatacattcaggcgctgaacgcggtcgatacctccacggcaccggatatcga

SEQ ID NO: 269468 - DNA, 75 bp, synthetic construct
  source 1..75: mol_type = other DNA
gtggtattgccacaaaagctggcgatgtgacggtctttaactacgacggggaaacgcgagagtttttgtcgactt

SEQ ID NO: 269469 - DNA, 75 bp, synthetic construct
  source 1..75: mol_type = other DNA
gatgcgccggtcgaaggaaaagacggctttgccgtgtgccgtaaggccagccttgatggttgggagtatgtcgca

SEQ ID NO: 269470 - DNA, 75 bp, synthetic construct
  source 1..75: mol_type = other DNA
aaccagcctgatcgcctggatgaactacatcaaagccgtgcaggcggtggacacgtcaaaagcgccggatatcat

SEQ ID NO: 269471 - DNA, 75 bp, synthetic construct
  source 1..75: mol_type = other DNA
tcggcattaccactaaagccggtgatatgactgtttataactacgacgggaaaacgcgcaagtttctgtcgactt

SEQ ID NO: 269472 - DNA, 75 bp, synthetic construct
  source 1..75: mol_type = other DNA
gatgcgccggtcgatgagaaagaaggttttgccatttgccgcacggccagccttgatgggtgggattatgttgtc

SEQ ID NO: 269473 - DNA, 75 bp, synthetic construct
  source 1..75: mol_type = other DNA
acgtgagctgaggaaaaagctacaacgcattgaaatggagaatgaaatattaattcaattggtcaacgcaacagt

SEQ ID NO: 269474 - DNA, 75 bp, synthetic construct
  source 1..75: mol_type = other DNA
ccgtggggccaatcagttttacagcgtcatggaacggctgaagatgctcgattccctgcaggcaacacagcttca

SEQ ID NO: 269475 - DNA, 75 bp, synthetic construct
  source 1..75: mol_type = other DNA
tgcagccttccctcaagaaagaatgccggagaacacgccttacgcctttaacacgcttgtgcttgttgatgctga

SEQ ID NO: 269476 - DNA, 75 bp, synthetic construct
  source 1..75: mol_type = other DNA
attatctcaacaaactgttgggaaatgagcttgtcgcaatcaatcagtactttctccatgcccgaatgtttaaaa

SEQ ID NO: 269477 - DNA, 75 bp, synthetic construct
  source 1..75: mol_type = other DNA
cgtctgggtaatgcacgcgcggatgacctggtgcgcaataacgggattgcggctaatgcagtgtccctgcataag

SEQ ID NO: 269478 - DNA, 75 bp, synthetic construct
  source 1..75: mol_type = other DNA
aatagaccctcaattgaaattgaaacgtttcatacctctttggattgttgatattatggggtatagagatattaa

SEQ ID NO: 269479 - DNA, 75 bp, synthetic construct
  source 1..75: mol_type = other DNA
ctttgtgtagatgatggaggagacccaatacttcgatattctcactccgagtcaggagaaacttgcggtaatata

SEQ ID NO: 269480 - DNA, 75 bp, synthetic construct
  source 1..75: mol_type = other DNA
tctccgataacaccagaacaaatcgaaatacgtaagctgaggaaaaagctacaacgcattgaaatggagaatgaa

SEQ ID NO: 269481 - DNA, 75 bp, synthetic construct
  source 1..75: mol_type = other DNA
aattcagacgtgaatccgctcagttagtggtggatcaacactatacggttgcagatgccgcaaatgccatggatg

SEQ ID NO: 269482 - DNA, 75 bp, synthetic construct
  source 1..75: mol_type = other DNA
gcagatgccgcgaaagctatggatgttggcctttccacaatgacaagatgggtcaaacaactgcgtgatgagcgt

SEQ ID NO: 269483 - DNA, 75 bp, synthetic construct
  source 1..75: mol_type = other DNA
cgcattgaaatggagaatgaaatattaaaaaaggctaccgcgctcttgatgtcagtgaaccgccccgggaatcct

SEQ ID NO: 269484 - DNA, 75 bp, synthetic construct
  source 1..75: mol_type = other DNA
ggttgcggaggttttttgaatgagacgaacatttacagcagaggaaaaagcctctgttttttgaactatggaaga

SEQ ID NO: 269485 - DNA, 75 bp, synthetic construct
  source 1..75: mol_type = other DNA
aagctacaacgcattgaaatggagaatgaaatattaaaaaaggctaccgcgctcttgatgtcagactccctgaac

SEQ ID NO: 269486 - DNA, 75 bp, synthetic construct
  source 1..75: mol_type = other DNA
ctgctcatccgtacttttgcgcttctgatgcagggaaaattgttagtcagaaccgagcgcgccgttttaatgaaa

SEQ ID NO: 269487 - DNA, 75 bp, synthetic construct
  source 1..75: mol_type = other DNA
ggcgaaagaaccgggggcgaatctgttcctgatggcggtacaggatattcgcgttggcggacgtcagtcgaacgc

SEQ ID NO: 269488 - DNA, 75 bp, synthetic construct
  source 1..75: mol_type = other DNA
gcaaatcgacggcgtcggtgatgtcgatgtcggcggcagctcgctgcccgccgtgcgcgtcgggctgaacccgca

SEQ ID NO: 269489 - DNA, 75 bp, synthetic construct
  source 1..75: mol_type = other DNA
tttcgcccgattatgatgaccaccctggcggcactgtttggcgcgttgccgctggtactgtcgggcggagacggc

SEQ ID NO: 269490 - DNA, 75 bp, synthetic construct
  source 1..75: mol_type = other DNA
gagattccagaaaccacgctgagcgcgctggtggcggaacaagcggcaaaaacaccggatgctccggcgctggca

SEQ ID NO: 269491 - DNA, 75 bp, synthetic construct
  source 1..75: mol_type = other DNA
gaaggccatcgttaaccgcctgttatggatgcaaaaccactactcgctcacaggcgaagatgtcgttgctcaaaa

SEQ ID NO: 269492 - DNA, 75 bp, synthetic construct
  source 1..75: mol_type = other DNA
gctggcgaatttactgcgtgagcgtggcgtaaaacctggcgacagtgtggcagtggcgttgccgcgctcggtctt

SEQ ID NO: 269493 - DNA, 75 bp, synthetic construct
  source 1..75: mol_type = other DNA
gtctgtcactggtggcggtgttcctgccgctgctgttgatgggcggattgccgggccgactgttacgcgaatttg

SEQ ID NO: 269494 - DNA, 75 bp, synthetic construct
  source 1..75: mol_type = other DNA
gcgcgaatgggagccgaaaatccgcaaaaaactggcgacattgccggaactggcggacgtgaactccgaccagca

SEQ ID NO: 269495 - DNA, 75 bp, synthetic construct
  source 1..75: mol_type = other DNA
ggcggcgcggttcgtctgggcgatgtggcgacggtgaccgactcagtgcaggatgtgcgcaacgccgggatgacc

SEQ ID NO: 269496 - DNA, 75 bp, synthetic construct
  source 1..75: mol_type = other DNA
ttgctctgcaacaaggctacggcaagtcgctaaaatgggtgctcaatcatacccgtctggtgggcgtggtgctgc

SEQ ID NO: 269497 - DNA, 75 bp, synthetic construct
  source 1..75: mol_type = other DNA
tcgccccgctgccgcaggtcgattttccggtgattatggtcagcgcctcgctgcccggtgcgtcaccagaaacaa

SEQ ID NO: 269498 - DNA, 75 bp, synthetic construct
  source 1..75: mol_type = other DNA
aaattatccgtgacgatccggcagtggataatgtcaccggctttacaggcggttcgcgagtgaacagcgggatga

SEQ ID NO: 269499 - DNA, 75 bp, synthetic construct
  source 1..75: mol_type = other DNA
tgagatcctcgccaataaacagcgttacgatgagccaacgttaatccagcatgctgaacgcctgaaaatgctgat

SEQ ID NO: 269500 - DNA, 75 bp, synthetic construct
  source 1..75: mol_type = other DNA
atattccgggtgttcaggcgcaaacccacaccctggcaacggggccggttaatgaccttgaactggcgctgttcc

SEQ ID NO: 269501 - DNA, 75 bp, synthetic construct
  source 1..75: mol_type = other DNA
tattctgcgcctgaaactggaatttaccgacggggaattccgccagctggctacgcaactttcaggtgtgcagcg

SEQ ID NO: 269502 - DNA, 75 bp, synthetic construct
  source 1..75: mol_type = other DNA
cgctggataccggctatccggacgatcgcctgaaaatgatgctggaagatgcgcgtccgtcgctgttaatcacca

SEQ ID NO: 269503 - DNA, 75 bp, synthetic construct
  source 1..75: mol_type = other DNA
ggcaacagttaacgggcgcgccgttgcataatctatatggcccgacggaagcggcggtagatgtgagttggtatc

SEQ ID NO: 269504 - DNA, 75 bp, synthetic construct
  source 1..75: mol_type = other DNA
taaccaggctgccgcaacgggaggcgatgcgcgtcagttggttgggtatctggtgtcgcaatcaggcctgccgct

SEQ ID NO: 269505 - DNA, 75 bp, synthetic construct
  source 1..75: mol_type = other DNA
tgctataacgccccgcttacaccgcagggcagtgcgccgctgcaactttcacaaccgcaccacacggcttatatc

SEQ ID NO: 269506 - DNA, 75 bp, synthetic construct
  source 1..75: mol_type = other DNA
gatgcgcgtcagttggtgggctatctggtgtcgcaatcaggtctgccgttggataccagcgcattacaggcacag

SEQ ID NO: 269507 - DNA, 75 bp, synthetic construct
  source 1..75: mol_type = other DNA
tgagatcctcgccaataaacagcgttacgatgagccaacgttaattcaacacgctgaacgcctgaaaatgctgat

SEQ ID NO: 269508 - DNA, 75 bp, synthetic construct
  source 1..75: mol_type = other DNA
accgctgttcggtccggtactcaatatcaaggtatttgattaccaactggatattcctggtgttcaggcgcaaac

SEQ ID NO: 269509 - DNA, 75 bp, synthetic construct
  source 1..75: mol_type = other DNA
cccgcgtcactttctccggcacctttaccggggcgcagcgcctcggcagatattctgcgcctgaaactggaattt

SEQ ID NO: 269510 - DNA, 75 bp, synthetic construct
  source 1..75: mol_type = other DNA
ggactgtgcacacgttgatattatctcagcagtggcgtttgaaaaaattggtccaattattcgtgcagcgctgaa

SEQ ID NO: 269511 - DNA, 75 bp, synthetic construct
  source 1..75: mol_type = other DNA
tgcgtattcttgatgcgatgatgcatccggtgccgccaggtgtggcgggtgatctctatctcaccggtattcaac

SEQ ID NO: 269512 - DNA, 75 bp, synthetic construct
  source 1..75: mol_type = other DNA
agtgatatcaaaaatgagcccggtatgcggcattaccacagccatatcactctgtttgaatcgcgtatgggggca

SEQ ID NO: 269513 - DNA, 75 bp, synthetic construct
  source 1..75: mol_type = other DNA
tgcatgatgagccactgacctgctgtgatgcagaaaagtttgacccacgatacctggatatggttctggatactg

SEQ ID NO: 269514 - DNA, 75 bp, synthetic construct
  source 1..75: mol_type = other DNA
ctgcgtagcggtgaacatactgagattaacgacgtgatccatgtacggggtgacgatggaacagaaactgattaa

SEQ ID NO: 269515 - DNA, 75 bp, synthetic construct
  source 1..75: mol_type = other DNA
gcgcgtgagggcaggttatacgcgccccgtcagggtggcgatatatctgacagtgtcgggaaaaaaacagttcag

SEQ ID NO: 269516 - DNA, 75 bp, synthetic construct
  source 1..75: mol_type = other DNA
cggaaacgaactgaacccatttcagcagagcgtctgagtggcattgtggcagggctgcgggcctccctgcgtaac

SEQ ID NO: 269517 - DNA, 75 bp, synthetic construct
  source 1..75: mol_type = other DNA
acttcgcaacctgttgtcacccggaaacgtacagaacccatttcagcagaacgtctgagtggcattgtggcaggg

SEQ ID NO: 269518 - DNA, 75 bp, synthetic construct
  source 1..75: mol_type = other DNA
attacgttgaaacgaggatctcactcgatcagcatcttatcagccagccagccagccagccagccagccagccag

SEQ ID NO: 269519 - DNA, 75 bp, synthetic construct
  source 1..75: mol_type = other DNA
cgccagagagcgccaatttaagcggcagaataaactgaatgcctggctggatagtccggaaatacgccaattctg

SEQ ID NO: 269520 - DNA, 75 bp, synthetic construct
  source 1..75: mol_type = other DNA
gcacgcatgatgcccggaccggggatatccgtgatgtggcacagccgtgtgcggaggtgctggttcgcctgggaa

SEQ ID NO: 269521 - DNA, 75 bp, synthetic construct
  source 1..75: mol_type = other DNA
tgggcggtgacgtgggagcaggaatttcagctggatgaagagattgatctcgccgcgctcccggacttcctgcgc

SEQ ID NO: 269522 - DNA, 75 bp, synthetic construct
  source 1..75: mol_type = other DNA
tacagttctgcacccgctatattcggggtgatcacttacatcattaatgacgccaggaacgcggagtttgatgac

SEQ ID NO: 269523 - DNA, 75 bp, synthetic construct
  source 1..75: mol_type = other DNA
gatgcgtcacttactgcctgcgatggttcactgctgatatgtgcaatcgacggggaattcaggatcaagcgatat

SEQ ID NO: 269524 - DNA, 75 bp, synthetic construct
  source 1..75: mol_type = other DNA
ccgaaccacgcgcctctgtccgcccggtatcggaggaaaatatcagggatctggtgaagaaaattagggaaaaaa

SEQ ID NO: 269525 - DNA, 75 bp, synthetic construct
  source 1..75: mol_type = other DNA
cgtttcaggcgatgcgcggtaagttgcaggatttcatgaaaattatccgtgacgatccggcagtggataatgtca

SEQ ID NO: 269526 - DNA, 75 bp, synthetic construct
  source 1..75: mol_type = other DNA
ccgcaggtcgattttccggtgattatggtcagcgcctcgctgcccggtgcgtcgccggagacaatggcgtcttcc

SEQ ID NO: 269527 - DNA, 75 bp, synthetic construct
  source 1..75: mol_type = other DNA
atactgggcttccgtatgctgccggtcgccccgctgccacaggtcgattttccggtgattatggtcagcgcctcg

SEQ ID NO: 269528 - DNA, 75 bp, synthetic construct
  source 1..75: mol_type = other DNA
tcacaggtaatcctgattatcgccgccatcgccacggtgtatatcgtgctgggtatcctttacgagagttacgtg

SEQ ID NO: 269529 - DNA, 75 bp, synthetic construct
  source 1..75: mol_type = other DNA
ggtgaatcatcagggactgtccgcagcttcaaccatctcgttcaacctgccgaccgggaaatcgctttcggacgc

SEQ ID NO: 269530 - DNA, 75 bp, synthetic construct
  source 1..75: mol_type = other DNA
tgatgtgcggctggatgctgaaagccagcaagccgcgtgaacaaacacggctacgcggttttggccggatgctgg

SEQ ID NO: 269531 - DNA, 75 bp, synthetic construct
  source 1..75: mol_type = other DNA
tcttagcgatgcgctgatggaagcgggtgccgtttctatcacttttcaggatacccacgatacgccagtatttga

SEQ ID NO: 269532 - DNA, 75 bp, synthetic construct
  source 1..75: mol_type = other DNA
aaaaaaggcgaaccgttcctgtgttgcgacattgccgcactgcggggcgaagccagcaacgcggagcacacctgg

SEQ ID NO: 269533 - DNA, 75 bp, synthetic construct
  source 1..75: mol_type = other DNA
ccgaaccacgggcctctgcccgcccggtatcggaggaaaatatcagggatctggtgaagaaaattcgggaaaata

SEQ ID NO: 269534 - DNA, 75 bp, synthetic construct
  source 1..75: mol_type = other DNA
caccatcgctactggtttcgtggtggatgacgccatcgtggtgctggaaaacattgcccgtcatctggaagcggg

SEQ ID NO: 269535 - DNA, 75 bp, synthetic construct
  source 1..75: mol_type = other DNA
aactgaaaaccgccgctgaatatcagccgttgattattcattacaacaacggcggcgcggttcgtctgggtgatg

SEQ ID NO: 269536 - DNA, 75 bp, synthetic construct
  source 1..75: mol_type = other DNA
tgaagcttatgccgacagcttcgcactggacccggtcgtggaaaaagaagagtggtgccgtattaccggtcgtaa

SEQ ID NO: 269537 - DNA, 75 bp, synthetic construct
  source 1..75: mol_type = other DNA
cgtatggggcttgagtatgtcgatatcttttactctcatcgcgtcgatgaaaatacgccgatggaagaaaccgcc

SEQ ID NO: 269538 - DNA, 75 bp, synthetic construct
  source 1..75: mol_type = other DNA
agaaaacggcccggaagataccacgcaagatgacgatatgaaacaaagcatcgtcaaatggctgttcgaactgaa

SEQ ID NO: 269539 - DNA, 75 bp, synthetic construct
  source 1..75: mol_type = other DNA
gacgaaaaggccttagtagaagaggaacccagtgataacgatttggccgaagaggaactgttatcgcagggtgcc

SEQ ID NO: 269540 - DNA, 75 bp, synthetic construct
  source 1..75: mol_type = other DNA
agtttaaacgcgaatccgctcaactggtggttgaccagatatacaccgtggcagatgccgccaaagctatggatg

SEQ ID NO: 269541 - DNA, 75 bp, synthetic construct
  source 1..75: mol_type = other DNA
tgatcgcgtgacgtcggtattgatcggtgccagccgtgcggagcaactggaggagaacgtacaggcgctgaataa

SEQ ID NO: 269542 - DNA, 75 bp, synthetic construct
  source 1..75: mol_type = other DNA
atggtctggttagcgaatcccgaacgttacgggcagatgcaataccgctattgcggaaaaagtggtttacgcctg

SEQ ID NO: 269543 - DNA, 75 bp, synthetic construct
  source 1..75: mol_type = other DNA
aattcagaaataataatgctccaaatacatttggggttggcgatatccacggaggtcctgaggggcttgagttaa

SEQ ID NO: 269544 - DNA, 75 bp, synthetic construct
  source 1..75: mol_type = other DNA
ttacgggaaaaatattccgcttgaggaaacggtggtctcgccacaagccgttttcgatgcgccacaactcaccac

SEQ ID NO: 269545 - DNA, 75 bp, synthetic construct
  source 1..75: mol_type = other DNA
aaagagttcgatctcagcaacccgctggtccaggctaagctcaaagaacgctacggcaaaaatattccgcttgag

SEQ ID NO: 269546 - DNA, 75 bp, synthetic construct
  source 1..75: mol_type = other DNA
agtcaattttgatgcttcaagagtagtgccaactgcctcagagaacagaccaagaaacattgcatttaactatat

SEQ ID NO: 269547 - DNA, 75 bp, synthetic construct
  source 1..75: mol_type = other DNA
aaagtctctgcaatcagacaccccagccaccgatgctttcctggctgaagtacgggcgcagggggtggatgctgc

SEQ ID NO: 269548 - DNA, 75 bp, synthetic construct
  source 1..75: mol_type = other DNA
atcaccgaagggattgcactcggctttatgtcgtactgcatcatgaaagtgtgcaccgggcgctggcgcgatctg

SEQ ID NO: 269549 - DNA, 75 bp, synthetic construct
  source 1..75: mol_type = other DNA
ccttgaacaggccctgcaacaatccgcctccaactggggcgagctggaaaaagaatttatgcgatttaaagcgga

SEQ ID NO: 269550 - DNA, 75 bp, synthetic construct
  source 1..75: mol_type = other DNA
aagacggatattttgtaaacgtgcgcatcattaatgatgcaaaaaaatcgtcaatattcgatgaatacgtggttg

SEQ ID NO: 269551 - DNA, 75 bp, synthetic construct
  source 1..75: mol_type = other DNA
cagcttctcatggagcgacgatcgccagtactgttcggaagtgggtggaaggtttaccagaacgcgctgggaatg

SEQ ID NO: 269552 - DNA, 75 bp, synthetic construct
  source 1..75: mol_type = other DNA
ttgcacgaacttgtaggccggataaggcgttcacgccgcatccggcataaacaacgagcacgttgtctgcgaccc

SEQ ID NO: 269553 - DNA, 75 bp, synthetic construct
  source 1..75: mol_type = other DNA
attacccacggcgctgcggacatcgctcggcattcagcttgcccctgcgctggtggcttgtagcgcctggttgag

SEQ ID NO: 269554 - DNA, 75 bp, synthetic construct
  source 1..75: mol_type = other DNA
ctggcgaaaatgcttttcggttatggactgctgcaactgctgtttatgctacgtctgatgccatggtatctctcc

SEQ ID NO: 269555 - DNA, 75 bp, synthetic construct
  source 1..75: mol_type = other DNA
gcacagcgtgctggcggaagtgcgccatccggtgatgagcagttttgttagtttgtttccggcgacgacgatgct

SEQ ID NO: 269556 - DNA, 75 bp, synthetic construct
  source 1..75: mol_type = other DNA
gaggattatatccgtggccagacagtcatcgaggccaaactggacgcgctttacaacaaactggaagtggtacag

SEQ ID NO: 269557 - DNA, 75 bp, synthetic construct
  source 1..75: mol_type = other DNA
agcgtcaggcggcgcggttcgcctcccttgagcagtcgctgcaacagtccgcctccaactggggcgagctggaaa

SEQ ID NO: 269558 - DNA, 75 bp, synthetic construct
  source 1..75: mol_type = other DNA
ccttgaacaggccctgcaacagtccgcctccaactggggcgagctggaaaaggaatttatgcgatttaaagcgga

SEQ ID NO: 269559 - DNA, 75 bp, synthetic construct
  source 1..75: mol_type = other DNA
caaaaactggcgcaaacggcaaaacgttatctcggcaaaccgtacgatttcagcttctcgtggagcgacgatcgc

SEQ ID NO: 269560 - DNA, 75 bp, synthetic construct
  source 1..75: mol_type = other DNA
atgaaagatttaacactcaaatttgccgacagggccgacttttcggcctttatggatagcattggctattatgat

SEQ ID NO: 269561 - DNA, 75 bp, synthetic construct
  source 1..75: mol_type = other DNA
gacagctattacctcatacgggcttttgaaagtgaagaacagatgaaaagcgttcttgatgatttctatgcgagt

SEQ ID NO: 269562 - DNA, 75 bp, synthetic construct
  source 1..75: mol_type = other DNA
agataactggcaacaggcagtatcagaagaacgtgctattcgttgtgcaaacagattaattcaatgtaaaggata

SEQ ID NO: 269563 - DNA, 75 bp, synthetic construct
  source 1..75: mol_type = other DNA
gcggcgcaagaaacgctgccgcaactggcaacccgactggcagcacaactgaaaaaaatgcgccgccatcaacgc

SEQ ID NO: 269564 - DNA, 75 bp, synthetic construct
  source 1..75: mol_type = other DNA
ggcagcagttaaccggcgcgccgttacataatctttatggcccgacggaagcagcggtggatgtgagctggtatc

SEQ ID NO: 269565 - DNA, 75 bp, synthetic construct
  source 1..75: mol_type = other DNA
agaccagacaggattctggttggcagctattgatgatacccgcatggattgtcattcaatagcttattatgatat

SEQ ID NO: 269566 - DNA, 75 bp, synthetic construct
  source 1..75: mol_type = other DNA
tgcgcaatttgcagcaaagcgcgccaatcaatttttcgctggtggctgttaacctcgatcaaaagcaaccgggct

SEQ ID NO: 269567 - DNA, 75 bp, synthetic construct
  source 1..75: mol_type = other DNA
atgcaatatgcattatttgatgggatggaacgaaagtttttgctggatgctcttgaatttggtgttattaaggac

SEQ ID NO: 269568 - DNA, 75 bp, synthetic construct
  source 1..75: mol_type = other DNA
ggatgcgttttacggaagataacggcgaagtctggcaatgggtcgatgatgcgctgacgttcgaactgccagaaa

SEQ ID NO: 269569 - DNA, 75 bp, synthetic construct
  source 1..75: mol_type = other DNA
acaaccgcaccacacggcttatatcatctttacctctggctccaccggcaggccgaaaggggtaatggtcgggca

SEQ ID NO: 269570 - DNA, 75 bp, synthetic construct
  source 1..75: mol_type = other DNA
tggcaacccgactggcagctcaactgaaaaaaatgcgtcgccatcaacgttacgatgccgaacaaattgtccgtg

SEQ ID NO: 269571 - DNA, 75 bp, synthetic construct
  source 1..75: mol_type = other DNA
aggccgttactcatgcttgtgtaattaaccaggcgacagcaaccggcggcgatgcgcgccagttggtagggtatc

SEQ ID NO: 269572 - DNA, 75 bp, synthetic construct
  source 1..75: mol_type = other DNA
gccagggcgtgcgccgaaagcgggcagtgaaacgattatcgccgcggcattctcgtcgttgctgggttgtgacgt

SEQ ID NO: 269573 - DNA, 75 bp, synthetic construct
  source 1..75: mol_type = other DNA
ggattgtgcgcatgtggatattatttccccggagtattttaaagaaataggaccactaataaatacacaaattaa

SEQ ID NO: 269574 - DNA, 75 bp, synthetic construct
  source 1..75: mol_type = other DNA
tctggttttgctgtaacagcctttttgagaattaaagaccaggatatcgcaacgaatatacttaaccgtgaggga

SEQ ID NO: 269575 - DNA, 75 bp, synthetic construct
  source 1..75: mol_type = other DNA
ggcggtcagcgtggctattccgggatggcagtttctgacacagccatcaccggaggagcagcattttacctgggg

SEQ ID NO: 269576 - DNA, 75 bp, synthetic construct
  source 1..75: mol_type = other DNA
atcgcaaggggaaagtgcaggcggagcagtcaccctcccttcagaaatccccgcccacgtttctgaaaccgtttg

SEQ ID NO: 269577 - DNA, 75 bp, synthetic construct
  source 1..75: mol_type = other DNA
gaaaaagcgcagtccgctctggcggagttaggcattgaatttcagtctgatgcgcagcatgtgaccatcagagcc

SEQ ID NO: 269578 - DNA, 75 bp, synthetic construct
  source 1..75: mol_type = other DNA
gccgtgccggaaggtggacaaaaagagcgccgtttaggggcgatttgcggcaccgcttttctcgaacaagcgctg

SEQ ID NO: 269579 - DNA, 75 bp, synthetic construct
  source 1..75: mol_type = other DNA
gaaaaagcgcagtctgccctggcggaattgggtattgatttccagtcagatgcacagcatgtgaccatcagggcc

SEQ ID NO: 269580 - DNA, 75 bp, synthetic construct
  source 1..75: mol_type = other DNA
ttgactggaaaattatgttgcaggaacgagaggactgaggaacaaagcttattctggcgctgtccgtccttgctg

SEQ ID NO: 269581 - DNA, 75 bp, synthetic construct
  source 1..75: mol_type = other DNA
atggaacggtatggatgtgatatcggcctgggcgcgcggattggtaaaggcctcatgttacctcatcatgcagga

SEQ ID NO: 269582 - DNA, 75 bp, synthetic construct
  source 1..75: mol_type = other DNA
agtatggatgtgatattggtctgggggcgcagattggtaaaggcctcgtgctgccccaccattcaggtgtcgtca

SEQ ID NO: 269583 - DNA, 75 bp, synthetic construct
  source 1..75: mol_type = other DNA
ggtcatcaaaagatagttccttttgccgcgttaataaaagctgatgaatgcatcatttcaaaaatttcttcgtat

SEQ ID NO: 269584 - DNA, 75 bp, synthetic construct
  source 1..75: mol_type = other DNA
aatcgtattatcgccgtaggccaccagcatcatctgaacgtcgttggctggaacccaggaccggcgctttcagtt

SEQ ID NO: 269585 - DNA, 75 bp, synthetic construct
  source 1..75: mol_type = other DNA
tgtggttgagcaataacactccgttcaaaaatggcgtcgccattcgcggtggcgtgccggtttgctggccgtggt

SEQ ID NO: 269586 - DNA, 75 bp, synthetic construct
  source 1..75: mol_type = other DNA
gttcgactcctgacgcaggatatgcaaaggggggatattctgattactaaatcgttaacttgttttggtaatacg

SEQ ID NO: 269587 - DNA, 75 bp, synthetic construct
  source 1..75: mol_type = other DNA
tatgactcttctcctgataacattgttttatacacagacctttatggttcattcctctggaatattatccccttt

SEQ ID NO: 269588 - DNA, 75 bp, synthetic construct
  source 1..75: mol_type = other DNA
tttcagcgcggcggttgatttcttaggcctgcaaaaagaggtggatcgcaaccgtatcgggttgctcggcatctg

SEQ ID NO: 269589 - DNA, 75 bp, synthetic construct
  source 1..75: mol_type = other DNA
gattgtgaccggtgagaaagcgcattcacgctattttgctgaagatgcttacaaggcggttggcagtaaagacaa

SEQ ID NO: 269590 - DNA, 75 bp, synthetic construct
  source 1..75: mol_type = other DNA
atgctcaacagaatctacagaaaattgcaatatcattctgtggaacaaatgatatctgcgatattgttgattata

SEQ ID NO: 269591 - DNA, 75 bp, synthetic construct
  source 1..75: mol_type = other DNA
acaaaatattgatgtgacaaatagcgagagcgcattaattattaaaatgaatgattatggcgatttgggtgatgc

SEQ ID NO: 269592 - DNA, 75 bp, synthetic construct
  source 1..75: mol_type = other DNA
ttcttcttataagcttgcagtatatagcaatacaggtaaggttctcggtccagtaagttatctggcatctgaact

SEQ ID NO: 269593 - DNA, 75 bp, synthetic construct
  source 1..75: mol_type = other DNA
ggcgatctacaacaaagacaccaaccgctatatcctgcgtaacctgatggaaaatggcctgaaagatcgggacgg

SEQ ID NO: 269594 - DNA, 75 bp, synthetic construct
  source 1..75: mol_type = other DNA
agctggtggtctcacatggtgggtaaccagaaaaaaaacagtaaaaaaaacattggaagcatacatagaaataat

SEQ ID NO: 269595 - DNA, 75 bp, synthetic construct
  source 1..75: mol_type = other DNA
tatcaactggctgattatctttctaccgaatgtagcgacatctgggcgctgcaaggtaaatcaaccgaaactaat

SEQ ID NO: 269596 - DNA, 75 bp, synthetic construct
  source 1..75: mol_type = other DNA
gcaagccgctggataaacagaaattccgtattttcgatcactggggcaactttgagtatcacgaactgcataccg

SEQ ID NO: 269597 - DNA, 75 bp, synthetic construct
  source 1..75: mol_type = other DNA
taaccgcgccgcgcacggcggacgtatcaaagctaaagatacttactggctgcttaaggaagcatatttactggg

SEQ ID NO: 269598 - DNA, 75 bp, synthetic construct
  source 1..75: mol_type = other DNA
tattgatgtcccggagattgtgaatctggtctttgccaaaccggtcaaatcaaaagtgaagttctggcagatgat

SEQ ID NO: 269599 - DNA, 75 bp, synthetic construct
  source 1..75: mol_type = other DNA
tggattttaataaacataagggtgaaaaagattttctgtttttatcaaaggacattgttacatcgacagatgagt

SEQ ID NO: 269600 - DNA, 75 bp, synthetic construct
  source 1..75: mol_type = other DNA
gctgatggcatcgacctatccggcaaatgtcgcccaggccgtgcagtggtcacacgataacccgctcaaacaagg

SEQ ID NO: 269601 - DNA, 75 bp, synthetic construct
  source 1..75: mol_type = other DNA
aacaacaatcacaatcggactaacggacaagaacaaaatttactgcgcaatgaaggtagcagtcgaaccggcaag

SEQ ID NO: 269602 - DNA, 75 bp, synthetic construct
  source 1..75: mol_type = other DNA
cttaactggaatttaaatgcctgtagtcgtttcacaggccaaatgatactttggtctgtgaaaaaagaaaccgat

SEQ ID NO: 269603 - DNA, 75 bp, synthetic construct
  source 1..75: mol_type = other DNA
gagatgaaacacgccgatcgttatattgagcgcattctttttctggaaggtcttccaaacttacaggacctgggc

SEQ ID NO: 269604 - DNA, 75 bp, synthetic construct
  source 1..75: mol_type = other DNA
gtgacaacgggccagctgcgttgatcaacattggcattgtccatgaaaatgttttgaatgcgttttgtgctgact

SEQ ID NO: 269605 - DNA, 75 bp, synthetic construct
  source 1..75: mol_type = other DNA
gaacagtaacggtatctgggatcgcgaaccggtaaaagagtccgaccagattggatttcgtctgaaggagcatgt

SEQ ID NO: 269606 - DNA, 75 bp, synthetic construct
  source 1..75: mol_type = other DNA
tccagatttttgaccatgacgcgacagaaaaactacgcacttacttttcaaatgtatgtgctgattttgaagctg

SEQ ID NO: 269607 - DNA, 75 bp, synthetic construct
  source 1..75: mol_type = other DNA
aacgcgggctggtggtgatcaagcccagcggcgttgcctacgaaaccatgaaagcggacgatatggtggtggttg

SEQ ID NO: 269608 - DNA, 75 bp, synthetic construct
  source 1..75: mol_type = other DNA
ccctgccctgaaggacggggttttacggcgcaccggataagcctggagattatctacaccagcatggacatcatt

SEQ ID NO: 269609 - DNA, 75 bp, synthetic construct
  source 1..75: mol_type = other DNA
ctgcagcatcccgcccgtcacctgtgaaaggcactgccagcgtggcagccatatccagtgcaaacactctggtat

SEQ ID NO: 269610 - DNA, 75 bp, synthetic construct
  source 1..75: mol_type = other DNA
cagcaacacttcacgttttgatggcgaataccacaaccgtgaagacgggaatgttcgcccaccgcaacgccagtt

SEQ ID NO: 269611 - DNA, 75 bp, synthetic construct
  source 1..75: mol_type = other DNA
acagcctcaaaggcgtatcgagtaggttactgcgacgagatcgaccagatattgcagtcaggtattactacaaag

SEQ ID NO: 269612 - DNA, 75 bp, synthetic construct
  source 1..75: mol_type = other DNA
gtgaaacctgctgctcgtcgccgcgctcgtgagtgtgccgtccaggcgctctactcttggcagttgtcccagaac

SEQ ID NO: 269613 - DNA, 75 bp, synthetic construct
  source 1..75: mol_type = other DNA
tctgtctcctatcagcaaagctctctcgccgacctgctggcgctgattcagttgctgcaggcgcaactgggaatt

SEQ ID NO: 269614 - DNA, 75 bp, synthetic construct
  source 1..75: mol_type = other DNA
ttgctggtgggatgactgatgagcagctcagagacgctctgcagaaagcgcagcaggcttatatcgacctgacta

SEQ ID NO: 269615 - DNA, 75 bp, synthetic construct
  source 1..75: mol_type = other DNA
tgtcagaacgcgctggaagcagagaaagatttgaaagtgtttggcaaaagtgatgatggcctctcaatgccaaaa

SEQ ID NO: 269616 - DNA, 75 bp, synthetic construct
  source 1..75: mol_type = other DNA
ttgaagcactgaatgccatggggaacggaaatatggtggggttgctggatattcgctttgagcgtattggcgacg

SEQ ID NO: 269617 - DNA, 75 bp, synthetic construct
  source 1..75: mol_type = other DNA
ttaatgcaatgggaatatcgaaagcaatggcggaaaagattttagttgctaaatcacggatcgttggaagtagtg

SEQ ID NO: 269618 - DNA, 75 bp, synthetic construct
  source 1..75: mol_type = other DNA
ttataacaaaaaactgtgtagagcaggtaaaaattatgctgattgtgtgagaagtaatccatcagggagcttagc

SEQ ID NO: 269619 - DNA, 75 bp, synthetic construct
  source 1..75: mol_type = other DNA
taaggaaattaaattataaatactgtgatggtttgttatgggagtttttacattatgaacgaactgcgaaaataa

SEQ ID NO: 269620 - DNA, 75 bp, synthetic construct
  source 1..75: mol_type = other DNA
ttgatgcagagcttagggacgcagtcaataaggggtttaaaattattgacaaagaaataaagtcactacaaatga

SEQ ID NO: 269621 - DNA, 75 bp, synthetic construct
  source 1..75: mol_type = other DNA
gcgcctcggtcatgtattttgccgaccacggcctggaacgtgaccctacgaagaagaacgtctattttcatggag

SEQ ID NO: 269622 - DNA, 75 bp, synthetic construct
  source 1..75: mol_type = other DNA
ggcatgtttgccgcaggtctgatcttgtatattgcagtcaaaccagacgtacatcttgatcatattcttttcggc

SEQ ID NO: 269623 - DNA, 75 bp, synthetic construct
  source 1..75: mol_type = other DNA
aagcgatgaaaatgacgcgcagatcgcagagcggttaacaggcgtagcgaagaactcggtgcaacacgagcacaa

SEQ ID NO: 269624 - DNA, 75 bp, synthetic construct
  source 1..75: mol_type = other DNA
tgcacgcttcgcagtttgctcaggccctgaagctacaaaaacagcacggctgggcgcagtttatcagtatgcagg

SEQ ID NO: 269625 - DNA, 75 bp, synthetic construct
  source 1..75: mol_type = other DNA
gttctgggatgtacccacttccctctattacaagatgaactgttgcaggtgctgccagagggaacccggttggtg

SEQ ID NO: 269626 - DNA, 75 bp, synthetic construct
  source 1..75: mol_type = other DNA
gcagtccagcgacagcgagctggatactttgcgccagcaacatcacgttctacagcagcaactggaactcaccac

SEQ ID NO: 269627 - DNA, 75 bp, synthetic construct
  source 1..75: mol_type = other DNA
tacagcagcaactggaactcaccacccgcaagctggaaaacctgaccgatattgaacgccagctctcgacccgca

SEQ ID NO: 269628 - DNA, 75 bp, synthetic construct
  source 1..75: mol_type = other DNA
tgggcgcagtttgtcagtatgcaggatcactacaatctgatttatcgcgaagaagagcgcgagatgctgccgctg

SEQ ID NO: 269629 - DNA, 75 bp, synthetic construct
  source 1..75: mol_type = other DNA
ggtaagcggtttgcatacgagatggctgcattatgggctgctgtgcatggtctctctgaccattgtggcgacgct

SEQ ID NO: 269630 - DNA, 75 bp, synthetic construct
  source 1..75: mol_type = other DNA
ctattgcgttgccgcaggtgcgtaaaaattacccttatgaggtgtttgtagagtggcatcggaaagaggttttta

SEQ ID NO: 269631 - DNA, 75 bp, synthetic construct
  source 1..75: mol_type = other DNA
atatggctcctgataaaatttatcataataacggttcttacgttgcggttgaggtcatctccaatattatttctg

SEQ ID NO: 269632 - DNA, 75 bp, synthetic construct
  source 1..75: mol_type = other DNA
aatgaaagagccaccagatactgttgttctggggtgtactcatttccctctattacgagaagaactgttacaggt

SEQ ID NO: 269633 - DNA, 75 bp, synthetic construct
  source 1..75: mol_type = other DNA
gtcactgcagtgcaagaacgttatccccttgcattggcggtggtggcttgcaacaccgccagtaccgtttcactt

SEQ ID NO: 269634 - DNA, 75 bp, synthetic construct
  source 1..75: mol_type = other DNA
cgtttcgtggtgctgaattttgacgatcggggtaccgtcacccatcgggcgatattgggggaaacctgtacggtg

SEQ ID NO: 269635 - DNA, 75 bp, synthetic construct
  source 1..75: mol_type = other DNA
aaaacggccagcgtgacggcttctgattctgttactgccacggtgccggtggtcatggtgaaagcatcaacccgc

SEQ ID NO: 269636 - DNA, 75 bp, synthetic construct
  source 1..75: mol_type = other DNA
atgaattatactgatattttaaagctgataattgttgtttcatctcccataaaactccacttgattgccactagc

SEQ ID NO: 269637 - DNA, 75 bp, synthetic construct
  source 1..75: mol_type = other DNA
aactcgcgcgcgcactgcgcaacatgattcgtaccggccttgtcgtcgaaaccaaccttaaagccggtcgctgcc

SEQ ID NO: 269638 - DNA, 75 bp, synthetic construct
  source 1..75: mol_type = other DNA
agttaaggctgcatggcatcacctgggccagaaagttgtgatgatggattcaccacaaacagcacttgtggaagc

SEQ ID NO: 269639 - DNA, 75 bp, synthetic construct
  source 1..75: mol_type = other DNA
ataaaggcagcgtattttcaatcaagaaagttcatgtattacccgagtctctacctgcagcgttgacctctctcg

SEQ ID NO: 269640 - DNA, 75 bp, synthetic construct
  source 1..75: mol_type = other DNA
ctgccacggtgccggtggtcatggtgaaagcatcaacccgcgtcaccctggacacaccggaggtggtctgcacca

SEQ ID NO: 269641 - DNA, 75 bp, synthetic construct
  source 1..75: mol_type = other DNA
atgaatacgttatccacgatacaggagctcgcgcgcgcgattcgcaacctcatccgctcaggtgtggtgactgag

SEQ ID NO: 269642 - DNA, 75 bp, synthetic construct
  source 1..75: mol_type = other DNA
tcatcaaacggtaaggtactgcatacccataaacaccccggcgacagcggcggcacaaccgggggacctctatga

SEQ ID NO: 269643 - DNA, 75 bp, synthetic construct
  source 1..75: mol_type = other DNA
gcaccaacaggctgattaccgacacgctggaagtgcagaagggcgggacgatgcgcggcaacattgaacacaccg

SEQ ID NO: 269644 - DNA, 75 bp, synthetic construct
  source 1..75: mol_type = other DNA
gctggaagtacagaagggcgggacgatgcgcggcaacattgaacacaccggcggtgaactctcatcaaacggtaa

SEQ ID NO: 269645 - DNA, 75 bp, synthetic construct
  source 1..75: mol_type = other DNA
ggaattaaaacggccagcgtgacggcttctgattctgttactgccacggtgccggtggtcatggtgaaagcgtca

SEQ ID NO: 269646 - DNA, 75 bp, synthetic construct
  source 1..75: mol_type = other DNA
atgaacactctcgcaaatattcaggaactcgcgcgcgcactgcgcaacataatccgcaccggcattatcgtcgaa

SEQ ID NO: 269647 - DNA, 75 bp, synthetic construct
  source 1..75: mol_type = other DNA
cagtgataccagctcgatggttgctaatgagttaatcaaacagcgtcacgaccctgattttgtacgtcaggttgt

SEQ ID NO: 269648 - DNA, 75 bp, synthetic construct
  source 1..75: mol_type = other DNA
cttatggcggcgtgttatctaatttttccgggaccgtaaaatataatggcagtagctatcctttcccgactacca

SEQ ID NO: 269649 - DNA, 75 bp, synthetic construct
  source 1..75: mol_type = other DNA
ttggcggtggcagcgccaatgtttatgtaaaccttgcgcccgccgtgaatgtggggcaaaacctggtcgtagatc

SEQ ID NO: 269650 - DNA, 75 bp, synthetic construct
  source 1..75: mol_type = other DNA
aagtgcgaccgcatcaacgatggagatagttgcaacaaacttactaatactaagcaaattcctaaaaagcaggaa

SEQ ID NO: 269651 - DNA, 75 bp, synthetic construct
  source 1..75: mol_type = other DNA
cgctgattgatgggcaaacggtagcagaaaaagcgcaaaagctatggcaggactatttacgccaaaggatgcagc

SEQ ID NO: 269652 - DNA, 75 bp, synthetic construct
  source 1..75: mol_type = other DNA
ccggaatttgtcgctcgccatattgccgaatggcagtatcagaatccgctggatctgataattactggctgccaa

SEQ ID NO: 269653 - DNA, 75 bp, synthetic construct
  source 1..75: mol_type = other DNA
ccggaatttgtcgctcgccatattgccgaatggcagcatcagaatccgctggatctgataattaccggctgccaa

SEQ ID NO: 269654 - DNA, 75 bp, synthetic construct
  source 1..75: mol_type = other DNA
tacaattttaaatatatatcccaacaagagaaggatgtcgtcctaaaggtctataaatcagtaagtaaaataatt

SEQ ID NO: 269655 - DNA, 75 bp, synthetic construct
  source 1..75: mol_type = other DNA
tgaaattgatgattcgaatttagatatcagccgaaaatcaggtttgaggtgctatctcatggggtggtcaaaaga

SEQ ID NO: 269656 - DNA, 75 bp, synthetic construct
  source 1..75: mol_type = other DNA
atagttgcaacaaacttactaatactaagcaatttcctcaaaagcaggaaaataaatataattgataggattgaa

SEQ ID NO: 269657 - DNA, 75 bp, synthetic construct
  source 1..75: mol_type = other DNA
gcaccaacaggctgattaccggcacgctggaagtacagaagggcgggacgatgcgcggcaacattgaacacaccg

SEQ ID NO: 269658 - DNA, 75 bp, synthetic construct
  source 1..75: mol_type = other DNA
cttatgagaaggtgatatcaacactgaaacgagcaagtccagagctatataatctttcaggccataggttaaggc

SEQ ID NO: 269659 - DNA, 75 bp, synthetic construct
  source 1..75: mol_type = other DNA
tgagttagccagtgaaatttttgattacataagcaatagcagggaaaaaatgacaaaaaggaaaaaacataattt

SEQ ID NO: 269660 - DNA, 75 bp, synthetic construct
  source 1..75: mol_type = other DNA
tggtcatgcgccaacggctgccgtcggctattcgctcggcggtaatatgctggcctgtttgctggcaaaagaagg

SEQ ID NO: 269661 - DNA, 75 bp, synthetic construct
  source 1..75: mol_type = other DNA
ttggctttattggcggtacattacttcatccgcaaatgtggctggagtcacgcattcctgactggttaacaacgt

SEQ ID NO: 269662 - DNA, 75 bp, synthetic construct
  source 1..75: mol_type = other DNA
ttggcttcattagcggtacgttactccacccgcaaatgtggcttgagtcacgcattcctgactggttatcaatgt

SEQ ID NO: 269663 - DNA, 75 bp, synthetic construct
  source 1..75: mol_type = other DNA
accgtctcgtggatgcactctcgcggcagcactggcatttgttgcttatttgctcaatcaacgctacggcagcgg

SEQ ID NO: 269664 - DNA, 75 bp, synthetic construct
  source 1..75: mol_type = other DNA
gcatgcaggtatttttcgttatttctggatatttttcctacatgctatttttacgctacccattgaaaaaatggt

SEQ ID NO: 269665 - DNA, 75 bp, synthetic construct
  source 1..75: mol_type = other DNA
atctcgcatggagtgaagaccctgcccaggcgaaacagaaaccgcgtttagtggtgtttcacgggctggagggca

SEQ ID NO: 269666 - DNA, 75 bp, synthetic construct
  source 1..75: mol_type = other DNA
atgaatcttaagctgcagctgaaaatcctctcttttctgcagttctgtctgtgggggagttggctaacgaccctc

SEQ ID NO: 269667 - DNA, 75 bp, synthetic construct
  source 1..75: mol_type = other DNA
ggctgattttcgctggttactccgtggttctggccttcgcgttcatggcgatgttcaaatataaacacgttcgtg

SEQ ID NO: 269668 - DNA, 75 bp, synthetic construct
  source 1..75: mol_type = other DNA
gctgtcttcatgcctgcgttgctggggattgtggccgacaaatggttaagtgcgaaatgggtttacgccatttgt

SEQ ID NO: 269669 - DNA, 75 bp, synthetic construct
  source 1..75: mol_type = other DNA
attcacccctatgcgcggctttagcaattgtcatctacaaactatgctgccgcgtttgtttcgtcgtcaggtgaa

SEQ ID NO: 269670 - DNA, 75 bp, synthetic construct
  source 1..75: mol_type = other DNA
gctctccgccgttctggttctgtttaccctgactctgccgtatattcccgttgctaaacagcaagctaaccagag

SEQ ID NO: 269671 - DNA, 75 bp, synthetic construct
  source 1..75: mol_type = other DNA
gcggtctttatgcctgcgctgctggggattgtggccgacaaatggttaagtgcgaaatgggtctatgccatttgc

SEQ ID NO: 269672 - DNA, 75 bp, synthetic construct
  source 1..75: mol_type = other DNA
ctgctcactttgccacaattcattatgttgcaatatgtcaaaggcaaagcggaaacctggcccaaactatccttg

SEQ ID NO: 269673 - DNA, 75 bp, synthetic construct
  source 1..75: mol_type = other DNA
ccatacccactccactcatgccaccgcatgggcgcaggcggggctggcgatcccggcgttaggcactacgcacgc

SEQ ID NO: 269674 - DNA, 75 bp, synthetic construct
  source 1..75: mol_type = other DNA
cgactacttctttggcgatatcccgtgcacgcgcggattaagcgaagaagaggtgcagggcgagtacgaactgaa

SEQ ID NO: 269675 - DNA, 75 bp, synthetic construct
  source 1..75: mol_type = other DNA
cacatcgacagcttcctgatgaataaacacttcatgcgtaagcatggtcctaacgcttattacgggcagaagtaa

SEQ ID NO: 269676 - DNA, 75 bp, synthetic construct
  source 1..75: mol_type = other DNA
atgtcggggaacatcgagcacaccggcgggaaatttacctcaaatggcgtgcaggtcgatgaccacgatcatggt

SEQ ID NO: 269677 - DNA, 75 bp, synthetic construct
  source 1..75: mol_type = other DNA
gcgacgcatcttgaactctaccgtcgttacccgtcgctcggcggcattgtccatacccattccactcatgccacc

SEQ ID NO: 269678 - DNA, 75 bp, synthetic construct
  source 1..75: mol_type = other DNA
gttacccgtcgcttggcggcatcgtgcatacccactccactcatgccaccgcatgggcgcaggcggggctggcta

SEQ ID NO: 269679 - DNA, 75 bp, synthetic construct
  source 1..75: mol_type = other DNA
cccctctgcctcggaggatgcgtggcatgtggttttccctgatggtgcggtcattgagtacgagcccgagaccag

SEQ ID NO: 269680 - DNA, 75 bp, synthetic construct
  source 1..75: mol_type = other DNA
tatgacaaatataatacgttggcctgggaattaatatcacacctgtggtttttactggtgttagtggtcatgacg

SEQ ID NO: 269681 - DNA, 75 bp, synthetic construct
  source 1..75: mol_type = other DNA
tgttcaattttattgtcatgcaaacgctattttatttgccgttctttatcctcggcgcactggctttcattttcc

SEQ ID NO: 269682 - DNA, 75 bp, synthetic construct
  source 1..75: mol_type = other DNA
gttatccgtcgcttggcggcattgtccatacccactccactcatgctaccgcatgggcgcaggcggggctggcga

SEQ ID NO: 269683 - DNA, 75 bp, synthetic construct
  source 1..75: mol_type = other DNA
agttacctacaatgaagcaaaggaactgctcattgcgtgtgatgcggcaattaggactatagagataatgcgaat

SEQ ID NO: 269684 - DNA, 75 bp, synthetic construct
  source 1..75: mol_type = other DNA
gcgggtcactgtcgtctaacggcaagatactccacacccataaacaccccggcgacagcggcgggcaaacggggg

SEQ ID NO: 269685 - DNA, 75 bp, synthetic construct
  source 1..75: mol_type = other DNA
tttgccaagctcatgacccagcagaatgtaaacgccatcagtcgtcatgcgccagatctcggtagaatgatgaaa

SEQ ID NO: 269686 - DNA, 75 bp, synthetic construct
  source 1..75: mol_type = other DNA
tggcaacgtcgccggggtgtcgtttggtatcaaaaataatgaaaaaaatatttattttaaaggctcacagttagg

SEQ ID NO: 269687 - DNA, 75 bp, synthetic construct
  source 1..75: mol_type = other DNA
gaaagttacggtattgatgcgggtcagccgctcattcttcacggcgtgcaggtaggccaggttattgatcgtaaa

SEQ ID NO: 269688 - DNA, 75 bp, synthetic construct
  source 1..75: mol_type = other DNA
ttagcgatttacccaccacgacggtcagtttaagcgcagaaactctaccagacgtacaggcgggatctgtcgtgc

SEQ ID NO: 269689 - DNA, 75 bp, synthetic construct
  source 1..75: mol_type = other DNA
aactgactggtcgggatgaaaaggatatccggcgtctctggcaggagaaagtggatgcaatgcaggagtctgcca

SEQ ID NO: 269690 - DNA, 75 bp, synthetic construct
  source 1..75: mol_type = other DNA
ttaatgacatccaaaacaaactgcaagcgctaaataaatttgcgaaagattcatgcaatgcaacttactctttcc

SEQ ID NO: 269691 - DNA, 75 bp, synthetic construct
  source 1..75: mol_type = other DNA
atctgtgctgactgtgctgcgacgattaacgacatccagaataaattgcaggcgttgaataaatttgccaaagat

SEQ ID NO: 269692 - DNA, 75 bp, synthetic construct
  source 1..75: mol_type = other DNA
atcgactttatgtcggcggatggtattgttccaggccgtacgcctgttcgttatcagggcgttgaagtcggaaca

SEQ ID NO: 269693 - DNA, 75 bp, synthetic construct
  source 1..75: mol_type = other DNA
tgttacgggaaaatacccgcatcgaattacgtaatccgaaattatcccttagcgatgccaatctcagcgccctgc

SEQ ID NO: 269694 - DNA, 75 bp, synthetic construct
  source 1..75: mol_type = other DNA
tgttacgggaaaatacccgcatcgaattacgcaacccgaaattatcccttagcgatgccaatctcagcgccctgc

SEQ ID NO: 269695 - DNA, 75 bp, synthetic construct
  source 1..75: mol_type = other DNA
tagcatcaagtccgatatgaaagatgcgctacgcgaagagacacaattctggctggtgacgccgaaggcctcgct

SEQ ID NO: 269696 - DNA, 75 bp, synthetic construct
  source 1..75: mol_type = other DNA
ttcgctatctcggtattgatatcgggcaaatccagacgctggatctgattaccgcgcgcaatgaagtacaggcaa

SEQ ID NO: 269697 - DNA, 75 bp, synthetic construct
  source 1..75: mol_type = other DNA
ttagcgatttgcccaccacgaccgtgagtttgagtgcagaaacattaccagacgtgcaggcgggatcggtagtgc

SEQ ID NO: 269698 - DNA, 75 bp, synthetic construct
  source 1..75: mol_type = other DNA
gtggatgcaatgcaggagtctgccacccgtcagcatgaacaggataccatccggaagtttactgaagagaataaa

SEQ ID NO: 269699 - DNA, 75 bp, synthetic construct
  source 1..75: mol_type = other DNA
tctgaaaggtgttacaaatgataaccttcataaaattggagccggtacgctggatgtgaaggttacccagggggg

SEQ ID NO: 269700 - DNA, 75 bp, synthetic construct
  source 1..75: mol_type = other DNA
atttcatatatacctgagttactgaatggttcatttgttctggtggagaattggtcatccggagttattcagaca

SEQ ID NO: 269701 - DNA, 75 bp, synthetic construct
  source 1..75: mol_type = other DNA
catggttgctatgtgggtttgagcggctggaacattgtggcatattctatcaatatcggctctgtcttaaggttt

SEQ ID NO: 269702 - DNA, 75 bp, synthetic construct
  source 1..75: mol_type = other DNA
acataaaaaaatgctgtccgacagtggtgcaaattcaaagacctcctcttcttcttttaacgaactgaatgccgg

SEQ ID NO: 269703 - DNA, 75 bp, synthetic construct
  source 1..75: mol_type = other DNA
taatattcttaagccgaatgacagtaatagcttattagaaatgaacccaggctcgctgtatgaagatgtcaaacg

SEQ ID NO: 269704 - DNA, 75 bp, synthetic construct
  source 1..75: mol_type = other DNA
caaatccctgatggtattcagtagtgataataataaattctccacactgacagttaatgacctgacgaccagtga

SEQ ID NO: 269705 - DNA, 75 bp, synthetic construct
  source 1..75: mol_type = other DNA
gcatggattgatcttgcaaaagatatgatgcgcgtggtgacaggggacaaaatgtcagtgcttgccgggggctct

SEQ ID NO: 269706 - DNA, 75 bp, synthetic construct
  source 1..75: mol_type = other DNA
gaaagtaccggagtcaccgtcacagccggacagcaggaaagcggggatgaaaaaaacggaggagaaaaagcccgc

SEQ ID NO: 269707 - DNA, 75 bp, synthetic construct
  source 1..75: mol_type = other DNA
gtggatgcaatgcaggagtctgccacccgtcagcgtgaacaggatactattcggaagtttactgaagggaataaa

SEQ ID NO: 269708 - DNA, 75 bp, synthetic construct
  source 1..75: mol_type = other DNA
ggtatatattgcaaacgtggggaatgtacaggttccatttatcaataaatcaaatagccagccaggaagagagtg

SEQ ID NO: 269709 - DNA, 75 bp, synthetic construct
  source 1..75: mol_type = other DNA
gcaggcaaagtatggttgcgatggagggatttgtgctgtatgcgggaacaaatggtcttgtgtctgttgatgcaa

SEQ ID NO: 269710 - DNA, 75 bp, synthetic construct
  source 1..75: mol_type = other DNA
cgtggcagtctgtccgctaggaacatcactggtggtggcgacaaagggcgagccttatttgttcagtggggtttc

SEQ ID NO: 269711 - DNA, 75 bp, synthetic construct
  source 1..75: mol_type = other DNA
ggggctttccgatctcagtctgaaagactcttggggagctgccgggcaggtgggggttgattatctgattaaccg

SEQ ID NO: 269712 - DNA, 75 bp, synthetic construct
  source 1..75: mol_type = other DNA
tgatcgttatgatgttgctgtggagttaaaaaaggctgtaaaaacggacaactggcgtccattttttgtaaagct

SEQ ID NO: 269713 - DNA, 75 bp, synthetic construct
  source 1..75: mol_type = other DNA
tcaggttcagcggcttgaggaagcccgcaggagcttcactctgccggaaagtatctgcagtgaatccgcctccgg

SEQ ID NO: 269714 - DNA, 75 bp, synthetic construct
  source 1..75: mol_type = other DNA
gaagcatccatcgaaggtggtcagcacctgaacgttaacgtgatgaaccgtgaaatgctgctcgacgcgatggaa

SEQ ID NO: 269715 - DNA, 75 bp, synthetic construct
  source 1..75: mol_type = other DNA
ggacttaaaccgccagcgtgggcggcttcggcctttgagtctggagtgaaaaaatcgaatgaggaggggaccgat

SEQ ID NO: 269716 - DNA, 75 bp, synthetic construct
  source 1..75: mol_type = other DNA
ctacatcccgcgtgagctgccaggcgggcggccttcctttatccacgtatttgaacccctggaagatgggcagac

SEQ ID NO: 269717 - DNA, 75 bp, synthetic construct
  source 1..75: mol_type = other DNA
cagtgcttttgcgcatgaagccggcgaattttttatgcgtgcaggttctgcaaccgtacgtccaacagaaggtgc

SEQ ID NO: 269718 - DNA, 75 bp, synthetic construct
  source 1..75: mol_type = other DNA
tggcagtaagtacacttctctctggcagcgtttatgcgcatgaagcaggtgagttcttcattcgagcaggttcag

SEQ ID NO: 269719 - DNA, 75 bp, synthetic construct
  source 1..75: mol_type = other DNA
cggacaatggcggcgctagcctgtatcgcgcaaaatgacagccaacagttgctcgacgaaatcgtccaacaatag

SEQ ID NO: 269720 - DNA, 75 bp, synthetic construct
  source 1..75: mol_type = other DNA
taaaactcacaaccagggcgtgttcgacgtttacactccggacatcctgcgttgccgtaaatctggtgttctgac

SEQ ID NO: 269721 - DNA, 75 bp, synthetic construct
  source 1..75: mol_type = other DNA
aggtgattcattacgccgacaatctaagatggttacagattggcttaaggctcatcctgagtaccaccttgacca

SEQ ID NO: 269722 - DNA, 75 bp, synthetic construct
  source 1..75: mol_type = other DNA
cgtatacaagctgcatgggatgcaaagaaagaagctgctaaagctggtatcaagatttctaagcgttgtcctgca

SEQ ID NO: 269723 - DNA, 75 bp, synthetic construct
  source 1..75: mol_type = other DNA
taaagttagaagaacaacacaaaaagctgctcaaatactcaacagagttaaaaaacaacacaataaggaatcaat

SEQ ID NO: 269724 - DNA, 75 bp, synthetic construct
  source 1..75: mol_type = other DNA
tggtacgcgcttctcagtggtcacaccgcaaatttcagccgcgggcgttgagcatctagatactatcctccagcc

SEQ ID NO: 269725 - DNA, 75 bp, synthetic construct
  source 1..75: mol_type = other DNA
agcatctagatactatcctccagccgtatatcaacgtcgaaccaggccggggcaatcctcgccgcgactttgaat

SEQ ID NO: 269726 - DNA, 75 bp, synthetic construct
  source 1..75: mol_type = other DNA
cacagccagcgtggggtgctcataaaactggaactgccaaacggagtcggattaagcgccgattcaacgccgctc

SEQ ID NO: 269727 - DNA, 75 bp, synthetic construct
  source 1..75: mol_type = other DNA
ttggtgattatcatataaacagaattgtttttggtgctttgttaaatccgtcatttcatgttgttatttattacc

SEQ ID NO: 269728 - DNA, 75 bp, synthetic construct
  source 1..75: mol_type = other DNA
taatatctgaagatgatttttattctcatctttattcgttatgtcagttggataatgtaggggttcttttaggcg

SEQ ID NO: 269729 - DNA, 75 bp, synthetic construct
  source 1..75: mol_type = other DNA
agtaagtaagggtggcggttcggaagctgagaaagctattgttactttaaaaaacatggctttcaatcaagtaac

SEQ ID NO: 269730 - DNA, 75 bp, synthetic construct
  source 1..75: mol_type = other DNA
tttagacctgatataaataaaccaacctttcatgcttttttatctgttcccaaaaatgaacatttaacagatgaa

SEQ ID NO: 269731 - DNA, 75 bp, synthetic construct
  source 1..75: mol_type = other DNA
agatttgtgaggatgattttcgttctcatgtttactctttatgccagttggataatgttggggttctcttgggag

SEQ ID NO: 269732 - DNA, 75 bp, synthetic construct
  source 1..75: mol_type = other DNA
tcttttaaatatgcacatcctgagctattgaatttgttgctagaaaaatacttactggttgacaatactgaatct

SEQ ID NO: 269733 - DNA, 75 bp, synthetic construct
  source 1..75: mol_type = other DNA
aaacagataatgctgttgtgatgccattagcgtctgaatggagtgatgtcggtaattttccttctttatgggaaa

SEQ ID NO: 269734 - DNA, 75 bp, synthetic construct
  source 1..75: mol_type = other DNA
atccgtgggcgggtaaaggattcgggatgatccagatcccgcgcatcggccaggaagtgctggtggacttcaaaa

SEQ ID NO: 269735 - DNA, 75 bp, synthetic construct
  source 1..75: mol_type = other DNA
acggtgatccggatttaccgataatcgttgggcgtacctacaaccaggacaccatgccaccgtggggactaccgg

SEQ ID NO: 269736 - DNA, 75 bp, synthetic construct
  source 1..75: mol_type = other DNA
ataaagttggtacagccacaaccggggatattgcaacagttcatcatttaccaccgacattgatggcacaatggt

SEQ ID NO: 269737 - DNA, 75 bp, synthetic construct
  source 1..75: mol_type = other DNA
tgactggttggttaacatgtcagtctggtacatggatatcgataccaccgccaattataagctgggcggtgcaca

SEQ ID NO: 269738 - DNA, 75 bp, synthetic construct
  source 1..75: mol_type = other DNA
attttggtgatgccagcagcaaattccgtccttacgttggggccggtattaactacaccaccttctttgataatg

SEQ ID NO: 269739 - DNA, 75 bp, synthetic construct
  source 1..75: mol_type = other DNA
tgacccacagcagcgactacaaggcgttccagaataaaacggtagtggacatcctggatgaagtgctggcggatt

SEQ ID NO: 269740 - DNA, 75 bp, synthetic construct
  source 1..75: mol_type = other DNA
aagcgcagcgcagcccaggcagtcgggcacatggggccggtcatatccgtaccctcatgaccgggtacaccttta

SEQ ID NO: 269741 - DNA, 75 bp, synthetic construct
  source 1..75: mol_type = other DNA
acaaaaaccattgtcaaaaatgaaaccatcagcgtgggagaagatcgcaatgccaccatcacaaaaaatgatggt

SEQ ID NO: 269742 - DNA, 75 bp, synthetic construct
  source 1..75: mol_type = other DNA
caatcagggcagcttgatttaaatatgaatgaccgagcgcagatatacctccacctggaacatcggagaaaacag

SEQ ID NO: 269743 - DNA, 75 bp, synthetic construct
  source 1..75: mol_type = other DNA
ctggttgcatgccgagaaagatcaacgcattgaagtaaataataatgaaagccactgggtgggcaataatcgcct

SEQ ID NO: 269744 - DNA, 75 bp, synthetic construct
  source 1..75: mol_type = other DNA
ctacccgtgggcggggaaaggattcgggatgatccagatcccgcgcatcggccaggaagtgctggtggatttcaa

SEQ ID NO: 269745 - DNA, 75 bp, synthetic construct
  source 1..75: mol_type = other DNA
atgaaaaagttaacagtggcggctttggcagtagcaactcttctctctggcagtgcctttgcgcatgaatccggc

SEQ ID NO: 269746 - DNA, 75 bp, synthetic construct
  source 1..75: mol_type = other DNA
taacatcaagaatgcgtacatccggggtgattacgtagaccctatccgcgttctgatcaaagacggcattccgta

SEQ ID NO: 269747 - DNA, 75 bp, synthetic construct
  source 1..75: mol_type = other DNA
gaaatatcatcaaagttaagtcgaaaccttgatgaatttggggccgcatctggaacggcatcagaaaaaagtgcg

SEQ ID NO: 269748 - DNA, 75 bp, synthetic construct
  source 1..75: mol_type = other DNA
ccgggacccgccggatattttctaatgaatttaagcttcatatggttgaactggcgtcgaaacccaatgccaatg

SEQ ID NO: 269749 - DNA, 75 bp, synthetic construct
  source 1..75: mol_type = other DNA
tatgtgttaggggcagcaaatactctggaaaccgccaatgatgtatcgaaagcagcgcgttctgccgtaggccga

SEQ ID NO: 269750 - DNA, 75 bp, synthetic construct
  source 1..75: mol_type = other DNA
cgttgagattaaagaagatgaaattggctgtgagctcgcgaccattgatggtaaccgtggtcttgcgctttctcc

SEQ ID NO: 269751 - DNA, 75 bp, synthetic construct
  source 1..75: mol_type = other DNA
aagggcattctaacctcaccattctttgcatcgagatgaaagccgatgagatcagctgcgaattgacaacgattg

SEQ ID NO: 269752 - DNA, 75 bp, synthetic construct
  source 1..75: mol_type = other DNA
ccttgccagtggcagaacgttggctgcgtcaggcgcaactgacgccgggtgaagcgccagtttgcgcccagccgc

SEQ ID NO: 269753 - DNA, 75 bp, synthetic construct
  source 1..75: mol_type = other DNA
atgagagaatataacggtgaaaaacgatacaaagattacctgttaaagcgttacagtatttctcgtgaaggttac

SEQ ID NO: 269754 - DNA, 75 bp, synthetic construct
  source 1..75: mol_type = other DNA
tcacggtaacatgacgctggaaaatccatcgccagagctgctcacagtgttgatccgtgaactgaccgggagggg

SEQ ID NO: 269755 - DNA, 75 bp, synthetic construct
  source 1..75: mol_type = other DNA
cctttgctgctcgtccgcaggaccacagtcaaaaagttaacaagaagatgtaccgcggcgctctgaaaagcatcc

SEQ ID NO: 269756 - DNA, 75 bp, synthetic construct
  source 1..75: mol_type = other DNA
cgtggcgccagaaaggcaccggccgtgcgcgttctagttctatcaagagcccgatctggcgttctggtggcgtga

SEQ ID NO: 269757 - DNA, 75 bp, synthetic construct
  source 1..75: mol_type = other DNA
cggagacttaggatacgttccggacgcgctgggctgcgttttgaaagtgctgaatgaaatggctgccgacgacgc

SEQ ID NO: 269758 - DNA, 75 bp, synthetic construct
  source 1..75: mol_type = other DNA
ctgtttacctctttctcaggaagtttagtctccaggattcccggggcggttcagctgcgttaattcattttgtgg

SEQ ID NO: 269759 - DNA, 75 bp, synthetic construct
  source 1..75: mol_type = other DNA
accggtgttgatgtgggtaaatccttctccggtaaggactggaaagtcacagcccgcgccggccttggctaccag

SEQ ID NO: 269760 - DNA, 75 bp, synthetic construct
  source 1..75: mol_type = other DNA
ggcgtgatgatgcaacagggctgtcatggcgtgcacagtatgcgaaagattttccagacactgatacgacagtaa

SEQ ID NO: 269761 - DNA, 75 bp, synthetic construct
  source 1..75: mol_type = other DNA
cactgactgaagccctgcagtcaccgtcagctgcggcatattttgaccggaccgcatcatcagaagcccgcaccc

SEQ ID NO: 269762 - DNA, 75 bp, synthetic construct
  source 1..75: mol_type = other DNA
cctttctgaggctgtcagggaaaaagcagcatacgctgcggcaaacttactggtgagcgattatgtcaataaatg

SEQ ID NO: 269763 - DNA, 75 bp, synthetic construct
  source 1..75: mol_type = other DNA
atacattgcctgttacacgaaaccggatggtaagcaggatgtgtttgtcttcaacccggcaggtatggatatccg

SEQ ID NO: 269764 - DNA, 75 bp, synthetic construct
  source 1..75: mol_type = other DNA
gcagatgctggtttccggttttggtcaggttgaacgtatcacactcagtacatcgatgtcggagctgccggtatg

SEQ ID NO: 269765 - DNA, 75 bp, synthetic construct
  source 1..75: mol_type = other DNA
gctggaagagagtgaagataacgccagtgtcagcgaacaaactcgacagcagctgatggctctggcgaacgcccc

SEQ ID NO: 269766 - DNA, 75 bp, synthetic construct
  source 1..75: mol_type = other DNA
tcctttctccattcttaggacgatttttagcaaaaattagcaatgaaaaatttaaagcttttattggcttgccgg

SEQ ID NO: 269767 - DNA, 75 bp, synthetic construct
  source 1..75: mol_type = other DNA
cagagtcagtttaatccggcctccattgtggcttattcctggcgtggtgagtacattgcctgttacacgaaaccg

SEQ ID NO: 269768 - DNA, 75 bp, synthetic construct
  source 1..75: mol_type = other DNA
ggttcaaaaatcccgtcaatgcaggcgtgtctgagcaggcaaagtatggttgcgatggagggatttgtgctgtat

SEQ ID NO: 269769 - DNA, 75 bp, synthetic construct
  source 1..75: mol_type = other DNA
atgacaagggtatttacagttatcggcagacaaataatcggcgtaatcgtttacaaattaatctttcacaaaata

SEQ ID NO: 269770 - DNA, 75 bp, synthetic construct
  source 1..75: mol_type = other DNA
cgcacctacaaccaggacacgatgccgccgtggggattgccgggcatggcgtcgcagagcgggatattcagccac

SEQ ID NO: 269771 - DNA, 75 bp, synthetic construct
  source 1..75: mol_type = other DNA
cgggttacacctttacgctgatgaatcatccaacggcagaggtcaaccaggaatacctactggtacagaccacgc

SEQ ID NO: 269772 - DNA, 75 bp, synthetic construct
  source 1..75: mol_type = other DNA
accgcccacagcgaaccctgagcaaaccccataccaaaggcccgcagagcgccatcgtcaccggtccggcggggt

SEQ ID NO: 269773 - DNA, 75 bp, synthetic construct
  source 1..75: mol_type = other DNA
tggcggatgccatcagcgcccataaggcgtgcccggactcaccgctggtcagttactaccaggcagggctgaagc

SEQ ID NO: 269774 - DNA, 75 bp, synthetic construct
  source 1..75: mol_type = other DNA
accccacaccaaaggcccgcagagcgccattgtcaccggcccggcggggcaggaaatctggacggataaatatgg

SEQ ID NO: 269775 - DNA, 75 bp, synthetic construct
  source 1..75: mol_type = other DNA
tgggagaagatcgcaccgccaccattaccaaaaatgatggtctctccgtaaaactggcacaaaccatcaatatcg

SEQ ID NO: 269776 - DNA, 75 bp, synthetic construct
  source 1..75: mol_type = other DNA
agagaatatgcggaggtgctgatcgctattacggagtatcaccgtgccctgttatccaggcttatggcagattag

SEQ ID NO: 269777 - DNA, 75 bp, synthetic construct
  source 1..75: mol_type = other DNA
aagaaagttaactcactgactgatgatcgggtactgaaagaagttatgagactgggggcgttacagaaaaaactc

SEQ ID NO: 269778 - DNA, 75 bp, synthetic construct
  source 1..75: mol_type = other DNA
tgttatcctctggacccgactgaattaaatatagagttagcacttcgccatctggaaattcccggaaagtggttc

SEQ ID NO: 269779 - DNA, 75 bp, synthetic construct
  source 1..75: mol_type = other DNA
tattatcatggacgtgcaagtgataatgcgtcaatggaagatgttgcccgtcgtcacagcaatacaacaggagct

SEQ ID NO: 269780 - DNA, 75 bp, synthetic construct
  source 1..75: mol_type = other DNA
atccggtcacaggcttacaaaattactgctgtaacttatggctttcttcaggttcacaatggaagccagtgggta

SEQ ID NO: 269781 - DNA, 75 bp, synthetic construct
  source 1..75: mol_type = other DNA
acacaaacaggcgcatcaacaccaaatcaaatctggtttttgaaactggaggaggacattccgggggtgtggcgg

SEQ ID NO: 269782 - DNA, 75 bp, synthetic construct
  source 1..75: mol_type = other DNA
acccgctgtacgccctgtttacagcctgggtatcgatacctggtggtatgacgttaataaagcggccaaactgcc

SEQ ID NO: 269783 - DNA, 75 bp, synthetic construct
  source 1..75: mol_type = other DNA
cggaaaaactgggatttaccggacgtgggaagggattgcctgtgaagcggtggcgctactcattaaggcaacaaa

SEQ ID NO: 269784 - DNA, 75 bp, synthetic construct
  source 1..75: mol_type = other DNA
aattattcccggacaccgacccggcatttaaaggcgcagacagtcgcgagttgctacgcgaagcctggcggcgca

SEQ ID NO: 269785 - DNA, 75 bp, synthetic construct
  source 1..75: mol_type = other DNA
ggcgtagtgctgacccgcacgctgctacagggtaaacgtacccgctggcagcaatcgcccttcctgttaaccgcc

SEQ ID NO: 269786 - DNA, 75 bp, synthetic construct
  source 1..75: mol_type = other DNA
ctggcgactggtcatgaccgggttatgttttgccctgtttggtctcggcggcctgctgctttctgtcgtgtggtt

SEQ ID NO: 269787 - DNA, 75 bp, synthetic construct
  source 1..75: mol_type = other DNA
cactctgttggatagccttggtaaacgcgtgcgtttccttcgtcaggtgcaacatgagcttaaactggagaatat

SEQ ID NO: 269788 - DNA, 75 bp, synthetic construct
  source 1..75: mol_type = other DNA
cggaaaaacttggatttaccggacgtggggaagggatagcctgtgaagcggtggcgctactcattaaggcaacaa

SEQ ID NO: 269789 - DNA, 75 bp, synthetic construct
  source 1..75: mol_type = other DNA
aggttgtctggtctgtgacggcgctgctggggatgggaatggcgctggcgcgtcacgggcaaccgcgcaccgata

SEQ ID NO: 269790 - DNA, 75 bp, synthetic construct
  source 1..75: mol_type = other DNA
catcagcgatgcgctggaaggtattacgcactctctgtgtacgcttgagttccaggacaaccgtcgcctgtacga

SEQ ID NO: 269791 - DNA, 75 bp, synthetic construct
  source 1..75: mol_type = other DNA
tgcaaaggcgaggtcgtatttatcgcatagtagatatcacggacacactgaaggagattaaggatgagcatgtta

SEQ ID NO: 269792 - DNA, 75 bp, synthetic construct
  source 1..75: mol_type = other DNA
atgaaatcaacatgtcgttacacgcgccattcacgggcgtggggctggcagaagagagtggcgaggcggaagttt

SEQ ID NO: 269793 - DNA, 75 bp, synthetic construct
  source 1..75: mol_type = other DNA
ggccaattgatttagtcagtgcatctcattcacaaatgtctaagcgctacggctttatttatgtggatcgtgatg

SEQ ID NO: 269794 - DNA, 75 bp, synthetic construct
  source 1..75: mol_type = other DNA
atgtggctgaaatatatcgcgtctatgattattttcgttcttttcccactcaacgcctctgaaccgccgagagcc

SEQ ID NO: 269795 - DNA, 75 bp, synthetic construct
  source 1..75: mol_type = other DNA
caaattttagaagtataacgaaagcgcataaagtatcaatatctgacactactatattaattggtagaaataatg

SEQ ID NO: 269796 - DNA, 75 bp, synthetic construct
  source 1..75: mol_type = other DNA
agctgctggtgacttttgaggtcgtcgcacgtcatgaaagttataccagagcggcagaggagttagcgttgaccc

SEQ ID NO: 269797 - DNA, 75 bp, synthetic construct
  source 1..75: mol_type = other DNA
ctggatctggctctgctggtggacggcctgcaagctgagcgcgaacagggcatcaccattgacgtggcttaccgt

SEQ ID NO: 269798 - DNA, 75 bp, synthetic construct
  source 1..75: mol_type = other DNA
atcaacaaaatccggtgacgggtgggctgatttttatcgatcgcctgagcaacgtgactgttggtgccggtatgg

SEQ ID NO: 269799 - DNA, 75 bp, synthetic construct
  source 1..75: mol_type = other DNA
ttgtttatcaacaaaaactgattgccaaccgcgagcgtgaagcctgctttaaagcatttatgaataataactatg

SEQ ID NO: 269800 - DNA, 75 bp, synthetic construct
  source 1..75: mol_type = other DNA
agtacgataaattgattattggtattttgcagattggcgtactggtgctgatggcgataatcggtgagttaaatg

SEQ ID NO: 269801 - DNA, 75 bp, synthetic construct
  source 1..75: mol_type = other DNA
gcaagtggtgctgggcgcggcgtttggctggtcgattccaatggcttttgccgctgtgagtgagtcggtgccatt

SEQ ID NO: 269802 - DNA, 75 bp, synthetic construct
  source 1..75: mol_type = other DNA
gacgagccactggtgttagatcgttatcagcaaaacccggttaccggtgggctgatttttatcgatcgcctgagc

SEQ ID NO: 269803 - DNA, 75 bp, synthetic construct
  source 1..75: mol_type = other DNA
ccgcattaagtttgctgaacaccaccagactggcaacaagtggtgcatttacccgatgtacgatttcacccactg

SEQ ID NO: 269804 - DNA, 75 bp, synthetic construct
  source 1..75: mol_type = other DNA
caagcattgaagtatcgaagaaaggcaaaggttctaaaactctaaattccaaatcaggacagatagctaatttta

SEQ ID NO: 269805 - DNA, 75 bp, synthetic construct
  source 1..75: mol_type = other DNA
ttgccggtaagaagacgcgcgcgcgtgttgatggcattcgctatcaggttgatattaataaccttacccagcgtg

SEQ ID NO: 269806 - DNA, 75 bp, synthetic construct
  source 1..75: mol_type = other DNA
acccgccaaatctacgaagatcagctctcatcactgcataacgacagtaaacgtcacggcacccagggcgaaaag

SEQ ID NO: 269807 - DNA, 75 bp, synthetic construct
  source 1..75: mol_type = other DNA
gaactggaattgaatgccctggttcgtcgccactttccgcactggggcgcgcgcgatttgctgggggataaataa

SEQ ID NO: 269808 - DNA, 75 bp, synthetic construct
  source 1..75: mol_type = other DNA
tatgtgattggcgatcgcgcgaccgatattcaactggcggaaaacatgggcattaatggtttacgctacgaccgc

SEQ ID NO: 269809 - DNA, 75 bp, synthetic construct
  source 1..75: mol_type = other DNA
ataccgggctggcgctgggcgaagcgttaaaaattgcccttggcgacaaacgcggcatctgccggtttggttttg

SEQ ID NO: 269810 - DNA, 75 bp, synthetic construct
  source 1..75: mol_type = other DNA
tatgtgattggcgatcgcgcgaccgacattcaactggcggaaaacatgggtattaatggtttacgctacgaccgc

SEQ ID NO: 269811 - DNA, 75 bp, synthetic construct
  source 1..75: mol_type = other DNA
caaaattaaaggtgtggagggtatctataaccgtcaccagtattttgatgagcgtaaagcggcgctggcgcagtg

SEQ ID NO: 269812 - DNA, 75 bp, synthetic construct
  source 1..75: mol_type = other DNA
acgacttccgacgcaccgcacgtactcatttagcagcgttgggtgttgatcctgtcgtggcggaacgatgcctca

SEQ ID NO: 269813 - DNA, 75 bp, synthetic construct
  source 1..75: mol_type = other DNA
tcgacaaagacataaacccgcgtattggtcatatgaaggttgaggacgtaaaaccacgacacattgacgagatgc

SEQ ID NO: 269814 - DNA, 75 bp, synthetic construct
  source 1..75: mol_type = other DNA
gataacggaacgcggttattccgttgccgaagtatctgatcgtctgggcgtttctgcccacagcctctacaagtg

SEQ ID NO: 269815 - DNA, 75 bp, synthetic construct
  source 1..75: mol_type = other DNA
gccgaagtatccgaccgtctgggcgtttctgcgcacagcctctacaagtggctacgggctatcaagcctgataac

SEQ ID NO: 269816 - DNA, 75 bp, synthetic construct
  source 1..75: mol_type = other DNA
aatttaaggaagaagccgtccgacagataacggaacgcggttattccgttgccgaagtatctgaccgtctgggcg

SEQ ID NO: 269817 - DNA, 75 bp, synthetic construct
  source 1..75: mol_type = other DNA
aaagagacacagattgacgtgaaggtgtggctggatcgcgaaggcggcagcaagctccacaccggggtgggtttc

SEQ ID NO: 269818 - DNA, 75 bp, synthetic construct
  source 1..75: mol_type = other DNA
atgagtcagaagtatctttttatcgatcgcgatggaaccctgattagcgaaccgccgagtgattttcaggtggat

SEQ ID NO: 269819 - DNA, 75 bp, synthetic construct
  source 1..75: mol_type = other DNA
ttcttccgctcgctctcctacaccatgggcgtgacgctgcacctgaaaaccaaaggtaagaacgatcaccaccgc

SEQ ID NO: 269820 - DNA, 75 bp, synthetic construct
  source 1..75: mol_type = other DNA
gataaacccttgttcagcgtttgaagtatctgatgctggtggtaaagaggtttcccgcgaccgttggctaactcg

SEQ ID NO: 269821 - DNA, 75 bp, synthetic construct
  source 1..75: mol_type = other DNA
aaagcagggaacgctggctaagccgagaagagcttgcgcgattcttacaggcaatgccaatgacaaaaggtttct

SEQ ID NO: 269822 - DNA, 75 bp, synthetic construct
  source 1..75: mol_type = other DNA
agcaaaagctaaagaacagtcagcacgggttgcattgggttatgacgttgcgggggaaaagcaagaacgtaaagc

SEQ ID NO: 269823 - DNA, 75 bp, synthetic construct
  source 1..75: mol_type = other DNA
aatcccgtgaacgctggctgagcagagaagaattgattaaattctttcaggccatgcgggtgactcaaggatttt

SEQ ID NO: 269824 - DNA, 75 bp, synthetic construct
  source 1..75: mol_type = other DNA
ggcaagccaatcgatgatacacacactcatggtggtgttcagcgtggtggaagcagtaccgacggggtaaactga

SEQ ID NO: 269825 - DNA, 75 bp, synthetic construct
  source 1..75: mol_type = other DNA
aagagctggtgcagggggaactgccattttctgtttccatgctgatttacgatttgcgttgtccgacggtgttgt

SEQ ID NO: 269826 - DNA, 75 bp, synthetic construct
  source 1..75: mol_type = other DNA
cagaagagcaaacgctgatcgatagcgtgcgcaatacgttgacggagcaaggtgatgccctccgccatctggcag

SEQ ID NO: 269827 - DNA, 75 bp, synthetic construct
  source 1..75: mol_type = other DNA
tcaaagcatgggtgaagtctggggaaagatttgatgggcgttctgatggcaatggcttgtatttatgttttccta

SEQ ID NO: 269828 - DNA, 75 bp, synthetic construct
  source 1..75: mol_type = other DNA
gccgaccatagcaacggacgtgctgagatggacgcgccgcatattcgactacggaatcaaacggcacgcgctgga

SEQ ID NO: 269829 - DNA, 75 bp, synthetic construct
  source 1..75: mol_type = other DNA
gccgggttttaccgttcacgatttccgacgcacggccagaactcaccttgccgcgcttggggtagaccctgtagt

SEQ ID NO: 269830 - DNA, 75 bp, synthetic construct
  source 1..75: mol_type = other DNA
catctggcatttacctgctgaacgggtaaagaacggtgatgctattgatatccctttacctgcaataaccattgg

SEQ ID NO: 269831 - DNA, 75 bp, synthetic construct
  source 1..75: mol_type = other DNA
aaaatggaactctgcgcagcccaatggattgaatttgatttggataacgccatctggcatttacctgctgaacgg

SEQ ID NO: 269832 - DNA, 75 bp, synthetic construct
  source 1..75: mol_type = other DNA
agctgaagcgctcaaaaaaatagaagaagaaaaaaattccttaaaagtttccgagttggctctagagtactttga

SEQ ID NO: 269833 - DNA, 75 bp, synthetic construct
  source 1..75: mol_type = other DNA
atgcctcacgagatagctttcccggcgatcacggcatgatgctgcttattttttcggcattcatgtggcgttatt

SEQ ID NO: 269834 - DNA, 75 bp, synthetic construct
  source 1..75: mol_type = other DNA
tgttgttaaacattatcggccttgggctgtttctttcctggtatattccggctaatcatggattctggttgccga

SEQ ID NO: 269835 - DNA, 75 bp, synthetic construct
  source 1..75: mol_type = other DNA
atgctgagtttctggctgaaagaaaacgcctccggaagacggcgtatcgtaattattggtctggtcatgctgtta

SEQ ID NO: 269836 - DNA, 75 bp, synthetic construct
  source 1..75: mol_type = other DNA
gtgatttttcaaaagattgcccgcttacttaaatctgagatcaatggctattcatggcacgttggtgatttgttg

SEQ ID NO: 269837 - DNA, 75 bp, synthetic construct
  source 1..75: mol_type = other DNA
atggcactaccccgcaaactaaaatatctgaacatgttcaacgacggtctgagctacatgggcgttgttgaatcc

SEQ ID NO: 269838 - DNA, 75 bp, synthetic construct
  source 1..75: mol_type = other DNA
ttgccctgggtgttgctgacgccattaagtgatcgattaatcaccttttttgacaaatcactaccgggaaaaaac

SEQ ID NO: 269839 - DNA, 75 bp, synthetic construct
  source 1..75: mol_type = other DNA
ccgttgcggttacaccggaaagtcagcaactgctggcaaaagcggtatctatcgccaggccagtaaagggacaca

SEQ ID NO: 269840 - DNA, 75 bp, synthetic construct
  source 1..75: mol_type = other DNA
atgagctatagcaatattcttgtcgctgttgcggttacaccggaaagtcagcaactgctggcaaaagcggtatct

SEQ ID NO: 269841 - DNA, 75 bp, synthetic construct
  source 1..75: mol_type = other DNA
gataaggcgcgccagcttttcgatacagtttctcaggtctgtgaaattgtcgacggtgttcggcagtgtctgcag

SEQ ID NO: 269842 - DNA, 75 bp, synthetic construct
  source 1..75: mol_type = other DNA
tgcagtgcgacgtagtcatgagagcatcaagagttgtccttttaatttcaaaggagctgaaatgttgtttgcaat

SEQ ID NO: 269843 - DNA, 75 bp, synthetic construct
  source 1..75: mol_type = other DNA
atgagctataccaatgttcttgttgccgtagctgtctcgccagaaagccagcaactgttaacaaaagcggtatct

SEQ ID NO: 269844 - DNA, 75 bp, synthetic construct
  source 1..75: mol_type = other DNA
caatcacagtttcttttcgcgagcatcctgctcggcgaaaagagtgattgcctcaagtgaggtcgatgtgctgtt

SEQ ID NO: 269845 - DNA, 75 bp, synthetic construct
  source 1..75: mol_type = other DNA
tattttacggatcagcccacgggatcccatacttaaaattcagacccaggctgtggacagtaactctattccgct

SEQ ID NO: 269846 - DNA, 75 bp, synthetic construct
  source 1..75: mol_type = other DNA
gtgaatacttaccacatcacactaccctggccgccgagcaataaccgctactaccgccataatcgcgggcgcaca

SEQ ID NO: 269847 - DNA, 75 bp, synthetic construct
  source 1..75: mol_type = other DNA
cagcgtcgcgtagccgaaacctttgctgtcctgccagatagccgccagcaggttgtcctgacgctcctgcaacag

SEQ ID NO: 269848 - DNA, 75 bp, synthetic construct
  source 1..75: mol_type = other DNA
gtgaatacttacgacatcacaatcccctggcccccgagcaataaccgctagtaccgccataatcgcgggcgcaca

SEQ ID NO: 269849 - DNA, 75 bp, synthetic construct
  source 1..75: mol_type = other DNA
aacaatgcgttgcgaaatatgaactaccggttgaggaaaaaaattccggtattatttccgtgacagcaaattgtc

SEQ ID NO: 269850 - DNA, 75 bp, synthetic construct
  source 1..75: mol_type = other DNA
gtgactacagccgttaccataaacgtagtgaaattcagggtaacctgacacagcaattggggaactatgggtcgg

SEQ ID NO: 269851 - DNA, 75 bp, synthetic construct
  source 1..75: mol_type = other DNA
tgacgcggtcgattgttccaatgaaagcacaatttacattaggcgatacagcaacaccttcggatatttttgata

SEQ ID NO: 269852 - DNA, 75 bp, synthetic construct
  source 1..75: mol_type = other DNA
accttggtgttatggccggttacggtaacgagcataacaacacggactctgtgcgcaccggataccgctcaaaag

SEQ ID NO: 269853 - DNA, 75 bp, synthetic construct
  source 1..75: mol_type = other DNA
ccatgaaaccatgaataacggccagtccggggcgcaccaggcgatggctgaagcgcatcgccgcatgatcaacgc

SEQ ID NO: 269854 - DNA, 75 bp, synthetic construct
  source 1..75: mol_type = other DNA
acgaatgtctgctggtggttttaacggaaagttgagtttcccttgggagtcaagttcgcttctgagaaatcatca

SEQ ID NO: 269855 - DNA, 75 bp, synthetic construct
  source 1..75: mol_type = other DNA
gtgaatacttaccacatcacaatgccctggcccccgagcaataaccgctagtaccgccataatcgcgggcgcaca

SEQ ID NO: 269856 - DNA, 75 bp, synthetic construct
  source 1..75: mol_type = other DNA
gtgaatacttactacatcacaattccctggcccccgagcaataaccgctagtaccgccataatcgcgggcgcacg

SEQ ID NO: 269857 - DNA, 75 bp, synthetic construct
  source 1..75: mol_type = other DNA
gtgaatacttactacatcacaataccctggcccccgagcaataaccgctagtaccgccataatcgcgggcgcact

SEQ ID NO: 269858 - DNA, 75 bp, synthetic construct
  source 1..75: mol_type = other DNA
aggtcgatccgcgcaaagccgccgtcgaagccgctatcgcccgcgccaaagcacgtaagctggaacagcaacaac

SEQ ID NO: 269859 - DNA, 75 bp, synthetic construct
  source 1..75: mol_type = other DNA
cgaaatacgatgtcatgaatgatttgatgtcttttggcatacatcgtttgtggaaacgcttcacgattgattgca

SEQ ID NO: 269860 - DNA, 75 bp, synthetic construct
  source 1..75: mol_type = other DNA
gcccgttctggcgaaagcgtcgaagtgcgcgaccggctggcgctcgacggcaaaaaagcgggcggctattttaac

SEQ ID NO: 269861 - DNA, 75 bp, synthetic construct
  source 1..75: mol_type = other DNA
catcaaaacgggtgacgctgacaccatgaacgaactgctggactctgcgccagcggcggtaacgggtgacgaagg

SEQ ID NO: 269862 - DNA, 75 bp, synthetic construct
  source 1..75: mol_type = other DNA
tattaatcactggcggaggccgtcgtatcggtcttgctctcgcctggcatttcattaatcaaaagcaacctgtga

SEQ ID NO: 269863 - DNA, 75 bp, synthetic construct
  source 1..75: mol_type = other DNA
cacgggcgataacgacgtatcgacctctatgacacctggcggagtggtcatcaaccttgcgccgcaaaatccgct

SEQ ID NO: 269864 - DNA, 75 bp, synthetic construct
  source 1..75: mol_type = other DNA
atgttaactggggcttttctctatctgcctttggtgttcatgcctgaggcagatagcctcaagcacccgcagcaa

SEQ ID NO: 269865 - DNA, 75 bp, synthetic construct
  source 1..75: mol_type = other DNA
cgcacaaagaatatatgataataaagttcgttcattgaaagaggaacaaaaaattaaacagcccacaattaaatg

SEQ ID NO: 269866 - DNA, 75 bp, synthetic construct
  source 1..75: mol_type = other DNA
aatattctctgggcggtggcttacgatactcagtacgcgatggttgaccgtgacgacgacgtaaagattggcatt

SEQ ID NO: 269867 - DNA, 75 bp, synthetic construct
  source 1..75: mol_type = other DNA
cagcagattgtcgaaccaattgccgggaaaaacggaccgctcggctatctgcgcctgacgctcgacacccatacg

SEQ ID NO: 269868 - DNA, 75 bp, synthetic construct
  source 1..75: mol_type = other DNA
atatgacgaacaaggcgatcttattgcccgcgcaggcgaaagcgtagaagtacgcgaccgtctggcactcgacgg

SEQ ID NO: 269869 - DNA, 75 bp, synthetic construct
  source 1..75: mol_type = other DNA
atcatcgacaacatcaacggtgacaatttccgccaggacgtgccttacaccatcacctgcgatcctgatgtgcgc

SEQ ID NO: 269870 - DNA, 75 bp, synthetic construct
  source 1..75: mol_type = other DNA
tgggggaaacccgttatcagctggctgacggctcgctgctgtgcaaagacgtgccgataggtcgaacgggtaagc

SEQ ID NO: 269871 - DNA, 75 bp, synthetic construct
  source 1..75: mol_type = other DNA
ttggctggcgtggtctgcttcctgaaaatgaaagggttgagttcagtgcgccatcaggtcaggatggtgagataa

SEQ ID NO: 269872 - DNA, 75 bp, synthetic construct
  source 1..75: mol_type = other DNA
aatggctggttgcggtaaataaaccgtccggctggctggtccaccgtagctggctggatcgcgatgagaaagtgg

SEQ ID NO: 269873 - DNA, 75 bp, synthetic construct
  source 1..75: mol_type = other DNA
gactattcacgcgggcctggacgacacctggatgcaggcgttatcacaatttggcctggcgcggtctgcttcctg

SEQ ID NO: 269874 - DNA, 75 bp, synthetic construct
  source 1..75: mol_type = other DNA
gcctgggatctccggctggatctggctccggaacaggcaaaaggaatgctgctgggtgatcgttcccgctcctgc

SEQ ID NO: 269875 - DNA, 75 bp, synthetic construct
  source 1..75: mol_type = other DNA
ccccggtacagccgctggaaaccgggatgcagatgatgcgtgttgccgacagtcgctggccggaaagcctgcaat

SEQ ID NO: 269876 - DNA, 75 bp, synthetic construct
  source 1..75: mol_type = other DNA
gcagggatcgcctgttcagtggctgtcgcctcagcattgtggtggtggcaggtctatccggtgcagcagcaactg

SEQ ID NO: 269877 - DNA, 75 bp, synthetic construct
  source 1..75: mol_type = other DNA
cctgatggctaagctggaaggaaatgcgacgggcgataacgacaataagtctgacgataatccgaccggtgacgg

SEQ ID NO: 269878 - DNA, 75 bp, synthetic construct
  source 1..75: mol_type = other DNA
ttgccgcagggcgttaatctcaacatcaatctgtccccgcagcaaccgctaccggacaaagcaccagagatgggc

SEQ ID NO: 269879 - DNA, 75 bp, synthetic construct
  source 1..75: mol_type = other DNA
gctggctgaccttatcgtcaaagacgaaagcgccattcagctgatcgaagatggtctgcgcgaagtgtcgtgcgg

SEQ ID NO: 269880 - DNA, 75 bp, synthetic construct
  source 1..75: mol_type = other DNA
acctggatgcaggcgttatcacaatttggctggcgcggtctgcttcctgaaaatgaaagggttgagttcagtgcg

SEQ ID NO: 269881 - DNA, 75 bp, synthetic construct
  source 1..75: mol_type = other DNA
aagtcagattatgaaatttgaagtgcaggatgcttctcctactattgcgactgagctgaatttagtgactggtga

SEQ ID NO: 269882 - DNA, 75 bp, synthetic construct
  source 1..75: mol_type = other DNA
aacgatgggatcattcaaagaaagcatggatcaggtacatatattcacaaaaagaattttacggcacatatcgat

SEQ ID NO: 269883 - DNA, 75 bp, synthetic construct
  source 1..75: mol_type = other DNA
gttttgtcctatggtgcgtattccatgttctgtttctggtctttggattaggacaggcaaactatgggttaatcc

SEQ ID NO: 269884 - DNA, 75 bp, synthetic construct
  source 1..75: mol_type = other DNA
cgctatgcctcgcttcgtcagtgcaggatggaagtcgcggaagtagaagcgttgtaccgtaaaaatcagatcccg

SEQ ID NO: 269885 - DNA, 75 bp, synthetic construct
  source 1..75: mol_type = other DNA
caacaagagatgaaactggatcccacgccgattgctcatcgtacccatggcctgaaccctaataacctcaataaa

SEQ ID NO: 269886 - DNA, 75 bp, synthetic construct
  source 1..75: mol_type = other DNA
ctcaaccacgatgacacactccccgaagacccgctgctggcagtggcactggctaaccctgaatacgttaccgcg

SEQ ID NO: 269887 - DNA, 75 bp, synthetic construct
  source 1..75: mol_type = other DNA
cgaatatgccgatctgcgcattcgcatgttcccggcgaaaggatcgctgctgatcatggatcaccgcattaatca

SEQ ID NO: 269888 - DNA, 75 bp, synthetic construct
  source 1..75: mol_type = other DNA
acccgacactgattggcgcggtaaaagtccctgatggcaccgtggatccatttcgtttgaccgcagccaacatgc

SEQ ID NO: 269889 - DNA, 75 bp, synthetic construct
  source 1..75: mol_type = other DNA
tatttcgttgcgcaatctggatcaggcacaggtgatcctgctcggcgtttctcgctgcggtaaaactcccaccag

SEQ ID NO: 269890 - DNA, 75 bp, synthetic construct
  source 1..75: mol_type = other DNA
attcgccccctgaccaaagcagtggcagaagcatactacgcttcccgtgaagccctcggcttcccgatgtgcaac

SEQ ID NO: 269891 - DNA, 75 bp, synthetic construct
  source 1..75: mol_type = other DNA
tccagccttctcgtcgcccgaccgatggtcgctacggcgaaaaccccaaccgtttacagcactactatcagttcc

SEQ ID NO: 269892 - DNA, 75 bp, synthetic construct
  source 1..75: mol_type = other DNA
cgtttacagcactactatcagttccaggtggtcatcaagccatcgccggataatattcaggagctgtacctcggt

SEQ ID NO: 269893 - DNA, 75 bp, synthetic construct
  source 1..75: mol_type = other DNA
ggctaacccggaatacgtcaccgcgcttgatgatggctggtatctcctgctcggtatcgtctgcgataacggaca

SEQ ID NO: 269894 - DNA, 75 bp, synthetic construct
  source 1..75: mol_type = other DNA
tttcttggtggcgatcgcccggttacggtagtcaacccgcccgcaatgcgccatccgcagatacgaattgtcgta

SEQ ID NO: 269895 - DNA, 75 bp, synthetic construct
  source 1..75: mol_type = other DNA
gcggcgcggcgaaacggaagtcaatcttcgcgtagggatccgtactggcgatacgcctgcacaggaacgcagcaa

SEQ ID NO: 269896 - DNA, 75 bp, synthetic construct
  source 1..75: mol_type = other DNA
catgcaccagtggtggtgaatgctgccgggatctgggggcaacatattgccgagtatgccgatctgcgtattcgc

SEQ ID NO: 269897 - DNA, 75 bp, synthetic construct
  source 1..75: mol_type = other DNA
tgtttgtggtagcagagagcggcttcggcaccggattaaacttcctgacgctatggcaggcatttgatcagtttc

SEQ ID NO: 269898 - DNA, 75 bp, synthetic construct
  source 1..75: mol_type = other DNA
ctgtggtggcaggggcagcagatcaccggaaattaccagactatccgggcgcaggagcggacgcaggccatgctg

SEQ ID NO: 269899 - DNA, 75 bp, synthetic construct
  source 1..75: mol_type = other DNA
gagcttatcgatgcctcgccgtatgcgaaaaagtacacctccggcgtactgtcgttcgcggaggctgaactgccg

SEQ ID NO: 269900 - DNA, 75 bp, synthetic construct
  source 1..75: mol_type = other DNA
ttgtgccactcgcgatcatctgccaatggtaggcaacgtgcctgattatgacgctacactcgtggaatatgcgtc

SEQ ID NO: 269901 - DNA, 75 bp, synthetic construct
  source 1..75: mol_type = other DNA
ctatggcaggcatttgttcagtttcgcgaagcacatccgcaagcgcaattacaacgcttacatttcattagtttt

SEQ ID NO: 269902 - DNA, 75 bp, synthetic construct
  source 1..75: mol_type = other DNA
actggcggaacagcaaggtttgcagattcgttatcagcatcagttaaaggatttatcccgtaaagatgataagtg

SEQ ID NO: 269903 - DNA, 75 bp, synthetic construct
  source 1..75: mol_type = other DNA
aaggtttacctcctcgcatccagcaagcagccgacatctgtcgcattgttggcaatcaggctgtacaccccggag

SEQ ID NO: 269904 - DNA, 75 bp, synthetic construct
  source 1..75: mol_type = other DNA
ttcgtatccagcaggccgcagacatttgccgaatcgttggtaatcaggcagtccatccgggagagattaaccttg

SEQ ID NO: 269905 - DNA, 75 bp, synthetic construct
  source 1..75: mol_type = other DNA
atctctctgccagcgccacttcgcggttcagcggtttatcgtcatggcgatcgcacgcctgcctggctgagcgaa

SEQ ID NO: 269906 - DNA, 75 bp, synthetic construct
  source 1..75: mol_type = other DNA
aacaggctaatgccgagccagaacaacaggtcgatccgcgcaaagccgccgtcgaagccgctattgcccgtgcca

SEQ ID NO: 269907 - DNA, 75 bp, synthetic construct
  source 1..75: mol_type = other DNA
agaaacacacagcaaatcctacactttgccagttgcattgcatttaattatcttaatagccatatcgatagttct

SEQ ID NO: 269908 - DNA, 75 bp, synthetic construct
  source 1..75: mol_type = other DNA
gtagctgcaacgataaaattactgccggagagaaaaggctggcaagaattctggaaagaggactaggcgaagagt

SEQ ID NO: 269909 - DNA, 75 bp, synthetic construct
  source 1..75: mol_type = other DNA
acgccacagcagcaggcgctattacataaacttggggtacagtatctgcaagggtatttagttggtcgtccgcaa

SEQ ID NO: 269910 - DNA, 75 bp, synthetic construct
  source 1..75: mol_type = other DNA
aagctggctggcaacacttaccgtgctgttgctgctgatgtgtaccccttatgaaaatgactttattgccggtta

SEQ ID NO: 269911 - DNA, 75 bp, synthetic construct
  source 1..75: mol_type = other DNA
gtattgatttacaacatgctcttttactatctcacccgcatgattgtgaatccccacttcgcgcagatattgtgg

SEQ ID NO: 269912 - DNA, 75 bp, synthetic construct
  source 1..75: mol_type = other DNA
gcttaaccgccgctggcatttgcaggcgctgaccgatccattaacgctattacccaactttcgtgcactggagca

SEQ ID NO: 269913 - DNA, 75 bp, synthetic construct
  source 1..75: mol_type = other DNA
gtgttgatttacaacatgttcttttactatctcactcgcatgattgtaagcccccactttgcgcagatattgtgg

SEQ ID NO: 269914 - DNA, 75 bp, synthetic construct
  source 1..75: mol_type = other DNA
cgccgattggcatcaaatgcagcatgtatcttgtgggaaatttctttgattttccgctaaagatatctacctttt

SEQ ID NO: 269915 - DNA, 75 bp, synthetic construct
  source 1..75: mol_type = other DNA
attacggtctgggcttctggacctgtctgccgattgccgggttaatggcggcggcggcgggcttcctgctcggct

SEQ ID NO: 269916 - DNA, 75 bp, synthetic construct
  source 1..75: mol_type = other DNA
atgaaaccgatgcatattgcaatggcgctgctctctgccgcgatgttctttgtcctcgctggcgtctttatgggc

SEQ ID NO: 269917 - DNA, 75 bp, synthetic construct
  source 1..75: mol_type = other DNA
atgaaaagctggtggatatatatcttcacaatggaaatatgattcgtggtttccctcttgatggtaaagatgacc

SEQ ID NO: 269918 - DNA, 75 bp, synthetic construct
  source 1..75: mol_type = other DNA
gattcatatcaactttttgttaatgcatataagcctaaacttcctgcaagaaaaaataaaaaaaaactgaagaaa

SEQ ID NO: 269919 - DNA, 75 bp, synthetic construct
  source 1..75: mol_type = other DNA
gcgggacggtggatatcgccactctgaccatgatctacattattcttggtctcgggctgaacgtggtggtagggc

SEQ ID NO: 269920 - DNA, 75 bp, synthetic construct
  source 1..75: mol_type = other DNA
atgaaacctatgcatattgcaatggcgttgctctctgccgcgatgttctttgtgctggcgggcgtttttatgggc

SEQ ID NO: 269921 - DNA, 75 bp, synthetic construct
  source 1..75: mol_type = other DNA
ttaccgatctggcgaaagcgaagtcattgagtgtggtcgcggagtttgtcgagacgcaacagcagcaggcgctat

SEQ ID NO: 269922 - DNA, 75 bp, synthetic construct
  source 1..75: mol_type = other DNA
acgccttggtgggtgaattatttctctattgacggggatttagaacaagaaagtaagggagcgttaatttttctt

SEQ ID NO: 269923 - DNA, 75 bp, synthetic construct
  source 1..75: mol_type = other DNA
gtcaggatgtggtcgattgtgaagtaaaattgacctctgagcgccgcgaagaggcaccacgcctgtttacgcaca

SEQ ID NO: 269924 - DNA, 75 bp, synthetic construct
  source 1..75: mol_type = other DNA
ccgagaagtattgttcggtagcgctgatgctagagaaagccgtgaatattacccactcctatgaagtgatagccg

SEQ ID NO: 269925 - DNA, 75 bp, synthetic construct
  source 1..75: mol_type = other DNA
tgggatgcaataaccgaaagagttaaggctgaatatgccttcgcaatattcaaacgcagacacatttttggagaa

SEQ ID NO: 269926 - DNA, 75 bp, synthetic construct
  source 1..75: mol_type = other DNA
cgcaggctttcgctgctgcctcagcaccatttaacgccagaggggatcacagtccaggagctggtttcgtatggt

SEQ ID NO: 269927 - DNA, 75 bp, synthetic construct
  source 1..75: mol_type = other DNA
tcttcagagcattattcctcaataacatcacggatgctgacgctcgggtcttattacaaaaaaggcccagggaag

SEQ ID NO: 269928 - DNA, 75 bp, synthetic construct
  source 1..75: mol_type = other DNA
atgcgactgccttacgtaatatttacagcagctatgctttcttctgtatcaacagcacaagctattcccaatatg

SEQ ID NO: 269929 - DNA, 75 bp, synthetic construct
  source 1..75: mol_type = other DNA
ccgcagccatactggcttccgcgtcaacagcccatgccctgcccaatatgtggaccagcggatttggtcagggcg

SEQ ID NO: 269930 - DNA, 75 bp, synthetic construct
  source 1..75: mol_type = other DNA
tacaacatgtggtcgcggagtttgtcgagacgcaacagcagcaggcgctattgcataagctcggggtgcaatatc

SEQ ID NO: 269931 - DNA, 75 bp, synthetic construct
  source 1..75: mol_type = other DNA
attatctcaataaactattgagaaatgagcttgtcgcaatcaatcagtattttctccatgcccggatgtttaaaa

SEQ ID NO: 269932 - DNA, 75 bp, synthetic construct
  source 1..75: mol_type = other DNA
tcgagcgtattttgtttttagaaggaatcccaaacttacaggatttaggcaaactggggattggtgaagatgtcg

SEQ ID NO: 269933 - DNA, 75 bp, synthetic construct
  source 1..75: mol_type = other DNA
aacaataacaaagttggctccttcagtcctgggctgaagaatacgcagaaagagctgtctgacctcagtgaatgc

SEQ ID NO: 269934 - DNA, 75 bp, synthetic construct
  source 1..75: mol_type = other DNA
ccaggcaaaattcagtcccgtgctgaactgctgaagaaaatgaccggccgtgagctgaaaccgcacgaccgtact

SEQ ID NO: 269935 - DNA, 75 bp, synthetic construct
  source 1..75: mol_type = other DNA
cgccgtatgagtggggatgatctgagcacatggcagaaaccacgggctggcacagtgatcaggctggaggaatac

SEQ ID NO: 269936 - DNA, 75 bp, synthetic construct
  source 1..75: mol_type = other DNA
tgtccggcccgattgcccagtggggcgatatggaatttaacggcgcgcgtcaggcgattaaagacattaatgcca

SEQ ID NO: 269937 - DNA, 75 bp, synthetic construct
  source 1..75: mol_type = other DNA
ccattttttaaagaaaacaactctgtttttatgaatgtcgatggttcatcatttgaagtgataaaaaataacaaa

SEQ ID NO: 269938 - DNA, 75 bp, synthetic construct
  source 1..75: mol_type = other DNA
tataaatgtaattgtacaaaagactggaaaaaagaagacagatttgttgtatacaaagcagattgcacaggaatc

SEQ ID NO: 269939 - DNA, 75 bp, synthetic construct
  source 1..75: mol_type = other DNA
attgttgctatttctaatcaatggggtattgttaatattgaacccttgattgagtttgtacagcaaaatggtttt

SEQ ID NO: 269940 - DNA, 75 bp, synthetic construct
  source 1..75: mol_type = other DNA
gagctgcgtaaaagtgaatttaaggtgctggttgacgaaatcacgccaaccatttcagccggtacaggtgccagc

SEQ ID NO: 269941 - DNA, 75 bp, synthetic construct
  source 1..75: mol_type = other DNA
tttctactaacaagccgctgatggctacggcagtcctgaaagacggcgcgcttgtaattgacaaagtaaagccgc

SEQ ID NO: 269942 - DNA, 75 bp, synthetic construct
  source 1..75: mol_type = other DNA
ctgtgttgctacgcgaccgtataccacaatgtagccagtgcggattacgtagagcagatgaccggtacagtcgag

SEQ ID NO: 269943 - DNA, 75 bp, synthetic construct
  source 1..75: mol_type = other DNA
cgccagcggctggctggcggacaaagtcggcgtgcgcaatattttctttaccgccatcgtgctgtttactctcgg

SEQ ID NO: 269944 - DNA, 75 bp, synthetic construct
  source 1..75: mol_type = other DNA
accctgacgctgaaagatctcccggacaatctggcgagcagcggcaacagtctgctgtcgatgattatgcaattg

SEQ ID NO: 269945 - DNA, 75 bp, synthetic construct
  source 1..75: mol_type = other DNA
cgttttaataggagaaagttctaagctatatgatcatgaccatgattttagaagtgggccggaagaaaaaaataa

SEQ ID NO: 269946 - DNA, 75 bp, synthetic construct
  source 1..75: mol_type = other DNA
gactggttactggcgcatatcccgatggataagcaggtgctgggtaagtggctgaaggcaggctacatggagtcc

SEQ ID NO: 269947 - DNA, 75 bp, synthetic construct
  source 1..75: mol_type = other DNA
gcggcgatcaccattatcttcaggcgcagattggtaacgaaaaggattacttgtgtgctcaggttgcctacaagt

SEQ ID NO: 269948 - DNA, 75 bp, synthetic construct
  source 1..75: mol_type = other DNA
ttggtgtggttatagcttatacaaccctgtacattatcgcgtttattatttgcccgtttattcgggttgaacaac

SEQ ID NO: 269949 - DNA, 75 bp, synthetic construct
  source 1..75: mol_type = other DNA
cgcgcctgatgcttaaagcaggcagcccggtgcatcgggaaattctctacaacgatatctacaactgggacaacg

SEQ ID NO: 269950 - DNA, 75 bp, synthetic construct
  source 1..75: mol_type = other DNA
aaaaatttcttatattagtaccagtattattagcactcattatctctcaactcccagtgccgcagggactgctac

SEQ ID NO: 269951 - DNA, 75 bp, synthetic construct
  source 1..75: mol_type = other DNA
catctgaatactggcgcctgggttttgtatttggtgcaatctattttcttgtatacattgctatcgaatacccat

SEQ ID NO: 269952 - DNA, 75 bp, synthetic construct
  source 1..75: mol_type = other DNA
cacatgatgaaagtgcgcggaaaataggggcgtatttaatgtggactgcggtgagtaccacatgtgtgacaagtt

SEQ ID NO: 269953 - DNA, 75 bp, synthetic construct
  source 1..75: mol_type = other DNA
attgttgctatttctaatcaatggggcattgttaatattgaacccttgattgattttgtacaaaaaaatggtttt

SEQ ID NO: 269954 - DNA, 75 bp, synthetic construct
  source 1..75: mol_type = other DNA
ctggcggcattcttgcgttggtttcgatgcgtaaagttcagactccgcatcatatgcaaaatctgacgaccaaag

SEQ ID NO: 269955 - DNA, 75 bp, synthetic construct
  source 1..75: mol_type = other DNA
tggctttgcggtgattatgccgatgatgtttgtcgatgagctgggctttaccacgtccgagtggctacaggtgtg

SEQ ID NO: 269956 - DNA, 75 bp, synthetic construct
  source 1..75: mol_type = other DNA
gcagaaaaaatacactctgccggtgttaattctcaccgcccgcgatacccttaccgacaaaatcgccgggctgga

SEQ ID NO: 269957 - DNA, 75 bp, synthetic construct
  source 1..75: mol_type = other DNA
cctgctacgacgccataataatcagggcgaaagtgagctgattgttggcaacctgacgctgaatatgggtcgccg

SEQ ID NO: 269958 - DNA, 75 bp, synthetic construct
  source 1..75: mol_type = other DNA
tctggcggcacaaaccgaaggctacgcgtgcgatggcgtcacgaccgcgcggatggcggaacaaagcctggaagc

SEQ ID NO: 269959 - DNA, 75 bp, synthetic construct
  source 1..75: mol_type = other DNA
caacaggactatatgcggcggctgaacgagtgggagagcgccttcgcagaattgcagaagatgcacgcggttacg

SEQ ID NO: 269960 - DNA, 75 bp, synthetic construct
  source 1..75: mol_type = other DNA
agcgcgtcgtgatattgagtcagcaggtgcagagattagccgggcaagtggatcgcttgagtcggttatttatcg

SEQ ID NO: 269961 - DNA, 75 bp, synthetic construct
  source 1..75: mol_type = other DNA
tctctgggtggaacaccaggataaggggcggctcgaactgaattttgtcattccgaacatggaactacagagcgg

SEQ ID NO: 269962 - DNA, 75 bp, synthetic construct
  source 1..75: mol_type = other DNA
cgccgtccggactgccgaaaacgaagcaggaggccgcagaagccatcacgcgcggactgctgacccttgcttcgt

SEQ ID NO: 269963 - DNA, 75 bp, synthetic construct
  source 1..75: mol_type = other DNA
aggggaaggactgggtacaactgacggagtgacacagagtgacggagctggaaagacatttgctgaacgcattag

SEQ ID NO: 269964 - DNA, 75 bp, synthetic construct
  source 1..75: mol_type = other DNA
gaccgcttgagtcggttatttatcacgaacaacagataagggatgaacaggagcgtcaggcgcaggagcttgccc

SEQ ID NO: 269965 - DNA, 75 bp, synthetic construct
  source 1..75: mol_type = other DNA
atcagcagcagaatcgccagcggttgattgattgtttcccacaggcgcaatgggcgacagaagtcgatgtcagtg

SEQ ID NO: 269966 - DNA, 75 bp, synthetic construct
  source 1..75: mol_type = other DNA
tatgacggttatctcacgccgcaaaatccggcaaatcagcatcattgtatcggcgccagttaccatcgcggtagt

SEQ ID NO: 269967 - DNA, 75 bp, synthetic construct
  source 1..75: mol_type = other DNA
actggcgcaacagcaaggtttacagattcgttatcaacaccagttacaggatttatcccgtaaggatgactgttg

SEQ ID NO: 269968 - DNA, 75 bp, synthetic construct
  source 1..75: mol_type = other DNA
tggcgaacgggcatcaaatcaaccgtttcaatcaaacatcgcatttgccggtttattcagttgccggtcaggtca

SEQ ID NO: 269969 - DNA, 75 bp, synthetic construct
  source 1..75: mol_type = other DNA
atttgttatcaacatcagttaaaggatttatcccgtcaggatgactgttggttattgaattttgcaggtgatcag

SEQ ID NO: 269970 - DNA, 75 bp, synthetic construct
  source 1..75: mol_type = other DNA
tgccagtacgctggcggcgttaaatccgaataggttatgggtgcggaaattgttgaagggtaaagcggttaaggc

SEQ ID NO: 269971 - DNA, 75 bp, synthetic construct
  source 1..75: mol_type = other DNA
gcggttcgtacaaggcccaggggctcgtcacggaggacatagaggcctatctcgagcagcaccggcacaagtcga

SEQ ID NO: 269972 - DNA, 75 bp, synthetic construct
  source 1..75: mol_type = other DNA
ttcgagctggaactgaatgcgttagtgcgccgccatttccctcactggggcgcgcgcgatttgctgggagataaa

SEQ ID NO: 269973 - DNA, 75 bp, synthetic construct
  source 1..75: mol_type = other DNA
aagttgaaaatttaccgctcaatggcattggtcaggttgatctcacctttgacgagccgttggtgttagatcgct

SEQ ID NO: 269974 - DNA, 75 bp, synthetic construct
  source 1..75: mol_type = other DNA
aaagaatgccctgtaccgcaaatgccccaaatatgagcgcattattgctgatgctattggtgttgcgccggagga

SEQ ID NO: 269975 - DNA, 75 bp, synthetic construct
  source 1..75: mol_type = other DNA
ttttctcggtttggcaatcgaagtgataagtttgaattttgtttgaagctccttgcggggccacttaggcatatc

SEQ ID NO: 269976 - DNA, 75 bp, synthetic construct
  source 1..75: mol_type = other DNA
gatggttattattcattatggggttggtcactatcatgcttttttccgggaatgagtatcagtggatgcaggata

SEQ ID NO: 269977 - DNA, 75 bp, synthetic construct
  source 1..75: mol_type = other DNA
gctcgctttgtcggaatggtaaacaagccggaggtgatcgccacagatcaccctgctttgaagaggatactggaa

SEQ ID NO: 269978 - DNA, 75 bp, synthetic construct
  source 1..75: mol_type = other DNA
ggatcaaacatctgatcgtggcgatcaacaaaatggatctggtggattacagtgaagagacgttcacccgtattc

SEQ ID NO: 269979 - DNA, 75 bp, synthetic construct
  source 1..75: mol_type = other DNA
tctcatcgctgcataacgacagtaagcgtcatggcacccagggcgaaaagctggatctggcactgctggtggacg

SEQ ID NO: 269980 - DNA, 75 bp, synthetic construct
  source 1..75: mol_type = other DNA
ctattggtgttgcgccggaggagatctggcccagctgtcaacgacggatgaaaagtgatccacttatatctccac

SEQ ID NO: 269981 - DNA, 75 bp, synthetic construct
  source 1..75: mol_type = other DNA
cgagcagtacacccgcaatatggcgactggcgcatcgacatgtgaactggcgatcttactgatcgacgcccgtaa

SEQ ID NO: 269982 - DNA, 75 bp, synthetic construct
  source 1..75: mol_type = other DNA
gaaccagaagaacaggttgatccgcgcaaagccgccgtcgaagccgctattgcccgtgccaaagcgcgcaagctg

SEQ ID NO: 269983 - DNA, 75 bp, synthetic construct
  source 1..75: mol_type = other DNA
agtgaagagacgttcacccgtattcgtgaagattatctgacctttgccgggcagctgccgggtaatctggatatc

SEQ ID NO: 269984 - DNA, 75 bp, synthetic construct
  source 1..75: mol_type = other DNA
agtatgccggaatgagctggctggagttgctggagcgcggtaagcgtatggatatcaatatcccgttggtggaga

SEQ ID NO: 269985 - DNA, 75 bp, synthetic construct
  source 1..75: mol_type = other DNA
acctggcctgctggaaagtggaccgtttcagcacagaggcgcagctgacagtggatgacgtgcgtgccggcggac

SEQ ID NO: 269986 - DNA, 75 bp, synthetic construct
  source 1..75: mol_type = other DNA
aatccaccctactccaaaatctccccctggattgatgcggctatacgtgagcaggctcgcggagttacaacagtg

SEQ ID NO: 269987 - DNA, 75 bp, synthetic construct
  source 1..75: mol_type = other DNA
gagctgaggcgttgtcagcgtcaccggagacagatatcccccgctcatggtggctgcgtcttttacagcgaggac

SEQ ID NO: 269988 - DNA, 75 bp, synthetic construct
  source 1..75: mol_type = other DNA
gcaggctggaggcactgtcagcgtcaccggagaaaaatttgccacgctcatggtggctgcgtcttttacagagag

SEQ ID NO: 269989 - DNA, 75 bp, synthetic construct
  source 1..75: mol_type = other DNA
gcagactggaggttctgtcagcgtcaccggagaacgatttgccgcgctcatggtggtggcgtcttttacagagag

SEQ ID NO: 269990 - DNA, 75 bp, synthetic construct
  source 1..75: mol_type = other DNA
ggaagctggtttcctcgatctggaaaaatcccgccgccgtttgcgtcgtcataaagccattagtcatgacttccg

SEQ ID NO: 269991 - DNA, 75 bp, synthetic construct
  source 1..75: mol_type = other DNA
aattcaatcattggtgggctacagaaggtgactgggttgagaaaccgaattaccgccgcaacggcatgagcgggg

SEQ ID NO: 269992 - DNA, 75 bp, synthetic construct
  source 1..75: mol_type = other DNA
caccggttcataaatttgaggcgatagcgaagggcaaagaagtggacagggatgcagacattaagcgcctggaga

SEQ ID NO: 269993 - DNA, 75 bp, synthetic construct
  source 1..75: mol_type = other DNA
cgatggcttgtgcaacacttggattagtgttgggtggtttagttggcggccctgttgcccgtcatcttttgaaaa

SEQ ID NO: 269994 - DNA, 75 bp, synthetic construct
  source 1..75: mol_type = other DNA
actgtcaggaagctgggcacaccatcagtaaaataccgctggcggtgatgaaaaagctggttggttatgaccctg

SEQ ID NO: 269995 - DNA, 75 bp, synthetic construct
  source 1..75: mol_type = other DNA
cagcacttgtttcattctatccgctatccgtttgggcgtccgacgattgttcgggagatagctgtaataaaagat

SEQ ID NO: 269996 - DNA, 75 bp, synthetic construct
  source 1..75: mol_type = other DNA
tgcaggcaaatgttcctgtctgggcacatgaacaactggctgcatgggatgctgcagagtttgcggcaatgtcgg

SEQ ID NO: 269997 - DNA, 75 bp, synthetic construct
  source 1..75: mol_type = other DNA
aaatgaaggtaggtaactacttgaaaaatcaagaaccagaacgaaaaagccagaacatcaccaagacaggaactt

SEQ ID NO: 269998 - DNA, 75 bp, synthetic construct
  source 1..75: mol_type = other DNA
agatgaaggtaggtaagtatttgaaagatcaagaatcagaacggaaaagccagaacatcaccaaaacgggaactt

SEQ ID NO: 269999 - DNA, 75 bp, synthetic construct
  source 1..75: mol_type = other DNA
agacgctgatcccactcgacagttgggtcactgaagggatcgactgggtcgttacccatttccgtcccgtctttc

SEQ ID NO: 270000 - DNA, 75 bp, synthetic construct
  source 1..75: mol_type = other DNA
aaggcggccgaagcgctggttaaaaacgtttttgcaaaaattgcgacagtggctgatggggtgacgaacggtata

SEQ ID NO: 270001 - DNA, 75 bp, synthetic construct
  source 1..75: mol_type = other DNA
aatggttacccttatctttctcaggtgaataacgttgaccctcagcaaatgatgatgatggttactctgttatcc

SEQ ID NO: 270002 - DNA, 75 bp, synthetic construct
  source 1..75: mol_type = other DNA
ttgcaaaaccaggcaaactatttacaaagtgcttctcagctgatgtccgattccgcacgagtaaatagccgtatt

SEQ ID NO: 270003 - DNA, 75 bp, synthetic construct
  source 1..75: mol_type = other DNA
gttgggcgcgacgcccgcagtcgcggcaaccgtcgctggtataccactggccctgtcggtctgctgacccgtcca

SEQ ID NO: 270004 - DNA, 75 bp, synthetic construct
  source 1..75: mol_type = other DNA
agggttgctgaactggaaacaaatggggtgccgaccaccaacgacttaaacaaaatggttgttggcgatctgctc

SEQ ID NO: 270005 - DNA, 75 bp, synthetic construct
  source 1..75: mol_type = other DNA
cggtctgcctgtcgggagattcacaacctgacagaaccgttgtcccggcatggtgtgtatcttcgtccgcagacc

SEQ ID NO: 270006 - DNA, 75 bp, synthetic construct
  source 1..75: mol_type = other DNA
gccgttgggcgcgactcacgtagtcgcggcaaccgtcgctggtacaccactggccctgtcggtctgctgacccgc

SEQ ID NO: 270007 - DNA, 75 bp, synthetic construct
  source 1..75: mol_type = other DNA
ttgccatcggcgcaatcggtgcctggtcacaggcaatggttaccctggcgctggtgttaaccgccctgctgttct

SEQ ID NO: 270008 - DNA, 75 bp, synthetic construct
  source 1..75: mol_type = other DNA
ggcgtggcgacgctggtttcactgattgctatcggcgcgatcggcgcatggtcgcaggcaatggtgactttggcg

SEQ ID NO: 270009 - DNA, 75 bp, synthetic construct
  source 1..75: mol_type = other DNA
tggcgcatctgccacgttttcagtcggtaacgaggttccggtgctgggtcaggtgagctacgccgacaacaggcc

SEQ ID NO: 270010 - DNA, 75 bp, synthetic construct
  source 1..75: mol_type = other DNA
ggcttatctcagcattgttctgctccacgccagcgatggcggatatgaatcgcaccacgaaaggtgcattgctag

SEQ ID NO: 270011 - DNA, 75 bp, synthetic construct
  source 1..75: mol_type = other DNA
gttccccgcggctcagggtgaaggatggtgcgtcagccacgttttcagttggtaatgaggttccggtgctgggtc

SEQ ID NO: 270012 - DNA, 75 bp, synthetic construct
  source 1..75: mol_type = other DNA
gaaattagcttcaacgactggttacgcactcacccgcaggctgatcagatagcccgcgactataacgacgcattt

SEQ ID NO: 270013 - DNA, 75 bp, synthetic construct
  source 1..75: mol_type = other DNA
ggtcgaataaaccagcttttgcacccggaagacgatgtgaatatcggggcgtttgaggcgctggcggcgaaagac

SEQ ID NO: 270014 - DNA, 75 bp, synthetic construct
  source 1..75: mol_type = other DNA
atgaagcgttacacacctgactttcctgaaatgatgcgtctgtgcgagatgaatttttcgcaattgcgccgtttg

SEQ ID NO: 270015 - DNA, 75 bp, synthetic construct
  source 1..75: mol_type = other DNA
tttacgacactcattacccggctccaggatcgccagcattggcgcaacgtctggttgaattgttagcgccagccc

SEQ ID NO: 270016 - DNA, 75 bp, synthetic construct
  source 1..75: mol_type = other DNA
atgtcttcaacgcgtatgccagcattgtttttaggtcacggtagcccgatgaacgtgctggaagataatttatat

SEQ ID NO: 270017 - DNA, 75 bp, synthetic construct
  source 1..75: mol_type = other DNA
gcgttatcgaacccaacgccagagcactatctgccgttgttgtatgtcttaggtgcgtgggatgggcaggagcca

SEQ ID NO: 270018 - DNA, 75 bp, synthetic construct
  source 1..75: mol_type = other DNA
accgtaccggggatgtgctggtttattatggccggaagtcagagattaagcggttgcagacgcttttaccgctga

SEQ ID NO: 270019 - DNA, 75 bp, synthetic construct
  source 1..75: mol_type = other DNA
aggtatcagcggctgacggggatattattctgctgggtggcctggctgaatcgaaggtcacaaacgccgataccg

SEQ ID NO: 270020 - DNA, 75 bp, synthetic construct
  source 1..75: mol_type = other DNA
ttgaggttcagaccagtgagcgtaacggttccgggctggcactggcggcgaagctgctttccggcaagctgaata

SEQ ID NO: 270021 - DNA, 75 bp, synthetic construct
  source 1..75: mol_type = other DNA
tggcggtcacgtactggaaccatcagctggcacgggtattttccaggagacaaaacggcagggaatgataatgac

SEQ ID NO: 270022 - DNA, 75 bp, synthetic construct
  source 1..75: mol_type = other DNA
agattaaaaaaacaccaaaaaatggatgtttattcaattccggctgcgagccatgatggctgcaccacaatgcac

SEQ ID NO: 270023 - DNA, 75 bp, synthetic construct
  source 1..75: mol_type = other DNA
gtcaatgttcactactattgtggcaaaggcacattcgatgacttccgtctggatacgcttaaacgtaagaaagac

SEQ ID NO: 270024 - DNA, 75 bp, synthetic construct
  source 1..75: mol_type = other DNA
cgaaacaacagcgattgtccgggtggaaaaaattgacggtgaaaaagcacaatacatctgccgtatcgcctggct

SEQ ID NO: 270025 - DNA, 75 bp, synthetic construct
  source 1..75: mol_type = other DNA
gcaactggacgaaaacggtcagaacctgattcgggtaatggctgaaaatggtcgtcttaacgcgctcccggatgt

SEQ ID NO: 270026 - DNA, 75 bp, synthetic construct
  source 1..75: mol_type = other DNA
gagcgcttttctgaagatatcgatctttctgttcactgggccgatctggcaggccactcagaagaggaggaacag

SEQ ID NO: 270027 - DNA, 75 bp, synthetic construct
  source 1..75: mol_type = other DNA
atggacatttttgattactaccggagcgcatcacaacgtcgcgagcttcaggaaatcctctcttacgcggcgcag

SEQ ID NO: 270028 - DNA, 75 bp, synthetic construct
  source 1..75: mol_type = other DNA
agatatcggcgatcgcgtccgactatccatcggttgtcagtgatgaagtggcagcaatgattcgctttgctggca

SEQ ID NO: 270029 - DNA, 75 bp, synthetic construct
  source 1..75: mol_type = other DNA
tcaggcatggcagggcgccaaagtaggagacaagcgccttgtaggtggcatctggcacgagtttgatggcctgca

SEQ ID NO: 270030 - DNA, 75 bp, synthetic construct
  source 1..75: mol_type = other DNA
aaacgtactggcgaggcgtgctttctttccgcgatttccaggggcgcatgaaagccttcaccaatggttcggaga

SEQ ID NO: 270031 - DNA, 75 bp, synthetic construct
  source 1..75: mol_type = other DNA
ggcattatcaatgcgacgacagttagccaggctggcggcatcaagctgaagaaggtgaataagccgaccgaacct

SEQ ID NO: 270032 - DNA, 75 bp, synthetic construct
  source 1..75: mol_type = other DNA
aactggcatatttgcctaacccggcagtatccaagatggcccgcgacatggctgtaaaagctgcgtacatgatga

SEQ ID NO: 270033 - DNA, 75 bp, synthetic construct
  source 1..75: mol_type = other DNA
gcaaaaatacaagccagtgataacccgctgaatatcgtggacggcgagggattcctccaggcattgtatgggtat

SEQ ID NO: 270034 - DNA, 75 bp, synthetic construct
  source 1..75: mol_type = other DNA
agccttacgcatgatgctgctgcaactggcggatgttgttgaggcgggaatgaaaaccgcgcctgaaaccaaaca

SEQ ID NO: 270035 - DNA, 75 bp, synthetic construct
  source 1..75: mol_type = other DNA
acgaatttacgtcaggggcgtgtgcgtattcgctacaaatatacgcccgttccgccactggaagacatggagctt

SEQ ID NO: 270036 - DNA, 75 bp, synthetic construct
  source 1..75: mol_type = other DNA
tggccgcgccggagctggacacggaagcggtaacaaaatccctgtgcgtgattgcgggtaaactgcgcgcgtttg

SEQ ID NO: 270037 - DNA, 75 bp, synthetic construct
  source 1..75: mol_type = other DNA
gtcaggcgacaccgctggatacattcaaaacctctgtccgcgcaggtcattcggttgaacagattatgcaatatc

SEQ ID NO: 270038 - DNA, 75 bp, synthetic construct
  source 1..75: mol_type = other DNA
tttgctgtcctgctggcgaacatcacggttcctctgatcgattactatacgcgtccgcgcgtttacggccatcgc

SEQ ID NO: 270039 - DNA, 75 bp, synthetic construct
  source 1..75: mol_type = other DNA
caaaacttctgtccgcgccggtcattcggttgagcagattatgcagtatccgatctacagcggtattctggcggg

SEQ ID NO: 270040 - DNA, 75 bp, synthetic construct
  source 1..75: mol_type = other DNA
tggtgcgtgtggctgaagccggagaggaaggtgagacacaggatcagcttgtcatcggtggctcgcaggctgacg

SEQ ID NO: 270041 - DNA, 75 bp, synthetic construct
  source 1..75: mol_type = other DNA
accgctggaagatttaacgctgatccagacgtttaccgatcagtattacgaaccagcctttgcatcgctgggagg

SEQ ID NO: 270042 - DNA, 75 bp, synthetic construct
  source 1..75: mol_type = other DNA
gcctacatttttgaagtctatacacgaaccgcacagactctggcggataccatcgccgaagcgcagtttgaggtt

SEQ ID NO: 270043 - DNA, 75 bp, synthetic construct
  source 1..75: mol_type = other DNA
ccgccactggaagacatggagctttaccagacgtttactgatgaatactttgaacctgcatttgcggtgctggga

SEQ ID NO: 270044 - DNA, 75 bp, synthetic construct
  source 1..75: mol_type = other DNA
tggccgcgccggagctggacacggaggcggtgacaaaatccctgtgcgtgattgcgggtaaactgcgcgcgtttg

SEQ ID NO: 270045 - DNA, 75 bp, synthetic construct
  source 1..75: mol_type = other DNA
gcggcgcgttctcgacgccaaaaccgaccagatcgcgggtgccaaattgcagattcaactgctggcgcgcggtgt

SEQ ID NO: 270046 - DNA, 75 bp, synthetic construct
  source 1..75: mol_type = other DNA
cggtaagtattccccccctcgcgccatggtggatggtcgtgctgggtacggtgtttgcggtgatcatcgctaaac

SEQ ID NO: 270047 - DNA, 75 bp, synthetic construct
  source 1..75: mol_type = other DNA
ctgaatcgcattaactggggcaactacgacctcgtcgtcatcgacgagtcacacaacttccgcaacaatgacgcc

SEQ ID NO: 270048 - DNA, 75 bp, synthetic construct
  source 1..75: mol_type = other DNA
cgtgcgcttaggctgtgttgtttttttcgaaagcatactgatttcagggatgaatttgatcagctttcggcacat

SEQ ID NO: 270049 - DNA, 75 bp, synthetic construct
  source 1..75: mol_type = other DNA
atggacatcgaagatttcctggaagaagaaaacgatttggctctgtggaattatgatattttgagtattgactgg

SEQ ID NO: 270050 - DNA, 75 bp, synthetic construct
  source 1..75: mol_type = other DNA
accggtgacgacaatgtgctgagcgcccaagccaacgacgtgtcttatcgcaaagagcaattgcgacgtttgcaa

SEQ ID NO: 270051 - DNA, 75 bp, synthetic construct
  source 1..75: mol_type = other DNA
agagcacgcttaagaagagctatgacttccaagaactgctcacccttttctcaccacactcgaaggagaaagcca

SEQ ID NO: 270052 - DNA, 75 bp, synthetic construct
  source 1..75: mol_type = other DNA
cctgctgcaagggacaagcccagcctattacagatgcctgtctcctgttcaataaggaaacggccgatggccgca

SEQ ID NO: 270053 - DNA, 75 bp, synthetic construct
  source 1..75: mol_type = other DNA
aaactggattcactggttactgccgggaaactgattggtgcggagtgctggtatgacgtggtggataacagcacc

SEQ ID NO: 270054 - DNA, 75 bp, synthetic construct
  source 1..75: mol_type = other DNA
atggtcgtgctgggtacggtgtttgcggtgatcatcgctaaacagttgtatggcggtctggggcaaaacccgttt

SEQ ID NO: 270055 - DNA, 75 bp, synthetic construct
  source 1..75: mol_type = other DNA
tcgctggggctatgcgctactctgggctggttgttcgcaccggaaacactcgcatcgccgcaaattcatctgttg

SEQ ID NO: 270056 - DNA, 75 bp, synthetic construct
  source 1..75: mol_type = other DNA
ccgcccgaggtggtgtgaagcgtcgcggaaccccggattccactcacgattgaacgaggtgctaaaaagtatttt

SEQ ID NO: 270057 - DNA, 75 bp, synthetic construct
  source 1..75: mol_type = other DNA
tgcggaacgtttatgacatcaagccattaattcgtaagttaattgaggtgctgaaaaccgagtatgataaaaagc

SEQ ID NO: 270058 - DNA, 75 bp, synthetic construct
  source 1..75: mol_type = other DNA
cggaagacaatgatctgtctctgtggaatgatgatattttaagcattgactggttcgttatcctcaaagagcttt

SEQ ID NO: 270059 - DNA, 75 bp, synthetic construct
  source 1..75: mol_type = other DNA
agatgcgcgtcggcaccctggcgatcaccgaccatgacaccacagctgcaatcgcaccagcaagagaggaaattt

SEQ ID NO: 270060 - DNA, 75 bp, synthetic construct
  source 1..75: mol_type = other DNA
ccagaatggtgtggtcattcgccttacatgttgccacaaccacgattaacaaaaatctggccatagctcatattc

SEQ ID NO: 270061 - DNA, 75 bp, synthetic construct
  source 1..75: mol_type = other DNA
gcccctacgccaaagcagcttttgactttgccgccgaacaccaaagtgtagaacgctggcaggacatgctggcgt

SEQ ID NO: 270062 - DNA, 75 bp, synthetic construct
  source 1..75: mol_type = other DNA
ctattggtggcgggagcagctataccccggagttactggaaggatttattaagcgttatcacgaattgccggtca

SEQ ID NO: 270063 - DNA, 75 bp, synthetic construct
  source 1..75: mol_type = other DNA
aattatgagccagtttttttatattcatcctgataacccacagcaacgtctgatcaaccaggcggtggagatcgt

SEQ ID NO: 270064 - DNA, 75 bp, synthetic construct
  source 1..75: mol_type = other DNA
tgcgcgccagcatcatctttgggcatcacaaggatctgattttcatcagccgtgcccgtggattgaactgggtcg

SEQ ID NO: 270065 - DNA, 75 bp, synthetic construct
  source 1..75: mol_type = other DNA
gcacaggtctttggcggaatatctatggccgcaagcattctgacagccggcgttggcggggtgtcttcactgtta

SEQ ID NO: 270066 - DNA, 75 bp, synthetic construct
  source 1..75: mol_type = other DNA
ttgcaaaaccaggcaaactatttacaaagcgcttctcagctgatgtccgactccgcgcgagtaaatagccgtatt

SEQ ID NO: 270067 - DNA, 75 bp, synthetic construct
  source 1..75: mol_type = other DNA
acgtttttgcaaaaattgcgacagtggctgatggggtgacgaacggtatacgttctgccgggacaacggcgttga

SEQ ID NO: 270068 - DNA, 75 bp, synthetic construct
  source 1..75: mol_type = other DNA
tcggcaaatccctgcttttgtgaaaagagcacgttcagagctctttaaacttaaaacagacaagaaacctctgtt

SEQ ID NO: 270069 - DNA, 75 bp, synthetic construct
  source 1..75: mol_type = other DNA
agtacttaagtcagagtgcgaaggcagagctggaaaaagctactctcgagctgcaaaaccaggcgaattatatac

SEQ ID NO: 270070 - DNA, 75 bp, synthetic construct
  source 1..75: mol_type = other DNA
agtaagagataggaaagatccacgtaaaaaggaaggtaaccatatgaaagttgccttgcttggggaagcctggga

SEQ ID NO: 270071 - DNA, 75 bp, synthetic construct
  source 1..75: mol_type = other DNA
ctttgccgaattgcttgatggtgtggcgtcagggcagttaaaagcgtcctctgtaaaaaatattttcgatctgcc

SEQ ID NO: 270072 - DNA, 75 bp, synthetic construct
  source 1..75: mol_type = other DNA
ggaagcatcatgggggttctgattgctggagaactccatctttattattcaggaacttacaccgagaatttggtt

SEQ ID NO: 270073 - DNA, 75 bp, synthetic construct
  source 1..75: mol_type = other DNA
gccgtccggcatcctgaaagacgccacttccgttcgcctcttcctgaaagcaacagatagcgaggagtatcacaa

SEQ ID NO: 270074 - DNA, 75 bp, synthetic construct
  source 1..75: mol_type = other DNA
gacgcacaaaaacgggcgaccggatggcatcagctgtattccgcagacggtggtatggcacccaccggcgatgca

SEQ ID NO: 270075 - DNA, 75 bp, synthetic construct
  source 1..75: mol_type = other DNA
ccgatggaatgtatggaactctatcagacgtttaccgacgagttctttggctctgcttttgcatctcttggaggt

SEQ ID NO: 270076 - DNA, 75 bp, synthetic construct
  source 1..75: mol_type = other DNA
tgaccatgagcagggttggcacaaatcgctgtccaacgttccggttaaaaatgtgctggggatgtccaggcatgt

SEQ ID NO: 270077 - DNA, 75 bp, synthetic construct
  source 1..75: mol_type = other DNA
caggcaaggcaaacccattaagtacattgcagatgctctcagaatgcctctgagcacgtcatacaggattgctca

SEQ ID NO: 270078 - DNA, 75 bp, synthetic construct
  source 1..75: mol_type = other DNA
gatgtctatctacaaacgtctgcgcagctttgaacatgagctggatggtgacaaaattcaggaagtaacccatac

SEQ ID NO: 270079 - DNA, 75 bp, synthetic construct
  source 1..75: mol_type = other DNA
taaaccttagtccgttggtgcattccgatcgcgatgctgagctgctggcacgcgagatgattctggcgcacgaga

SEQ ID NO: 270080 - DNA, 75 bp, synthetic construct
  source 1..75: mol_type = other DNA
actttataaaacgcttgatcgtcgtgaggcgctgaaaggggctgattttgtcactacccaactgcgcgtaggtca

SEQ ID NO: 270081 - DNA, 75 bp, synthetic construct
  source 1..75: mol_type = other DNA
gcatggaagacgaacagttttccgtcaagcattacgacgcgcgagtgaaagacggcgtggtacagctgcgcggtt

SEQ ID NO: 270082 - DNA, 75 bp, synthetic construct
  source 1..75: mol_type = other DNA
gcatggaagacgaacagttttccgtcaaacattacgaagcacgagtgaaagacggcgtggtgcagctgcgcggtt

SEQ ID NO: 270083 - DNA, 75 bp, synthetic construct
  source 1..75: mol_type = other DNA
cattgatattgccagagatggtcaaacaaaggctttttggctggcgatattgattatcttcgttgctgctgtctt

SEQ ID NO: 270084 - DNA, 75 bp, synthetic construct
  source 1..75: mol_type = other DNA
agaaaaaggccgcgacggtaaaaatgcgcgtaaaggtgccgtgattggcggtacgggtggtgcaattctgggtaa

SEQ ID NO: 270085 - DNA, 75 bp, synthetic construct
  source 1..75: mol_type = other DNA
gccccatccagttacgtttcatcgaactgatggaaacgggcgagggtagcgaacttttccgtaagcaccatatct

SEQ ID NO: 270086 - DNA, 75 bp, synthetic construct
  source 1..75: mol_type = other DNA
aatggttaccgtctggagcgcgatgtggcgaactggcgcgatgctggacttactggcatcaacgtcagcgttgat

SEQ ID NO: 270087 - DNA, 75 bp, synthetic construct
  source 1..75: mol_type = other DNA
gacggggattaacgtcagtgtcgatagcctcgacgctcgccagttttatgctattaccggtcaggataaattcaa

SEQ ID NO: 270088 - DNA, 75 bp, synthetic construct
  source 1..75: mol_type = other DNA
atgttgcttgcaaaaatcgtggcgattttatgtgcgcatctccacattaccgccaattctgtaacagagatcaca

SEQ ID NO: 270089 - DNA, 75 bp, synthetic construct
  source 1..75: mol_type = other DNA
ctggcgggacggaacctgttgtcaacacggtgtctggctggcggatattcgttctattggtacgaatactattga

SEQ ID NO: 270090 - DNA, 75 bp, synthetic construct
  source 1..75: mol_type = other DNA
gcccaggggttactgcaacgactggggctggaagaccgtacagagtattatccggcacagctttcgggtggttag

SEQ ID NO: 270091 - DNA, 75 bp, synthetic construct
  source 1..75: mol_type = other DNA
ccatcttcaggagagattgatataatgaaatatgcagatagctatgcacctgatagatataagagattggtcgcg

SEQ ID NO: 270092 - DNA, 75 bp, synthetic construct
  source 1..75: mol_type = other DNA
cagccatggattcttttgatttaattgaggagcaagatctagaaagcgtcaggtctagtgcttttatgggacgta

SEQ ID NO: 270093 - DNA, 75 bp, synthetic construct
  source 1..75: mol_type = other DNA
tgccaaagatggaatggagtattattgggcacgaaatggaatgaggaatcccggaattggcaataatattactac

SEQ ID NO: 270094 - DNA, 75 bp, synthetic construct
  source 1..75: mol_type = other DNA
gtaatcctgttggcggcgaaggtgttacgctcaagcgcgtgcaggcgaaaagccgttcagggatctctgtatcct

SEQ ID NO: 270095 - DNA, 75 bp, synthetic construct
  source 1..75: mol_type = other DNA
cgggcgtcaccttcaaacgacccctgctgaaaaccgaaaccagctcaggcttatcgattagttctaacggcgaag

SEQ ID NO: 270096 - DNA, 75 bp, synthetic construct
  source 1..75: mol_type = other DNA
tgatagatataagagattggtcgcggcagatgaagatgttcaggcattgatctggttgagcagggtgagttttaa

SEQ ID NO: 270097 - DNA, 75 bp, synthetic construct
  source 1..75: mol_type = other DNA
tgaggatatccgtcagcaattgggtgacattgtgattcagcgtggaacgctggctcgcgaaagtttggcgcttga

SEQ ID NO: 270098 - DNA, 75 bp, synthetic construct
  source 1..75: mol_type = other DNA
tgcatattttgcccgacgtttaccccgcaggagacgaagtgctgaccatctggatggcaactggtcgccgcgttc

SEQ ID NO: 270099 - DNA, 75 bp, synthetic construct
  source 1..75: mol_type = other DNA
ggtcacgaactggcaccccatttattagtacgtgcgcggttaactaccaacagctcgccacgccgcaactgttac

SEQ ID NO: 270100 - DNA, 75 bp, synthetic construct
  source 1..75: mol_type = other DNA
aacggctggtggccaggctgggcttaaccccgtggtatcaggatgcgccattgtctgaacacgagcctcagcccg

SEQ ID NO: 270101 - DNA, 75 bp, synthetic construct
  source 1..75: mol_type = other DNA
aaatcatcacaactgggctgcctgtgcgcggatgctggaaaccgacgtcgccaacctgcatcggctggcgaaacg

SEQ ID NO: 270102 - DNA, 75 bp, synthetic construct
  source 1..75: mol_type = other DNA
aaaccattcgccaggcactggcacaaaatcatcacaactgggctgcctgtgcgcggatgctggaaaccgacgtcg

SEQ ID NO: 270103 - DNA, 75 bp, synthetic construct
  source 1..75: mol_type = other DNA
cgcgaaatttactgcaacactatcgttttccggggaacgtgcgcgaactggaacatgctattcatcgggcggtag

SEQ ID NO: 270104 - DNA, 75 bp, synthetic construct
  source 1..75: mol_type = other DNA
aatcctttctcgttggggagattccgggtggggaaagcaggtagcacaggagaaaaaaacggggcgattcagtga

SEQ ID NO: 270105 - DNA, 75 bp, synthetic construct
  source 1..75: mol_type = other DNA
gaagaccgcgctattcatcaattcttccgtgaaagcgcctttcctgcggaggcgcaaattcatgaaatactcaac

SEQ ID NO: 270106 - DNA, 75 bp, synthetic construct
  source 1..75: mol_type = other DNA
caatacggatttaaagggaacttgcctgcgggtttacaaggatctacggggcgaatcctttctcgttggggagat

SEQ ID NO: 270107 - DNA, 75 bp, synthetic construct
  source 1..75: mol_type = other DNA
ccagcccccatccaggatgcgtctcctgcgcctgctgccgtcggaaagaaaaggaaaggaagaccaccacgcaga

SEQ ID NO: 270108 - DNA, 75 bp, synthetic construct
  source 1..75: mol_type = other DNA
cgcccgtcattgtggtgaaaaaacgtcgcgttatttcaccaccacctgtcgtcgataaaacagagactgtcattt

SEQ ID NO: 270109 - DNA, 75 bp, synthetic construct
  source 1..75: mol_type = other DNA
aaactcccgtcattgtggtgaaaaaacgtcgtactttttcgctaccgtccttatccgaaaaaacagatattatcg

SEQ ID NO: 270110 - DNA, 75 bp, synthetic construct
  source 1..75: mol_type = other DNA
gggtccggtaatgtcaatgtaggctatagctacgggaaagattaccggcaactcaactacagcgttcgcggtggc

SEQ ID NO: 270111 - DNA, 75 bp, synthetic construct
  source 1..75: mol_type = other DNA
tggcctcggtttctcgccgtttcatgccggactgatgatgatcccgatggtgcttggcagcatgggaatgaagcg

SEQ ID NO: 270112 - DNA, 75 bp, synthetic construct
  source 1..75: mol_type = other DNA
ttatgacaccggttttcctgcaaattggcctcggtttctcgccgtttcatgccggactgatgatgatcccgatgg

SEQ ID NO: 270113 - DNA, 75 bp, synthetic construct
  source 1..75: mol_type = other DNA
acgcactctctgtgtacgcttgagttccaggacaaccgtcgtctgtatgactgggtactggacaacatcaccatt

SEQ ID NO: 270114 - DNA, 75 bp, synthetic construct
  source 1..75: mol_type = other DNA
gcgaaggcgaaatggttaccatgccgaaccatccgaacaaaccggaaatgggtagccgtcaggtgccgtttagcg

SEQ ID NO: 270115 - DNA, 75 bp, synthetic construct
  source 1..75: mol_type = other DNA
tccggccctcaatctggtgcctgccgaagcctgcgtaccgtttgacgaaatcattccccaggcctcaagccattt

SEQ ID NO: 270116 - DNA, 75 bp, synthetic construct
  source 1..75: mol_type = other DNA
atgtactcccttgtcgggctgggccaccgccagcttcgcgataagctggcgattaatcacagcaaaatgctggcg

SEQ ID NO: 270117 - DNA, 75 bp, synthetic construct
  source 1..75: mol_type = other DNA
atggcggagctgttgcaccgcctggcaaagggtgaaaaggggacgccagaattatccctgcgtgacgatccggca

SEQ ID NO: 270118 - DNA, 75 bp, synthetic construct
  source 1..75: mol_type = other DNA
gtgctgtagtgcgggcgcgttttgatacccgtgtgggatatcgggttctgatgatactcacacggaaaaatggca

SEQ ID NO: 270119 - DNA, 75 bp, synthetic construct
  source 1..75: mol_type = other DNA
tttgatcaacattccggtggggattatcggtgcgatcgccacattgctgttaatgccaaactacaccatgcagac

SEQ ID NO: 270120 - DNA, 75 bp, synthetic construct
  source 1..75: mol_type = other DNA
tgacttttctggttgtactttgttgtctgtggctggccttctcacgttatggcgatatcttgttaggtcagtcgg

SEQ ID NO: 270121 - DNA, 75 bp, synthetic construct
  source 1..75: mol_type = other DNA
attatccctgcgcgacgatccggcacaggaaaccctgcgtttcagcgccgatgccagccttgcgtttcccctgag

SEQ ID NO: 270122 - DNA, 75 bp, synthetic construct
  source 1..75: mol_type = other DNA
acccgatgtacgacttcacccattgcatcagcgatgcgctggaaggtattacgcactctctgtgtacgcttgagt

SEQ ID NO: 270123 - DNA, 75 bp, synthetic construct
  source 1..75: mol_type = other DNA
gcagctttgcaagcattgcagaccatcgctgatgaacaaaaactttgttatggcctgttgggactggaaccgtta

SEQ ID NO: 270124 - DNA, 75 bp, synthetic construct
  source 1..75: mol_type = other DNA
gcttgcgccgcaatcgccagctctgcgccctgcagctgaatgaaaagcgtgttgatgtggtgtatgccaaagagg

SEQ ID NO: 270125 - DNA, 75 bp, synthetic construct
  source 1..75: mol_type = other DNA
ccttccccgtgcagatgaccagctggttaccgccacatgaaattgcggtcaacatccctggttttatcgacgcca

SEQ ID NO: 270126 - DNA, 75 bp, synthetic construct
  source 1..75: mol_type = other DNA
cgatgatggatgatacgtatgagacggatgacgggggaagtgaagcggaacaacatgcgcagtcggcgaaaaagg

SEQ ID NO: 270127 - DNA, 75 bp, synthetic construct
  source 1..75: mol_type = other DNA
acgttgccgtgtgccattccgcttgccagagaacaaggacaatgcggctatcgtgatggttaatgcggtatgcga

SEQ ID NO: 270128 - DNA, 75 bp, synthetic construct
  source 1..75: mol_type = other DNA
gcacacccgccgggtttgatcacgacggttataaaatcctctgtaaacctctgctttccggtaactatgaaatca

SEQ ID NO: 270129 - DNA, 75 bp, synthetic construct
  source 1..75: mol_type = other DNA
aatttcacttcacaataagatttcatctttcataaaagatatatatgatgataactatccaattgataacttcat

SEQ ID NO: 270130 - DNA, 75 bp, synthetic construct
  source 1..75: mol_type = other DNA
aagtgcgtctgcgtaatgcttacgtgattaaagcggaacgcgtggagaaagatgctgaaggcaatatcaccacta

SEQ ID NO: 270131 - DNA, 75 bp, synthetic construct
  source 1..75: mol_type = other DNA
cagttggtgaccgacaagcacgtagaaggctgggacgatccgcgtatgccgaccatttccggtctgcgtcgtcgt

SEQ ID NO: 270132 - DNA, 75 bp, synthetic construct
  source 1..75: mol_type = other DNA
ggtacggtgtttgcggtgatcatcgctaaacagttgtatggcggtctggggcaaaacccgtttaatccggcaatg

SEQ ID NO: 270133 - DNA, 75 bp, synthetic construct
  source 1..75: mol_type = other DNA
cacactcgctacgcatcctgcgcatgactgagttgacggcgattcttgggatctcgcgctcaagtatctacgaaa

SEQ ID NO: 270134 - DNA, 75 bp, synthetic construct
  source 1..75: mol_type = other DNA
atgcgggcgaaacttctgggaatagtcctgacaccccctattgcgatcagctcttttgcttctaccgagacttta

SEQ ID NO: 270135 - DNA, 75 bp, synthetic construct
  source 1..75: mol_type = other DNA
cggtcagttgccgggtgataaagtcactccttacatcgccaaactgcgctattcggtgcccggagtgacgctgat

SEQ ID NO: 270136 - DNA, 75 bp, synthetic construct
  source 1..75: mol_type = other DNA
gcgtggtgaagagattctggcgaactggtcaaccttcgccactaaatttgcgctggttaaaccgaagtccagtga

SEQ ID NO: 270137 - DNA, 75 bp, synthetic construct
  source 1..75: mol_type = other DNA
taagcggttctcttcgttgatgtggcagtccgttatctgttgcctgctggcaggactgatgatgtggctccccag

SEQ ID NO: 270138 - DNA, 75 bp, synthetic construct
  source 1..75: mol_type = other DNA
tgcaagacggcgactgatgcaattattctcacctccacattccgtgccggaatgagctctctggctgtgatccta

SEQ ID NO: 270139 - DNA, 75 bp, synthetic construct
  source 1..75: mol_type = other DNA
actgtacaaaaatgggaaagcggcgctaagcaccccagcggtatgtcattaaaactgcttagtattgtgcaaaaa

SEQ ID NO: 270140 - DNA, 75 bp, synthetic construct
  source 1..75: mol_type = other DNA
ctcggctgtaaatatctacgtatttgccatctgaacaactgcgcaacgggtgtagcaactcaggatgacaaactg

SEQ ID NO: 270141 - DNA, 75 bp, synthetic construct
  source 1..75: mol_type = other DNA
ataatcaacatcaaaccacctccaagccgtcactgcttgccgcctgcatagcactggcactcttaccttccgccg

SEQ ID NO: 270142 - DNA, 75 bp, synthetic construct
  source 1..75: mol_type = other DNA
gtgtagaagtggtgcgtggcgcgaccgggctaatgaccggcaccggcaatccttctgcggcgattaatatggtcc

SEQ ID NO: 270143 - DNA, 75 bp, synthetic construct
  source 1..75: mol_type = other DNA
tggatggaacggtaagtaagggtgtggaatttgaactcaacggtgcaattaccgacaactggcaactgacgtttg

SEQ ID NO: 270144 - DNA, 75 bp, synthetic construct
  source 1..75: mol_type = other DNA
tccgtggcacgactccagcactgctgttcgataagatcgactggcagggcgctgtcgggggcgtacatcaggaca

SEQ ID NO: 270145 - DNA, 75 bp, synthetic construct
  source 1..75: mol_type = other DNA
ggcggctatcagaacaacgatttatggctggatcgctacaatagcgaaaaaactttcttctccggcattgtggat

SEQ ID NO: 270146 - DNA, 75 bp, synthetic construct
  source 1..75: mol_type = other DNA
gaccaccacgttagccatcttccgtattgagcaggataatgtcgctcagtccaccggtacacctatccccggcag

SEQ ID NO: 270147 - DNA, 75 bp, synthetic construct
  source 1..75: mol_type = other DNA
tttatgacctgcacagccataccacggcttccgatggctgcctgacgccagaggcgctggtacaccgtgctgtag

SEQ ID NO: 270148 - DNA, 75 bp, synthetic construct
  source 1..75: mol_type = other DNA
atgacaacgttcaccgacaaagaactgattaaagaaatcagtgactggaaatacgtaccgacaaaagaagactgc

SEQ ID NO: 270149 - DNA, 75 bp, synthetic construct
  source 1..75: mol_type = other DNA
gcgtgagaatccgccagtcgaaaccggagcatggaaagacgctgttgactgggtgctcaaagaggcttaccaggc

SEQ ID NO: 270150 - DNA, 75 bp, synthetic construct
  source 1..75: mol_type = other DNA
gcattgggcaccatccgcgacatcattgaaccgcgcggtgcaaccatcgttggtcactggccaactgcgggctac

SEQ ID NO: 270151 - DNA, 75 bp, synthetic construct
  source 1..75: mol_type = other DNA
atgaatgttttcgaaatggaagggtttcttcgcgggaaatgtgtaccgcgagatctgaaagtgaatgaaacaaat

SEQ ID NO: 270152 - DNA, 75 bp, synthetic construct
  source 1..75: mol_type = other DNA
gcctgtgccactgacaccagaaggattgattaaagcagtgcgtttctatgaacaggtaaagcgtgagaatccgcc

SEQ ID NO: 270153 - DNA, 75 bp, synthetic construct
  source 1..75: mol_type = other DNA
aagaactaattaaagaaatcagagagcgaattggcagcctggacgtgcgagacaatattgagcgccgggcttatg

SEQ ID NO: 270154 - DNA, 75 bp, synthetic construct
  source 1..75: mol_type = other DNA
gttctaaaactgcgacctctgtagatttagcgatcagcaatgatgatgctgagcatatttgtctttctgatgaat

SEQ ID NO: 270155 - DNA, 75 bp, synthetic construct
  source 1..75: mol_type = other DNA
aaggctgagttataacgcatcagttaaccagacgcgtgatactatcggtggtacactttctgcctcctatttatt

SEQ ID NO: 270156 - DNA, 75 bp, synthetic construct
  source 1..75: mol_type = other DNA
ctatgctgattttacttataattcatatagttttataagaaataggccaaagcaacgctatgagtcaatcgttac

SEQ ID NO: 270157 - DNA, 75 bp, synthetic construct
  source 1..75: mol_type = other DNA
gcccttagttaagtgtgctatttcccttatctttatctgtatgtttttgctggctgtctttacattttatgagtt

SEQ ID NO: 270158 - DNA, 75 bp, synthetic construct
  source 1..75: mol_type = other DNA
ctatcatttttcatttatggtcaaatgaaattcttgccgacgaattcaattatagttttatccgcggcggtagca

SEQ ID NO: 270159 - DNA, 75 bp, synthetic construct
  source 1..75: mol_type = other DNA
tacttcgtcgacgtgatatttaatggatcaaaaatttccacttccgttgagttaaatattaatgaagaagattca

SEQ ID NO: 270160 - DNA, 75 bp, synthetic construct
  source 1..75: mol_type = other DNA
agccgttgatttcgttgtccgggtaaaaaccagcggcctgaccgttgagcagataaaaccgcagataactgacgt

SEQ ID NO: 270161 - DNA, 75 bp, synthetic construct
  source 1..75: mol_type = other DNA
gcgcaaattcttgaatctgcacagcaggatggtaatgaaatcatggtgtttgttggcaaccgtggctgcgtacag

SEQ ID NO: 270162 - DNA, 75 bp, synthetic construct
  source 1..75: mol_type = other DNA
ctgcaaagtatccaacagtgcgttggcgcaaattcttgaatctgcacagcaggatggtaatgaaatcatggtgtt

SEQ ID NO: 270163 - DNA, 75 bp, synthetic construct
  source 1..75: mol_type = other DNA
gaacctgccgtgccgtttatccgtagccaggccgggacactgatatcactgattccaggaattactgaccgcgaa

SEQ ID NO: 270164 - DNA, 75 bp, synthetic construct
  source 1..75: mol_type = other DNA
ctgaaaacacagaacgccagctacgtgatatcgctaacgctctgccgggagaaaccatagatactggcgctgaca

SEQ ID NO: 270165 - DNA, 75 bp, synthetic construct
  source 1..75: mol_type = other DNA
ctgaaaacacagaacgccagctacgtgatatcgctaacgctctgccgggagaaaccatagataccagcgcagaca

SEQ ID NO: 270166 - DNA, 75 bp, synthetic construct
  source 1..75: mol_type = other DNA
aacaataaaaaacaggggctgatgcagcgcattggtcgttgcatggggtatctgcaggtagccgctgagattgaa

SEQ ID NO: 270167 - DNA, 75 bp, synthetic construct
  source 1..75: mol_type = other DNA
gtcggcctttcagggtttcctgtgaagagggtgagttcgtcgtttatgagaacggaaaacctgtccgggcatcgc

SEQ ID NO: 270168 - DNA, 75 bp, synthetic construct
  source 1..75: mol_type = other DNA
atgacgggaaaatcaccatatcagaaaatggaaaagtaacactgccatcgcaccagcacagtgagacgctcattg

SEQ ID NO: 270169 - DNA, 75 bp, synthetic construct
  source 1..75: mol_type = other DNA
gtgattttgataatccgccctttaaaaaagtgccggcttactggcttcatccggggctgacttatcttaaagtgc

SEQ ID NO: 270170 - DNA, 75 bp, synthetic construct
  source 1..75: mol_type = other DNA
tgctgaactgaataaaaaactgtcgacgctgatgccttctgaagatgaaaaaaaacgccgcgatgagcagtttgc

SEQ ID NO: 270171 - DNA, 75 bp, synthetic construct
  source 1..75: mol_type = other DNA
atgaaaaaaaacgccgcgatgagcagaaatctctcagagtgtttcagtattcataatgataatttcagtgagctg

SEQ ID NO: 270172 - DNA, 75 bp, synthetic construct
  source 1..75: mol_type = other DNA
ctcggagaatgcggtggtgatctggaacatgcctaagctcgctgaatcattcctcgaacactggcaagaccgctg

SEQ ID NO: 270173 - DNA, 75 bp, synthetic construct
  source 1..75: mol_type = other DNA
atgacgctttacccgcactgctgaagatgggcgattgccatctggtggtgcaaaaacgcggcgcggcagatgccg

SEQ ID NO: 270174 - DNA, 75 bp, synthetic construct
  source 1..75: mol_type = other DNA
gacggagaaatacgccgctacgacaggcgtcagaacatgatttgccgtgagtgccgggaaagcgaagttatgcag

SEQ ID NO: 270175 - DNA, 75 bp, synthetic construct
  source 1..75: mol_type = other DNA
cctgaagtggatgtcactcttgcgcgtaagattgccatggagcataaacgctcactagccaccggaactgaccct

SEQ ID NO: 270176 - DNA, 75 bp, synthetic construct
  source 1..75: mol_type = other DNA
acggttaaaatgttcaccagctatcggttgcctgtcatgccagagttgacggtcggcggtggtgttaactggcaa

SEQ ID NO: 270177 - DNA, 75 bp, synthetic construct
  source 1..75: mol_type = other DNA
gatcaatgggattaccaacagttggagagtggcgtaatgatgtagctgagattaatcatgaagaacaaggtatag

SEQ ID NO: 270178 - DNA, 75 bp, synthetic construct
  source 1..75: mol_type = other DNA
atgtccatattttcagagtctcctgacaaagaaataacaatgagtaaaactgatattgataaaacatatagatat

SEQ ID NO: 270179 - DNA, 75 bp, synthetic construct
  source 1..75: mol_type = other DNA
gcctacggggctcggagctttctttaacaccaacggtagcgttgcggcgttgttggttgctctctttaaccttgg

SEQ ID NO: 270180 - DNA, 75 bp, synthetic construct
  source 1..75: mol_type = other DNA
atcgcctctcgccgtgctgattatcgtcaggtggcaaaactggcgctgccgtccggcatcttccagattaacgaa

SEQ ID NO: 270181 - DNA, 75 bp, synthetic construct
  source 1..75: mol_type = other DNA
aacatgcctaagctcgctgaatcattcctcgaacactggcaagaccgctggaatcagggaagagactaccgttcc

SEQ ID NO: 270182 - DNA, 75 bp, synthetic construct
  source 1..75: mol_type = other DNA
tgtaccgggtaaaacagctgttcgggggggggcactgacgctgcgtgactacgatggtcaggttgcggaggctat

SEQ ID NO: 270183 - DNA, 75 bp, synthetic construct
  source 1..75: mol_type = other DNA
tgtaccgggtaaaacagctgttcgggggttcactgacgctgcgtgactacgatggtcaggttgcggaggctatgg

SEQ ID NO: 270184 - DNA, 75 bp, synthetic construct
  source 1..75: mol_type = other DNA
gagattcactgacgctgcgtgactacgatggtcaggtagcggaagctatggccatggtgcgtgcgttgaacagga

SEQ ID NO: 270185 - DNA, 75 bp, synthetic construct
  source 1..75: mol_type = other DNA
cgctgattgatgggcaaacggtagaagaaaaagcacaaaagctatggcaggactatttacgccagaggatacagc

SEQ ID NO: 270186 - DNA, 75 bp, synthetic construct
  source 1..75: mol_type = other DNA
accgcttggcgaatcaatacatgcgcaatacggtattttaggcaaccaaaccaccgcagtgatagaactggcaca

SEQ ID NO: 270187 - DNA, 75 bp, synthetic construct
  source 1..75: mol_type = other DNA
attgtggtgacgccgccagtgcagcgtcttgagccgggagcaaaaagtatggtccgtctggccagcaccccggat

SEQ ID NO: 270188 - DNA, 75 bp, synthetic construct
  source 1..75: mol_type = other DNA
aagctacatcaacgactacggtggacgaccggtgctgcagttcagttgcagtggtgaccgttgtacggcggtgaa

SEQ ID NO: 270189 - DNA, 75 bp, synthetic construct
  source 1..75: mol_type = other DNA
accaaattacctgcgcgaactgaacgaacaactggaagagaacctcggctacaaactgcccgtcgaatttgttcc

SEQ ID NO: 270190 - DNA, 75 bp, synthetic construct
  source 1..75: mol_type = other DNA
ccggattgaaaacccgacgccgtattacgtgacagtgattggcattggtggtagtgaaaaacaggccagagaggg

SEQ ID NO: 270191 - DNA, 75 bp, synthetic construct
  source 1..75: mol_type = other DNA
gataacaaacagctaccctatctggctcaggcatgggtagagaatgaaaagaaagaaaaaattaccactggcccg

SEQ ID NO: 270192 - DNA, 75 bp, synthetic construct
  source 1..75: mol_type = other DNA
catcagttaaataatcccaaccatccacagaaattactacggcccgacgccgctgtctgggccagcagaatgctg

SEQ ID NO: 270193 - DNA, 75 bp, synthetic construct
  source 1..75: mol_type = other DNA
agccaacgtcgggaaaatgaccgttgaagaaatggcggaaaaactgaaagtcgccacaaccgccctccgggcaca

SEQ ID NO: 270194 - DNA, 75 bp, synthetic construct
  source 1..75: mol_type = other DNA
agccagtgtcgggaaaatgaccgtcgaggaaatggcgaaaaaactgaacgttgccacaaccgctctccgggcaca

SEQ ID NO: 270195 - DNA, 75 bp, synthetic construct
  source 1..75: mol_type = other DNA
cgggcaggagatcaaagggatactgaaaagcgctgcggttgttaataccgctatccagctacgaggtgatgaagc

SEQ ID NO: 270196 - DNA, 75 bp, synthetic construct
  source 1..75: mol_type = other DNA
cggagaagccatttcccgatcattgcagaactatccgccggaaatgcgtgaagctgccgcctttgacctgctgag

SEQ ID NO: 270197 - DNA, 75 bp, synthetic construct
  source 1..75: mol_type = other DNA
agatcgtccatactttgaatcaagcacgtaaagcaggtagcgttcggttaaccggttctagggatgaacgtaagg

SEQ ID NO: 270198 - DNA, 75 bp, synthetic construct
  source 1..75: mol_type = other DNA
cccactgaaattaaagaaaaacagaaaagattgattgggtatatgttccagtcacatccttcctctgaggagaga

SEQ ID NO: 270199 - DNA, 75 bp, synthetic construct
  source 1..75: mol_type = other DNA
aacggtgcagatatccaggataaatcagcttttctggacaatgttggcgttaccagcctgacgtttatgaaaaac

SEQ ID NO: 270200 - DNA, 75 bp, synthetic construct
  source 1..75: mol_type = other DNA
taataagaataaaaactatatcgtggctgaactggttgttccgccagaagtgggcggcttctggatgcgtgagct

SEQ ID NO: 270201 - DNA, 75 bp, synthetic construct
  source 1..75: mol_type = other DNA
cgttcggctggataacatgaccaatattcccgacggtatggactggggcgtcattgatggcaacctgataaacat

SEQ ID NO: 270202 - DNA, 75 bp, synthetic construct
  source 1..75: mol_type = other DNA
ggagctgcaacctttgcggtcgtaccgccgttacagatgcgcgtgatgcgtgtcgccagtgaagcgccaggtctg

SEQ ID NO: 270203 - DNA, 75 bp, synthetic construct
  source 1..75: mol_type = other DNA
ccgcaggtgctgtctgcattgctgacgacggtactgggcgctggtgcaatgtttaccctctacacctatatctct

SEQ ID NO: 270204 - DNA, 75 bp, synthetic construct
  source 1..75: mol_type = other DNA
aggcagcatatccgaaactggctattgcctatccttctggtgttattccagatatgcgcggctggacaatcaagg

SEQ ID NO: 270205 - DNA, 75 bp, synthetic construct
  source 1..75: mol_type = other DNA
gcacggacacaccatcacggtaaatgctacgggtaataccgaaaacaccgtcaaaaacatcgcatttaactatat

SEQ ID NO: 270206 - DNA, 75 bp, synthetic construct
  source 1..75: mol_type = other DNA
agtgggtgattgaagataacttcgttaatggtcgcccggactgggataaagtgggcgcacagttcgttgcagacg

SEQ ID NO: 270207 - DNA, 75 bp, synthetic construct
  source 1..75: mol_type = other DNA
aattgacaaatcatttagtatgattgataatttaggattaaaagaaaactctggctctatttttattagagagct

SEQ ID NO: 270208 - DNA, 75 bp, synthetic construct
  source 1..75: mol_type = other DNA
aggcacgcaacgctataccacacgtgacggaaatttgtatatccgcaaactcattggaacatggaatggtaatga

SEQ ID NO: 270209 - DNA, 75 bp, synthetic construct
  source 1..75: mol_type = other DNA
attgtgcggtgagtatggaatttggcactgttgcaaagttagcgatgaggcagccttttgtcttattcaaaggcc

SEQ ID NO: 270210 - DNA, 75 bp, synthetic construct
  source 1..75: mol_type = other DNA
cagccttttgtcttattcaaaggccttacatttcaaaaactctgcttaccaggcgcatttcgcccaggggatcac

SEQ ID NO: 270211 - DNA, 75 bp, synthetic construct
  source 1..75: mol_type = other DNA
atgcctcataacccaaatacctggccggactggctggagttgtttcagagctggtggcgtggagacacaccgctg

SEQ ID NO: 270212 - DNA, 75 bp, synthetic construct
  source 1..75: mol_type = other DNA
cggagacattatcaaatggcctggctttgatgaccagaaaaatgcagagaacaacgcagaatttattgcagcttt

SEQ ID NO: 270213 - DNA, 75 bp, synthetic construct
  source 1..75: mol_type = other DNA
ccgaaccgatccagaacggtcgccagcaacgtggcggcggcggtcgtgggcaaggtggtggtggtcgcggtcaac

SEQ ID NO: 270214 - DNA, 75 bp, synthetic construct
  source 1..75: mol_type = other DNA
tttacagccaagacgtcatgcctaacatcaatccagatgatctccaatggcatgattacgaaaaggctagggcac

SEQ ID NO: 270215 - DNA, 75 bp, synthetic construct
  source 1..75: mol_type = other DNA
gtttaacccagcgtattttcccgcgttacaacgtctgagcggagagaaagaaacgcgtgatgcccatacattcct

SEQ ID NO: 270216 - DNA, 75 bp, synthetic construct
  source 1..75: mol_type = other DNA
tttgtgcaatgaaattatcaggagagaagtgacagacaaaaagggaaaaacgcatgaacagaaaacaaaaacaag

SEQ ID NO: 270217 - DNA, 75 bp, synthetic construct
  source 1..75: mol_type = other DNA
aaaggtgctacagaacaaattattgatgctttgcgacaagtcattattgattttaatgaaaatttaactgaacaa

SEQ ID NO: 270218 - DNA, 75 bp, synthetic construct
  source 1..75: mol_type = other DNA
taaggcaagtgcagggctgacttctcaagtcagagaggcaattgaaaaatttgcactatcgatcaatgaacagtt

SEQ ID NO: 270219 - DNA, 75 bp, synthetic construct
  source 1..75: mol_type = other DNA
cacggtaataaatcgcaaggtgcgcgtacccgtgcgctggctgattttaaatcgggcgatattcgtgtactggtg

SEQ ID NO: 270220 - DNA, 75 bp, synthetic construct
  source 1..75: mol_type = other DNA
caaggtggtggtcgcggtcaacagcaaccacgccgtggggaaggtggcgcaaaatctgcaagcgctaaacctgca

SEQ ID NO: 270221 - DNA, 75 bp, synthetic construct
  source 1..75: mol_type = other DNA
ccccggaaaaagcactccatctgatagaacgactggaggcgctcgccacagaggaagaaatctccccggagaaac

SEQ ID NO: 270222 - DNA, 75 bp, synthetic construct
  source 1..75: mol_type = other DNA
ctgttgcaaagttagcgatgaggcagccttttgtcttattcaaaggccttacatttcaaaaactctgcttaccag

SEQ ID NO: 270223 - DNA, 75 bp, synthetic construct
  source 1..75: mol_type = other DNA
tcttcgccaaccgcgcacttgttcaggaaaccagcatccagacggcgcgtgcactcgatatccgtctgccgctgt

SEQ ID NO: 270224 - DNA, 75 bp, synthetic construct
  source 1..75: mol_type = other DNA
gctgctggtgaccggcgagcctgaacaggcagaagccatcgcgccggggctgaccgggcaacactggctggaggg

SEQ ID NO: 270225 - DNA, 75 bp, synthetic construct
  source 1..75: mol_type = other DNA
gtggttccgggattaaaccgtctccggccccgttctgtttcagggcctgccatcgtcatgaccgtggctgttgtg

SEQ ID NO: 270226 - DNA, 75 bp, synthetic construct
  source 1..75: mol_type = other DNA
tctggcagggatttgcgccctgttaattattattaatcaggatgttctggtaaagaacggagtgtctgctcgtct

SEQ ID NO: 270227 - DNA, 75 bp, synthetic construct
  source 1..75: mol_type = other DNA
gactactgtctgcgtgctggcgatatggggggccggaatgacgacctcgttcttcgccaaccgcgcgcttgttca

SEQ ID NO: 270228 - DNA, 75 bp, synthetic construct
  source 1..75: mol_type = other DNA
tccctccccctgctggcgcagtacctgcgcgatgacgggcgcatcaaccagtttattgccgccaacctttccggc

SEQ ID NO: 270229 - DNA, 75 bp, synthetic construct
  source 1..75: mol_type = other DNA
aaatcggatggcacggtagaacgcgctcttgaaaatctggggttacaggatgtaaaagctggttcattgaacaat

SEQ ID NO: 270230 - DNA, 75 bp, synthetic construct
  source 1..75: mol_type = other DNA
gacagcggagaatatggttttcagcgacaaagagaggcaatctggtccaatgttatcaccatcgcacaaaagagc

SEQ ID NO: 270231 - DNA, 75 bp, synthetic construct
  source 1..75: mol_type = other DNA
atggcatttaggttaatgcgtaaaaagcatttgcaagaatatgttataaacagtttgccaaatgaaaatcttatc

SEQ ID NO: 270232 - DNA, 75 bp, synthetic construct
  source 1..75: mol_type = other DNA
actatcaacctcagtaaaatggcgtggcagctcagcgaaaaggacagcgaagggaacgtgatccggaaagtgacg

SEQ ID NO: 270233 - DNA, 75 bp, synthetic construct
  source 1..75: mol_type = other DNA
atcacgtcgaagtgtctccaactcttgatcacaaccggatgaacctggccaactcgcctggtacagcaaagaatt

SEQ ID NO: 270234 - DNA, 75 bp, synthetic construct
  source 1..75: mol_type = other DNA
ttatcaccatcgcacaaaagagcgatggtgaggatcaatttaatcgtattatcgctgcctcgaaaagtggttcag

SEQ ID NO: 270235 - DNA, 75 bp, synthetic construct
  source 1..75: mol_type = other DNA
attgaatggctttattcagtgaaaacagaagaagtttctgcggagcttttagcacaactatccccattggcccat

SEQ ID NO: 270236 - DNA, 75 bp, synthetic construct
  source 1..75: mol_type = other DNA
ttgaacgtaaaaagaaattagggacaaatattggtgctcttgattttttattatcaattcataaggagaaagttg

SEQ ID NO: 270237 - DNA, 75 bp, synthetic construct
  source 1..75: mol_type = other DNA
tttaatgatcaccccagcggcaaccgcgccagagctgaccgcccgtggctatcagctgatcctgcgcaccaccgg

SEQ ID NO: 270238 - DNA, 75 bp, synthetic construct
  source 1..75: mol_type = other DNA
tggcggtatggatgcggcgggtctgcctgagtgagccggttgcccgttccgggaagctgccgacactggcaccgc

SEQ ID NO: 270239 - DNA, 75 bp, synthetic construct
  source 1..75: mol_type = other DNA
gcaccgccgttactgcgccagctggctgccatcgggaataacctgaatcagacggcgaggaaggtgaacagcggg

SEQ ID NO: 270240 - DNA, 75 bp, synthetic construct
  source 1..75: mol_type = other DNA
tgcggttgatttaggtatggcaacagatgatgaaacgaaactgtactggcatggaaaaaatatcgggtgctgctt

SEQ ID NO: 270241 - DNA, 75 bp, synthetic construct
  source 1..75: mol_type = other DNA
gtcgcacggtgcagggtgcgagtacgctgacgcaacagctggtgaaaaacttgttcctctccagcgagcgctctt

SEQ ID NO: 270242 - DNA, 75 bp, synthetic construct
  source 1..75: mol_type = other DNA
tgctgggggcgttgaacttaacgccaatcgaagtggcgcaggcattccagactatcgccagcggcggtaaccgtg

SEQ ID NO: 270243 - DNA, 75 bp, synthetic construct
  source 1..75: mol_type = other DNA
gatgccttctgcattgtcggcccgcagtcgcaggcgaagaaaatcggcggtatcagcaccagtgcggtagagctg

SEQ ID NO: 270244 - DNA, 75 bp, synthetic construct
  source 1..75: mol_type = other DNA
ctaaaaatcctgccagacggtcgcttgcagctggtggacggttctatcgtggataagcatacccatggcggcgtt

SEQ ID NO: 270245 - DNA, 75 bp, synthetic construct
  source 1..75: mol_type = other DNA
aatgtaatagctccgcttcaggatgcggttgatttaggtatggcaacagatgatgaaacgaaactgttactggca

SEQ ID NO: 270246 - DNA, 75 bp, synthetic construct
  source 1..75: mol_type = other DNA
ggccgtactgatggccatcgagagagagttgcgcagcttacggcaggtcgtcagggaacatggagcgcgggatga

SEQ ID NO: 270247 - DNA, 75 bp, synthetic construct
  source 1..75: mol_type = other DNA
gcgggggtgctttctatcccgttattgctgccggatggcacaccttttcccgggcgttacttactggtatttctc

SEQ ID NO: 270248 - DNA, 75 bp, synthetic construct
  source 1..75: mol_type = other DNA
cttctccagttgcatgaggccgatctggcttcgaccaccattgataagcactatgccatgcttaacatgctgctt

SEQ ID NO: 270249 - DNA, 75 bp, synthetic construct
  source 1..75: mol_type = other DNA
taggagatctggaccaaacaggtgacactgtcacgctacatatttcacacacgaagacaataacgaccgccgccg

SEQ ID NO: 270250 - DNA, 75 bp, synthetic construct
  source 1..75: mol_type = other DNA
cctcagccagcaggtgctgcgttaccagtccgggaagccgcaacacaggaagaaattaaaacagaaactgtggcg

SEQ ID NO: 270251 - DNA, 75 bp, synthetic construct
  source 1..75: mol_type = other DNA
gaagtgtgtgatgaaacactggctaaaattgtcagtgaattagatgtactggaagcattaattatggacagccaa

SEQ ID NO: 270252 - DNA, 75 bp, synthetic construct
  source 1..75: mol_type = other DNA
ctgtttagcgataaccggcagaaagaagagatcgccgccgatttgtttatgtctaaaatggctatcctgagcgtg

SEQ ID NO: 270253 - DNA, 75 bp, synthetic construct
  source 1..75: mol_type = other DNA
ggcggctgctcgagcggtgcgacggcaggcagctggcggcgtggatgcgtcagacctgcctcgatgagaagccgg

SEQ ID NO: 270254 - DNA, 75 bp, synthetic construct
  source 1..75: mol_type = other DNA
tgaccgggttcaggtggtggccgcactgatggccatcggggatgagctgcgccggctgcgtctggccgtcaggga

SEQ ID NO: 270255 - DNA, 75 bp, synthetic construct
  source 1..75: mol_type = other DNA
cgagggtgaattgcgccagttgcggcaggctgtcagggaacagggggtacggatgatagttaaatttcatgccag

SEQ ID NO: 270256 - DNA, 75 bp, synthetic construct
  source 1..75: mol_type = other DNA
tatgcggcgcatccggcgcgaagcggcaactgaaaaaggcgaacgaacaggccaggctataccgctgcggtggga

SEQ ID NO: 270257 - DNA, 75 bp, synthetic construct
  source 1..75: mol_type = other DNA
ttgtccaggtcagaacggctggtggacctgcgcaaccgggcttttctctttgttgcatacaatacgctgatgcgt

SEQ ID NO: 270258 - DNA, 75 bp, synthetic construct
  source 1..75: mol_type = other DNA
cactcttgggcgagatggtgtcacgctcgccagctcgcctggttcccgatctcaccagagatggcccgcgagtat

SEQ ID NO: 270259 - DNA, 75 bp, synthetic construct
  source 1..75: mol_type = other DNA
ccgcagcccgtgaactcagcctgtatgaatcacagctctacaactggcgcagtaaacagcaacatcagcagacgt

SEQ ID NO: 270260 - DNA, 75 bp, synthetic construct
  source 1..75: mol_type = other DNA
aagaagcgcggagcagtggctgtttgcatgtcaaagattgtgatattgagtatctgccacagttaccctgtgaaa

SEQ ID NO: 270261 - DNA, 75 bp, synthetic construct
  source 1..75: mol_type = other DNA
acaacctgacaatccttacaggattgccggttaatacacaaaacctctccgtcattaactgtgaaaaattacaaa

SEQ ID NO: 270262 - DNA, 75 bp, synthetic construct
  source 1..75: mol_type = other DNA
taatttatatctatcatgctccagatgtaacaatataaaactatcaaaatatgacaacattcttgattgctgtaa

SEQ ID NO: 270263 - DNA, 75 bp, synthetic construct
  source 1..75: mol_type = other DNA
agcacgttatgatggtgctgatgtacatgaagcactacaggaatgcttttatggaaaatgttacatttgcgaaac

SEQ ID NO: 270264 - DNA, 75 bp, synthetic construct
  source 1..75: mol_type = other DNA
cttgctgaacgcatcggtgttgctgccgcagcctgtgaactcagcctgtatgaatcacagctctacaactggcgc

SEQ ID NO: 270265 - DNA, 75 bp, synthetic construct
  source 1..75: mol_type = other DNA
ctcggtgtgttctggcgctaccggtttggggattaccggattttatgtgaaatcagagacgaagagcttgtgatt

SEQ ID NO: 270266 - DNA, 75 bp, synthetic construct
  source 1..75: mol_type = other DNA
ttgtattaatcctgaatctcatttttctgatgggacgccatgccactattcgggtaatgggatttttggtattcc

SEQ ID NO: 270267 - DNA, 75 bp, synthetic construct
  source 1..75: mol_type = other DNA
cgattgtcgcgggactggcattattgctggtgtttatgtcagtcagaaaacaacctgaaacagtttgcgttgcca

SEQ ID NO: 270268 - DNA, 75 bp, synthetic construct
  source 1..75: mol_type = other DNA
gacattttcaaaatgtggtgttgatgagttatgggcaaaaacaagcaaggccggcttggagtttcagacattaac

SEQ ID NO: 270269 - DNA, 75 bp, synthetic construct
  source 1..75: mol_type = other DNA
ctgacggtgacagtacacgccagaaatcccggcgtgtggcgcaggagcctgtccggttacaggcaacaacagccc

SEQ ID NO: 270270 - DNA, 75 bp, synthetic construct
  source 1..75: mol_type = other DNA
taatggtcgtccggactgggataaagtcggtgcgcagtttgttgcggatgttgtaccgttcgaaatgatgaagct

SEQ ID NO: 270271 - DNA, 75 bp, synthetic construct
  source 1..75: mol_type = other DNA
tcgcaaagtggtgcgtaaagacaccaagggcctgattgcccgttggaagtatttctggatgtcggtgattgcgct

SEQ ID NO: 270272 - DNA, 75 bp, synthetic construct
  source 1..75: mol_type = other DNA
tgctgggggcgttgaacttaacgccaatcgaagtggcgcaggcattccagaccatcgccagcggtggtaaccgtg

SEQ ID NO: 270273 - DNA, 75 bp, synthetic construct
  source 1..75: mol_type = other DNA
ggtgcgtgcgcgtctgacctttgatggcgatcatctggcgacgatcgtcaatatggagaacaaccgtcagttcgg

SEQ ID NO: 270274 - DNA, 75 bp, synthetic construct
  source 1..75: mol_type = other DNA
gacccgttcgatgaacgtgccgacggtgaatctgggcatggcgttggggctgcctgcggttacggagacctggat

SEQ ID NO: 270275 - DNA, 75 bp, synthetic construct
  source 1..75: mol_type = other DNA
gcaggcattccagactatcgccagcggaggtaaccgcgcaccgctttctgcactgcgttcagtgattgctgaaga

SEQ ID NO: 270276 - DNA, 75 bp, synthetic construct
  source 1..75: mol_type = other DNA
agcctgtactactttggtcgtccggtggaagagttgagccttgaccagcaggcgctgttagtcggtatggtgaaa

SEQ ID NO: 270277 - DNA, 75 bp, synthetic construct
  source 1..75: mol_type = other DNA
ctgaccgccggtcgcacggtgcagggggcgagtacgctgacgcaacagttggtgaaaaacttgttcctttccagt

SEQ ID NO: 270278 - DNA, 75 bp, synthetic construct
  source 1..75: mol_type = other DNA
tgttcatctcattgtggatggggccgcgcatgattgctcatctgcaaaaactctcctttggtcaggtggtgcgta

SEQ ID NO: 270279 - DNA, 75 bp, synthetic construct
  source 1..75: mol_type = other DNA
gtgttattggcttcgttgatgactatcgcaaagtggtgcgtaaagacaccaaggggttgattgctcgctggaagt

SEQ ID NO: 270280 - DNA, 75 bp, synthetic construct
  source 1..75: mol_type = other DNA
ctgggcttcctgtggtttaacacctatccggcgcaggtctttatgggcgatgtaggttcgctggcgttaggtggt

SEQ ID NO: 270281 - DNA, 75 bp, synthetic construct
  source 1..75: mol_type = other DNA
catgttgagtgcgcgtccgctgggtgttcagccgcgcggtggggtgatctctcctcagccagcctttatgcagct

SEQ ID NO: 270282 - DNA, 75 bp, synthetic construct
  source 1..75: mol_type = other DNA
gccgcaacagcaacctgctcagcaagagcagaaagacagtgacggcgtagcaggttggatcaaggatatgtttgg

SEQ ID NO: 270283 - DNA, 75 bp, synthetic construct
  source 1..75: mol_type = other DNA
tttgccgtgctgattgccatttacggtgtttatctcgatcaaaaaattcgcagccgaattgatggcaaagtctgg

SEQ ID NO: 270284 - DNA, 75 bp, synthetic construct
  source 1..75: mol_type = other DNA
aattgccacaaaactcattaacatatttggatccaccttattacataaaaggtaaaggtttatatatcaaccatt

SEQ ID NO: 270285 - DNA, 75 bp, synthetic construct
  source 1..75: mol_type = other DNA
atgattggtggaaagtcgagcaaattggtcattgtgttatccgttcttattggctcttcttccggatttgccagc

SEQ ID NO: 270286 - DNA, 75 bp, synthetic construct
  source 1..75: mol_type = other DNA
caaaaaaagcattcatacatagccagacaattaatttatctgataccggtaattatgaaaacttgtccattgtcg

SEQ ID NO: 270287 - DNA, 75 bp, synthetic construct
  source 1..75: mol_type = other DNA
gaaatggaattccggcattctgtctggttcactaaatagtgagttcagttttctttggggagataatgcaaaagg

SEQ ID NO: 270288 - DNA, 75 bp, synthetic construct
  source 1..75: mol_type = other DNA
ctgattcagcatgcatcagtcggtaataaccagtatcgggaaattcgtattgagtcacacctgggagacggggat

SEQ ID NO: 270289 - DNA, 75 bp, synthetic construct
  source 1..75: mol_type = other DNA
tcaccctgttgctggcagccgctaccgtgcaggcctccacccgggatgaaattgaacgactctggaatccgcagg

SEQ ID NO: 270290 - DNA, 75 bp, synthetic construct
  source 1..75: mol_type = other DNA
tgcccattcctgaagccatggcgtacgtactgttacgtccgctgcttgatgatgtgccggaggatgaactgtgcg

SEQ ID NO: 270291 - DNA, 75 bp, synthetic construct
  source 1..75: mol_type = other DNA
catgcttatcctgactatgtttgcatggctatcctccgttactacgctctagatgccaccaattttgataggtca

SEQ ID NO: 270292 - DNA, 75 bp, synthetic construct
  source 1..75: mol_type = other DNA
gctcatccatgcgcccaacgggggcaaagagggggtgcaaattttgccgttccagcagatcaccgcaaaggatga

SEQ ID NO: 270293 - DNA, 75 bp, synthetic construct
  source 1..75: mol_type = other DNA
tgggtacggcattactgcgtcgtcgtagcggcgaaagcaaggaactggaacgtattgaaaccgaagcccaacggc

SEQ ID NO: 270294 - DNA, 75 bp, synthetic construct
  source 1..75: mol_type = other DNA
gtccttatcgcctgaccgggcatgacctgctggacaatatgtactgtgctgataacgggcggtggtatgaaaccc

SEQ ID NO: 270295 - DNA, 75 bp, synthetic construct
  source 1..75: mol_type = other DNA
gcccgtcatggaggccatgaagcacatcaatgactggcttggcgaagaggtgatccgctttaacccttacgcact

SEQ ID NO: 270296 - DNA, 75 bp, synthetic construct
  source 1..75: mol_type = other DNA
cagacgcttgacgaacgcagcggctatattgaggcactttccgctataccggatgaagtcatcgaaatggctgcg

SEQ ID NO: 270297 - DNA, 75 bp, synthetic construct
  source 1..75: mol_type = other DNA
ctttccattggtcataaaaatggtattacattcaggaactggtttgaaaaagagtcaggtgatatctctaatcac

SEQ ID NO: 270298 - DNA, 75 bp, synthetic construct
  source 1..75: mol_type = other DNA
cctcaagcgttaccagatgcggcgcatggcggataacttcattatgcagagcggtatggatctgttttatgccgg

SEQ ID NO: 270299 - DNA, 75 bp, synthetic construct
  source 1..75: mol_type = other DNA
gtttccactgacgcgtcgtcatgcattgcaatatgttcagccaggtctggcactggtgggcgatgcggcgcacac

SEQ ID NO: 270300 - DNA, 75 bp, synthetic construct
  source 1..75: mol_type = other DNA
tgggccagttatcctgtgctcaagcgttaccagatgcggcgtatggcggataacttcatgatgcaaagtggtatg

SEQ ID NO: 270301 - DNA, 75 bp, synthetic construct
  source 1..75: mol_type = other DNA
gcattcgccagttgcagaatatgaatatggcgcagctacaggcggaaatcgcgaagcatttcccgtcgcgtctgg

SEQ ID NO: 270302 - DNA, 75 bp, synthetic construct
  source 1..75: mol_type = other DNA
ccgaaagtaacgttacgtgtgccaggctcgctgattgcgctgcatcgccataatgatcttcaggagctggaactg

SEQ ID NO: 270303 - DNA, 75 bp, synthetic construct
  source 1..75: mol_type = other DNA
tatcgttatctttcaggatatggccatcatattattgacgatgatggggggaaagacgataaactcagtttggct

SEQ ID NO: 270304 - DNA, 75 bp, synthetic construct
  source 1..75: mol_type = other DNA
gatgagcttcaggttcagggtaattctcttgctaaaaatgtattatccggtggaaaaggtaatgacaagctgtac

SEQ ID NO: 270305 - DNA, 75 bp, synthetic construct
  source 1..75: mol_type = other DNA
gtactcgtgcgctggccgattttaaatcgggcgatattcgtgtactggtggcaactgacatcgctgcgcgcggtc

SEQ ID NO: 270306 - DNA, 75 bp, synthetic construct
  source 1..75: mol_type = other DNA
attgccgtaaaacatggcaactacagttcacttacaccgcctctcagcccggtaagcaccagaaaatcattgata

SEQ ID NO: 270307 - DNA, 75 bp, synthetic construct
  source 1..75: mol_type = other DNA
atgatgagcttcaggcacacggagcttataatattctgtcaggtggtactggtgatgataaactttatggtggtg

SEQ ID NO: 270308 - DNA, 75 bp, synthetic construct
  source 1..75: mol_type = other DNA
atgttatttgcatggataaccgaacctaacgcctggcttgcgctcggtacactgacgctgctggagatcgttctt

SEQ ID NO: 270309 - DNA, 75 bp, synthetic construct
  source 1..75: mol_type = other DNA
ctcggcgctatcgtgcagattatgctgctggatattattttcagcctcgattcggtgattaccgccgtgggcctg

SEQ ID NO: 270310 - DNA, 75 bp, synthetic construct
  source 1..75: mol_type = other DNA
tggactggtacggtctggcaagagctgcccggcaaacgtcctggcatcagtctgcgctttactttaagcgcaatg

SEQ ID NO: 270311 - DNA, 75 bp, synthetic construct
  source 1..75: mol_type = other DNA
tacctactggtttgtgcaatacggtatgacaacccagccgtatcagttcacgaaaggcagcatttttcatctgat

SEQ ID NO: 270312 - DNA, 75 bp, synthetic construct
  source 1..75: mol_type = other DNA
ttccaaaaggttacatctatttcgccatgttcttctcgattgcggtggaaagtctcaacctgattcgcaataaaa

SEQ ID NO: 270313 - DNA, 75 bp, synthetic construct
  source 1..75: mol_type = other DNA
tgctggatattattttcagcctcgactcagtgattactgccgtaggtctatcagatcatctgttcattatgatgg

SEQ ID NO: 270314 - DNA, 75 bp, synthetic construct
  source 1..75: mol_type = other DNA
aacaagagaaaaaacacatcaagataaatgaaaaaataaacacattgattggggtttttaataaaaccattgcaa

SEQ ID NO: 270315 - DNA, 75 bp, synthetic construct
  source 1..75: mol_type = other DNA
atgaacatggcaatgtagacattcaaataagatctcttattgaaaaatacagcagtgagttggaaaaagtattag

SEQ ID NO: 270316 - DNA, 75 bp, synthetic construct
  source 1..75: mol_type = other DNA
aattgccgtgccgagcagggaaaatgaattcaggaaactttctcttgagcaagataaaagacacattaagataaa

SEQ ID NO: 270317 - DNA, 75 bp, synthetic construct
  source 1..75: mol_type = other DNA
tttgaaattgatggcataaacgcaaaaccattaagcgaaaaacccacattacagattaactacaaaaaaccggat

SEQ ID NO: 270318 - DNA, 75 bp, synthetic construct
  source 1..75: mol_type = other DNA
cgttatggaggctatgaagcacatcaatgactggcttggcgaagaggtgatccgttttaactcttatgctcttct

SEQ ID NO: 270319 - DNA, 75 bp, synthetic construct
  source 1..75: mol_type = other DNA
tcatctacattggcaaagataacttcaccagtaacgagatagcaaaacttcttattgagcgattttcacttccga

SEQ ID NO: 270320 - DNA, 75 bp, synthetic construct
  source 1..75: mol_type = other DNA
gtccgccacgctgttccgccgtaagtattacatcaacggcagccatgcaggcttcatcatgtatatgaccgatgc

SEQ ID NO: 270321 - DNA, 75 bp, synthetic construct
  source 1..75: mol_type = other DNA
gcgctcgaaagagcgttgcagggtgcaagaggcggtggggcattcaaaaacctgctgctccaggcaccgaacggc

SEQ ID NO: 270322 - DNA, 75 bp, synthetic construct
  source 1..75: mol_type = other DNA
ttctccgcctttgcgctggactggtttgtcttcgggaatgcgtttcttgaactgcgcaccaacaggctgggcgga

SEQ ID NO: 270323 - DNA, 75 bp, synthetic construct
  source 1..75: mol_type = other DNA
agatctacgggatgccggaatatatcggcgggttgctgtctgtcagcctgtcaaactcagcggatacattccgca

SEQ ID NO: 270324 - DNA, 75 bp, synthetic construct
  source 1..75: mol_type = other DNA
tggaagcggggccacaggaattccttgccgcaggtgccagttttaaccagatggtcaccgcgctggagcgcatga

SEQ ID NO: 270325 - DNA, 75 bp, synthetic construct
  source 1..75: mol_type = other DNA
cacgcgatcgtgaatctggcggtacaggtttggggctggcgattgttgaaaccgccattcagcagcatcgtggct

SEQ ID NO: 270326 - DNA, 75 bp, synthetic construct
  source 1..75: mol_type = other DNA
aatacgtgcgacgcggaagcgatcttgaatcatggtggtatgtgcaggatggcaaggacgcgtttcagtttcgcc

SEQ ID NO: 270327 - DNA, 75 bp, synthetic construct
  source 1..75: mol_type = other DNA
gcaggaagtatgccagggagcaggcagatctcgccgcctcactgaaagcgtcaccggagctgaactcattcacct

SEQ ID NO: 270328 - DNA, 75 bp, synthetic construct
  source 1..75: mol_type = other DNA
cgccacgctgttccgccgtaaatattacatcaatggcagtcatgctggcttcatcatgtatatgaccgatgccgc

SEQ ID NO: 270329 - DNA, 75 bp, synthetic construct
  source 1..75: mol_type = other DNA
gaaccgcttcggtgaagttatcacccttgaacctgcgctggcaaaatacacccgacgcggtttagacctggatac

SEQ ID NO: 270330 - DNA, 75 bp, synthetic construct
  source 1..75: mol_type = other DNA
ctacgaaatcaatgaagaggattattttgaaattgatggcataaacgcaaaaccattgaataaaaaaccaatatt

SEQ ID NO: 270331 - DNA, 75 bp, synthetic construct
  source 1..75: mol_type = other DNA
ggtgacgttgagaaagccgcccgcgtcttctccatcaacgagctgacgccgatacaagaaagcctgaaggagctg

SEQ ID NO: 270332 - DNA, 75 bp, synthetic construct
  source 1..75: mol_type = other DNA
tgccataacaatggccgctggtatgaaccaccgatcagcccctacgggctggcgcgcatgttcgacgttgccgcc

SEQ ID NO: 270333 - DNA, 75 bp, synthetic construct
  source 1..75: mol_type = other DNA
tggaagaggcgcaaaagcgcggtgccttgccttacccggtgggtgcagagtcgaaatatgaaatcccgccgctct

SEQ ID NO: 270334 - DNA, 75 bp, synthetic construct
  source 1..75: mol_type = other DNA
aacctgatgccgcgctggtgcagcatacgcgccagcagccgcaggacagctatgtgctggcagatgtgctggcaa

SEQ ID NO: 270335 - DNA, 75 bp, synthetic construct
  source 1..75: mol_type = other DNA
cttaaccgatgacaactatgcggtgatgaaggtggcgcgcattggctgtgaatgcggggcgaatgtctcgacatt

SEQ ID NO: 270336 - DNA, 75 bp, synthetic construct
  source 1..75: mol_type = other DNA
tacccataatcaatatgttagcagcattaaggtcttatctgattcacaggaaacgcaatatattaaagttgatat

SEQ ID NO: 270337 - DNA, 75 bp, synthetic construct
  source 1..75: mol_type = other DNA
tgccacgctctattccggaggtagccagattcagggtgcgcaggcattagatgtgttgcgaggtctggtgttcgc

SEQ ID NO: 270338 - DNA, 75 bp, synthetic construct
  source 1..75: mol_type = other DNA
cggctttgctcaaaccggggcagcgtcttctggtgcatgacgcgcctgtttacccgacgactcaggtcattattg

SEQ ID NO: 270339 - DNA, 75 bp, synthetic construct
  source 1..75: mol_type = other DNA
tggaccggaccggaattttgaaaacccctggttgctcccggtaagcggtacgaacaaccagcgttgtgtgaatca

SEQ ID NO: 270340 - DNA, 75 bp, synthetic construct
  source 1..75: mol_type = other DNA
gtagtttgctggcctgcatcggcctggtgattgcgactaacgtcacttactacatgttgctgacttatatgccga

SEQ ID NO: 270341 - DNA, 75 bp, synthetic construct
  source 1..75: mol_type = other DNA
gcagtttgcgctggtggacacgatttgccgtcactttcccggcgcggagtttctaaccagcggtgatttgggctt

SEQ ID NO: 270342 - DNA, 75 bp, synthetic construct
  source 1..75: mol_type = other DNA
aacattgtgcgattcgtattaatcctaatcgtagtggtgaggagacagtgctgcgtattttgcgcgagagtattg

SEQ ID NO: 270343 - DNA, 75 bp, synthetic construct
  source 1..75: mol_type = other DNA
tgccacgctttactccggaggcagccagattcagggcgctcaggcgctggaagtcttgcgcggactggtttttgc

SEQ ID NO: 270344 - DNA, 75 bp, synthetic construct
  source 1..75: mol_type = other DNA
tgccagcgatccgattgtggacggcattctgctggatatggacacaccgggcgggatggtggcgggagcatttga

SEQ ID NO: 270345 - DNA, 75 bp, synthetic construct
  source 1..75: mol_type = other DNA
ctaaatgcagctgaaaaaatcatccttaatgatattaatatttctgtttatgctttttggcacagtgtattaaat

SEQ ID NO: 270346 - DNA, 75 bp, synthetic construct
  source 1..75: mol_type = other DNA
gagagatcgcacatacaaacaagtctatccggcgctatggcaaagcgactctgttgtctggttctcgcagcaatt

SEQ ID NO: 270347 - DNA, 75 bp, synthetic construct
  source 1..75: mol_type = other DNA
agaggtgattgattcaattttgcaggcaatgcaggggcgggttctgaagggggatcttatcaccggatgggaaaa

SEQ ID NO: 270348 - DNA, 75 bp, synthetic construct
  source 1..75: mol_type = other DNA
ttcagcgtatgcgctgaaagccgattcgggcgctgtgcagcaggtgatgaccccaaggccggagcaatcacacca

SEQ ID NO: 270349 - DNA, 75 bp, synthetic construct
  source 1..75: mol_type = other DNA
aacggaatttgttcagcgagcgacgacgttttttggaccggaccggaattttgaaaacccctggttgctcccggt

SEQ ID NO: 270350 - DNA, 75 bp, synthetic construct
  source 1..75: mol_type = other DNA
tgcgaaaatattcgtcatcagcgtattgccaaaaatcacgcgcaacttatcgcgctggtcagggcgctgaaatgc

SEQ ID NO: 270351 - DNA, 75 bp, synthetic construct
  source 1..75: mol_type = other DNA
acggtggaaaaagcccgcccgatcctggctgcttcaccgcaggcggatgccggaccctcactccgtgatcagatc

SEQ ID NO: 270352 - DNA, 75 bp, synthetic construct
  source 1..75: mol_type = other DNA
taccagtgcgtggtgccgactacctggaacgccagcccgcgcgatcccaaagggcaaattggtgcctatgaagcg

SEQ ID NO: 270353 - DNA, 75 bp, synthetic construct
  source 1..75: mol_type = other DNA
atgagcactcagtatgaaactcagggatacaccatcaataatgccggacgtcgcctggtggtcgacccgatcacg

SEQ ID NO: 270354 - DNA, 75 bp, synthetic construct
  source 1..75: mol_type = other DNA
tggtgcagtcgatcattacccgcacggcggacttcattaataacgtgatgatccccgacgccttagccatcggtc

SEQ ID NO: 270355 - DNA, 75 bp, synthetic construct
  source 1..75: mol_type = other DNA
gctataacccggatgttgatgatgctccgcgtatgcaagattacaccctggaagcggatgaaggtcgcgacatga

SEQ ID NO: 270356 - DNA, 75 bp, synthetic construct
  source 1..75: mol_type = other DNA
cgtccagtgcgagaacgatcccggcgatagcacctggcagcaatttaccccggatggaccgcgtgcgtttctgcc

SEQ ID NO: 270357 - DNA, 75 bp, synthetic construct
  source 1..75: mol_type = other DNA
atgagcactcagtacgaaactcagggatataccatcaataatgccggacgtcgcctggtggtcgatccgattacg

SEQ ID NO: 270358 - DNA, 75 bp, synthetic construct
  source 1..75: mol_type = other DNA
tatgccgagttatttgtcgcataacctgcattactccgaagaccacggggtgctgattattatcgccattatgat

SEQ ID NO: 270359 - DNA, 75 bp, synthetic construct
  source 1..75: mol_type = other DNA
cggaatttgttcagcgagcgacgacgttttttggaccggaccggaattttgaaaacccctggttgctcccggtaa

SEQ ID NO: 270360 - DNA, 75 bp, synthetic construct
  source 1..75: mol_type = other DNA
ccctggttgctcccggtaagtggcacgaacaaccagcgttgtgtgaatcatatttctgaacctgatacagaaatt

SEQ ID NO: 270361 - DNA, 75 bp, synthetic construct
  source 1..75: mol_type = other DNA
gcgttccagcagcatgttgataaactggaacagggcgaccgcgaaggtttgcaggatggcccgaaagtctcgttt

SEQ ID NO: 270362 - DNA, 75 bp, synthetic construct
  source 1..75: mol_type = other DNA
gtcctatgcctcgattggtatttgggcaccggttctgctgttgatttgtaagatggcgcaaggtttctcggtcgg

SEQ ID NO: 270363 - DNA, 75 bp, synthetic construct
  source 1..75: mol_type = other DNA
caattacccttcgtgatgtcaccattattgatgacggtaaactgcgtaaagccattaccgcagcatcactgggta

SEQ ID NO: 270364 - DNA, 75 bp, synthetic construct
  source 1..75: mol_type = other DNA
atattaacgccactccaatacttttgtattttcaacgctaacaccggagaaattatcgctgcgtcatttgagtga

SEQ ID NO: 270365 - DNA, 75 bp, synthetic construct
  source 1..75: mol_type = other DNA
tcggatgtcgcgccagtgcacgcattatgggcgttggcctcaacacgattttacgtcacttaaaaaactcaggcc

SEQ ID NO: 270366 - DNA, 75 bp, synthetic construct
  source 1..75: mol_type = other DNA
cattaacaacgtgatgatccccgacgccttagccatcggtcagttcaacaaaccgtggagcgaaatcggcactgg

SEQ ID NO: 270367 - DNA, 75 bp, synthetic construct
  source 1..75: mol_type = other DNA
ggcgaaaaaatcgccacgaaccaggcaggggatgttcagaacgtcaatcctggtcagccagcaggcacgacaccg

SEQ ID NO: 270368 - DNA, 75 bp, synthetic construct
  source 1..75: mol_type = other DNA
acaaaatgccttgtgcttgattaatgagccagaatgctatgcaaaagcacatcataaccccgtcaaaaagtgcaa

SEQ ID NO: 270369 - DNA, 75 bp, synthetic construct
  source 1..75: mol_type = other DNA
ctaaggccattaacagcatgaatatactgataccactgcaatacttttgtgtttttaacgccaacaccggggaaa

SEQ ID NO: 270370 - DNA, 75 bp, synthetic construct
  source 1..75: mol_type = other DNA
aacgtcttcaggggactgagctggaattataaaaccaactctccctgtaaatttggaagtaaaatcattatcaac

SEQ ID NO: 270371 - DNA, 75 bp, synthetic construct
  source 1..75: mol_type = other DNA
acaacagggaaaacataactattcatctggacgatcacatccggtctcttcagggaaaagaatgctatgaagatg

SEQ ID NO: 270372 - DNA, 75 bp, synthetic construct
  source 1..75: mol_type = other DNA
tactgcaacacagaactggaagttttagaaaaagttcaagctgaaaacaacatcactatcaagaatctcgaagaa

SEQ ID NO: 270373 - DNA, 75 bp, synthetic construct
  source 1..75: mol_type = other DNA
ggatattcgttgcggttgctggctgacggagaaaccggaaaccgcaatgaaagccatcacccgcaatcttgaccg

SEQ ID NO: 270374 - DNA, 75 bp, synthetic construct
  source 1..75: mol_type = other DNA
gtcttcagagggctgaactggaattacaaaaccaattccccctgtaaatttggcagtaaaattatcgtcaacaat

SEQ ID NO: 270375 - DNA, 75 bp, synthetic construct
  source 1..75: mol_type = other DNA
ggtgatcaacgtcttcagagggctgaactggaattacaaaaccaattccccctgtaaatttggcagtaaaattat

SEQ ID NO: 270376 - DNA, 75 bp, synthetic construct
  source 1..75: mol_type = other DNA
tcaatggttaatggttcacacaaggaccaaagaaagattaattgaattgattggtatattggaaaatgaaaagat

SEQ ID NO: 270377 - DNA, 75 bp, synthetic construct
  source 1..75: mol_type = other DNA
ggatataagaaaatggatggaagtagcatcagatttaattctcatcaaataaggcatctactcaatactcttgca

SEQ ID NO: 270378 - DNA, 75 bp, synthetic construct
  source 1..75: mol_type = other DNA
ccgtgagcatctggcgattttgcagctgaccggtaacccgatgctgacagtggcgctgaccaaagccgatcgcgt

SEQ ID NO: 270379 - DNA, 75 bp, synthetic construct
  source 1..75: mol_type = other DNA
gaacaaggatgaggtgtttgagcgaggggtgatcaacgtcttcaggggactgagctggaattacaaaaccaattc

SEQ ID NO: 270380 - DNA, 75 bp, synthetic construct
  source 1..75: mol_type = other DNA
tgcacaaaatattcagaatgactggtgatgagaaacattacttaacaatgatgggtgaagaagaggtaaatgtta

SEQ ID NO: 270381 - DNA, 75 bp, synthetic construct
  source 1..75: mol_type = other DNA
ggatggattgtaaaccagaacgaccagaaaaaacaaaacccgccgaagcgggttaagtgcgggtgcgttgaggat

SEQ ID NO: 270382 - DNA, 75 bp, synthetic construct
  source 1..75: mol_type = other DNA
aagagctacgctcagagaataacatcaattgaaaaactaaaacatatttatgaatccactactcaggaacaactt

SEQ ID NO: 270383 - DNA, 75 bp, synthetic construct
  source 1..75: mol_type = other DNA
tctgtcggcgtcccggttacccgcttgaaatggcgcaaccacaataccagcagtggctggaagatcatttgacgc

SEQ ID NO: 270384 - DNA, 75 bp, synthetic construct
  source 1..75: mol_type = other DNA
ccggcaactgactgaaatctcagtactgacaaaaagcattggtggtaaaagcgcccggaactgggcggtgaaaca

SEQ ID NO: 270385 - DNA, 75 bp, synthetic construct
  source 1..75: mol_type = other DNA
ctgacggaaagcatcggaggtaaaactgccccgaactgggccatgaaacaggattttcgctgcggctgctggctg

SEQ ID NO: 270386 - DNA, 75 bp, synthetic construct
  source 1..75: mol_type = other DNA
tctgagcacatttgaacaactgcaccagaagaaggatgaggtgtttgatcggggcgtgatcaacgtcttcatagg

SEQ ID NO: 270387 - DNA, 75 bp, synthetic construct
  source 1..75: mol_type = other DNA
tctgagcacatttgaacaactgcaccagaagaatgatgaggtgtttgaacggggcgtgatcaacgtcttcatagg

SEQ ID NO: 270388 - DNA, 75 bp, synthetic construct
  source 1..75: mol_type = other DNA
tctgagcacatttgaacaactgcaccagaataaagatgaggtgtttgaccggggcgtgatcaacgtcttcatagg

SEQ ID NO: 270389 - DNA, 75 bp, synthetic construct
  source 1..75: mol_type = other DNA
atcacgttcagaaaagagcaggttgacaggcttaataatattattgccagacactatctggaaatattacctgca

SEQ ID NO: 270390 - DNA, 75 bp, synthetic construct
  source 1..75: mol_type = other DNA
atgctgcatctgttcagcggcaaaccgatccccaacaaccgggaaaatatcatcattcgtctggatgattacatc

SEQ ID NO: 270391 - DNA, 75 bp, synthetic construct
  source 1..75: mol_type = other DNA
aagaatactctatactattagaaaatagaaacaatgaaaccgcattaataactcctttacatccatatatcccat

SEQ ID NO: 270392 - DNA, 75 bp, synthetic construct
  source 1..75: mol_type = other DNA
catgtgcactaatcaatgagaaagataaagagaacattatttccaatattaaaatattgcaaaacattgcagaaa

SEQ ID NO: 270393 - DNA, 75 bp, synthetic construct
  source 1..75: mol_type = other DNA
gaatattatgagaaacatactagaatattattttgcatttgttcatagaacagatgctctacaagatgaattaac

SEQ ID NO: 270394 - DNA, 75 bp, synthetic construct
  source 1..75: mol_type = other DNA
ggattttcgctgcggctgctggctcatggagaaaactgaaacggcaatgaaagccatcacccgaaaccttgaccg

SEQ ID NO: 270395 - DNA, 75 bp, synthetic construct
  source 1..75: mol_type = other DNA
atgccaaccgttattacccacgccgccgtccccctttgtattggtttagggttggggtcgaaaatcatcccgccg

SEQ ID NO: 270396 - DNA, 75 bp, synthetic construct
  source 1..75: mol_type = other DNA
tcgatattgcggtgagcaaaaacacgttcccgattttcggtgcgggctgggatcgcctgatgggacgccagaacg

SEQ ID NO: 270397 - DNA, 75 bp, synthetic construct
  source 1..75: mol_type = other DNA
tcggcctgatgctctctatcgtgggtgtgctgctgcgctcgttgtttaatcgcggcattgaaagcccgcaagtgc

SEQ ID NO: 270398 - DNA, 75 bp, synthetic construct
  source 1..75: mol_type = other DNA
ccgccctggactgggcgatgaaacaggattttcgctgcggttgctggctgatggaaaaaccggaaaccgcaatga

SEQ ID NO: 270399 - DNA, 75 bp, synthetic construct
  source 1..75: mol_type = other DNA
ccggtcactggagtacgataattttccggaaatcagtgaagcgaacattctgatcacatttgaacaactacacca

SEQ ID NO: 270400 - DNA, 75 bp, synthetic construct
  source 1..75: mol_type = other DNA
tacgcgacctggcaaaagagacgggaaccgacgagcaggcaatgcgcctgacgctgcgccaggcggcacagcagg

SEQ ID NO: 270401 - DNA, 75 bp, synthetic construct
  source 1..75: mol_type = other DNA
caaaatgccgacacagacggcagcaaggcgtttctggagcgtatcatccacatctataccgacaagcgcggccag

SEQ ID NO: 270402 - DNA, 75 bp, synthetic construct
  source 1..75: mol_type = other DNA
tataaccgtaaagccagtgcttttgcacgagaactttttggccaatttttgcctagtataaattatccatctcca

SEQ ID NO: 270403 - DNA, 75 bp, synthetic construct
  source 1..75: mol_type = other DNA
tgattcagcgcgatgacctggttcagtacacggcaactgccgatgcaaccagctccggtggtgtcctgcgcgtgc

SEQ ID NO: 270404 - DNA, 75 bp, synthetic construct
  source 1..75: mol_type = other DNA
tgtctgcgccaacctggcggcggtgatcagccagaccaataaacgggtgttgttgatcgactgcgatatgcgcaa

SEQ ID NO: 270405 - DNA, 75 bp, synthetic construct
  source 1..75: mol_type = other DNA
agagcaggagctgaaaatcaccgaagccagcactgtcggcgatgtgcgtattgttgacccggcaatcacccagcc

SEQ ID NO: 270406 - DNA, 75 bp, synthetic construct
  source 1..75: mol_type = other DNA
gtttgttgaacgctccagttgccgcccgctggcaacgtaaaattctcgacacattagcaacttatcatgagcaac

SEQ ID NO: 270407 - DNA, 75 bp, synthetic construct
  source 1..75: mol_type = other DNA
agtcaccggcccgctgtcgtctaatcatggagaaattgttcatcagtggtgtcttgatggtcaggggattgcgct

SEQ ID NO: 270408 - DNA, 75 bp, synthetic construct
  source 1..75: mol_type = other DNA
tggggatgattatcttcctgccgcaacgttttgcccgttatggcctgctggtcggtacgataaccggctggttgt

SEQ ID NO: 270409 - DNA, 75 bp, synthetic construct
  source 1..75: mol_type = other DNA
cttttcagttgccgcaaagtagcctgcttacgctcacgcaatatgcttttcttgctaccgcactggcctgcttcg

SEQ ID NO: 270410 - DNA, 75 bp, synthetic construct
  source 1..75: mol_type = other DNA
ctgcacttacacgactgttctgtagtattccattaccggtgagtagcgcggttatgctggtttcttatctaccgc

SEQ ID NO: 270411 - DNA, 75 bp, synthetic construct
  source 1..75: mol_type = other DNA
tggcagtggtttccgctcggcagtggcggtgctttgtcgccggggattattctgacggcggtgattaccgggctt

SEQ ID NO: 270412 - DNA, 75 bp, synthetic construct
  source 1..75: mol_type = other DNA
tttaaggggatgctcgggctgccatttggcattgccgacccgaattttaaaattcagcttgcgccattcgcgctc

SEQ ID NO: 270413 - DNA, 75 bp, synthetic construct
  source 1..75: mol_type = other DNA
tggacttagtggattaggtcatcgccttgcgcggttatttacgccgacggtgatggtgctgtttatgctgatgct

SEQ ID NO: 270414 - DNA, 75 bp, synthetic construct
  source 1..75: mol_type = other DNA
tggaaagaatgttgcatctgctcagcggtaaaccgatccccaacaaccgggggaatatcaccattaatctggatg

SEQ ID NO: 270415 - DNA, 75 bp, synthetic construct
  source 1..75: mol_type = other DNA
ccactgtcgtctaatcatggagaaattgtccatcagtggtgtctcgatgggcaggggattgctctgcgttcctag

SEQ ID NO: 270416 - DNA, 75 bp, synthetic construct
  source 1..75: mol_type = other DNA
accacagggaatgttgcggattatcagtagctttggctttggacggcaggtcgtcgccccggcgctgtcggcact

SEQ ID NO: 270417 - DNA, 75 bp, synthetic construct
  source 1..75: mol_type = other DNA
tggcgatgattatcttcctgccgcaacgttttgcccgttacggcctgctggtcggcacgataacaggctggttgt

SEQ ID NO: 270418 - DNA, 75 bp, synthetic construct
  source 1..75: mol_type = other DNA
gaacgccaggtaaaggaggtgctgcgggaatacggttttgctgaggcaaaactgtttgtcaccgcagcgactgaa

SEQ ID NO: 270419 - DNA, 75 bp, synthetic construct
  source 1..75: mol_type = other DNA
gaatatctgcaatggctggcgtcactggcacgggtgcagaatgatgccgaagcgctggctgttcacctggagcgc

SEQ ID NO: 270420 - DNA, 75 bp, synthetic construct
  source 1..75: mol_type = other DNA
cagggacaatattatcattcgtctggatgagcacatccggtccgttcagggtaaagcgtgctatgaagatgatat

SEQ ID NO: 270421 - DNA, 75 bp, synthetic construct
  source 1..75: mol_type = other DNA
tcttcaggggactgaactggaattacaaaaccaattgcccctgcaaatttggcagtaaaattatcgtcaacaacc

SEQ ID NO: 270422 - DNA, 75 bp, synthetic construct
  source 1..75: mol_type = other DNA
gagcggggggtgatcaacgtcttcagagggttgagctggaattacaaaaccaactccccctgtaaatttggtaat

SEQ ID NO: 270423 - DNA, 75 bp, synthetic construct
  source 1..75: mol_type = other DNA
tccggaaatcagcgaagcgaacattctgagcacatttaaacaactgcaccagaacaaagatgaagtgtttgagcg

SEQ ID NO: 270424 - DNA, 75 bp, synthetic construct
  source 1..75: mol_type = other DNA
cggaagtggtcaacgggcatacggacgttatctgctccacctcagtcagccacattctggctgtgcgaaagacta

SEQ ID NO: 270425 - DNA, 75 bp, synthetic construct
  source 1..75: mol_type = other DNA
ccgggaaaatatcatcatccgtctggatgaccacattcagtccgttcagggtcaggagtgctatgaagatgagat

SEQ ID NO: 270426 - DNA, 75 bp, synthetic construct
  source 1..75: mol_type = other DNA
tgggggtttcatcttatcaccgggcaacaggccgatcgacttgccgacctggaaagaatgctgcatctgttcagc

SEQ ID NO: 270427 - DNA, 75 bp, synthetic construct
  source 1..75: mol_type = other DNA
ccgggcaacaggctgaccgactcgccgatctggaaagaatgttgcacctgttcagcggtaaaccgatccccgaca

SEQ ID NO: 270428 - DNA, 75 bp, synthetic construct
  source 1..75: mol_type = other DNA
aaacagaattttcgctgcggttgctggctgatggagaaacccgaaacagcaatgaaagccattacccggaatctt

SEQ ID NO: 270429 - DNA, 75 bp, synthetic construct
  source 1..75: mol_type = other DNA
gcaccagaataaggatgaagtgtttgagcggggggtgatcaacgtcttcagagggttgagctggaattacaaaac

SEQ ID NO: 270430 - DNA, 75 bp, synthetic construct
  source 1..75: mol_type = other DNA
cgatcgcgaaatctggcgtgacctgatgcaacgttcagggatgctttccttaatggatgcacaggcccgtgatac

SEQ ID NO: 270431 - DNA, 75 bp, synthetic construct
  source 1..75: mol_type = other DNA
atggaaaaacctgaaacggcaatgaaagccatcacccgcaatctcgatcacgaaatctggcgtgacctgatgcaa

SEQ ID NO: 270432 - DNA, 75 bp, synthetic construct
  source 1..75: mol_type = other DNA
atgcgcaggcccgggacacatggtaccgatcactggaatatgataattttccggaaataagtgaagcgaatatcc

SEQ ID NO: 270433 - DNA, 75 bp, synthetic construct
  source 1..75: mol_type = other DNA
ctgccccggactgggccatgaaacaggattttcgctgtggctgctggctcatggagaaacctgatacagcaatga

SEQ ID NO: 270434 - DNA, 75 bp, synthetic construct
  source 1..75: mol_type = other DNA
caactcaccctgtaaatttggcagtaaaattatcgtcaacaatctggtgaggtgggaccggtgggggattcatct

SEQ ID NO: 270435 - DNA, 75 bp, synthetic construct
  source 1..75: mol_type = other DNA
atccgccacattctggctgtacgaaagagtgcgctgctgcaaatcgacacacttatccggcaactggctgaaatc

SEQ ID NO: 270436 - DNA, 75 bp, synthetic construct
  source 1..75: mol_type = other DNA
ccgctgggtaaagagattattgctcaggaaagccagtggcagagctatgtccactggccgctggaagtgcattaa

SEQ ID NO: 270437 - DNA, 75 bp, synthetic construct
  source 1..75: mol_type = other DNA
cggcgacattacgtcttgccgtcaatgcgggtgattttattgccaaagcgcaggaaatcctcggttgtccggtac

SEQ ID NO: 270438 - DNA, 75 bp, synthetic construct
  source 1..75: mol_type = other DNA
accgggttgctgacctggaaaggatgctgcacctgttcagcggcaggcccatccccgacaaccgggaaaatatca

SEQ ID NO: 270439 - DNA, 75 bp, synthetic construct
  source 1..75: mol_type = other DNA
ccgacaaccgggaaaacatcactattcgtctggatggtcacatccagtccgttcagggtaaagagcgcaatgaag

SEQ ID NO: 270440 - DNA, 75 bp, synthetic construct
  source 1..75: mol_type = other DNA
ttatcaccgggcaacagactgaccgactcgtcgacctggaaagaatgctacatctgttcagcggcaaaccgatcc

SEQ ID NO: 270441 - DNA, 75 bp, synthetic construct
  source 1..75: mol_type = other DNA
cgctgctgcaaatcgatacacttatccggcaactggctgaaatctcggtactgacggaaagcattggcggtaaaa

SEQ ID NO: 270442 - DNA, 75 bp, synthetic construct
  source 1..75: mol_type = other DNA
tgagcacatttgaacaactgcaccagaataacgatgaggtgtttgaccggggcgtgatcaacgtcttcagagggc

SEQ ID NO: 270443 - DNA, 75 bp, synthetic construct
  source 1..75: mol_type = other DNA
tgagcacatttgaacaactgcaccagaataacgatgaagtgtttgaccggggggtgatcaacgtcttcaaagggc

SEQ ID NO: 270444 - DNA, 75 bp, synthetic construct
  source 1..75: mol_type = other DNA
atgtcaaacatcacaatctcccgtccggaagtggtcaccgcacatacggacgttatctgctccaccagtatccga

SEQ ID NO: 270445 - DNA, 75 bp, synthetic construct
  source 1..75: mol_type = other DNA
gaacgcccatcgtcctttctttatgcatggccttagccactggttaggtctggatgttcatgacgttggcgttta

SEQ ID NO: 270446 - DNA, 75 bp, synthetic construct
  source 1..75: mol_type = other DNA
gttttgtttaaccgcgttcgcgacctgacggcagagatctggtttggtcgtcgcttaggccaggatgccgcgcca

SEQ ID NO: 270447 - DNA, 75 bp, synthetic construct
  source 1..75: mol_type = other DNA
ctggtaaaactcggcatcctgaaaggtgatgttgatgaactgatcgctcagaacgcccatcgtcctttctttatg

SEQ ID NO: 270448 - DNA, 75 bp, synthetic construct
  source 1..75: mol_type = other DNA
cgccggcaacgatgatcgactggcgtcccattgttcatgaaatgcgcctgttcaaatcgccagaagagattgccg

SEQ ID NO: 270449 - DNA, 75 bp, synthetic construct
  source 1..75: mol_type = other DNA
acattgtgattaccgaaaccggcaatgaaaacctcaccgccagcgtggtgaaaaagccggaagaaattgaagcgt

SEQ ID NO: 270450 - DNA, 75 bp, synthetic construct
  source 1..75: mol_type = other DNA
ggtatcggcattcgtattgaagacgatattgtgattaccgaaaccggtaatgaaaacctcaccgccagcgtggtg

SEQ ID NO: 270451 - DNA, 75 bp, synthetic construct
  source 1..75: mol_type = other DNA
gcagattggtatcacgaccgatcccagcgatggcaaactcgaactggatgccgacaaactcaccgctgcactgaa

SEQ ID NO: 270452 - DNA, 75 bp, synthetic construct
  source 1..75: mol_type = other DNA
ggtctcggtcgccgcccagaatgcgcagctgacggtcaacaacgtcgccattgagaacagcagcaacaccatcag

SEQ ID NO: 270453 - DNA, 75 bp, synthetic construct
  source 1..75: mol_type = other DNA
aaaacatcaccattcatctggatgaccatatccaatctgttcagggaaaagaggactatgaagatgagatgttca

SEQ ID NO: 270454 - DNA, 75 bp, synthetic construct
  source 1..75: mol_type = other DNA
gctcaatggcgataaagccgagcagcggatgcaactggaaactattattgaagcttatgaagaatttagcgagtt

SEQ ID NO: 270455 - DNA, 75 bp, synthetic construct
  source 1..75: mol_type = other DNA
tatcgcctgtcagtcacatcaaatgacaccggcatcgacaatgcgatgacgctctcggtcagcggtgatgatgca

SEQ ID NO: 270456 - DNA, 75 bp, synthetic construct
  source 1..75: mol_type = other DNA
ctacaaagttttatgggctatgacgccagtgccagcagcaacggcatggaggtctcggtcgccgcccagaatgcg

SEQ ID NO: 270457 - DNA, 75 bp, synthetic construct
  source 1..75: mol_type = other DNA
cacatcagggattattaaaattcccgctggtggttctttctgtggcgcttggcggcatgattggcgaccaggtgc

SEQ ID NO: 270458 - DNA, 75 bp, synthetic construct
  source 1..75: mol_type = other DNA
attcccgctgtcagtgaagccaatatcctcagtacgtttgagcagttgcaccagagcaaaggcgaggtgtttgag

SEQ ID NO: 270459 - DNA, 75 bp, synthetic construct
  source 1..75: mol_type = other DNA
agcaggtgataaggcttattcgctcaaaaggcgtgggcgtctggttcgtttcgcaaaacccgtctgatattccgg

SEQ ID NO: 270460 - DNA, 75 bp, synthetic construct
  source 1..75: mol_type = other DNA
gggctgattactggcgcaacggggacgggtaaaactgtcacgctgcaaaaactggcggaatctctgtcagaaatc

SEQ ID NO: 270461 - DNA, 75 bp, synthetic construct
  source 1..75: mol_type = other DNA
aagctatcacacgcaatctcgatcgtgaaatctggcgtgacctgatgcaacgttccgggatgctttccttaatgg

SEQ ID NO: 270462 - DNA, 75 bp, synthetic construct
  source 1..75: mol_type = other DNA
aggaaaccagaactggttgatcggctaaatgatattatagccagacactatccggaaatgttaccttcacaatag

SEQ ID NO: 270463 - DNA, 75 bp, synthetic construct
  source 1..75: mol_type = other DNA
ggccggtggggatttcatcttatcaccggaccacagactgaccgggttgccgacctggaaaggatgctgcatctc

SEQ ID NO: 270464 - DNA, 75 bp, synthetic construct
  source 1..75: mol_type = other DNA
gttcgcggatgggaccagtgacggaagatgagcgaaatgacctgattaacctgaaccgccccgggaatcctggag

SEQ ID NO: 270465 - DNA, 75 bp, synthetic construct
  source 1..75: mol_type = other DNA
atggagaaaccggaaacggcaatgaaagccattacccgcaatctcgatcgcgaaatctggcgtgacctgatgcaa

SEQ ID NO: 270466 - DNA, 75 bp, synthetic construct
  source 1..75: mol_type = other DNA
agagtacaacaatagaattaaagaaataaatattaaagtcaaacaatttaaggatagtgaaaagtctatacgtta

SEQ ID NO: 270467 - DNA, 75 bp, synthetic construct
  source 1..75: mol_type = other DNA
caggcaagcgccgagcagcaaaataatcccccgcgaaagggaaagaggtggcggtggatgacggcattcttggtg

SEQ ID NO: 270468 - DNA, 75 bp, synthetic construct
  source 1..75: mol_type = other DNA
aggggttatcaatatcctcagcgccgagaagctctaccagatgccgaaactgtatgccgccagcctgctgtggat

SEQ ID NO: 270469 - DNA, 75 bp, synthetic construct
  source 1..75: mol_type = other DNA
cgatcagggactattgttactcgactttaaagatctccgggcgattacccaatatatcggtgataacgccaaatc

SEQ ID NO: 270470 - DNA, 75 bp, synthetic construct
  source 1..75: mol_type = other DNA
gtggtctgccgtccacagggtacgcggacaccattacagacggtgaagatattgaaaatctggaaatatggcgtg

SEQ ID NO: 270471 - DNA, 75 bp, synthetic construct
  source 1..75: mol_type = other DNA
atgacaaagcccaaatcaccggggccggaagccctttatcttggtcgtcagaacgaacacacgacgcagcgccag

SEQ ID NO: 270472 - DNA, 75 bp, synthetic construct
  source 1..75: mol_type = other DNA
gttgtcagatggtgcggtgaaagtaatggtttttattccgagcgagtttcgctgaagcagcaattaactgacgtt

SEQ ID NO: 270473 - DNA, 75 bp, synthetic construct
  source 1..75: mol_type = other DNA
cctgttccgcgtgatggtcgtgactacgatccggaagtactgaagcaggcggtgaatgatgcggtcgcgaatatt

SEQ ID NO: 270474 - DNA, 75 bp, synthetic construct
  source 1..75: mol_type = other DNA
ggccagccgccttccagtgacaacgtggaggcgctggagcagcagtattattcccagtgtctgcagacgctgatt

SEQ ID NO: 270475 - DNA, 75 bp, synthetic construct
  source 1..75: mol_type = other DNA
atggcaaagatccgatatctgcagggcacgcatgatgcccgggccggggatatccgtgatgtcgcacagccgtgt

SEQ ID NO: 270476 - DNA, 75 bp, synthetic construct
  source 1..75: mol_type = other DNA
gctgtatgcgccacagataagcctggcggtgctggaagcgtaccagcgccatcttcgcagctaccgcaaggccga

SEQ ID NO: 270477 - DNA, 75 bp, synthetic construct
  source 1..75: mol_type = other DNA
cctgccggctccgcaggacgggcgtgatgccacggcactggaaatactccctgccattgacgatcaaaaatcctt

SEQ ID NO: 270478 - DNA, 75 bp, synthetic construct
  source 1..75: mol_type = other DNA
gtgactatgatcccgatgttctgcagaaggcggtgaatgatgctgtcgggaaaataccggtaccggcgaacggta

SEQ ID NO: 270479 - DNA, 75 bp, synthetic construct
  source 1..75: mol_type = other DNA
cggaccggaactgtgggatcacagagtcggtgacggtgcctgcccgggaggtgatccacgaccgttttaactgtt

SEQ ID NO: 270480 - DNA, 75 bp, synthetic construct
  source 1..75: mol_type = other DNA
acagctgcctgacggcgcatctgacggtaataaggcaatcagtgaaacagagcatgatgcggtgaaagcgatgtt

SEQ ID NO: 270481 - DNA, 75 bp, synthetic construct
  source 1..75: mol_type = other DNA
cagaaccgcattcagttttttgaactgtggctgaacgccaaactgcgtcacggcaatacggtggtgctgaaaatc

SEQ ID NO: 270482 - DNA, 75 bp, synthetic construct
  source 1..75: mol_type = other DNA
ccgcgtgatggtcgtgattatgatccggatgtactgcagcaggcggtgaatgatgcggttgcgaatattccggta

SEQ ID NO: 270483 - DNA, 75 bp, synthetic construct
  source 1..75: mol_type = other DNA
cctgacggcgcatctgacggtaataaggcaatcagtgaaacagagcatggtgcgttgaaagcgatgttgaggggg

SEQ ID NO: 270484 - DNA, 75 bp, synthetic construct
  source 1..75: mol_type = other DNA
gctggctgctggtgggcgatgcgttgcgcagttgcgtcaataccggaatttctgtgcgcggcatggatacggcgc

SEQ ID NO: 270485 - DNA, 75 bp, synthetic construct
  source 1..75: mol_type = other DNA
cgacctacggaggaaatatttgcaacggagccaccagcgcggattctgccacgccaacgctaatttatgatgcga

SEQ ID NO: 270486 - DNA, 75 bp, synthetic construct
  source 1..75: mol_type = other DNA
acgccaacgctaatttatgacgcgaaactggagatccactccccgcgcggtgttcgtttcgtcccgattaatggc

SEQ ID NO: 270487 - DNA, 75 bp, synthetic construct
  source 1..75: mol_type = other DNA
atttgcgcgtctttatgctggtggctcgccgggctggttttgccgccgtggcggaagaactgggcgtttctccgg

SEQ ID NO: 270488 - DNA, 75 bp, synthetic construct
  source 1..75: mol_type = other DNA
ttttgtgagtttcacagaaatattatcaacagatgcgccgatgagattcgcaaagctggcgttaatgtcagcatc

SEQ ID NO: 270489 - DNA, 75 bp, synthetic construct
  source 1..75: mol_type = other DNA
acggcactggaaatactccccgccattgacgatcaaaaatcctttccccggggcacgtatgccacacaccagggc

SEQ ID NO: 270490 - DNA, 75 bp, synthetic construct
  source 1..75: mol_type = other DNA
aaggcggtgaatgatgcggtcgcaaatattccgcagccggcagacggtaaaagtctcaccccggatgatgtgcgt

SEQ ID NO: 270491 - DNA, 75 bp, synthetic construct
  source 1..75: mol_type = other DNA
atgtggaaccttttacagcgaacccgaaaaaaccagaaatcaggacgtgacgtaagagaggcgggctggaccagc

SEQ ID NO: 270492 - DNA, 75 bp, synthetic construct
  source 1..75: mol_type = other DNA
cctgtgtatcaccgaagatcgtcgtaaacaacttgatctgccgatgatggtggaaaataacaccagcgcctacgg

SEQ ID NO: 270493 - DNA, 75 bp, synthetic construct
  source 1..75: mol_type = other DNA
cagctgcgcttattctcttttccgcgcagggcgttgcggaacaaaccacgcagccagttgttacttcctgtgcca

SEQ ID NO: 270494 - DNA, 75 bp, synthetic construct
  source 1..75: mol_type = other DNA
agcggcagggagatactgcccgtctctgtcgtcgtcctaatgcgcagcagaatcgcatccagttttttgaactgt

SEQ ID NO: 270495 - DNA, 75 bp, synthetic construct
  source 1..75: mol_type = other DNA
atgtttatcagaatgcctggtgggttggttctgaagattgcccacgtggcactagtgcagaaaactccaataacc

SEQ ID NO: 270496 - DNA, 75 bp, synthetic construct
  source 1..75: mol_type = other DNA
aatctcggtatggttggtatctggtcaatcgcgcgcgacctgccgggcggcactaacctgtctccggaattccac

SEQ ID NO: 270497 - DNA, 75 bp, synthetic construct
  source 1..75: mol_type = other DNA
agcacagggcactgttccgtctaattcttctgtagttgcctggaataaacagcagggcggtcaaacctggtatgt

SEQ ID NO: 270498 - DNA, 75 bp, synthetic construct
  source 1..75: mol_type = other DNA
agtatacctttcatccgtcagtttcatctgttcatcaacaaaaacgaccacctaaaaaagatcagagtttcagac

SEQ ID NO: 270499 - DNA, 75 bp, synthetic construct
  source 1..75: mol_type = other DNA
acaggggataaaaaccgcctcatgctgggcgataaaacgaaacgtatgaagcagcaagctgagtttgacatcaac

SEQ ID NO: 270500 - DNA, 75 bp, synthetic construct
  source 1..75: mol_type = other DNA
gtgccggcacgctttgtcagtaacccaccgacctggaaaagctatcttctgaccggattgatggcgcagcggatc

SEQ ID NO: 270501 - DNA, 75 bp, synthetic construct
  source 1..75: mol_type = other DNA
ttaaaccggctcctgatgttcagccagccccagctgataagtcaaacgacaactatgctgtagtagcctggaaag

SEQ ID NO: 270502 - DNA, 75 bp, synthetic construct
  source 1..75: mol_type = other DNA
acgccgatggttggcgtgaacgacgttcagggtgaggtgttctatctctctgatgctcgtctggtcatgcaggat

SEQ ID NO: 270503 - DNA, 75 bp, synthetic construct
  source 1..75: mol_type = other DNA
actaaatctatgattggtatggggctggtgtgttccgctctgccagcattggcaatggaagcatggaataaccaa

SEQ ID NO: 270504 - DNA, 75 bp, synthetic construct
  source 1..75: mol_type = other DNA
atttgtcagtctgcaaataccgaaggccagaacattcacggtaagtgtgcaacgtctgcgattgccaacctgcat

SEQ ID NO: 270505 - DNA, 75 bp, synthetic construct
  source 1..75: mol_type = other DNA
cacgggagcacctcaaaaacaccatcatacactaaatcagtaagttggcaccattaccgtatggggctggtgtgt

SEQ ID NO: 270506 - DNA, 75 bp, synthetic construct
  source 1..75: mol_type = other DNA
atgtgatgctgtctatcggtggtgctaataatgccccgctggcagcttcctgtaagaacgttgacgatctaatgc

SEQ ID NO: 270507 - DNA, 75 bp, synthetic construct
  source 1..75: mol_type = other DNA
atgaaatcttgggtaaaaatgaatagttggacatcagaagacaccaaagcagtgaaaacgtggtttgatttggac

SEQ ID NO: 270508 - DNA, 75 bp, synthetic construct
  source 1..75: mol_type = other DNA
tttgttctcactggtatctacatctggcgggcgaacggcgaattcgaccgtcttaataatgaagtcctgcatgag

SEQ ID NO: 270509 - DNA, 75 bp, synthetic construct
  source 1..75: mol_type = other DNA
cagaatacaaagcgatcaccatgtctgcggtagatgcgcagactgttgagcagcagaaactctctgcagaaatgg

SEQ ID NO: 270510 - DNA, 75 bp, synthetic construct
  source 1..75: mol_type = other DNA
atgaaatcgcggttaatttcaatcacatggaagaggtcgccgcagcacaccggcagcgtattccgttcacgttaa

SEQ ID NO: 270511 - DNA, 75 bp, synthetic construct
  source 1..75: mol_type = other DNA
cccggcgatacggtgacgtgggggggctcgctgtggcactgcaacagtatgaccggtgataaacccggagaagct

SEQ ID NO: 270512 - DNA, 75 bp, synthetic construct
  source 1..75: mol_type = other DNA
aaggcggtgaatgatgcagtcgcaaatattccgcagccggcggacggtaaaagtctcaccccggatgatgtgcgt

SEQ ID NO: 270513 - DNA, 75 bp, synthetic construct
  source 1..75: mol_type = other DNA
gccattttcatgttccgcgtgatggtcgtgactacgatccggatgttctgcagaaggcggttctggatgcggtga

SEQ ID NO: 270514 - DNA, 75 bp, synthetic construct
  source 1..75: mol_type = other DNA
aatatatttccgaaaaaatccctgaacagtttcctactacaattatgttagaaatcgatcttgcgggtggaagcg

SEQ ID NO: 270515 - DNA, 75 bp, synthetic construct
  source 1..75: mol_type = other DNA
acttctgtcagacgatagactatcccgattgctttacacggatgaagacgatgataaggcaattcgccaaggata

SEQ ID NO: 270516 - DNA, 75 bp, synthetic construct
  source 1..75: mol_type = other DNA
atcaaagagaaagacttgaattatatggatgccgaaaataaattatatcaacctccatacttttttattactaca

SEQ ID NO: 270517 - DNA, 75 bp, synthetic construct
  source 1..75: mol_type = other DNA
tcggcaacgggtggcgagtttcaataatgatccgctgatcacacgggcgattgccgtcaatatcttgctcgatct

SEQ ID NO: 270518 - DNA, 75 bp, synthetic construct
  source 1..75: mol_type = other DNA
aaaattattcgtgatgcgctgaaattgcaatcctcttataaccgaagagatgttatttacatttgcaatagatta

SEQ ID NO: 270519 - DNA, 75 bp, synthetic construct
  source 1..75: mol_type = other DNA
aattaaaaaattagaaaaagcaataactatcataccagaccatgctctgacgcagcataaacttggacttgcatt

SEQ ID NO: 270520 - DNA, 75 bp, synthetic construct
  source 1..75: mol_type = other DNA
tgggttaagctggaaggaaagccgcttccggtgcaggcaccgaccctgaaatgggcctggggcgatggcatgaca

SEQ ID NO: 270521 - DNA, 75 bp, synthetic construct
  source 1..75: mol_type = other DNA
cgggacaacggagttctcgccaatgggcctgttgcccgtcattgcgcgcggtgtggatgtctcgatccctgctgc

SEQ ID NO: 270522 - DNA, 75 bp, synthetic construct
  source 1..75: mol_type = other DNA
ggatataaaaaccccaagcatgttcaggttatagaggtcactaatcattttccgggggggtactgggaagactag

SEQ ID NO: 270523 - DNA, 75 bp, synthetic construct
  source 1..75: mol_type = other DNA
cgtgactttcccgtgcacaatggttgaccgcattgttccggcggctactcctgaaacattgcaggaaattgctga

SEQ ID NO: 270524 - DNA, 75 bp, synthetic construct
  source 1..75: mol_type = other DNA
gtgggcgcacagttcgttgcggacgttgttccgttcgaaatgatgaaactgcgtatgcttaacggcagccactct

SEQ ID NO: 270525 - DNA, 75 bp, synthetic construct
  source 1..75: mol_type = other DNA
gcggggaagccgtttccctgtcgtttgcatttaacgttctggatattgagtcggcaacgtataccgtcagagatg

SEQ ID NO: 270526 - DNA, 75 bp, synthetic construct
  source 1..75: mol_type = other DNA
ggtctggcgcgtgcagtgcaggacggcctgaagaaaggcaatgctaacgtggtgttctttgatggtatcaccgct

SEQ ID NO: 270527 - DNA, 75 bp, synthetic construct
  source 1..75: mol_type = other DNA
caggcggttgcggatatcaacgctaaaggtggcgttaaaggcaacaaactgcaaatcgtaaaatatgacgatgcc

SEQ ID NO: 270528 - DNA, 75 bp, synthetic construct
  source 1..75: mol_type = other DNA
ggctttacttggcattcattcaaatggtgccagtcgtcgtatcagagaatatcgtaacggtgaaaaaccgatccc

SEQ ID NO: 270529 - DNA, 75 bp, synthetic construct
  source 1..75: mol_type = other DNA
tccgatttactacggtagtggttatctgccaacggcggattactggcgactgggggcgatttttgggctgatatt

SEQ ID NO: 270530 - DNA, 75 bp, synthetic construct
  source 1..75: mol_type = other DNA
gtgccgcgctgggcagagacggaactgcaggcaatgggcccgctctgttcgcgtgaaaaacggatgctggggctg

SEQ ID NO: 270531 - DNA, 75 bp, synthetic construct
  source 1..75: mol_type = other DNA
ccgctctgttcgcgtgaaaaacggatgctggggctgatggtaggcgcgctggtgctgtggattttcggcggtgat

SEQ ID NO: 270532 - DNA, 75 bp, synthetic construct
  source 1..75: mol_type = other DNA
agctttgcgtctgcgtcgtgaaaaagggctgaaagcgtttactgtcatgtcctgcgacaacgtgcgtgaaaacgg

SEQ ID NO: 270533 - DNA, 75 bp, synthetic construct
  source 1..75: mol_type = other DNA
ctatttcacagtgaaagaaacagcggtcaacacaaatcacggaatacagaatcgttcaccacaaaaatcaccggg

SEQ ID NO: 270534 - DNA, 75 bp, synthetic construct
  source 1..75: mol_type = other DNA
cgctgatatgcagaagcggcaacgtgatgtagcagaacgtaactcatgttacagtaacagtcattactatctcga

SEQ ID NO: 270535 - DNA, 75 bp, synthetic construct
  source 1..75: mol_type = other DNA
tgtgatccagggggcgttactggtggcactggcggcgatcatcgcagaccgcctgtttgaaaggctggtgcaggc

SEQ ID NO: 270536 - DNA, 75 bp, synthetic construct
  source 1..75: mol_type = other DNA
agatccagcgtgatgatcaggtgaccttcaccacgacggcgacggtgaccgcagccgatggtcttctccgggtgc

SEQ ID NO: 270537 - DNA, 75 bp, synthetic construct
  source 1..75: mol_type = other DNA
cggatattgacctgggggaaacagagcttccggtactcggggagatcacatggcaggcttatgacccggtaagga

SEQ ID NO: 270538 - DNA, 75 bp, synthetic construct
  source 1..75: mol_type = other DNA
cagttgtcgccggaattcaccgctcgtcttgttgaccgttggcgagagcttgaagaagctgcggttaatatccca

SEQ ID NO: 270539 - DNA, 75 bp, synthetic construct
  source 1..75: mol_type = other DNA
cgctggctaaaaatggtgttatccggcttcctcaaattgaggtttccgaaagaatcaataacttagggttcaatg

SEQ ID NO: 270540 - DNA, 75 bp, synthetic construct
  source 1..75: mol_type = other DNA
ccattcgcagcctgcgcaccagcctgcacttcgccatgatgcaggcgccgaacaacgtgctgatgatgaccgggg

SEQ ID NO: 270541 - DNA, 75 bp, synthetic construct
  source 1..75: mol_type = other DNA
gcggctatgaaaccattgccgacaccatgactaacccggattatcgcaaagcggccttctccttgatgatgcagg

SEQ ID NO: 270542 - DNA, 75 bp, synthetic construct
  source 1..75: mol_type = other DNA
ttgatcctttacggtgtgctgcccgtcctgcaggcgacacttgccgggctgggagcgattgatgccagcgtgaca

SEQ ID NO: 270543 - DNA, 75 bp, synthetic construct
  source 1..75: mol_type = other DNA
atgaagatgttgcgcgatccgctgttctggctcattgctttgtttgtggcactgattttctggctgccttacagc

SEQ ID NO: 270544 - DNA, 75 bp, synthetic construct
  source 1..75: mol_type = other DNA
ggaaactttgcaaaggttgttggtattggtcaaaacaaactgtttgcgtggatgcgtgatcacaaaatccttatt

SEQ ID NO: 270545 - DNA, 75 bp, synthetic construct
  source 1..75: mol_type = other DNA
acttaatgatgcggtaaacctgactggcgggaccagcagcaaaacatctgccagccagtatgcgctgtttatcga

SEQ ID NO: 270546 - DNA, 75 bp, synthetic construct
  source 1..75: mol_type = other DNA
cagaactttgtcggttttgaaacgggagcgaacgggcgacgcataccggtattcagctactacaacgttaacaaa

SEQ ID NO: 270547 - DNA, 75 bp, synthetic construct
  source 1..75: mol_type = other DNA
aaaccttaaagacgcgcccgccagcatcagtgtgataactcaggaagacctgcagcgtaaaccggtacagaatct

SEQ ID NO: 270548 - DNA, 75 bp, synthetic construct
  source 1..75: mol_type = other DNA
gttcgcattaatgccccacgtagtgttggtgccgcagctgcaagccagaaagttgccgcagagttaattctgaag

SEQ ID NO: 270549 - DNA, 75 bp, synthetic construct
  source 1..75: mol_type = other DNA
ggcatgacgttgtttattgtgatccgccttacctgactgataccgacaatttcaccgcgtaccatgagcgcggtt

SEQ ID NO: 270550 - DNA, 75 bp, synthetic construct
  source 1..75: mol_type = other DNA
gttgggattacggcaccagcgaactgaaatactacggtgagaaagtcgaaaacaaaaaccctggcaacagcagcc

SEQ ID NO: 270551 - DNA, 75 bp, synthetic construct
  source 1..75: mol_type = other DNA
taccagcggaccattaattgacggtgtgctgggaatgaaagcttacggcagcctggcaaaacgtgaaaaggatga

SEQ ID NO: 270552 - DNA, 75 bp, synthetic construct
  source 1..75: mol_type = other DNA
agctgcctgttatcaattccaccttcatatattgaggcagcaaaagaggaaggcgtcaccattttatcggcactg

SEQ ID NO: 270553 - DNA, 75 bp, synthetic construct
  source 1..75: mol_type = other DNA
aagtgctaccggaatattaccagccagcgaacgtctgggccgtttatgtttcaaggctggcgacgtcagcgaaag

SEQ ID NO: 270554 - DNA, 75 bp, synthetic construct
  source 1..75: mol_type = other DNA
gccgacagcgcgacggctaaaacaccgggcggttataccatctggaataccggcgcggcctggcaggtgactaaa

SEQ ID NO: 270555 - DNA, 75 bp, synthetic construct
  source 1..75: mol_type = other DNA
accgttcaggaacatcgcgatcgcggtgatacctataacggtcaattctttaccagcggaccattaattgacggc

SEQ ID NO: 270556 - DNA, 75 bp, synthetic construct
  source 1..75: mol_type = other DNA
atttagctactacaacgttaacaaagctcgtattcagggcgtggaaaccgaactgaaaattccgttcaacgatga

SEQ ID NO: 270557 - DNA, 75 bp, synthetic construct
  source 1..75: mol_type = other DNA
gtggaactggacgcgattcttgataacctgagcgacgaagagcaaatcgagttgctcgagctactcgaagaagaa

SEQ ID NO: 270558 - DNA, 75 bp, synthetic construct
  source 1..75: mol_type = other DNA
gcgaaaccctctgacctcaatcgtccgggtcacgtatttccattgcgtgcacaggcggggggggtactgactcgc

SEQ ID NO: 270559 - DNA, 75 bp, synthetic construct
  source 1..75: mol_type = other DNA
tatgacaatgcctttcattcgctgaaggtggaatgtatccacggggaacgctttagcagccgggaaataatgcgg

SEQ ID NO: 270560 - DNA, 75 bp, synthetic construct
  source 1..75: mol_type = other DNA
aagcgtttctatgagcctgttgtcttctggattggtggcgagacaaacgagactgtaaccaaaacgactcaacgc

SEQ ID NO: 270561 - DNA, 75 bp, synthetic construct
  source 1..75: mol_type = other DNA
cgctcgaagcaaaaagcagcaaggtcagctatgaagtcttcgccccgggcgagctagcaaaggtctatgatttgc

SEQ ID NO: 270562 - DNA, 75 bp, synthetic construct
  source 1..75: mol_type = other DNA
gaatcgtcccagtacacagcaagctaatccccctcgtgaaatcattgctcaaaaccacacatagcggttttctgt

SEQ ID NO: 270563 - DNA, 75 bp, synthetic construct
  source 1..75: mol_type = other DNA
gcggctgaaggtgtgactaccggtgtttctgccgctgaccgtattacgaccgttcgcgcagcgattgccgatggc

SEQ ID NO: 270564 - DNA, 75 bp, synthetic construct
  source 1..75: mol_type = other DNA
ggagcgttatctcggccttcccgagtgtgatatggccggagccaccatcacagaacgacagcgttatgccgggaa

SEQ ID NO: 270565 - DNA, 75 bp, synthetic construct
  source 1..75: mol_type = other DNA
atacatgatgcgccgcttcgccaaaatgatgcgcgacatcaaaaaaccaaaagagaaaaagataccagccccaat

SEQ ID NO: 270566 - DNA, 75 bp, synthetic construct
  source 1..75: mol_type = other DNA
ggtgggataaggacgcagacacaatctacgtttcacgcgtgtggaaggcgaaagaaaagacagccgttcaggcgt

SEQ ID NO: 270567 - DNA, 75 bp, synthetic construct
  source 1..75: mol_type = other DNA
cacccgcaggcgcaggttcagctttggtgggataaggacgcagacacaatctacgtttcacgcgtgtggaaggcg

SEQ ID NO: 270568 - DNA, 75 bp, synthetic construct
  source 1..75: mol_type = other DNA
tgacgggctggcatgggacaagcgtccgtcatctgtactggcatcgctatgtctgggcctcagtcattccaccgc

SEQ ID NO: 270569 - DNA, 75 bp, synthetic construct
  source 1..75: mol_type = other DNA
ctgcgtatttatgaaggcggtgcgctggaatgtattctgaaccgttataagcctgcatggcagacgtttatttac

SEQ ID NO: 270570 - DNA, 75 bp, synthetic construct
  source 1..75: mol_type = other DNA
atgaatagtcgagtaaccaaccctgagtcgtacatattttctgcaatcatcttaattggcaaagataacttcacc

SEQ ID NO: 270571 - DNA, 75 bp, synthetic construct
  source 1..75: mol_type = other DNA
aaatataattacttagcatttctgacagatgcaaagttgattgaaaagttacccgaaattgttacaaataaccaa

SEQ ID NO: 270572 - DNA, 75 bp, synthetic construct
  source 1..75: mol_type = other DNA
tcgtctctacagagaaggatgttactttcggtctgttgaaggagcaatggcatatcatcaagaaccacccgggaa

SEQ ID NO: 270573 - DNA, 75 bp, synthetic construct
  source 1..75: mol_type = other DNA
cgtcagggtaagggtgttccgcgtcgagagtgaaaacagccataaaggtgcgtgcctgcctgtgcgttatgacga

SEQ ID NO: 270574 - DNA, 75 bp, synthetic construct
  source 1..75: mol_type = other DNA
taaagcaactttaagaaagtcagaaacagcagaaacgaaaactataaatcctattccttctgattggccaaaaga

SEQ ID NO: 270575 - DNA, 75 bp, synthetic construct
  source 1..75: mol_type = other DNA
agagttctcacgagagaagtttactacggcgatgatttgccatcactttagaatgtttacagtcagagcttggaa

SEQ ID NO: 270576 - DNA, 75 bp, synthetic construct
  source 1..75: mol_type = other DNA
gaacctgatgccgtggaagtttgtttaaatgaatttaaaagagatctatccttggcatgtgtctatacaacaaat

SEQ ID NO: 270577 - DNA, 75 bp, synthetic construct
  source 1..75: mol_type = other DNA
cctgcgagtggagaagccgggcgtgctggaagtacctgcggccgagaatatccacggcgagatggagcgcggctg

SEQ ID NO: 270578 - DNA, 75 bp, synthetic construct
  source 1..75: mol_type = other DNA
gctatttctctgttctcgctattattccaaccgctgtttggtcctgagagatcccctcataatttccccaaaacg

SEQ ID NO: 270579 - DNA, 75 bp, synthetic construct
  source 1..75: mol_type = other DNA
aaaaatcctctatacaccaatatgattgtgaaccttttttttctcggtgggtgctttgcatgaagataaacaata

SEQ ID NO: 270580 - DNA, 75 bp, synthetic construct
  source 1..75: mol_type = other DNA
aatcgctttgctggaggaaacagcgggtatccgcgacgatgtgctggcagcgatgcaagacgaactggataacct

SEQ ID NO: 270581 - DNA, 75 bp, synthetic construct
  source 1..75: mol_type = other DNA
tggtaggcatcccggtcgtgcccattggcattggcttcggtgcgctgtttgcgctggcaataacggcgctgtgga

SEQ ID NO: 270582 - DNA, 75 bp, synthetic construct
  source 1..75: mol_type = other DNA
caatccgtttctcggctatacgctggtgggtgttggtgctgcagcctattcaccggcgaaatacggtattctcgg

SEQ ID NO: 270583 - DNA, 75 bp, synthetic construct
  source 1..75: mol_type = other DNA
tcaattatgtgcagtaagaaatttaggacttagaaccgcacgatacaacttcgttgctatacttgattgcgatat

SEQ ID NO: 270584 - DNA, 75 bp, synthetic construct
  source 1..75: mol_type = other DNA
gcgtctctgttcctcggtattgaactgatctctttgccgctgtttggcctggtcggttacgctttccgccagaaa

SEQ ID NO: 270585 - DNA, 75 bp, synthetic construct
  source 1..75: mol_type = other DNA
ctgttggtactggtgctgggtgtatggccacaaccgctgattagcattgtgcggttggcaatgccgctgatgtaa

SEQ ID NO: 270586 - DNA, 75 bp, synthetic construct
  source 1..75: mol_type = other DNA
tgttctcttaccgcggtctgttctggcatcgtccgatcctcgcggcagtgatgacggtgatgatgctgtctctgg

SEQ ID NO: 270587 - DNA, 75 bp, synthetic construct
  source 1..75: mol_type = other DNA
ggcattcttcttccacgccgccgtctcttcacgattgaatcacctcccgaaggacgtatccctggtgcgattcag

SEQ ID NO: 270588 - DNA, 75 bp, synthetic construct
  source 1..75: mol_type = other DNA
atatctgagaaaccatgaaggctgcccgcactgctggcgtggcgtgacggggcgaacggtgatcgcagaagttat

SEQ ID NO: 270589 - DNA, 75 bp, synthetic construct
  source 1..75: mol_type = other DNA
cggtgccattcagactgccgtcatggattccgcacagggctgggtggactccattaaatcagcactgcgtcttga

SEQ ID NO: 270590 - DNA, 75 bp, synthetic construct
  source 1..75: mol_type = other DNA
acaacatcccgctccttaacgaacacattccggttactgcttcagaccctcagaagatggctgtggttggttcta

SEQ ID NO: 270591 - DNA, 75 bp, synthetic construct
  source 1..75: mol_type = other DNA
atgggttacgtagttattgatattgaagccgacgaagacgttgccgaaaaagcgttgcaggcaatgaaagttatt

SEQ ID NO: 270592 - DNA, 75 bp, synthetic construct
  source 1..75: mol_type = other DNA
gtatttaacgcaccgttttcaaacactcgttctgtggcagagttggtgattggtgaattgctgctcctgctacgt

SEQ ID NO: 270593 - DNA, 75 bp, synthetic construct
  source 1..75: mol_type = other DNA
ttcggcgtggtgatgcgtctgttcctctacgcaccggtgggtgacagcgaagcgattcgcgtggtgctggcgatt

SEQ ID NO: 270594 - DNA, 75 bp, synthetic construct
  source 1..75: mol_type = other DNA
ctggtgtatgcgcagtctggcgacctgtcgtttgtcgcgctgggtaaaaacctcggcgacggtatgctcaacgag

SEQ ID NO: 270595 - DNA, 75 bp, synthetic construct
  source 1..75: mol_type = other DNA
gtacccgcgcgtatgcggagatctggctcgaccaggaaaaagtcgccactactgatgaagaaccgatccttggtc

SEQ ID NO: 270596 - DNA, 75 bp, synthetic construct
  source 1..75: mol_type = other DNA
tcaggccataaattcggtctggctccgctgggctgcggctgggttatctggcgtgacgaagaagcgctgccgcag

SEQ ID NO: 270597 - DNA, 75 bp, synthetic construct
  source 1..75: mol_type = other DNA
atggataagaagcaagtaacggatttaaggtcagaactactcgattcacgttttggtgcgaagtctatttccact

SEQ ID NO: 270598 - DNA, 75 bp, synthetic construct
  source 1..75: mol_type = other DNA
gtctggctccgctgggctgcggctgggttatctggcgtgacgaagaagcgctgccgcaggaactggtgttcaacg

SEQ ID NO: 270599 - DNA, 75 bp, synthetic construct
  source 1..75: mol_type = other DNA
aaatcgccaaactggggccgtatgagttcatctgtaccggtcgcccggacgaaggcatcccggcggtttgcttca

SEQ ID NO: 270600 - DNA, 75 bp, synthetic construct
  source 1..75: mol_type = other DNA
gctgccgcaggaactggtgttcaacgttgactacctcggcggtcagattggtactttcgccatcaacttctcccg

SEQ ID NO: 270601 - DNA, 75 bp, synthetic construct
  source 1..75: mol_type = other DNA
caacggataaaccaaacctggtgtgcggtccggtacaaatctgctggcataaattcgcccgctactgggatgtgg

SEQ ID NO: 270602 - DNA, 75 bp, synthetic construct
  source 1..75: mol_type = other DNA
gcactctggcactggtcggttattccattgggtctggctgtcgctattctctcgaccgctctgccttattcgctg

SEQ ID NO: 270603 - DNA, 75 bp, synthetic construct
  source 1..75: mol_type = other DNA
ttcccatgtcgatttaaccggctgtgcgctggcactgggggccggggcttgttgggctatttacattttaagtgg

SEQ ID NO: 270604 - DNA, 75 bp, synthetic construct
  source 1..75: mol_type = other DNA
cgaaaacaccatcggcgtggtgccgactttcggcgtgacctacaccggtaactatgagttcccacaaccgctgca

SEQ ID NO: 270605 - DNA, 75 bp, synthetic construct
  source 1..75: mol_type = other DNA
atcgacatcgacatgcacatcgacgctgccagcggtggcttcctggcaccgttcgtcgccccggatatcgtctgg

SEQ ID NO: 270606 - DNA, 75 bp, synthetic construct
  source 1..75: mol_type = other DNA
ggcgctcggcgcgattatcgccgcttcaatggggtctacgctgacagtacgcaaagagggtgatgctgccaactt

SEQ ID NO: 270607 - DNA, 75 bp, synthetic construct
  source 1..75: mol_type = other DNA
tcctgctaccgctggggcaagacgtttcccatgtcgatttaaccggctgtgcgctggcactggggccggggcttg

SEQ ID NO: 270608 - DNA, 75 bp, synthetic construct
  source 1..75: mol_type = other DNA
acctcggcggtcagattggtactttcgccatcaacttctcccgcccggcgggtcaggtgattgcacagtattatg

SEQ ID NO: 270609 - DNA, 75 bp, synthetic construct
  source 1..75: mol_type = other DNA
gccgatgtacaggggcagccagtatttgatatcacccagccccaggttcctttactcaactatactgccacttct

SEQ ID NO: 270610 - DNA, 75 bp, synthetic construct
  source 1..75: mol_type = other DNA
ccgagaacctctggcgtattttacaggaacatatgccagacgatttaatccagcagatatcaatggaagagccag

SEQ ID NO: 270611 - DNA, 75 bp, synthetic construct
  source 1..75: mol_type = other DNA
accactattaaaaccggtggtcgaacactttggcatcgatccggtgcattttggcatcatcatgatcttcaacct

SEQ ID NO: 270612 - DNA, 75 bp, synthetic construct
  source 1..75: mol_type = other DNA
ggctatatctgttgacgacaacggcatcgttacccatacacaggaaattcttaacacagagccgggtaaaattgt

SEQ ID NO: 270613 - DNA, 75 bp, synthetic construct
  source 1..75: mol_type = other DNA
gagaagcggtgccactactggttagtcttattttactgctgttggttattacctatatcccggcaatatctttgc

SEQ ID NO: 270614 - DNA, 75 bp, synthetic construct
  source 1..75: mol_type = other DNA
gtttgattgccacgacgcaaaccccttcgctgttagctattccgttttttatcttattaggcacgttaatgagct

SEQ ID NO: 270615 - DNA, 75 bp, synthetic construct
  source 1..75: mol_type = other DNA
cgtaagtacagcggtcacatcagcaacgtattcgttgtcgtgatgggtctgattgcaatctccgcaatcttctac

SEQ ID NO: 270616 - DNA, 75 bp, synthetic construct
  source 1..75: mol_type = other DNA
atcaacttctcccgcccggcgggtcaggtaattgcacagtactatgaattcctgcgcctcggtcgtgaaggctaa

SEQ ID NO: 270617 - DNA, 75 bp, synthetic construct
  source 1..75: mol_type = other DNA
gcctccctgaaatatctcagtgatcacccgaaactgcagggtattgcccaacagaacagctttaaacatacctga

SEQ ID NO: 270618 - DNA, 75 bp, synthetic construct
  source 1..75: mol_type = other DNA
gtcgcagtggcgaattttgtgacttcgctgaccgaaaataaatatatgttcctgttaattatcaacatattgctg

SEQ ID NO: 270619 - DNA, 75 bp, synthetic construct
  source 1..75: mol_type = other DNA
cgtttgccgccgccattaccgctggtggctcgttagtcaccccgatcataccgccgggaatagccctgattattt

SEQ ID NO: 270620 - DNA, 75 bp, synthetic construct
  source 1..75: mol_type = other DNA
ggccataaattcggtctggctccgctgggctgcggctgggttatctggcgtgatgaagaagcgctgccgcaggaa

SEQ ID NO: 270621 - DNA, 75 bp, synthetic construct
  source 1..75: mol_type = other DNA
tccgcttgataccctgatttatggcgttacgcatggcgataaagtggcggttgccattgaaggtaatgagcgacg

SEQ ID NO: 270622 - DNA, 75 bp, synthetic construct
  source 1..75: mol_type = other DNA
tgagcaaggggaggcacttgcggatatcagaaagtcattacttcttaacagcactggacttagccgagaactgtt

SEQ ID NO: 270623 - DNA, 75 bp, synthetic construct
  source 1..75: mol_type = other DNA
ttgttgctggccccgtttttcttcttcacatatggatttcttaatcagttcaccgcgtttcaggatcttaacaac

SEQ ID NO: 270624 - DNA, 75 bp, synthetic construct
  source 1..75: mol_type = other DNA
actgatattcgaaaacgtcgctgttcgcgtctctccggatatgcgtcttgaaatgcatattgataccgatgaagc

SEQ ID NO: 270625 - DNA, 75 bp, synthetic construct
  source 1..75: mol_type = other DNA
gcatggacaggaagatttcgatattgtccgaggggatactttacgcgaacctaaatttttaaaaagcgatcgttt

SEQ ID NO: 270626 - DNA, 75 bp, synthetic construct
  source 1..75: mol_type = other DNA
accatgtaaaagaaaatggtggtgatccgcgtttactaaaaatcaagggtcaggaaaagaacttaacgacggaag

SEQ ID NO: 270627 - DNA, 75 bp, synthetic construct
  source 1..75: mol_type = other DNA
tttcgcaacttgaattgtttgatctgccttataaccagtctccttcgctgcatattattctctgctggctacttt

SEQ ID NO: 270628 - DNA, 75 bp, synthetic construct
  source 1..75: mol_type = other DNA
cttataaccagtctccttcgctgcatattgttctctgctggctactttggcgtcactttcgtcagcatctggctg

SEQ ID NO: 270629 - DNA, 75 bp, synthetic construct
  source 1..75: mol_type = other DNA
caggatgtctggctgtttgatgacacgctgctggcgaatatccgtatcgcgcgcccacaggcgacgcggcaggag

SEQ ID NO: 270630 - DNA, 75 bp, synthetic construct
  source 1..75: mol_type = other DNA
tcacctatggatttcttaatcagttcaccgcgactcaggatcttaacaaccatgatatccccagtcaggtattcg

SEQ ID NO: 270631 - DNA, 75 bp, synthetic construct
  source 1..75: mol_type = other DNA
atcaaaatagcactgccatatgtcgtaggcgcgggcgcgtgcattgtgttgatggagctaatgataatgcttcag

SEQ ID NO: 270632 - DNA, 75 bp, synthetic construct
  source 1..75: mol_type = other DNA
gctgcggtttttttctctacccgctgaagtttagttttatccgtcctgaagtgagtggggtgacaggatggttat

SEQ ID NO: 270633 - DNA, 75 bp, synthetic construct
  source 1..75: mol_type = other DNA
gttcctgatcgccactgtcggcgcactgactatttccttgttgtcaccgcagcaacctttactcgtggactttcc

SEQ ID NO: 270634 - DNA, 75 bp, synthetic construct
  source 1..75: mol_type = other DNA
caccgctgaatcgcggctttgtggcgctgttcctgttgctgctgatggctttcgtcatctggtttggtaaggatc

SEQ ID NO: 270635 - DNA, 75 bp, synthetic construct
  source 1..75: mol_type = other DNA
aacagtacaagtgctgccggtacgggggcacaggcaggaactcggttgagaataatgcgctgggtaacaagaatg

SEQ ID NO: 270636 - DNA, 75 bp, synthetic construct
  source 1..75: mol_type = other DNA
aagcagaatattgccgggctcagccgggacccggaaaacgccaacggcagcattgcaccgatatttgacagggag

SEQ ID NO: 270637 - DNA, 75 bp, synthetic construct
  source 1..75: mol_type = other DNA
attggattatcacgtaaaattggggataatgtaaaaataggtgcaatgtcttttataaataaagatataccatcg

SEQ ID NO: 270638 - DNA, 75 bp, synthetic construct
  source 1..75: mol_type = other DNA
gatgctcttgatgctgccgctcgcgctggcaggttgcagcaacagctcgttgccatccgtgagcagctcaggcag

SEQ ID NO: 270639 - DNA, 75 bp, synthetic construct
  source 1..75: mol_type = other DNA
catgatcttcatcatgggctccacttgggttgttgcctacgccaacccgaacatcctcgacctgattgaagccat

SEQ ID NO: 270640 - DNA, 75 bp, synthetic construct
  source 1..75: mol_type = other DNA
cgcaccgtggcgtgtggaacaaactggcggcgggttcttttgaagcgcgcggcaaaaagctgggtatcattggct

SEQ ID NO: 270641 - DNA, 75 bp, synthetic construct
  source 1..75: mol_type = other DNA
agaatcatatgtgcaaccttggtgagaggttgtttaacgagatttttgatcttgatgccattgctgaactcgctg

SEQ ID NO: 270642 - DNA, 75 bp, synthetic construct
  source 1..75: mol_type = other DNA
atgaatatcgaagaatttgtgagtgaagataaccatatgtgcaatttatgcggagatctgttttacaagatcttt

SEQ ID NO: 270643 - DNA, 75 bp, synthetic construct
  source 1..75: mol_type = other DNA
gaaggtatcggggtttattcaccgggcggtaagtcaggaacgggcgattatgcaaacgttcctggaagtatcgcc

SEQ ID NO: 270644 - DNA, 75 bp, synthetic construct
  source 1..75: mol_type = other DNA
cccgctttattgtggccggaggggaaacgtcgagcattgtggcgcagaccctgggggttgaggcgttccatattg

SEQ ID NO: 270645 - DNA, 75 bp, synthetic construct
  source 1..75: mol_type = other DNA
tatcgtcaacaggcccccgcccgcgccgtcgacttaagcgcctgctttaccgatctggagagctacgtcaggacg

SEQ ID NO: 270646 - DNA, 75 bp, synthetic construct
  source 1..75: mol_type = other DNA
atgcagtctctcgatccactcttcgcgcgtttatcccgttcaaaatttcgctctcgctttcgtttgggcatgaaa

SEQ ID NO: 270647 - DNA, 75 bp, synthetic construct
  source 1..75: mol_type = other DNA
gaatccccgccggaagggcgtattcccggtgccattcagaccgccgtcatggataccgcgcagggctgggtggac

SEQ ID NO: 270648 - DNA, 75 bp, synthetic construct
  source 1..75: mol_type = other DNA
aacaacaccggcggtattcttcttccccgtcgcaggctgttcaccatcgaatccccgccggaagggcgtattccc

SEQ ID NO: 270649 - DNA, 75 bp, synthetic construct
  source 1..75: mol_type = other DNA
ttcgtccgtatgagtttaccggacgcggcgatcgtattggctgggttaaaggtattgatgataactggcacctga

SEQ ID NO: 270650 - DNA, 75 bp, synthetic construct
  source 1..75: mol_type = other DNA
ataattttatggcgaaacatggcgtcagcgatgagcatatcgtgatgcgtgtgacgggctgcccgaacggctgtg

SEQ ID NO: 270651 - DNA, 75 bp, synthetic construct
  source 1..75: mol_type = other DNA
gagaactgcctgaaagcattgcgcgagggagataccctagtagtttgggcactagatcggctcggcgggtcattg

SEQ ID NO: 270652 - DNA, 75 bp, synthetic construct
  source 1..75: mol_type = other DNA
cgaacccgtacgagtcgcaactgcacgcagaagcgtatgagtgggcgaagaaaatctctgaacatctgctgccgc

SEQ ID NO: 270653 - DNA, 75 bp, synthetic construct
  source 1..75: mol_type = other DNA
gaaatcctggcgacgcttgatgaactgatagggcgctgggcgaaagaacgtgaagcgggtgaaggcttcggcgac

SEQ ID NO: 270654 - DNA, 75 bp, synthetic construct
  source 1..75: mol_type = other DNA
tatctgccgctggagcataccttggcggtggcggaagccgtcgtgacgactcagcgcgactggggtaaccgtacc

SEQ ID NO: 270655 - DNA, 75 bp, synthetic construct
  source 1..75: mol_type = other DNA
atccaccacgctgaggacggcgtctgcggcctatcttgaacagcacggattcaacaacaccggtggtattctttt

SEQ ID NO: 270656 - DNA, 75 bp, synthetic construct
  source 1..75: mol_type = other DNA
acccggaccaggtatatctgcgaaatcatgaaggctgcccgcactgctggcgtggcgtgacaggacgaacagtga

SEQ ID NO: 270657 - DNA, 75 bp, synthetic construct
  source 1..75: mol_type = other DNA
tcgaacacggcaacaagaaaacctacgcccgcacggcgagtgagtttggttatctgccgctggagcatacgttgg

SEQ ID NO: 270658 - DNA, 75 bp, synthetic construct
  source 1..75: mol_type = other DNA
tcgaacacggtaataagaaaacctacgcccgcacggcgagcgagtttggttatctgccgctggagcataccctgg

SEQ ID NO: 270659 - DNA, 75 bp, synthetic construct
  source 1..75: mol_type = other DNA
ccctcgcggacgagccacaaaagatcgactctatttttgtgtaccgatgctggatctggtggttccggaagaggg

SEQ ID NO: 270660 - DNA, 75 bp, synthetic construct
  source 1..75: mol_type = other DNA
cacgtactggcaacgcaaaccctgaaacagggccgtgcgaagaccatgaaaattgaagtccagggcaaagccgcg

SEQ ID NO: 270661 - DNA, 75 bp, synthetic construct
  source 1..75: mol_type = other DNA
tccaccagcaaccgtaactttgaaggccgccaggggcgcggcgggcgcacgcatctggtcagcccggcaatggct

SEQ ID NO: 270662 - DNA, 75 bp, synthetic construct
  source 1..75: mol_type = other DNA
catgagttgcgcctgcgacttggcgagcagttacgccgcgtgccgctggagaagctccagcgcggcagggcgggt

SEQ ID NO: 270663 - DNA, 75 bp, synthetic construct
  source 1..75: mol_type = other DNA
agggacaagatccagccagaggtttactggttgcatgggcaccagttcctgcgattgctgccagtacagttatag

SEQ ID NO: 270664 - DNA, 75 bp, synthetic construct
  source 1..75: mol_type = other DNA
tggatctggtggttccggaagagggggagctccgacaggccgtggcgatgctggaaacattacgcgaagagcaag

SEQ ID NO: 270665 - DNA, 75 bp, synthetic construct
  source 1..75: mol_type = other DNA
acggcgcgtttggcgcactggcctttggtatcggcacttccgaagttgaacacgtactggcaacgcaaaccctga

SEQ ID NO: 270666 - DNA, 75 bp, synthetic construct
  source 1..75: mol_type = other DNA
cgtatcgccattttgaactggttagagtactgactgaaggatattctataaatattcaacactaccttgatcacg

SEQ ID NO: 270667 - DNA, 75 bp, synthetic construct
  source 1..75: mol_type = other DNA
gcattgggacacgtatcccacggatgtataaagaaaacatcaccgagccggaaatcctggcgtcgcttgatgaac

SEQ ID NO: 270668 - DNA, 75 bp, synthetic construct
  source 1..75: mol_type = other DNA
cacgtactggcaacgcaaaccctgaaacaggggcgcgcaaaaaccatgaaaattgaagtccagggcaaagctgcg

SEQ ID NO: 270669 - DNA, 75 bp, synthetic construct
  source 1..75: mol_type = other DNA
gaccctgtgcaatatggcaatcgaaatgggcgcaaaagccggtctggttgcaccggacgaaaccacctttaacta

SEQ ID NO: 270670 - DNA, 75 bp, synthetic construct
  source 1..75: mol_type = other DNA
atttggcgtcgagctgtatgacctgaatcacccgtatcaggggatcgtccacgtaatggggccggaacagggcgt

SEQ ID NO: 270671 - DNA, 75 bp, synthetic construct
  source 1..75: mol_type = other DNA
atcccggcggtttgcttcaaactgaaagatggtgaagatccgggatacaccctgtacgacctctctgaacgtctg

SEQ ID NO: 270672 - DNA, 75 bp, synthetic construct
  source 1..75: mol_type = other DNA
cgctatcaggcgattaaaggtggaatgcttgtgttggttgtgactgaaacatgcgggagtttgccaatgattaca

SEQ ID NO: 270673 - DNA, 75 bp, synthetic construct
  source 1..75: mol_type = other DNA
acctatcccttagtaaaagaagagcaggtggcccacattcatcttgccgatgcggatgctcctttcccgaagttt

SEQ ID NO: 270674 - DNA, 75 bp, synthetic construct
  source 1..75: mol_type = other DNA
gcgaagttgtcgcgtgaggcgattattgctggcggtggtcactggcgactgcatttgtgggtaatgtgcagcacc

SEQ ID NO: 270675 - DNA, 75 bp, synthetic construct
  source 1..75: mol_type = other DNA
attatgccacaaaaggacttcttcctgatggggagcaagggcctgcgcaaaaaataaggagaagcctagggttaa

SEQ ID NO: 270676 - DNA, 75 bp, synthetic construct
  source 1..75: mol_type = other DNA
atgctcgttacgcccgtaaaataccgccttactgctttaactgttccgcgtgcgcatagccgcattcaccgcatc

SEQ ID NO: 270677 - DNA, 75 bp, synthetic construct
  source 1..75: mol_type = other DNA
ttaacgtcgccaaaagcatggcatgctaatgtaaaagagtcatcacccgccttcttcaaacttcatgaaaacggt

SEQ ID NO: 270678 - DNA, 75 bp, synthetic construct
  source 1..75: mol_type = other DNA
cagaaaatgcagttggaacaacagctggtggccgccgcccctaaagtcgattttgccgaccgggtatcagcggct

SEQ ID NO: 270679 - DNA, 75 bp, synthetic construct
  source 1..75: mol_type = other DNA
ctggcacccacctaccgtaaccagctggcgtttatcgatatcttctttaaggggatgaataacaccaactacaac

SEQ ID NO: 270680 - DNA, 75 bp, synthetic construct
  source 1..75: mol_type = other DNA
cttctgaaggaccagttcaggtacaaaactgaagaagtattcgactttaaacttattagtcccacaaaagccgaa

SEQ ID NO: 270681 - DNA, 75 bp, synthetic construct
  source 1..75: mol_type = other DNA
gtaatggaggccgaggaccaggtggcaacgcaaggggaggccacgcgcaagtatctcgaccgggacaaaaaagcg

SEQ ID NO: 270682 - DNA, 75 bp, synthetic construct
  source 1..75: mol_type = other DNA
acactgaaagttcttcgttcttcactggatgcagcaaaaattttcacacagacggcagatgctcaggaactggcc

SEQ ID NO: 270683 - DNA, 75 bp, synthetic construct
  source 1..75: mol_type = other DNA
aatggaatcctgatcgggaactttgcaaaggtcgttggacttaagcaaaacgcccttttctcatggttgcgccag

SEQ ID NO: 270684 - DNA, 75 bp, synthetic construct
  source 1..75: mol_type = other DNA
gggtcggtacgattagcagagctggaagcggaagtgttgcagcgggtgatgcaacgtggtgaatttgaaactcgc

SEQ ID NO: 270685 - DNA, 75 bp, synthetic construct
  source 1..75: mol_type = other DNA
atggttttttgtgagctaccggttgggagccaaaactctcgttcgcagacgtcttacggtatttgtatcggtgta

SEQ ID NO: 270686 - DNA, 75 bp, synthetic construct
  source 1..75: mol_type = other DNA
gtctcgatccatctctgtcaaattttggcgttgccatcggagaaatagaactggattcaggtgcattgcaggtca

SEQ ID NO: 270687 - DNA, 75 bp, synthetic construct
  source 1..75: mol_type = other DNA
tgctcggcgggatggcgatgaaatggcgttggcgcaagcgtatggaagccgcaggcaaacccacggataaaccaa

SEQ ID NO: 270688 - DNA, 75 bp, synthetic construct
  source 1..75: mol_type = other DNA
gctgcaatcgacctgcgttgcgtaaacatggttgccgatctgtggcatgcgcctgcaccgaaaaatggtcaggcc

SEQ ID NO: 270689 - DNA, 75 bp, synthetic construct
  source 1..75: mol_type = other DNA
ctgttctggcgttatttattagcccagttgtggttgcaatagcaggagaacaatctcactgtacaaaaatcaacg

SEQ ID NO: 270690 - DNA, 75 bp, synthetic construct
  source 1..75: mol_type = other DNA
ccctggttgtgttgaatggcgtggcgttattgcctcaatttgcctgtaaacaggggcttgcgaacggtgaactgg

SEQ ID NO: 270691 - DNA, 75 bp, synthetic construct
  source 1..75: mol_type = other DNA
atgacaaacatgatctcatatcagggacttgttcgcaccttccctaatttttccgggaccgtaaaatatagtggc

SEQ ID NO: 270692 - DNA, 75 bp, synthetic construct
  source 1..75: mol_type = other DNA
cttatggtggcgtgttatctaatttttccgggaccgtaaaatatagtggcagtagctatccatttccgaccacca

SEQ ID NO: 270693 - DNA, 75 bp, synthetic construct
  source 1..75: mol_type = other DNA
attggttcttccgaggcctgtatgctcggcgggatggcgatgaaatggcgttggcgcaagcgtatggaagctgca

SEQ ID NO: 270694 - DNA, 75 bp, synthetic construct
  source 1..75: mol_type = other DNA
atctgcattctgttgatggcgcgcctatatttgatgttaaaaaaggtgatacgtcttattccctgattagctgcc

SEQ ID NO: 270695 - DNA, 75 bp, synthetic construct
  source 1..75: mol_type = other DNA
ttccggaaccgtaaaatataatggcagtagctatccttttcctaccaccagcgaaacgccacgcgttgtttataa

SEQ ID NO: 270696 - DNA, 75 bp, synthetic construct
  source 1..75: mol_type = other DNA
ggggtattacctctccggcacaaccgcagatgcgggcaactcgattttcaccaataccgcgtcgttttcacctgc

SEQ ID NO: 270697 - DNA, 75 bp, synthetic construct
  source 1..75: mol_type = other DNA
cccttttccagctcgatccagagcgcgctcatgagtttacttttcagcaattacgccgcattaccggaacgccgt

SEQ ID NO: 270698 - DNA, 75 bp, synthetic construct
  source 1..75: mol_type = other DNA
ggcctgacgtttaaaaacccgcttggtctggctgctggccttgataaagatggcgaatgtattgatgcgctggga

SEQ ID NO: 270699 - DNA, 75 bp, synthetic construct
  source 1..75: mol_type = other DNA
atgactatcaaatcaaatacgccagcacacgacaaggactgctggcaaacgccgctctggctttttgatgcactg

SEQ ID NO: 270700 - DNA, 75 bp, synthetic construct
  source 1..75: mol_type = other DNA
ggtcggcaagatgtttattcagccgaaagtcacgctggaaaacggcgacgtgacgctgctcgataacgcgatcgg

SEQ ID NO: 270701 - DNA, 75 bp, synthetic construct
  source 1..75: mol_type = other DNA
tgcgccaaatcagtggattgtggtagatatcgccaacgatccgttaagtacgccgcatatctatttgtgttgcga

SEQ ID NO: 270702 - DNA, 75 bp, synthetic construct
  source 1..75: mol_type = other DNA
ttacgtcgcattaccggaacgccgtttgaagcacttgttcgacagaacgttccagcgaaaccggttaactgcatg

SEQ ID NO: 270703 - DNA, 75 bp, synthetic construct
  source 1..75: mol_type = other DNA
ctgttggcgcagagaaaaagtggcacgccgatgactttaaccgcgttgagcatgggcgatgaacgggcgttgcac

SEQ ID NO: 270704 - DNA, 75 bp, synthetic construct
  source 1..75: mol_type = other DNA
ctattggcgcagagaaaaagcggcacgccgatgactttaaccgcgttgagcatgggggatgaacgggcgttgcat

SEQ ID NO: 270705 - DNA, 75 bp, synthetic construct
  source 1..75: mol_type = other DNA
gggctggccctgcttcacccaggtggagcgttttactctcgacgcgccgtttatcaccctcgaacagcgtactga

SEQ ID NO: 270706 - DNA, 75 bp, synthetic construct
  source 1..75: mol_type = other DNA
atgaaaaagattatcgctggtgttgttcttgctctgggtttggttggtgctgcaaatgctaatacctattatgtg

SEQ ID NO: 270707 - DNA, 75 bp, synthetic construct
  source 1..75: mol_type = other DNA
gccgctttggctttttgatgcactggatattgagtttggattctggctggattctgcagcgagcgacaaaaatgc

SEQ ID NO: 270708 - DNA, 75 bp, synthetic construct
  source 1..75: mol_type = other DNA
cgcttgcctgcggtcattgccgtgcgccagtgtggcgaagtcgctttgcctgtaccgggaatgcgccagcgtatg

SEQ ID NO: 270709 - DNA, 75 bp, synthetic construct
  source 1..75: mol_type = other DNA
gatatcgccaacgatccgttaagtacgccgcatatctatttgtgttgtgatccggtgcgcccgtatgtttctgcc

SEQ ID NO: 270710 - DNA, 75 bp, synthetic construct
  source 1..75: mol_type = other DNA
tgaaagccatggttggttatcgtcttggatcgacattttttgttatatggcttgatagagagttcaacctataca

SEQ ID NO: 270711 - DNA, 75 bp, synthetic construct
  source 1..75: mol_type = other DNA
ctgcgcaaccgcctaagccacccggagaattatgcgggttgcaatgtcgctatgttcctcggctcttatccactt

SEQ ID NO: 270712 - DNA, 75 bp, synthetic construct
  source 1..75: mol_type = other DNA
ctacatcacgccgcagttttcccgcactcatatcaacttccagcgcgtccccactgttgacacgtctaacccttt

SEQ ID NO: 270713 - DNA, 75 bp, synthetic construct
  source 1..75: mol_type = other DNA
ggctaaaggcagtacgggaccgggttcacaatgaactcaatgccggacatccggtaccggggtttaaactggtaa

SEQ ID NO: 270714 - DNA, 75 bp, synthetic construct
  source 1..75: mol_type = other DNA
cagcgactttgaagatctgacaaagcctgtcagcgaaataatcaccaatgccagcgcacgtgtacctctgttaac

SEQ ID NO: 270715 - DNA, 75 bp, synthetic construct
  source 1..75: mol_type = other DNA
atgctgtatgactttgagactgtaagattatttattcaccagccaaggctcaaccacgtttcagaatggtcgtta

SEQ ID NO: 270716 - DNA, 75 bp, synthetic construct
  source 1..75: mol_type = other DNA
gaccaccaccaccagcctcgtgtttcgtaaaatattcgcgcagttaaatctgcatgcatccgaggtggaaggcga

SEQ ID NO: 270717 - DNA, 75 bp, synthetic construct
  source 1..75: mol_type = other DNA
agctggttcgcacaacacaatgcttcgctggtggtgatgcgcccggatcgctttgttgccgccaccgccattccg

SEQ ID NO: 270718 - DNA, 75 bp, synthetic construct
  source 1..75: mol_type = other DNA
ttgggtgaagccattggacgtttcaccagcactctcaataaacgcgtgctgttcctgggttccggtgggctttcc

SEQ ID NO: 270719 - DNA, 75 bp, synthetic construct
  source 1..75: mol_type = other DNA
gcggcgtggttacgccacaacataacgtcgcgcagcatgtagatttattggttggggtcgtgcctatcgttaacc

SEQ ID NO: 270720 - DNA, 75 bp, synthetic construct
  source 1..75: mol_type = other DNA
gaaatggacatggcgatccgcaaagcgcgcgatgccgggcggcatatcagttacttcggccccgaggctaacgat

SEQ ID NO: 270721 - DNA, 75 bp, synthetic construct
  source 1..75: mol_type = other DNA
cattagtggtgccgggcggcaaaatgggtctggcaatggagttaattatgctgccgctggtgcaacgactgatgg

SEQ ID NO: 270722 - DNA, 75 bp, synthetic construct
  source 1..75: mol_type = other DNA
tagcccgtttgtgctgacgttccagcatatgggcattacctttgccgccagcattcttaactttgttgtgctgac

SEQ ID NO: 270723 - DNA, 75 bp, synthetic construct
  source 1..75: mol_type = other DNA
ggcgctgaagtttaaagtaccgggcggagtggcaacaactatcgcgggtttgattttcttgctctttattatcgg

SEQ ID NO: 270724 - DNA, 75 bp, synthetic construct
  source 1..75: mol_type = other DNA
tgatcgcctcgctggcgacctttgctacggtgtgggtgtggattatgattttgctgtcgcagattgccttccgtc

SEQ ID NO: 270725 - DNA, 75 bp, synthetic construct
  source 1..75: mol_type = other DNA
gcacagtactatgaattcctgcgcctcggtcgtgaaggctatacaaaagtacagaacgcatcccatcgcacgttc

SEQ ID NO: 270726 - DNA, 75 bp, synthetic construct
  source 1..75: mol_type = other DNA
acctggccactttctgccagacctgggacgacgagaacgtccataaattgatggatttttcaataaagaaaaact

SEQ ID NO: 270727 - DNA, 75 bp, synthetic construct
  source 1..75: mol_type = other DNA
acctggccactttctgccagacctgggacgacgagaaagtccataaattgatggatttttccataaagaaaaact

SEQ ID NO: 270728 - DNA, 75 bp, synthetic construct
  source 1..75: mol_type = other DNA
tgcgggcgtgaaaataaatgcggtacagacctgctgaccaaagaactttacccggatgtgttttcatcatggtca

SEQ ID NO: 270729 - DNA, 75 bp, synthetic construct
  source 1..75: mol_type = other DNA
gtgacctacaccggtaactatgagttcccacaaccgctgcacgatgcgctggataaattccaggccgacaccggt

SEQ ID NO: 270730 - DNA, 75 bp, synthetic construct
  source 1..75: mol_type = other DNA
acagctacgaagcttcgctgatggcgctacatgatcgtgatgtctatcgcaccatggcgtgcggcatcgcgggcc

SEQ ID NO: 270731 - DNA, 75 bp, synthetic construct
  source 1..75: mol_type = other DNA
ggccgttggcaccaacaccattggttcttctgaggcctgtatgctcggcgggatggcgatgaaatggcgttggcg

SEQ ID NO: 270732 - DNA, 75 bp, synthetic construct
  source 1..75: mol_type = other DNA
cttcactctcggcggtgaagccaccgacatcgtggtgatgcgcattatgtgtcgtcgcggcttcgaaatggactt

SEQ ID NO: 270733 - DNA, 75 bp, synthetic construct
  source 1..75: mol_type = other DNA
tatcttgatggcaacgctcgtcagaacctggccactttttgccagacctgggacgacgaaaacgtccataaattg

SEQ ID NO: 270734 - DNA, 75 bp, synthetic construct
  source 1..75: mol_type = other DNA
gcacagtactatgaattcctgcgcctcggtcgtgaaggctatacaaaagtacagaacgcttccgaccgcacgttc

SEQ ID NO: 270735 - DNA, 75 bp, synthetic construct
  source 1..75: mol_type = other DNA
tgcgctggataaattccaggccgacaccggtatcgacatcgacatgcacatcgacgccgccagcggtggcttcct

SEQ ID NO: 270736 - DNA, 75 bp, synthetic construct
  source 1..75: mol_type = other DNA
tgaaatcgatcagtgcttcaggccataaattcggtctggctccgctgggctgcggctgggttatctggcgtgacg

SEQ ID NO: 270737 - DNA, 75 bp, synthetic construct
  source 1..75: mol_type = other DNA
atgcgcgatgatgtcgcatttcagattatcaatgatgaattatatcttgatggcaacgctcgtcagaacctggcc

SEQ ID NO: 270738 - DNA, 75 bp, synthetic construct
  source 1..75: mol_type = other DNA
cggcgtgtataaagctggttttgccaccagccagcctacgacgaggcggtggcgaaagtgtttgaatcgctggcg

SEQ ID NO: 270739 - DNA, 75 bp, synthetic construct
  source 1..75: mol_type = other DNA
accagccagcaagcctacgacgaagcggtggcgaaagtgtttgaatcgctggcgcgactggaacagattttaggt

SEQ ID NO: 270740 - DNA, 75 bp, synthetic construct
  source 1..75: mol_type = other DNA
gagttgcgtgagatcccgatgcgccccggtcagttgtttatggacccgaaacgcatgattgaagcctgcgacgaa

SEQ ID NO: 270741 - DNA, 75 bp, synthetic construct
  source 1..75: mol_type = other DNA
gatccgaactactcgattcacgttttggcgccaagccgatttcgactatcgcagaatcaaaacgttttccgctgc

SEQ ID NO: 270742 - DNA, 75 bp, synthetic construct
  source 1..75: mol_type = other DNA
gcacagtactatgaattcctgcgcctcggtcgtgaaggctatacaaaagtacagaacgcgtcctaccgcacgttc

SEQ ID NO: 270743 - DNA, 75 bp, synthetic construct
  source 1..75: mol_type = other DNA
gcacagtactatgaattcctgcgcctcggtcgtgaaggctatacaaaagtacagaacgcctccaatcgcacgttc

SEQ ID NO: 270744 - DNA, 75 bp, synthetic construct
  source 1..75: mol_type = other DNA
ggtccgaactactcgattcacgttttggcgctaagccgatttcgactatcgcagaatcaaaacgatttccgctgc

SEQ ID NO: 270745 - DNA, 75 bp, synthetic construct
  source 1..75: mol_type = other DNA
gttccgaactactcgattcacgttttggcgcgaagccgatttcgactatcgcagaatcaaaacgctttccgctgc

SEQ ID NO: 270746 - DNA, 75 bp, synthetic construct
  source 1..75: mol_type = other DNA
gttccgaactactcgattcacgttttggcgccaagccgatttcgactatcgcagaatcaaaacggtttccgctgc

SEQ ID NO: 270747 - DNA, 75 bp, synthetic construct
  source 1..75: mol_type = other DNA
taagaacgagaaagaagaatattatggttccgaagatggtaagtcttacatcaaatatctgcattctgtagatgg

SEQ ID NO: 270748 - DNA, 75 bp, synthetic construct
  source 1..75: mol_type = other DNA
aagggccgaacattatgaacggctacctgcgggtagagaagcctggtgtactggaagtgcctactgccgagaatg

SEQ ID NO: 270749 - DNA, 75 bp, synthetic construct
  source 1..75: mol_type = other DNA
aaggctacggcgtgactgaatgtgcgccagtggtgtccattaatgtgccaatggcggcgaggccgggcactgttg

SEQ ID NO: 270750 - DNA, 75 bp, synthetic construct
  source 1..75: mol_type = other DNA
cgtatacaccgataaaaaacgccactcaccagatagccgattggcagcaaaacggctggagctttaccccgttga

SEQ ID NO: 270751 - DNA, 75 bp, synthetic construct
  source 1..75: mol_type = other DNA
agacgcccacgggaacattaaggccatcaaaggcggtaagatgatgcgtaacctcgaaaacggcaacttcatcaa

SEQ ID NO: 270752 - DNA, 75 bp, synthetic construct
  source 1..75: mol_type = other DNA
acgctaggatcgtgggaaagcaacgaagcaatgatgcttgaaaacatcaataagcacattaaatcgcgcatgaaa

SEQ ID NO: 270753 - DNA, 72 bp, synthetic construct
  source 1..72: mol_type = other DNA
tccctgaaatatctcagcgatcacccgaaactgcagggtattgcccagcagaacagctttaaacatacctga

SEQ ID NO: 270754 - DNA, 75 bp, synthetic construct
  source 1..75: mol_type = other DNA
tcctgcgcctcggtcgtgaaggctataccaaagtacagaacgcttcctaccaggttgccgcttatctggcggatg

SEQ ID NO: 270755 - DNA, 75 bp, synthetic construct
  source 1..75: mol_type = other DNA
gcgtgatgaagaagcgctgccgcaggaactggtgttcaacgttgactacctcggcggtcagattggtactttcgc

SEQ ID NO: 270756 - DNA, 75 bp, synthetic construct
  source 1..75: mol_type = other DNA
gtttaatgctgcccaatgcgggcattagtgcggcagtgatttttggggccatcgcccgtcgccgtattccggcaa

SEQ ID NO: 270757 - DNA, 75 bp, synthetic construct
  source 1..75: mol_type = other DNA
cctggttgagcaggggcgtccagtggtgatattcccggaagggcgaatcaccaccaccggctcgctgatgaaaat

SEQ ID NO: 270758 - DNA, 75 bp, synthetic construct
  source 1..75: mol_type = other DNA
ctacgatggcgcgggttttgtcgcggcgaagtctggtgcaacggttattcctgtgcgtattgaaggggcggaact

SEQ ID NO: 270759 - DNA, 75 bp, synthetic construct
  source 1..75: mol_type = other DNA
gcatttcagattatcaatgatgaattatatcttgatggcaacgctcgtcagaacctggccactttctgccagacc

SEQ ID NO: 270760 - DNA, 75 bp, synthetic construct
  source 1..75: mol_type = other DNA
atgctgcgctgccgtaaatctggtgtactgaccggtttaccagatggttatggtcgtgggcgtatcatcggtgac

SEQ ID NO: 270761 - DNA, 75 bp, synthetic construct
  source 1..75: mol_type = other DNA
gcgacgccagccaccacggaattgtgggaaaaagtgatggaaggcattcgtattgaaaacgcaacccacgcgccg

SEQ ID NO: 270762 - DNA, 75 bp, synthetic construct
  source 1..75: mol_type = other DNA
gaagcggatatcgaaggcggtcaacatctcaacgtcaacgttatgaaccgggaaatgttgttggatgccatcgag

SEQ ID NO: 270763 - DNA, 75 bp, synthetic construct
  source 1..75: mol_type = other DNA
gagcgtgtagacaccattgcctgcgatctggttgaacgctttatgaagaaaattaaagctctgccaacttatcgc

SEQ ID NO: 270764 - DNA, 75 bp, synthetic construct
  source 1..75: mol_type = other DNA
gctgcacgatcgtgatgtctatcgcaccatggcttgcggcatcgcgggtctgtcggtggcgacggattcactttc

SEQ ID NO: 270765 - DNA, 75 bp, synthetic construct
  source 1..75: mol_type = other DNA
atgcccgcgtgaaaccaatccgtgacgaaaacggcctggcggtggactttgaaatcgacggtgaatatccgcagt

SEQ ID NO: 270766 - DNA, 75 bp, synthetic construct
  source 1..75: mol_type = other DNA
tatcgaaaacgcaacccacgcgccggttgatttcgataccaatattgccaccacaattaccgctcatgatgcggg

SEQ ID NO: 270767 - DNA, 75 bp, synthetic construct
  source 1..75: mol_type = other DNA
gcattccagattatcaatgacgaattatatcttgatggcaacgctcgtcagaacctggccactttctgccagacc

SEQ ID NO: 270768 - DNA, 75 bp, synthetic construct
  source 1..75: mol_type = other DNA
ctgcacgaaatgcgcgatgatgttgcatttcagattatcaatgatgaattatatcttgatggcaacgctcgttag

SEQ ID NO: 270769 - DNA, 75 bp, synthetic construct
  source 1..75: mol_type = other DNA
atcaacggcgggatggacgagaagctgaagattcaggtgggcccgaaaatggctccgctgatggacgacgtgctg

SEQ ID NO: 270770 - DNA, 75 bp, synthetic construct
  source 1..75: mol_type = other DNA
tgccatcaaatatgcccgcgtgaaaccaatccgtgacgaaaacggcctggcggtggactttgaaatcgacggtga

SEQ ID NO: 270771 - DNA, 75 bp, synthetic construct
  source 1..75: mol_type = other DNA
gaggagctggcggaacatcgtcgtgcgctgttgcagattcaggaaatggcggcgaaatacggttttgatatctcc

SEQ ID NO: 270772 - DNA, 75 bp, synthetic construct
  source 1..75: mol_type = other DNA
tccgctcagaactactcgattcacgttttggtgccaagcctatttcgactatcgctgactcaaaacgatttccgc

SEQ ID NO: 270773 - DNA, 75 bp, synthetic construct
  source 1..75: mol_type = other DNA
tccgctcagaactactcgattcacgttttggtgccaagtcgatttcaactatcgctgactcaaaacgatttccgc

SEQ ID NO: 270774 - DNA, 75 bp, synthetic construct
  source 1..75: mol_type = other DNA
tccgctcagaactactcgattcacgttttggtgccaagacgatttctactatcgctgactcaaaacgatttccgc

SEQ ID NO: 270775 - DNA, 75 bp, synthetic construct
  source 1..75: mol_type = other DNA
atggataagaagcaagtaacggatttaaggtcggaactactcgattcacgttttggcgcaaagtccatttccact

SEQ ID NO: 270776 - DNA, 75 bp, synthetic construct
  source 1..75: mol_type = other DNA
atggataagaagcaagtaacggatttaaggtcggaactactcgattcacgttttggcgcaaagtcaatttcaact

SEQ ID NO: 270777 - DNA, 75 bp, synthetic construct
  source 1..75: mol_type = other DNA
tccgctcagaactactcgattcacgttttggtgccaaggctatttccactatcgctgactcaaaacgatttccgc

SEQ ID NO: 270778 - DNA, 75 bp, synthetic construct
  source 1..75: mol_type = other DNA
ggtcagaactactcgattcacgttttggtgccaaggccatttcgactatcgcagaatcaaaacgctttccgctgc

SEQ ID NO: 270779 - DNA, 75 bp, synthetic construct
  source 1..75: mol_type = other DNA
gctctgaactactcgattcacgttttggtgctaaggccatttcgactatcgcagaatcaaaacgctttccgctgc

SEQ ID NO: 270780 - DNA, 75 bp, synthetic construct
  source 1..75: mol_type = other DNA
gatcggaactactcgattcacgttttggtgcgaaggccatttcgactatcgcagaatcaaaacgctttccgctgc

SEQ ID NO: 270781 - DNA, 75 bp, synthetic construct
  source 1..75: mol_type = other DNA
agcggtggcttcctggcaccgttcgtcgccccggatatcgtctgggacttccgcctgccgcgtgtgaaatcgatc

SEQ ID NO: 270782 - DNA, 75 bp, synthetic construct
  source 1..75: mol_type = other DNA
aaaactggatcgacaaagaagaatatccgcaatccgcagccatcgacctgcgttgcgtaaacatggttgccgatc

SEQ ID NO: 270783 - DNA, 75 bp, synthetic construct
  source 1..75: mol_type = other DNA
ggtccgaactactcgattcacgttttggtgcaaaggccatttcgactatcgcagaatcaaaacgctttccgctgc

SEQ ID NO: 270784 - DNA, 75 bp, synthetic construct
  source 1..75: mol_type = other DNA
atggataagaagcaagtaacggatttaaggtcggaactactcgattcacgttttggcgcaaagtcgatttcgact

SEQ ID NO: 270785 - DNA, 75 bp, synthetic construct
  source 1..75: mol_type = other DNA
atgctgaacgactacagagtgaaattgagaacgaaacaggcatccgttttggtatcatcgaaaaagatgcgtttg

SEQ ID NO: 270786 - DNA, 75 bp, synthetic construct
  source 1..75: mol_type = other DNA
ggtgcatgggctgaaacaaccgaaagcaataatgcaggccgcgaaaatgcggaacgcggttataacctcatcatg

SEQ ID NO: 270787 - DNA, 75 bp, synthetic construct
  source 1..75: mol_type = other DNA
tttctgaaatgcagcctgtagcgaaagcaatggtcagtttcagcaaagcaacaatcaaacaaagtcagtcaggtc

SEQ ID NO: 270788 - DNA, 75 bp, synthetic construct
  source 1..75: mol_type = other DNA
caaaagcctgtatgcgggtattccatacgaatactacctatatgattctgcaaaacctgctgatgtgcgaaattt

SEQ ID NO: 270789 - DNA, 75 bp, synthetic construct
  source 1..75: mol_type = other DNA
ggtatcatcgaaaaagatgcttttgcccatgtggttacaaattctggatcagaatctaaagctataggagtatca

SEQ ID NO: 270790 - DNA, 75 bp, synthetic construct
  source 1..75: mol_type = other DNA
agcccggaattcgaagcgttatggcagcgcatttgtcaaaaaacgctgtaccgtctggcatttgatgaagatgaa

SEQ ID NO: 270791 - DNA, 75 bp, synthetic construct
  source 1..75: mol_type = other DNA
tgtgttgaaagcatttctggtatctcatcagggacgtagtgatgaagccagtattgagatttcaggggatttgtt

SEQ ID NO: 270792 - DNA, 75 bp, synthetic construct
  source 1..75: mol_type = other DNA
atggataagaagcaagtaacggatttaaggtcggaactactcgattcacgttttggcgcgaagtcgatttcaact

SEQ ID NO: 270793 - DNA, 75 bp, synthetic construct
  source 1..75: mol_type = other DNA
atggataagaagcaagtaacggatttaaggtcggaactactcgattcacgttttggcgccaagtccatttcaact

SEQ ID NO: 270794 - DNA, 75 bp, synthetic construct
  source 1..75: mol_type = other DNA
tgtttctgagaaatgagttgaaagaacataacaaacaattggttgaggcagcacagcaagctaataccacacact

SEQ ID NO: 270795 - DNA, 75 bp, synthetic construct
  source 1..75: mol_type = other DNA
ggggcagaccgtaatcaagatccttttatctggggagcgattctcggagaagaggtgggagaatttcatcaggct

SEQ ID NO: 270796 - DNA, 75 bp, synthetic construct
  source 1..75: mol_type = other DNA
atattcgaacgtcatcttgataaaggaacgcgcccgggggggttacccacgcctttccgttatgcatggggcggt

SEQ ID NO: 270797 - DNA, 75 bp, synthetic construct
  source 1..75: mol_type = other DNA
tgcatgtataccaacttttcaaacgctaatttaacaaattgtaaaatctctaatgcaaacttttcgaatgcaaaa

SEQ ID NO: 270798 - DNA, 75 bp, synthetic construct
  source 1..75: mol_type = other DNA
ccaatgacagtaccgagaaacaagccaataacagtaccgataaacaagccaataacagtaccgataaacaagcca

SEQ ID NO: 270799 - DNA, 75 bp, synthetic construct
  source 1..75: mol_type = other DNA
accagttttaatgaagcccgtttaaagaaagaagtgaatagcagtttttccattccgggtttaacgtcttatcag

SEQ ID NO: 270800 - DNA, 75 bp, synthetic construct
  source 1..75: mol_type = other DNA
agagatgaaagctgcgctgcgggaacagctcggtgatgtgcaacaggttttcgatacactctctgcaaaaatcga

SEQ ID NO: 270801 - DNA, 75 bp, synthetic construct
  source 1..75: mol_type = other DNA
catttattatcacccttggtaccaacgctattttccgtgggatcacgctggtgatctccgatgccaactcggtat

SEQ ID NO: 270802 - DNA, 75 bp, synthetic construct
  source 1..75: mol_type = other DNA
gtaaccttagcaacgcttatcttgaatatatagatttcacaacagtgattctatatgaaacacctgcaacacctg

SEQ ID NO: 270803 - DNA, 75 bp, synthetic construct
  source 1..75: mol_type = other DNA
cccaaatgaagtactgaaagcagcagtcaagtcagaatggtttgagcgtcacaagattgaattaagttattgggg

SEQ ID NO: 270804 - DNA, 75 bp, synthetic construct
  source 1..75: mol_type = other DNA
atgttatgtattaaattcgaatatttgacagataaaatgattaagcatgtatcagacctgctcatcaaagaagat

SEQ ID NO: 270805 - DNA, 75 bp, synthetic construct
  source 1..75: mol_type = other DNA
atcacatgaaccaacagagaaagaaacaaaagaatttataaaaagcatcaatttattaattgaaaaaatagactc

SEQ ID NO: 270806 - DNA, 75 bp, synthetic construct
  source 1..75: mol_type = other DNA
gtatcttgaacacatagatttcacaaccgtgattctatatgaaacatctaaaatacctggaatacctggaacacc

SEQ ID NO: 270807 - DNA, 75 bp, synthetic construct
  source 1..75: mol_type = other DNA
catgtataccaatttttcaaacactaatttgacaaattgtgaactctctaatgcaaacttttcgaatgcaaaatt

SEQ ID NO: 270808 - DNA, 75 bp, synthetic construct
  source 1..75: mol_type = other DNA
aaaacaaattaattatgatataaatcatttgaatgatggtttgattaagcgtgtactgaatctttttattcacct

SEQ ID NO: 270809 - DNA, 75 bp, synthetic construct
  source 1..75: mol_type = other DNA
atgacttttacctatgagacgctgccaacagatgcaaaaacagctatccgtgagatgaaagcggagctgcgaaaa

SEQ ID NO: 270810 - DNA, 75 bp, synthetic construct
  source 1..75: mol_type = other DNA
taaatttgcccgctactgggatgtggagctgcgtgagatccctatgcgccccggtcagttgtttatggacccgaa

SEQ ID NO: 270811 - DNA, 75 bp, synthetic construct
  source 1..75: mol_type = other DNA
tggaaaacactgtcctgcaacaggcgttgtggcaggcgctggaagcgcatccgaaagtaacgttacgtgtgccag

SEQ ID NO: 270812 - DNA, 75 bp, synthetic construct
  source 1..75: mol_type = other DNA
atggatattctgcagaagcaggcagctctgcagcaggcaacgaaaaaagcattagccgaagccattatgtatcca

SEQ ID NO: 270813 - DNA, 75 bp, synthetic construct
  source 1..75: mol_type = other DNA
acctggccactttctgccagacctgggacgacgagaaggtccataaattgatggatttttcgataaaaaaaaact

SEQ ID NO: 270814 - DNA, 75 bp, synthetic construct
  source 1..75: mol_type = other DNA
acctggccactttctgccagacctgggacgacgagaacgtccataaattgatggatttctcgattaaaaaaaact

SEQ ID NO: 270815 - DNA, 75 bp, synthetic construct
  source 1..75: mol_type = other DNA
acctggccactttctgccagacctgggacgacgagaatgtccataaattgatggatttatcgatcaaaaaaaact

SEQ ID NO: 270816 - DNA, 75 bp, synthetic construct
  source 1..75: mol_type = other DNA
aaatctatcccatttactggtcacaggcgcagatgcaagcgcggcagagcgacaatatgtctgcggttcaatctt

SEQ ID NO: 270817 - DNA, 75 bp, synthetic construct
  source 1..75: mol_type = other DNA
ggccggaagtttcttatagtgatattgccgcaggtacagtaagcgatgccactcgcaatgaaattaagcgtcgcg

SEQ ID NO: 270818 - DNA, 75 bp, synthetic construct
  source 1..75: mol_type = other DNA
tgtggggtcgctcctggcaaagttctgcccatttcagagaaatggcatccactactgattaaagcactcacttcc

SEQ ID NO: 270819 - DNA, 75 bp, synthetic construct
  source 1..75: mol_type = other DNA
ctcggcgtgaaatatttcccggccatgatgctggttgacccgaaacagggcagtgttcgcccgttatcatacggc

SEQ ID NO: 270820 - DNA, 75 bp, synthetic construct
  source 1..75: mol_type = other DNA
agattatgaagcaaactgggaaggccgctttaagctggaggatctgaacattcacggtaagcgagcgttgggcat

SEQ ID NO: 270821 - DNA, 75 bp, synthetic construct
  source 1..75: mol_type = other DNA
atgccaatcactttgatgatgtgtataaaggccccggtgacagctttttcggctcgctggaggcgtctcgccccg

SEQ ID NO: 270822 - DNA, 75 bp, synthetic construct
  source 1..75: mol_type = other DNA
acgggtatataccatgcatgatgctgaccgccatcaggatcatctggcagtttatcaggcatcaatggttgcctg

SEQ ID NO: 270823 - DNA, 75 bp, synthetic construct
  source 1..75: mol_type = other DNA
tctgcaactcaatgatatgatttcctccctggaagatattattaaaaatcaaattcccgctgatgtagaaatcat

SEQ ID NO: 270824 - DNA, 75 bp, synthetic construct
  source 1..75: mol_type = other DNA
catttatgcctcaggtttttgaatccgtgaaagaagaatatttttctcttaaactgactgcgttaaaaaaacata

SEQ ID NO: 270825 - DNA, 75 bp, synthetic construct
  source 1..75: mol_type = other DNA
tgaaaaagccaggtgcagccattcagatcgcggcggctgttaataaacagtacgcgccggaactggatattgttg

SEQ ID NO: 270826 - DNA, 75 bp, synthetic construct
  source 1..75: mol_type = other DNA
agcaaagatgcgttggctgcaattcttaaaaagccgggcgcagctattcagatcgcggcggcggtaaataaacaa

SEQ ID NO: 270827 - DNA, 75 bp, synthetic construct
  source 1..75: mol_type = other DNA
cgttcagaagcagcgtggctgggtgccgaatggcgcgatccacgcgatcgccgatgtgctgggtattccggcgag

SEQ ID NO: 270828 - DNA, 75 bp, synthetic construct
  source 1..75: mol_type = other DNA
cggatggcggcgctgatgttcacgatgaagtccggcaccagtggtgatgtgattgagctgattggtaaatctatc

SEQ ID NO: 270829 - DNA, 75 bp, synthetic construct
  source 1..75: mol_type = other DNA
tggtcgttgtagcaccgaaagccagcgagcagaaagatttcatcatcgacagcaaaaccaactggacttcgctgc

SEQ ID NO: 270830 - DNA, 75 bp, synthetic construct
  source 1..75: mol_type = other DNA
ttattgcatggtctacgggcgtcgatgccaaaacggcgattggtcttggcctgccgttcagcctgttaatgcagt

SEQ ID NO: 270831 - DNA, 75 bp, synthetic construct
  source 1..75: mol_type = other DNA
gcgcatcgctagctcgccttgcgcaaaaaggaatttatattgctaccgtggtgatgactaccggtaattctggcg

SEQ ID NO: 270832 - DNA, 75 bp, synthetic construct
  source 1..75: mol_type = other DNA
ggggcaggcggaagggcgtgatgtctggttgcatcaacaacaggcggcgctggactggctggcagcgcaggggga

SEQ ID NO: 270833 - DNA, 75 bp, synthetic construct
  source 1..75: mol_type = other DNA
ttgtcctgtcgcaggaacgcccggcggaaagtgatacgttcaccatcgaatgccggtcatttgcgccggagctgc

SEQ ID NO: 270834 - DNA, 75 bp, synthetic construct
  source 1..75: mol_type = other DNA
cattactggtcctggtgactgtcgccggttgccatcaggtaccttccactcgtaagcaggccaccgttcccccga

SEQ ID NO: 270835 - DNA, 75 bp, synthetic construct
  source 1..75: mol_type = other DNA
gcaccgcgtcgtttcggggaaacggctatcactggttggaaaaaggaaaagccactgctgatccgcgaccgttcc

SEQ ID NO: 270836 - DNA, 75 bp, synthetic construct
  source 1..75: mol_type = other DNA
cctaactctgaagatttatctgttaagcataaagactggcagcaactagtgcataaataccaaggaattaaggcg

SEQ ID NO: 270837 - DNA, 75 bp, synthetic construct
  source 1..75: mol_type = other DNA
accgctccaagatcaagaattatctttatcctcagctcggggcgctgaaagtagcacagataacagagggtgata

SEQ ID NO: 270838 - DNA, 75 bp, synthetic construct
  source 1..75: mol_type = other DNA
ccgtccggttatcgtgtgggcgctggataacgggcgtgcgggtgagcgttacgcgaaaaaacatgcagaacgcag

SEQ ID NO: 270839 - DNA, 75 bp, synthetic construct
  source 1..75: mol_type = other DNA
gctccatcagcaaaaggggatgataagtttatcaccaccgactatttgcaacagtgccgatttttttgtggttgt

SEQ ID NO: 270840 - DNA, 75 bp, synthetic construct
  source 1..75: mol_type = other DNA
tgtccagacaggcaaacgccggaaaaggagtagccgaagccagagagccggaagtgctgaaatgccggatattca

SEQ ID NO: 270841 - DNA, 75 bp, synthetic construct
  source 1..75: mol_type = other DNA
caatcgcagatgttgtattaccattaacatctaacactcaacctcaggaactaaaatctagaatcgactctgaat

SEQ ID NO: 270842 - DNA, 75 bp, synthetic construct
  source 1..75: mol_type = other DNA
attcagatcacccaaaatctgcaattttttttctgtttttcatagtagtaaatttaatcctatggggttggaaca

SEQ ID NO: 270843 - DNA, 75 bp, synthetic construct
  source 1..75: mol_type = other DNA
gatcaatgaacgtctggctagggacagcacacctgagcacataaaatgcagtgagttcaatcggctgttggtccc

SEQ ID NO: 270844 - DNA, 75 bp, synthetic construct
  source 1..75: mol_type = other DNA
tgtttttactaaagccctttttgatgaatataaaatccgtgcagtacaagctgcacaaacaatcgagaccagcga

SEQ ID NO: 270845 - DNA, 75 bp, synthetic construct
  source 1..75: mol_type = other DNA
gggtcacagcactatcaaagtgacggagctttacttgcacgcttccccggcgcgttaccacgaagctgttaaccg

SEQ ID NO: 270846 - DNA, 75 bp, synthetic construct
  source 1..75: mol_type = other DNA
agtccaggtgaagccacttttatcgttcgcaaaagtatctgtggcgaaaatatctataagcgtattggacgatat

SEQ ID NO: 270847 - DNA, 75 bp, synthetic construct
  source 1..75: mol_type = other DNA
aaggtgatcgcgttgttgttgatgggcaggcttatgaagcgctgttctggacgcaaagtgacaaccctgctctgg

SEQ ID NO: 270848 - DNA, 75 bp, synthetic construct
  source 1..75: mol_type = other DNA
tccttcacgcgctgaccacctgcctgagcgccgcctttacccgtggactgagtggtgtcgaaccgcagtggaatc

SEQ ID NO: 270849 - DNA, 75 bp, synthetic construct
  source 1..75: mol_type = other DNA
gtaaacggcggcgattccaacatctggtacaaggatgtggatatcgtggtcagtccgttcatcaccaccccggca

SEQ ID NO: 270850 - DNA, 75 bp, synthetic construct
  source 1..75: mol_type = other DNA
gccatgctggcacatcccgaactggactataacctgcagtacagccattacaacggcacggtacggaaccagctg

SEQ ID NO: 270851 - DNA, 75 bp, synthetic construct
  source 1..75: mol_type = other DNA
aaaggggattacaacaccggctctcatggtggggcggtcgcgtgggtgcaacagcacggcgcaaccatcaaaggc

SEQ ID NO: 270852 - DNA, 75 bp, synthetic construct
  source 1..75: mol_type = other DNA
tgcaggataaatggaagtcagaaggcaaagatattgctatctggtacaccttgccaattctgccgactggcctga

SEQ ID NO: 270853 - DNA, 75 bp, synthetic construct
  source 1..75: mol_type = other DNA
atttattattgtggttccttcagttgctatcaaggaaggcgtttataaaacactacaaataactgaagaacattt

SEQ ID NO: 270854 - DNA, 75 bp, synthetic construct
  source 1..75: mol_type = other DNA
attttagtgccctaaaagaagaacagagtaatgcagcaaaatatgttagagctacagatcttacagaaataatgg

SEQ ID NO: 270855 - DNA, 75 bp, synthetic construct
  source 1..75: mol_type = other DNA
caaataccggaaagaggtcttaaacagccctgaattcgaagcgttatggcagcgcatttgtcaaaaaacgctgta

SEQ ID NO: 270856 - DNA, 75 bp, synthetic construct
  source 1..75: mol_type = other DNA
atgaaagatttaccggacatcaaagaatgggttggcgagcgtcagctggcaacgctggacggttatggttacacc

SEQ ID NO: 270857 - DNA, 75 bp, synthetic construct
  source 1..75: mol_type = other DNA
gacctgtgtggggtcaaaagcagcactgaacaaagcgaactatgaagccgctgtctccgcaatgatgggtatcac

SEQ ID NO: 270858 - DNA, 75 bp, synthetic construct
  source 1..75: mol_type = other DNA
cgatcagattggtcagtattccgtgattgctgagcagcttggccgcgataccacgattttcccggacaagctgtc

SEQ ID NO: 270859 - DNA, 75 bp, synthetic construct
  source 1..75: mol_type = other DNA
tgcaaaattactggactcagcaggccgggcttttcaccatgagcgccagaaaggccatgctggcacatcctgaac

SEQ ID NO: 270860 - DNA, 75 bp, synthetic construct
  source 1..75: mol_type = other DNA
atgacctgcggcggatggcagaagaaaaagctatcccggtgattttcgcttcccgtgccagttatcttgatgatg

SEQ ID NO: 270861 - DNA, 75 bp, synthetic construct
  source 1..75: mol_type = other DNA
gtttggtttgctgaaagcagggcggcaaagcggggaaagcggagtcgatcgttactttgagcaacaggtttcgct

SEQ ID NO: 270862 - DNA, 75 bp, synthetic construct
  source 1..75: mol_type = other DNA
tggcggcatttaccgatgcaacgccaaccacacttgatgatatacctgttacctgggccagcacgccagcgcggg

SEQ ID NO: 270863 - DNA, 75 bp, synthetic construct
  source 1..75: mol_type = other DNA
cctccagagcggggcgcgacttctcagagttcatgaaaggtgagaagggcatgatggaagcattggcctcggtgg

SEQ ID NO: 270864 - DNA, 75 bp, synthetic construct
  source 1..75: mol_type = other DNA
caacggctgcgtcaatcatcactttgtcagttacatgatgaggaactcgatcatgcaggcatttatggacatggc

SEQ ID NO: 270865 - DNA, 75 bp, synthetic construct
  source 1..75: mol_type = other DNA
tgccgtttggatacaacaatcccctgagcgttatgttcaaccagttacttaaacaggtaagaaagtctgatggcg

SEQ ID NO: 270866 - DNA, 75 bp, synthetic construct
  source 1..75: mol_type = other DNA
agagcgtaacgccacgttttaaagaagcattgcgctggatggcggcaaaccgcaaagcgtaccatgtagtggatg

SEQ ID NO: 270867 - DNA, 75 bp, synthetic construct
  source 1..75: mol_type = other DNA
cgcaaagcgtaccatgtggtggatgaagcggaattgacaaaagcgtcaggcacggaacatcacggcggcgtttgc

SEQ ID NO: 270868 - DNA, 75 bp, synthetic construct
  source 1..75: mol_type = other DNA
cagaagatgattcccccacgctgcgtacacgcacacatgcttttacttgaactggcacaccgccgagttacatca

SEQ ID NO: 270869 - DNA, 75 bp, synthetic construct
  source 1..75: mol_type = other DNA
gcagggacggatggtttttttgcttcacggcggtaaagacggcgagcagctggcacagcggttttcactgttact

SEQ ID NO: 270870 - DNA, 75 bp, synthetic construct
  source 1..75: mol_type = other DNA
cttaggcatcttaaatttgatgttactatatataataattctacaaatatcgggcctgctagttcgcgcaataaa

SEQ ID NO: 270871 - DNA, 75 bp, synthetic construct
  source 1..75: mol_type = other DNA
aacgttgccgggctgaatatctctgtcgcaaccggcgttttgcttggtgaatggtggcgtcagaataaagcctga

SEQ ID NO: 270872 - DNA, 75 bp, synthetic construct
  source 1..75: mol_type = other DNA
ttcgatgatagatgtaaaaaactattcaaacaactctttaacatctctgtacccgaaattgcgccacttgagtgg

SEQ ID NO: 270873 - DNA, 75 bp, synthetic construct
  source 1..75: mol_type = other DNA
gaattaaaacaacagatggtggcggaagtggagcaaaattgcgccgctcataccatctttgcttcgaacacgtca

SEQ ID NO: 270874 - DNA, 75 bp, synthetic construct
  source 1..75: mol_type = other DNA
cggagcagacatcaacatgatcggcaactgcaaaacggcgcaagaagcggaagctctggcgcggcagggccaaca

SEQ ID NO: 270875 - DNA, 75 bp, synthetic construct
  source 1..75: mol_type = other DNA
ttaatgttcgtctggacaacattgctatcatcaccatcgacgtaccgggtgagaaaatgaataccctgaaggcgg

SEQ ID NO: 270876 - DNA, 75 bp, synthetic construct
  source 1..75: mol_type = other DNA
tggtggatgacgtcgttccgcactccattttactggaagccgctgtagagctggcgaagcaggatcgtccggttt

SEQ ID NO: 270877 - DNA, 75 bp, synthetic construct
  source 1..75: mol_type = other DNA
atggaaatggcatcagcatttaccctcaatatgcgtctggacaatattgccgtcatcaccattgatgttcctggc

SEQ ID NO: 270878 - DNA, 75 bp, synthetic construct
  source 1..75: mol_type = other DNA
ctggcgatgacgccgcaatcgcaggcgctgcgtagtatcttttttgccagtacggacgtgaagaaagatcccggc

SEQ ID NO: 270879 - DNA, 75 bp, synthetic construct
  source 1..75: mol_type = other DNA
caattatccggcgacagaacgcatcctggaggttgttgaaacgggattagcgcagggcaccagcagcggttatga

SEQ ID NO: 270880 - DNA, 75 bp, synthetic construct
  source 1..75: mol_type = other DNA
atggtttacgaaaatgaattgtggcacagttttcttctgcgttcacagataatgtataacttatccaattgcagg

SEQ ID NO: 270881 - DNA, 75 bp, synthetic construct
  source 1..75: mol_type = other DNA
aaaaaatggacaatgccagttcagagctggaatttgacattgtcacagttagctatttattttgaagggcggctg

SEQ ID NO: 270882 - DNA, 75 bp, synthetic construct
  source 1..75: mol_type = other DNA
attttacgttaatcgcattctggcaccttacattaatgaagctatccgcatgttgaccgaaggtgagcgtgttga

SEQ ID NO: 270883 - DNA, 75 bp, synthetic construct
  source 1..75: mol_type = other DNA
gttacagccggtaaagcggggctacctgtaagaattaaagatatcaacgcccagggcataaatcatgctttgaaa

SEQ ID NO: 270884 - DNA, 75 bp, synthetic construct
  source 1..75: mol_type = other DNA
aagttcgccgtcgtcatctcaaagccagcgaacgtgacaaacagctggcattaatctccggaacgacggactatc

SEQ ID NO: 270885 - DNA, 75 bp, synthetic construct
  source 1..75: mol_type = other DNA
ttctctcggcgcgggcgaagtggttgcaataatgcaacgactggccacgcagtatggttcccgttttaccccttg

SEQ ID NO: 270886 - DNA, 75 bp, synthetic construct
  source 1..75: mol_type = other DNA
catattctgacgctggaagatcctgtggaatatctctattcggggagctacacgcgacaaccaggaatgcagccg

SEQ ID NO: 270887 - DNA, 75 bp, synthetic construct
  source 1..75: mol_type = other DNA
ctatctcaatcaacatgccgatgcgcatattctgacgctggaagatcctgttgaatatatctatgccagccagcg

SEQ ID NO: 270888 - DNA, 75 bp, synthetic construct
  source 1..75: mol_type = other DNA
cccgtgaagttgatgtggcacgctgcctctcaactgaaactctggccacttatgcacacgaactggcagagtggg

SEQ ID NO: 270889 - DNA, 75 bp, synthetic construct
  source 1..75: mol_type = other DNA
ctattctggcaatcccgaccgtgattctcgccggtccggtttacgctcgcgtgttgaaaggtatcgataagccaa

SEQ ID NO: 270890 - DNA, 75 bp, synthetic construct
  source 1..75: mol_type = other DNA
tttctccgctgctgatggcctggtcgattgccgcagtactgcgtatcgcgttgggttctgcaaccgttgcggcaa

SEQ ID NO: 270891 - DNA, 75 bp, synthetic construct
  source 1..75: mol_type = other DNA
atgccattagtcattgttgctatcggtgtaatcttgttgttgctcctgatgatccgcttcaaaatgaacggcttc

SEQ ID NO: 270892 - DNA, 75 bp, synthetic construct
  source 1..75: mol_type = other DNA
atttattatatgacctgcctgactgtctttattatctctgttgcattactgatggtaggtctgtggaatgcgaca

SEQ ID NO: 270893 - DNA, 75 bp, synthetic construct
  source 1..75: mol_type = other DNA
catgacaccagaccaacaacgctcatttcttgagattgggcgattctatacgcaaccaaaaccaggcaaactcgc

SEQ ID NO: 270894 - DNA, 75 bp, synthetic construct
  source 1..75: mol_type = other DNA
cttgaagtcatcgaaaccggattagcgcaaggcaccagtagcggctatgacgcggaagcccgtgcctttggtgaa

SEQ ID NO: 270895 - DNA, 75 bp, synthetic construct
  source 1..75: mol_type = other DNA
ggataagcctgtctcactcgcccttaaatctggcaacttcggtgatgtaagccttttttcacgagcccaaagaga

SEQ ID NO: 270896 - DNA, 75 bp, synthetic construct
  source 1..75: mol_type = other DNA
caggcggtgagacctccggcgtagtcacacagagcctgggcataaaagggtttcatattggcccaaccatttctc

SEQ ID NO: 270897 - DNA, 75 bp, synthetic construct
  source 1..75: mol_type = other DNA
atggaaaacaaaatatcaacctattctccagcattcggtattgtgtcatggatagctctcgcaggcggtatcgtt

SEQ ID NO: 270898 - DNA, 75 bp, synthetic construct
  source 1..75: mol_type = other DNA
acgattgcgttcaatgccacgccaccaaacgagcaatggaaaaccgtggctttgactttgagatgattaatgtcg

SEQ ID NO: 270899 - DNA, 75 bp, synthetic construct
  source 1..75: mol_type = other DNA
agcgatctgctgctatcctccggcaaaaaacaaaatataccttcgttgcgccaatgtcaccttttccgcagcgca

SEQ ID NO: 270900 - DNA, 75 bp, synthetic construct
  source 1..75: mol_type = other DNA
tgtttattatggacccgcgacatccagaatatgaatctgacactcgcgctcaggtcatcgcgccgttgattgcgg

SEQ ID NO: 270901 - DNA, 75 bp, synthetic construct
  source 1..75: mol_type = other DNA
cgacaacacttctatctggctggttgtgtggggagaaaacacggttcacggtattttcccgaaaggtcagaaagc

SEQ ID NO: 270902 - DNA, 75 bp, synthetic construct
  source 1..75: mol_type = other DNA
gctcagactctgttctatggcgatacaagtgttaaccctcagcagttcatggggcttgcttctcgttattccagc

SEQ ID NO: 270903 - DNA, 75 bp, synthetic construct
  source 1..75: mol_type = other DNA
ttgatttgtttcaccgggcgctggatcggggcgcagagaggcttgcaaaagaagtcacacagctcgctattgctc

SEQ ID NO: 270904 - DNA, 75 bp, synthetic construct
  source 1..75: mol_type = other DNA
cggcagccggtagtccgcaactggggcgcacggcagtaatgagaacacaggcaaagataacgacttcagcggcac

SEQ ID NO: 270905 - DNA, 75 bp, synthetic construct
  source 1..75: mol_type = other DNA
tctgatttgctggcgttgttgcacgtttatctgggaagccgtctggatgtacgtctgcaactttgtgttgagcgt

SEQ ID NO: 270906 - DNA, 75 bp, synthetic construct
  source 1..75: mol_type = other DNA
ataatgtaaaaataggtgcaatgtcttttataaataaagatataccatcgaactgcacatatataacaaaaaaga

SEQ ID NO: 270907 - DNA, 75 bp, synthetic construct
  source 1..75: mol_type = other DNA
gaaccatatcgccacgccggtatcccgttttctggccctgctcagcgtgatgcgcctgccgacgcgcacggcgga

SEQ ID NO: 270908 - DNA, 75 bp, synthetic construct
  source 1..75: mol_type = other DNA
tgtcgcatcagcaattttaataaaattatatattcgtaagaaatttgcacacagagccgttttcacacaccaaca

SEQ ID NO: 270909 - DNA, 75 bp, synthetic construct
  source 1..75: mol_type = other DNA
gtgctgtcttacttaatggcaattcactttgttttatttgggaactctactaatttaaaaaacttctggaaacat

SEQ ID NO: 270910 - DNA, 75 bp, synthetic construct
  source 1..75: mol_type = other DNA
actgagggcgaatggtggaccactttccgtggcatcccaatccgtgaaactgacgcaattctggaaacagaagcg

SEQ ID NO: 270911 - DNA, 75 bp, synthetic construct
  source 1..75: mol_type = other DNA
tttgtgggcaggagaaaccttaactggcgcgacgcaggatgcaattgttgagatcattgctactgacggcatgac

SEQ ID NO: 270912 - DNA, 75 bp, synthetic construct
  source 1..75: mol_type = other DNA
tgcgctgcatgttccagggacggcattttctgcaactgggtgcggaatcactccgtgatggcgaacagataagtg

SEQ ID NO: 270913 - DNA, 75 bp, synthetic construct
  source 1..75: mol_type = other DNA
atgaatatcatgaaacgttttttttatgtgatgtccctgaactggatactgacgtttgttgataaacatatcacc

SEQ ID NO: 270914 - DNA, 75 bp, synthetic construct
  source 1..75: mol_type = other DNA
ttgcggcgttgctggctaccggactcattcgcagtggacaaatttttctgcctgggcgctggatccactggcaaa

SEQ ID NO: 270915 - DNA, 75 bp, synthetic construct
  source 1..75: mol_type = other DNA
tgccgccggtattgcgtgcagttgtttccctcatccatctgcaactgggtatcacacttctgcttatgcccgtgc

SEQ ID NO: 270916 - DNA, 75 bp, synthetic construct
  source 1..75: mol_type = other DNA
ctgcgtgcacagtatctggcgtcactacaaacaacgctgcaaccctatatgtggaacgcggttattcttggatta

SEQ ID NO: 270917 - DNA, 75 bp, synthetic construct
  source 1..75: mol_type = other DNA
gaaattcaaccttttggctctatgccgcgccgctttagttctgccctagctaattctttaaaccagttaccaagg

SEQ ID NO: 270918 - DNA, 75 bp, synthetic construct
  source 1..75: mol_type = other DNA
gctcccccgtttgggggcgctcaaatccttttgagttagccgcgtgctatttgcataactcaatcagggttgcgc

SEQ ID NO: 270919 - DNA, 75 bp, synthetic construct
  source 1..75: mol_type = other DNA
gaagatgggccgtgcggctttctacatgaaccgcaccgttgcccaggctctcgacctgcaatctctggataaagc

SEQ ID NO: 270920 - DNA, 75 bp, synthetic construct
  source 1..75: mol_type = other DNA
attgccgaagacagatgtttctcgaaaggacgtctgcgcgatgaattcagaatgaagcctgccccccggtgctga

SEQ ID NO: 270921 - DNA, 75 bp, synthetic construct
  source 1..75: mol_type = other DNA
tggggcgaaaacaccgtgcatggcatcttcccgaaagggcagaaggctggcatccagatggaagataaaggccag

SEQ ID NO: 270922 - DNA, 75 bp, synthetic construct
  source 1..75: mol_type = other DNA
aagcactgcatcgcattccaaaccgtggcatgggccgcccggtgttctacatgaaccgcactgtaggccaggctc

SEQ ID NO: 270923 - DNA, 75 bp, synthetic construct
  source 1..75: mol_type = other DNA
ttgattatatagtgacaatatcattagcgtttatattgtttgtatctattttatttcatcgagatgcatatgcaa

SEQ ID NO: 270924 - DNA, 75 bp, synthetic construct
  source 1..75: mol_type = other DNA
ttggctacaatgaaagatgttgcccgcctggcgggcgtttctacctcaacagtttctcacgttatcaataaagat

SEQ ID NO: 270925 - DNA, 75 bp, synthetic construct
  source 1..75: mol_type = other DNA
cagtaccaatcctttctattcagaactggtgcgtggcgttgaacgcagctgcttcgaacgcggttatagtctcgt

SEQ ID NO: 270926 - DNA, 75 bp, synthetic construct
  source 1..75: mol_type = other DNA
acaatgaccttcaagataggtgatattgtcatcaatactattagcactgctattcctaaagatgaatcgggtcaa

SEQ ID NO: 270927 - DNA, 75 bp, synthetic construct
  source 1..75: mol_type = other DNA
ttgtcatcaatactattagcactgctattcctaaagatgaatcgggtcaacggtgtatagaagggttgaatttag

SEQ ID NO: 270928 - DNA, 75 bp, synthetic construct
  source 1..75: mol_type = other DNA
tttgaattaatatttaattttaatactctatcttcacggtttagcgatcctgggaatattttttacatgtcaggt

SEQ ID NO: 270929 - DNA, 75 bp, synthetic construct
  source 1..75: mol_type = other DNA
gaaggcaaaatatgcctgttttatttatattgaaagaacaatatacaatcacgataatccatccggtgggacacc

SEQ ID NO: 270930 - DNA, 75 bp, synthetic construct
  source 1..75: mol_type = other DNA
gtgccaattctgtttagtgggaaaaatgccgtgatagtacctgtgtacctgattgaccctgctacggccccgacg

SEQ ID NO: 270931 - DNA, 75 bp, synthetic construct
  source 1..75: mol_type = other DNA
cctgatcgatggcgctacccatatcgagacgtattgggtgcccaaatacgttgaccaggcaatgcaaaagttaga

SEQ ID NO: 270932 - DNA, 75 bp, synthetic construct
  source 1..75: mol_type = other DNA
aaacctccgcgccggagaagttgaaagaactgaaagtgatctggaagtcgccgctgatcccaggcgatccgatcg

SEQ ID NO: 270933 - DNA, 75 bp, synthetic construct
  source 1..75: mol_type = other DNA
aaaccaacgcgctggccgtcgccaacaagcaagtggatgttgccaccaacaacaccgaaaacctcgacaagctga

SEQ ID NO: 270934 - DNA, 75 bp, synthetic construct
  source 1..75: mol_type = other DNA
gtcatcctgctggcaaaagacgtgatatatgacgagtacttttttgatctgcggcagtcatttttcgttgagcgt

SEQ ID NO: 270935 - DNA, 75 bp, synthetic construct
  source 1..75: mol_type = other DNA
aagctgacgaaattggtggtgcacagattcacatacgggatttatcctcacgcttaaaagaggatggacatgatg

SEQ ID NO: 270936 - DNA, 75 bp, synthetic construct
  source 1..75: mol_type = other DNA
atgagtaatacaataaccttatcctatacaaatgattttaaaccaatcaacaatcatatcccccctgctcaatct

SEQ ID NO: 270937 - DNA, 75 bp, synthetic construct
  source 1..75: mol_type = other DNA
gaatggtaccggaatctctgcggggagtgataaaacgggggacgtggcccagaacggtgcacgcgcgatcggcgg

SEQ ID NO: 270938 - DNA, 75 bp, synthetic construct
  source 1..75: mol_type = other DNA
actcacaccgttgctccgatgagtggacgtgatatgacgctggcgcaggtcaccatgaaacttgccaaccttgca

SEQ ID NO: 270939 - DNA, 75 bp, synthetic construct
  source 1..75: mol_type = other DNA
ctgacacgctggcatcaaaacgatctcgccggacagttattaaaactagctgaagagggcggggaacgctggcgc

SEQ ID NO: 270940 - DNA, 75 bp, synthetic construct
  source 1..75: mol_type = other DNA
gcaaaaactccttatcccattggcctatttttcactatgcaaaaaatggttgtaagaattttctattaactggaa

SEQ ID NO: 270941 - DNA, 75 bp, synthetic construct
  source 1..75: mol_type = other DNA
agtgaaaacttaaagaaatctctaagcaaaaactccttatcccattggcctatttttcactatgcaaaaaatggt

SEQ ID NO: 270942 - DNA, 75 bp, synthetic construct
  source 1..75: mol_type = other DNA
ctcgtgataaccatcagaatggtgccgttgtggaaacacaggaacatcaggaagtgggggctttccgtaaggtga

SEQ ID NO: 270943 - DNA, 75 bp, synthetic construct
  source 1..75: mol_type = other DNA
tgcagaggctaataaagccattgaatatctcaatagcgtgatggatatgcaaagcactgacatggcggagatccg

SEQ ID NO: 270944 - DNA, 75 bp, synthetic construct
  source 1..75: mol_type = other DNA
gagctggttaatggcgcagctcgccacctggctgatctgctggtagcaatccagaaagcgggggtagcggcatga

SEQ ID NO: 270945 - DNA, 75 bp, synthetic construct
  source 1..75: mol_type = other DNA
ccattattccgctcagtgatggtcagactatcagcattctgtttcatagcccgacagcggaaaaccggatcacca

SEQ ID NO: 270946 - DNA, 75 bp, synthetic construct
  source 1..75: mol_type = other DNA
gcagcatctcctgatggcccacgctatgacatgtcacaatcagaaacagaaaggaagtcaattaacaatggcata

SEQ ID NO: 270947 - DNA, 75 bp, synthetic construct
  source 1..75: mol_type = other DNA
ctcgtgataaccatcagaatggtaccgttgtggaaacacaggaacatcaggaagtgggagctttccgtaaggtga

SEQ ID NO: 270948 - DNA, 75 bp, synthetic construct
  source 1..75: mol_type = other DNA
agtgggcagggggcaaatatcccctgcttgatgatattaaacgacatttgcctaagggcgaatgtttggttgagc

SEQ ID NO: 270949 - DNA, 75 bp, synthetic construct
  source 1..75: mol_type = other DNA
gcttgatgatattaaacggcatttgcccaagggcgaatgtctggttgagccttttgtaggtgccgggtcggtgtt

SEQ ID NO: 270950 - DNA, 75 bp, synthetic construct
  source 1..75: mol_type = other DNA
gcactccggtgatctgatggtggtagataaagctgaaaaaccactgcagggagacattgttattgctgaaactga

SEQ ID NO: 270951 - DNA, 75 bp, synthetic construct
  source 1..75: mol_type = other DNA
cagagagagagcaaactcaaagagttatactctcatgtcatccctacctactctataaataaatttagcgagatt

SEQ ID NO: 270952 - DNA, 75 bp, synthetic construct
  source 1..75: mol_type = other DNA
agtgacgaggaaaaaaaacctaacccactcttgttagccgacatttgtgctaaagagggattcagtacaagtgag

SEQ ID NO: 270953 - DNA, 75 bp, synthetic construct
  source 1..75: mol_type = other DNA
gcggtcatcggttcgctgattattttcactctgcgtgtaaatcgcactgttgcgcagaccgacgtggcacatcat

SEQ ID NO: 270954 - DNA, 75 bp, synthetic construct
  source 1..75: mol_type = other DNA
gccgcaacgtacttcttgcgtgtgtccggcgattctatgcgtgatgcccgcattcatgatggcgatgtgctggtc

SEQ ID NO: 270955 - DNA, 75 bp, synthetic construct
  source 1..75: mol_type = other DNA
gcgacctactttgtccgggccattggcgattcgatgaaagatatgggcctgcactccggcgatctcatggttgtc

SEQ ID NO: 270956 - DNA, 75 bp, synthetic construct
  source 1..75: mol_type = other DNA
cacggcttcctgccaccgcatccgggcccgactgcgattgccaccattttcaatgccgatatgggtaaaaccctg

SEQ ID NO: 270957 - DNA, 75 bp, synthetic construct
  source 1..75: mol_type = other DNA
gacgagggcgaggcgttttatcttcacccaggagagctggcgctggcggtgacgctggagtcggtgacgctgcca

SEQ ID NO: 270958 - DNA, 75 bp, synthetic construct
  source 1..75: mol_type = other DNA
actaatggttcacgtgacagcgcaccgtatcgatcccggctggtctggctgcattgtgctggagttttataactc

SEQ ID NO: 270959 - DNA, 75 bp, synthetic construct
  source 1..75: mol_type = other DNA
taccttccgtggccatacggcggcatttattgatctgagcggtccaaaggacgaagtgagcgctgcgcttgatcg

SEQ ID NO: 270960 - DNA, 75 bp, synthetic construct
  source 1..75: mol_type = other DNA
actatctttatcttattgagcaaataacagaactggaatcagagttaaaccagtcaatcaaagctgacgctactg

SEQ ID NO: 270961 - DNA, 75 bp, synthetic construct
  source 1..75: mol_type = other DNA
gtgataacgcccgccagcgtgttcaatcggcatcacctgaacaacgtcaggtttttcgggagaaagttcaggaga

SEQ ID NO: 270962 - DNA, 75 bp, synthetic construct
  source 1..75: mol_type = other DNA
cctcgcctgagcagcgccaggcggttcgcgagaaaatgcagactaacccgcagaaccagcagcgaagagaggcag

SEQ ID NO: 270963 - DNA, 75 bp, synthetic construct
  source 1..75: mol_type = other DNA
atgaagctgaaaactatgggagctatgacgacttccgcgacttcagccgtcgccaaccactgacccagcaacaaa

SEQ ID NO: 270964 - DNA, 75 bp, synthetic construct
  source 1..75: mol_type = other DNA
actgaagatgcattcgctaaagccacaggtacgaaaaacaaagaactcttcctgatcgatggcgctacccatatt

SEQ ID NO: 270965 - DNA, 75 bp, synthetic construct
  source 1..75: mol_type = other DNA
acaccaaggaagcggactacgttctctatgatggcgatggccttgagctacttatcaaatccagcgggagtaaaa

SEQ ID NO: 270966 - DNA, 75 bp, synthetic construct
  source 1..75: mol_type = other DNA
ccgcccacaacgtctaaacgacagtaaccatactgtcaggctgaataacgagcaacggtcagcagtacgcgaacg

SEQ ID NO: 270967 - DNA, 75 bp, synthetic construct
  source 1..75: mol_type = other DNA
ccggtaactatgagttcccgcaaccgctgcacgatgcgctggataaattccaggccgacaccggtatcgacatcg

SEQ ID NO: 270968 - DNA, 75 bp, synthetic construct
  source 1..75: mol_type = other DNA
gactacaaagcctccctgaaatatctcagcgatcacccgaaactgcagggtattgcccaacagaacagctttaaa

SEQ ID NO: 270969 - DNA, 75 bp, synthetic construct
  source 1..75: mol_type = other DNA
cttccacaggacttgttccccggcagtatagcactggaggaaaatcgactctgttgggtatcagtaagcgaggtg

SEQ ID NO: 270970 - DNA, 75 bp, synthetic construct
  source 1..75: mol_type = other DNA
gtatccgccggtttatctgccaccaccagccggagaaccgtttgttgacagctttgtgcgcggattcggctatag

SEQ ID NO: 270971 - DNA, 75 bp, synthetic construct
  source 1..75: mol_type = other DNA
atggataagaagcaagtaacggatttaaggtcggaactactcgattcacgttttggtgctaagtccatttcgact

SEQ ID NO: 270972 - DNA, 75 bp, synthetic construct
  source 1..75: mol_type = other DNA
atggataagaagcaagtaacggatttaaggtcggaaaaaaactggatcgacaaagaagaatatccgcaatccgca

SEQ ID NO: 270973 - DNA, 75 bp, synthetic construct
  source 1..75: mol_type = other DNA
ctgagacgctgatacagcttcctaacatcactcagattcaggaagcactacgggttaagcaggaagaaaaagatg

SEQ ID NO: 270974 - DNA, 75 bp, synthetic construct
  source 1..75: mol_type = other DNA
atacgaaaagagaaaggggatgtttgggaaggtgtcggtagatatcattctgcaacgccaaaatataagtacaga

SEQ ID NO: 270975 - DNA, 75 bp, synthetic construct
  source 1..75: mol_type = other DNA
tcggtcggtatcattcaaacacccctttttataaaaatagatatatttctaaagttcgatataaatacagaaaaa

SEQ ID NO: 270976 - DNA, 75 bp, synthetic construct
  source 1..75: mol_type = other DNA
ttacgacttccatcatcgacgcggagtcattgctgaaggcggcaaggtgagcaatctcgatgcaatggatattac

SEQ ID NO: 270977 - DNA, 75 bp, synthetic construct
  source 1..75: mol_type = other DNA
ggaagacggtatctggttttttgatgagagctgtccgggaggagctgtctgggtgcttgaagatggctctctcga

SEQ ID NO: 270978 - DNA, 75 bp, synthetic construct
  source 1..75: mol_type = other DNA
gtaagaaagacgccgcgtattccgaccgttccgctcacggagcttaaccgcgagcagaagtggcagatgatgtta

SEQ ID NO: 270979 - DNA, 75 bp, synthetic construct
  source 1..75: mol_type = other DNA
gatcgccggcgtgcatcctgattaccgcctgaacaggacgttcagcccggatgatatggttaaagagcccgccac

SEQ ID NO: 270980 - DNA, 75 bp, synthetic construct
  source 1..75: mol_type = other DNA
cgaacggtgaaagggtgagctttacctataacgaccatgtaatgcatcaactcgattcggcgctggatttgcgaa

SEQ ID NO: 270981 - DNA, 75 bp, synthetic construct
  source 1..75: mol_type = other DNA
ggtaaatttatttttgatgcggggatgtatcgatttatccgcttcaatcatcgtgttttgcgcacgttctggata

SEQ ID NO: 270982 - DNA, 75 bp, synthetic construct
  source 1..75: mol_type = other DNA
ctgcttataccagtaaggctttaattatcgataccagtccgatagaaaaagaaattagcaacattatttcgcata

SEQ ID NO: 270983 - DNA, 75 bp, synthetic construct
  source 1..75: mol_type = other DNA
taccaatacctggacgcccgacagccagtggctggtatttgacgtgcgtccttctggggcgtcgtttaccggcga

SEQ ID NO: 270984 - DNA, 75 bp, synthetic construct
  source 1..75: mol_type = other DNA
cgcacacgtcggcgtggtgaccgttcatccgaagtcagagaaatatgtctttattcacggccctgaaaatcctga

SEQ ID NO: 270985 - DNA, 75 bp, synthetic construct
  source 1..75: mol_type = other DNA
gaggtcgaggttatctaccgtgcgtcacagggcgcacacgtcggcgtggtgaccgttcatccgaagtcagagaaa

SEQ ID NO: 270986 - DNA, 75 bp, synthetic construct
  source 1..75: mol_type = other DNA
ttttcctatagtgaaccagaagaacccccgccgttaaatttttcatttgaagaaaggaaaaaaatttttctatgg

SEQ ID NO: 270987 - DNA, 75 bp, synthetic construct
  source 1..75: mol_type = other DNA
atggaatttaaagatttaccaaaagaaatccagacaattgctgcaacggctctcggtgatagtctggtgaaaatt

SEQ ID NO: 270988 - DNA, 75 bp, synthetic construct
  source 1..75: mol_type = other DNA
gatcctggcgtttttctatctggtggtaattggaacttcactgacctttagtctgtatttgaagggcgcacagtt

SEQ ID NO: 270989 - DNA, 75 bp, synthetic construct
  source 1..75: mol_type = other DNA
attggtgacgcacggtaatccgacgtcattatcgatctctcctgctgcgttattctggggtatcgcctcggcatt

SEQ ID NO: 270990 - DNA, 75 bp, synthetic construct
  source 1..75: mol_type = other DNA
gcgatgttaataaacgggtaatttctgtttgcgtgaatggccatgttctttcatcaatcaaaacagaaacggcga

SEQ ID NO: 270991 - DNA, 75 bp, synthetic construct
  source 1..75: mol_type = other DNA
ggttctgataatcaaaagcaggaaagcgatgttaatgaacgggtaatttctgtttgcgtgaatggccatgttctt

SEQ ID NO: 270992 - DNA, 75 bp, synthetic construct
  source 1..75: mol_type = other DNA
atggaatttaaagatttaccaaaagaaatccagataattgctgcaacgacactcggtgatagtctgctgaaaatt

SEQ ID NO: 270993 - DNA, 75 bp, synthetic construct
  source 1..75: mol_type = other DNA
atactgcggatgctgacatgcagaatgccggtactgacgctggcgcgacgccctcagcagacgaggcctcatccg

SEQ ID NO: 270994 - DNA, 75 bp, synthetic construct
  source 1..75: mol_type = other DNA
ttcagtcgatgctgccccagaacgtccaggggggggaatggcagtcccgcgccatcgcgatgaacaaggctctgg

SEQ ID NO: 270995 - DNA, 75 bp, synthetic construct
  source 1..75: mol_type = other DNA
ccccgtcacctcgctgctgcagaatcccgacttctttggccctgccatcatggcaatgatgatactcccgctctt

SEQ ID NO: 270996 - DNA, 75 bp, synthetic construct
  source 1..75: mol_type = other DNA
atgggtaatgaaacagtatcaataattatgccagcttataatgctgaagaaactattaaagatagtattttgtca

SEQ ID NO: 270997 - DNA, 75 bp, synthetic construct
  source 1..75: mol_type = other DNA
gccgtctcgtccccaggacagtgcagcgcaggctccccacaccggagcatgtcagcagcatcatcggtgtactga

SEQ ID NO: 270998 - DNA, 75 bp, synthetic construct
  source 1..75: mol_type = other DNA
atactgcggatgctgacatgcagaatgccggtactgacgctggcgtggatccctcagcaaacgaggcctcatccg

SEQ ID NO: 270999 - DNA, 75 bp, synthetic construct
  source 1..75: mol_type = other DNA
cccggcactgtcaggcctgattaccacgatggttacgcagggctgtagtggtcaagtaatattggccacggtttt

SEQ ID NO: 271000 - DNA, 75 bp, synthetic construct
  source 1..75: mol_type = other DNA
accggaaaaatgacggatgaagatgactggcaggctgttctgcatattgctgtcttcatccgggcacaggcaccg

SEQ ID NO: 271001 - DNA, 75 bp, synthetic construct
  source 1..75: mol_type = other DNA
tggcgacaaagcacagcaacgcgtcgtgctctcacctgtcttctatgcgctggacacttttacggtcaatcttgg

SEQ ID NO: 271002 - DNA, 75 bp, synthetic construct
  source 1..75: mol_type = other DNA
tccgtagcgaacttcaacactgtaatcgtcgtgttgcaggtagtgctgatcgcggtgattctgggcatggttgtt

SEQ ID NO: 271003 - DNA, 75 bp, synthetic construct
  source 1..75: mol_type = other DNA
cgcgtctgatgtacgtaatgggtcgtgacggcgtgttcccgaaaagcttcttcggttatgtacacccgaaatggc

SEQ ID NO: 271004 - DNA, 75 bp, synthetic construct
  source 1..75: mol_type = other DNA
atgtcgcataacgttactccaaacacctctcgcgtggaattgcgtaaaacgcttacgttagttccggttgtaatg

SEQ ID NO: 271005 - DNA, 75 bp, synthetic construct
  source 1..75: mol_type = other DNA
tggttatgaccatcgcggtgtgttgatccttgtcgatggtgttcgtcagggaaccgatactggacacctgaatgg

SEQ ID NO: 271006 - DNA, 75 bp, synthetic construct
  source 1..75: mol_type = other DNA
gagaaccgttccactctatttgccgacagtttcgcttctcacttactgacatatggcggtgagtattatcgtcag

SEQ ID NO: 271007 - DNA, 75 bp, synthetic construct
  source 1..75: mol_type = other DNA
aatggtcgtctcgcgcggggatgactatcaacccgaccaactggctaatgttatttggttcgtatgcccaggcat

SEQ ID NO: 271008 - DNA, 75 bp, synthetic construct
  source 1..75: mol_type = other DNA
ttgctgttactgttttcgcgtcaggatgctgccgtactggcgacagaagaaggcaagaaaaacctgattgccgag

SEQ ID NO: 271009 - DNA, 75 bp, synthetic construct
  source 1..75: mol_type = other DNA
atatggcggtgagtattatcgtcaggaacagcatcctggcggtgcgacgacggggttcccgcaagcgaaaatcga

SEQ ID NO: 271010 - DNA, 75 bp, synthetic construct
  source 1..75: mol_type = other DNA
ccttccattccatcgtggatgtttgtggtggcgctggtggcctttatgactgcctttaacctgcgtagtctgaaa

SEQ ID NO: 271011 - DNA, 75 bp, synthetic construct
  source 1..75: mol_type = other DNA
gtggtacgcaatttattacgtgaaaaagctgtgatttctagcctgtgttacgtaaaatataacgtaacaaattca

SEQ ID NO: 271012 - DNA, 75 bp, synthetic construct
  source 1..75: mol_type = other DNA
tgctaactgggttcatataaaggttgattccaatggcaatacaacaactaccactaatgaagggattggggaaaa

SEQ ID NO: 271013 - DNA, 75 bp, synthetic construct
  source 1..75: mol_type = other DNA
gatggtaattattttgtctgtggtatttatttctggtgggagttatattatatctcttttcaaggtttttgctca

SEQ ID NO: 271014 - DNA, 75 bp, synthetic construct
  source 1..75: mol_type = other DNA
gattagtacagatgacgcctatgtcacggggaatgcagatccaatttctgcacaagtctcaggtagtgtcactgt

SEQ ID NO: 271015 - DNA, 75 bp, synthetic construct
  source 1..75: mol_type = other DNA
caatcacaaagatgccattagtctgctgattttttccgtggttggcgcgctaaccgtacagctcacttttttgct

SEQ ID NO: 271016 - DNA, 75 bp, synthetic construct
  source 1..75: mol_type = other DNA
gctgcactcaaaacatttaactggcgtagaaacaatccggacctcatcaagcgagcgatgcagcatgggaagttg

SEQ ID NO: 271017 - DNA, 75 bp, synthetic construct
  source 1..75: mol_type = other DNA
cgcgtctgatgtacgtaatggggcgtgacggcgttttcccgaaaagcttcttcggttatgtacacccgaaatggc

SEQ ID NO: 271018 - DNA, 75 bp, synthetic construct
  source 1..75: mol_type = other DNA
gctgatcggcggcatgatcttcatctttgcaacttacttcctgcaactgtacttcccggatatctctcgctttaa

SEQ ID NO: 271019 - DNA, 75 bp, synthetic construct
  source 1..75: mol_type = other DNA
tcctgtgcttctcctttaccggttttgacggcatcagcaacctgtcggaagaaaccaaagatgcagagcgcgtga

SEQ ID NO: 271020 - DNA, 75 bp, synthetic construct
  source 1..75: mol_type = other DNA
tcgtggtgttccaggtggtactgattgccgtgatcctaggtatggtgatttatggcgtggcgcacggcgaaggtg

SEQ ID NO: 271021 - DNA, 75 bp, synthetic construct
  source 1..75: mol_type = other DNA
atcggtctgatttacctggcttgcgtcaccaagagcttccgtaacccggttccgcagtacgaagacgtagcataa

SEQ ID NO: 271022 - DNA, 75 bp, synthetic construct
  source 1..75: mol_type = other DNA
atgcgaacatgcgcccttgtgggattaatccaaccattatttatcgtccatacagttttatggccaaaatcagcg

SEQ ID NO: 271023 - DNA, 75 bp, synthetic construct
  source 1..75: mol_type = other DNA
cgtgacgggacgagtcattaacccagcatcgagccggttgcaattaaattacggtgtaagtcgaagacgtggcta

SEQ ID NO: 271024 - DNA, 75 bp, synthetic construct
  source 1..75: mol_type = other DNA
catctggataagttaaaaaagcgtggtgaaccagtcgcaaccggcgaaaaggaaaagtacaacacggcagtaaaa

SEQ ID NO: 271025 - DNA, 75 bp, synthetic construct
  source 1..75: mol_type = other DNA
gtatctgcacgagttcaggaactggaaaacctgactatcagtgaactaccaccgctgcgattgggctttctcgtt

SEQ ID NO: 271026 - DNA, 75 bp, synthetic construct
  source 1..75: mol_type = other DNA
ttatcaaaaactttttccggtttaccaacgaatttctgctattgataatgaaattcataattccgggcgtcgttc

SEQ ID NO: 271027 - DNA, 75 bp, synthetic construct
  source 1..75: mol_type = other DNA
ttatcaaaaactattcccggtttaccaacgactttctgctattgataatgaaattcataattccgggcgtcattc

SEQ ID NO: 271028 - DNA, 75 bp, synthetic construct
  source 1..75: mol_type = other DNA
aacagcgcatccctgcagatttatatattgtttatgaaacacagcaggtgacgcccgcgatggttaagctgttgg

SEQ ID NO: 271029 - DNA, 75 bp, synthetic construct
  source 1..75: mol_type = other DNA
atgaatgaatattcttttagtctgccttacccgccgtcgaataaccgctattaccgacattcacgcggttttcac

SEQ ID NO: 271030 - DNA, 75 bp, synthetic construct
  source 1..75: mol_type = other DNA
tatttcaggttgaatcaaaacataaaacacctgtgataaaacacgttcgccgccatacactcatctatacgccag

SEQ ID NO: 271031 - DNA, 75 bp, synthetic construct
  source 1..75: mol_type = other DNA
aggagaaatttcgcacctggcgtccggcggattttgctgatgccctgcgccgctggccgccggcacagcgtaaaa

SEQ ID NO: 271032 - DNA, 75 bp, synthetic construct
  source 1..75: mol_type = other DNA
ctggctccctgatttgcatccggcctcggtagttgctctcaatgcacgggcactgaaggaaattttcagcgatga

SEQ ID NO: 271033 - DNA, 75 bp, synthetic construct
  source 1..75: mol_type = other DNA
attacacacagaaccgggacaagttatttgctaacttgattagcatcattgatggaatcattgcagatggagttg

SEQ ID NO: 271034 - DNA, 75 bp, synthetic construct
  source 1..75: mol_type = other DNA
aatttgttggctgcacggatacatttttgtggatggtaaaacgagcgggttacactattattccaccagcaaagg

SEQ ID NO: 271035 - DNA, 75 bp, synthetic construct
  source 1..75: mol_type = other DNA
gagcccgtcgctgggtgaatccagccatcacgtctgcccgcgttgctccggtactggcaccgtgcgtgataatga

SEQ ID NO: 271036 - DNA, 75 bp, synthetic construct
  source 1..75: mol_type = other DNA
gttcgctgaacgtaagcgtcctgaacaacctgcgctggcaacctttgccatgccggatgtgccgccagcgccaac

SEQ ID NO: 271037 - DNA, 75 bp, synthetic construct
  source 1..75: mol_type = other DNA
cgtagtgaacgtacagaaggcagcgataatcgcgaagaaaaccgtcgtaatcgtcgccaggcacagcagcagact

SEQ ID NO: 271038 - DNA, 75 bp, synthetic construct
  source 1..75: mol_type = other DNA
atcagctggaaatcttcgagcgccgcagcttttttcagttgctgcaaaagcacgataacgacgatcggctgctgg

SEQ ID NO: 271039 - DNA, 75 bp, synthetic construct
  source 1..75: mol_type = other DNA
ccactaccagatcgagtcgcagatcgagtccgccttccagcgtgaagtccgtctgccgtccggtggttccattgt

SEQ ID NO: 271040 - DNA, 75 bp, synthetic construct
  source 1..75: mol_type = other DNA
tgctgaacctgaagttgttgctcaacctgccgcgccagtcgtcgctgaagtcgcagcagaagttgaaacggtagc

SEQ ID NO: 271041 - DNA, 75 bp, synthetic construct
  source 1..75: mol_type = other DNA
tgctggagatgtcccgtcagcgcctgagcccgtcactcggtgaatccagccatcacgtctgtccgcgttgctctg

SEQ ID NO: 271042 - DNA, 75 bp, synthetic construct
  source 1..75: mol_type = other DNA
gccatcgacatcaactctgcacgcgcaacccgcggcggcgatatcgaagaaacggcgtttaacaccaacctcgaa

SEQ ID NO: 271043 - DNA, 75 bp, synthetic construct
  source 1..75: mol_type = other DNA
cctcccactaaaagaaattgcccgcgaatatttccctgctaactacagtgctcatggtcgtcccaacattaaaga

SEQ ID NO: 271044 - DNA, 75 bp, synthetic construct
  source 1..75: mol_type = other DNA
atattgaagaagttgccgaaactgctgaggttgtggttgctgaacctgaagttgttgctcaacctgccgcgccag

SEQ ID NO: 271045 - DNA, 75 bp, synthetic construct
  source 1..75: mol_type = other DNA
tgaatgccattgaaacgcgtcaggacggtgttcgctgcgtgattgtgccaaacgatcagatggaaaccccgcact

SEQ ID NO: 271046 - DNA, 75 bp, synthetic construct
  source 1..75: mol_type = other DNA
ctgatcgaagaagaagcgctgaaagagaacacccaggaagttcacgccattgttcctgtgccaatcgcttcttac

SEQ ID NO: 271047 - DNA, 75 bp, synthetic construct
  source 1..75: mol_type = other DNA
atctccaacctacgccgtaagctgccggatcgcaaagacgggcatccgtggtttaaaacgttgcgtggtcgcggc

SEQ ID NO: 271048 - DNA, 75 bp, synthetic construct
  source 1..75: mol_type = other DNA
tttacccgcatagataataatatcagcctcaataaagccggacaggaactgtatcaaaaactgttcccggtttat

SEQ ID NO: 271049 - DNA, 75 bp, synthetic construct
  source 1..75: mol_type = other DNA
cgatgcttcagcatattgctgaagatcgtggtgaatatgtccgccaggcgcattttccagatagcgatgcagata

SEQ ID NO: 271050 - DNA, 75 bp, synthetic construct
  source 1..75: mol_type = other DNA
gtgaccgatgcgcaggtagtatcccgtcgtgataccttcgccgggcatatcacgctgttgttcggtcattacaac

SEQ ID NO: 271051 - DNA, 75 bp, synthetic construct
  source 1..75: mol_type = other DNA
cccccaccaaacaaccggccaccccgtggcctgcaacactaaacaggcagaacgtgaaaaattatctctggctgg

SEQ ID NO: 271052 - DNA, 75 bp, synthetic construct
  source 1..75: mol_type = other DNA
gggtgatattctgacggtgatcctcgaagaatccacccagtcgagcaaacaggcgaaaaccaacttcggcaaaag

SEQ ID NO: 271053 - DNA, 75 bp, synthetic construct
  source 1..75: mol_type = other DNA
aatccacatcggaaaaacagatcgttgcggcactggcggttctctcgctcggcgttttttgttggcttggggtga

SEQ ID NO: 271054 - DNA, 75 bp, synthetic construct
  source 1..75: mol_type = other DNA
tgtgtttgacggtcgcttactggtggtgacccgttatgacactcataacggcaaaaccagaatttttctcgagca

SEQ ID NO: 271055 - DNA, 75 bp, synthetic construct
  source 1..75: mol_type = other DNA
aattggtgatgaggggattgatgccgattatgttgagccctcaaaaattctaacgccgaataatcatcttgactg

SEQ ID NO: 271056 - DNA, 75 bp, synthetic construct
  source 1..75: mol_type = other DNA
ggtcatcaacgtattggttatctttcttccagccacggcattgaagatgacgccatgcgtaaagcaggctggatg

SEQ ID NO: 271057 - DNA, 75 bp, synthetic construct
  source 1..75: mol_type = other DNA
ggcgcactgacagcgttaaaagacaatggtattgctattccgttacatctctcgatcatcggttttgatgatatc

SEQ ID NO: 271058 - DNA, 75 bp, synthetic construct
  source 1..75: mol_type = other DNA
aagcaaaacgtgagaatttgactatcacgctggaaaacggtccggacaatactctgacaattcatcctgtcacag

SEQ ID NO: 271059 - DNA, 75 bp, synthetic construct
  source 1..75: mol_type = other DNA
gggatgcgtgctatcagctgccgcgctgggtgtatgtcaacggtgtatttaatcaggggctggataaccgccgcg

SEQ ID NO: 271060 - DNA, 75 bp, synthetic construct
  source 1..75: mol_type = other DNA
ggtgtgtttaatcaggggctggataaccgccgcgtgcgggagatggcctggtgccttaaaggagctggacgatga

SEQ ID NO: 271061 - DNA, 75 bp, synthetic construct
  source 1..75: mol_type = other DNA
aaggtgtgtgaagcaacagccaccgcaaccggaggcccggtatgacgctttatatcgggatgaacaataccagcg

SEQ ID NO: 271062 - DNA, 75 bp, synthetic construct
  source 1..75: mol_type = other DNA
gggcaatgcctgtagttccacgctggtgaaattgctcaatcagcggcgctgggcggatgcatgccgacagttgcc

SEQ ID NO: 271063 - DNA, 75 bp, synthetic construct
  source 1..75: mol_type = other DNA
agcgcgggtgtatggaccgacggcattggtaatacatcgggcgtcattcccggcaaaacaatcacggaacgacag

SEQ ID NO: 271064 - DNA, 75 bp, synthetic construct
  source 1..75: mol_type = other DNA
gcagcagaagggctgatctccaacgtgctacgtgtggagctggcgctggaaagatgtgtgaagcaacagccgccg

SEQ ID NO: 271065 - DNA, 75 bp, synthetic construct
  source 1..75: mol_type = other DNA
gggcaaaaccattacggaacgacaggcagcggaagggctgatctccaacgtgctacgtgtggagcgggcgctgga

SEQ ID NO: 271066 - DNA, 75 bp, synthetic construct
  source 1..75: mol_type = other DNA
cgtttgccttcaacgtggggacgggcaatgcctgcagttccacgttggttaaattgctcaaccagcggcgctggg

SEQ ID NO: 271067 - DNA, 75 bp, synthetic construct
  source 1..75: mol_type = other DNA
cgtttgccttcaacgtgggtacgggcaatgcctgcagttccacgctggtgaaattgctcaatcagcggcgctggg

SEQ ID NO: 271068 - DNA, 75 bp, synthetic construct
  source 1..75: mol_type = other DNA
gtgtggccgcagtgctggcgctggcggcactgatgcctgattttcgtctgctgaatacctcgcctgacggtctgg

SEQ ID NO: 271069 - DNA, 75 bp, synthetic construct
  source 1..75: mol_type = other DNA
cttattcaaaagcggaatccgggggatgacctgtccagacggctacatgagagcgtcattgccactactgataac

SEQ ID NO: 271070 - DNA, 75 bp, synthetic construct
  source 1..75: mol_type = other DNA
atctggaaatcatctcagccgcgattgaaacgctgcggacacagatcgcccttattcaaaagcggaatccggggg

SEQ ID NO: 271071 - DNA, 75 bp, synthetic construct
  source 1..75: mol_type = other DNA
actgggcagcgtggcgaagcactgctgacggctaattaccatcaacaaatcagaaccaatcgcctgttaacgatg

SEQ ID NO: 271072 - DNA, 75 bp, synthetic construct
  source 1..75: mol_type = other DNA
gacgaaatataccactgatctgtttagccttgatgtggcctataaccgtacccgcggcaaagacaccgataccgg

SEQ ID NO: 271073 - DNA, 75 bp, synthetic construct
  source 1..75: mol_type = other DNA
ggggttttcagctacttcgataataagccgcttgcgtttctgtacggttgcggcgcgctggcgtgctttttgtac

SEQ ID NO: 271074 - DNA, 75 bp, synthetic construct
  source 1..75: mol_type = other DNA
ggtgttaactgtacaggctcctgcagctggaaaatctacgttaaaaagggtctggtgacctgggaaaaccaacag

SEQ ID NO: 271075 - DNA, 75 bp, synthetic construct
  source 1..75: mol_type = other DNA
ggtgttaactgtacaggctcctgcagctggaaaatctacgttaaaaagggtctggtaacctgggaaagccaacag

SEQ ID NO: 271076 - DNA, 75 bp, synthetic construct
  source 1..75: mol_type = other DNA
atacggatacagaggcgatgccggaaagcacagtctccatattccccggtactgagcgcgagcaacatggtatta

SEQ ID NO: 271077 - DNA, 75 bp, synthetic construct
  source 1..75: mol_type = other DNA
cgaagaacgccgcagaaaggaagtccagccggatatgtatggtggtgaagaaacatacagcggcgattacgaaga

SEQ ID NO: 271078 - DNA, 75 bp, synthetic construct
  source 1..75: mol_type = other DNA
gggctacctgcgctggttgtttaataacctcgacagtatgagcccggaattgcgtttaacgttgaagcattacct

SEQ ID NO: 271079 - DNA, 75 bp, synthetic construct
  source 1..75: mol_type = other DNA
ccgcgacgaattcatcatgatccgcaagatgaagaacgttaactggctggatgatgaaggtcgcgatcaggttca

SEQ ID NO: 271080 - DNA, 75 bp, synthetic construct
  source 1..75: mol_type = other DNA
tccgctttctgcggcggtcgatccggcctgggaagcgaaaagcgactgggaaatctacaaaggtatcgctaaagc

SEQ ID NO: 271081 - DNA, 75 bp, synthetic construct
  source 1..75: mol_type = other DNA
tcgctcgggccattgatggacaaacttggcaacggcggtaaagggatttcgtggaatacccaggatgaaatcgat

SEQ ID NO: 271082 - DNA, 75 bp, synthetic construct
  source 1..75: mol_type = other DNA
ggtgttaactgtacaggctcctgcagctggaaaatctacgttaaaaatggtctggtgacctgggaaatccaacag

SEQ ID NO: 271083 - DNA, 75 bp, synthetic construct
  source 1..75: mol_type = other DNA
ggtgttaactgtacaggctcctgcagctggaaaatctacgttaaaaaaggtctggtgacctgggaaagccaacag

SEQ ID NO: 271084 - DNA, 75 bp, synthetic construct
  source 1..75: mol_type = other DNA
gccgatactgcccataaaacgcatgggcgctcgatgattattctcggcgcaggtgttaaccactggtatcacatg

SEQ ID NO: 271085 - DNA, 75 bp, synthetic construct
  source 1..75: mol_type = other DNA
tgcagtcgaccttctcaggaagagagcgcaggcaggggggacagtggggcgtcttctgctgaaaatgccctgcgt

SEQ ID NO: 271086 - DNA, 75 bp, synthetic construct
  source 1..75: mol_type = other DNA
ggtcacaggaggggctgtaacgcccgttccgggtaatgcgtcttgtccttctgaaacaccggttaatgagtcccc

SEQ ID NO: 271087 - DNA, 75 bp, synthetic construct
  source 1..75: mol_type = other DNA
atgctctgaaactgctgcgcctgctgcgcgttatgcgccgtcttcgggagctgcaacgtggtctgacgtacgggg

SEQ ID NO: 271088 - DNA, 75 bp, synthetic construct
  source 1..75: mol_type = other DNA
ggcgctccggcatgatgctgaacgcgtgtgggatgagttttgcctgatttcagacacaggcgacaaatccttcag

SEQ ID NO: 271089 - DNA, 75 bp, synthetic construct
  source 1..75: mol_type = other DNA
cgggactattgcggcggtggtgctggtgcgctttggcaggtttcgcggatcaaatggttttgcctttatgatcac

SEQ ID NO: 271090 - DNA, 75 bp, synthetic construct
  source 1..75: mol_type = other DNA
ggtgtgggccggctggtcaacgcgctggtatggcgaattattgcgcgatgacgcgatgatgagtgcggttggttt

SEQ ID NO: 271091 - DNA, 75 bp, synthetic construct
  source 1..75: mol_type = other DNA
gatcatgcccgcgatcatttctggctggttactggcttttactttgtcgcttgatgatctggtgatcgccagctt

SEQ ID NO: 271092 - DNA, 75 bp, synthetic construct
  source 1..75: mol_type = other DNA
ttttgctgaaggacgggatgatatcgagcatctgcagaatgaggccttccggctggcatgggaactggctgagtc

SEQ ID NO: 271093 - DNA, 75 bp, synthetic construct
  source 1..75: mol_type = other DNA
acgtcaggatgccgagcgtgtctggggacagtttgcgctggcgtccggcacggatgcggaatttgaccgtgtgtt

SEQ ID NO: 271094 - DNA, 75 bp, synthetic construct
  source 1..75: mol_type = other DNA
ggacagcagggtatcgcccgaccggagaacgctgtttctgacacagaccacactgaaaaatgcgggtttccttcc

SEQ ID NO: 271095 - DNA, 75 bp, synthetic construct
  source 1..75: mol_type = other DNA
gatggagaacgcactgaaatatctgtatccgtggatcccagaactactggaatcaggaatggggagaccgcaggt

SEQ ID NO: 271096 - DNA, 75 bp, synthetic construct
  source 1..75: mol_type = other DNA
gtcatctggctgagaatgaagtcaggggcgaactgacgtttattgaaaaggctcagggtatccataaagcacgga

SEQ ID NO: 271097 - DNA, 75 bp, synthetic construct
  source 1..75: mol_type = other DNA
ggagcgtaatcgacgtcaccattttggtgaacccgaaccggtactcatgctggcgggcagccccccggaaccggg

SEQ ID NO: 271098 - DNA, 75 bp, synthetic construct
  source 1..75: mol_type = other DNA
gtaccgaatctgcggtgcgtattactcacatcccaaccgggatcgtgacccagtgccagaacgaccgttcccagc

SEQ ID NO: 271099 - DNA, 75 bp, synthetic construct
  source 1..75: mol_type = other DNA
attttcgtgcgattatcgcaatatggcgcaagctattatagacggatgtataggacacgttgaatacacgggggg

SEQ ID NO: 271100 - DNA, 75 bp, synthetic construct
  source 1..75: mol_type = other DNA
tcataccgcattcacattgacccgaaagaaaaagcaatgacacgaattgcgtttgcgctggctgttgaggttatt

SEQ ID NO: 271101 - DNA, 75 bp, synthetic construct
  source 1..75: mol_type = other DNA
tgtttacccatcgtttgaggtaacaacatgccgcacggaatacaattttggatcatgctatttagttggcgtccg

SEQ ID NO: 271102 - DNA, 75 bp, synthetic construct
  source 1..75: mol_type = other DNA
atatcgaaatcaacccagcggatctgcgcattgatgtctatcgcgcgtccggtgcgggcggtcagcacgttaacc

SEQ ID NO: 271103 - DNA, 75 bp, synthetic construct
  source 1..75: mol_type = other DNA
acagccggatgtctggaacgaacccgaacgcgcacaggcgctgggtaaagagcgttcctccctcgaagccgttgt

SEQ ID NO: 271104 - DNA, 75 bp, synthetic construct
  source 1..75: mol_type = other DNA
aaggtctgcaacaaattcagcaggctgatgtggtggtctacgaccgtctggtttctgacgatattatgaatctgg

SEQ ID NO: 271105 - DNA, 75 bp, synthetic construct
  source 1..75: mol_type = other DNA
ggcgaacaacgatcagaaagccattactgaaaccaccgaacagttaatcaacgaaccgctcgatcatcgtggtga

SEQ ID NO: 271106 - DNA, 75 bp, synthetic construct
  source 1..75: mol_type = other DNA
tgcgtaccgcaggaagagattaaccagatcctgctgcgggaagcgcaaaaaggtaaacgcgtggtgcgtctgaaa

SEQ ID NO: 271107 - DNA, 75 bp, synthetic construct
  source 1..75: mol_type = other DNA
cttatgacaatagcaaagtattgttaaaagcagatggtagcaacacggttgactataacttcgccgtctggtcaa

SEQ ID NO: 271108 - DNA, 75 bp, synthetic construct
  source 1..75: mol_type = other DNA
cttacgacaatagcaaagttttgttgaaagcagatggtagcaacgcggttgactataacttcgccatctggtcaa

SEQ ID NO: 271109 - DNA, 75 bp, synthetic construct
  source 1..75: mol_type = other DNA
cgcttaaccagcgcgtcagcgaagccgctgaatctcgtcgtatcttctgtaacgtggtcgatgcgccgaaagccg

SEQ ID NO: 271110 - DNA, 75 bp, synthetic construct
  source 1..75: mol_type = other DNA
ctgccgctgcactgatgcccgaccatgcgccaccaggcaccgtgcgtcgccccggactgctcggctggatagcat

SEQ ID NO: 271111 - DNA, 75 bp, synthetic construct
  source 1..75: mol_type = other DNA
tctgcggacgccgtggtcttctcgccggatggtcagtggctggcgtggatggaggacggtcagttgtggatcacc

SEQ ID NO: 271112 - DNA, 75 bp, synthetic construct
  source 1..75: mol_type = other DNA
gcgtttttaatgcgtgatgataacggcattgtgcaactgtggcttatctcgccacagggcggcgagccgcgccag

SEQ ID NO: 271113 - DNA, 75 bp, synthetic construct
  source 1..75: mol_type = other DNA
ccacagcctggcagtgatgaaatcaatcgtgcttatgaagaaggatgggtaggaaatcacgcactggcgtttatt

SEQ ID NO: 271114 - DNA, 75 bp, synthetic construct
  source 1..75: mol_type = other DNA
cagtattttcgtgaacggcttgacgttcatcggcagaacagtcagcagctgccgcgcgcaaatgcgcccgaatat

SEQ ID NO: 271115 - DNA, 75 bp, synthetic construct
  source 1..75: mol_type = other DNA
ggcagtcatgtacatgtctttagcccaaacggtgaaagggtgagctttacctacaacgaccatgtaatgcatgaa

SEQ ID NO: 271116 - DNA, 75 bp, synthetic construct
  source 1..75: mol_type = other DNA
gccacagggcggcgagccgcaccagttaacccataacaaaacggatattcagtctgcatttaactggcatccatc

SEQ ID NO: 271117 - DNA, 75 bp, synthetic construct
  source 1..75: mol_type = other DNA
cagctgtcggtgattatcatcggcctgatttttggtctggcgatgttctatgaagtggcctttatcatgttagcg

SEQ ID NO: 271118 - DNA, 75 bp, synthetic construct
  source 1..75: mol_type = other DNA
tgactattcccagcgtaatctgtgcgggactgatcttgccgaaattcctcggcaaccttgagcgcccgacaccgt

SEQ ID NO: 271119 - DNA, 75 bp, synthetic construct
  source 1..75: mol_type = other DNA
cattgccaaaatatggtgttggcacgcccggccatcagggcgctggccaggaaggggcaaggctataaaagataa

SEQ ID NO: 271120 - DNA, 75 bp, synthetic construct
  source 1..75: mol_type = other DNA
aacggcacaatcacggatgtggacaaaaacgcgctcacctcccgcgcatatggtcgtgccgcagtggtcaccgat

SEQ ID NO: 271121 - DNA, 75 bp, synthetic construct
  source 1..75: mol_type = other DNA
tgactggaaggccttcgaccgcgccatcgacagtaaccacggtgttcctgaggctgccgcacgcctgaaagaacg

SEQ ID NO: 271122 - DNA, 75 bp, synthetic construct
  source 1..75: mol_type = other DNA
cggccggacaaaagtggtctctgggcttcacaccaaaattccagcgtgttgacctgtttaactacaacgtgctgg

SEQ ID NO: 271123 - DNA, 75 bp, synthetic construct
  source 1..75: mol_type = other DNA
aatcggtaaccaaaggtcagcttgaagacgtcaaacgcaaactcgatgtttttgaaaaggcgggccacgcggatg

SEQ ID NO: 271124 - DNA, 75 bp, synthetic construct
  source 1..75: mol_type = other DNA
ctgaagcggtcggacaacttcactggtgacccaaatatccatggacaacttgccatcgaaagtatcgtggttgat

SEQ ID NO: 271125 - DNA, 75 bp, synthetic construct
  source 1..75: mol_type = other DNA
tgtaatcgttgcagcaatagccattaaattgctgacgttcgttaacagtcaggatctgggtagcctgtttgggat

SEQ ID NO: 271126 - DNA, 75 bp, synthetic construct
  source 1..75: mol_type = other DNA
ggaagcatattttgaaacagcaaacgccgctgtggctggcgcaacatccgcatgtaatggcatttcaccaggcac

SEQ ID NO: 271127 - DNA, 75 bp, synthetic construct
  source 1..75: mol_type = other DNA
cgaaagagtacggcggagatgcagcgttgctggtgttgattgaagtggaagagtggttgccgccggagttgccgt

SEQ ID NO: 271128 - DNA, 75 bp, synthetic construct
  source 1..75: mol_type = other DNA
gttgatgttggtaaccaaatctccagtggtgataccaccgggattgtggtgatcacccaaacacatcctatcgat

SEQ ID NO: 271129 - DNA, 75 bp, synthetic construct
  source 1..75: mol_type = other DNA
gttgatgttggtaaccaaatctccagtggtgataccaccgggattgtggtgatcacccagacgcatcctatcgat

SEQ ID NO: 271130 - DNA, 75 bp, synthetic construct
  source 1..75: mol_type = other DNA
gatttactggcagaaattgaccccagccagttcaaagttgcattagcacaagcccagggccaactggcaaaagat

SEQ ID NO: 271131 - DNA, 75 bp, synthetic construct
  source 1..75: mol_type = other DNA
gttacctcaccgggcttggcaccattaccgccgctaatactgttacggtgcgcagccgcgtggacggtcaactga

SEQ ID NO: 271132 - DNA, 75 bp, synthetic construct
  source 1..75: mol_type = other DNA
ttaacgctcgcatgttagtcgacaccgaacaaaacgccgtggtgatccccaccgccgccctgcaaatgggcaacg

SEQ ID NO: 271133 - DNA, 75 bp, synthetic construct
  source 1..75: mol_type = other DNA
ctcgaagaaattaagtgaaggtacgctgttaagtctcgataaccaaatcgataccactactggcaccattaaagt

SEQ ID NO: 271134 - DNA, 75 bp, synthetic construct
  source 1..75: mol_type = other DNA
aagcaggacacgattgtccaccgaccgcagcgtaaaaaaatcagcgaagtgccagtaaagcggttgattcaggaa

SEQ ID NO: 271135 - DNA, 75 bp, synthetic construct
  source 1..75: mol_type = other DNA
atatcccggcactggcaggactgattaccacgatggttacgcagggctatgagtatcgtcgtgatgacgatatgg

SEQ ID NO: 271136 - DNA, 75 bp, synthetic construct
  source 1..75: mol_type = other DNA
gagcttgatcagtggatggaaagccggatttatccggtgatgactgcgatcccggcactggctggactgattacc

SEQ ID NO: 271137 - DNA, 75 bp, synthetic construct
  source 1..75: mol_type = other DNA
tgaacacggggcgacgctgtttgatggtcgccccgttgtttttgacgaagaggattttccggccgtcgcggttta

SEQ ID NO: 271138 - DNA, 75 bp, synthetic construct
  source 1..75: mol_type = other DNA
aattcaatggtggctttgctagtggcggcgctgtccgtcgggatgctggcgggcatggatttgatgtcgctgctg

SEQ ID NO: 271139 - DNA, 75 bp, synthetic construct
  source 1..75: mol_type = other DNA
cgaaagagtatggtggcgacgcggcgttgctggtgttgattgaagtggaagagtggctgccgccagaattgccct

SEQ ID NO: 271140 - DNA, 75 bp, synthetic construct
  source 1..75: mol_type = other DNA
ggtaaaagacacgttaaaaacctggggtctgctggaactggtcaactccgtggttgggctgattattgtgttgat

SEQ ID NO: 271141 - DNA, 75 bp, synthetic construct
  source 1..75: mol_type = other DNA
gcaaccggtcagctggttggcgtgaatccggcgctgctggtgctggcgacggctgcgggttccaacaccctcacc

SEQ ID NO: 271142 - DNA, 75 bp, synthetic construct
  source 1..75: mol_type = other DNA
tttcggcgatgaccgccgccgggattatcagtgctgcaatccttgatccagcaaccggtcagctggttggcgtga

SEQ ID NO: 271143 - DNA, 75 bp, synthetic construct
  source 1..75: mol_type = other DNA
gcgcggcaggtccggtcatctttggcgtgggttataacgatattaaatcctggtggttggtcggtgcggtactga

SEQ ID NO: 271144 - DNA, 75 bp, synthetic construct
  source 1..75: mol_type = other DNA
tttaaaaccaccgccgtattaagcggttactcttccggtaccacctggctggtgttttctgcgtttactttaagc

SEQ ID NO: 271145 - DNA, 75 bp, synthetic construct
  source 1..75: mol_type = other DNA
tttaagaccaccgccgtattaagcggttactcttcaggtactacctggctggtgttctcggcgtttaccttaagc

SEQ ID NO: 271146 - DNA, 75 bp, synthetic construct
  source 1..75: mol_type = other DNA
tatggcggcgcggctggtccggttatcttcggtgttggctataacgacattaagtcctggtggctggtcggtgcg

SEQ ID NO: 271147 - DNA, 75 bp, synthetic construct
  source 1..75: mol_type = other DNA
ccggcaacaccttccaacaccgcgcgtgcgggcggcattgtgttaccgataatcaacagcgtggcggtagctctg

SEQ ID NO: 271148 - DNA, 75 bp, synthetic construct
  source 1..75: mol_type = other DNA
gccgcgtttgtaaccacaggcttaggtaaacgtattgcctatctgctgattggtaaaattggtagcactaccctg

SEQ ID NO: 271149 - DNA, 75 bp, synthetic construct
  source 1..75: mol_type = other DNA
cgttgatgcgccagttgagaaaacacaagtcgacgccagtgtagtcgagcaagagtggcgggcgatgactgatgt

SEQ ID NO: 271150 - DNA, 75 bp, synthetic construct
  source 1..75: mol_type = other DNA
ggcctgcaaagtatccaacagtgcgttggcgcaaattcttgaatctgcacagcaggatggtaatgaaatcatggt

SEQ ID NO: 271151 - DNA, 75 bp, synthetic construct
  source 1..75: mol_type = other DNA
taccgatatggcggcatggagtgagcttctggcacggtttatcaccgatgagaatacgccgcttgagttaaaagc

SEQ ID NO: 271152 - DNA, 75 bp, synthetic construct
  source 1..75: mol_type = other DNA
gcgggcgatgaccgacgttcatcagttttttacgttgctcaagcgccacaacctgactcgccagcaggcgtttaa

SEQ ID NO: 271153 - DNA, 75 bp, synthetic construct
  source 1..75: mol_type = other DNA
ttttccatataaaagaaaccacggctcgcggcgaacgtcagagtgttcagttctttgatcatcagggcgatgcgt

SEQ ID NO: 271154 - DNA, 75 bp, synthetic construct
  source 1..75: mol_type = other DNA
gaatattttcaacccgacgtttactcttcatctattagaagagagcattgctgaagcctgggttacccgtaaacc

SEQ ID NO: 271155 - DNA, 75 bp, synthetic construct
  source 1..75: mol_type = other DNA
atcaaaacgttgcaggccattgaagatgccaacgtggtgatgttggtgattgatgcgcgcgaaggtatttccgat

SEQ ID NO: 271156 - DNA, 75 bp, synthetic construct
  source 1..75: mol_type = other DNA
tgctatcagcgcttccaggcgcgggccagcactgcgaccgaaaccagcgtcaaaccggacgcttgtgattcgccg

SEQ ID NO: 271157 - DNA, 75 bp, synthetic construct
  source 1..75: mol_type = other DNA
gcagaatactgggcgcaatttgaagcagaagaaaacggcgaagaagaagaggaagacgacttcgacctacaaagc

SEQ ID NO: 271158 - DNA, 75 bp, synthetic construct
  source 1..75: mol_type = other DNA
gctgaatactgggcgcaatttgaagcggaagagaacggcgaagaagaagaggaagacgactttgacccgcaaagt

SEQ ID NO: 271159 - DNA, 75 bp, synthetic construct
  source 1..75: mol_type = other DNA
cattttgtctgggtgctgaatagcgaaaacaaagtcagcaaacatctggtgacgccgggcattcaggacagtcag

SEQ ID NO: 271160 - DNA, 75 bp, synthetic construct
  source 1..75: mol_type = other DNA
cgccgccatcgccgcattctggttctggcaaggccgcaatgaatcccagagcgcagcgccaggtgcgacgaaaca

SEQ ID NO: 271161 - DNA, 75 bp, synthetic construct
  source 1..75: mol_type = other DNA
cgagtacgattgattgcttacttcatgacgtccttcattgttggcgttcttgccgctggcctggttggttctaag

SEQ ID NO: 271162 - DNA, 75 bp, synthetic construct
  source 1..75: mol_type = other DNA
tgaaagagacgctggacttccgtctgggctttatcgatttcgcccgtgtgcactttatttctgcattgcacggca

SEQ ID NO: 271163 - DNA, 75 bp, synthetic construct
  source 1..75: mol_type = other DNA
tgatgcgcgcgaaggtatttccgatcaggatctctccctgctgggctttattctcaatagtgggcgctcacttgt

SEQ ID NO: 271164 - DNA, 75 bp, synthetic construct
  source 1..75: mol_type = other DNA
caggatctctcgctgctgggctttattctcaatagtgggcgctcacttgtcattgtggtgaataagtgggatggc

SEQ ID NO: 271165 - DNA, 75 bp, synthetic construct
  source 1..75: mol_type = other DNA
aaacaaaaccgatggtctggatccggatcaggccgttgttgatttctattcgctcggtttaggtgaaatctaccc

SEQ ID NO: 271166 - DNA, 75 bp, synthetic construct
  source 1..75: mol_type = other DNA
cgcggtcgtcgtgtgaagctgaaatatgcccacgccggtggttataacccgccgattgtggtgattcacggtaac

SEQ ID NO: 271167 - DNA, 75 bp, synthetic construct
  source 1..75: mol_type = other DNA
ctgctggcgattgaagaagcggacgtcgtactgtttatggtggatgcgcgcgcgggcctgatgccggcggatgaa

SEQ ID NO: 271168 - DNA, 75 bp, synthetic construct
  source 1..75: mol_type = other DNA
gttatgagttcttccttgccgatctcgacggcgaagtccgtgcggatgcatgggcaaaagaagcagtgcgtatgg

SEQ ID NO: 271169 - DNA, 75 bp, synthetic construct
  source 1..75: mol_type = other DNA
cgcgcaagcggcgcgcaccatcgtccgtgatagtggcgatggcaaagtacaaacactgggcgcggtagagcatag

SEQ ID NO: 271170 - DNA, 75 bp, synthetic construct
  source 1..75: mol_type = other DNA
gagctatcacgaatcttgggttttagaagaccgcattattaaagatggttcttacaacatcgatcagggcgttgg

SEQ ID NO: 271171 - DNA, 75 bp, synthetic construct
  source 1..75: mol_type = other DNA
tctgaaagagctggaacgtgaaaatcgtgaactgcgtcgcagtaacgatatccttcgccaggcttccgcttattt

SEQ ID NO: 271172 - DNA, 75 bp, synthetic construct
  source 1..75: mol_type = other DNA
aatggcatcctgaaaggctacatgcaggataaactcaacgcgcgtttgatggggatgacgccgactggcaacggt

SEQ ID NO: 271173 - DNA, 75 bp, synthetic construct
  source 1..75: mol_type = other DNA
caacgacctgaaactggataacggcgtgggtgtctgcggcaaagaagggcagagtttgccggttggcgtgggtca

SEQ ID NO: 271174 - DNA, 75 bp, synthetic construct
  source 1..75: mol_type = other DNA
ccgtgacgagttcatcatgatccgcaagatgaagaacgttaactggctggatgatgaaggtcgcgatcaggtaca

SEQ ID NO: 271175 - DNA, 75 bp, synthetic construct
  source 1..75: mol_type = other DNA
tccgctccaactggcaggagctaaaccagttgattgccgccgctaacgtctggaccatcaaaacttacggtcctg

SEQ ID NO: 271176 - DNA, 75 bp, synthetic construct
  source 1..75: mol_type = other DNA
tacgcacagctggcctggggctttaactactacggcaccgtcggttcgaaccgcgacgaattcatcatgatccgc

SEQ ID NO: 271177 - DNA, 75 bp, synthetic construct
  source 1..75: mol_type = other DNA
gtgggtgtctgcggtaaagaagggcagagtttgccggttggcgtgggccagccgacgcttaaagtcgataacctg

SEQ ID NO: 271178 - DNA, 75 bp, synthetic construct
  source 1..75: mol_type = other DNA
gccgcagtaacgatatccttcgcaggcttcgcttatttgcgaaggcggagttcgacgcctctggaaaaaatgatg

SEQ ID NO: 271179 - DNA, 75 bp, synthetic construct
  source 1..75: mol_type = other DNA
ctggtgcgccagcttccggtgaaaaatctgacgctcgccgatggaagcacttgtccggtggttagcgtttatgat

SEQ ID NO: 271180 - DNA, 75 bp, synthetic construct
  source 1..75: mol_type = other DNA
cgctgaacgtcagcgtctgaaagagctggagcgtgaaaatcgtgaaccacggcagcctgacggctgcaaattgaa

SEQ ID NO: 271181 - DNA, 75 bp, synthetic construct
  source 1..75: mol_type = other DNA
tacaccggagactctgcgtgtctgggtgcgccagcatgagcgggataccggaggcggtgatggcgggctcaccac

SEQ ID NO: 271182 - DNA, 75 bp, synthetic construct
  source 1..75: mol_type = other DNA
gttccattgccccaaagattggctgtacaccggagactctgcgtgtctgggtgcgccagcatgagcgggataccg

SEQ ID NO: 271183 - DNA, 75 bp, synthetic construct
  source 1..75: mol_type = other DNA
tacaccggagactctgcatgtctgggtttgccagcatgggcgggataccggaggcggtgacaatggtgggcttac

SEQ ID NO: 271184 - DNA, 75 bp, synthetic construct
  source 1..75: mol_type = other DNA
acgcacgcctggcgagctggcgcaacagactggcgtttctggcaggaccatcctgcgtgatattgactatctcaa

SEQ ID NO: 271185 - DNA, 75 bp, synthetic construct
  source 1..75: mol_type = other DNA
cacgataacgacgatcggctgctggcgctgttattactgaatacctttactccccgtgcgcaactcgcctcggcg

SEQ ID NO: 271186 - DNA, 75 bp, synthetic construct
  source 1..75: mol_type = other DNA
tcgacagcgatctgatcggtttgtattttgcctgtgcgctggagcggcatcaaaacgaacgccagccgatcattt

SEQ ID NO: 271187 - DNA, 75 bp, synthetic construct
  source 1..75: mol_type = other DNA
tacgccggagactctgcgtgtctgggtacgccagcatgagcgggataccggaggcggtgatggcgggctcaccac

SEQ ID NO: 271188 - DNA, 75 bp, synthetic construct
  source 1..75: mol_type = other DNA
tatgactcacaatgggcggtaatttgttccattgccccaaagactggctgtacgccggagactctgcatgtctgg

SEQ ID NO: 271189 - DNA, 75 bp, synthetic construct
  source 1..75: mol_type = other DNA
tatggttctggaaagtcaggatgaatatgactcacagtgggcggcaatttgttccattgccccaaagactggctg

SEQ ID NO: 271190 - DNA, 75 bp, synthetic construct
  source 1..75: mol_type = other DNA
cgctgaacgtcagcgtctgaaagagctggagcgtgaaaatcgtgaactgcgccgcagtaacgatatccttcgcca

SEQ ID NO: 271191 - DNA, 75 bp, synthetic construct
  source 1..75: mol_type = other DNA
cgtaaagtctggcgtcagttgttacgggaaggtatcagagtggccagatgtacagtggtgaaccgccccggaaat

SEQ ID NO: 271192 - DNA, 75 bp, synthetic construct
  source 1..75: mol_type = other DNA
gccgcagtaacgatatccttcgccaggcttccgcttattttgcgaagcggagttcgaccgcctctggaaaaaact

SEQ ID NO: 271193 - DNA, 75 bp, synthetic construct
  source 1..75: mol_type = other DNA
gaatctgccgactggtataactccagctacatcatcgcctgggggtctaacgtaccgcagacacgtacgccggac

SEQ ID NO: 271194 - DNA, 75 bp, synthetic construct
  source 1..75: mol_type = other DNA
ctggggcgagcaaaccgacgtaccggaatctgccgactggtataactccagctacatcatcgcctgggggtctaa

SEQ ID NO: 271195 - DNA, 75 bp, synthetic construct
  source 1..75: mol_type = other DNA
gccgcagtaacgatattcttcgccaggcttccgcttattttgcgaaggtggagttcgaccgcctctggaaaaaat

SEQ ID NO: 271196 - DNA, 75 bp, synthetic construct
  source 1..75: mol_type = other DNA
ctggtgcgccaattgcccgttaaaaacctgacgttagtcgatggcaacacctgtccggtggtcagcgtttatgat

SEQ ID NO: 271197 - DNA, 75 bp, synthetic construct
  source 1..75: mol_type = other DNA
ccatgatgtatcacgcccaggaacgcataatgaatatccccggttcggaagtaaccggcatgcgcggcggcattc

SEQ ID NO: 271198 - DNA, 75 bp, synthetic construct
  source 1..75: mol_type = other DNA
cagcgattgaaggcaaactcgatctgctggtgacgctcgatttccgcatgtccagcacctgcctgttttccgata

SEQ ID NO: 271199 - DNA, 75 bp, synthetic construct
  source 1..75: mol_type = other DNA
ctggaacgtgaacgtgactgcgccgcagtaacgatatccttcgccaggcttccgcttattttgcgaaggcggagt

SEQ ID NO: 271200 - DNA, 75 bp, synthetic construct
  source 1..75: mol_type = other DNA
tatggttctggaaagtcagagcgaatatgactcacaatgggcgacaatttgttccattgccccaaagattgactg

SEQ ID NO: 271201 - DNA, 75 bp, synthetic construct
  source 1..75: mol_type = other DNA
ttgaagttgatgccttagtgctgaatccaggccgtcaggaagccagcttcgatgggcaaacgctggagttaaccg

SEQ ID NO: 271202 - DNA, 75 bp, synthetic construct
  source 1..75: mol_type = other DNA
ctcaccaccgctgaacgtcagcgtctgaaagagctggaacgtgaaaatcgtgaactgcgcgttcagttcttccgg

SEQ ID NO: 271203 - DNA, 72 bp, synthetic construct
  source 1..72: mol_type = other DNA
atgactaaaaatactcgtttttcccctgaagtccgtcaacgggcagtccgtatggttctggaaagtcagggc

SEQ ID NO: 271204 - DNA, 75 bp, synthetic construct
  source 1..75: mol_type = other DNA
ctggagcgtgaaatcgtgaactgcgccgcagtaacgatatccttcgccaggcttccgcttattttgcgaaggcgg

SEQ ID NO: 271205 - DNA, 75 bp, synthetic construct
  source 1..75: mol_type = other DNA
tactttatcaactactgccgccgctacagcgatatgccgatgctggtaatgctggaaccgcgcgacgatggcagc

SEQ ID NO: 271206 - DNA, 75 bp, synthetic construct
  source 1..75: mol_type = other DNA
ccgcgcggtggtcagccaacgtgtaccgccgggcatgaccatgatgtatcacgcccaggaacgcattatgaatat

SEQ ID NO: 271207 - DNA, 75 bp, synthetic construct
  source 1..75: mol_type = other DNA
tattgaaaccatcgcccgtgaatttgccgataccgcccataaaacgcatgggcgctcgatgattatcctcggtgc

SEQ ID NO: 271208 - DNA, 75 bp, synthetic construct
  source 1..75: mol_type = other DNA
atattgtggcggtggaacgcgactaccctgctacctatgaacgctttacctcgctcgggccattgatggacaaac

SEQ ID NO: 271209 - DNA, 75 bp, synthetic construct
  source 1..75: mol_type = other DNA
caaagaaaccgacgtggtattgcaaccactgctgcacgactctccggcagagctctcacagccgtgtgaagtgct

SEQ ID NO: 271210 - DNA, 75 bp, synthetic construct
  source 1..75: mol_type = other DNA
accccagctgcgtggcgacctgccccagcggcgcgatctacaaacgcgaagaagacggtattgtgctgatcgatc

SEQ ID NO: 271211 - DNA, 75 bp, synthetic construct
  source 1..75: mol_type = other DNA
aaggcggctgggtccgcgatgtcaacggtaagatccgcccgcgtctgggcagcaagatgggggtgattaccaaaa

SEQ ID NO: 271212 - DNA, 75 bp, synthetic construct
  source 1..75: mol_type = other DNA
cgcgtttgcccgaaaccaacgcatatgattggcggttacgcgcagctggcctggggctttaactactacggcacc

SEQ ID NO: 271213 - DNA, 75 bp, synthetic construct
  source 1..75: mol_type = other DNA
tcgcagcgtaaaacacgatccgattctggtacgccagcttccggtgaaaaatctgacgctcgccgatggcagtgt

SEQ ID NO: 271214 - DNA, 75 bp, synthetic construct
  source 1..75: mol_type = other DNA
gcgcagccgcgtaaaattatctccagcccgacctggtccggtctggaaagcgataacgtctcctacaatgccgga

SEQ ID NO: 271215 - DNA, 75 bp, synthetic construct
  source 1..75: mol_type = other DNA
ctccagaaaccaacggtcatgttgcagtcaaagcgtggcaggcgctgggcgagatcaccggacgcgaacataccc

SEQ ID NO: 271216 - DNA, 75 bp, synthetic construct
  source 1..75: mol_type = other DNA
gaactgaccattgttgataacgactgggtggaagtgtttaacgccaacggtgcgctgacggctcgtgcggtagtc

SEQ ID NO: 271217 - DNA, 75 bp, synthetic construct
  source 1..75: mol_type = other DNA
ttcctcggcaaactcaattacaccaaacgcgatggcccggcacaggggcgtccgctgattgacaccgccattgat

SEQ ID NO: 271218 - DNA, 75 bp, synthetic construct
  source 1..75: mol_type = other DNA
acccgccagtcaccggaaggctgtgagtcaggcaattattactacattgctgacatgcagcagaaaacagtacaa

SEQ ID NO: 271219 - DNA, 75 bp, synthetic construct
  source 1..75: mol_type = other DNA
atgaagaaattgtatcgacctgttctcaccgctttgttggttatcggtgccatgggggtttctggctgcgaccgc

SEQ ID NO: 271220 - DNA, 75 bp, synthetic construct
  source 1..75: mol_type = other DNA
ttgcccgatttaaggacctgactccgccgcccttcagcgacgtggtggcgcataaatccgatatcgagcaggaat

SEQ ID NO: 271221 - DNA, 75 bp, synthetic construct
  source 1..75: mol_type = other DNA
cttccgcctggggcgagcgcgtggtgctgcgactgctggacaaaaaccaggcccgcctgacgctggagcgtctgg

SEQ ID NO: 271222 - DNA, 75 bp, synthetic construct
  source 1..75: mol_type = other DNA
ttgccatcaatccggctatcaggggcgcatggcgatccacgaaatgatggtggtgacgccggaattacgggccgc

SEQ ID NO: 271223 - DNA, 75 bp, synthetic construct
  source 1..75: mol_type = other DNA
tagatctcttctccctctcggaggagatgccagcgaatgaagatctcctgaatgaagattcagccgcaccggtta

SEQ ID NO: 271224 - DNA, 75 bp, synthetic construct
  source 1..75: mol_type = other DNA
gtaggttgcggtcgtgaccacactctgtttgctaaagcagatggtaaagtgaaattcgaagttaaaggcccgaaa

SEQ ID NO: 271225 - DNA, 75 bp, synthetic construct
  source 1..75: mol_type = other DNA
gtagcatcatcgttcgtcaacgtggtaccaaattccacgctggcgctaacgtaggttgcggtcgtgaccacactc

SEQ ID NO: 271226 - DNA, 75 bp, synthetic construct
  source 1..75: mol_type = other DNA
taaccttccttattagagacctcaagcgtgatgtaggacggcttgaatctatctttgataaagctggtctctcaa

SEQ ID NO: 271227 - DNA, 75 bp, synthetic construct
  source 1..75: mol_type = other DNA
aactcgccgttgaagtggcgaaggacacactcagcagtgcgcgtgaagtgaaggagacgcatgacagcctggaag

SEQ ID NO: 271228 - DNA, 75 bp, synthetic construct
  source 1..75: mol_type = other DNA
ataatgatgatggcaccatatctatggaaattgtcatgggaaagcatagcggaaaaaaagttatgaacggtgggt

SEQ ID NO: 271229 - DNA, 75 bp, synthetic construct
  source 1..75: mol_type = other DNA
tcgtctgctggataaaagccaggcctgcctctctcttgagtatctcggactgaaccacactctgaccgcgcaact

SEQ ID NO: 271230 - DNA, 75 bp, synthetic construct
  source 1..75: mol_type = other DNA
gacacttttcgacgcaggccatcacagaaggtaataaaaacccgatttccttttcccttccgcaggggcttacca

SEQ ID NO: 271231 - DNA, 75 bp, synthetic construct
  source 1..75: mol_type = other DNA
gaaaatcccgggcagggaaatcactggagctacatcttgaacaacttttccttgaacatggtcttactcagttcg

SEQ ID NO: 271232 - DNA, 75 bp, synthetic construct
  source 1..75: mol_type = other DNA
gttacggcagcagtaactcgaaccagcagcgcgttgtcctggctggcgcgccactggcactgctgcgacgcgggc

SEQ ID NO: 271233 - DNA, 75 bp, synthetic construct
  source 1..75: mol_type = other DNA
ggacaggtcagggccgaactcctcgtgctatcgctgctgcgctcgaagccggtaaggcgctggaagatttcgaga

SEQ ID NO: 271234 - DNA, 75 bp, synthetic construct
  source 1..75: mol_type = other DNA
ttgagttgttctgtacgccgggcgaaattccctctgcccgcttaccgatgagcgatgtgcgtttttattcccgca

SEQ ID NO: 271235 - DNA, 75 bp, synthetic construct
  source 1..75: mol_type = other DNA
tcgatcaaccatacacgcgaactgaacccttcagtgtttctcaatgcacatgtttcatcacatgattgcccggac

SEQ ID NO: 271236 - DNA, 75 bp, synthetic construct
  source 1..75: mol_type = other DNA
aaggctcggtcaagcatgtgtatttcgttgctgagaccaagggctcgatgtcgtcactggatttacggcctattg

SEQ ID NO: 271237 - DNA, 75 bp, synthetic construct
  source 1..75: mol_type = other DNA
ttaaaggcctcaatgctgacgtcttcgcacaattcaagagcaacccggaaagcttcattgccgaagccattcgtt

SEQ ID NO: 271238 - DNA, 75 bp, synthetic construct
  source 1..75: mol_type = other DNA
gcgggcttgtcggatgacgtagatgcttatgatctaatcctcaaagacaaggaacggttattatcactagctgag

SEQ ID NO: 271239 - DNA, 75 bp, synthetic construct
  source 1..75: mol_type = other DNA
aatcgcccagctctacaaaatccccacccgcaatattgaacagctcggtgatgcgctgaactatctggatgataa

SEQ ID NO: 271240 - DNA, 75 bp, synthetic construct
  source 1..75: mol_type = other DNA
tgcgtccggggcgcaaactggcctcgctgctggtatcgcgtattaaggtgatggcacggctggatatcgccgaaa

SEQ ID NO: 271241 - DNA, 75 bp, synthetic construct
  source 1..75: mol_type = other DNA
ctggccctgcaggggggccacattgatcccctttcattcagcagcctcaggctggccagtggtgcattcgtcctg

SEQ ID NO: 271242 - DNA, 75 bp, synthetic construct
  source 1..75: mol_type = other DNA
cggccagtggcaggaatacccgactaaacgcagctttgccgtttcagtatctacggaactacgccgccagtatta

SEQ ID NO: 271243 - DNA, 75 bp, synthetic construct
  source 1..75: mol_type = other DNA
ggcattattggaacgatggggaccggtaaaacccagtttactaaatcgctggtcacacagttgatgcgtaatcag

SEQ ID NO: 271244 - DNA, 75 bp, synthetic construct
  source 1..75: mol_type = other DNA
atgactcacaatgggcggtaatttgttccattgccccaaagactggctgtacaccggagattctgcgtgtctggg

SEQ ID NO: 271245 - DNA, 75 bp, synthetic construct
  source 1..75: mol_type = other DNA
gtacgatctggttgatggagtcacagttatcgaactcgctggttatccatcagagattcaaaacctggtagttgc

SEQ ID NO: 271246 - DNA, 75 bp, synthetic construct
  source 1..75: mol_type = other DNA
cgtattgcagagttcggcgacaagacctgtttacttgatgaagaaagtgatgatgttgattgccgccattatgca

SEQ ID NO: 271247 - DNA, 75 bp, synthetic construct
  source 1..75: mol_type = other DNA
ggattttcatcgttataccgtctgctggacgacggcaatctggatttctcagagctaaagttattcaacgataat

SEQ ID NO: 271248 - DNA, 75 bp, synthetic construct
  source 1..75: mol_type = other DNA
gcgaacttgttgccattcgcgaagagattgagccgttattgatcattaataacagccattatttactggatgatg

SEQ ID NO: 271249 - DNA, 75 bp, synthetic construct
  source 1..75: mol_type = other DNA
ttttttctctgcccccggaagttttcattattcgaatgtacgcggtgaaagctggcaacatattacccggcaaat

SEQ ID NO: 271250 - DNA, 75 bp, synthetic construct
  source 1..75: mol_type = other DNA
aagcaacgtcgctggccgctgatgcaaggcgactatctctcaagcctgattctggctatttacgcgttgcgtaat

SEQ ID NO: 271251 - DNA, 75 bp, synthetic construct
  source 1..75: mol_type = other DNA
tacaccggagactctgcgtgtctgggttcgccagcatgagcgggataccggggcggtgatggtgggctcaccacc

SEQ ID NO: 271252 - DNA, 75 bp, synthetic construct
  source 1..75: mol_type = other DNA
tatactggagactctgcgtgtctgggtacgccagcatgagcgggataccgggggcggtgaggtgggctcaccacc

SEQ ID NO: 271253 - DNA, 75 bp, synthetic construct
  source 1..75: mol_type = other DNA
tatggttctggaaagtcaggatgaatatgactcacagtgggcggcaatttgttccattgcccaaagattggctgt

SEQ ID NO: 271254 - DNA, 75 bp, synthetic construct
  source 1..75: mol_type = other DNA
gaagaactaatggcggaactggtcaggactgtgaatagtggcggaacagtccttgatccttttatggggtcaggg

SEQ ID NO: 271255 - DNA, 75 bp, synthetic construct
  source 1..75: mol_type = other DNA
aatcgcgcaataatccaggttgccagtcagtttaacctcctggaaatgccgaacgagcacacgacaccggagaag

SEQ ID NO: 271256 - DNA, 75 bp, synthetic construct
  source 1..75: mol_type = other DNA
gctcttctgcaaccggatacggtactcgccatcagcaaacatattgaggcgatggatgaactttcgcgtgatggg

SEQ ID NO: 271257 - DNA, 75 bp, synthetic construct
  source 1..75: mol_type = other DNA
ccttgatccttttatgggatcgggaacaacgggtgttgcagcactgaaagcagggcgcaaatttattggtataga

SEQ ID NO: 271258 - DNA, 75 bp, synthetic construct
  source 1..75: mol_type = other DNA
tacccggccatgcgggcatggccttatgggttttcagttatgtggcctcagcgccgtgtgcgggctgtgccgtgc

SEQ ID NO: 271259 - DNA, 75 bp, synthetic construct
  source 1..75: mol_type = other DNA
atgcgtcctctgtggcatttaatcattttatcggcggcgatagcggtggttcgatctactacaaacctgtttcct

SEQ ID NO: 271260 - DNA, 75 bp, synthetic construct
  source 1..75: mol_type = other DNA
gtgaactacaacgcttgcaagtggtacgagtcctctgtggcatttaatcatttcatcggcggtaagagcggtggg

SEQ ID NO: 271261 - DNA, 75 bp, synthetic construct
  source 1..75: mol_type = other DNA
tttatccagaaatctacaggggtaccgtaaaggcgcgatctctgatgatgtgctctttgttggttttaaagaaaa

SEQ ID NO: 271262 - DNA, 75 bp, synthetic construct
  source 1..75: mol_type = other DNA
cagcacatacgccagaacacactaaggtttatcagactgacaatgtcacgctctgttgtgggaatgcactggaaa

SEQ ID NO: 271263 - DNA, 75 bp, synthetic construct
  source 1..75: mol_type = other DNA
ttctggcactggaacaaagcggagaattacttacccgcgttaccagcgtcttttttgcgatgactgcggcgcata

SEQ ID NO: 271264 - DNA, 75 bp, synthetic construct
  source 1..75: mol_type = other DNA
atcattggcgcgtataaatttgtacagtccatgctgagtgagtctgatatctgctgggtaccgctatctgtagcc

SEQ ID NO: 271265 - DNA, 75 bp, synthetic construct
  source 1..75: mol_type = other DNA
agcatttcagtctgtatgttgatggggataagcgggttagcaagatgcgagatagtgcgttttgggaactgatga

SEQ ID NO: 271266 - DNA, 75 bp, synthetic construct
  source 1..75: mol_type = other DNA
attattaatgctattaatcagggaacagcgaaagaactgtttctggggttagtggaatattttaagcaggaaaaa

SEQ ID NO: 271267 - DNA, 75 bp, synthetic construct
  source 1..75: mol_type = other DNA
cgctgaacgtcagcgtctgaaagagccggaacgtgaaaatcgtgagttgcgccgcagtaacgatatccttcgcca

SEQ ID NO: 271268 - DNA, 75 bp, synthetic construct
  source 1..75: mol_type = other DNA
ggccaagtttgccaacgcgggcggcaagccgctggaaatgggcgacatcgaatccatctgggaggcctggttggc

SEQ ID NO: 271269 - DNA, 75 bp, synthetic construct
  source 1..75: mol_type = other DNA
tcccgctgatgctaacccataatctcccactgaaggcacgccagcagttcttctccgatatcaataacaacgtct

SEQ ID NO: 271270 - DNA, 75 bp, synthetic construct
  source 1..75: mol_type = other DNA
atgtaccgttgatgatgactctgctacttccactgaagacacgtcagcaattcttctccgatattaataacaacg

SEQ ID NO: 271271 - DNA, 75 bp, synthetic construct
  source 1..75: mol_type = other DNA
atcatacggctttatttcgcaggatgacctggcaaaacagttcctgaatgtctctgaagattttaaaccgaattt

SEQ ID NO: 271272 - DNA, 75 bp, synthetic construct
  source 1..75: mol_type = other DNA
gtaaaaaaagtcgacgttattgctgttggccgtacccggatcattaccccggcaggagagtcctgggacagctgg

SEQ ID NO: 271273 - DNA, 75 bp, synthetic construct
  source 1..75: mol_type = other DNA
ttcgacggaaacagcgtcagcgccgattttatggataacagggaacagcccggtatgcaggaaagggagtcattc

SEQ ID NO: 271274 - DNA, 75 bp, synthetic construct
  source 1..75: mol_type = other DNA
tgtgatgaagagtggcgaacatcactaagagtcaactcaatcacaaagaatatatttgataacctggataattta

SEQ ID NO: 271275 - DNA, 75 bp, synthetic construct
  source 1..75: mol_type = other DNA
actacctataaaaaaccacctttaggccctggtaaaacagtacttcttatagatgatataacaactcgaggctat

SEQ ID NO: 271276 - DNA, 75 bp, synthetic construct
  source 1..75: mol_type = other DNA
gtatgtacttaatttgatgggatggcaaagtacagaaactttatatatcggcgcatcactaaacgacatgcaaac

SEQ ID NO: 271277 - DNA, 75 bp, synthetic construct
  source 1..75: mol_type = other DNA
aatgaaaatgacctgaatgatgtgttgataccggcattattaagtgaagataaaagtatccatcgtatggcacgc

SEQ ID NO: 271278 - DNA, 75 bp, synthetic construct
  source 1..75: mol_type = other DNA
cagacggcccgcaggattaacaatgtgctgtttgatggttccggtgatatcacaatccctgccgggatgagtcag

SEQ ID NO: 271279 - DNA, 75 bp, synthetic construct
  source 1..75: mol_type = other DNA
atgaccaaatatatatctatagcaatactgcttaccagtctatccagccacgctggatcgctcatgtgtccgaca

SEQ ID NO: 271280 - DNA, 75 bp, synthetic construct
  source 1..75: mol_type = other DNA
tttatcagcattatgtctgaatataatcgtaatgataaatctaaaaacaggtgggagagggaattgtctgaatat

SEQ ID NO: 271281 - DNA, 75 bp, synthetic construct
  source 1..75: mol_type = other DNA
attaataacagcattcatattctgttaagccgcgatggcggttttgaagagatgttgttccacattctgcaacga

SEQ ID NO: 271282 - DNA, 75 bp, synthetic construct
  source 1..75: mol_type = other DNA
cgggcatgatgcgatcgtgcgccgcaggattgagcaacccgatgcgccaaatgataactctattcgtgtggtggc

SEQ ID NO: 271283 - DNA, 75 bp, synthetic construct
  source 1..75: mol_type = other DNA
tgattgagtcttcgaaactgacgccgacggcgagccgggaagatctccagcgcgacgaaacctgggtcgcggtgc

SEQ ID NO: 271284 - DNA, 75 bp, synthetic construct
  source 1..75: mol_type = other DNA
tattaatgcgccataacgaggcgttactgggtgcggcattgtgtgatgatcgtctgtttgatttgctgaaagacc

SEQ ID NO: 271285 - DNA, 75 bp, synthetic construct
  source 1..75: mol_type = other DNA
cggccatgatgcgatcgttcgccgcaggattgagcagcccgatgcgccaaaggataacgcgattcgtgtggtggc

SEQ ID NO: 271286 - DNA, 75 bp, synthetic construct
  source 1..75: mol_type = other DNA
cacaaatccaaaaaacgaaaacctcaagtttatacatcaaccttaataacccttgcatcatgcaactggtgacgg

SEQ ID NO: 271287 - DNA, 75 bp, synthetic construct
  source 1..75: mol_type = other DNA
cccgccaggattgggtaagtaatgatgaactggcagaaaaaatcacatcgctggtggataaaattatggataaag

SEQ ID NO: 271288 - DNA, 75 bp, synthetic construct
  source 1..75: mol_type = other DNA
tctctaataccgctgtacgtcaaagaatctttgccactggctgttccgctatggaagcagtgcaatactacgtat

SEQ ID NO: 271289 - DNA, 75 bp, synthetic construct
  source 1..75: mol_type = other DNA
gttgcttgttctgttatacctgaaaacgacatttgtgtgtgtatttatggctgtttttctccggtatcttttctc

SEQ ID NO: 271290 - DNA, 75 bp, synthetic construct
  source 1..75: mol_type = other DNA
atgaacaaaacaaaaagcagatatccttcctggtgggcatattatcaactagcccgcaacgcttattttttatta

SEQ ID NO: 271291 - DNA, 75 bp, synthetic construct
  source 1..75: mol_type = other DNA
attcaagcatatctatatacttgtggcagttggtttctattaataattccttcactatggctatatctgagaact

SEQ ID NO: 271292 - DNA, 75 bp, synthetic construct
  source 1..75: mol_type = other DNA
agcctttttattctggcatatggatgttattttcttctttttattcccccactctggctatatctgaaaaccaga

SEQ ID NO: 271293 - DNA, 75 bp, synthetic construct
  source 1..75: mol_type = other DNA
aatgggacgatgctcgtctggcaatgctcgataaccgcgctaactggaagatagatcaggtgcgtgaggcgcaca

SEQ ID NO: 271294 - DNA, 75 bp, synthetic construct
  source 1..75: mol_type = other DNA
gctctacgcgcagggcgtgctcacgcctaatgaatggctggatctgggtggtttaagttcactttccgctgaaga

SEQ ID NO: 271295 - DNA, 75 bp, synthetic construct
  source 1..75: mol_type = other DNA
cgctggtaaacccgcagatttcgcccgatctctcggaaccgaatctgacctttatttatgtgccgccgggccgcg

SEQ ID NO: 271296 - DNA, 75 bp, synthetic construct
  source 1..75: mol_type = other DNA
acgaagcgttgttggtgctggcgggatatctgctgattaatctggtcttcggtaatattctggaaccacgcatta

SEQ ID NO: 271297 - DNA, 75 bp, synthetic construct
  source 1..75: mol_type = other DNA
caggtactggtgtttaatggcttctacgaagcgttgctggtgctggcgggatatctgctgattaatctggtcttc

SEQ ID NO: 271298 - DNA, 75 bp, synthetic construct
  source 1..75: mol_type = other DNA
taattatttgatctcttttacccgcagtcatcactcatcgcttgcgataagttgtgatttatctgttgaaatccc

SEQ ID NO: 271299 - DNA, 75 bp, synthetic construct
  source 1..75: mol_type = other DNA
gaacaaataaaacattttctggcgacggcatttattcgccagcaaccggagcgttttttctctgcccccggaagt

SEQ ID NO: 271300 - DNA, 75 bp, synthetic construct
  source 1..75: mol_type = other DNA
caactgaccgatgagtggccgcaatatcccggtgacgagataaaacaaatcgttgaacatagcggtctgtttctt

SEQ ID NO: 271301 - DNA, 75 bp, synthetic construct
  source 1..75: mol_type = other DNA
atttctgccggtggcggtgtgggctatcaactggagatattcgaccgccgcagcttttttcagttgctgcaaaaa

SEQ ID NO: 271302 - DNA, 75 bp, synthetic construct
  source 1..75: mol_type = other DNA
gcaatgcttgataaccgcgccaactggaagattgatcaggtgcgtgaagcgcacaacgagttgctcgacgcgatg

SEQ ID NO: 271303 - DNA, 75 bp, synthetic construct
  source 1..75: mol_type = other DNA
agaagaacattacgatgactacgtgatgacgctctacgcacagggcgtactgacgcctaatgaatggctggatct

SEQ ID NO: 271304 - DNA, 75 bp, synthetic construct
  source 1..75: mol_type = other DNA
tgaacaggtgattccgtttcgcaccaaatctatcggtaacatgccacctgccaatcaggagcatgacgcgccgct

SEQ ID NO: 271305 - DNA, 75 bp, synthetic construct
  source 1..75: mol_type = other DNA
ggctcgcttctctcattgatagcattgagaacatcaatacgctcgccaacgaatgcgaactgaccgaagaggact

SEQ ID NO: 271306 - DNA, 75 bp, synthetic construct
  source 1..75: mol_type = other DNA
actatgaccataagctaaaaacagacgatgattatattaataatcctcttggctttaatgtcaccagttatcgtg

SEQ ID NO: 271307 - DNA, 75 bp, synthetic construct
  source 1..75: mol_type = other DNA
gctcgaagcgggcgcaagtgcgctggatgcagtgacggaagccgtgcgcttgctggaagagtgcccactgtttaa

SEQ ID NO: 271308 - DNA, 75 bp, synthetic construct
  source 1..75: mol_type = other DNA
atgtatcgcgcctggggctacgcaggcgatacgccaaccaccggtatctaccgtgaaaaaggggacaccgttgcc

SEQ ID NO: 271309 - DNA, 75 bp, synthetic construct
  source 1..75: mol_type = other DNA
ccagaagcaggcgaagaaacgattcttacattattaaatgacaatcaaccggctcacgtctcgcgtcgtaaagta

SEQ ID NO: 271310 - DNA, 75 bp, synthetic construct
  source 1..75: mol_type = other DNA
gaccgttcaggcgcaaaaatggcaaattttgcagaaaccgccggtattttcattgggtaaccccattcatgattc

SEQ ID NO: 271311 - DNA, 75 bp, synthetic construct
  source 1..75: mol_type = other DNA
ctgcaaaaacagctcgatgttcctgttttgctctctaacgtattgattgcaaggctggcggcagaattactggtt

SEQ ID NO: 271312 - DNA, 75 bp, synthetic construct
  source 1..75: mol_type = other DNA
caggacaacattttctacctgccggaagaggcgcgctggtcatttatcaaacaaaatgccaaacaggacgatatt

SEQ ID NO: 271313 - DNA, 75 bp, synthetic construct
  source 1..75: mol_type = other DNA
cgtttacgaatacttcctcggcaagtttgccgcaaccgaaggcaaaggcggtggtgagttctacacgccaaaatg

SEQ ID NO: 271314 - DNA, 75 bp, synthetic construct
  source 1..75: mol_type = other DNA
tcagggtaaaagccgtgatatcgcgctgtatggtcaggaactgacagccacgacgtataaactggcaaaaatgaa

SEQ ID NO: 271315 - DNA, 75 bp, synthetic construct
  source 1..75: mol_type = other DNA
ggactaatcgctatcgatcacgaaggtaacgtcgcgctaccttttaacaccgagggaatgtatcgcgcctggggc

SEQ ID NO: 271316 - DNA, 75 bp, synthetic construct
  source 1..75: mol_type = other DNA
atgggcaaagcagtcattgcaattcatggtggcgcaggtgcaattagccgcgcgcagatgagtctgcaacaggaa

SEQ ID NO: 271317 - DNA, 75 bp, synthetic construct
  source 1..75: mol_type = other DNA
gcacggattgcgcgtggtgacagcaagttggaaaaatatgaagaccaggcaggcttctgcaaagttgcgaccctg

SEQ ID NO: 271318 - DNA, 75 bp, synthetic construct
  source 1..75: mol_type = other DNA
tccactaataaagaacagtcagatgctcaggccgagatccgccgtctccagaaagacactgaagttcaaaacacc

SEQ ID NO: 271319 - DNA, 75 bp, synthetic construct
  source 1..75: mol_type = other DNA
gataaagaagtacggtccggattcctccactcataaagaacagtcagatgctcagaccgagatccgccgtctcca

SEQ ID NO: 271320 - DNA, 75 bp, synthetic construct
  source 1..75: mol_type = other DNA
ggatattctgcgagcaaggcgatctaccggcttgctaaaagctaacgtgaaacaaacggttaaatacagaacaga

SEQ ID NO: 271321 - DNA, 75 bp, synthetic construct
  source 1..75: mol_type = other DNA
cgccggaacaggtgatgcagttaattgagcatctgcgcgaacgtgcttcacatctctcttacaccgccgaacgcc

SEQ ID NO: 271322 - DNA, 75 bp, synthetic construct
  source 1..75: mol_type = other DNA
gccagcgttgcaacacgtcttgatatcaccacccacagcctttactcctggataaagaagtacggtccggattct

SEQ ID NO: 271323 - DNA, 75 bp, synthetic construct
  source 1..75: mol_type = other DNA
ctccagaaagagctgaaacgggttaccgacgaacgggacatattaaaaaaagccactgtagattcaatctgtcaa

SEQ ID NO: 271324 - DNA, 75 bp, synthetic construct
  source 1..75: mol_type = other DNA
ccaccaggggaaaacatttaaacaatcatcaatgttgctcactgatattgattttcagagcgccagctggcgcag

SEQ ID NO: 271325 - DNA, 75 bp, synthetic construct
  source 1..75: mol_type = other DNA
ttttattcaataggtgaggttttattaatggctatgcttccttttataacaaaatcaggtgggtccagaaatatt

SEQ ID NO: 271326 - DNA, 75 bp, synthetic construct
  source 1..75: mol_type = other DNA
gaggggcagattggtggatttctcctgggaggggctgtctcttatacacaaatccccacccggggatttgtgatg

SEQ ID NO: 271327 - DNA, 75 bp, synthetic construct
  source 1..75: mol_type = other DNA
tgatatccttcatgccaggagagcatgcggattaatgaacagttgttcgtatcgggaagtaagtaatattgttct

SEQ ID NO: 271328 - DNA, 75 bp, synthetic construct
  source 1..75: mol_type = other DNA
cgcgggcggcgaagccctgtctgtcgcccgttgcagtctggcaaatgcttcttacacggctactgaaaaaacact

SEQ ID NO: 271329 - DNA, 75 bp, synthetic construct
  source 1..75: mol_type = other DNA
tacgggaggcatcgcgctgcccgtctcccgtcaccatctggcagacactgctcacccgactgctggatcagcact

SEQ ID NO: 271330 - DNA, 75 bp, synthetic construct
  source 1..75: mol_type = other DNA
gtttacttgaagagccggataacggtatcgacgcgtttcttgcgcccggtcacgttagtatggttatcggcactg

SEQ ID NO: 271331 - DNA, 75 bp, synthetic construct
  source 1..75: mol_type = other DNA
cgaagacctggtgaaaaacaggcctcgctcccctgtcagaccacctatacccgcaacctccaaaacgccagacct

SEQ ID NO: 271332 - DNA, 75 bp, synthetic construct
  source 1..75: mol_type = other DNA
ttctcgacataacggacagcgaattaaaagaggatttattgcaaagtctgatggattcactaggttctaacaaac

SEQ ID NO: 271333 - DNA, 75 bp, synthetic construct
  source 1..75: mol_type = other DNA
aaacatggtcgatgaaagaggtgcctgcgccgtcgtcagctgatgtggcaacgatgcgcgaaatggcagaacggg

SEQ ID NO: 271334 - DNA, 75 bp, synthetic construct
  source 1..75: mol_type = other DNA
ccgcagcaacaatatccttcgccaggcttccgcttattttgtgaaggaggagttcgaccgcctctggaaaaaatg

SEQ ID NO: 271335 - DNA, 75 bp, synthetic construct
  source 1..75: mol_type = other DNA
ccaaagattggctgtacgccggagactctgcgtgtctgggttcgccagcatgagcgggagtaccgggggcggtga

SEQ ID NO: 271336 - DNA, 75 bp, synthetic construct
  source 1..75: mol_type = other DNA
ggacgccagcatgagcgggataccgggagcggtgatggtgggctcaccagcgctgaacgtcagcgtctgaaagag

SEQ ID NO: 271337 - DNA, 75 bp, synthetic construct
  source 1..75: mol_type = other DNA
cttctcatatagctcaaggtgttgagaaaaattttactatcaaatttaagaattgcactcaaagaataccaaagc

SEQ ID NO: 271338 - DNA, 75 bp, synthetic construct
  source 1..75: mol_type = other DNA
gccgcaatatatccccgggcaccaagctactgtagatgaacacatgaagcttgcgtttactgaaggctttcaata

SEQ ID NO: 271339 - DNA, 75 bp, synthetic construct
  source 1..75: mol_type = other DNA
gaacgggacatattaaaaaaagccactgtagattcaatctgccaatgcaacacccctttcaattatctctttcgg

SEQ ID NO: 271340 - DNA, 75 bp, synthetic construct
  source 1..75: mol_type = other DNA
tttcacactcagccgggagaatatgcagcaggcgctggacgtgctgatcccgctgaatatcaggcagatccatct

SEQ ID NO: 271341 - DNA, 75 bp, synthetic construct
  source 1..75: mol_type = other DNA
aaccgcctgcgtaagcggcgtggcgcatacttatatggcggcggaacggctggaaaagttgtgccagttagagaa

SEQ ID NO: 271342 - DNA, 75 bp, synthetic construct
  source 1..75: mol_type = other DNA
tatgcacaattgctagcaattaaaaaatgggcagacaatgaatttcatataattgaacttcatatgattccagga

SEQ ID NO: 271343 - DNA, 75 bp, synthetic construct
  source 1..75: mol_type = other DNA
aaagaggctcttgcgatcccgaccaacggcgatggggttcagggttacaaactgcaaattatctacaaacacaaa

SEQ ID NO: 271344 - DNA, 75 bp, synthetic construct
  source 1..75: mol_type = other DNA
gtcgccatctttgttgatggtaccagtatcaaccttatcaacggcagcacgccaatcgaacttggcaaaacctac

SEQ ID NO: 271345 - DNA, 75 bp, synthetic construct
  source 1..75: mol_type = other DNA
tgacccggatcgcattggcgctggcactggcgggttactgcgtgacgccccttgcgctggcggaagacagcgcgt

SEQ ID NO: 271346 - DNA, 75 bp, synthetic construct
  source 1..75: mol_type = other DNA
gcagattcctcttccgtattgccaattggcgtcagtaaaaaactggcgcgcgtgctggttgatgtcaacaaagct

SEQ ID NO: 271347 - DNA, 75 bp, synthetic construct
  source 1..75: mol_type = other DNA
ggcctggggtatctggcgggatgcggtttgcttgacagcttcaccgaaaaaatggcgcgaaattttcatttcgaa

SEQ ID NO: 271348 - DNA, 75 bp, synthetic construct
  source 1..75: mol_type = other DNA
aaatggcgcgaaattttcatttcgaatatggaacagcgcgcgcctggggatcttttggctatgctattggcgcgt

SEQ ID NO: 271349 - DNA, 75 bp, synthetic construct
  source 1..75: mol_type = other DNA
gacgacaaaacactggaaattcatacgaaatacatcaatctgccaatggttcctgttccatcatggtgtactcat

SEQ ID NO: 271350 - DNA, 75 bp, synthetic construct
  source 1..75: mol_type = other DNA
tatgtccgtatctatccaggcaacattatggatgttatcggttttgacattcataatttcactcgtactgtaaca

SEQ ID NO: 271351 - DNA, 75 bp, synthetic construct
  source 1..75: mol_type = other DNA
aggattgagcagcccgatgcgccaaaggataaccaaattcgtgtggtggcagacgtggcgaagtccaccatcacc

SEQ ID NO: 271352 - DNA, 75 bp, synthetic construct
  source 1..75: mol_type = other DNA
cttcctggtgggcatattatcaactattccgcaatacttactttatatttggaattccatgcttattattctatg

SEQ ID NO: 271353 - DNA, 75 bp, synthetic construct
  source 1..75: mol_type = other DNA
tgttttgtggtgttatgtctatcactggattgataatagacccatattacgggaaagacattaatgcttatttct

SEQ ID NO: 271354 - DNA, 75 bp, synthetic construct
  source 1..75: mol_type = other DNA
cgaaatacatcaatctgccaatggttcctgttccatcatggtgtactcatccagaaaccgcatcaaacaccatgc

SEQ ID NO: 271355 - DNA, 75 bp, synthetic construct
  source 1..75: mol_type = other DNA
accgatggcgcagcggcggtgatcctgatgactgaatcccgggcgaaagaattagggctggtaccgctggggtat

SEQ ID NO: 271356 - DNA, 75 bp, synthetic construct
  source 1..75: mol_type = other DNA
gggccagcctgtgggcgtggagatatttcattatcgcgacgatctctcgctcgaatcctacatttatgcacgcag

SEQ ID NO: 271357 - DNA, 75 bp, synthetic construct
  source 1..75: mol_type = other DNA
gtcggaaggaaaacttaaagaagaggtgatgaccgcctacatccctccttataaacagcctctcgcagaagataa

SEQ ID NO: 271358 - DNA, 75 bp, synthetic construct
  source 1..75: mol_type = other DNA
tgggggacaccgcagagcaaatggcgaaaacctacggtattactcgcgaacagcaagatgcattagcgcaccgtt

SEQ ID NO: 271359 - DNA, 75 bp, synthetic construct
  source 1..75: mol_type = other DNA
tggcatttgataaagtgccttttgatttccttggcgaagttgcactacgtagtctttatacctttgtactggttt

SEQ ID NO: 271360 - DNA, 75 bp, synthetic construct
  source 1..75: mol_type = other DNA
ccagcctgtgggcgtggagatttttcattatcgtgacgatctttcgctcgaatcctacatttatgcacgcagtgc

SEQ ID NO: 271361 - DNA, 75 bp, synthetic construct
  source 1..75: mol_type = other DNA
ggctgcggctggattactgcttccgcttttcaccaccttcaacctgattaacgaactagatgatgtcagccccgg

SEQ ID NO: 271362 - DNA, 75 bp, synthetic construct
  source 1..75: mol_type = other DNA
gaaaacctacggcatcactcgtgaacagcaagatgcgttagcccaccgttcgcatcagcgtgccgcccaggcgtg

SEQ ID NO: 271363 - DNA, 75 bp, synthetic construct
  source 1..75: mol_type = other DNA
cccgccagggcgatcgcatcgccatcgttagcgggttacgtacgccttttgctcgccaggcaacggcttttcatg

SEQ ID NO: 271364 - DNA, 75 bp, synthetic construct
  source 1..75: mol_type = other DNA
attacgcaaagctgcgcccggcgtttgatcgcaaacacggaacggtaacggcggcaaacagtacgccgctgaccg

SEQ ID NO: 271365 - DNA, 75 bp, synthetic construct
  source 1..75: mol_type = other DNA
gcgctggaacgtgccggtttgacgatgagcgatctgacattgatcgatatgcacgaagcctttgccgcccagacg

SEQ ID NO: 271366 - DNA, 75 bp, synthetic construct
  source 1..75: mol_type = other DNA
cgcatcagcgagccgctcaggcgtggtcggaaggtaaactcaaagaagaagtgatgaccgcctttatcccccctt

SEQ ID NO: 271367 - DNA, 75 bp, synthetic construct
  source 1..75: mol_type = other DNA
gcagaatattctaccggctttcggatggggggcaccgcagagcaaaaggcgaaaacctacggcatcacccgagaa

SEQ ID NO: 271368 - DNA, 75 bp, synthetic construct
  source 1..75: mol_type = other DNA
cgtgattgacggtacgctcgcgcaactcggtgaacttgcgcagcaaatgaacagcccgtctttgattattattgg

SEQ ID NO: 271369 - DNA, 75 bp, synthetic construct
  source 1..75: mol_type = other DNA
gccaggcggtggcgtgaacgcacagggccagccgttgccatcgttcgccatcacgcgcagcagtggcgatcgcca

SEQ ID NO: 271370 - DNA, 75 bp, synthetic construct
  source 1..75: mol_type = other DNA
cgagcacaccattgataacagcggctttaccactcagcttgagcttgaagcaaaaatcccggaatggatagcaga

SEQ ID NO: 271371 - DNA, 75 bp, synthetic construct
  source 1..75: mol_type = other DNA
aaagtcagcgtgaaacgccgcaaaccgccaaaacccaaaaaggagaaaagcagcagccgtgaaggtgattatatg

SEQ ID NO: 271372 - DNA, 75 bp, synthetic construct
  source 1..75: mol_type = other DNA
acgccgtggtgatggatgcggtcaatgagcttattgaagtggtctatcaggacgatgacgatctggtggtgattt

SEQ ID NO: 271373 - DNA, 75 bp, synthetic construct
  source 1..75: mol_type = other DNA
cgctggcgcgtggacgtgcggaactctaccccgaaatgcatggcacggtgacaggcttcaaaagtgacatcgaca

SEQ ID NO: 271374 - DNA, 75 bp, synthetic construct
  source 1..75: mol_type = other DNA
aactgaaggcgctggcccagcagttgatgcaagagcgcgggggagttgtttcccctcgctcgcccctaccgggtg

SEQ ID NO: 271375 - DNA, 75 bp, synthetic construct
  source 1..75: mol_type = other DNA
caggaaaacagtgaaaaactggccgccgatatgattatcagtcagaaacgcatgggcggcctgcaggccgtgcgt

SEQ ID NO: 271376 - DNA, 75 bp, synthetic construct
  source 1..75: mol_type = other DNA
caggaaaacagtgaaaaactggctgccgatatgatcatcagtcagaaacgcatgggcggcctgcaggccgtgcgt

SEQ ID NO: 271377 - DNA, 75 bp, synthetic construct
  source 1..75: mol_type = other DNA
gttgaggactaccgctgcgctgcactggtggaaaacatccagattggcgatttcagcgccgctgcagcagaagcc

SEQ ID NO: 271378 - DNA, 75 bp, synthetic construct
  source 1..75: mol_type = other DNA
ttcaaaagtgacatcgacaatcaggactggattattgcaaaagccgagcacaccattgataacagcggctttacc

SEQ ID NO: 271379 - DNA, 75 bp, synthetic construct
  source 1..75: mol_type = other DNA
gaggatgcaccggatcacgtcatgggcagtaccaccacgggcggggaaaccactccgggcgcggtgaaagtcggg

SEQ ID NO: 271380 - DNA, 75 bp, synthetic construct
  source 1..75: mol_type = other DNA
caggaaaacagtgaaaaactggcggccgatatgatgatcagtcagaaacgcatgggtggcctgcaggccgtgcgt

SEQ ID NO: 271381 - DNA, 75 bp, synthetic construct
  source 1..75: mol_type = other DNA
gaactgtccagcaagttcaccgtagagccgtccgtgcagcagacactggaagaccagatccagcagtccgcctct

SEQ ID NO: 271382 - DNA, 75 bp, synthetic construct
  source 1..75: mol_type = other DNA
gaagcgcagattttcgggatgaatttaacgttaaacgtgaagtgtcctggcatgatgtgaccgttgagcgcgtgg

SEQ ID NO: 271383 - DNA, 75 bp, synthetic construct
  source 1..75: mol_type = other DNA
atctgttattcatccggcaggggcagggcaaaaacgccactggtaaaccactgccagtgatcactatcacacgca

SEQ ID NO: 271384 - DNA, 75 bp, synthetic construct
  source 1..75: mol_type = other DNA
acatgtccttccttacgcgcatggcggaaatgctgggcgcaatcaccacggtaaaaagcggtaatctgttattca

SEQ ID NO: 271385 - DNA, 75 bp, synthetic construct
  source 1..75: mol_type = other DNA
acaggaggagatggctggtcgccggtgaagggagaaggcgggaagggggtgtcgaggcccggtcaggaggagtag

SEQ ID NO: 271386 - DNA, 75 bp, synthetic construct
  source 1..75: mol_type = other DNA
attgataacagcggctttaccacgcagcttgagcttgaggcaaaaatcccggaatggatagcggaaacagagtga

SEQ ID NO: 271387 - DNA, 75 bp, synthetic construct
  source 1..75: mol_type = other DNA
tccgccacagcggaaaccatgccccccctacccgacctgccggaaatgcgggtggaggtgcgcggagtggcagat

SEQ ID NO: 271388 - DNA, 75 bp, synthetic construct
  source 1..75: mol_type = other DNA
gctggcacgtacacgtaatcagggactggcagggttctgtgaaggcgcggaactgctggctgcgatgatcatcca

SEQ ID NO: 271389 - DNA, 75 bp, synthetic construct
  source 1..75: mol_type = other DNA
ccaaagagcgcgagcctaccgatccgatgctgatggaggacgcggaatataaatgcgaacagaccaactttgata

SEQ ID NO: 271390 - DNA, 75 bp, synthetic construct
  source 1..75: mol_type = other DNA
agccgtccgtgcagcagacactggaagaccagatccagcagtccgcctctttcctgacgctgattaacgtcacgc

SEQ ID NO: 271391 - DNA, 75 bp, synthetic construct
  source 1..75: mol_type = other DNA
tgaacaccggggcgcgccggatgtggttaccatccgcgcccggagtgcagattttcgcgggacgctcaattcccg

SEQ ID NO: 271392 - DNA, 75 bp, synthetic construct
  source 1..75: mol_type = other DNA
gttgaggactaccgctgcgctgcactggtggagaacatccagattggcgatttcagcgccgccgtagcagaagcc

SEQ ID NO: 271393 - DNA, 75 bp, synthetic construct
  source 1..75: mol_type = other DNA
ttcctgacgctgattaacgttacgccagtgactgagcagtccggtcagctgcttggattgggtgttggcagcacc

SEQ ID NO: 271394 - DNA, 75 bp, synthetic construct
  source 1..75: mol_type = other DNA
tagaggttctggaattgaaagaccctatactaactgaaggcatattataccagcgtcgtatatcatctcttttaa

SEQ ID NO: 271395 - DNA, 75 bp, synthetic construct
  source 1..75: mol_type = other DNA
atatcaaacaaaatacaatgacaatctaaaattatctaaccgtgatgatttctttttaagaaaaacacagcgtat

SEQ ID NO: 271396 - DNA, 75 bp, synthetic construct
  source 1..75: mol_type = other DNA
ccactttagtgatgataaaagagagtttataaagatggacttatataatggaggtgatgtaattttagaaagtga

SEQ ID NO: 271397 - DNA, 75 bp, synthetic construct
  source 1..75: mol_type = other DNA
ttaaaacaaatgttctttcagttaataacttcaaagaatcaaagataaatagtgatacagtggaggttacagtaa

SEQ ID NO: 271398 - DNA, 75 bp, synthetic construct
  source 1..75: mol_type = other DNA
ataatagtgtaaacatcgcccctaatgaaaaaaaatttgtttccctaacagagccagataagttgtcattcaaca

SEQ ID NO: 271399 - DNA, 75 bp, synthetic construct
  source 1..75: mol_type = other DNA
cattaacgacatcatcaatgtagctattttagaaacttcttatctgcaaataaaaaaaatcccaaataataatga

SEQ ID NO: 271400 - DNA, 75 bp, synthetic construct
  source 1..75: mol_type = other DNA
tgagctattaagaagacatacaaagagcaattctgagtggatagaaaaaataatcccatatgtttatgatatatt

SEQ ID NO: 271401 - DNA, 75 bp, synthetic construct
  source 1..75: mol_type = other DNA
agaaaaaaatattgagtgatataaaattagaaattagtgaatctgtatcagaacagtatttcatgaagttgacag

SEQ ID NO: 271402 - DNA, 75 bp, synthetic construct
  source 1..75: mol_type = other DNA
ttgcaatatgtggtggacccatacaagcaatttaaaaaatttgaattttatgttaaaagtgagttgtcattttcc

SEQ ID NO: 271403 - DNA, 75 bp, synthetic construct
  source 1..75: mol_type = other DNA
taaatttacatgggaaacgtatggtgatatcgtggtatcacctgaagatagaatttctcatctggaattagatgg

SEQ ID NO: 271404 - DNA, 75 bp, synthetic construct
  source 1..75: mol_type = other DNA
atttatcaacggtagagcaatttaaaaaatttgagttttatgtgaaaagtgaattatcttcggctaagtcaattt

SEQ ID NO: 271405 - DNA, 75 bp, synthetic construct
  source 1..75: mol_type = other DNA
gcgctctataagaaccttacagctacaattagctaattacgtaacttcgaatacatttgaacctgaaaacacaat

SEQ ID NO: 271406 - DNA, 75 bp, synthetic construct
  source 1..75: mol_type = other DNA
aatacattttcaaaaaatataacaatacagacagcggatggagttatggcaaactgggatgatgaactaagtact

SEQ ID NO: 271407 - DNA, 75 bp, synthetic construct
  source 1..75: mol_type = other DNA
ctatcaatgcatttgatggacatgtgcatagaattatgggagatgctgttatggctttcttccgaagcaatgaaa

SEQ ID NO: 271408 - DNA, 75 bp, synthetic construct
  source 1..75: mol_type = other DNA
gttaaatcaaaaattgataaagaaataaacaagaagctagggattaagcaagccgaaagaaaaaaagtgacaaat

SEQ ID NO: 271409 - DNA, 75 bp, synthetic construct
  source 1..75: mol_type = other DNA
ggcgcgcagtctcgcccgcagcagtccgctccggcagcgccgtctaacgagccgccgatggactttgatgatgac

SEQ ID NO: 271410 - DNA, 75 bp, synthetic construct
  source 1..75: mol_type = other DNA
cacaccgggcgcggtgaaagtcggaaaaggtggcgaatatgccaacttggacgccgtggtgatggatgccgtcaa

SEQ ID NO: 271411 - DNA, 75 bp, synthetic construct
  source 1..75: mol_type = other DNA
gagcgggatgttgaaagagccatcataaaggctggcggaaaagcatgtggcaggagaaacacgaggacagaacgc

SEQ ID NO: 271412 - DNA, 75 bp, synthetic construct
  source 1..75: mol_type = other DNA
tatcgcttccggacataagcgaatatttcattaatgacgtatttcagcccttgcgatacgagcgggatgttgaaa

SEQ ID NO: 271413 - DNA, 75 bp, synthetic construct
  source 1..75: mol_type = other DNA
cgaagccatcaacatgagtggggaaatttatcaacggtagagcaatttaaaaaatttgaattttatgttaaaagt

SEQ ID NO: 271414 - DNA, 75 bp, synthetic construct
  source 1..75: mol_type = other DNA
tatcgttacttcgagatgttatatgacattcacattggaatcttagaaaacaaggcaaatagagattttatatat

SEQ ID NO: 271415 - DNA, 75 bp, synthetic construct
  source 1..75: mol_type = other DNA
ggcaccgcagggcgttatcttagcaatgtggcaaaagtaattaaattacctttgctagatataggcataaatatt

SEQ ID NO: 271416 - DNA, 75 bp, synthetic construct
  source 1..75: mol_type = other DNA
gctgaatttgacaaagtttcatctgccgttggagtctctgctaaggctcgtgagaaaatcatgcgcatctatgag

SEQ ID NO: 271417 - DNA, 75 bp, synthetic construct
  source 1..75: mol_type = other DNA
gccgactttgacaaggttatatcttctgtcggggcttccgctaagactcgtgagaaaatcatgcgtatctatgag

SEQ ID NO: 271418 - DNA, 75 bp, synthetic construct
  source 1..75: mol_type = other DNA
aaaatttgaattttatgttaaaagtgagttatcattttccaagtcaatttttgatgatataaaaaccaaatatat

SEQ ID NO: 271419 - DNA, 75 bp, synthetic construct
  source 1..75: mol_type = other DNA
tgcgtatggttgggctgctaccggatcacgtcagttactatccgcatatgttggcacccggacaaaaacagcgtc

SEQ ID NO: 271420 - DNA, 75 bp, synthetic construct
  source 1..75: mol_type = other DNA
catccactgcattttggcgattattccttccgcagtcagcgtattcgcatgatttttcaggatccttcgacctcg

SEQ ID NO: 271421 - DNA, 75 bp, synthetic construct
  source 1..75: mol_type = other DNA
gtaccgcggatgtgctggcctcaccgctacatgagcttaccaggcggctaatttccgggcattttggcgaagcgt

SEQ ID NO: 271422 - DNA, 75 bp, synthetic construct
  source 1..75: mol_type = other DNA
gatttttcaggatccttcgacctcgttgaatccccgtcaacgtatctcgcaaattctggattttccactgcgtct

SEQ ID NO: 271423 - DNA, 75 bp, synthetic construct
  source 1..75: mol_type = other DNA
tcacgtcagttactatccgcatatgttggcacccgggcaaaaacagcgtctgggtctggcgcgcgcgctgatatt

SEQ ID NO: 271424 - DNA, 75 bp, synthetic construct
  source 1..75: mol_type = other DNA
gtaagcatattttgaagcagcaaacgccactgtggctggcgcaacatccccatgtaatggcatttcatcaggcac

SEQ ID NO: 271425 - DNA, 75 bp, synthetic construct
  source 1..75: mol_type = other DNA
gctctggcaggaggaagtctctttttcaactaacactgaaagtgccgttgtgacaggcaatgtaagagtaagcaa

SEQ ID NO: 271426 - DNA, 75 bp, synthetic construct
  source 1..75: mol_type = other DNA
cacaggagtgttgccaccaccatggagtatattgatttttcggtggaagttgctgctgaggcactggaggctgaa

SEQ ID NO: 271427 - DNA, 75 bp, synthetic construct
  source 1..75: mol_type = other DNA
tattcgtaacctgactacaaaaacatgcattactgactgcatgattaaagtcttcctcggtcgtgatggtttacc

SEQ ID NO: 271428 - DNA, 75 bp, synthetic construct
  source 1..75: mol_type = other DNA
ttcaccggagctgtttttggatttgcacggtttgacgcagctgcaagccaagcaggaattaggcgcattgattgc

SEQ ID NO: 271429 - DNA, 75 bp, synthetic construct
  source 1..75: mol_type = other DNA
tattcgtagcctgaccacaaaaacatgcataactggctgcatggttaaagttttcctcggtcgtgatggattacc

SEQ ID NO: 271430 - DNA, 75 bp, synthetic construct
  source 1..75: mol_type = other DNA
taaacagacgccgcagacgcccggcgcaaaaggcgggaccgtggccgacgaaacaccggagaaaatgacctggtt

SEQ ID NO: 271431 - DNA, 75 bp, synthetic construct
  source 1..75: mol_type = other DNA
ggatagcagatcagttaatgatggaaacacaaagcaaggccacgcaagcaagtaccacggcaggcgcggtagcgg

SEQ ID NO: 271432 - DNA, 75 bp, synthetic construct
  source 1..75: mol_type = other DNA
agggtgaggctgacgatggtaagatcacgggattcgatcagccagttggtaaaccgaaaaaaggtaaaaagggca

SEQ ID NO: 271433 - DNA, 75 bp, synthetic construct
  source 1..75: mol_type = other DNA
gaatttatcgacatgtttgatgatgttgctgttaaggctggcgaggtggcggaagagattatcaggatggtaacg

SEQ ID NO: 271434 - DNA, 75 bp, synthetic construct
  source 1..75: mol_type = other DNA
tcaacttctcgttgcacaacgacaggcagaccaggcctttgggcgtatagagcgcggcgcaaaacaggctgaccg

SEQ ID NO: 271435 - DNA, 75 bp, synthetic construct
  source 1..75: mol_type = other DNA
atcttttcggcatatctgacggcgttgtaacagcaatagacttaatcactagtggcgttgagggattgggtaaag

SEQ ID NO: 271436 - DNA, 75 bp, synthetic construct
  source 1..75: mol_type = other DNA
tcaaactgcttacaggtgaagcggaggccacggagcgtgttttcaacagactgaaagatatatcaaaagaaacag

SEQ ID NO: 271437 - DNA, 75 bp, synthetic construct
  source 1..75: mol_type = other DNA
atgccatgccgtatgccgaagcgggcaagctggtgaccttcggcattgtgccggatctacctgaaaccggatatg

SEQ ID NO: 271438 - DNA, 75 bp, synthetic construct
  source 1..75: mol_type = other DNA
gccggggaagatgaagaaaaactgacgtggtttgaaaaacgggtactgaaacccgtcaatgatgctttgggttaa

SEQ ID NO: 271439 - DNA, 75 bp, synthetic construct
  source 1..75: mol_type = other DNA
gcgggtccggctgccggtgctgatgaaccagccgacaaaatgagctggtttgaagaaaaggtcttaaagccggtc

SEQ ID NO: 271440 - DNA, 75 bp, synthetic construct
  source 1..75: mol_type = other DNA
gaagaatttaactcaatccgtgacaacaccccaacaatcatacaggaaatggcccgacagatggggttgtcaatg

SEQ ID NO: 271441 - DNA, 75 bp, synthetic construct
  source 1..75: mol_type = other DNA
ggcgtgtctgcggaacaactatcaaactccatgcgccagttccgccaggctattgatgctggcgtgttgcaggct

SEQ ID NO: 271442 - DNA, 75 bp, synthetic construct
  source 1..75: mol_type = other DNA
tcgccagtttattgacatggcggagcaggcaaaaatgcttcgcgtaaaaatcaaactgcttacaggtgaagcgga

SEQ ID NO: 271443 - DNA, 75 bp, synthetic construct
  source 1..75: mol_type = other DNA
tgaacgttgaagagtgcgaccgcctttcttttctgccttacctgtttggcaacgattttctgtatgccgaggcgt

SEQ ID NO: 271444 - DNA, 75 bp, synthetic construct
  source 1..75: mol_type = other DNA
cagtgggcgggtacatctggtcagtggcgaaaactggtttgatcgcatggtcagcgccgacgcggcgggcattat

SEQ ID NO: 271445 - DNA, 75 bp, synthetic construct
  source 1..75: mol_type = other DNA
ttcgacgctggcgataggcgtgctggtgctggaagtgctgctcgcccttaccgttatactatggggttacggtta

SEQ ID NO: 271446 - DNA, 75 bp, synthetic construct
  source 1..75: mol_type = other DNA
tctggcacttcatccgcctgccggacggtggcggttacatgatgccggatggcgaccattttcatctggttaacg

SEQ ID NO: 271447 - DNA, 75 bp, synthetic construct
  source 1..75: mol_type = other DNA
ggcggttacatgatgccggatggcgaccgtttccacatggtgaacggtgcaaactggtttgaccgtaccgtgagt

SEQ ID NO: 271448 - DNA, 75 bp, synthetic construct
  source 1..75: mol_type = other DNA
atgcagggctgactcacctgtacaggatgcgcgatgcgcagttgtggagccacatcgaatttcaccctgaatgca

SEQ ID NO: 271449 - DNA, 75 bp, synthetic construct
  source 1..75: mol_type = other DNA
ctcctttctgccgtatctgtttggcaacgattttctgtatgccgaggcgtatgtgtacgcgctggcgcaaaaaat

SEQ ID NO: 271450 - DNA, 75 bp, synthetic construct
  source 1..75: mol_type = other DNA
cgaccgtttccacatggtgaacggtgaaaactggtttgaccgtaccgtgagtgctgatgccgcaggcatcatcct

SEQ ID NO: 271451 - DNA, 75 bp, synthetic construct
  source 1..75: mol_type = other DNA
aggaggatcaggcactgtttcgccagctgatggcgggcactcgcaagattaagcaggacactattgtccatcgac

SEQ ID NO: 271452 - DNA, 75 bp, synthetic construct
  source 1..75: mol_type = other DNA
atgcggtatgcgaaacctgtcactctgaacgttgaagaatgtgaccgtctctcctttctgccttacctgtttggc

SEQ ID NO: 271453 - DNA, 75 bp, synthetic construct
  source 1..75: mol_type = other DNA
aaagcagcagccgtgaaggtgattatatggaaggtgcggaaggcaatgtgtttgtgttacgcaagacttatcaga

SEQ ID NO: 271454 - DNA, 75 bp, synthetic construct
  source 1..75: mol_type = other DNA
gccatcagttccgcattgctgaccgcgaggcgtatacgggggtacgcgcctactggcttgatcttaattacggga

SEQ ID NO: 271455 - DNA, 75 bp, synthetic construct
  source 1..75: mol_type = other DNA
cgatcgttttcatatgattaacagtgaaaactggtttgatcgcaccgtcagtgccgatgctgccggaatcatcct

SEQ ID NO: 271456 - DNA, 75 bp, synthetic construct
  source 1..75: mol_type = other DNA
caggtactggagtggcggcgttatctccttcaggagaaacaacaatcggctcagacatggaacaataaaatagca

SEQ ID NO: 271457 - DNA, 75 bp, synthetic construct
  source 1..75: mol_type = other DNA
atggggccggaaggtgtggctaacgtttcgctgtctaacattgcgggcgaatcagcggaagggctgctggtgacc

SEQ ID NO: 271458 - DNA, 75 bp, synthetic construct
  source 1..75: mol_type = other DNA
cgaccgtttcatggtaacggtgaaaactggtttgaccgcacggtcagtgctgatgccgcaggcatcatccttacc

SEQ ID NO: 271459 - DNA, 75 bp, synthetic construct
  source 1..75: mol_type = other DNA
ctgtgtacgtgctggcgaaacaaatgatgccggaatatgaaggcggcttctggcacttcatccgcctgccggacg

SEQ ID NO: 271460 - DNA, 75 bp, synthetic construct
  source 1..75: mol_type = other DNA
gcaaactggtttgaccgtaccgtgagtgccgatgccgcaggcatcattctgacctctcttgtgattaaccgtcag

SEQ ID NO: 271461 - DNA, 75 bp, synthetic construct
  source 1..75: mol_type = other DNA
ggggaaaaatcccttcaataaaagcaatgttcagcgggatacgaggaagaaaaaaacgctgacacgatcgcaatt

SEQ ID NO: 271462 - DNA, 75 bp, synthetic construct
  source 1..75: mol_type = other DNA
cgaccgtttccacatggtgaacggtgcaaactggtttgaccgtaccgtgagtgctgatgcctgcggcatcattct

SEQ ID NO: 271463 - DNA, 75 bp, synthetic construct
  source 1..75: mol_type = other DNA
tttggccaggattttctgtatgtcgaagcgtctgtgtacgcgctggcgaaaaaaatgatgccggaatatgaaggc

SEQ ID NO: 271464 - DNA, 75 bp, synthetic construct
  source 1..75: mol_type = other DNA
cggggatgcagggttgacacacctgtacaggatgcgcgatgcacagttgtggagccacatcgaatttcaccccga

SEQ ID NO: 271465 - DNA, 75 bp, synthetic construct
  source 1..75: mol_type = other DNA
tggcacttcatccgcctgccggacggtgaccgttttcatctggttaacggtgcaaactggtttgaccgcacggtc

SEQ ID NO: 271466 - DNA, 75 bp, synthetic construct
  source 1..75: mol_type = other DNA
ggagttgttgtttctgcttttgcctgtagccgctgcctatggctggtatatgggccgcagaagtgcgcaacaaaa

SEQ ID NO: 271467 - DNA, 75 bp, synthetic construct
  source 1..75: mol_type = other DNA
tgaacgttgaagaaatcgaccgtctgtcttttctgccttacctgtttggcaacgattttctgtatgccgaggcat

SEQ ID NO: 271468 - DNA, 75 bp, synthetic construct
  source 1..75: mol_type = other DNA
aaaaatgatattgtattgtccggagtgatgacaggaacatcaaagatttttcatctaaataattctggcgactta

SEQ ID NO: 271469 - DNA, 75 bp, synthetic construct
  source 1..75: mol_type = other DNA
aggcggacatctgcgaagcccttcacgaccacgccgacgagctttaccgcagctgcctcgcacgcttcggggatg

SEQ ID NO: 271470 - DNA, 75 bp, synthetic construct
  source 1..75: mol_type = other DNA
ttaacatggcccgctttatcagaagccagacgctgatcctgctggaaaaactgaatgaactggacgccgacgacc

SEQ ID NO: 271471 - DNA, 75 bp, synthetic construct
  source 1..75: mol_type = other DNA
aagcagatatctgtgaatcgcttcacgaccacgccgatgagctttaccgcagttgcctcgcacgtttcggggatg

SEQ ID NO: 271472 - DNA, 75 bp, synthetic construct
  source 1..75: mol_type = other DNA
tgcttttcagtcgtctgggaaattatcctgcccagtggctggatgagtctctggcgcgtggcgaattaatggaat

SEQ ID NO: 271473 - DNA, 75 bp, synthetic construct
  source 1..75: mol_type = other DNA
aggctgacatctgcgaagcgcttaacgaccgcgctgacgagctttaccgcagctgcctcgcacgcttcggggatg

SEQ ID NO: 271474 - DNA, 75 bp, synthetic construct
  source 1..75: mol_type = other DNA
ctttgtggcaggcaatcctgaggcagacccggagcaggagctgacggaccggtgggtggtggagcagatgtcagc

SEQ ID NO: 271475 - DNA, 75 bp, synthetic construct
  source 1..75: mol_type = other DNA
tgtggcggatgagttcgataaacccaccaccgatatccgtaaggacagatgcagcaagtgcatgcgcgggtgtga

SEQ ID NO: 271476 - DNA, 75 bp, synthetic construct
  source 1..75: mol_type = other DNA
gctgacggccatgacggcctcgtttgtgctggcgacaccgacggagacggacggggcgctgtttcccggtcgcat

SEQ ID NO: 271477 - DNA, 75 bp, synthetic construct
  source 1..75: mol_type = other DNA
ggctggaaggtctcgcgcgtgctggatgccatcgcactctcacaccagcagggcctctggctgaacgtgaatgac

SEQ ID NO: 271478 - DNA, 75 bp, synthetic construct
  source 1..75: mol_type = other DNA
gatccgccacggcaagcacgtttactcggaaaaaccgctggcgctaaacgcccacgacgcgcgtgagatggtcga

SEQ ID NO: 271479 - DNA, 75 bp, synthetic construct
  source 1..75: mol_type = other DNA
tggcaggggcgggaatatcaggcatacccgattgacggcagcggttttgagatgaacgggaagggcagcagtgcc

SEQ ID NO: 271480 - DNA, 75 bp, synthetic construct
  source 1..75: mol_type = other DNA
gggaaaaagccagagataaagcgcgtatcaaagatgcggagacttttggtgcgtgggctgagaaatggttacgcg

SEQ ID NO: 271481 - DNA, 75 bp, synthetic construct
  source 1..75: mol_type = other DNA
ggcaatctataacaaagccgagtatcgcgagcagcgcacagccatgttgcaggactgggctgacatgattgatga

SEQ ID NO: 271482 - DNA, 75 bp, synthetic construct
  source 1..75: mol_type = other DNA
tcaaggatgctgagacattcggcgcgtgggccgagaagtggttgcgcggctatcaaatggcagattccacccgcg

SEQ ID NO: 271483 - DNA, 75 bp, synthetic construct
  source 1..75: mol_type = other DNA
aacgaaagatgctgaaacttttggtgcctgggctcagaaatggctgcgtggctatcagatggccgactccacccg

SEQ ID NO: 271484 - DNA, 75 bp, synthetic construct
  source 1..75: mol_type = other DNA
taccaaaggagaggatgaaacgacgtaatccacatttggtttttcttccccaacaggcaatggatattttgattg

SEQ ID NO: 271485 - DNA, 75 bp, synthetic construct
  source 1..75: mol_type = other DNA
aatactgactggatcgaaaaatgcctggcacatgaacagaaaggggttagggcggtatacaacaaagctgaatat

SEQ ID NO: 271486 - DNA, 75 bp, synthetic construct
  source 1..75: mol_type = other DNA
ttgcagatgtgcgctggtggaagtgaatatctggttcctggtcgttacaatttccggaagccattatctaatgcc

SEQ ID NO: 271487 - DNA, 75 bp, synthetic construct
  source 1..75: mol_type = other DNA
aggcagatatttgtgaatcgcttcacgaccacgccgacgagctttaccgcagctgcctcgcacgcttcggggatg

SEQ ID NO: 271488 - DNA, 75 bp, synthetic construct
  source 1..75: mol_type = other DNA
tcaacatggcgcgattcatcaaaagccagagcctgacgttgctcgggaaactggacgcactggatgccgacgaac

SEQ ID NO: 271489 - DNA, 75 bp, synthetic construct
  source 1..75: mol_type = other DNA
cgaagttcggcaaccagaagctgacagaaatcacccatgaggatttacgggcgctgactgatgcgattgtggagc

SEQ ID NO: 271490 - DNA, 75 bp, synthetic construct
  source 1..75: mol_type = other DNA
ctatcgccatatttaaaccacgagagcgaacactgacaccagaagaaattggcctgttcttccgcacgctggatg

SEQ ID NO: 271491 - DNA, 75 bp, synthetic construct
  source 1..75: mol_type = other DNA
cacgatatgcgccgtacagccagtacgttgttgcatgaggctggttatccttcagactggattgaaaaggctctg

SEQ ID NO: 271492 - DNA, 75 bp, synthetic construct
  source 1..75: mol_type = other DNA
caccgacggagacggacggagcgctgtttcccggtcgcatcatgctggcgaacacctgtatgtgggattaccggg

SEQ ID NO: 271493 - DNA, 75 bp, synthetic construct
  source 1..75: mol_type = other DNA
gacagatgcagcaagtgcatgcgcgggtgtgagatgcgcggcatggtggctaattttggcggtttcctttccatc

SEQ ID NO: 271494 - DNA, 75 bp, synthetic construct
  source 1..75: mol_type = other DNA
ccggagcaggagctgagtgaccgctgggtggtggagcagatgtcgcagctgacagccatgacggcctcgtttgtg

SEQ ID NO: 271495 - DNA, 75 bp, synthetic construct
  source 1..75: mol_type = other DNA
tgggggccacggtggtccgccgccgggtgtatgcccgttttctggatgcggtgaatttcgtcgcgggcaatccgg

SEQ ID NO: 271496 - DNA, 75 bp, synthetic construct
  source 1..75: mol_type = other DNA
cgctgacagccatgacggcctcgtttgtgctggccacaccgaccgagacggacggggcgctgtttcccggtcgta

SEQ ID NO: 271497 - DNA, 75 bp, synthetic construct
  source 1..75: mol_type = other DNA
agctgaccgccatgacggcctcgtttgtgctggccacaccgaccgagacggacggggcgctgtttcccggtcgta

SEQ ID NO: 271498 - DNA, 75 bp, synthetic construct
  source 1..75: mol_type = other DNA
agtctgtcacctggcagagtcggcagtatcaggcctatcccattcaggggagtggatttgagatgaacggcaagg

SEQ ID NO: 271499 - DNA, 75 bp, synthetic construct
  source 1..75: mol_type = other DNA
ggcgggcaatccggaagcggacccggagcaggagctgagcgaccgctgggtggtggagcagatgtcagagctgac

SEQ ID NO: 271500 - DNA, 75 bp, synthetic construct
  source 1..75: mol_type = other DNA
gaccctgagcaggagctgacggaccggtgggtggtggagcagatgtcatcgctgacggccatgacggcctcgttt

SEQ ID NO: 271501 - DNA, 75 bp, synthetic construct
  source 1..75: mol_type = other DNA
aagggcagcagtgcctgtccgtcgctgacggtgtcgaatctgttaggtctggtcaccgggatggcggaggacctg

SEQ ID NO: 271502 - DNA, 75 bp, synthetic construct
  source 1..75: mol_type = other DNA
aagggcagcagtgcctgaccgtcgctgacggtgtcgaatctgtttggtctggtcaccggaatggcggaggacctg

SEQ ID NO: 271503 - DNA, 75 bp, synthetic construct
  source 1..75: mol_type = other DNA
gagcgctgtttcccggtcgcatcatgctggcgaacacctgtatgtgggattaccggggagatgaatgcgggtata

SEQ ID NO: 271504 - DNA, 75 bp, synthetic construct
  source 1..75: mol_type = other DNA
aagggcagcagtgcctggccgtcgctgacggtgtcgaatctgtttggtctggtcaccgggatggcggaggacctg

SEQ ID NO: 271505 - DNA, 75 bp, synthetic construct
  source 1..75: mol_type = other DNA
aagggcagcagtgcctgcccgtcgctgacggtgtcgaatctgtttggtctggtcaccggcatggcggaggacctg

SEQ ID NO: 271506 - DNA, 75 bp, synthetic construct
  source 1..75: mol_type = other DNA
aagggcagcagtgcctgtccgtcgctgacggtgtcgaatctgttgggtctggtcaccggaatggcggaggacctg

SEQ ID NO: 271507 - DNA, 75 bp, synthetic construct
  source 1..75: mol_type = other DNA
agatgtcgcagctgacagccatgacggcctcgtttgtgctggccacaccgaccgagacggacggggcgctgtttc

SEQ ID NO: 271508 - DNA, 75 bp, synthetic construct
  source 1..75: mol_type = other DNA
cgccgggtgtatgcccgttttctggatgcggtgaatttcgttgcgggcaatccggaggcggacccggagcaggag

SEQ ID NO: 271509 - DNA, 75 bp, synthetic construct
  source 1..75: mol_type = other DNA
gatgagcgggaagggcagcagtgccagaccgtcgctgacggtgtccaatctgttcggtctggtcaccgggatggc

SEQ ID NO: 271510 - DNA, 75 bp, synthetic construct
  source 1..75: mol_type = other DNA
gccacggtggtccgccgccgggtgtatgcgcgttttcttgatgcggtgaactttgtggcggggaatccggaggca

SEQ ID NO: 271511 - DNA, 75 bp, synthetic construct
  source 1..75: mol_type = other DNA
acggagcgctgtttcccggtcgcatcatgctggcgaacacctgtatgtgggattaccggggagatgaatgcggtt

SEQ ID NO: 271512 - DNA, 75 bp, synthetic construct
  source 1..75: mol_type = other DNA
gacaaacagacgggggagatgcgggagcagacagaatggcatcgcgtggtgctgttcggcaagctcgcggaagtg

SEQ ID NO: 271513 - DNA, 75 bp, synthetic construct
  source 1..75: mol_type = other DNA
cacttccggcgcgccttactttcgcattagcggcattgattgcgttctatcgcggtgagcgtaacggagaaacat

SEQ ID NO: 271514 - DNA, 75 bp, synthetic construct
  source 1..75: mol_type = other DNA
atccggtacaggacgatgcacactggctggaacgttatcagcaactctggagccagcatcgtgaccgtgttatcg

SEQ ID NO: 271515 - DNA, 75 bp, synthetic construct
  source 1..75: mol_type = other DNA
cagtggccgggccgtattgtctcaggaacaggacggcataaaatcgcacacccacagcgccagcgcatccagtac

SEQ ID NO: 271516 - DNA, 75 bp, synthetic construct
  source 1..75: mol_type = other DNA
agactgccccggagacggacaaaccgatcaaaggaaaatcccgcaaaaccaaatccgcagccgcgccgcagccgc

SEQ ID NO: 271517 - DNA, 75 bp, synthetic construct
  source 1..75: mol_type = other DNA
taattctcgttggcaatttaggccaggaccccgaaatgcgctatatgcctaatggcggcgcggtcgctaacctgc

SEQ ID NO: 271518 - DNA, 75 bp, synthetic construct
  source 1..75: mol_type = other DNA
tttggtccggtggatgaaaaatatctgccagaactgaaggcgctggctcagcagttgatgcaagagcgcgggtga

SEQ ID NO: 271519 - DNA, 75 bp, synthetic construct
  source 1..75: mol_type = other DNA
tggtggtgtacaacattccggcgttaagcggcgttaaactgaccctggatcagatcaacactctggttacgttgc

SEQ ID NO: 271520 - DNA, 75 bp, synthetic construct
  source 1..75: mol_type = other DNA
tatttacttatgacattaaaagtaacttttttgaaattagagataatattggcacagaaaatatattcagttcgt

SEQ ID NO: 271521 - DNA, 75 bp, synthetic construct
  source 1..75: mol_type = other DNA
tgctcatcggcctgtactgacgctgtgaatgcgccggaatggcggtattactggcaggtcaacatgccagccgcc

SEQ ID NO: 271522 - DNA, 75 bp, synthetic construct
  source 1..75: mol_type = other DNA
taagtcacctgttttgtgttgtggtgagaatatcacctttcatcaggtggccaaatttagtgtgccactacatcc

SEQ ID NO: 271523 - DNA, 75 bp, synthetic construct
  source 1..75: mol_type = other DNA
atgacggaacgggaactgtccattattcgtgcactgggcgaagaattcgccacggtgctggcggatttacagcgc

SEQ ID NO: 271524 - DNA, 75 bp, synthetic construct
  source 1..75: mol_type = other DNA
cagtctgagtggctctacggggtctgccggtgttcatactcatggtaatggtattcgttggccaggaggcggcgg

SEQ ID NO: 271525 - DNA, 75 bp, synthetic construct
  source 1..75: mol_type = other DNA
atggtttaccgccttgcttacatgaagaaaagtggaaacaggttatctctgtgtcctgattttgtgatccactac

SEQ ID NO: 271526 - DNA, 75 bp, synthetic construct
  source 1..75: mol_type = other DNA
gtggcagtcgccatggataatgcaattttagaaaacatcttgcggcaagttcgtcgcgattttcccggtgcacag

SEQ ID NO: 271527 - DNA, 75 bp, synthetic construct
  source 1..75: mol_type = other DNA
ggcgggttcatggacaatgacggagcctggtgtcaggaaagaagatgctgaagagtgggtttatactaccgccct

SEQ ID NO: 271528 - DNA, 75 bp, synthetic construct
  source 1..75: mol_type = other DNA
caggatgaagttctcagattgaaacagattagcgggctgacggagctgtttcaggaagaggatttcagcccggca

SEQ ID NO: 271529 - DNA, 75 bp, synthetic construct
  source 1..75: mol_type = other DNA
gtctggcaatgtatgaagttggtttaaaaacatattctccaataggacaatcactggaaaaacgtgcggaaaaaa

SEQ ID NO: 271530 - DNA, 75 bp, synthetic construct
  source 1..75: mol_type = other DNA
atgaaagccaaaatcagaaacgaaattcaggcattaattcgaattaaaatgcgtaataacaatggcagagactta

SEQ ID NO: 271531 - DNA, 75 bp, synthetic construct
  source 1..75: mol_type = other DNA
cagaaagctacccagttggcgcaccaatcccgtggccatcagataccgttccgtctggttatgccctgatgcagg

SEQ ID NO: 271532 - DNA, 75 bp, synthetic construct
  source 1..75: mol_type = other DNA
catactgtaggtattggtgcgcatacgcactccgttgcgattggttcacatggacacaccatcaccgttaacgct

SEQ ID NO: 271533 - DNA, 75 bp, synthetic construct
  source 1..75: mol_type = other DNA
atgcgttcacaacctgactgttatgaaaaaatcatccgttttatggaagagcaaaatgcatccgtatcaccgctg

SEQ ID NO: 271534 - DNA, 75 bp, synthetic construct
  source 1..75: mol_type = other DNA
ttattatctccgggagctgaaccggcagcatatcgtggagcctgaccgcagtggtaagggaagcgccatctactg

SEQ ID NO: 271535 - DNA, 75 bp, synthetic construct
  source 1..75: mol_type = other DNA
taaggtagtgtctgcggccagtgtgaatacaagtgctgcaggagcgcacactcatagtgtcagcggcacagccgc

SEQ ID NO: 271536 - DNA, 75 bp, synthetic construct
  source 1..75: mol_type = other DNA
tagaaagcctagagttgaaggaccctgtactaactgaaggaatattataccagcatcgaatatcatctattctaa

SEQ ID NO: 271537 - DNA, 75 bp, synthetic construct
  source 1..75: mol_type = other DNA
gaatcgggtcaatgttggtttggggaggaagtatcctgattatgtctgtagcggctgttatttacatgcttgccg

SEQ ID NO: 271538 - DNA, 75 bp, synthetic construct
  source 1..75: mol_type = other DNA
gggaatggctcttttagggattggggctgctggaatggccgtagagaaaacgagaaaccagatgaaacgtggaac

SEQ ID NO: 271539 - DNA, 75 bp, synthetic construct
  source 1..75: mol_type = other DNA
tatatcttgggtatggagaaacattgagagctaatactgaagttacattgagtagcactggttacttttacgaga

SEQ ID NO: 271540 - DNA, 75 bp, synthetic construct
  source 1..75: mol_type = other DNA
gaagaggtaatggctgcagtgcagtcattaatcttattttcattttttctttatatggtgcgagttttttcgttg

SEQ ID NO: 271541 - DNA, 75 bp, synthetic construct
  source 1..75: mol_type = other DNA
taaaaaaaatcccaaataatgatgatagcggttatgttttatgtctagacaaccctaacctctcatcttacatat

SEQ ID NO: 271542 - DNA, 75 bp, synthetic construct
  source 1..75: mol_type = other DNA
gcctgcagatgtgtgccggtggaagtgaataccttttgcctgggcgctactcagtgagcaagccattatccaacg

SEQ ID NO: 271543 - DNA, 75 bp, synthetic construct
  source 1..75: mol_type = other DNA
gatagcatttcaatatttacttatgacattaaaagtaacttttttgaaattagagataatattggcacagaaaat

SEQ ID NO: 271544 - DNA, 75 bp, synthetic construct
  source 1..75: mol_type = other DNA
agccgtttataacaaagcggaatacgcagaacagcgccgcgacatgttgcagcaatgggcggatatgattgatgg

SEQ ID NO: 271545 - DNA, 75 bp, synthetic construct
  source 1..75: mol_type = other DNA
tattgatcttttaataaagactggtgtgttccggggattaaaaacagtacttcactatatgggcgtcattgatac

SEQ ID NO: 271546 - DNA, 75 bp, synthetic construct
  source 1..75: mol_type = other DNA
cccattatgcagaaaaccattcagtgatgttaaagaagaatatatacctgaacttaaagcactggctgaagattt

SEQ ID NO: 271547 - DNA, 75 bp, synthetic construct
  source 1..75: mol_type = other DNA
taatgtcggggctatggccacaatgaaactggcattaaaactggtgctgctcaccctggttcgcaaaagcgagtt

SEQ ID NO: 271548 - DNA, 75 bp, synthetic construct
  source 1..75: mol_type = other DNA
ataaagcaattaacaatacaagaggtaaaaatgttaatgctaatattaaacatagtcaaattcaagagataaaaa

SEQ ID NO: 271549 - DNA, 75 bp, synthetic construct
  source 1..75: mol_type = other DNA
atgagcagtgcctacaatagtctcgatccccgtgtccgtaagtggatttataagcagggctggtcatcattaagg

SEQ ID NO: 271550 - DNA, 75 bp, synthetic construct
  source 1..75: mol_type = other DNA
taaaggttatcttgagcgggtgcccgaaaaaggaaaagagctccagagctctgctgaacagctcgtctgcgcgga

SEQ ID NO: 271551 - DNA, 75 bp, synthetic construct
  source 1..75: mol_type = other DNA
cgtacttctattacaggaccatttgcatttaccgcttccattatcggcattgtcggtgcaggtgcgatgttgatc

SEQ ID NO: 271552 - DNA, 75 bp, synthetic construct
  source 1..75: mol_type = other DNA
atggacgtgacaaacgatgattacatccgtctgttgtcggcactgctgccgcccggtccggcgtggtcagccaga

SEQ ID NO: 271553 - DNA, 75 bp, synthetic construct
  source 1..75: mol_type = other DNA
gtgttcgtgccgatcaactctggtcgcaactttgccagacaggtccgttccggaatgtggatataaatgacttta

SEQ ID NO: 271554 - DNA, 75 bp, synthetic construct
  source 1..75: mol_type = other DNA
acgatcagcaccgtcgtcttgagagcctgggggaagccctggaaatgcaagtgacgccctggcacggggatgtac

SEQ ID NO: 271555 - DNA, 75 bp, synthetic construct
  source 1..75: mol_type = other DNA
atgatgaacgaataccagcggctggatccacggatacagaagtggatataccggcagggatgggccgatctcagg

SEQ ID NO: 271556 - DNA, 75 bp, synthetic construct
  source 1..75: mol_type = other DNA
attttacaacattatataaatacgcattatttgtcagagtcgcaaactcagaagataaaagatattgtggatttt

SEQ ID NO: 271557 - DNA, 75 bp, synthetic construct
  source 1..75: mol_type = other DNA
tgtaaccaacgtagtagtgtaattggtggaaaagaaccattaacaataatcattcctgctattgaacatggtatg

SEQ ID NO: 271558 - DNA, 75 bp, synthetic construct
  source 1..75: mol_type = other DNA
gcaggttactgcgcctcattccgttgccagcctgcgccagcgtatggggcgttccggtcggcgcgactcgcctgc

SEQ ID NO: 271559 - DNA, 75 bp, synthetic construct
  source 1..75: mol_type = other DNA
taggcgatcaaaccgtaaacacgttgtcggcattacttatccaacgcggtttcaaggcgggctcatttgctggtg

SEQ ID NO: 271560 - DNA, 75 bp, synthetic construct
  source 1..75: mol_type = other DNA
agcggtgaactggttctgggcgtcgaaggcgaacgtcaggtgaatcaatataccttctatgccgtgttcagcacg

SEQ ID NO: 271561 - DNA, 75 bp, synthetic construct
  source 1..75: mol_type = other DNA
atatgtataaaaaaatccaagtggaagccgcaactaccgacatcaaaacacttgaacagcttttgaaaaaattca

SEQ ID NO: 271562 - DNA, 75 bp, synthetic construct
  source 1..75: mol_type = other DNA
ttaggttcaactgcgggaaagtggttaggtgcgttagtgggatttttatttatggctatggtcggggcattgtta

SEQ ID NO: 271563 - DNA, 75 bp, synthetic construct
  source 1..75: mol_type = other DNA
ctgggtgatgagccggatccccgatgcccccgtgtcgggatttgaaagcgatttaggctctaccgcgggaaagtg

SEQ ID NO: 271564 - DNA, 75 bp, synthetic construct
  source 1..75: mol_type = other DNA
gaagcaataatattgtcctgaccggtgaaccgcgtatgaaagaacgcccgatcggtcatctggtcgatgcgctgc

SEQ ID NO: 271565 - DNA, 75 bp, synthetic construct
  source 1..75: mol_type = other DNA
atcaccggatggcgatgtgtttttcgctggtggcgttgtcagatacaccagtgacgattcttgatcccaaatgca

SEQ ID NO: 271566 - DNA, 75 bp, synthetic construct
  source 1..75: mol_type = other DNA
cggaagatacggtgattcgtattaaaggcgatctggtttctaaaccttatatcgacatcacactcaatctgatga

SEQ ID NO: 271567 - DNA, 75 bp, synthetic construct
  source 1..75: mol_type = other DNA
cttcgattgcgattccatttatgcgcaagcccaaaaagccgccgctgctatgtggcgtcggatggatgcgctggc

SEQ ID NO: 271568 - DNA, 75 bp, synthetic construct
  source 1..75: mol_type = other DNA
ggtggaagcacatatcggtgctcacgcgccgtttaccgtgccggatgccggtctggagatgctgcgtgaagccgt

SEQ ID NO: 271569 - DNA, 75 bp, synthetic construct
  source 1..75: mol_type = other DNA
aaaaaacgattgtcagtgatgatatcagaaatataatcagaagaatgagtgaaccgccccgggtttcctggagag

SEQ ID NO: 271570 - DNA, 75 bp, synthetic construct
  source 1..75: mol_type = other DNA
cagtacagctacacccggcgaaagtgcaggaaggcgtcgatatcgccatcgaaaatgatgtcattatctctatcg

SEQ ID NO: 271571 - DNA, 75 bp, synthetic construct
  source 1..75: mol_type = other DNA
cttcgattgcgattccatttatgcacaagccagaaaagccgctgccagtatgtggcgtcggatggatgcgctggc

SEQ ID NO: 271572 - DNA, 75 bp, synthetic construct
  source 1..75: mol_type = other DNA
atttttaaaagttggcctgcgtgcgatgacctgttttgaaaccactgaccgtaacaacggcatcacagagttaca

SEQ ID NO: 271573 - DNA, 75 bp, synthetic construct
  source 1..75: mol_type = other DNA
cggaaacgccggaacggcaatgcgcccgctggcggcagctctttgtctgggtagcaatgatattgtgctgactgg

SEQ ID NO: 271574 - DNA, 75 bp, synthetic construct
  source 1..75: mol_type = other DNA
ttgtggtggaagaccggcgcagccgcccgaccggactcacagccggagatacgggggtgtatcaccatgaggggc

SEQ ID NO: 271575 - DNA, 75 bp, synthetic construct
  source 1..75: mol_type = other DNA
tctgatgatgtggagcgcctgcaaaattacgggcatttcagcgttcccctgccgggtgcagaggcgctgattgcc

SEQ ID NO: 271576 - DNA, 75 bp, synthetic construct
  source 1..75: mol_type = other DNA
atcatcaatggcaaatcgacggataagcatatccaccgtggcgacagcggcggaaccacggggccgatgcaatga

SEQ ID NO: 271577 - DNA, 75 bp, synthetic construct
  source 1..75: mol_type = other DNA
gctgttattgccggaatcacctattccggccatgtacatcatgataacggtgaaggcagtaagacaggagcgccg

SEQ ID NO: 271578 - DNA, 75 bp, synthetic construct
  source 1..75: mol_type = other DNA
gggcagcgggatcaggccgtggtacttgtggtggaagaccggcgcagccgcccgaccggactcaccgccggagac

SEQ ID NO: 271579 - DNA, 75 bp, synthetic construct
  source 1..75: mol_type = other DNA
gggatacggtattccggtcatgtgcatcaggataacggcaaaggcagtaagacaggagcaccggagaatggctga

SEQ ID NO: 271580 - DNA, 75 bp, synthetic construct
  source 1..75: mol_type = other DNA
gaaaggttgcttctatgaggcatttaaggtcgcaatgcgcaactatccggttactcctgatggttggataagctg

SEQ ID NO: 271581 - DNA, 75 bp, synthetic construct
  source 1..75: mol_type = other DNA
gtgacgattctcgacccaggatgtaccgctaaaacgttcccggattatttcgaacaactggcgcggattagtttc

SEQ ID NO: 271582 - DNA, 75 bp, synthetic construct
  source 1..75: mol_type = other DNA
attggtcatctggtggatgcgctgcgcctgggcggggcgaagatcacttacctggaacaagaaaattatccgcca

SEQ ID NO: 271583 - DNA, 75 bp, synthetic construct
  source 1..75: mol_type = other DNA
tgattgccccggtaacgcgcggtattcgcctgttgtttggccggggcgttctgaccggcacacatgacgaactga

SEQ ID NO: 271584 - DNA, 75 bp, synthetic construct
  source 1..75: mol_type = other DNA
caaacgaatgaatatggtctgattagcaatgtcacacactggatgccgctaccagaacctccgcaggagtcgaag

SEQ ID NO: 271585 - DNA, 75 bp, synthetic construct
  source 1..75: mol_type = other DNA
ctttgctggttacgtgtgagatcggcgttatacctgcttattacggctttgtgagcgttaatggtgataggcatt

SEQ ID NO: 271586 - DNA, 75 bp, synthetic construct
  source 1..75: mol_type = other DNA
tgatttcactcagattaacagtgattcagatgtagagagaaatgagaatgctgtctcttttatcagggatgcaat

SEQ ID NO: 271587 - DNA, 75 bp, synthetic construct
  source 1..75: mol_type = other DNA
attatttttaattgtgtcgggtggccggatttgggagaaggttcggcaatattacagtttgccatgacagccaga

SEQ ID NO: 271588 - DNA, 75 bp, synthetic construct
  source 1..75: mol_type = other DNA
aactgcgcgagcaggaagaccgcgagcgccacatcagcaacgcgcgcagccgtatagcagcgtcctctcctttcc

SEQ ID NO: 271589 - DNA, 75 bp, synthetic construct
  source 1..75: mol_type = other DNA
aaataaaaagatgacggggagtcaatgtacggctgtaataactttctcgagccaaataactaaacatgatggttc

SEQ ID NO: 271590 - DNA, 75 bp, synthetic construct
  source 1..75: mol_type = other DNA
gataccccagcgggtagcgaatggctggaaagcgtgcgggcttatgagaaagcgattttgagccagcgtgggtaa

SEQ ID NO: 271591 - DNA, 75 bp, synthetic construct
  source 1..75: mol_type = other DNA
ccgtctcctttatcagggatgcaatgaatagtgaagagcatataattatttttaattgtgttgggtggcctgatt

SEQ ID NO: 271592 - DNA, 75 bp, synthetic construct
  source 1..75: mol_type = other DNA
ggcatgtatttttatatggctgacgcagcaacttttactgattgtgcgaccggaaaacgattcgcggtggcaaat

SEQ ID NO: 271593 - DNA, 75 bp, synthetic construct
  source 1..75: mol_type = other DNA
tctgatgggatgtaataatcgggccgaagtcgatacgctttctccggcgcaggctgccgaactgaaaccgatgcc

SEQ ID NO: 271594 - DNA, 75 bp, synthetic construct
  source 1..75: mol_type = other DNA
ctttcgcttcctacggtacatgggcgcgaaccgctgacaagctggtattaaccgacagcaaaggtgaaaagtcat

SEQ ID NO: 271595 - DNA, 75 bp, synthetic construct
  source 1..75: mol_type = other DNA
tgtgttcatatgaatatcacaatgctgcacaacggtacgttggttgctctctttcgcagccgttgggcagacaac

SEQ ID NO: 271596 - DNA, 75 bp, synthetic construct
  source 1..75: mol_type = other DNA
atgacgaaatcgacgatggcgacgacagccgcaaagaaccgacagccgtcggacgctccgctttctggggtgccc

SEQ ID NO: 271597 - DNA, 75 bp, synthetic construct
  source 1..75: mol_type = other DNA
ccgtcttttattgccgtacccaacccggcgaaaaatgggtcggcaatgatgatatcagcgcagtgaaaatttccg

SEQ ID NO: 271598 - DNA, 75 bp, synthetic construct
  source 1..75: mol_type = other DNA
tattctgacgctcgcgctgggcgcgctgtgcggactgatcaacgccggattgattatctacaccggtgtgaaccc

SEQ ID NO: 271599 - DNA, 75 bp, synthetic construct
  source 1..75: mol_type = other DNA
cccatcaccggggaacaaagcgggtggtatcaccacgctggaagacaaatcacttggctgtacccagaaagcggg

SEQ ID NO: 271600 - DNA, 75 bp, synthetic construct
  source 1..75: mol_type = other DNA
gtttgaaaaactggtcactatggtcaacgacttcaaacagtactttattgcccatgaccagccgatctatgaaaa

SEQ ID NO: 271601 - DNA, 75 bp, synthetic construct
  source 1..75: mol_type = other DNA
tgcgccacccgaacgcgggcgcagtgctggtgattggtctgggttgtgaaaacaaccaggttgccgcattccgtg

SEQ ID NO: 271602 - DNA, 75 bp, synthetic construct
  source 1..75: mol_type = other DNA
ataacccagtgcactatgcggatgccattcgttataatgctcgaacgcctctgcaaggttctttgctgccgttaa

SEQ ID NO: 271603 - DNA, 75 bp, synthetic construct
  source 1..75: mol_type = other DNA
tcattcctgactcaaactaaaagtgctgaaaagtggcttttgtcacaaacagacttttgtgagttaatttctgtc

SEQ ID NO: 271604 - DNA, 75 bp, synthetic construct
  source 1..75: mol_type = other DNA
tcttcagccacacctacggctgctcacagctgggcgacgatcacattaatacccgcaccatgctgcaaaacatgg

SEQ ID NO: 271605 - DNA, 75 bp, synthetic construct
  source 1..75: mol_type = other DNA
agttaccggcgcagtgtcgtagttgtaacgtgttaaaagcgtgctggggaggctgcccgaaacaccgctttatgc

SEQ ID NO: 271606 - DNA, 75 bp, synthetic construct
  source 1..75: mol_type = other DNA
ggtgaatttctggtggcgatattcgaccactggatcaaacgcgacgtcggcaagattttcgtgatgaatatcgaa

SEQ ID NO: 271607 - DNA, 75 bp, synthetic construct
  source 1..75: mol_type = other DNA
gtttatccgcaatatcggctggggaatatgcatcagcaaacaattgcagaaatgatcgattccccgcaacagcag

SEQ ID NO: 271608 - DNA, 75 bp, synthetic construct
  source 1..75: mol_type = other DNA
atcgcgctgggcgtgatgttccagggcggcgtaccgctgccgctggccattattctgacgctcgcgctgggcgcg

SEQ ID NO: 271609 - DNA, 75 bp, synthetic construct
  source 1..75: mol_type = other DNA
gctcggtgattgttgagcacaacggcgacgtttacgcctgcgatcactatgtttatccgcaatatcgactgggga

SEQ ID NO: 271610 - DNA, 75 bp, synthetic construct
  source 1..75: mol_type = other DNA
tttatgattttttgtgcaatgcaggcgttgagtttatccagtttattccggtggtggagcgcctggctgatgaaa

SEQ ID NO: 271611 - DNA, 75 bp, synthetic construct
  source 1..75: mol_type = other DNA
ttgaagtcttcaacagcaacggtgcactgactgcccgtgcggttgtcagccagcgtgttccggcagggatgacca

SEQ ID NO: 271612 - DNA, 75 bp, synthetic construct
  source 1..75: mol_type = other DNA
gctcggttcttccggtaaaggtcatgagtttatgctcaagtacctgctggggacggagcacggtatccagggcaa

SEQ ID NO: 271613 - DNA, 75 bp, synthetic construct
  source 1..75: mol_type = other DNA
aaagatctgggtatcgccgataacgactggattgaagtcttcaacagcaacggtgctctgactgcccgtgcggtt

SEQ ID NO: 271614 - DNA, 75 bp, synthetic construct
  source 1..75: mol_type = other DNA
ttattgaaaaagcaaatgcaatgactgtatttcagtctgccgaccagattgaagaaattctccaaaaggttgaac

SEQ ID NO: 271615 - DNA, 75 bp, synthetic construct
  source 1..75: mol_type = other DNA
cgatgagtttgttgtagtgcgtaagatgaagaacattgactggttagatggcgaaggcaatgaccaggtacagga

SEQ ID NO: 271616 - DNA, 75 bp, synthetic construct
  source 1..75: mol_type = other DNA
acccaacagcgtggtggtatccataactcggtcacccgtatcacgccgaaaccgacgcatatgatcggcggctat

SEQ ID NO: 271617 - DNA, 75 bp, synthetic construct
  source 1..75: mol_type = other DNA
atgacggcacaacaaggtgatgcactgcgtgatattgttaataaggccagagttaccaccattcttcagagtaag

SEQ ID NO: 271618 - DNA, 75 bp, synthetic construct
  source 1..75: mol_type = other DNA
tccagacaatcagaagatgaagcaaccaaaaatccgcctcaaccgttcacgggcagtttgtataaggttttgagc

SEQ ID NO: 271619 - DNA, 75 bp, synthetic construct
  source 1..75: mol_type = other DNA
ttgccgacgaaccggtttccgcgctggacgtctcggtgcgtgcgcaggtgctcaacctgatgatggacctacagc

SEQ ID NO: 271620 - DNA, 75 bp, synthetic construct
  source 1..75: mol_type = other DNA
ccaatgtattccagcatcgccctttccttgaacaggataatcaggcgcacggttataaactggtggcggtgggga

SEQ ID NO: 271621 - DNA, 75 bp, synthetic construct
  source 1..75: mol_type = other DNA
aaacgtgaaggaatttttgcaatcttatcaatcaccggaagttgctaaagcggcagaaactatctttaacggtgg

SEQ ID NO: 271622 - DNA, 75 bp, synthetic construct
  source 1..75: mol_type = other DNA
acacggattaaggttgaggtggggcaatggtatcgcatgacgggtaaacgtttatcacttaatgtcccgcctttt

SEQ ID NO: 271623 - DNA, 75 bp, synthetic construct
  source 1..75: mol_type = other DNA
aaggggcacagttgccacgtgtactggacgacccgaaagtggatgtagcgattatcagcaccacttacatcgagc

SEQ ID NO: 271624 - DNA, 75 bp, synthetic construct
  source 1..75: mol_type = other DNA
gctatatagaaagcagttcggccgggagttataccattttcattaatacccctccctatagtgtagcgacacagc

SEQ ID NO: 271625 - DNA, 75 bp, synthetic construct
  source 1..75: mol_type = other DNA
acctgctgtttttaccttttacggcgcagctggtaccggatggtagcggtaatgctgtcggtgttggaacatttt

SEQ ID NO: 271626 - DNA, 75 bp, synthetic construct
  source 1..75: mol_type = other DNA
tatctgcattggcattgtcgccctaccgctgacgatggtgattgtcagtggcgggatcgatatttcgtttggttc

SEQ ID NO: 271627 - DNA, 75 bp, synthetic construct
  source 1..75: mol_type = other DNA
ggcagttacgcggtcgggtcaaacgacagttcgccacgatgggtgaacgtcgccgtttctgggaaaaactgttcg

SEQ ID NO: 271628 - DNA, 75 bp, synthetic construct
  source 1..75: mol_type = other DNA
atttagatttaccgtggctcaacctacatgtactaccattgcgctggactcaaccagccaaaatgttagcggtaa

SEQ ID NO: 271629 - DNA, 75 bp, synthetic construct
  source 1..75: mol_type = other DNA
gctatatagaaagcagttcggccgggagttataccattttcattaatacccttggctatcatgtatcgacacagc

SEQ ID NO: 271630 - DNA, 75 bp, synthetic construct
  source 1..75: mol_type = other DNA
cctaaaaacaaaatatgtaactctgtaattaataattctaatcaaattttcatatatgattatatatctttgcgt

SEQ ID NO: 271631 - DNA, 75 bp, synthetic construct
  source 1..75: mol_type = other DNA
gaaaaagaaatatgtaactctgtaattaataataataataataataatcggattttcatatatgattatatatat

SEQ ID NO: 271632 - DNA, 75 bp, synthetic construct
  source 1..75: mol_type = other DNA
gacgaaattgagcgcattattcgtagtgcggtcaataacgtgccctatgccgtggggatcaacaaccacatgggc

SEQ ID NO: 271633 - DNA, 75 bp, synthetic construct
  source 1..75: mol_type = other DNA
atgcactgcggtggcagcgacgcgttctccggcgtcggctacgcctctgacctgctggtgcgctgcggcgcaacg

SEQ ID NO: 271634 - DNA, 75 bp, synthetic construct
  source 1..75: mol_type = other DNA
taggttactctttttctgtaatagattctcctctaagtaacaaaggtgctactttaagtgtatatagaaaagtaa

SEQ ID NO: 271635 - DNA, 75 bp, synthetic construct
  source 1..75: mol_type = other DNA
tcgcaagctatttttatacaaaaaatgaagatattaataatcagttggtaaataatataataggaggtttatctg

SEQ ID NO: 271636 - DNA, 75 bp, synthetic construct
  source 1..75: mol_type = other DNA
ttatttttggggggcagatactagagatggaaagcttgtcatgaaaaagggtcaggataaatatactttaatgac

SEQ ID NO: 271637 - DNA, 75 bp, synthetic construct
  source 1..75: mol_type = other DNA
aaatcaaaccagagcacttcaaaaactgggttgaatgggcgaaagccaatcagctcggtctggattttaacccct

SEQ ID NO: 271638 - DNA, 75 bp, synthetic construct
  source 1..75: mol_type = other DNA
cgtgccgatctggaacaggctatgcggctgattccggggccgaaacggcttaatttacatgccatctatctggaa

SEQ ID NO: 271639 - DNA, 75 bp, synthetic construct
  source 1..75: mol_type = other DNA
tttaaatttatcggcgccaatattttacgcgtctggcttaacgttgaagaacgtcgtaaccccacgcaaggagca

SEQ ID NO: 271640 - DNA, 75 bp, synthetic construct
  source 1..75: mol_type = other DNA
gccgcatatcaaaccagcggtagcgccatcatcaccaactacttctcttccggcgtcgcggtgtttgcctttctg

SEQ ID NO: 271641 - DNA, 75 bp, synthetic construct
  source 1..75: mol_type = other DNA
acaaactatttctggtgtagtatctaaaaacgttggttacaaacccggacaatataccgtagaattgactggatt

SEQ ID NO: 271642 - DNA, 75 bp, synthetic construct
  source 1..75: mol_type = other DNA
gcattgccgcgtgggttattggcacgcgcaatatgaaaaaagccctgctgcgtgcgttgttagaaccgacagccg

SEQ ID NO: 271643 - DNA, 75 bp, synthetic construct
  source 1..75: mol_type = other DNA
atgaggtgatcagcgagaagctaaaccctgcgcaccatatcgacgccgttgagagcaaattgtttggcattggcg

SEQ ID NO: 271644 - DNA, 75 bp, synthetic construct
  source 1..75: mol_type = other DNA
cgatggctttacgctctcgcatcccgacgaccgcattcgccagttctggattgaccactgcaaagcaagccgtcg

SEQ ID NO: 271645 - DNA, 75 bp, synthetic construct
  source 1..75: mol_type = other DNA
ccagcgtcatgatacgccagtgggtagcgagtggctggaaagcgtgcgggcttatgaaaacacgattttgcgtca

SEQ ID NO: 271646 - DNA, 75 bp, synthetic construct
  source 1..75: mol_type = other DNA
ctgggacagcgatcacgtagtgctgctggatgatgaaacccaggcgattgccagtgagattgttcgtcacgatct

SEQ ID NO: 271647 - DNA, 75 bp, synthetic construct
  source 1..75: mol_type = other DNA
ggcaggcggtgtgggaaatgtattgccagcgtcacgatacgccagcgggtagcgaatggctggaaagcgtacggg

SEQ ID NO: 271648 - DNA, 75 bp, synthetic construct
  source 1..75: mol_type = other DNA
atgacacaacaaggggatgctgtagccggggagctggcaccgtcagtcattctctctctggggattatttcaatt

SEQ ID NO: 271649 - DNA, 75 bp, synthetic construct
  source 1..75: mol_type = other DNA
aagataataagaatgcagaaaacgtgaaggaatttctgcaatcttatcaatcatccgaagtcgctaaagcggcag

SEQ ID NO: 271650 - DNA, 75 bp, synthetic construct
  source 1..75: mol_type = other DNA
atgctctttttctcgcagtgatatttttctttgggtttaaatataatcatgaccctgaaaagataaagcatcgag

SEQ ID NO: 271651 - DNA, 75 bp, synthetic construct
  source 1..75: mol_type = other DNA
gaaaatgctcactgtgtcgccaattatcaactgccaccagagaggcagcagcagttattaacccagctatcagct

SEQ ID NO: 271652 - DNA, 75 bp, synthetic construct
  source 1..75: mol_type = other DNA
tgcagccgcagctaaaagactacggcggtcaactggtcgcctgcttcgctgttgatcaggatgaaaacccacagc

SEQ ID NO: 271653 - DNA, 75 bp, synthetic construct
  source 1..75: mol_type = other DNA
cctgaacccagacgatcgccgcgagcgcatcaaactcactggcgaactgccaagcccgctgaatccaccgccagg

SEQ ID NO: 271654 - DNA, 75 bp, synthetic construct
  source 1..75: mol_type = other DNA
cctgaacccggacgatcgtcgcgaacgcatcaaacttaccggtgaactgccaagcccgctgaatccaccgccggg

SEQ ID NO: 271655 - DNA, 75 bp, synthetic construct
  source 1..75: mol_type = other DNA
gatgaaagccgttgaagatcatgccccgatccttattactcgtcagaatggagaggcttgtgttctgatgtcact

SEQ ID NO: 271656 - DNA, 75 bp, synthetic construct
  source 1..75: mol_type = other DNA
ccttcaaccttggtattgggaaagatttaggactttttggtgccttttctttcgatatcacgcaggccaatacga

SEQ ID NO: 271657 - DNA, 75 bp, synthetic construct
  source 1..75: mol_type = other DNA
gggcattaaagggtatctggctttttttctcaccataatctttttttccggtgttttttccgggacagacagctg

SEQ ID NO: 271658 - DNA, 75 bp, synthetic construct
  source 1..75: mol_type = other DNA
agtgaacaagggattgttccctgcctgacacgcgcgcaactcgccagtatggggctgaatacggcttctgtcgcc

SEQ ID NO: 271659 - DNA, 75 bp, synthetic construct
  source 1..75: mol_type = other DNA
ttcgccggagttgtttttggatttacatggtctgacgcagttgcaggccaaacaggagttaggcgcgttgattgc

SEQ ID NO: 271660 - DNA, 75 bp, synthetic construct
  source 1..75: mol_type = other DNA
ttagtgggttaccgttattcgaccagcggatattttaatttcgctgatacaacatacagtcgaatgaatggctac

SEQ ID NO: 271661 - DNA, 75 bp, synthetic construct
  source 1..75: mol_type = other DNA
ataccggtgcgccgaccaaagtattagcgcccgatacggcaggtaaattttacccaaaccaggattgcagtagtt

SEQ ID NO: 271662 - DNA, 75 bp, synthetic construct
  source 1..75: mol_type = other DNA
ggagagtcgcctgcaccgatgtaaattacgctggcttttgaagcatgtaaaaaattcacaaaggagcgaaagatg

SEQ ID NO: 271663 - DNA, 75 bp, synthetic construct
  source 1..75: mol_type = other DNA
acatcgcaaattttcgctcaacactggagagtcgcctgcaccgatgtaaattacgctggcttttgaagcatgtaa

SEQ ID NO: 271664 - DNA, 75 bp, synthetic construct
  source 1..75: mol_type = other DNA
aaacaggtgcgggcgctggggcatgcgggagatgtattgttagccatttccacccgtggcaacagccgcgatatt

SEQ ID NO: 271665 - DNA, 75 bp, synthetic construct
  source 1..75: mol_type = other DNA
gtcgctggccacagaaatgtacgacatggctgtggcggcatcgctgacgcaagaacgggggcgagtggctgcggt

SEQ ID NO: 271666 - DNA, 75 bp, synthetic construct
  source 1..75: mol_type = other DNA
atggacgaaatgaatttaagtcctgaagcacaggaactgcgtgacagtattgtggctgagcttcagtccggtggc

SEQ ID NO: 271667 - DNA, 75 bp, synthetic construct
  source 1..75: mol_type = other DNA
cggcgatctggacccgtattttttttccggatttatcaaatcgacccccgcctggcagcctctgccagtggctat

SEQ ID NO: 271668 - DNA, 75 bp, synthetic construct
  source 1..75: mol_type = other DNA
ccgatctcgccttcctgaaagccagattcaacaagaacttggcagcaggcgaaaaattaattggcactgaatact

SEQ ID NO: 271669 - DNA, 75 bp, synthetic construct
  source 1..75: mol_type = other DNA
aagtgtattccgacgccgtggacttctcttccgaagacgtaacggcagtcgtgaaaccttccctgcgtattgttt

SEQ ID NO: 271670 - DNA, 75 bp, synthetic construct
  source 1..75: mol_type = other DNA
acgatgctgaaatttgcgcattcgttgaaaaagccatctacgaagaaattattccggtactggatttgccacgcg

SEQ ID NO: 271671 - DNA, 75 bp, synthetic construct
  source 1..75: mol_type = other DNA
tacccgtggcaacagccgcgatatcgtaaaagcagttgaagccgccgtgacacgtgatatgaccattgtggcatt

SEQ ID NO: 271672 - DNA, 75 bp, synthetic construct
  source 1..75: mol_type = other DNA
tactcgtggtaatagtcgcgatattgttaaagctgttgaagctgccgttacacgtgatatgaccattgtggcact

SEQ ID NO: 271673 - DNA, 75 bp, synthetic construct
  source 1..75: mol_type = other DNA
ggaccaccaacggcccggagccgctggactaccaacgttcaccactggattacgaacactatctgacccgccagc

SEQ ID NO: 271674 - DNA, 75 bp, synthetic construct
  source 1..75: mol_type = other DNA
atatatataaaatcaagaaaaaaaatggaatctcaggtgtgaatattaaatataagtgtgtttgtaaaacttctg

SEQ ID NO: 271675 - DNA, 75 bp, synthetic construct
  source 1..75: mol_type = other DNA
ccctcgctcagccgacgacggcgtcgcgtccgctcgcggtacaacaactgattgccctgatctcgcgcctcgatg

SEQ ID NO: 271676 - DNA, 75 bp, synthetic construct
  source 1..75: mol_type = other DNA
atgtgcctgcttatcgggccgaactgatagccgaaagcctgtgggagtttattgacgaggaccgcagcgtgcaga

SEQ ID NO: 271677 - DNA, 75 bp, synthetic construct
  source 1..75: mol_type = other DNA
ggggcaaattgccgtcactctgcgtgacgcacaggcctgctttaacctgaatgccctcgctcagccgacgacggc

SEQ ID NO: 271678 - DNA, 75 bp, synthetic construct
  source 1..75: mol_type = other DNA
atggccgttaatgtgcgctcatcaatagcagtgaaggacatccgaaccagcaggtttcttttctggtacatcagg

SEQ ID NO: 271679 - DNA, 75 bp, synthetic construct
  source 1..75: mol_type = other DNA
gcagaaaatggattttttcctggcgagcctcttattgcggttaaagagggagataagtacaccgttgtggaaggc

SEQ ID NO: 271680 - DNA, 75 bp, synthetic construct
  source 1..75: mol_type = other DNA
atgacggtaagtattgtttcaccttcctcagcggctgtaaagccccgtcatacccgtttcagacgtgaagacatc

SEQ ID NO: 271681 - DNA, 75 bp, synthetic construct
  source 1..75: mol_type = other DNA
ccgatatgcatgtatgtcctatggtgactccaggtttacctcctgttccccatgttggggggcctctgttaccac

SEQ ID NO: 271682 - DNA, 75 bp, synthetic construct
  source 1..75: mol_type = other DNA
ctgatatgcatgtatgtcctgtggtgacaccaggtttgccacctgttccccatgtagggggaccattgttaccac

SEQ ID NO: 271683 - DNA, 75 bp, synthetic construct
  source 1..75: mol_type = other DNA
ctgatatgcatgtatgtcctatgatgacgcctggtttaccacctgttccccatgtcggtggacctctgttgccgc

SEQ ID NO: 271684 - DNA, 75 bp, synthetic construct
  source 1..75: mol_type = other DNA
actttggtataaccaggaaaaacaagagcttatttgcaaactggacaacctggctttcccgctgcgcgatggcat

SEQ ID NO: 271685 - DNA, 75 bp, synthetic construct
  source 1..75: mol_type = other DNA
atatccagattatcctgcctttaaaagagatgttcttaataagtcaataaaagaaatcatgaagcatactgaagt

SEQ ID NO: 271686 - DNA, 75 bp, synthetic construct
  source 1..75: mol_type = other DNA
ggaagcatattttgaagcaacaaacaccgctgtggctggcacaacatccgcatgtgatggcgtttcaccaggcac

SEQ ID NO: 271687 - DNA, 75 bp, synthetic construct
  source 1..75: mol_type = other DNA
cagcgctgccggtgatgtgtctgccagctttgccactgacaccggtaataccactgtcatgccccgggcaggtgg

SEQ ID NO: 271688 - DNA, 75 bp, synthetic construct
  source 1..75: mol_type = other DNA
cttgcctccgactcactccccaaagcgtggtttactgagccatggtacagggtctatcgccaggtctcgccggat

SEQ ID NO: 271689 - DNA, 75 bp, synthetic construct
  source 1..75: mol_type = other DNA
ccattaaacacgaagctgaataaagaaaaaatagaatctgactggcagaagtataaaaaaatcattgataaagac

SEQ ID NO: 271690 - DNA, 75 bp, synthetic construct
  source 1..75: mol_type = other DNA
aggctgatcctgttgtagatgaagtccctaagatagtgactgacttcctgggcggtgtgttcacaaagtccacac

SEQ ID NO: 271691 - DNA, 75 bp, synthetic construct
  source 1..75: mol_type = other DNA
atgaaaaaatttaattttgctgctctacttccgggatttttggcactcaataattctgtatgggcaagtgattca

SEQ ID NO: 271692 - DNA, 75 bp, synthetic construct
  source 1..75: mol_type = other DNA
cgtcaccatcaacggacagacagtcatggttccgaaactgtatctgtctccggaagatatcacccttcataatgg

SEQ ID NO: 271693 - DNA, 75 bp, synthetic construct
  source 1..75: mol_type = other DNA
atcaaagcactgaccagggttatccatctgctaattgctgccgaggccgttagacagtttatggaaatggcagag

SEQ ID NO: 271694 - DNA, 75 bp, synthetic construct
  source 1..75: mol_type = other DNA
aatatatgatcccaggcgagaacggcagggttattcctggtcgtgatattggtggcggtggcggttttagtatgc

SEQ ID NO: 271695 - DNA, 75 bp, synthetic construct
  source 1..75: mol_type = other DNA
ggccagttccgcgccgaaatgctggacggcaagatcacggcagaaaggatggttaacgcaatccaggcggctacg

SEQ ID NO: 271696 - DNA, 75 bp, synthetic construct
  source 1..75: mol_type = other DNA
aaaatttacggtattgttcacggtgtcatgccatccatcggcgcggcagcaacctatacccgcatgaagcgtggt

SEQ ID NO: 271697 - DNA, 75 bp, synthetic construct
  source 1..75: mol_type = other DNA
attgggagatattcctgaagcgcatttaacgcaggaaaatgttctttggaaaggctcattatcaatgggaaaaaa

SEQ ID NO: 271698 - DNA, 75 bp, synthetic construct
  source 1..75: mol_type = other DNA
actggcggtagctgggcggcggctggctctgcggcactcactgcgatcatgtctctggcaacatccatcttcggt

SEQ ID NO: 271699 - DNA, 75 bp, synthetic construct
  source 1..75: mol_type = other DNA
aagtctgtctttagatgcacctgacggtcagatagagaacctgtatcaggatgagaaggacggaaagtatcatct

SEQ ID NO: 271700 - DNA, 75 bp, synthetic construct
  source 1..75: mol_type = other DNA
gaactcaggcgttgcatacattatctgccgggtttggctgtccccctgaaaagctgaaaaaagtgctgctttcgc

SEQ ID NO: 271701 - DNA, 75 bp, synthetic construct
  source 1..75: mol_type = other DNA
aatttacagagttagaaaaagaaaaaattcgtgaagaattgcttaaagttgcatatcgattttttgtagataaag

SEQ ID NO: 271702 - DNA, 75 bp, synthetic construct
  source 1..75: mol_type = other DNA
gagtatgcaattgcgaactgcagccaaaacactcgggcttgatgagactaaaatggataattctcagttgcgtga

SEQ ID NO: 271703 - DNA, 75 bp, synthetic construct
  source 1..75: mol_type = other DNA
gttcgtccgattgatacgtcatttccgccgtcacttagcactcaggatggtctgtacaccaccatcatccgtggt

SEQ ID NO: 271704 - DNA, 75 bp, synthetic construct
  source 1..75: mol_type = other DNA
tcgcgctcaacggtatgaccaagttccgcacccgcatcctgccgcagctgctggcagggcagaaggcaaaaggca

SEQ ID NO: 271705 - DNA, 75 bp, synthetic construct
  source 1..75: mol_type = other DNA
gtgcgctggataaaggttggatcatcattccgtgtgagttgatcgactacaatggcgacgcgttgcgtgaactgg

SEQ ID NO: 271706 - DNA, 75 bp, synthetic construct
  source 1..75: mol_type = other DNA
atggccgatgagagcagggaagttaacatggctgtgattaatagcagaagtaaattcagttttttcaataaagtt

SEQ ID NO: 271707 - DNA, 75 bp, synthetic construct
  source 1..75: mol_type = other DNA
aattcagtttttttaataaaattcgtgtattattaaaaaaacttataaagcccaatgagggcattgatgatgtta

SEQ ID NO: 271708 - DNA, 75 bp, synthetic construct
  source 1..75: mol_type = other DNA
atgaaaacaataagctaggttttaatcttgcacttgggtctggagcagaacatcataaagagcgatacttttgta

SEQ ID NO: 271709 - DNA, 75 bp, synthetic construct
  source 1..75: mol_type = other DNA
cctggactgtttcagcactcaggtcggggctcagtataccgtcgacaacgaagcgaagcgcgatatcaccatgaa

SEQ ID NO: 271710 - DNA, 75 bp, synthetic construct
  source 1..75: mol_type = other DNA
cggcggttattcctgataccaacgagccggactgggaaaatctggaaggtgtgaaaatctcgctgtacccgctca

SEQ ID NO: 271711 - DNA, 75 bp, synthetic construct
  source 1..75: mol_type = other DNA
ttagcttaggcaaagaactgtctgagctgatgtctgcgcaaaaaagcgcgactgcggtacaacgtgtcactattg

SEQ ID NO: 271712 - DNA, 75 bp, synthetic construct
  source 1..75: mol_type = other DNA
gcgggcgcagcaatcaccattacggtgttgacgcttgctgcggttaatacgctgggtattccggtcgatctgcct

SEQ ID NO: 271713 - DNA, 75 bp, synthetic construct
  source 1..75: mol_type = other DNA
atgctgctggtggcgctggtggttaacccattgctggtgtggtggaaaattcgtcgtaacccgttcccgctggtg

SEQ ID NO: 271714 - DNA, 75 bp, synthetic construct
  source 1..75: mol_type = other DNA
tcgtcgtaacccgttcccgctggtgctgctgtgcctgcgcgaaagcggtgtgtatgccttcttcacccgcagctc

SEQ ID NO: 271715 - DNA, 75 bp, synthetic construct
  source 1..75: mol_type = other DNA
ttcgcgttattacgacaacggcgatttcattagcaaacgccgttataaaggtaatacctacgccatcccatactc

SEQ ID NO: 271716 - DNA, 75 bp, synthetic construct
  source 1..75: mol_type = other DNA
ttcgcgttattacgacaacggcgattttatcagcaaacgccgttataaaggtaatacctacgccatcccttattc

SEQ ID NO: 271717 - DNA, 75 bp, synthetic construct
  source 1..75: mol_type = other DNA
ctgatcccgctggcctgtaatatgttcggcattccgaacgacatcgccatgcaggtcgtggctgtcggctttatt

SEQ ID NO: 271718 - DNA, 75 bp, synthetic construct
  source 1..75: mol_type = other DNA
actgcggaatattcaagatcacaaatggcgtggggttacagacaaaatagttatataattaattacttgtataac

SEQ ID NO: 271719 - DNA, 75 bp, synthetic construct
  source 1..75: mol_type = other DNA
gagattggttgttatatttggtttttttgccacgccacaacttgcttatcaattgcagtttactaaccaggcaga

SEQ ID NO: 271720 - DNA, 75 bp, synthetic construct
  source 1..75: mol_type = other DNA
tgtggctggcaactcatcacgacagacaacccgccactttatttactgctcacactcatcaatccatcaatcagc

SEQ ID NO: 271721 - DNA, 75 bp, synthetic construct
  source 1..75: mol_type = other DNA
tctccacgctgtggggctacgcgcaactgctggtcgtgctggttggctgtatgctgctggtggcgctggtggtta

SEQ ID NO: 271722 - DNA, 75 bp, synthetic construct
  source 1..75: mol_type = other DNA
ttaatcaatagccaatatcaggaaattgataacacgcccgccggaatgcaattgcgcttaggatatacggcccgc

SEQ ID NO: 271723 - DNA, 75 bp, synthetic construct
  source 1..75: mol_type = other DNA
ggacgctgctgaaaaactgtctgaagttgattttaaagcggttaagcaggcattagccaaaatgcattacactgt

SEQ ID NO: 271724 - DNA, 75 bp, synthetic construct
  source 1..75: mol_type = other DNA
ttcgtttaaattagacgatggtcgtaaagttagctttaaattgctcgcagcggacacagcaaaagataaccgtaa

SEQ ID NO: 271725 - DNA, 75 bp, synthetic construct
  source 1..75: mol_type = other DNA
tctgctttttcgtcaccctgttttgcatcagagaaaaaattccagccggtcagcaaaaaagagatgctgcacatg

SEQ ID NO: 271726 - DNA, 75 bp, synthetic construct
  source 1..75: mol_type = other DNA
tcctctgcttcagagatgaaggatgtgctgaccttgatgcgtgtgatgctgatatttctgcatgggaaccggaac

SEQ ID NO: 271727 - DNA, 75 bp, synthetic construct
  source 1..75: mol_type = other DNA
atgaattatatatattccgcgactacaaactctttctattcgctggagatgaaagaggattacactcaagctgac

SEQ ID NO: 271728 - DNA, 75 bp, synthetic construct
  source 1..75: mol_type = other DNA
ataccggtgcgccgactaaagtattagcgcccgatacggcgggtaaattttacccgaaccatgattgcagtagtt

SEQ ID NO: 271729 - DNA, 75 bp, synthetic construct
  source 1..75: mol_type = other DNA
tgggataaagataagcagaaatcgattatctatccgggaatgattgcgatctatcgtgacaccgaggtcggcctc

SEQ ID NO: 271730 - DNA, 75 bp, synthetic construct
  source 1..75: mol_type = other DNA
gtcgtaaaccacaggaagtatctgaacactttattaaactcgttcatgctcgaattgctgaagtgtctggctgga

SEQ ID NO: 271731 - DNA, 75 bp, synthetic construct
  source 1..75: mol_type = other DNA
acttcgaggccatgcaaaaggagatgtacgggcagtttgaaaacaccttcatgatgtccctgccgcgcctgtgcg

SEQ ID NO: 271732 - DNA, 75 bp, synthetic construct
  source 1..75: mol_type = other DNA
tggctatgtgcgtattgaaggaacgctgccaacaggcgagcgtacccttattctgtggcgcgattgcgacaagat

SEQ ID NO: 271733 - DNA, 75 bp, synthetic construct
  source 1..75: mol_type = other DNA
aaaaagaatcaccagccatgcagttgccgagtggttcaacgggctggatagaactgccgaacggtcagcgctgga

SEQ ID NO: 271734 - DNA, 75 bp, synthetic construct
  source 1..75: mol_type = other DNA
aaagagtatggtggcgatgcggcgttgttggtgctgattgaagtggaagagtggttgccgccggaattaccctga

SEQ ID NO: 271735 - DNA, 75 bp, synthetic construct
  source 1..75: mol_type = other DNA
agcggctattggtcgtctgaaaagtgaggaactggcgcaatataatttatggctggattatctggacgcactgga

SEQ ID NO: 271736 - DNA, 75 bp, synthetic construct
  source 1..75: mol_type = other DNA
tacaaacgcgaagaagacggcattgtgctgattgatcaggataaatgccgtggctggcgtttgtgcataagcggt

SEQ ID NO: 271737 - DNA, 75 bp, synthetic construct
  source 1..75: mol_type = other DNA
ccgcaccccaacaagtactggacttaggtgttagtactgagggggtttttaacgaaatagaaatgggggttcttc

SEQ ID NO: 271738 - DNA, 75 bp, synthetic construct
  source 1..75: mol_type = other DNA
tactgctaccagtagcctgttgcgtgcgggaaataaagtcgccgtcgcccgtgttgaactgcacaatgaagaaca

SEQ ID NO: 271739 - DNA, 75 bp, synthetic construct
  source 1..75: mol_type = other DNA
aagccctgaaattagtgggtgaaatgtttgtctatcacatgccgtttaaccgggcattggggatggaactggagc

SEQ ID NO: 271740 - DNA, 75 bp, synthetic construct
  source 1..75: mol_type = other DNA
aatcacaacaaaaaacggctagaatccctctagaagttttaagcgaaatgaatttggtcaaagaggaaaacgaaa

SEQ ID NO: 271741 - DNA, 75 bp, synthetic construct
  source 1..75: mol_type = other DNA
agtcgcagcaacttaatgctcgtttcccacatgatgtagttgcagaattagaaagcaaccttgaagatggggaaa

SEQ ID NO: 271742 - DNA, 75 bp, synthetic construct
  source 1..75: mol_type = other DNA
aatgtcagtatcgctggcgcgttcttgctattggcaattaccgggccgggggcaatttctctcgatcgccgttag

SEQ ID NO: 271743 - DNA, 75 bp, synthetic construct
  source 1..75: mol_type = other DNA
atgatcacctcaccaccaaaacgcggaatggcactggtcgtggtgctggtattgctggcggtcataatgctggta

SEQ ID NO: 271744 - DNA, 75 bp, synthetic construct
  source 1..75: mol_type = other DNA
gcacaggcctgctttaacctgaatgttctagctcagccgacgacggcatcgcgtccgctcgcggtacaacagttg

SEQ ID NO: 271745 - DNA, 75 bp, synthetic construct
  source 1..75: mol_type = other DNA
atagcgaaagatactcaatcatcgttgcattactggactatattaatattgagactaatcaggcaccgttgatga

SEQ ID NO: 271746 - DNA, 75 bp, synthetic construct
  source 1..75: mol_type = other DNA
gcgggtaataaagtcgccgtcgcccgcgttgaactgcacaatgaagaacaactttatattgccagtgctaccgcc

SEQ ID NO: 271747 - DNA, 75 bp, synthetic construct
  source 1..75: mol_type = other DNA
ggcctttaacaatcagccaatgatggttggtaactgggcacaaagcattttgcacggcggggtgattgcgtcggc

SEQ ID NO: 271748 - DNA, 75 bp, synthetic construct
  source 1..75: mol_type = other DNA
gtgattcttgaggcgctgtttgacccgtggttaagccctgttcaggcgcgggcgttattacaacaacgtccggcg

SEQ ID NO: 271749 - DNA, 75 bp, synthetic construct
  source 1..75: mol_type = other DNA
agcccggagttttcaccggggacgtggtgtacacatccccgccatgaaaaacacggctttcgggcaggtgctccg

SEQ ID NO: 271750 - DNA, 75 bp, synthetic construct
  source 1..75: mol_type = other DNA
ttccccgttaaacaaatcaagtatcggggacaggtacagtttttgtccgccagccctgaattcggtgatatctgt

SEQ ID NO: 271751 - DNA, 75 bp, synthetic construct
  source 1..75: mol_type = other DNA
ttccgtagcagacgaagaaaatacgatctctgtgggttcttctaccaaccagcgccgtatcaccaacgttgctgc

SEQ ID NO: 271752 - DNA, 75 bp, synthetic construct
  source 1..75: mol_type = other DNA
gtgaagacggtcaacgtcagatcaccaacgtcgcagcggggtcggcggataccgatgcggtcaacgtgggtcaat

SEQ ID NO: 271753 - DNA, 75 bp, synthetic construct
  source 1..75: mol_type = other DNA
ggtgagcgccaatggtcgttgggtctacaaattacaaggtagtaccaatagccagggtgaatactccgccgcact

SEQ ID NO: 271754 - DNA, 75 bp, synthetic construct
  source 1..75: mol_type = other DNA
accgggtgccagcatggcttctattggtggcggtacttacaacggtgaatcggcagttgctttaggtgtatcgat

SEQ ID NO: 271755 - DNA, 75 bp, synthetic construct
  source 1..75: mol_type = other DNA
caccgcagaactctgtcggtgaattctcagtcggtagtgcggatggtcaacgtcagatcactaacgtcgcagcag

SEQ ID NO: 271756 - DNA, 75 bp, synthetic construct
  source 1..75: mol_type = other DNA
acgtcagatcaccaacgtcgcagcaggttcggcggataccgatgcggttaacgtgggtcagttgaaagtaacgga

SEQ ID NO: 271757 - DNA, 75 bp, synthetic construct
  source 1..75: mol_type = other DNA
gaataatgaactcatattgagagcattcgcactttcatattctgtgacaccatataaaaaaccattaaagaaatt

SEQ ID NO: 271758 - DNA, 75 bp, synthetic construct
  source 1..75: mol_type = other DNA
gggcactcaacgaaattcttaccccagttcctacgccgttctcgacattatttgccggagagatcaaagcagagt

SEQ ID NO: 271759 - DNA, 75 bp, synthetic construct
  source 1..75: mol_type = other DNA
attctatacaaaataaaatgaaaataggattaatcggttctaaggattatgaaatagagcaagctgtaaagaata

SEQ ID NO: 271760 - DNA, 75 bp, synthetic construct
  source 1..75: mol_type = other DNA
aacaacgtcggtgacgcgctggaagcgatcgataccacgctggatgatgctctgctgtgggatacaacagccaat

SEQ ID NO: 271761 - DNA, 75 bp, synthetic construct
  source 1..75: mol_type = other DNA
tatgcgcagttgaagcaaagcgtgcaggaaacgaagcaatacaccgatcagcggatggttgagatggataacaaa

SEQ ID NO: 271762 - DNA, 75 bp, synthetic construct
  source 1..75: mol_type = other DNA
ggatccagatgctggcaggtctggcgctgttaagtaccatcggcggcagtttgtatcaggcgctgcataatgagc

SEQ ID NO: 271763 - DNA, 75 bp, synthetic construct
  source 1..75: mol_type = other DNA
tgtactgcgcgagctgggagcgaacgtaatcgccatcggttgtgagccgaatggtgtaaacatcaatgccgaagt

SEQ ID NO: 271764 - DNA, 75 bp, synthetic construct
  source 1..75: mol_type = other DNA
ccgtaagatcattattggtaaagacacgcgtatttctggctatatgctggagtcagcactggaagcgggtctggc

SEQ ID NO: 271765 - DNA, 75 bp, synthetic construct
  source 1..75: mol_type = other DNA
tgctgcgtaaatccggcaccgaaccgttaattcgcgtgatggtggaaggcgaagacgaagcgcaggtgactgaat

SEQ ID NO: 271766 - DNA, 75 bp, synthetic construct
  source 1..75: mol_type = other DNA
cggcaccaaactaccggatgcagttgaagaagccatcgaagcggaaatggaaaaagagatcagctgcgttgattc

SEQ ID NO: 271767 - DNA, 75 bp, synthetic construct
  source 1..75: mol_type = other DNA
tgctgcgtaaatctggcaccgagccgttgattcgcgtgatggtcgaaggtgaagacgaagcacaggtgactgaat

SEQ ID NO: 271768 - DNA, 75 bp, synthetic construct
  source 1..75: mol_type = other DNA
gaagacgaagcgcaggtgactgaatttgcacaccgcatcgccgatgcagtaaaagccgttgatggtggaaggcga

SEQ ID NO: 271769 - DNA, 75 bp, synthetic construct
  source 1..75: mol_type = other DNA
ccgatcatcgaccgccaactcggccgcgaggttatgggcatcgtgcagggcgggtcggtgtcgtggcagttaggg

SEQ ID NO: 271770 - DNA, 75 bp, synthetic construct
  source 1..75: mol_type = other DNA
ttattaaacgttttatgcgtaacgaacataaagcagtagaagaggttattgattccccctttcggaagtcgcgaa

SEQ ID NO: 271771 - DNA, 75 bp, synthetic construct
  source 1..75: mol_type = other DNA
ttgatccacaaggcaaatgcctaccacaaactcgtcgcggcgtaaaagaagaatggcgttttcgctctgaactcg

SEQ ID NO: 271772 - DNA, 75 bp, synthetic construct
  source 1..75: mol_type = other DNA
tggcttatctgacgcgtaccttccgcgcagaggccgggattgtgatttccgcatcgcataacccgttctacgata

SEQ ID NO: 271773 - DNA, 75 bp, synthetic construct
  source 1..75: mol_type = other DNA
cgttgctggcttgcaggtgctggcggcgatggcgcgtaaccatatgagcctgcacgacctttgcagcggcatgaa

SEQ ID NO: 271774 - DNA, 75 bp, synthetic construct
  source 1..75: mol_type = other DNA
ctgcgtggtggtgctgtgggtacattgatgagcaacatggggcttgaactggcgctgaaacagttaggtattcca

SEQ ID NO: 271775 - DNA, 75 bp, synthetic construct
  source 1..75: mol_type = other DNA
gaccatgaaggcaataaagtcgatggcgaccagattatgtatatcatcgcgcgtgaaggtcttcgtcagggccag

SEQ ID NO: 271776 - DNA, 75 bp, synthetic construct
  source 1..75: mol_type = other DNA
cgcaggaaaatacacacaccgtctcaggctcaagaagcaattacccgctggcctgccacttgttgcgatccgtca

SEQ ID NO: 271777 - DNA, 75 bp, synthetic construct
  source 1..75: mol_type = other DNA
cgcagcaaaatacacacaccgtctcaggctcaagaagcaattacccgctggtctgccacttgttgcgatccggca

SEQ ID NO: 271778 - DNA, 75 bp, synthetic construct
  source 1..75: mol_type = other DNA
cgcagtaaaatacacacaccgtctcaggctcaagaagcaattacccgctggcctgccacttgttgcgatccgaca

SEQ ID NO: 271779 - DNA, 75 bp, synthetic construct
  source 1..75: mol_type = other DNA
acgggtaatcgccgcagtaaaatacacacaccgtctcaggctcaagaagcaattacccgctggactgccacttgt

SEQ ID NO: 271780 - DNA, 75 bp, synthetic construct
  source 1..75: mol_type = other DNA
acgggtaatcgccgcagaaaaatacacacaccggctcaggctcaagaagcaattacccgctggactgccacttgt

SEQ ID NO: 271781 - DNA, 75 bp, synthetic construct
  source 1..75: mol_type = other DNA
acgggtaatcgccgcagaaaaatacacacaccgactcaggctcaagaagcaattgcccgctggactgccacttgt

SEQ ID NO: 271782 - DNA, 75 bp, synthetic construct
  source 1..75: mol_type = other DNA
tattagcgcaggtgttgctattgctaatgcagccagagatggaacaagtgcagcacatcaagcagcttcaaaggc

SEQ ID NO: 271783 - DNA, 75 bp, synthetic construct
  source 1..75: mol_type = other DNA
atcaaacgtctggtgagtccggcgaacctgaccctgtcacagggtggtgaggtgtaccgcggctatggcggtaat

SEQ ID NO: 271784 - DNA, 75 bp, synthetic construct
  source 1..75: mol_type = other DNA
gctattggcaaaggtgtatctgacgcacaacaagcaggaaaacaggcaggaaatattgccaatttattaagtagg

SEQ ID NO: 271785 - DNA, 75 bp, synthetic construct
  source 1..75: mol_type = other DNA
cgcagtaaaatacacacaccgtctcaggctcaagaagcaattacccgctggactgccacttgttgcgatccgcca

SEQ ID NO: 271786 - DNA, 75 bp, synthetic construct
  source 1..75: mol_type = other DNA
atgtcacaaaaagggcgattaaagcaggttttgatggcgttgaacttcatggtgcgcacggattccttctgcaga

SEQ ID NO: 271787 - DNA, 75 bp, synthetic construct
  source 1..75: mol_type = other DNA
ggcacacactccgtgacgcactgaaaatgacaggcagatcgcgctcacagttttaccgtgatatgcgcgcaggct

SEQ ID NO: 271788 - DNA, 75 bp, synthetic construct
  source 1..75: mol_type = other DNA
acgttctggatggcctgaaagaggttaaactctgcgtggcttaccgtatgctggatggtcgtgaagtgactacca

SEQ ID NO: 271789 - DNA, 75 bp, synthetic construct
  source 1..75: mol_type = other DNA
tcgtgcggtacagctgaactccctgtctggcttctgcctgactaaactggacgttctggatggcctgaaagaggt

SEQ ID NO: 271790 - DNA, 75 bp, synthetic construct
  source 1..75: mol_type = other DNA
ttacttcagaactttttctcacctcattccaaccgaagagtcgatcaatggggcggctctcttaaaaaccgtatg

SEQ ID NO: 271791 - DNA, 75 bp, synthetic construct
  source 1..75: mol_type = other DNA
agctaattgatctgtttatgaatgcctcattgaccacgcaaatactggcgtcagtatttttgttactcttctacc

SEQ ID NO: 271792 - DNA, 75 bp, synthetic construct
  source 1..75: mol_type = other DNA
gtcacgcaaaccgcaagtggtgggtatttatcgtctgattatgaagagcggttcagataacttccgtgcgtcttc

SEQ ID NO: 271793 - DNA, 75 bp, synthetic construct
  source 1..75: mol_type = other DNA
atctcctattgttgataaggaaattcagcagtttttgcaatcagatcaaatacgctttgatgccacactagataa

SEQ ID NO: 271794 - DNA, 75 bp, synthetic construct
  source 1..75: mol_type = other DNA
aagccgatgtcattatctccaatcgaatggcagaagaactaaaggatgtggcagacaaggtctacacccgcgatc

SEQ ID NO: 271795 - DNA, 75 bp, synthetic construct
  source 1..75: mol_type = other DNA
cgtaatctcgccaccttcaaacaacaagccgatgtcattatctccaatcgaatggcagaagaactaaaggatgtg

SEQ ID NO: 271796 - DNA, 75 bp, synthetic construct
  source 1..75: mol_type = other DNA
ctttaaccgcgcccgtgtccggcgggcgtttgtcacgattggtcagcgtcatatgcgtgatgcccgtcggctggt

SEQ ID NO: 271797 - DNA, 75 bp, synthetic construct
  source 1..75: mol_type = other DNA
atgacgacttcctttttgcacgttgattttcagcagcccgcggagatgcgctttaaccgcgcccgtgtccggcgg

SEQ ID NO: 271798 - DNA, 75 bp, synthetic construct
  source 1..75: mol_type = other DNA
ccggacgacttgctcgttcgattggttacatggtcccccgtaaaagctcccgtcgttctggcctgatggtcagga

SEQ ID NO: 271799 - DNA, 75 bp, synthetic construct
  source 1..75: mol_type = other DNA
ctttcagacgtgccgaatagcgacagattagcttgttcaataaatgataattctggtattgctattatcaaaaca

SEQ ID NO: 271800 - DNA, 75 bp, synthetic construct
  source 1..75: mol_type = other DNA
actcaagatttagattttatccgcttggataactcttctttttcttgctgccctgaagagtcaatcgactatgcc

SEQ ID NO: 271801 - DNA, 75 bp, synthetic construct
  source 1..75: mol_type = other DNA
gcggcttgacaaggtcgaacataaacctgctttggtcatttgtaacgaatcacatcgctttatcgttgctgaaca

SEQ ID NO: 271802 - DNA, 75 bp, synthetic construct
  source 1..75: mol_type = other DNA
cggcacctctcttacttaagaatcccgaaatccctgatgtactggttcatccagtacccggcacagtcctcaaaa

SEQ ID NO: 271803 - DNA, 75 bp, synthetic construct
  source 1..75: mol_type = other DNA
cggaagatggtgttatggttattaccgatatgaactggaatgatgtgggatcgtggtcttctctatgggatatat

SEQ ID NO: 271804 - DNA, 75 bp, synthetic construct
  source 1..75: mol_type = other DNA
ttaatccaggtcaaaaaatctcaacgcaaacacacaaccatagatcagagcactgggttatagtttcaggaatag

SEQ ID NO: 271805 - DNA, 75 bp, synthetic construct
  source 1..75: mol_type = other DNA
tagaaatttggttatagtccaaactaaagatgcaattcttatcgcagaaaaagaacgagtacaagatgtaaagtt

SEQ ID NO: 271806 - DNA, 75 bp, synthetic construct
  source 1..75: mol_type = other DNA
ttgatgacgttattgatgccacgctaccaaaatcggtggcagtcgtggtgaaagcggtgaaatctgccgttgtcg

SEQ ID NO: 271807 - DNA, 75 bp, synthetic construct
  source 1..75: mol_type = other DNA
agcggtactgacgcatccggacgtggaatatcacacctccaccaacgtcgtggatattcgcgagacggaagacga

SEQ ID NO: 271808 - DNA, 75 bp, synthetic construct
  source 1..75: mol_type = other DNA
cacccgatggtatgttactggatatcaaacctgaaggtggcgatcccgcactttgtcaagctgcgttggcagcag

SEQ ID NO: 271809 - DNA, 75 bp, synthetic construct
  source 1..75: mol_type = other DNA
tgtcactgtcagtcgttcagaacggaatgtcgtcatcgaagtcatacgcgggttcagacggctgctgaggctcgg

SEQ ID NO: 271810 - DNA, 75 bp, synthetic construct
  source 1..75: mol_type = other DNA
ggtgcgccagagcttattaggcgatgcgccgcgcgtcaccggacatgtggtctaccgtgcggttatcgattgtgc

SEQ ID NO: 271811 - DNA, 75 bp, synthetic construct
  source 1..75: mol_type = other DNA
tgtggatatcccaggcgtgggcgaaagcgccgaacgtgataatgagtacgaaaatctctatagcgaattgatgcc

SEQ ID NO: 271812 - DNA, 75 bp, synthetic construct
  source 1..75: mol_type = other DNA
ctgatactgccgcgcaagaccccggtcagatccctatagttggcatggagcaaattcgtggacttgagaagcact

SEQ ID NO: 271813 - DNA, 75 bp, synthetic construct
  source 1..75: mol_type = other DNA
aaggcgatgtgcacggcgtggtgctggtgaatcaggtgcggatgatggatctacgcgcccggctggcaaagcgta

SEQ ID NO: 271814 - DNA, 75 bp, synthetic construct
  source 1..75: mol_type = other DNA
attctcgatgcaacggtatctcgcatagaagagttgtttcagcgaccgcatgatggtgtaacggggcttgatacc

SEQ ID NO: 271815 - DNA, 75 bp, synthetic construct
  source 1..75: mol_type = other DNA
ccgtttcacgcaagaaaaacatcagcaaacccactccacttttcaaaacttgttgccaccaaaggcggcaggcat

SEQ ID NO: 271816 - DNA, 75 bp, synthetic construct
  source 1..75: mol_type = other DNA
atggctaaccttttgaataaattcattatgacgagaatactcgctgcgataacccttttgctgagtatcgtattg

SEQ ID NO: 271817 - DNA, 75 bp, synthetic construct
  source 1..75: mol_type = other DNA
tattcgttgtcacctgaaaaatatgaggctgaatacggaaagaaacctcctgcttctctggatgtaacgtctatg

SEQ ID NO: 271818 - DNA, 75 bp, synthetic construct
  source 1..75: mol_type = other DNA
gctggataatctcaagacgctggccacagccgtagcactgaaagcaacggacaacacgccgctggccatcatccg

SEQ ID NO: 271819 - DNA, 75 bp, synthetic construct
  source 1..75: mol_type = other DNA
actgctgttaacggttccaaatatggctgggcggactcgaatttccagacgtccgatagcacttataatatctat

SEQ ID NO: 271820 - DNA, 75 bp, synthetic construct
  source 1..75: mol_type = other DNA
aaaaataacagcatatctaaccaatatctgccgccggagatggcgctaacacctgaacagcggcaattggcacaa

SEQ ID NO: 271821 - DNA, 75 bp, synthetic construct
  source 1..75: mol_type = other DNA
atggcccaattggcacggtgagattggcttttaacggccaatactcacggtttgataactatgctggtgctgact

SEQ ID NO: 271822 - DNA, 75 bp, synthetic construct
  source 1..75: mol_type = other DNA
gaggtaattatcggaaagcaacgaaatggcccaattggcacggtgagattggcttttaacggccaatactcacgg

SEQ ID NO: 271823 - DNA, 75 bp, synthetic construct
  source 1..75: mol_type = other DNA
aactaaaccgctcgcttgaacaacgtgccgataaacgtccggtaaactcagatttgcgagagtcaggctccattg

SEQ ID NO: 271824 - DNA, 75 bp, synthetic construct
  source 1..75: mol_type = other DNA
ttcatgtggatttacagcctattgccgatgagttacatggcgactacatcaatgacaaaagctttaagcgccatt

SEQ ID NO: 271825 - DNA, 75 bp, synthetic construct
  source 1..75: mol_type = other DNA
accagaaagttctggatgatgtgatggccgttgccgacatcctgacttccatggtggttgacgtttctgacctgc

SEQ ID NO: 271826 - DNA, 75 bp, synthetic construct
  source 1..75: mol_type = other DNA
acgttctggatggcctgaaagaggtgaaactctgtgtggcttaccgtatgccggatggtcgtgaagtgacgacca

SEQ ID NO: 271827 - DNA, 75 bp, synthetic construct
  source 1..75: mol_type = other DNA
aggaacattctaagccagctgctgataaggtttttgatatgcgtgcagacgcgattacccgagcttttgaccgag

SEQ ID NO: 271828 - DNA, 75 bp, synthetic construct
  source 1..75: mol_type = other DNA
aacagataaaaaaatcctggagcggagatataaaaaggaaattgaaagatccccggaaaatgctgctgctgcacg

SEQ ID NO: 271829 - DNA, 75 bp, synthetic construct
  source 1..75: mol_type = other DNA
cggctgagaaacttgataaatggcttcagaaaagaattatcacaacagcaggttacatattccagaaaagttata

SEQ ID NO: 271830 - DNA, 75 bp, synthetic construct
  source 1..75: mol_type = other DNA
acattcatttaaaaagaaaacctattcactgcctgtcctgtggacagacagatatgcacctcccaccgcaagcgg

SEQ ID NO: 271831 - DNA, 75 bp, synthetic construct
  source 1..75: mol_type = other DNA
ccctagtgcggatactaaaaggtactcagctggcgaaaaactatatggccagcatcaggagcgctgatgtcgcca

SEQ ID NO: 271832 - DNA, 75 bp, synthetic construct
  source 1..75: mol_type = other DNA
caccttaatccacatttgcgatgggaagttcacgggctggaagggttaagtaaaaagaactggtatctgctaatt

SEQ ID NO: 271833 - DNA, 75 bp, synthetic construct
  source 1..75: mol_type = other DNA
tacatcaatgacaaaagctttaagcgccattttcagcaatggctgaactcattgtggcaggaaaaagaccgactt

SEQ ID NO: 271834 - DNA, 75 bp, synthetic construct
  source 1..75: mol_type = other DNA
tagccaacgagatcgaacatatcatcgccgcaacacattcattagtattgccagcaatcattcttctggcgttag

SEQ ID NO: 271835 - DNA, 75 bp, synthetic construct
  source 1..75: mol_type = other DNA
atgcacgagctgacaaaaatcacagggcataaagacccgagaatgttaatgcgttattatcatcctaaagctgag

SEQ ID NO: 271836 - DNA, 75 bp, synthetic construct
  source 1..75: mol_type = other DNA
catggaaagcctgcttaaccctgtagaagccattcgcaaaccccaacccaagaacgccagaactaggcgcctgga

SEQ ID NO: 271837 - DNA, 75 bp, synthetic construct
  source 1..75: mol_type = other DNA
attttctcacgctgctggcctgggtggtgaataacggattgtggtcggtactgaccagtaccgggctgtttgcgc

SEQ ID NO: 271838 - DNA, 75 bp, synthetic construct
  source 1..75: mol_type = other DNA
ggtgcagattggagtcgttatgtctggagctattgcaaatggctcagaaggagctcagaaatcagggggggcagc

SEQ ID NO: 271839 - DNA, 75 bp, synthetic construct
  source 1..75: mol_type = other DNA
cccggtatgtggctgcgtctgtcagcaacgatgaaaatgatcgggaatacaggcaaggagtatgaagaagcggtg

SEQ ID NO: 271840 - DNA, 75 bp, synthetic construct
  source 1..75: mol_type = other DNA
ttcagaacacgtctgatgatgtcattatgaacctggtaatgggaacgatgtttttggtgttgccggcgttgtggt

SEQ ID NO: 271841 - DNA, 75 bp, synthetic construct
  source 1..75: mol_type = other DNA
ggttacccgacctgttatcagtggtggaatgatgcgaatgcagggttactgaaacttgtcaaagagcagaccgat

SEQ ID NO: 271842 - DNA, 75 bp, synthetic construct
  source 1..75: mol_type = other DNA
atcctgttttgttgtgtgccgttgatggaggtgagtgtcagtaccctgcaatttgataccagccgggccaaaacc

SEQ ID NO: 271843 - DNA, 75 bp, synthetic construct
  source 1..75: mol_type = other DNA
aacactatcaataagttggagtcattacccagggaaatgactgaaaacgaaattcaggaaaccattagagcattc

SEQ ID NO: 271844 - DNA, 75 bp, synthetic construct
  source 1..75: mol_type = other DNA
acgggtaatcgccgcaggaaaatacacacaccgactcaggctcaagaagcaattacccgctggactgccacttgt

SEQ ID NO: 271845 - DNA, 75 bp, synthetic construct
  source 1..75: mol_type = other DNA
acgggtaatcgccgcagcaaaatacacacaccgcctcaggctcaagaagcaattccccgctggactgccacttgt

SEQ ID NO: 271846 - DNA, 75 bp, synthetic construct
  source 1..75: mol_type = other DNA
gctgctgcgccactctggtgggtgatggtgcataaattatccaagggggtgacacaggctgcggttgcgtcgatc

SEQ ID NO: 271847 - DNA, 75 bp, synthetic construct
  source 1..75: mol_type = other DNA
cttcccgtatcgccggtacggcaggcgcttcagttgcttctctgggcgcattccctgctctggatgcgatgcgcc

SEQ ID NO: 271848 - DNA, 75 bp, synthetic construct
  source 1..75: mol_type = other DNA
gcgggtaaaatacgtacgccgaatcaggctcaggaagcaatttccgttggtctgccgcttgttgcgatcggtaag

SEQ ID NO: 271849 - DNA, 75 bp, synthetic construct
  source 1..75: mol_type = other DNA
attttctcacgctgctcggctgggtgatcaataacggtctgtggaatgtcctgctgagcaccggcctttttgtcc

SEQ ID NO: 271850 - DNA, 75 bp, synthetic construct
  source 1..75: mol_type = other DNA
atttatcgtctgattatgaagagcggttcagataacttccgtgcgtcttctattcaggggattatgaaacgtatc

SEQ ID NO: 271851 - DNA, 75 bp, synthetic construct
  source 1..75: mol_type = other DNA
atgaaaatcaccatttccggtactggctatgttggcttgtcaaatggccttctaattgcacaaaatcatgaggtt

SEQ ID NO: 271852 - DNA, 75 bp, synthetic construct
  source 1..75: mol_type = other DNA
agcagaagcgattaaacttttcgctaatacctacctggcaatgcgtgtggcgtactttaacgagctggatagcta

SEQ ID NO: 271853 - DNA, 75 bp, synthetic construct
  source 1..75: mol_type = other DNA
tatcagcaggattgcgcgggtctggtgcgctttgcggcaaacgaggcgttgaaagttcatgacagtaaatggcta

SEQ ID NO: 271854 - DNA, 75 bp, synthetic construct
  source 1..75: mol_type = other DNA
gtatctaccgccagaaatgacgctaacacctgagcaacgacaactggcgcaaaactggaaccaggggaacgggaa

SEQ ID NO: 271855 - DNA, 75 bp, synthetic construct
  source 1..75: mol_type = other DNA
ctacgccaggggccaagcccacgttggtatcagcaggattgcgcaggtctggtgcgctttgcagcgaacgagtcg

SEQ ID NO: 271856 - DNA, 75 bp, synthetic construct
  source 1..75: mol_type = other DNA
caacaatccgtcgtttggttatggtggttattgtttgccgaaagataccaaacagttactggcgaattatcagtc

SEQ ID NO: 271857 - DNA, 75 bp, synthetic construct
  source 1..75: mol_type = other DNA
tatgtcatcatcgccactccaaccgactatgatcctaaaactaattatttcaatacatccagtgtagaatcagta

SEQ ID NO: 271858 - DNA, 75 bp, synthetic construct
  source 1..75: mol_type = other DNA
tgaacatgaactatatggccaaatgcatgattggatggtcgctctgatcaacaatggagaaatagaagagaccga

SEQ ID NO: 271859 - DNA, 75 bp, synthetic construct
  source 1..75: mol_type = other DNA
atttatcgtctgattatgaagagcggttcagataacttccgcgcgtcttccattcaggggattatgaagcgtatc

SEQ ID NO: 271860 - DNA, 75 bp, synthetic construct
  source 1..75: mol_type = other DNA
tgcgatctcgccaccttcaaacaacaagccgatatcatcatctccaaccgtatggcagaagagcttaaagatgtc

SEQ ID NO: 271861 - DNA, 75 bp, synthetic construct
  source 1..75: mol_type = other DNA
aagccgacgtcattatttccaaccgtatggcagaagagcttagggatgtggcagataaggtatacacccgcgatc

SEQ ID NO: 271862 - DNA, 75 bp, synthetic construct
  source 1..75: mol_type = other DNA
agcagaagcgattaaacttttcgctaatacctatctggcgatgcgcgtggcgtactttaacgaactggatagcta

SEQ ID NO: 271863 - DNA, 75 bp, synthetic construct
  source 1..75: mol_type = other DNA
atgttcgatgttgacgactgcacccgatactcccgcccccgtgaactcagtcaggatgtgcaggcgctgatcaac

SEQ ID NO: 271864 - DNA, 75 bp, synthetic construct
  source 1..75: mol_type = other DNA
ggtgaaactcgtctgattaggggaaacaaattttatgccgaggtgcggtttaaacaggttaagcctgaactcgat

SEQ ID NO: 271865 - DNA, 75 bp, synthetic construct
  source 1..75: mol_type = other DNA
cacgctgctggaaacgttgtgcgccacgtacccggacaccatccatcctcaactgctcgcgactgaagatatcac

SEQ ID NO: 271866 - DNA, 75 bp, synthetic construct
  source 1..75: mol_type = other DNA
tgaaaagaacggtatcaagcccaccccttgttatttagagtgtgtgttaaatgttattgcttactcgatgttccg

SEQ ID NO: 271867 - DNA, 75 bp, synthetic construct
  source 1..75: mol_type = other DNA
ctgaaagcgtatgtaaattttggagacggctatctttgcactcagtgtttcatctattacaccgagcttcatgta

SEQ ID NO: 271868 - DNA, 75 bp, synthetic construct
  source 1..75: mol_type = other DNA
atgaatggaaagttatcttcggtgtcaaacataattggaagctggctttcggtgaaactcgtctgattaggggaa

SEQ ID NO: 271869 - DNA, 75 bp, synthetic construct
  source 1..75: mol_type = other DNA
ttcctatgtattatcctaatctttttttaacaatccaaatccgcaatagaggtgatgctttttcaacgatgttgg

SEQ ID NO: 271870 - DNA, 75 bp, synthetic construct
  source 1..75: mol_type = other DNA
tagtactaacaggatccgtatatttaggcgagcagatgagctagctgattctagaaccaatcagccccatgctaa

SEQ ID NO: 271871 - DNA, 75 bp, synthetic construct
  source 1..75: mol_type = other DNA
actcaaagaacaagctgacgcctggtttgccctgaaccggttattaagggatgaatggaaagttatcttcggtgt

SEQ ID NO: 271872 - DNA, 75 bp, synthetic construct
  source 1..75: mol_type = other DNA
cggtacagaccaccacacaggagatcccgtcgcaaccgcaggcgattcagccggagagcgccgccatcaataatc

SEQ ID NO: 271873 - DNA, 75 bp, synthetic construct
  source 1..75: mol_type = other DNA
cccaccgcctgctggcgcgcagcaaagatatccgcatcctggtgatcctactgcgctgccgcatccatcagggtg

SEQ ID NO: 271874 - DNA, 75 bp, synthetic construct
  source 1..75: mol_type = other DNA
ctagaaccaatgagcctaatgccaaaaccagagaacggctcataccgttggctgaatccttagctcaagaactgc

SEQ ID NO: 271875 - DNA, 75 bp, synthetic construct
  source 1..75: mol_type = other DNA
gcgagcgggatgaacgaaccttatttagtggtttatcatttacgctgaacgcaggagagtgggtacaaatcaccg

SEQ ID NO: 271876 - DNA, 75 bp, synthetic construct
  source 1..75: mol_type = other DNA
atgccggaggatatttatttttatatctgtaatcttaatgccgcgctggcgatgttaggaaaattcctggaattt

SEQ ID NO: 271877 - DNA, 75 bp, synthetic construct
  source 1..75: mol_type = other DNA
accatcgaagaaagtgcataatgtaggcttgttagttatttctttttcgatgatatatatatgcatgaggttaag

SEQ ID NO: 271878 - DNA, 75 bp, synthetic construct
  source 1..75: mol_type = other DNA
ttatgacgagaatactcgctgcgataacgattttgctgagtatcgtattgaccgtcctggtcactattttctgtt

SEQ ID NO: 271879 - DNA, 75 bp, synthetic construct
  source 1..75: mol_type = other DNA
gaaaaggcgatgcctgcaggtgcaaaaattgatgcgccatcaacaaggtcaatgctcaaacaggtggcagaagat

SEQ ID NO: 271880 - DNA, 75 bp, synthetic construct
  source 1..75: mol_type = other DNA
ttatgtgtggttgccgtaaattttttgagcggtgcggactctggcgggaagaacgaacaggcgacggaagcctga

SEQ ID NO: 271881 - DNA, 75 bp, synthetic construct
  source 1..75: mol_type = other DNA
aacccagtgataacgatttggccgaagaggaactgttatcgcagggagcctgtgctggacgcgactcagctttac

SEQ ID NO: 271882 - DNA, 75 bp, synthetic construct
  source 1..75: mol_type = other DNA
tattataaaattgaccgaaggacaaaaacctaatattaaagttcctatgcctaaaataattgatttatttcttgg

SEQ ID NO: 271883 - DNA, 75 bp, synthetic construct
  source 1..75: mol_type = other DNA
ttaacggcgtcgatcgtctgacccagcgtatggcgcagcatacggagcaggggggggattgtgattctgactacc

SEQ ID NO: 271884 - DNA, 75 bp, synthetic construct
  source 1..75: mol_type = other DNA
tttatcatcgcgatggcgataccgcacaatgtctggaagccctggcgcaggccgggcttgccggattcgaagata

SEQ ID NO: 271885 - DNA, 75 bp, synthetic construct
  source 1..75: mol_type = other DNA
gccagcaaagcggcgatgaacctgctgactggtgccggcatcccggtacgtaccatcagtgcttacaaaatcctg

SEQ ID NO: 271886 - DNA, 75 bp, synthetic construct
  source 1..75: mol_type = other DNA
tgacccgatggcttctgcctggcttgttcgctctggttctgtgtgcgccagcaccgaatacttacgcagccacca

SEQ ID NO: 271887 - DNA, 75 bp, synthetic construct
  source 1..75: mol_type = other DNA
gctatatctgggaacaacttttttatgcacctgggcggctgtttttttttggaatatctctgctctgatgagttt

SEQ ID NO: 271888 - DNA, 75 bp, synthetic construct
  source 1..75: mol_type = other DNA
actgcttgattacaaccgtaaacaggcggacagtgcggtggaactggagaatgttgagttagcaccgctggtgga

SEQ ID NO: 271889 - DNA, 75 bp, synthetic construct
  source 1..75: mol_type = other DNA
ctgaaagctgagaacgtaatacagaatcgggtgacgttcgttaaaacaaagacgaacaaaccgcgtactgtccct

SEQ ID NO: 271890 - DNA, 75 bp, synthetic construct
  source 1..75: mol_type = other DNA
atcttcaggatgctgtttcactcaatccgctacgtggtggtgttgactcccagagtgtccacactgtgtccacag

SEQ ID NO: 271891 - DNA, 75 bp, synthetic construct
  source 1..75: mol_type = other DNA
tggcagcgttttggctggcgcaaacgccgtgccattgaactgctgcaccgcgtggggattaaagatcacaaagat

SEQ ID NO: 271892 - DNA, 75 bp, synthetic construct
  source 1..75: mol_type = other DNA
tgacttacaaatgcttagccaatgggcggataaaatcaacgtgctttattgtggtcagacagtggaaaccgcgcc

SEQ ID NO: 271893 - DNA, 75 bp, synthetic construct
  source 1..75: mol_type = other DNA
gtggtcagacggtggaaagcgcgccaagtaaggatttagtcacgatgccacatcatccttatactcaggcgctga

SEQ ID NO: 271894 - DNA, 75 bp, synthetic construct
  source 1..75: mol_type = other DNA
acggttaagccgggtaacggtattgagcaagcaactcactggatgccgctgccagaaccgccgcaggaggttaac

SEQ ID NO: 271895 - DNA, 75 bp, synthetic construct
  source 1..75: mol_type = other DNA
tctacttcactaacgtcgcctgtcgccagctcaatattaaaacttgtcaatgtcggaactacgaacgtcgtttcg

SEQ ID NO: 271896 - DNA, 75 bp, synthetic construct
  source 1..75: mol_type = other DNA
ggttggataagctgtagtgagcgaatgccagaaatgggagagcgacaatgctatgtgttagcagctgactttaaa

SEQ ID NO: 271897 - DNA, 75 bp, synthetic construct
  source 1..75: mol_type = other DNA
atgacaattaagaaactcgatgatggtcgttatgaagtggacatcagacctgcagggcgcaacggaaagcgcatc

SEQ ID NO: 271898 - DNA, 75 bp, synthetic construct
  source 1..75: mol_type = other DNA
aaccggacttgccaccgggtcaggcgacgcacgcattgcgtcacagctttgccactcactttatgattaacggag

SEQ ID NO: 271899 - DNA, 75 bp, synthetic construct
  source 1..75: mol_type = other DNA
cagttggacaactatcaaaactatttgggctaaagggtgtgagcacttttcaatagtagcaccgcagcaagatgg

SEQ ID NO: 271900 - DNA, 75 bp, synthetic construct
  source 1..75: mol_type = other DNA
ggcgcaaccactggcttaataaagccaagaagctggcggaagatttgggattaggcttccttaattttgctgcat

SEQ ID NO: 271901 - DNA, 75 bp, synthetic construct
  source 1..75: mol_type = other DNA
gagcagaactatactgaccaaacaatttcggctattgagttcatattccacatttatagtggtcggctgatccaa

SEQ ID NO: 271902 - DNA, 75 bp, synthetic construct
  source 1..75: mol_type = other DNA
ctggaaaagctgcaaagcgaaaatattcaatttactgattcattcacggaaattgatgacttagtagatgagcga

SEQ ID NO: 271903 - DNA, 75 bp, synthetic construct
  source 1..75: mol_type = other DNA
agaagaaattttcgcaattgaggaagacccgcacttctataaaaaatatgtcctctattacagtattgcggaaga

SEQ ID NO: 271904 - DNA, 75 bp, synthetic construct
  source 1..75: mol_type = other DNA
aaatttcttgctttaaagcgtttaagcacatcgatctagatttaggcacttcttctctattgactctagatgggc

SEQ ID NO: 271905 - DNA, 75 bp, synthetic construct
  source 1..75: mol_type = other DNA
ctgagctgaaactcatcgacacctttatacaagacagcctgaaactcctcacgcctacatttgtatcaaatcttc

SEQ ID NO: 271906 - DNA, 75 bp, synthetic construct
  source 1..75: mol_type = other DNA
aggagatactattctcaacgtattcgtcggtagaccatgctgcctaccaggaatcagttcgcaagattattgccc

SEQ ID NO: 271907 - DNA, 75 bp, synthetic construct
  source 1..75: mol_type = other DNA
acgattaagccgggtaatggtattgagcaagcaactcactggatgccgctaccggaaccgccgcaggaggtgaag

SEQ ID NO: 271908 - DNA, 75 bp, synthetic construct
  source 1..75: mol_type = other DNA
agccaagaatggttacatcctcttggttcaggacgcagagccaaacttcgatgtaaatggcaactctccgggaac

SEQ ID NO: 271909 - DNA, 75 bp, synthetic construct
  source 1..75: mol_type = other DNA
gccgttttgtggttcaggtaacgggctatggcagccgtggcgaacgctggattattgatcgttacaacatcacgc

SEQ ID NO: 271910 - DNA, 75 bp, synthetic construct
  source 1..75: mol_type = other DNA
gccgggtgctgcataagctgtacagcactggttctatcaaggaagcagagatcgtgcttgaagcaataaaggctc

SEQ ID NO: 271911 - DNA, 75 bp, synthetic construct
  source 1..75: mol_type = other DNA
attcccgttgagagcatgtcccaccttgagcaggcggagaaactgtatgacttctatgtcaagtatctccaagtg

SEQ ID NO: 271912 - DNA, 75 bp, synthetic construct
  source 1..75: mol_type = other DNA
tggctgatcagcaagcagaaattgttaagaagatggtgtttgaaacgctgaaggatttgtacaaaaaacccacct

SEQ ID NO: 271913 - DNA, 75 bp, synthetic construct
  source 1..75: mol_type = other DNA
atggtaattaaatcaacaattccggttggctttacaaacttacttaaagaacggttaggtatcgacaatatattc

SEQ ID NO: 271914 - DNA, 75 bp, synthetic construct
  source 1..75: mol_type = other DNA
agcggaggcgattaagcttttcgcaaatacctacctggcaatgcgtgtcgcttacttcaacgaactggacagcta

SEQ ID NO: 271915 - DNA, 75 bp, synthetic construct
  source 1..75: mol_type = other DNA
tttgcgtgaaggtaaagcgttgtacgacaaccttcacccctcgcggatcgtgattggtgagcgttcagagcgcgc

SEQ ID NO: 271916 - DNA, 75 bp, synthetic construct
  source 1..75: mol_type = other DNA
aaggcgaaaggtattccggttattatctatgaaccggtgatgcaggaagatgagttcttcaactcccgcgtcgtg

SEQ ID NO: 271917 - DNA, 75 bp, synthetic construct
  source 1..75: mol_type = other DNA
atgaaaataacaatttcaggaacaggttatgttggtctttcaaatggtattctgattgcgcaaaaccacgaagtg

SEQ ID NO: 271918 - DNA, 75 bp, synthetic construct
  source 1..75: mol_type = other DNA
atcggtaatcactacaacaacccgtcattcggttatggtggctactgtctgccgaaagatactaagcagttgctg

SEQ ID NO: 271919 - DNA, 75 bp, synthetic construct
  source 1..75: mol_type = other DNA
aaatgaactggtggataagctgaatctgattgctcctgtattgtttgatcgtgagccaggaatgggttttgaacc

SEQ ID NO: 271920 - DNA, 75 bp, synthetic construct
  source 1..75: mol_type = other DNA
ggatagcctgcaaaaaacagcggataaagcctgccagcaatacggaaagtctaaagccgtatatcagcatagtgc

SEQ ID NO: 271921 - DNA, 75 bp, synthetic construct
  source 1..75: mol_type = other DNA
gcgttattgtcggtgcgatgttggctatgtctgggtgtgctatggtgcaatacaatgacggagaaaaggttagca

SEQ ID NO: 271922 - DNA, 75 bp, synthetic construct
  source 1..75: mol_type = other DNA
ggtcccgaacaatatcatcgcggctatcgtcgatgccaaccgtacccgtaaagactttatcgcggattctattct

SEQ ID NO: 271923 - DNA, 75 bp, synthetic construct
  source 1..75: mol_type = other DNA
ctactaccgcgattatatcgcggcgaacagcaacgatgacgcatcactgcctccgccggagcaggataaacgctg

SEQ ID NO: 271924 - DNA, 75 bp, synthetic construct
  source 1..75: mol_type = other DNA
acagagctgcagtatcacagttacgtggctgggattatcgtgatcgtcgcaaagacaagcgacgaacaacgaatg

SEQ ID NO: 271925 - DNA, 75 bp, synthetic construct
  source 1..75: mol_type = other DNA
taaatttccgtgccaccacggacaagcacgatgcataccgtaatgccgactacgtgatcattgccacaccgaccg

SEQ ID NO: 271926 - DNA, 75 bp, synthetic construct
  source 1..75: mol_type = other DNA
aagcagatattattatttctaaccgcatgacgtcagaattagctgatgttgccgataaagtgtatacccgtggtt

SEQ ID NO: 271927 - DNA, 75 bp, synthetic construct
  source 1..75: mol_type = other DNA
tttgtgatcattgcgacacctactgattatgatcctaaaacgaactatttcgatacctcaagcgtagagtcggtt

SEQ ID NO: 271928 - DNA, 75 bp, synthetic construct
  source 1..75: mol_type = other DNA
cacggtgccggttggttttacgcaagccatgcgagagaagtttaatacccagaatctcatcttctccccggagtt

SEQ ID NO: 271929 - DNA, 75 bp, synthetic construct
  source 1..75: mol_type = other DNA
caacaatccgtcgtttggttatggtggttattgtttgccgaaagataccaagcagttactggcgaactaccagtc

SEQ ID NO: 271930 - DNA, 75 bp, synthetic construct
  source 1..75: mol_type = other DNA
taataccactacggttgaggcggtgatccgagacgttatgagcattaacccccatgcggtgatggtgatcaagtc

SEQ ID NO: 271931 - DNA, 75 bp, synthetic construct
  source 1..75: mol_type = other DNA
aacacttacctggcaatgcgcgtcgcttactttaacgagctggatagctatgcggaaactctgggtctcaattcc

SEQ ID NO: 271932 - DNA, 75 bp, synthetic construct
  source 1..75: mol_type = other DNA
aggcggatgtgatcatctctaaccgtatggcggaagagctggcggatgtggcggacaaggtatacacccgcgatc

SEQ ID NO: 271933 - DNA, 75 bp, synthetic construct
  source 1..75: mol_type = other DNA
cctgcgtgaaggccgtgcgctgtacgacaacctgcacccgtcgcgcattgtcattggtgagcgctctgcacgtgc

SEQ ID NO: 271934 - DNA, 75 bp, synthetic construct
  source 1..75: mol_type = other DNA
cctatttcaacgagctcgacagctatgcagaaagccaagggcttaacagcaagcagattatcgaaggggtatgcc

SEQ ID NO: 271935 - DNA, 75 bp, synthetic construct
  source 1..75: mol_type = other DNA
ctaccctgtttaccgactccactgaagcagaagcgattaaactttttgcaaacacctacctggcgatgcgcgtgg

SEQ ID NO: 271936 - DNA, 75 bp, synthetic construct
  source 1..75: mol_type = other DNA
aaaatgtgatcttttcgcctgagtttttacgcgaagggaaagcactttatgataacttacacccatcacgcatag

SEQ ID NO: 271937 - DNA, 75 bp, synthetic construct
  source 1..75: mol_type = other DNA
ctcattcttcaactctcgcctggaacgtgatctcgccaccttcaaacaacaagccgacgtcattatctccaaccg

SEQ ID NO: 271938 - DNA, 75 bp, synthetic construct
  source 1..75: mol_type = other DNA
ataaagtcgcgttgcagggtaatatggatccgtcgatgctgtacgcgccgcctgcccgcattgaagaagaagtgg

SEQ ID NO: 271939 - DNA, 75 bp, synthetic construct
  source 1..75: mol_type = other DNA
agccggagaaggcccgcgattcacctcgccagtcacctgtaaagcagacgtcgataaactgccgattccggatcc

SEQ ID NO: 271940 - DNA, 75 bp, synthetic construct
  source 1..75: mol_type = other DNA
ggagaaagccattaccgccctgaccggacaaagcgtcgatcaaaaatggtttgtagtttacggcgactccccaca

SEQ ID NO: 271941 - DNA, 75 bp, synthetic construct
  source 1..75: mol_type = other DNA
ggatggtgcacggcaacgacgtttcgccgtggcaaagcctggcgaaagtacgcaatgccttgatactggcgctga

SEQ ID NO: 271942 - DNA, 75 bp, synthetic construct
  source 1..75: mol_type = other DNA
atgacgaacgccaacgttttgccgcccagtaaacgccccgcgctgttatgggggctagtctgcctggtcatggcg

SEQ ID NO: 271943 - DNA, 75 bp, synthetic construct
  source 1..75: mol_type = other DNA
gaattgttcgcactttaccgttatgttttaaccggcttgttgctggtggcgttggctgttattgcctgcggcgca

SEQ ID NO: 271944 - DNA, 75 bp, synthetic construct
  source 1..75: mol_type = other DNA
gcagaaactgattcgcacgcaatatcaccgcccgctttccacggcgcttttagcccgcgagctgtactgcaatgc

SEQ ID NO: 271945 - DNA, 75 bp, synthetic construct
  source 1..75: mol_type = other DNA
catcgcccgctttctacggcgcttttagcccgcgagctgtactgcaatgccgattatcttgggcgcgtgtatcgt

SEQ ID NO: 271946 - DNA, 75 bp, synthetic construct
  source 1..75: mol_type = other DNA
gcagcaccgcaacggcctgattgaccccgacacccgcgcccgcctgcaaaacggtggcgaagcgcaggcgcagtg

SEQ ID NO: 271947 - DNA, 75 bp, synthetic construct
  source 1..75: mol_type = other DNA
ggcgatattcccccagcgctgaatgacggctttatgcagcgtctggaccgccaactggtgtggctggtcagcccc

SEQ ID NO: 271948 - DNA, 75 bp, synthetic construct
  source 1..75: mol_type = other DNA
aaaatccgctgcgctcggcgacgttaaaggaccaatggatgccgccagccagcaggcgtggggagcgtttttctg

SEQ ID NO: 271949 - DNA, 75 bp, synthetic construct
  source 1..75: mol_type = other DNA
atgacgaacgccaacgttttgccgcccagtaaacgcccggcgctgttatgggggatcgtctgcctggtcatggcg

SEQ ID NO: 271950 - DNA, 75 bp, synthetic construct
  source 1..75: mol_type = other DNA
atctaacgtcgctgcaacaatacgcgagcaaacgatggggatacacagctcagcaggtactggatgcagctcaag

SEQ ID NO: 271951 - DNA, 75 bp, synthetic construct
  source 1..75: mol_type = other DNA
aaaattaacgacgccatccagcatgtgcgcgacggtaaggcgcgttatcgcgtggttctgaaagccgacttctga

SEQ ID NO: 271952 - DNA, 75 bp, synthetic construct
  source 1..75: mol_type = other DNA
gattatgaatcgcggcggctttgccgagaagttgcgtgcggactggcaatgggtgattccgctgccagaaaatat

SEQ ID NO: 271953 - DNA, 75 bp, synthetic construct
  source 1..75: mol_type = other DNA
aagctcactcaggcggaggttattgaatttcttgtgaaaagttattacgacggcttaaaatttgacgattctgaa

SEQ ID NO: 271954 - DNA, 75 bp, synthetic construct
  source 1..75: mol_type = other DNA
cgacattgagcaacgcgtttacatcaagccagagcagtactcctcatcagggaataaacatccgatcaagtattg

SEQ ID NO: 271955 - DNA, 75 bp, synthetic construct
  source 1..75: mol_type = other DNA
gaactgccaggcgcaatagaaaagaaatttcaggaggcaattgcgtttgcctctgctgacaaggtttctggtgac

SEQ ID NO: 271956 - DNA, 75 bp, synthetic construct
  source 1..75: mol_type = other DNA
tggtattcagcgccacccaggccatcagcagttttggcattgtgctggtgagcggtattttcaccgccttcctgc

SEQ ID NO: 271957 - DNA, 75 bp, synthetic construct
  source 1..75: mol_type = other DNA
aacaaaagcgctgcaaaatgccgggctgacggcggtgaaaccagatctcaacgccatgccagtgaaggtcgatga

SEQ ID NO: 271958 - DNA, 75 bp, synthetic construct
  source 1..75: mol_type = other DNA
gcagcatcgcaacggcctgattgaccccgacacccgcgcccgcctgcaaaacggcggcgaagcgcaggcgcagtg

SEQ ID NO: 271959 - DNA, 75 bp, synthetic construct
  source 1..75: mol_type = other DNA
ggtggtatcacggtctttaaaccactgttaatgcaccatatcactgccaccagccgcgttggggtaattggtatt

SEQ ID NO: 271960 - DNA, 75 bp, synthetic construct
  source 1..75: mol_type = other DNA
tgatgcgctttgccgcccgcagcaaggttgcgccgacaaccgaactgttcccgatgtcgaaaattaacgacgcca

SEQ ID NO: 271961 - DNA, 75 bp, synthetic construct
  source 1..75: mol_type = other DNA
tcttaaccggcttgttgctggtggcgctggcggtgattgcctgcggcgcagtggcccgtctcggctggcgcaaag

SEQ ID NO: 271962 - DNA, 75 bp, synthetic construct
  source 1..75: mol_type = other DNA
ttctggcggacgtcaacgcccagccttcccatatcagcaagccgctgatgcaacgtattaaatacttcagcagcc

SEQ ID NO: 271963 - DNA, 75 bp, synthetic construct
  source 1..75: mol_type = other DNA
aacaaataaaaatataggtttagatttttctcggtgtggattaaataaggagattataattgagcctgaaaggga

SEQ ID NO: 271964 - DNA, 75 bp, synthetic construct
  source 1..75: mol_type = other DNA
tatctatggcatctggtccccgattgcagagggcaagatttgcacgcatgcgatgaagtggaaaaaggttcgtaa

SEQ ID NO: 271965 - DNA, 75 bp, synthetic construct
  source 1..75: mol_type = other DNA
ctgttaggcatcgagccgaaagtccgtcaactgcaacaaaacgcgacgcaggcggaagtgaaccgcttatctgtg

SEQ ID NO: 271966 - DNA, 75 bp, synthetic construct
  source 1..75: mol_type = other DNA
catggatggcgtcttgaaaaccgttgaaaagaccacacgtactttacaactgtttctgacgctggttgcggtgat

SEQ ID NO: 271967 - DNA, 75 bp, synthetic construct
  source 1..75: mol_type = other DNA
agcagaaaccctgcgactggatgtcattccacctgcgtttgagcaactccgccggaaaagaaaccgccgtaaacc

SEQ ID NO: 271968 - DNA, 75 bp, synthetic construct
  source 1..75: mol_type = other DNA
tggcagtatcccatctggcgctggcctgcggcttttttaccggaaccagcgactgcaggaagatgacaaatggcg

SEQ ID NO: 271969 - DNA, 75 bp, synthetic construct
  source 1..75: mol_type = other DNA
aacaggaaatcagcgatcagcagcgtctgcagctggagtatgagctgcagtccaggggctttgactgcggtgaca

SEQ ID NO: 271970 - DNA, 75 bp, synthetic construct
  source 1..75: mol_type = other DNA
gccgctgacaatgagcaggaccggctgcgtcgcgaggaactgagtgatgaggtctgggaacgctatttttataac

SEQ ID NO: 271971 - DNA, 75 bp, synthetic construct
  source 1..75: mol_type = other DNA
gtacagggcgaacgcaaagcgggtgcgcctgtactggataatccacgtctggatgcggtactggcggctgcagat

SEQ ID NO: 271972 - DNA, 75 bp, synthetic construct
  source 1..75: mol_type = other DNA
caagtctgagctaatcaacccgcgcaagggcacgccgaccagctacatcgccaaatacatcagtaagaacatcga

SEQ ID NO: 271973 - DNA, 75 bp, synthetic construct
  source 1..75: mol_type = other DNA
gcttgcgccccttggactcgtggcaataactgtccccctgttgaaaatctgaacaaatcaggggggatttacccg

SEQ ID NO: 271974 - DNA, 75 bp, synthetic construct
  source 1..75: mol_type = other DNA
gacatggtcattctggcggacgtcaacgcccagccttcccatatcagcaagccgctgatgcaacgtattgaatac

SEQ ID NO: 271975 - DNA, 75 bp, synthetic construct
  source 1..75: mol_type = other DNA
gtgcgtaataaaaaagcccctcagaccgtctcagcgcgtcatgacgcccgtgaacacctcagcattgaggcttac

SEQ ID NO: 271976 - DNA, 75 bp, synthetic construct
  source 1..75: mol_type = other DNA
ctatttgcgtgagacgattaagccatgtctggaacgactggagcatgtacgcgactgtcagctatccacttcttt

SEQ ID NO: 271977 - DNA, 75 bp, synthetic construct
  source 1..75: mol_type = other DNA
gataacgctgaatacgtgaatgcctgggcgtctctgcatcgtgttcagcaattccgcttctttggcattccgggg

SEQ ID NO: 271978 - DNA, 75 bp, synthetic construct
  source 1..75: mol_type = other DNA
tgggctggcgaatcctgacgacgtgcggaatatctgtgatgccaaaggaaatagttttgtcgatgcgatgaaggc

SEQ ID NO: 271979 - DNA, 75 bp, synthetic construct
  source 1..75: mol_type = other DNA
cgggcaattcggcgcgctggcggcgtggctggcaattgactggctgaaaacgcaatacggcgcgccgctacgtac

SEQ ID NO: 271980 - DNA, 75 bp, synthetic construct
  source 1..75: mol_type = other DNA
attgattttgtgctgaatgagctgaaagccaaaggcctgtgccgcgattttctcgcccagcagaaagaccggtga

SEQ ID NO: 271981 - DNA, 75 bp, synthetic construct
  source 1..75: mol_type = other DNA
agtccaggggatttgatggcagcgagaaagaggtcgatttactgcttcgcggaggcagtattccgtcaggagcag

SEQ ID NO: 271982 - DNA, 75 bp, synthetic construct
  source 1..75: mol_type = other DNA
agagggcaagatctgcactcatgcggtgaagtggaaaatggttcgtaaggccgttgacattcaggaggcggcagc

SEQ ID NO: 271983 - DNA, 75 bp, synthetic construct
  source 1..75: mol_type = other DNA
gtgttcagcaattccgcttctttggtattccggggcgtcaggcttaccgtgaacttcgcttgctggctggtcagg

SEQ ID NO: 271984 - DNA, 75 bp, synthetic construct
  source 1..75: mol_type = other DNA
acatgggaaaaggtggcggcggaaaccctgcgactggatgtcataccacctgcgtttgagcaactccgccggaaa

SEQ ID NO: 271985 - DNA, 75 bp, synthetic construct
  source 1..75: mol_type = other DNA
tccataatggggccattctattgcccggcggatggcacagtttatatcgatctctccttctatgatgacatgaaa

SEQ ID NO: 271986 - DNA, 75 bp, synthetic construct
  source 1..75: mol_type = other DNA
tgtctggaacggctggagcatatacgcgacagtcagctatccacttcttttcgctttatggcgagccatgaaggg

SEQ ID NO: 271987 - DNA, 75 bp, synthetic construct
  source 1..75: mol_type = other DNA
gattgtcgatgaagaacaccgcttcggggtgcgtcataaagagcgtattaaagcgatgcgcgcgaacgtggatat

SEQ ID NO: 271988 - DNA, 75 bp, synthetic construct
  source 1..75: mol_type = other DNA
gcctgaagtttattcaggatttgagcgagcggaaacaacgtatcgactgggtgcgcctgtttatgcgtgagctgg

SEQ ID NO: 271989 - DNA, 75 bp, synthetic construct
  source 1..75: mol_type = other DNA
aagcgatgcgcgcgaacgtcgacatactgacgctcaccgcgacaccaattccgcgcacgctgaacatggcaatga

SEQ ID NO: 271990 - DNA, 75 bp, synthetic construct
  source 1..75: mol_type = other DNA
cgcctgtcacgagatgcattacgaacccaactggacagcgccggttatcgccatgttgaccaggtaatggagcac

SEQ ID NO: 271991 - DNA, 75 bp, synthetic construct
  source 1..75: mol_type = other DNA
actggcgatctggaaaacagtgccgaacgtttccaggctgacacgctggcgcgttttgagaatcgcggcgtcgat

SEQ ID NO: 271992 - DNA, 75 bp, synthetic construct
  source 1..75: mol_type = other DNA
tcgctattgccagatgatttcattcctgacgtgaatacgcgtttgtcgttctataaacgtattgccagcgccaaa

SEQ ID NO: 271993 - DNA, 75 bp, synthetic construct
  source 1..75: mol_type = other DNA
acaactgctgggtcagttcccgcaatggttagcagagaacgccgcccgtgcggtggagttgggttcctggggcgt

SEQ ID NO: 271994 - DNA, 75 bp, synthetic construct
  source 1..75: mol_type = other DNA
atatcacgttgcgcggattaaacagtggttgagttatttgcgtaaagaatacgatgaagcaacgggattatttca

SEQ ID NO: 271995 - DNA, 75 bp, synthetic construct
  source 1..75: mol_type = other DNA
atgcgagtgttactggctccgatggagggtgtacttgactctctggtacgggaattactgaccgaagttaacgac

SEQ ID NO: 271996 - DNA, 75 bp, synthetic construct
  source 1..75: mol_type = other DNA
ccggcagtcgcatcctccgggtactcaaagcgctgcgcggtcatgccctgaacggtatttctaacggtgaactgg

SEQ ID NO: 271997 - DNA, 75 bp, synthetic construct
  source 1..75: mol_type = other DNA
cgccatccggtacgctggtgcgcgtgcaattgctgggtcagttcccacaatggctggcagagaacgccgcccgtg

SEQ ID NO: 271998 - DNA, 75 bp, synthetic construct
  source 1..75: mol_type = other DNA
cttggctgggacagcggcgagaagaagtttgaaattgccgatgctgtccagcaggctggtgctacggagctggtg

SEQ ID NO: 271999 - DNA, 75 bp, synthetic construct
  source 1..75: mol_type = other DNA
cacaactggacagcgccggatatcgccatgttgatcaggtgatggaacacggcgaatacgctacgcgcggtgcgc

SEQ ID NO: 272000 - DNA, 75 bp, synthetic construct
  source 1..75: mol_type = other DNA
aggaagtatccgcgccagcacctggaggatttaagcaccgggaagaaagaggcgttaccagtagatgacgatggt

SEQ ID NO: 272001 - DNA, 75 bp, synthetic construct
  source 1..75: mol_type = other DNA
atcggcgcggcctttttccggttcctggtcttttgctcacatgttctttccggccttatcccttgattctgtgga

SEQ ID NO: 272002 - DNA, 75 bp, synthetic construct
  source 1..75: mol_type = other DNA
ccgccgaccaacccattccaacccggcaaccagcaggcgttaaagcatggtggttacgcccggcgtcttctgctt

SEQ ID NO: 272003 - DNA, 75 bp, synthetic construct
  source 1..75: mol_type = other DNA
acggcggcgtacatgatgccgccgctgcttttgcctggaacaaaaccccaaaagcgattaacccatacacggacc

SEQ ID NO: 272004 - DNA, 75 bp, synthetic construct
  source 1..75: mol_type = other DNA
accataattatcagtgctgtcggcagcatcattaattatgttattgaaaattacaaactcaaatttatcacccca

SEQ ID NO: 272005 - DNA, 75 bp, synthetic construct
  source 1..75: mol_type = other DNA
tccgcgacctacttcatgcgggcggcagacagccatcaccgtgagggaatattgcaaggtgctttgctggtggtt

SEQ ID NO: 272006 - DNA, 75 bp, synthetic construct
  source 1..75: mol_type = other DNA
cgccacgccgcccgcccgtcgtctggcagttaaaacctttgtccgtgagtatgacagtctggtggtccgggaggc

SEQ ID NO: 272007 - DNA, 75 bp, synthetic construct
  source 1..75: mol_type = other DNA
ccagcgaccgtgggcgttatctgatgattggcgctgccgaacatggttttgtcgatacggtgcgtaatctggcgc

SEQ ID NO: 272008 - DNA, 75 bp, synthetic construct
  source 1..75: mol_type = other DNA
gcaaaaacgtcttgaagcgattgcctcgctggaagatctcggggcaggttttgcgctggcaacgcacgatctgga

SEQ ID NO: 272009 - DNA, 75 bp, synthetic construct
  source 1..75: mol_type = other DNA
ccgatgcgaccgctattgccgccacaatcgctctggctgcgagtggatgaacttttctcggcgttaaaaaactgg

SEQ ID NO: 272010 - DNA, 75 bp, synthetic construct
  source 1..75: mol_type = other DNA
tgctggatctcttcccgatggggagtgagctgccttatcgtcttgatttctttgatgatgaaatcgacagtctgc

SEQ ID NO: 272011 - DNA, 75 bp, synthetic construct
  source 1..75: mol_type = other DNA
gcgcctgaaatttattcaggatttgagtgagcggaaaacgcgtatcgaatgggtacgccagtttatgcgtgaact

SEQ ID NO: 272012 - DNA, 75 bp, synthetic construct
  source 1..75: mol_type = other DNA
gcgatgtatcaacaatctattaacgcaccagataccttctggggcgaacagggaaaaattctcgactggatcaaa

SEQ ID NO: 272013 - DNA, 75 bp, synthetic construct
  source 1..75: mol_type = other DNA
aaaaccgaagcgaaaatcatcagcctgttgagggagttacgcgcggaaggcaaaacgatgcttgtctcaacgcac

SEQ ID NO: 272014 - DNA, 75 bp, synthetic construct
  source 1..75: mol_type = other DNA
ttttacgaaaatcgctcgtcggttacggacgttgagaaactggagttgccgctgagttttggctggcttgtcggc

SEQ ID NO: 272015 - DNA, 75 bp, synthetic construct
  source 1..75: mol_type = other DNA
cgaactgttcgtccataccggggcaggacgctacatctgcggtgaagaaactgcgttaatcaactctctggaagg

SEQ ID NO: 272016 - DNA, 75 bp, synthetic construct
  source 1..75: mol_type = other DNA
aagatcggcaacgagaaatgtccggtagtcgacacctggtggcagaccgaaaccggcggtttcatgatcacacca

SEQ ID NO: 272017 - DNA, 75 bp, synthetic construct
  source 1..75: mol_type = other DNA
gtttggcgatcacgaacgttttgaacagacctacttctccaccttcaaaaatatgtatttcagcggcgacggcgc

SEQ ID NO: 272018 - DNA, 75 bp, synthetic construct
  source 1..75: mol_type = other DNA
ccgttgacgttcaggaggcggcagccgaccagggcgcttggactcgtggcaataactgtccccttgctgaaaatt

SEQ ID NO: 272019 - DNA, 75 bp, synthetic construct
  source 1..75: mol_type = other DNA
cggcaggccaaacccgacctggacaaacgcgacggtaagacaaagcagcgattatctggtcggcatgtttgctgc

SEQ ID NO: 272020 - DNA, 75 bp, synthetic construct
  source 1..75: mol_type = other DNA
cagtatgagcaaaaaagagcgccgggaactggcagcaaggctacgcctggttaaaccgatacggcgtaaagacta

SEQ ID NO: 272021 - DNA, 75 bp, synthetic construct
  source 1..75: mol_type = other DNA
aagcccaactccggctggatgaggatttcgatgctgataaccgccatctgcaactgctggcctgtgcggcgcaaa

SEQ ID NO: 272022 - DNA, 75 bp, synthetic construct
  source 1..75: mol_type = other DNA
ggattattctgacgggtattggagcctctggtctggtagcgcaaaattttgcctggaaactgatgaagattggtt

SEQ ID NO: 272023 - DNA, 75 bp, synthetic construct
  source 1..75: mol_type = other DNA
cagcgttttaatccagacatggtcattctggcggacgtaaacgcccagtcttcccatatcagcaagccgctgatg

SEQ ID NO: 272024 - DNA, 75 bp, synthetic construct
  source 1..75: mol_type = other DNA
ccgccattcccggcaacctccggtgcatggggtaaaccgacctgcgtcaacaacgttgaaaccctgtgcaacgtt

SEQ ID NO: 272025 - DNA, 75 bp, synthetic construct
  source 1..75: mol_type = other DNA
atactgaaggggcttatccgttgtaagtgtgggcttgtaatgactcctacagggatacgtaaacccgtttatcaa

SEQ ID NO: 272026 - DNA, 75 bp, synthetic construct
  source 1..75: mol_type = other DNA
gcatatgtcggtacatcattcgttcaggcgcatcgccaatattttttagcaggtgccatcgatcggccacctgtc

SEQ ID NO: 272027 - DNA, 75 bp, synthetic construct
  source 1..75: mol_type = other DNA
tatcgggaacgtgccaggctgttaaaggcagatcctaatgaaatgatttactccggggatgccagactgatagct

SEQ ID NO: 272028 - DNA, 75 bp, synthetic construct
  source 1..75: mol_type = other DNA
aggagactccttaagaagacaaacaaacctcattgatgctttctactctaagcacaaaaacgattattaccttct

SEQ ID NO: 272029 - DNA, 75 bp, synthetic construct
  source 1..75: mol_type = other DNA
atgaagttgctagcgacatacattcgttggagtaccagagagcaagactcaggagactccttaagaagacaaaca

SEQ ID NO: 272030 - DNA, 75 bp, synthetic construct
  source 1..75: mol_type = other DNA
tcctgctcacagatatgttgataagggtaaatctggttttcaccagcaacataagaatcaaggttctgacttcag

SEQ ID NO: 272031 - DNA, 75 bp, synthetic construct
  source 1..75: mol_type = other DNA
cgcacctgctggtggaaggtatgttgatctctgcctttgcgctgaaagcgtatcgcggctacatcttcctgcgtg

SEQ ID NO: 272032 - DNA, 75 bp, synthetic construct
  source 1..75: mol_type = other DNA
gttaatcaggtaaaagactctggtctgaaagggcgcggtggcgcaggcttctcgactggcctgaagtggagcctg

SEQ ID NO: 272033 - DNA, 75 bp, synthetic construct
  source 1..75: mol_type = other DNA
cagcgttaatcaactccctggaagggcgtcgcgctaacccacgctcgaaaccgcccttcccggcaacctccggtg

SEQ ID NO: 272034 - DNA, 75 bp, synthetic construct
  source 1..75: mol_type = other DNA
gggcgtgtcaaaatcaaaaacgaactccgccgccgtatccggcataaccgatattgggttaatgaggctaacaag

SEQ ID NO: 272035 - DNA, 75 bp, synthetic construct
  source 1..75: mol_type = other DNA
atgacttacaacgggcggcaatttgtttcattgccccaaagattagctgtacgccagaaactctacgtgtctggg

SEQ ID NO: 272036 - DNA, 75 bp, synthetic construct
  source 1..75: mol_type = other DNA
cgacggaccatccgcaacgcgcgcttattctggctgagctggaaaaactggatgctctttttgcggatgatgcga

SEQ ID NO: 272037 - DNA, 75 bp, synthetic construct
  source 1..75: mol_type = other DNA
gcagtgaaggatcagattgacgcaatttatcaccagacaggtgtgcgcccgctggtcttctactccatcgtgttg

SEQ ID NO: 272038 - DNA, 75 bp, synthetic construct
  source 1..75: mol_type = other DNA
tttctggtgctgcgttctgtgctcagtgacgatggtatcccttatgttctggtgttgctgggcgtgtgtacgggg

SEQ ID NO: 272039 - DNA, 75 bp, synthetic construct
  source 1..75: mol_type = other DNA
gctgcgctatttccgcgacaacggcattaacctcgacatcaccgatgccgaccgcgccgccctgaaagagaccgt

SEQ ID NO: 272040 - DNA, 75 bp, synthetic construct
  source 1..75: mol_type = other DNA
atagctgccttcaggcagcaggctgaaagcggtggtgtggatgagttcgtcgtgcagcggttcggtggtgtgtat

SEQ ID NO: 272041 - DNA, 75 bp, synthetic construct
  source 1..75: mol_type = other DNA
tacgaacgtcaccctttgcagtgaaagcccctgttacagcaattccgctgtggaaaagcttccattgcctacaca

SEQ ID NO: 272042 - DNA, 75 bp, synthetic construct
  source 1..75: mol_type = other DNA
tcgcgaggaacgtcgggagaacagccgctatgcctcgcttcgtcagtgcaggatggaagtcgcggaagtggaagc

SEQ ID NO: 272043 - DNA, 75 bp, synthetic construct
  source 1..75: mol_type = other DNA
ggagccgcgcccgaatacggtgaatgtggtgccggggaaaaccactttcactattgattgtcgccatactgacgc

SEQ ID NO: 272044 - DNA, 75 bp, synthetic construct
  source 1..75: mol_type = other DNA
atcgtcgtgatacggtttacgctttcagtcgcatttgccatcagtctgtcgaaaaagcgaaaaagatgggcgatc

SEQ ID NO: 272045 - DNA, 75 bp, synthetic construct
  source 1..75: mol_type = other DNA
tgaaacagaaaaactgaactatcgggtgatgcacagtggtgccgggcacgacgcgcaaattttcgcgcctcgcgt

SEQ ID NO: 272046 - DNA, 75 bp, synthetic construct
  source 1..75: mol_type = other DNA
acccaagaaacttcgaggttatgaaaactgcggttctcaaaggtcctcgatttgatactgaattaagccgcaagg

SEQ ID NO: 272047 - DNA, 75 bp, synthetic construct
  source 1..75: mol_type = other DNA
gaagccctgaactggccaatgattggcgagcaactcactaaacgagaccgttacgcccatgtagtgcgcaacacc

SEQ ID NO: 272048 - DNA, 75 bp, synthetic construct
  source 1..75: mol_type = other DNA
tttgcgatgaaatggatatcggtattgatatcgatttatggatggatgaagaacccgtgccaatgaacaaagaac

SEQ ID NO: 272049 - DNA, 75 bp, synthetic construct
  source 1..75: mol_type = other DNA
ctgccttattaccagcaattgcagttaaccgggccgatgatttgctgtaacggcagctatctttatcatccgcgc

SEQ ID NO: 272050 - DNA, 75 bp, synthetic construct
  source 1..75: mol_type = other DNA
ttaagccatgtctggaacggcttgagcatgtacgcgacagtcagctatccgcttcttttcgctttatggcaagcc

SEQ ID NO: 272051 - DNA, 75 bp, synthetic construct
  source 1..75: mol_type = other DNA
ttaagccatgtctggaacggctggagcatgtacgcgactgtcagctatccacttcttttcgctttatggcaagcc

SEQ ID NO: 272052 - DNA, 75 bp, synthetic construct
  source 1..75: mol_type = other DNA
atgaactacagctattcctggaatgctgagaaaaaagcaatcaatccttacgtagagacggaagagcaatcttca

SEQ ID NO: 272053 - DNA, 75 bp, synthetic construct
  source 1..75: mol_type = other DNA
ttgccgatccatttgtcagtgtaacttccggtagcattgagaattctgccggggcttattcgtggaatttaccta

SEQ ID NO: 272054 - DNA, 75 bp, synthetic construct
  source 1..75: mol_type = other DNA
gcgtatgctgtgcgccgactggtggtatcggaaattgtggaagatgcgttgcgaatggcgggaagatcagttgcg

SEQ ID NO: 272055 - DNA, 75 bp, synthetic construct
  source 1..75: mol_type = other DNA
cacgtttccattccacgctaaacaacggcaggcccaacccaacctggacaaatgcgacggtaagacaaagcagtg

SEQ ID NO: 272056 - DNA, 75 bp, synthetic construct
  source 1..75: mol_type = other DNA
aattacagaccatcagcgacagcagctcgtctatgaactgaagtccaggggatttgatggcagcgagaaagaagt

SEQ ID NO: 272057 - DNA, 75 bp, synthetic construct
  source 1..75: mol_type = other DNA
tccccttgctgaaaatttgaaccaacaggagaaagataaatcagcagatggggaccccagaacggatattatcag

SEQ ID NO: 272058 - DNA, 75 bp, synthetic construct
  source 1..75: mol_type = other DNA
aaatatatcagtaagaatattgacgggtgtggtctggctggcgagatcagtaaggaaacgggtaaatccctgcgt

SEQ ID NO: 272059 - DNA, 75 bp, synthetic construct
  source 1..75: mol_type = other DNA
actcgtggcaataactgtctccttgctgaaaatttgaaccaacaggagaaagataaatcagctgatgggaacccc

SEQ ID NO: 272060 - DNA, 75 bp, synthetic construct
  source 1..75: mol_type = other DNA
ttatgaaatcaacgaagagccaaccgcctatggcgatcacggcattcgtatttatggcatctggtcacctattgc

SEQ ID NO: 272061 - DNA, 75 bp, synthetic construct
  source 1..75: mol_type = other DNA
agacaaatcagctgatggggataccagaacggatatcacccgtatggatgacaaggagttgcacgattacctgca

SEQ ID NO: 272062 - DNA, 75 bp, synthetic construct
  source 1..75: mol_type = other DNA
atgcgtgtgttactggcaccgatggagggagtgcttgactctctggtgcgtgaattgctgaccgaagttaacgac

SEQ ID NO: 272063 - DNA, 75 bp, synthetic construct
  source 1..75: mol_type = other DNA
atggcagataacccaaatccttcatcgtcgctgccggacgttttttcaccggcgacccgcgactggtttcttcgc

SEQ ID NO: 272064 - DNA, 75 bp, synthetic construct
  source 1..75: mol_type = other DNA
gcaacgccgctttctgttgccagtgggttacaacgcattggacgtgccggacaccaggtaggaggtatctccaaa

SEQ ID NO: 272065 - DNA, 75 bp, synthetic construct
  source 1..75: mol_type = other DNA
cgctgaaactgtccggaaaaatccacaaacagcgtgaaagtattgcccgaagtcgtggcgaccccccgcccaaaa

SEQ ID NO: 272066 - DNA, 75 bp, synthetic construct
  source 1..75: mol_type = other DNA
aatccccttaccccggagcagaaatactggtttgcctgcgccacgtttgataactgggagggctggaatgagcaa

SEQ ID NO: 272067 - DNA, 75 bp, synthetic construct
  source 1..75: mol_type = other DNA
tggcgcgttcttttccgggactattcccccgtggctggcagaagaaaatacgatcgccaatattcaggggttgat

SEQ ID NO: 272068 - DNA, 75 bp, synthetic construct
  source 1..75: mol_type = other DNA
gatacccgcgaggcgcataagcgtaaaacctcacgcatcctctatatttcaccgatcaaagctctgggcaccgac

SEQ ID NO: 272069 - DNA, 75 bp, synthetic construct
  source 1..75: mol_type = other DNA
ctctgaaactgtccggaaaaatccacaaacagcttgaaagtattgcccgaagtcgtggcgaccccccacccaaaa

SEQ ID NO: 272070 - DNA, 75 bp, synthetic construct
  source 1..75: mol_type = other DNA
cactgaaactgtccggaaaaatccacaaacagcgtgaaagtattgcccgaagtcgtggcgaccccccacccaaaa

SEQ ID NO: 272071 - DNA, 75 bp, synthetic construct
  source 1..75: mol_type = other DNA
accgtgcatcctgacatccacagcgaaattatatggttctgctccacttacctgctgaaatccggacctcagatt

SEQ ID NO: 272072 - DNA, 75 bp, synthetic construct
  source 1..75: mol_type = other DNA
cgctgaaactgtccggaaaaatccacaaacagcctgaaagtattgcccgaagtcgtggcgaccccccccccaaaa

SEQ ID NO: 272073 - DNA, 75 bp, synthetic construct
  source 1..75: mol_type = other DNA
cgctgaaactgtccggaaaaatccacaaacagcatgaaagtattgcccgaagtcgtggcgaccccccacccaaaa

SEQ ID NO: 272074 - DNA, 75 bp, synthetic construct
  source 1..75: mol_type = other DNA
ccctgaaactgtccggaaaaatccacaaacagcgtgaaagtattgcccgaagtcgtggcgaccccccccccaaaa

SEQ ID NO: 272075 - DNA, 75 bp, synthetic construct
  source 1..75: mol_type = other DNA
cgtggtgtcctcccaaaaaaactgctgaatgaaatgattgagcaggcgtaccatgatttggtggcaaccaggcag

SEQ ID NO: 272076 - DNA, 75 bp, synthetic construct
  source 1..75: mol_type = other DNA
acttttacacccgcccacaccgtcatatctttactgaaatggcgcgtttgcaggaaagcggtagtcctatcgatc

SEQ ID NO: 272077 - DNA, 75 bp, synthetic construct
  source 1..75: mol_type = other DNA
gatatcaacaaacaaaaacatttattttagcaaaaatggaataaaacaaaaagacaaaaataaatataacacata

SEQ ID NO: 272078 - DNA, 75 bp, synthetic construct
  source 1..75: mol_type = other DNA
caataccgcatgggccgggcatattcacttcaaaaactcagcgggcgagtggtggctggtgatttcaccgtgggg

SEQ ID NO: 272079 - DNA, 75 bp, synthetic construct
  source 1..75: mol_type = other DNA
gaacctcgtcgaaaacgcggcgatgttgcaagataaaccggtacttatcttctcgctggagatgccatcagaaca

SEQ ID NO: 272080 - DNA, 75 bp, synthetic construct
  source 1..75: mol_type = other DNA
cctgacgccaacggaagtgcgctcccgcgcgcgccgtattgcccgtgaacacggcggcatcggactcatcatgat

SEQ ID NO: 272081 - DNA, 75 bp, synthetic construct
  source 1..75: mol_type = other DNA
tccgtaccggacaactggatgatgaagactgggcgcgtatttccggcaccatgggtattttgctcgaaaaacgta

SEQ ID NO: 272082 - DNA, 75 bp, synthetic construct
  source 1..75: mol_type = other DNA
ttttcgcgttgttaattttagcaacgctgataaaccattttctgctatggcggttaccggagagaaaagggggtg

SEQ ID NO: 272083 - DNA, 75 bp, synthetic construct
  source 1..75: mol_type = other DNA
tgaagcctttgacctgatgaaacagcgtggctatcggtctgaatttgaccgggaagactggtcaattccggaggg

SEQ ID NO: 272084 - DNA, 75 bp, synthetic construct
  source 1..75: mol_type = other DNA
atgcctgaactcactgaactaccagagggaccgttttcgcgccagcaggcagaggcggttgcggctcaatatgcc

SEQ ID NO: 272085 - DNA, 75 bp, synthetic construct
  source 1..75: mol_type = other DNA
ccgtaaagaccctggtctggttgtgctgaacaagacatataacgatcttgagcgcccgatcctagttaaatatct

SEQ ID NO: 272086 - DNA, 75 bp, synthetic construct
  source 1..75: mol_type = other DNA
atgactccgtggaatgcaaaagctggtgatctcgttgttttgccagcatatcgtagtgaccctgggctggtcgtg

SEQ ID NO: 272087 - DNA, 75 bp, synthetic construct
  source 1..75: mol_type = other DNA
cccgcaatgttcgcgttaagcctttccgggcttatgttgaaaatcactggcgtaaattgttcgccggactgaatg

SEQ ID NO: 272088 - DNA, 75 bp, synthetic construct
  source 1..75: mol_type = other DNA
aattgctggaggcgttacgttaccattatgcgttactccgcggatgtatgtcggcggaagaattcagcttatatt

SEQ ID NO: 272089 - DNA, 75 bp, synthetic construct
  source 1..75: mol_type = other DNA
cgaaaatgaagctttggctaagtattttatcaatcagtatgtaaaacgcagagagggttataactactttagtct

SEQ ID NO: 272090 - DNA, 75 bp, synthetic construct
  source 1..75: mol_type = other DNA
gtggctgaacgtctgacttctgttaaaaaagaaaatctttctgaaaacgaagccattgcccgatattttatcacc

SEQ ID NO: 272091 - DNA, 75 bp, synthetic construct
  source 1..75: mol_type = other DNA
aaacgtttcgcccgtcaggtgaatgaactgggcggcgattatctcgacgcgccagtctccggcggcgaaatcggc

SEQ ID NO: 272092 - DNA, 75 bp, synthetic construct
  source 1..75: mol_type = other DNA
ggaacgtcgttcttgctcttgctcgcattggcactgttgcaaagttagcgatgaggcagccttttgtcttattca

SEQ ID NO: 272093 - DNA, 75 bp, synthetic construct
  source 1..75: mol_type = other DNA
ctgcaaggcgcaaaatgggaaattccacatcaggaaatccagaatgcgacgaaagcctgccacgggctatttccc

SEQ ID NO: 272094 - DNA, 75 bp, synthetic construct
  source 1..75: mol_type = other DNA
gatatacttgcagaacagaaaaaaatcgtaattgattattcaatcggccaaaaaatcatttatatcggtgacgcg

SEQ ID NO: 272095 - DNA, 75 bp, synthetic construct
  source 1..75: mol_type = other DNA
gcactgtacaacacattatggagtgggcaaccagtcaacgttgaacgggcatccagacccgggttccggctgaat

SEQ ID NO: 272096 - DNA, 75 bp, synthetic construct
  source 1..75: mol_type = other DNA
gccgtgaaatacttctgtctgttatgctgacggtcaaggctgcctcggtccaggatacgcatgaagttgaacttt

SEQ ID NO: 272097 - DNA, 75 bp, synthetic construct
  source 1..75: mol_type = other DNA
aggcatgttaattggtgggctgtctttacttgcattaaatgcagcattaccactgaaaacaacagttgttgatgc

SEQ ID NO: 272098 - DNA, 75 bp, synthetic construct
  source 1..75: mol_type = other DNA
tgctttcagttttgtaagtacaatggggctggcgaacgcagtcccccccattaaaaatgtgtttccgcttttgtt

SEQ ID NO: 272099 - DNA, 75 bp, synthetic construct
  source 1..75: mol_type = other DNA
tctaccttgaaacccccgctgatgcggcaacgctgcgtgatttgctgaacatgctggggatgaacagcgcccgtg

SEQ ID NO: 272100 - DNA, 75 bp, synthetic construct
  source 1..75: mol_type = other DNA
gtggcgctcaatattgaagcggtttctgaagccttgttgtttgcttcaaaagccggtgcggacccggtacgtgtg

SEQ ID NO: 272101 - DNA, 75 bp, synthetic construct
  source 1..75: mol_type = other DNA
aacagcttgaaagtattgcccgaagtcgtggtgtccccccaaaaaaactgctgaatgaaatgattgagcaggcgt

SEQ ID NO: 272102 - DNA, 75 bp, synthetic construct
  source 1..75: mol_type = other DNA
ttttccgtggcaattttccagaagataaagaaattggacaattcgcaggtgaacgtggcgtatgtttccgtgtag

SEQ ID NO: 272103 - DNA, 75 bp, synthetic construct
  source 1..75: mol_type = other DNA
cgtccagcgttttcgcgaaggttttacccgcttaccggcagcacaatcctttgctgcgctgttgggaatggaaga

SEQ ID NO: 272104 - DNA, 75 bp, synthetic construct
  source 1..75: mol_type = other DNA
gtatccagattataataaaaacctacctgcctttgaagtatatggggaaaatgacatacttaaggatatggttat

SEQ ID NO: 272105 - DNA, 75 bp, synthetic construct
  source 1..75: mol_type = other DNA
aatggttgttattttttgaagccatcaacggttcaaaaaatgaaattagagataaagccatgttacaaatggcat

SEQ ID NO: 272106 - DNA, 75 bp, synthetic construct
  source 1..75: mol_type = other DNA
tttgacgtgaaagaccttgataatgtgaatcacgtcagacattttgttttcgcatcactggtacttaatccttac

SEQ ID NO: 272107 - DNA, 75 bp, synthetic construct
  source 1..75: mol_type = other DNA
ttgccgcgctgttggggatggaagagggcggaaaactggcgcaagaagcaggttggctcatggccagcgagatga

SEQ ID NO: 272108 - DNA, 75 bp, synthetic construct
  source 1..75: mol_type = other DNA
atgaaactgggatttattggcttaggcattatgggtacaccgatggccattaatctggcgcgtgctggtcatcaa

SEQ ID NO: 272109 - DNA, 75 bp, synthetic construct
  source 1..75: mol_type = other DNA
tgccgttaatgtcgaaaccgcgcgccaggtaacggacgctgccgacatcatttttattatggtgccggatacgcc

SEQ ID NO: 272110 - DNA, 75 bp, synthetic construct
  source 1..75: mol_type = other DNA
cgtgcagcgttttcgtgaaggttttacccgcttgccagcggcgcaatcattcgctgcgctgttaggaatggaaga

SEQ ID NO: 272111 - DNA, 75 bp, synthetic construct
  source 1..75: mol_type = other DNA
ataaactcgacgccattatgcctgcgcatgtgatctacagtgatgttgatccgcgtccggcgagcggttctccct

SEQ ID NO: 272112 - DNA, 75 bp, synthetic construct
  source 1..75: mol_type = other DNA
ggttggttgatggccagcgaaatgattgctatggatattgatatcagctttgcgccagtgctggacgtcgggcat

SEQ ID NO: 272113 - DNA, 75 bp, synthetic construct
  source 1..75: mol_type = other DNA
ggtgtgtatgccactgagtatgtactggaacgctacggacgggagctgccgccggaatcgctggccgtgaagatt

SEQ ID NO: 272114 - DNA, 75 bp, synthetic construct
  source 1..75: mol_type = other DNA
tttttaccgcgctgatttatctcatggcgtcgctgttcttccggttggtacgtacggcctgccgtcagcgttttg

SEQ ID NO: 272115 - DNA, 75 bp, synthetic construct
  source 1..75: mol_type = other DNA
ctgaacggggcggcaacaaccgccctccgtggtcttgatggtgcaattcctgagggggctttcggagttaccatg

SEQ ID NO: 272116 - DNA, 75 bp, synthetic construct
  source 1..75: mol_type = other DNA
tttttaccgcgctgatttatctcgtggcgtcgctgtttttccggctgatacgtaaagcctgtcgtcagcgtcttg

SEQ ID NO: 272117 - DNA, 75 bp, synthetic construct
  source 1..75: mol_type = other DNA
tctggtggtgatggtggcgacgtttatctcgctggtcgctgccgggtggatttttaccgcgctgatttatcttgt

SEQ ID NO: 272118 - DNA, 75 bp, synthetic construct
  source 1..75: mol_type = other DNA
accggaatcgctggccgtgaagattgtcacgtcgctgtttttgcagccggtgccgtggtgcagacgggcggcggc

SEQ ID NO: 272119 - DNA, 75 bp, synthetic construct
  source 1..75: mol_type = other DNA
gatccatcgactatcgccgccaccaacactgatttaagtaccttaaaggcaacggttgaggatggcagtggtaac

SEQ ID NO: 272120 - DNA, 75 bp, synthetic construct
  source 1..75: mol_type = other DNA
acgcagtcagcatcgacaacgtgaaaccaggagtcactacagactggaaagaaaccgcagatggcgtctataagg

SEQ ID NO: 272121 - DNA, 75 bp, synthetic construct
  source 1..75: mol_type = other DNA
gcctccttaacctctgtatactcattcgtcgtcagcacgaccgagggcgcgaccatgactgcaagcgtcactgac

SEQ ID NO: 272122 - DNA, 75 bp, synthetic construct
  source 1..75: mol_type = other DNA
atctcgctggtcgctgccgggtggatttttaccgcgctgatttatcttgtggcgtcgctgtttttccggctgata

SEQ ID NO: 272123 - DNA, 75 bp, synthetic construct
  source 1..75: mol_type = other DNA
gaacgctacgggcgggagctgccgccggaatcgctggccgtgaagattgtcacgtcgctgtttttgcagccggtg

SEQ ID NO: 272124 - DNA, 75 bp, synthetic construct
  source 1..75: mol_type = other DNA
agctgccgccggaatcgctggccgtgaagattgtcacgtcgctgtttttgcagccggtgccgtggcgcaggcggg

SEQ ID NO: 272125 - DNA, 75 bp, synthetic construct
  source 1..75: mol_type = other DNA
ggcgtcgctgttcttccggctgatacgtacggcctgccgccagcgtcttgaggagcggcaaccatgtcaaagctg

SEQ ID NO: 272126 - DNA, 75 bp, synthetic construct
  source 1..75: mol_type = other DNA
ggcggcgctgttattccggctgatacgtacggcctgctgtcagcgttttgaggggcgggaaccatgtcaaggctg

SEQ ID NO: 272127 - DNA, 75 bp, synthetic construct
  source 1..75: mol_type = other DNA
ccccatcaccgcagtaaaaaccattgaagctgcggcccgttttggtcgtgaagaagccttaaacctggaaaacaa

SEQ ID NO: 272128 - DNA, 75 bp, synthetic construct
  source 1..75: mol_type = other DNA
tctacggcctgggcttccctccattccacggcggcgcgttccgctggctggacaccctcggcagcgcaaaatacc

SEQ ID NO: 272129 - DNA, 75 bp, synthetic construct
  source 1..75: mol_type = other DNA
tccgcgtggtggatcaactgctgccggtaaaagtttttcatcgcatttgccctgagctacaaaacgccagccgga

SEQ ID NO: 272130 - DNA, 75 bp, synthetic construct
  source 1..75: mol_type = other DNA
aacggtatttccaacggtgaactggcggcagcactgcacgagtcaccggcaaacatcaaccgggcactcaacacc

SEQ ID NO: 272131 - DNA, 75 bp, synthetic construct
  source 1..75: mol_type = other DNA
atggcgcacagtaccgaaatggcgcgggcgcaggatcgtatcaatgaaattaaccagcgtgttatggctggtagt

SEQ ID NO: 272132 - DNA, 75 bp, synthetic construct
  source 1..75: mol_type = other DNA
acgacctgctggcagaagtcagccagccgaagcgcgatttcagcgaggaagagattatcgcccgcatgatgatcc

SEQ ID NO: 272133 - DNA, 75 bp, synthetic construct
  source 1..75: mol_type = other DNA
acgaagcccgcgcactggtcggcattttccttaacgatcaatatgtaaaaggcaaagcgaaaaagcttacccaag

SEQ ID NO: 272134 - DNA, 75 bp, synthetic construct
  source 1..75: mol_type = other DNA
ggcggcatcgcttaccagtctgcgtggaaaggcgtgccggttgtcatgaaagatatcaacgacaagtcgttaacc

SEQ ID NO: 272135 - DNA, 75 bp, synthetic construct
  source 1..75: mol_type = other DNA
gtgatggaaaaacagttcggctggccaatgggtccggcatacctgctggatgtcgtgggggttgataccgcgcaa

SEQ ID NO: 272136 - DNA, 75 bp, synthetic construct
  source 1..75: mol_type = other DNA
cgatgggtccggcatacctgctggatgtcgtgggcattgataccgcgcatcacgcccaggcagtgatggcagcag

SEQ ID NO: 272137 - DNA, 75 bp, synthetic construct
  source 1..75: mol_type = other DNA
gcgaactggccaacgcgctggagcgtccggaaaacttctgcgggatgcacttctttaacccggtccaccgaatgc

SEQ ID NO: 272138 - DNA, 75 bp, synthetic construct
  source 1..75: mol_type = other DNA
cgtgatgatgatcctgagcgtgacgaagcagccgctaacggtgaagcagatccaacaacgactgggagagacgcc

SEQ ID NO: 272139 - DNA, 75 bp, synthetic construct
  source 1..75: mol_type = other DNA
ccgcatcaacttctcacgctgcattttctgtggtctgtgcgaagaagcctgtccgaccacggcgattcagttaac

SEQ ID NO: 272140 - DNA, 75 bp, synthetic construct
  source 1..75: mol_type = other DNA
cggaagagccggtctatctgccgccccgttatcgtggtcgtatcgttctgacccgcgacccggacggcgaagagc

SEQ ID NO: 272141 - DNA, 75 bp, synthetic construct
  source 1..75: mol_type = other DNA
cccacacgaccaacgctggcgaattaacctcgcattactgattgggcttgtgtcgatcgcaccaatgttctggaa

SEQ ID NO: 272142 - DNA, 75 bp, synthetic construct
  source 1..75: mol_type = other DNA
acgatcatctggtgccggaagccagccacgggcgcgatgcggcgttgctcaatctgctacgcaccaaagtgcggg

SEQ ID NO: 272143 - DNA, 75 bp, synthetic construct
  source 1..75: mol_type = other DNA
gccgatgcgctgggggaaccgctgggcgatcaagcgattgtcgggctttctgacgaagatctgcatcggctttct

SEQ ID NO: 272144 - DNA, 75 bp, synthetic construct
  source 1..75: mol_type = other DNA
atttctacacccgtcctcaccgccatatctttaccgaaatggcgcgtttgcaggaaagcggtagccccattgacc

SEQ ID NO: 272145 - DNA, 75 bp, synthetic construct
  source 1..75: mol_type = other DNA
taacggcccaatcgggacggtacgcctgacctttaacggtcaatggtcgcgtttcgacaactacgcggggccaca

SEQ ID NO: 272146 - DNA, 75 bp, synthetic construct
  source 1..75: mol_type = other DNA
tatttaccgtgatgaggtttatcacgagaatagtgatttaaaaggcatcgcggaaattattatcggtaaacaacg

SEQ ID NO: 272147 - DNA, 75 bp, synthetic construct
  source 1..75: mol_type = other DNA
ttcagtttccgcacatgttgctccgtggtttacccaccgtcatctattgccaggacaggaaataattcatacttc

SEQ ID NO: 272148 - DNA, 75 bp, synthetic construct
  source 1..75: mol_type = other DNA
cgatccacaagttgccgggctgaaagtgcctccgcactcgatcgaagcggagcagtcagtgttgggcggtttaat

SEQ ID NO: 272149 - DNA, 75 bp, synthetic construct
  source 1..75: mol_type = other DNA
gtagccgagcgtgtggtggcagacgatttttacacccgcccacaccgtcatatctttactgaaatggcgcgtttg

SEQ ID NO: 272150 - DNA, 75 bp, synthetic construct
  source 1..75: mol_type = other DNA
accctcagcctgatagccctaatccgtatctcaatgcacgtcgttcatggaatatccacatgggccatgtgcagc

SEQ ID NO: 272151 - DNA, 75 bp, synthetic construct
  source 1..75: mol_type = other DNA
gtatatggtgaaagcatccctggcgaatggagcctcacttgagaaacaactggaggctattgatgaaaaactgac

SEQ ID NO: 272152 - DNA, 75 bp, synthetic construct
  source 1..75: mol_type = other DNA
ggcaacagtgactgatggaaacggcaacccgttagccaatgaggcggtgacattcacgctaccggcagatgtgag

SEQ ID NO: 272153 - DNA, 75 bp, synthetic construct
  source 1..75: mol_type = other DNA
ctctctacattacggtgaatgataattacggcaatggtgtacccctgcatcaggtaaccctcagcgtttcgccga

SEQ ID NO: 272154 - DNA, 75 bp, synthetic construct
  source 1..75: mol_type = other DNA
tttggtgagcagacggtcactgcatcactggctaataatggtgccagcgacaacaaaactgtgcattttattggc

SEQ ID NO: 272155 - DNA, 75 bp, synthetic construct
  source 1..75: mol_type = other DNA
atggcggtaaagcgattactgatgctgaaggcaaagcgaaagtcacgctgaaaggtacaaaagcaggcgctcata

SEQ ID NO: 272156 - DNA, 75 bp, synthetic construct
  source 1..75: mol_type = other DNA
aagcgcagtcacgaccgctggtggaatgcaaacagtagatataacgctggtggcaggcccggcagacgcctcgca

SEQ ID NO: 272157 - DNA, 75 bp, synthetic construct
  source 1..75: mol_type = other DNA
ctggctgctgtggggggaattacctatatcggaagccaatcgaaaatcatcccgatggtctatgaacaggacagg

SEQ ID NO: 272158 - DNA, 75 bp, synthetic construct
  source 1..75: mol_type = other DNA
ccacagtgaaagctaacgagtttcttaacggctcaaaagagcgtaatccgtttacccgcgcacaaacggaaatgg

SEQ ID NO: 272159 - DNA, 75 bp, synthetic construct
  source 1..75: mol_type = other DNA
cccctcaacctgacaccccaaacccatatctgaatgcgcggcgttcgtggaatattcacatggggcatgttcagc

SEQ ID NO: 272160 - DNA, 75 bp, synthetic construct
  source 1..75: mol_type = other DNA
attccataccagcctgtagcaggtattcagatgtcgtttcatcagcttttccttagattgagggtgaataaaaaa

SEQ ID NO: 272161 - DNA, 75 bp, synthetic construct
  source 1..75: mol_type = other DNA
gggtaaatgtggccattgccgtatgggtgacgtgtatgtctgcgtcgatggtccagttttcaactatgacattgc

SEQ ID NO: 272162 - DNA, 75 bp, synthetic construct
  source 1..75: mol_type = other DNA
atgtataaagttaaattattttttactcttgatatgtgtaaaaaatatagctttgatgtttatattttattagaa

SEQ ID NO: 272163 - DNA, 75 bp, synthetic construct
  source 1..75: mol_type = other DNA
tgatgctgatttaggtaatcgctatttcggcaccgtcaccgaggcgttagaacttgatactgccaagaatggtta

SEQ ID NO: 272164 - DNA, 75 bp, synthetic construct
  source 1..75: mol_type = other DNA
tttggttatatgtaatctctctcgttatttgtctgttttgtggttggtggcttttttggggacgacttatatttt

SEQ ID NO: 272165 - DNA, 75 bp, synthetic construct
  source 1..75: mol_type = other DNA
tatttgaagcattgctatatataatgcttacttattggttaatagattctttttttgctttcaataagtatgact

SEQ ID NO: 272166 - DNA, 75 bp, synthetic construct
  source 1..75: mol_type = other DNA
aagagctgcttgctactggcgtgggtattgttttatctcgcataagctgccggaaattcgccagattgccgatcg

SEQ ID NO: 272167 - DNA, 75 bp, synthetic construct
  source 1..75: mol_type = other DNA
gaagatcgccgcagacaactggacgatcgccaacgccagcttgatcaggaacgtcggcaactggaagatgagtac

SEQ ID NO: 272168 - DNA, 75 bp, synthetic construct
  source 1..75: mol_type = other DNA
acaaagcaaatcactgttttttattcttgatagcgaaaaagcgagctccgaacgggaaaaggtgaaacgttatgg

SEQ ID NO: 272169 - DNA, 75 bp, synthetic construct
  source 1..75: mol_type = other DNA
tttggttatatgtattctcgctcgttatttgtctggtttgtggttggtggcttttttggggacggtttatatttt

SEQ ID NO: 272170 - DNA, 75 bp, synthetic construct
  source 1..75: mol_type = other DNA
gagaatggcaacattgatattctggtagaaaaacgtgcgctgagtaataccaaagtgcaaattgaagtgcagatt

SEQ ID NO: 272171 - DNA, 75 bp, synthetic construct
  source 1..75: mol_type = other DNA
ggcaattattaatgatgttctcgacttctcgaaactggaagcaggcaagctgattctggaaagtattccattccc

SEQ ID NO: 272172 - DNA, 75 bp, synthetic construct
  source 1..75: mol_type = other DNA
aatgacggttatggctgttgatgataatccggcaaacctgaaacttatcggcgcattgctggaagatatggtgca

SEQ ID NO: 272173 - DNA, 75 bp, synthetic construct
  source 1..75: mol_type = other DNA
tgcatagtctggcaggatcgctggatgtcgccgatcgccaaatggtggaaatcctccgcgggctaatgcgcgact

SEQ ID NO: 272174 - DNA, 75 bp, synthetic construct
  source 1..75: mol_type = other DNA
gttctcacggcaattggcgggaagtatggcaaaagcgtgggccaggttgttctgcgctggatctaccaacgaggc

SEQ ID NO: 272175 - DNA, 75 bp, synthetic construct
  source 1..75: mol_type = other DNA
agatggtatcggcgcgtgtctgctgaaaccattaacacctacacgcctgttgcctgccctgacggaattttgtca

SEQ ID NO: 272176 - DNA, 75 bp, synthetic construct
  source 1..75: mol_type = other DNA
tgaccacaggggcgattattcacggtaaaggtgattacctggcgtacagtgaagaagaacatccggtagcgttgc

SEQ ID NO: 272177 - DNA, 75 bp, synthetic construct
  source 1..75: mol_type = other DNA
gttagtggcgcgtacttagataaagtacgataccctgttttttatcgcctgggctccggtaatcagtacattaaa

SEQ ID NO: 272178 - DNA, 75 bp, synthetic construct
  source 1..75: mol_type = other DNA
gacccgcaaactgggactggtgatcttacacagggcaatgtcacctataaaatgcaaggtaaacaaggctccgat

SEQ ID NO: 272179 - DNA, 75 bp, synthetic construct
  source 1..75: mol_type = other DNA
ggcttaaaaccggagttgaggctgagaagaaaattaaggacattaagcttaaagcaggtgtgtggagtaataaca

SEQ ID NO: 272180 - DNA, 75 bp, synthetic construct
  source 1..75: mol_type = other DNA
gtgaactgtctgatggcgtggtgtttaacggcaccgttcataaaaactttgagctgcgtctgccggtcatgcgtg

SEQ ID NO: 272181 - DNA, 75 bp, synthetic construct
  source 1..75: mol_type = other DNA
aatggccccgacacagaatagttatccagtcactatcggcgcaggtggggccggtggtgttagtgcgacgaacgg

SEQ ID NO: 272182 - DNA, 75 bp, synthetic construct
  source 1..75: mol_type = other DNA
gaggcggtggacgcgcaggctctggcggtggcgttagaggcagggcatttggttcaggcggaggtggtgcatacg

SEQ ID NO: 272183 - DNA, 75 bp, synthetic construct
  source 1..75: mol_type = other DNA
tgtgagatgtttatcatccacgcacgtaaagcctggctttcggggttaagtccgaaagaaaaccgtgaaatcccg

SEQ ID NO: 272184 - DNA, 75 bp, synthetic construct
  source 1..75: mol_type = other DNA
gaaaatgcccataaagcgggtgctgacattaacgtgctggaacacgcgctcaaactggtggcggataagcgttaa

SEQ ID NO: 272185 - DNA, 75 bp, synthetic construct
  source 1..75: mol_type = other DNA
cagtggcggcgttatttaagtgaaaatgcccataaagcgggtgcagacattaatgtgctggaacacgcgctcaaa

SEQ ID NO: 272186 - DNA, 75 bp, synthetic construct
  source 1..75: mol_type = other DNA
ctgcgatttcatcaacaccgtttccggcaaaggcgagtgtgagatgttcatcatccacgcacgtaaagcctggct

SEQ ID NO: 272187 - DNA, 75 bp, synthetic construct
  source 1..75: mol_type = other DNA
cggtaaaggtgattacctggcgtacagtgaagaagaacatccggtagcgttgcaactcggcggtagcgatccggc

SEQ ID NO: 272188 - DNA, 75 bp, synthetic construct
  source 1..75: mol_type = other DNA
atcccgcacaccgtttctcgattgctcctatgctcgactggacggacagacactgccgctatttcctgcgtctgc

SEQ ID NO: 272189 - DNA, 75 bp, synthetic construct
  source 1..75: mol_type = other DNA
atgcagctcaacattaccggaaataacgtcgagatcaccgaggccctgcgcgaatttgtcacctcaaaatttgcc

SEQ ID NO: 272190 - DNA, 75 bp, synthetic construct
  source 1..75: mol_type = other DNA
tgccctgcaggtggtgcagaaacgtaacttctggcagcttcaggctgaaatcaatctccggggacgctactgcca

SEQ ID NO: 272191 - DNA, 75 bp, synthetic construct
  source 1..75: mol_type = other DNA
acgagtacgacaggctgacctctgatgccgctgttgatgaggcccttctcatcaacgaatacaccttcaccgaag

SEQ ID NO: 272192 - DNA, 75 bp, synthetic construct
  source 1..75: mol_type = other DNA
cccgagctgttaacccactaggccacacaattggtatcgctcagaatgtgaaggctgttaatgttcagacggcta

SEQ ID NO: 272193 - DNA, 75 bp, synthetic construct
  source 1..75: mol_type = other DNA
cgataaagaaaagacctcgcagacactgaaaatggtggcggaaaatggtcgttgggtcattgacgatattgtcag

SEQ ID NO: 272194 - DNA, 75 bp, synthetic construct
  source 1..75: mol_type = other DNA
tggctggattatgatccggtttgtgattgtcaggattttggcgatctggtgttagaaagcgtagcgataacccaa

SEQ ID NO: 272195 - DNA, 75 bp, synthetic construct
  source 1..75: mol_type = other DNA
atgagcagaattatcacctccaccgtgtatacactgaatgagctatccaccaccgcacgggaaaaagcccgcgac

SEQ ID NO: 272196 - DNA, 75 bp, synthetic construct
  source 1..75: mol_type = other DNA
tgtatctgtctgatgaactctcagagtctgcccgcgagaaggctcgtgcctggtactgcgaagagggtgggctgg

SEQ ID NO: 272197 - DNA, 75 bp, synthetic construct
  source 1..75: mol_type = other DNA
tgctaagggcggctggcacggtctgggcaatacccgtttcaaatcgtccgttaaccgtacaccgcggcagaaaac

SEQ ID NO: 272198 - DNA, 75 bp, synthetic construct
  source 1..75: mol_type = other DNA
acgagtacgactggctgacctcagacgccgctgtggatgaggccctgctcatcaacgaatataccttcaccgaag

SEQ ID NO: 272199 - DNA, 75 bp, synthetic construct
  source 1..75: mol_type = other DNA
ttctggcaactgcaggctgaaatccaccaccggggacgttactgccatccgtactgcatggatatcaccgtcacc

SEQ ID NO: 272200 - DNA, 75 bp, synthetic construct
  source 1..75: mol_type = other DNA
aggctgaaatcaatcaccggggacgctactgccatccgtacagcatggatatcaccgtcacccggaacagtccga

SEQ ID NO: 272201 - DNA, 75 bp, synthetic construct
  source 1..75: mol_type = other DNA
agaattgaaaattgtagtgtgaagacagtgtatacccatcggcgtaatgaaccgccccgggtttcctggagagtg

SEQ ID NO: 272202 - DNA, 75 bp, synthetic construct
  source 1..75: mol_type = other DNA
gtgagctgcatcgtatcgcggatgccctgcaggcggtacagaaacgtaacttctggcagttacaggctgaaatca

SEQ ID NO: 272203 - DNA, 75 bp, synthetic construct
  source 1..75: mol_type = other DNA
gtgacctacatcgtatcgcggatgccctgcaggcggtgcagaaacgtaacttctggcagttacaggctgaaatca

SEQ ID NO: 272204 - DNA, 75 bp, synthetic construct
  source 1..75: mol_type = other DNA
gtgatcttcatcgtatcgcggatgccctgcaggcggtccagaaacgtaacttctggcagttacaggctgaaatca

SEQ ID NO: 272205 - DNA, 75 bp, synthetic construct
  source 1..75: mol_type = other DNA
atcgctataacgacttgcagcgtcaactggaagatgccggtgccagcattattgagccgcttgcagtttctactg

SEQ ID NO: 272206 - DNA, 75 bp, synthetic construct
  source 1..75: mol_type = other DNA
agaaccgaagtttagtgatattattaaaattgcgagggtgacaggtgttgatttgaatgaattggcgcatggaga

SEQ ID NO: 272207 - DNA, 75 bp, synthetic construct
  source 1..75: mol_type = other DNA
atgagcaaagaaatcaaagcgaaaagaatcaaaaaggtaattctggaacactcgacttatgaagaactggccgag

SEQ ID NO: 272208 - DNA, 75 bp, synthetic construct
  source 1..75: mol_type = other DNA
gtcaccggggacgttactgccatccgtacagcatggatatcaccgtcacccggaacagtccgactggtcaggtaa

SEQ ID NO: 272209 - DNA, 75 bp, synthetic construct
  source 1..75: mol_type = other DNA
aatacggattctttatctgaatttataaaccgtgataatgaatggttatccgcggtaaaggggaaacaggtcgta

SEQ ID NO: 272210 - DNA, 75 bp, synthetic construct
  source 1..75: mol_type = other DNA
taaaccgtgataatgaatggttatccgcggtaaaggggaaacaggtcgtattgattgcggccagaaagtcagaag

SEQ ID NO: 272211 - DNA, 75 bp, synthetic construct
  source 1..75: mol_type = other DNA
gtgaactccatcgtatcgcggatgccctgcaggcggtgcagaaacgtaacttctggcagttacaggctgaaatca

SEQ ID NO: 272212 - DNA, 75 bp, synthetic construct
  source 1..75: mol_type = other DNA
aatatgagaaaagagacaaaggcaaatgggtcttaaatgatgagcaatctgcaatattaacaatgctatctgaat

SEQ ID NO: 272213 - DNA, 75 bp, synthetic construct
  source 1..75: mol_type = other DNA
atgaactccatcgtatcgcggatgccctgcaggcggtgcagaaacgtaacttctggcaattacaggctgaaatca

SEQ ID NO: 272214 - DNA, 75 bp, synthetic construct
  source 1..75: mol_type = other DNA
tggctgtttttgcaagcttcacgactcaagcacaatcaccatcgctaaccgctgaacaaacagttcgcctgattt

SEQ ID NO: 272215 - DNA, 75 bp, synthetic construct
  source 1..75: mol_type = other DNA
gaactctttgaacatattgctgattatagctggccgtggacgtgggtggtttccgactcttaccgccaggcggtc

SEQ ID NO: 272216 - DNA, 75 bp, synthetic construct
  source 1..75: mol_type = other DNA
ttgtgcgtttccgtacctttgacgacgataaagaaaagaccacgcaaacgctgaaaatggtggcagaaaatggtc

SEQ ID NO: 272217 - DNA, 75 bp, synthetic construct
  source 1..75: mol_type = other DNA
tggcttgaagcggtgatccagcgtgtcgaaatgtacaatgcatcgcttcccgttccgctttcactggctgaatgt

SEQ ID NO: 272218 - DNA, 75 bp, synthetic construct
  source 1..75: mol_type = other DNA
ttccctttttcgtgttacccgtttttgcgggcgataacctgttgcgctggcatgatgcgcaacattttacggagc

SEQ ID NO: 272219 - DNA, 75 bp, synthetic construct
  source 1..75: mol_type = other DNA
ccggtgatcgaactggtaaatgctattgatgctccccaggtgaaaagccgcgttggtgtgccctggtttcagatg

SEQ ID NO: 272220 - DNA, 75 bp, synthetic construct
  source 1..75: mol_type = other DNA
ttagagatggagaatggatttctttaggaataagtagatcaacgtggtacaggaaattttacaaaaatgaaaatt

SEQ ID NO: 272221 - DNA, 75 bp, synthetic construct
  source 1..75: mol_type = other DNA
gtcatgcggtatattcttgatggcaaggataataatgacattgcggaaaaaatgttcatcagcaacaaaactgtc

SEQ ID NO: 272222 - DNA, 75 bp, synthetic construct
  source 1..75: mol_type = other DNA
tccggcggtatctcgatcaagccttcagaaggcatggatgagatgaagtacgatatgtgcggcgcggcggcggtt

SEQ ID NO: 272223 - DNA, 75 bp, synthetic construct
  source 1..75: mol_type = other DNA
tatacaaatacgaaccgcagcgattactctaggtctagacccttcagaattaactaccagaaatcagttagagtt

SEQ ID NO: 272224 - DNA, 75 bp, synthetic construct
  source 1..75: mol_type = other DNA
ggctctatgtatgctggagaatggatattctcagaaagctatcgcggcgatgttggaggtttccactcgaactat

SEQ ID NO: 272225 - DNA, 75 bp, synthetic construct
  source 1..75: mol_type = other DNA
gcaaatgggcttacagggcgattcggcagggctggccagcattctcacagtggcttgatgctgtgattcagcgtg

SEQ ID NO: 272226 - DNA, 75 bp, synthetic construct
  source 1..75: mol_type = other DNA
aaacgtaatgaccgtttgccgagcgctgcgattaatctggtcaccgcgcatgatggttttacgctccgtgactgc

SEQ ID NO: 272227 - DNA, 75 bp, synthetic construct
  source 1..75: mol_type = other DNA
gaatggttaaaacgaatccgcaaaatgtgcgatcgtgaaggtatcttgctgattgctgacgagatagccaccggt

SEQ ID NO: 272228 - DNA, 75 bp, synthetic construct
  source 1..75: mol_type = other DNA
ggcggcacgatgaccctttccgccacgatcaccacgcgcgaggttgcagaaactatcagtaacggcgaagctggt

SEQ ID NO: 272229 - DNA, 75 bp, synthetic construct
  source 1..75: mol_type = other DNA
cgtgacgccgaaatggttgccgatgtgcgcgtgctaggggccattggcgtggtcgaaaccactcgtccggtgaat

SEQ ID NO: 272230 - DNA, 75 bp, synthetic construct
  source 1..75: mol_type = other DNA
ttgctcttttagccatttctggaatttaccgaacaacgacggcagttatcgaacacatcaggtatgtccgatcgc

SEQ ID NO: 272231 - DNA, 75 bp, synthetic construct
  source 1..75: mol_type = other DNA
caacgtcaacactgacgccccgtccggttgccggaatgccggtcctccccgcttcacgtccggctgtatccggag

SEQ ID NO: 272232 - DNA, 75 bp, synthetic construct
  source 1..75: mol_type = other DNA
aaacaggcgggaaagcaggttgcgggcggactgccttccctggttaatcttccggccatccccgcgacacctgct

SEQ ID NO: 272233 - DNA, 75 bp, synthetic construct
  source 1..75: mol_type = other DNA
cagcggttgaacgttcgctgtgtgagaaactttgtgcggatgtgaactacagcggcctgatttgcaaaaatccgt

SEQ ID NO: 272234 - DNA, 75 bp, synthetic construct
  source 1..75: mol_type = other DNA
ctggtttttgacgttgatcgcgagggggcagcgattgactggagcgaccggaacgctcccgcgccgaacatcacc

SEQ ID NO: 272235 - DNA, 75 bp, synthetic construct
  source 1..75: mol_type = other DNA
tggaacgatcatttccgcgatgctgcccgtcgtttctggctacattatgatttgcctctgggggcgtttgccggg

SEQ ID NO: 272236 - DNA, 75 bp, synthetic construct
  source 1..75: mol_type = other DNA
gtaaaaaatcctgtgaacggtcatgctcacctgctctacgcgctcaatatcgccgtgagaaccgcgccggacagc

SEQ ID NO: 272237 - DNA, 75 bp, synthetic construct
  source 1..75: mol_type = other DNA
gacgaactggctgattatctcgatttgagcgcctcagcgcgccgtagcgtcgataaaaattacgggctggggcga

SEQ ID NO: 272238 - DNA, 75 bp, synthetic construct
  source 1..75: mol_type = other DNA
tggcttgatgccgtgatccagcgtgtcgaaatgtacaacgtatcgcttcccgttccgctttctccggcggaatgt

SEQ ID NO: 272239 - DNA, 75 bp, synthetic construct
  source 1..75: mol_type = other DNA
ccttttcggaacgtcatggtgatgtttaccgcgagcagatggtggattttattctcagtgcattgaatcccggga

SEQ ID NO: 272240 - DNA, 75 bp, synthetic construct
  source 1..75: mol_type = other DNA
taaatcaaaaggcacgccgtcccaggccggattgctggacgatacgcaaagcgccatcaatgtggtgcgccatcg

SEQ ID NO: 272241 - DNA, 75 bp, synthetic construct
  source 1..75: mol_type = other DNA
tacctgaaaagctggatgtcagtgaggtagccagggctgctgatgccacgttgttgagaatgggaattacaaaat

SEQ ID NO: 272242 - DNA, 75 bp, synthetic construct
  source 1..75: mol_type = other DNA
tttctatgatcaatggcgatgacggtaaaaaactgtccaaacgtcacggggcagtcagcgtaatgcagtatcgtg

SEQ ID NO: 272243 - DNA, 75 bp, synthetic construct
  source 1..75: mol_type = other DNA
atggatcactaccttgagatccgcgttctgccagatcctgaattttcgagcgaaatgttgatggcggcgttattt

SEQ ID NO: 272244 - DNA, 75 bp, synthetic construct
  source 1..75: mol_type = other DNA
tctgttgaatttgctgccaaagatggcactcacctgcaaggctggtttattccttcgtcgacggggcccgccgaa

SEQ ID NO: 272245 - DNA, 75 bp, synthetic construct
  source 1..75: mol_type = other DNA
catcaattaacaatgcattaaacatacaaaaaacatcatattctctgaccaaaatggatcagacagggaagttgt

SEQ ID NO: 272246 - DNA, 75 bp, synthetic construct
  source 1..75: mol_type = other DNA
aatggacaatgccgatccagagctggaatttgacattgccccagttggcgatttattttgaaggccgcctcgata

SEQ ID NO: 272247 - DNA, 75 bp, synthetic construct
  source 1..75: mol_type = other DNA
gtcctgaaggtaaagcggaacggcgggaatcccggctcgccggactccggctcgcagtcctcatcctcgggcgct

SEQ ID NO: 272248 - DNA, 75 bp, synthetic construct
  source 1..75: mol_type = other DNA
tctcttctagataaaggagcaaaagtatatcccgatacatcatgctctctgagactgggagaaccattcatcttt

SEQ ID NO: 272249 - DNA, 75 bp, synthetic construct
  source 1..75: mol_type = other DNA
atggcggcgctgcaaaaattctttgtcgaacagggtgtctggatccggccttttggcaaactgatttacctgatg

SEQ ID NO: 272250 - DNA, 75 bp, synthetic construct
  source 1..75: mol_type = other DNA
tcgcatgtgatgtttggcggtatcacccatgcgcccgccatcgagctatgccgcaaactggtggcaatgacgccg

SEQ ID NO: 272251 - DNA, 75 bp, synthetic construct
  source 1..75: mol_type = other DNA
ttatttctacgaagattttgctgagttcgatgccgatgcggcgaaaaaacatctgcgtccggtagcgcgtcagcc

SEQ ID NO: 272252 - DNA, 75 bp, synthetic construct
  source 1..75: mol_type = other DNA
tttacctttcaaattgctgctacttatttaagagatcttgttctttttgattatccatccctcttcggcaacact

SEQ ID NO: 272253 - DNA, 75 bp, synthetic construct
  source 1..75: mol_type = other DNA
ggtgatccagcgtgtcgaaatgtacaatgcatcgcttcccgttccgctttcactggctgaatgtcgggctattgg

SEQ ID NO: 272254 - DNA, 75 bp, synthetic construct
  source 1..75: mol_type = other DNA
ttgcaaaaatccgttccacctggaatggctggtgatggagtggcgcgaggaagcctataccctcgatgaactggc

SEQ ID NO: 272255 - DNA, 75 bp, synthetic construct
  source 1..75: mol_type = other DNA
gaccagcggtgagcgcgcgatccagcacggtctggcgattgccgccgggataaaagcagcgaaagatctcggtaa

SEQ ID NO: 272256 - DNA, 75 bp, synthetic construct
  source 1..75: mol_type = other DNA
tactggtctgatggcgaaccataatccgctggcccatgagctgattgcggcgtctgaacaatccggtgaccgcgc

SEQ ID NO: 272257 - DNA, 75 bp, synthetic construct
  source 1..75: mol_type = other DNA
acagggcgattcgtcagggatggccagcattctcacagtggcttgatgcggtgattcagcgtgtcgaaatgtaca

SEQ ID NO: 272258 - DNA, 75 bp, synthetic construct
  source 1..75: mol_type = other DNA
ttcgtcaccgtttataaagataggatatttaaaaaccacgaagagaaatcaatcaataaagaagatgataaacct

SEQ ID NO: 272259 - DNA, 75 bp, synthetic construct
  source 1..75: mol_type = other DNA
tgaaggcgctgaaagggcgctatgagatggttaacattaagctcgataaaaccggcggtctgacggaagcgctgg

SEQ ID NO: 272260 - DNA, 75 bp, synthetic construct
  source 1..75: mol_type = other DNA
atgttgtgtacctctcgtgccattagcgccgctttaccgctggtgccgcaggtcagtttcgccgatcttgacgga

SEQ ID NO: 272261 - DNA, 75 bp, synthetic construct
  source 1..75: mol_type = other DNA
ctcaacatacgcaacctggtggattcgccagacgattgaacgggcgattatgaaccaaacccgtactcacgccat

SEQ ID NO: 272262 - DNA, 75 bp, synthetic construct
  source 1..75: mol_type = other DNA
ctggtggtaaaaattgcccgccgttatggcaatcgtggtctggcgttgctggaccttatcgaaaagagggcaacc

SEQ ID NO: 272263 - DNA, 75 bp, synthetic construct
  source 1..75: mol_type = other DNA
atggcaatcgtggtctggcgttgctggaccttatcgaagagggcaacctggggctgatccgcgcggtagagaagt

SEQ ID NO: 272264 - DNA, 75 bp, synthetic construct
  source 1..75: mol_type = other DNA
gcacggtctgggcaatacccgtttcaaatcgtccgttaaccgtacaccacggcagaaaaccaacggtacgccggg

SEQ ID NO: 272265 - DNA, 75 bp, synthetic construct
  source 1..75: mol_type = other DNA
gcccacagaggcaattgctcaggctgaaaatgtggtaatgcgtctgtccggtatgtctgagtttgttgtgaataa

SEQ ID NO: 272266 - DNA, 75 bp, synthetic construct
  source 1..75: mol_type = other DNA
gcctgccgatgccattgcccgggcggaagacgtggtgttgtgcctgtccgggatgagcggggctgttcgtccgga

SEQ ID NO: 272267 - DNA, 75 bp, synthetic construct
  source 1..75: mol_type = other DNA
actgacagcaccgaagtggcgaaaaataacgcgctgactgatgatgatttttctgcgggaaagtcttcgacggcg

SEQ ID NO: 272268 - DNA, 75 bp, synthetic construct
  source 1..75: mol_type = other DNA
ggagtcgggaaaaacatgggcgcgctgggggctctgtccgtagatatgactcaggccaatgccacactccctgat

SEQ ID NO: 272269 - DNA, 75 bp, synthetic construct
  source 1..75: mol_type = other DNA
tcaattataatttcagcggaaatagtgtacagaatcggattgggggtaacagccattatgcatatttaaacctac

SEQ ID NO: 272270 - DNA, 75 bp, synthetic construct
  source 1..75: mol_type = other DNA
tcgaacaggaggtgctcaccacctggcctgctgatgccattgcccgggcggaagacgtggtgttgcgtctgtccg

SEQ ID NO: 272271 - DNA, 75 bp, synthetic construct
  source 1..75: mol_type = other DNA
gctcatcccattgctgaataccacgcaacaaccggcgcttgcggagctacgcgatcgctctacacgtgaaaaact

SEQ ID NO: 272272 - DNA, 75 bp, synthetic construct
  source 1..75: mol_type = other DNA
aagttcttaatacagaagctgcgaccctgaccagccagtttaaccagcggttacttgcggcaaataaatccggcg

SEQ ID NO: 272273 - DNA, 75 bp, synthetic construct
  source 1..75: mol_type = other DNA
cagacgcccgattttactaacactattctggctctcgaaaagagcggggagttactcactcgcgttaccagcgtc

SEQ ID NO: 272274 - DNA, 75 bp, synthetic construct
  source 1..75: mol_type = other DNA
gacgggcaaacgctggagttaaccggtactgagtttaccctgctctacctactggcgcagcatctgggtcaggtg

SEQ ID NO: 272275 - DNA, 75 bp, synthetic construct
  source 1..75: mol_type = other DNA
caacgctgaatgaaacgcacccggtaatttataacgtctgcaattcacacattctgaagggcatatcaacattac

SEQ ID NO: 272276 - DNA, 75 bp, synthetic construct
  source 1..75: mol_type = other DNA
aatgttggcgcttaatgtcaatattcctttcagtcactggctgcgttccgacagtaaatcgttgtggcggcatgc

SEQ ID NO: 272277 - DNA, 75 bp, synthetic construct
  source 1..75: mol_type = other DNA
gattttgcatcaactcatgcaacagcgtggcttctacccaatggttgctgcgcagcgcataggcgaagagtatca

SEQ ID NO: 272278 - DNA, 75 bp, synthetic construct
  source 1..75: mol_type = other DNA
aacgtgctggcttatgacgcttactaccgctatttcatgggggataaaccgacgttgatgagcgccacggaatgg

SEQ ID NO: 272279 - DNA, 75 bp, synthetic construct
  source 1..75: mol_type = other DNA
gcgtagccgttacgcgcaaatcaagcaggcctgggataatcgacaaatggatgtggtcgaacaaatgatgcctgg

SEQ ID NO: 272280 - DNA, 75 bp, synthetic construct
  source 1..75: mol_type = other DNA
ggctggcacgcttgccgatggaagcgaaagagaaagatgaatggcgttactggcaggcgggtttactgctggaac

SEQ ID NO: 272281 - DNA, 75 bp, synthetic construct
  source 1..75: mol_type = other DNA
cgacgtcaccgacgagcaggcgaaatggcgcgatgacgccattatgcgttcgcaatccacgtcgttaattgaacg

SEQ ID NO: 272282 - DNA, 75 bp, synthetic construct
  source 1..75: mol_type = other DNA
ccgtattttctcctcagcagcttataacgccggaccagggcgggtgcgaacctggcttggcaacagcgccgggcg

SEQ ID NO: 272283 - DNA, 75 bp, synthetic construct
  source 1..75: mol_type = other DNA
ggcaggcagaaccggcgggatccgacagcaaccggcaggttactgtggaagacgtcatcagaaccggcgcgtttc

SEQ ID NO: 272284 - DNA, 75 bp, synthetic construct
  source 1..75: mol_type = other DNA
cgctgtgcttattaaagcgcccggcgcgaaagatgcgaaagtggaaaaccagacgggagttcgtaccgactggcg

SEQ ID NO: 272285 - DNA, 75 bp, synthetic construct
  source 1..75: mol_type = other DNA
gttacctgcaatatgtttatcagcagtttggcaataaccgtattttctcctcagcagcttataacgccggacctg

SEQ ID NO: 272286 - DNA, 75 bp, synthetic construct
  source 1..75: mol_type = other DNA
ttctctgaaagtattgaacccggattcagcggcgccaaaatcattggttcaaagaatgaagatgttaaaacatta

SEQ ID NO: 272287 - DNA, 75 bp, synthetic construct
  source 1..75: mol_type = other DNA
aaagcgcaggacgtaattattcgaatgcagaaacgacagattgccgggctcggtattcctgtaaccaaatctaag

SEQ ID NO: 272288 - DNA, 75 bp, synthetic construct
  source 1..75: mol_type = other DNA
cagtgcccagggttgcctactggaccccctttcgttacccgctgctactgaatctggcaagcctgttcgataatg

SEQ ID NO: 272289 - DNA, 75 bp, synthetic construct
  source 1..75: mol_type = other DNA
gaatatgtcgccagcggtggctaaggcaactttaatgattctaaaacgctggtaccatgcgatgctttatgagac

SEQ ID NO: 272290 - DNA, 75 bp, synthetic construct
  source 1..75: mol_type = other DNA
gtgtcacttatccagcgtgtagaaaacggcactgaaaagatagcgcttaattgccttctgctactcatcatcacg

SEQ ID NO: 272291 - DNA, 75 bp, synthetic construct
  source 1..75: mol_type = other DNA
atattactcaaaatcagcattatcagcacctggctctcaaggaacggcgaaaagcagcttctctaacccctttag

SEQ ID NO: 272292 - DNA, 75 bp, synthetic construct
  source 1..75: mol_type = other DNA
aagctggatgatacttccactgatggtgaagatacactgattaccattaaaggtttcctcaatatcgtgtcgtta

SEQ ID NO: 272293 - DNA, 75 bp, synthetic construct
  source 1..75: mol_type = other DNA
attggttcggcgttttggggattaattgccggcggcgtctgttacgtggtgttgaatttaattgctgacagaaac

SEQ ID NO: 272294 - DNA, 75 bp, synthetic construct
  source 1..75: mol_type = other DNA
ggacaggtcaaggccgtactcctaaagcgatcgctgctgctatcgaagctggtaaaacgctggaagacttcgcgc

SEQ ID NO: 272295 - DNA, 75 bp, synthetic construct
  source 1..75: mol_type = other DNA
gtgagcgagacgcggcggtggtggcatttctggtaacggcaagtggattgacgcttgtcgggattggttctgcgt

SEQ ID NO: 272296 - DNA, 75 bp, synthetic construct
  source 1..75: mol_type = other DNA
atgcacttttatgtggatgaaaccggtcataccggtccgaatctttttgaccgcacccagccagtactttcttat

SEQ ID NO: 272297 - DNA, 75 bp, synthetic construct
  source 1..75: mol_type = other DNA
cgccattattttgttcttcgaccaggtgtttgatcagggactgaatccggttgtgccctggagtgcctactggac

SEQ ID NO: 272298 - DNA, 75 bp, synthetic construct
  source 1..75: mol_type = other DNA
ccattaccgggatgatgactaccctgcccgtaagttggatccagatgctggcaggtctggcgctgttgagtacca

SEQ ID NO: 272299 - DNA, 75 bp, synthetic construct
  source 1..75: mol_type = other DNA
tgtcaaaggtgctggggagcgaacgcattgggtagaaccgctggcagtaccgctggtcgagagtatattcagtac

SEQ ID NO: 272300 - DNA, 75 bp, synthetic construct
  source 1..75: mol_type = other DNA
gctctccgcgaaatctatgcttgatattgcactctctttgcattttgattcacagcagtcattcagccgcgaatt

SEQ ID NO: 272301 - DNA, 75 bp, synthetic construct
  source 1..75: mol_type = other DNA
gtatgtatgagtttgtggtgaatgatactcctgaacaggcagatgacgccgggcctgcagagcctgtttctgcgg

SEQ ID NO: 272302 - DNA, 75 bp, synthetic construct
  source 1..75: mol_type = other DNA
gaaatgaaaataggttcaaacgtcggatcgttaggcatagatacaagtaacaacagagacgccttagacgttgta

SEQ ID NO: 272303 - DNA, 75 bp, synthetic construct
  source 1..75: mol_type = other DNA
cgcagagcactctgccgtatatggctcctcattttgatcagattgaaaatcaacactatcgcccggcattcgatg

SEQ ID NO: 272304 - DNA, 75 bp, synthetic construct
  source 1..75: mol_type = other DNA
agggaatgcagcaaaagcgggccgaaattgccgccattgcgctcaacccgcaaacacctgatttcaacaatacta

SEQ ID NO: 272305 - DNA, 75 bp, synthetic construct
  source 1..75: mol_type = other DNA
atgatctggcagcctgagttcacagataaaacactctccaggaaacccgggtcggttcactccgcgaaatctatg

SEQ ID NO: 272306 - DNA, 75 bp, synthetic construct
  source 1..75: mol_type = other DNA
aaccatggcgctgaaacagcaggacaagctggctgatgtcactaccgatggtgaagatgcgttgattaccattcg

SEQ ID NO: 272307 - DNA, 75 bp, synthetic construct
  source 1..75: mol_type = other DNA
cactggctttgctggctacgccgataccattcactaacacactgataaataaatttttaggaaatgttgagcctg

SEQ ID NO: 272308 - DNA, 75 bp, synthetic construct
  source 1..75: mol_type = other DNA
aagttttcgtggtcgggcaggacaacgggacaaaacatccaaagcccttagcaagcgaggtgtgctgcccgttca

SEQ ID NO: 272309 - DNA, 75 bp, synthetic construct
  source 1..75: mol_type = other DNA
attgttgcgccagtggtggaaggcggtattgcagggattggcgttgtaggctggattttgatcggtgtttcggtt

SEQ ID NO: 272310 - DNA, 75 bp, synthetic construct
  source 1..75: mol_type = other DNA
accataacgaacaacacctacaccagcattgaaaacaaggtgggccagggtagaccagtgccaatactattaggt

SEQ ID NO: 272311 - DNA, 75 bp, synthetic construct
  source 1..75: mol_type = other DNA
atgcgtacccacattccccggcacaacatcaatacctttcttgccattgcggaaatctctgaccacttacaggca

SEQ ID NO: 272312 - DNA, 75 bp, synthetic construct
  source 1..75: mol_type = other DNA
cttcgcagatgatttcctggtacgattcatcagatcgcaacaatatctggaatatttcagcgtcggcaacggacg

SEQ ID NO: 272313 - DNA, 75 bp, synthetic construct
  source 1..75: mol_type = other DNA
atgaaagcgtcactacgcgccagttatcagcataataccgagaacggtcgtctctatctctccgggacatcacag

SEQ ID NO: 272314 - DNA, 75 bp, synthetic construct
  source 1..75: mol_type = other DNA
ttgttacggacaacgcggagagatcagaaagcgttatcgtgaagggcaggaagatcaactgggggctctgggcct

SEQ ID NO: 272315 - DNA, 75 bp, synthetic construct
  source 1..75: mol_type = other DNA
ctgccgctttgccgatatcgtgctgcctgcgaccacgcagtttgagcgtaacgatctcgaccagtacggcaacca

SEQ ID NO: 272316 - DNA, 75 bp, synthetic construct
  source 1..75: mol_type = other DNA
gttttcctgcttgagcaaagccgacaagcgcttacggcaagtgaacgacgctttcgcgacgtcattgaagccacc

SEQ ID NO: 272317 - DNA, 75 bp, synthetic construct
  source 1..75: mol_type = other DNA
aagcgtcgatccgtttggtttctccagccagtttgtcggcctggataacttcgtcacgctgtttcatgacagcta

SEQ ID NO: 272318 - DNA, 75 bp, synthetic construct
  source 1..75: mol_type = other DNA
ctatctcgactccttctggacgacgataaaattcagcacctttgtcaccgtcagcggtttgctggtatcgctgtt

SEQ ID NO: 272319 - DNA, 75 bp, synthetic construct
  source 1..75: mol_type = other DNA
atgtcatcatcccgtccggtgttccgctcgcgctggctgccttatctgctggtcgcgccgcagctcatcatcacc

SEQ ID NO: 272320 - DNA, 75 bp, synthetic construct
  source 1..75: mol_type = other DNA
atttataagatctaccgtgaaggctttaccggactggatttggcttcgtctgccgcgcagtcggtggtgttgatg

SEQ ID NO: 272321 - DNA, 75 bp, synthetic construct
  source 1..75: mol_type = other DNA
attcgccgcttctttaagattgcgctgccgcttatcgctccggtgagtttcttcctgctggtggtgaacctggtg

SEQ ID NO: 272322 - DNA, 75 bp, synthetic construct
  source 1..75: mol_type = other DNA
ttctggtggtgtttgcctcggtgtggaagcaaatcagctacaacttcctgttcttctatgccgcgctgcaatcca

SEQ ID NO: 272323 - DNA, 75 bp, synthetic construct
  source 1..75: mol_type = other DNA
aggcgcgcaacgactttgatattttccgcgagctgtgccgtcgctttaatcgcgaagaagcctttaccgaagggc

SEQ ID NO: 272324 - DNA, 75 bp, synthetic construct
  source 1..75: mol_type = other DNA
ggcggcgcaaaacgcatgttgggcggtaaaactggcgcacgatggcgcgttatccctcaatcaatgtgatgagag

SEQ ID NO: 272325 - DNA, 75 bp, synthetic construct
  source 1..75: mol_type = other DNA
gcgctgtgcaaatacggtaaccccaacgtgttgaccatcgacatcggtacttcgcagctggcgcaggcgaccagt

SEQ ID NO: 272326 - DNA, 75 bp, synthetic construct
  source 1..75: mol_type = other DNA
tacgcgtctttaacgttcgtggtcaggtgttggctggagcagtggtttctgaccgttatgcacccggcgtggcgc

SEQ ID NO: 272327 - DNA, 75 bp, synthetic construct
  source 1..75: mol_type = other DNA
gttcgtatggacaatgagaagagcttcgttgttgctgatattccggggctgattgaaggtgctgctgaaggtgca

SEQ ID NO: 272328 - DNA, 75 bp, synthetic construct
  source 1..75: mol_type = other DNA
tggctgatgtcgggatgctggggatgccaaacgctggtaaatcgacctttatccgcgcagtatctgcggctaaac

SEQ ID NO: 272329 - DNA, 75 bp, synthetic construct
  source 1..75: mol_type = other DNA
gtggatatcgacagattaatttatctatcgctggagaaaatcagaaaagatttcgtgtttatcaatctcaatacg

SEQ ID NO: 272330 - DNA, 75 bp, synthetic construct
  source 1..75: mol_type = other DNA
cgcctgttcacgacaacagcgactacaaaggctacagcagcaccattccgattgcccgttttgtcgatgcgatcc

SEQ ID NO: 272331 - DNA, 75 bp, synthetic construct
  source 1..75: mol_type = other DNA
gatattttccgcgagctgtgccgtcgctttaatcgcgaagaagcctttaccgaagggctggacgaaatgggctgg

SEQ ID NO: 272332 - DNA, 75 bp, synthetic construct
  source 1..75: mol_type = other DNA
gtattcgtaacggtgatgtggtacgcgtctttaacgctcgcggtcaggtgttggcaggggcagtagtttctgacc

SEQ ID NO: 272333 - DNA, 75 bp, synthetic construct
  source 1..75: mol_type = other DNA
gatgccgaaaccattcgtggactggcgcggcagatggcggcgaacagaacgcagattattgctggctggtgcgta

SEQ ID NO: 272334 - DNA, 75 bp, synthetic construct
  source 1..75: mol_type = other DNA
actaaacaggtggtgccgccacagtttgaggcgcgcaacgactttgatattttccgcgagttgtgccgccgcttt

SEQ ID NO: 272335 - DNA, 75 bp, synthetic construct
  source 1..75: mol_type = other DNA
gtacaacggaacagtggagcaggtgagggcgtttaacggccccgtggagatggtggcgcagtgcgaatatgttcc

SEQ ID NO: 272336 - DNA, 75 bp, synthetic construct
  source 1..75: mol_type = other DNA
gcttttggtggctcagtcactgtgttctgcgatgacgtatatcagtacataattaaggacaaaggcgggcggtat

SEQ ID NO: 272337 - DNA, 75 bp, synthetic construct
  source 1..75: mol_type = other DNA
tagttctggatactattgataaaaatatagatttagagtatttgctttcagcatttaaatatgaggcacatagct

SEQ ID NO: 272338 - DNA, 75 bp, synthetic construct
  source 1..75: mol_type = other DNA
gcatgggctcagaaatggctgcgtggctatcagatggccgactccacccgggatatgcgtcgctcagtctatgcc

SEQ ID NO: 272339 - DNA, 75 bp, synthetic construct
  source 1..75: mol_type = other DNA
ctgaaacacgtatttttggcaatgcatttaaatatgatattgaactgtctaatacgccaccagatgaagaagtaa

SEQ ID NO: 272340 - DNA, 75 bp, synthetic construct
  source 1..75: mol_type = other DNA
taacgtcgctccttgggtatctggaaaccctgtcaatgaaagcggatacgctctcaccggaagactgccgtcact

SEQ ID NO: 272341 - DNA, 75 bp, synthetic construct
  source 1..75: mol_type = other DNA
tttgttagcctttagcccggagaagccaggggctatagaagcgcaatgtaattactactatgcaaagtggaacac

SEQ ID NO: 272342 - DNA, 75 bp, synthetic construct
  source 1..75: mol_type = other DNA
gcaagagccagcctaatgcttgtgacaaattatttagcgtctggcgcgcgtcaggcaaacaagatccgctggcgt

SEQ ID NO: 272343 - DNA, 75 bp, synthetic construct
  source 1..75: mol_type = other DNA
cgcaatctacttcgcttattgaacgccgtgtgcgaatggcgcttggcaccggcgatcgtcgcggcctgaatacct

SEQ ID NO: 272344 - DNA, 75 bp, synthetic construct
  source 1..75: mol_type = other DNA
taacgatggtacgtaaaagtgagcttactaacgcaacctggaaggagatcaattttagtgaggcattatggacga

SEQ ID NO: 272345 - DNA, 75 bp, synthetic construct
  source 1..75: mol_type = other DNA
cgagtaccgcgatcagcgccgggcaatgcttcaggattgggcggacatgatcgatgagtggacaatcaggaagcc

SEQ ID NO: 272346 - DNA, 75 bp, synthetic construct
  source 1..75: mol_type = other DNA
gccgcgagatcgagcgctgacgcccgatgaaatcagcttgatgtaccagtacatggagcgcattggcaccacacc

SEQ ID NO: 272347 - DNA, 75 bp, synthetic construct
  source 1..75: mol_type = other DNA
tgacaaaggaatggataacggctggagggctttatgcatctttccgctatgaaggagattgggagcactacgcta

SEQ ID NO: 272348 - DNA, 75 bp, synthetic construct
  source 1..75: mol_type = other DNA
tcgaatttccgtcgcaaatcaacgaacactgggcaacgcatccgcaggtattcgctcgctacgcccggcattatc

SEQ ID NO: 272349 - DNA, 75 bp, synthetic construct
  source 1..75: mol_type = other DNA
tacgcaactggaacaggtgctcgatgccatgaaagaacgcggctttaagaagcagaataaacacccacgccgacg

SEQ ID NO: 272350 - DNA, 75 bp, synthetic construct
  source 1..75: mol_type = other DNA
ccgtcatcgtgaaacagatatcaccgcaaaggttcgcagcatctggcggcagatgcatcttgatgggtttatccg

SEQ ID NO: 272351 - DNA, 75 bp, synthetic construct
  source 1..75: mol_type = other DNA
tagtaagcgaggtggtattttccagaccatcctcggcgtggcacttgtcgcttctgcaatctggatgccaggtgt

SEQ ID NO: 272352 - DNA, 75 bp, synthetic construct
  source 1..75: mol_type = other DNA
agttttccgctgaactggcggaactggctaatgatatctatctgaacggtgaattattcgcgcgggtagatgctg

SEQ ID NO: 272353 - DNA, 75 bp, synthetic construct
  source 1..75: mol_type = other DNA
aagcagcactcaactttatgcgggaaattgttccagcggcgcgtcaacgtgcgagcgatgaattagcctccatac

SEQ ID NO: 272354 - DNA, 75 bp, synthetic construct
  source 1..75: mol_type = other DNA
ctgagacacgtatttggggtaattcatttaaatatgacattgaaatctctaacaaaccaccagatgaagaagtaa

SEQ ID NO: 272355 - DNA, 75 bp, synthetic construct
  source 1..75: mol_type = other DNA
attacaatgaagatttcggtaatgactccaacttattgatagtgttttatgttcagataatgcccgatgactttg

SEQ ID NO: 272356 - DNA, 75 bp, synthetic construct
  source 1..75: mol_type = other DNA
agcagaaaaaacatccccgccgtcgctttaaggggtatgtcacaccgcgcgagaagatttataaaatctggcagc

SEQ ID NO: 272357 - DNA, 75 bp, synthetic construct
  source 1..75: mol_type = other DNA
gacgtaatggtggtcagggtgtttccacgctggcctggtgtcatggggaatcgttgcaggttgtgctcgaaacgc

SEQ ID NO: 272358 - DNA, 75 bp, synthetic construct
  source 1..75: mol_type = other DNA
ctgaatttggtttctacagatgggcgtttcaacgcgcgtcttccggcaactgatggacaggtcaaattccctgcc

SEQ ID NO: 272359 - DNA, 75 bp, synthetic construct
  source 1..75: mol_type = other DNA
gcgttctcaacaatgcacagtctggtcatcggacagatcaagacggatgagaaatctaatgagattacagctccc

SEQ ID NO: 272360 - DNA, 75 bp, synthetic construct
  source 1..75: mol_type = other DNA
tggtttagtttccaggcgctggttaacgtaggcgcggcggcggggatgttaccgaccaaaggtctgacattgccg

SEQ ID NO: 272361 - DNA, 75 bp, synthetic construct
  source 1..75: mol_type = other DNA
gttcattctgtcgatcattacgctgcgtttgccgatggagttctggcagcgctacagcgcgactatgctgctggg

SEQ ID NO: 272362 - DNA, 75 bp, synthetic construct
  source 1..75: mol_type = other DNA
ccattcttcagatgataaagacgtcatcgcaattgatggaaaaatacaccggcattcttatgacaagagtcgccg

SEQ ID NO: 272363 - DNA, 75 bp, synthetic construct
  source 1..75: mol_type = other DNA
tgtccctgatgaacttattgatttcacgtttgaatggaaagggctgaagaaattatgcgaggcagtctcctttcg

SEQ ID NO: 272364 - DNA, 75 bp, synthetic construct
  source 1..75: mol_type = other DNA
tattttgacgaatgataaggtattcaaggcagggttaagacgtaagatgcgaaaagcagccatggacaggaacta

SEQ ID NO: 272365 - DNA, 75 bp, synthetic construct
  source 1..75: mol_type = other DNA
gggcatcgcgttggatcgatcttggcttgttgcgtatccagccagccgaactgaccaagctgtcgctgttttgct

SEQ ID NO: 272366 - DNA, 75 bp, synthetic construct
  source 1..75: mol_type = other DNA
gttcattctggcgatcattacgctgcgtctgccgatggagttctggcaacgctacagtgccacgatgctgctcgg

SEQ ID NO: 272367 - DNA, 75 bp, synthetic construct
  source 1..75: mol_type = other DNA
tattgccagagttgtatcctgtatcagtcctgcaaaatttcatgagtgctttattaactggatgcgtgattgtca

SEQ ID NO: 272368 - DNA, 75 bp, synthetic construct
  source 1..75: mol_type = other DNA
cctgctgcgtattcagcctgcggaactgactaagctgtcgctgttttgctatatcgccaactatctggtgcgcaa

SEQ ID NO: 272369 - DNA, 75 bp, synthetic construct
  source 1..75: mol_type = other DNA
cgcctgccgatggagttctggcagcgctacagcgccacaatgctgctcgggtcaatcatcttgctgatgatcgtg

SEQ ID NO: 272370 - DNA, 75 bp, synthetic construct
  source 1..75: mol_type = other DNA
atatcgccaactatctggtgcgtaaaggcgacgaagtacgtaataacctgcgcggctttctgaaaccgatgggcg

SEQ ID NO: 272371 - DNA, 75 bp, synthetic construct
  source 1..75: mol_type = other DNA
acggtcaaaaaagcggaaatcaaggtggagctgctgccgaaatacgctgcctgggcagagggtgtcctggctgcc

SEQ ID NO: 272372 - DNA, 75 bp, synthetic construct
  source 1..75: mol_type = other DNA
ttttcagggatacggcacatcgctattaatattttgacgaatgataaggtattcaaggcagggttaagacgtaag

SEQ ID NO: 272373 - DNA, 75 bp, synthetic construct
  source 1..75: mol_type = other DNA
cctttcgctcaataatagcagagcaaaagaaagagcccgaaatgatggtcagatattatatcagttctgctgatt

SEQ ID NO: 272374 - DNA, 75 bp, synthetic construct
  source 1..75: mol_type = other DNA
gcagctcgataaccactgtggcgtgaagaaagataaacagcaactggagcgccgtttgcgcgccgccagtagctg

SEQ ID NO: 272375 - DNA, 75 bp, synthetic construct
  source 1..75: mol_type = other DNA
gcagaggaaatggcagacgccgcgcagagcgcaatgcttgccgccatcggctttgatgccgatctgttgctgcag

SEQ ID NO: 272376 - DNA, 75 bp, synthetic construct
  source 1..75: mol_type = other DNA
tactggaaatgctcgacgattatcgctggcggctggttgaaccgtttgagttttggctgacggataaccccgcag

SEQ ID NO: 272377 - DNA, 75 bp, synthetic construct
  source 1..75: mol_type = other DNA
ggatacggcacattgctattaatattttgacgaatgataaggtattcaaggcagggttaagacgtaagatgacga

SEQ ID NO: 272378 - DNA, 75 bp, synthetic construct
  source 1..75: mol_type = other DNA
gctatcgcccgattgttgaagaagccgatgacaccgagcgcgatcagttgcaggcgatttttgacgccgtagacg

SEQ ID NO: 272379 - DNA, 75 bp, synthetic construct
  source 1..75: mol_type = other DNA
cgatggacaaacagcaggcatcggacgaaaaacatcgtcgcttccacgacaaagagtctgacttcctcgcgtttg

SEQ ID NO: 272380 - DNA, 75 bp, synthetic construct
  source 1..75: mol_type = other DNA
ccgccgtctcaagggcgttcagtctacggtcaaaaaagcggaaatcaaggtggagctgctgccgaagtacgccgc

SEQ ID NO: 272381 - DNA, 75 bp, synthetic construct
  source 1..75: mol_type = other DNA
cggctttcgaacagcgaacagaatagggtgttccagtcgcatagcggacggcgcattgtgctggcgaccaacgtc

SEQ ID NO: 272382 - DNA, 75 bp, synthetic construct
  source 1..75: mol_type = other DNA
atgacagaacaacaaaaattgacctttactgctttgcagcagcggctggattcgctgatgctgcgtgacagactg

SEQ ID NO: 272383 - DNA, 75 bp, synthetic construct
  source 1..75: mol_type = other DNA
ggcgctatgtcgggagctttttatccgccacgcgctggtggaaggcgactggcagacgcgtcacgtattcttccg

SEQ ID NO: 272384 - DNA, 75 bp, synthetic construct
  source 1..75: mol_type = other DNA
gctgagaaattcgccacagcgatccgaaatcactggcacgtggagaataagctgcactggcgtctggacgtggta

SEQ ID NO: 272385 - DNA, 75 bp, synthetic construct
  source 1..75: mol_type = other DNA
ggcggctaaataaagcctttgaggaaaaatttccgctgaaagaattaaataatccagagcatgacagttacgcaa

SEQ ID NO: 272386 - DNA, 75 bp, synthetic construct
  source 1..75: mol_type = other DNA
aagcctttgaggaaaaatttccgctgaaagaattaaataatccagagcatgacagttacgcaatcagtgaaaaga

SEQ ID NO: 272387 - DNA, 75 bp, synthetic construct
  source 1..75: mol_type = other DNA
gggcggctaaataaagccttcgaggaaaaatttctgctgaaagaattaaataatccagagcatgacagttacgca

SEQ ID NO: 272388 - DNA, 75 bp, synthetic construct
  source 1..75: mol_type = other DNA
tgacaagagtcgccgcaggggagcgattcatgtcattagtgcgttctcaacaatgcatagtctggtcctcggaca

SEQ ID NO: 272389 - DNA, 75 bp, synthetic construct
  source 1..75: mol_type = other DNA
tgataagagtcgtcgcaggggagcgattcatgtcattagtgtgtcctcaacaatgcacagtctggttctcggaca

SEQ ID NO: 272390 - DNA, 75 bp, synthetic construct
  source 1..75: mol_type = other DNA
aaataaagccttcgaggaaaaattcccactgaaagaattaaataatccagagcatgacagttacgcaattagtga

SEQ ID NO: 272391 - DNA, 75 bp, synthetic construct
  source 1..75: mol_type = other DNA
tttttgaagcaatatggtgatattgaaaacggtattccttttaacgataacattgcccgagttgtatcctgtatc

SEQ ID NO: 272392 - DNA, 75 bp, synthetic construct
  source 1..75: mol_type = other DNA
tcaaggcagggttaagacgtaagatgcgaaaagcagccatggacagaaactacctggcgtcagtccttacgggga

SEQ ID NO: 272393 - DNA, 75 bp, synthetic construct
  source 1..75: mol_type = other DNA
attgatggaaaaacgctccggcactcttatgacaagagtcgccgcaggggagcgatcagggaaagatcatcagaa

SEQ ID NO: 272394 - DNA, 75 bp, synthetic construct
  source 1..75: mol_type = other DNA
tacaaaaacagagcggtgattatttattcgctgtaaaaggaaatcagggacggcttaataaagcctttgaggaaa

SEQ ID NO: 272395 - DNA, 75 bp, synthetic construct
  source 1..75: mol_type = other DNA
atatttctattatccccgattacagacaaccctggaaagtggaacataaattatcggatattctactgttgacta

SEQ ID NO: 272396 - DNA, 75 bp, synthetic construct
  source 1..75: mol_type = other DNA
ggtattcaaggcagggttaagacgtaagatgcgaaaagcagctatggacagaaactatctggcgtcagtccttgc

SEQ ID NO: 272397 - DNA, 75 bp, synthetic construct
  source 1..75: mol_type = other DNA
caataatagcagaacaaaagaaagagccagaaatgacggtcagatattatatcagttctgctgatttaaccgcag

SEQ ID NO: 272398 - DNA, 75 bp, synthetic construct
  source 1..75: mol_type = other DNA
cggtcaataatagcagaacaaaagaaagagccagaaatgacggtcagatattatattagttctgctgatttaacc

SEQ ID NO: 272399 - DNA, 75 bp, synthetic construct
  source 1..75: mol_type = other DNA
gaggaaaaatttccgctgaaagaattaaataatccagagcatgacagttacgcaatgagtgaaaagagtcacggc

SEQ ID NO: 272400 - DNA, 75 bp, synthetic construct
  source 1..75: mol_type = other DNA
gaagaaatccgtattcatattgtttgcgatgtccctgatgaacttattgatttcacgtttgaatggaaaggactg

SEQ ID NO: 272401 - DNA, 75 bp, synthetic construct
  source 1..75: mol_type = other DNA
agagttgtatcctgtatcagtcctgaaaaatttcacgagtgctttattaactggatgcgtgactgccattcttca

SEQ ID NO: 272402 - DNA, 75 bp, synthetic construct
  source 1..75: mol_type = other DNA
cacaggcgtctggacgtggtaatgaatgaagacgactacaaaataagaagaggaaacgcagcagaattattttca

SEQ ID NO: 272403 - DNA, 75 bp, synthetic construct
  source 1..75: mol_type = other DNA
atcaagacggataagaaatccaatgagatcacagctatcccagaacttcttaacatgctggatattaaaggaaaa

SEQ ID NO: 272404 - DNA, 75 bp, synthetic construct
  source 1..75: mol_type = other DNA
ttcacgatactattgccagagttgtatcctgtatcagtcctgcaaaatttcacgagtgctttattaactggatgc

SEQ ID NO: 272405 - DNA, 75 bp, synthetic construct
  source 1..75: mol_type = other DNA
atttttctattattcccgattacagacaagcctggaaagtggaacataaattgtcagatattctactgttgacta

SEQ ID NO: 272406 - DNA, 75 bp, synthetic construct
  source 1..75: mol_type = other DNA
tacaaaaacagggaggtgattatttattcgcggtaaaaggaaaccaggggcggctaaataaagccttcgaggaaa

SEQ ID NO: 272407 - DNA, 75 bp, synthetic construct
  source 1..75: mol_type = other DNA
tccgctgaaagaattaaataatccagagcatgacagttacgcaattagtgaaaagagtcacggcagagaagaaat

SEQ ID NO: 272408 - DNA, 75 bp, synthetic construct
  source 1..75: mol_type = other DNA
tattttgacgaatgataaggtattcaaggcagggttaagacgtaagatgcgaaaagcagccatgggcagaaacta

SEQ ID NO: 272409 - DNA, 75 bp, synthetic construct
  source 1..75: mol_type = other DNA
agtatcccagcgatcaatatcttaatgagctggtcaccaacatggagtttgctgcaagggcaccagttgaagtcg

SEQ ID NO: 272410 - DNA, 75 bp, synthetic construct
  source 1..75: mol_type = other DNA
tgcgtgctaaggcagaaaaagcaacgtgtggtgtatggtcgctcgaatatggagagagccgatttgatggtgatg

SEQ ID NO: 272411 - DNA, 75 bp, synthetic construct
  source 1..75: mol_type = other DNA
atcccaacccttaaacgccctctaaaatacaaaaccatcactgacgtgagagtgatagagataacgcctctcccc

SEQ ID NO: 272412 - DNA, 75 bp, synthetic construct
  source 1..75: mol_type = other DNA
ttgactatttgtgccgttatttctggtgcagaaagttgggaagatatagaggatttcggggaaacacatctcgat

SEQ ID NO: 272413 - DNA, 75 bp, synthetic construct
  source 1..75: mol_type = other DNA
tactgttgactatttgtgccgttatttcgggtgcagaaggttgggaagatatagaggattttggggaaacacatc

SEQ ID NO: 272414 - DNA, 75 bp, synthetic construct
  source 1..75: mol_type = other DNA
gaaggttgggaagatatagaggattttggggaaacacatctcgattttttgaagcaatatggtgattttgaaaat

SEQ ID NO: 272415 - DNA, 75 bp, synthetic construct
  source 1..75: mol_type = other DNA
taatgctttcctgtttgaactgaaagcatctgtcagtgaagcgccttgtacgttcatgactacagatgctcctga

SEQ ID NO: 272416 - DNA, 75 bp, synthetic construct
  source 1..75: mol_type = other DNA
aatgcgactaaagcgcttcgcccggatcttgctaaacccgtctggcacaattcgcttcgcttgccgaaaaacgaa

SEQ ID NO: 272417 - DNA, 75 bp, synthetic construct
  source 1..75: mol_type = other DNA
agcacttctctcagaagcttgtggaggtactaaagaagtgtatgcaaccgaagcggtaaaagaagctcgcaacaa

SEQ ID NO: 272418 - DNA, 75 bp, synthetic construct
  source 1..75: mol_type = other DNA
aagaagcgtttgcaaccgaagcggtaaaagaagcctctaagcaaagctatatggtttcaatgttcagatggttag

SEQ ID NO: 272419 - DNA, 75 bp, synthetic construct
  source 1..75: mol_type = other DNA
gatatgttggaaaaaagaactggtaagccatgttctaaagtcataatccaggaagccattgaaaccttgcttgtc

SEQ ID NO: 272420 - DNA, 75 bp, synthetic construct
  source 1..75: mol_type = other DNA
tcagcaacttgaaagagattacaatctgacaagaaccaaaggaccgaaagcttctccagcagcgccctcacctac

SEQ ID NO: 272421 - DNA, 75 bp, synthetic construct
  source 1..75: mol_type = other DNA
cgctgaaagaattaaataatccagagcatgacagttacgcaatgagtgaaaagagtcacggcagagaagaaatcc

SEQ ID NO: 272422 - DNA, 75 bp, synthetic construct
  source 1..75: mol_type = other DNA
ggccttgccccgtttaccgtgctctcctgcgacaacattcccgataatggccatgtggtgaaaaacgcggtgctg

SEQ ID NO: 272423 - DNA, 75 bp, synthetic construct
  source 1..75: mol_type = other DNA
ttgcaatcacgtatcgttcattttggctttggagcctttcaccgcgcacatcaggcgttactgaccgatcgtgtg

SEQ ID NO: 272424 - DNA, 75 bp, synthetic construct
  source 1..75: mol_type = other DNA
acgaatcactggcggaaatcagccagcatctgggggtgaatgatccctgcgcgattagctgcgaaccgtttatcc

SEQ ID NO: 272425 - DNA, 75 bp, synthetic construct
  source 1..75: mol_type = other DNA
agggtgtgctatccggtgaattttcagaaactacgtttataagctgcccggaatgctttggtgatgatgattgcg

SEQ ID NO: 272426 - DNA, 75 bp, synthetic construct
  source 1..75: mol_type = other DNA
attaagccgggtaatggtattgagcaagcaactcactggatgccgctaccggaaccgccgctggaggtgaagtga

SEQ ID NO: 272427 - DNA, 75 bp, synthetic construct
  source 1..75: mol_type = other DNA
gataagttaattgcacgttttgctaacccggcgctgaaacataagacctggcaaatcgcgatggatggcagccag

SEQ ID NO: 272428 - DNA, 75 bp, synthetic construct
  source 1..75: mol_type = other DNA
tttcaccggagtatcgtgaacagatgcgccgatgagattcgcaaggttggcgtcaaagtcagcatcaaggggaat

SEQ ID NO: 272429 - DNA, 75 bp, synthetic construct
  source 1..75: mol_type = other DNA
tccaattgattacaaaaaatatagagctttcacgtatttatcaggaaatatcttggatgacgtaactcactggat

SEQ ID NO: 272430 - DNA, 75 bp, synthetic construct
  source 1..75: mol_type = other DNA
cagggtggcgactggggaatttgtgaaatcagcctgttcagcggtgagcaattgatgagccagcttcgcgcacaa

SEQ ID NO: 272431 - DNA, 75 bp, synthetic construct
  source 1..75: mol_type = other DNA
ggagcatggaaagacgctgttgactgggtgctcaaagaggcttgccaggctgtaaacattggcatcaaaggagag

SEQ ID NO: 272432 - DNA, 75 bp, synthetic construct
  source 1..75: mol_type = other DNA
gtagtacctgaaggactgattaaagcggtgcgtttttatgagcaggtaaaacgtgagaacccgccagtcgaaacc

SEQ ID NO: 272433 - DNA, 75 bp, synthetic construct
  source 1..75: mol_type = other DNA
catcgtcgtttccacgataaagagtccgacttcctggcgtttgtgaatttgtggaattatctctgtgagcagcaa

SEQ ID NO: 272434 - DNA, 75 bp, synthetic construct
  source 1..75: mol_type = other DNA
gcacaacgagaatgcattgtgacgccacgtttgacgggggcgaaaaatcatctctatgcctgtcatttcccactg

SEQ ID NO: 272435 - DNA, 75 bp, synthetic construct
  source 1..75: mol_type = other DNA
ggaaatccgtgtcggcccgcctgatgcttatctgcctgaacccgaagcccccggcgcgcggaaaaagaaaaaagc

SEQ ID NO: 272436 - DNA, 75 bp, synthetic construct
  source 1..75: mol_type = other DNA
gaaagatgcgctgaaaggcaaagtgcaggaaacgctgtccgcggtggcggatgacggtatcgagcagagcgggct

SEQ ID NO: 272437 - DNA, 75 bp, synthetic construct
  source 1..75: mol_type = other DNA
tgaagaaggttaaaaatcctgatgtacaacaggccattttccaggagatggcgaaagagattgaccaggcggcag

SEQ ID NO: 272438 - DNA, 75 bp, synthetic construct
  source 1..75: mol_type = other DNA
atgctgcgtgacaggctgcgcttttcccgccgtctgcatggtgtgaaaaaggttaaaaatcctgatgcacaacag

SEQ ID NO: 272439 - DNA, 75 bp, synthetic construct
  source 1..75: mol_type = other DNA
ccgccgcctcaagggcgttcagtccacggtgaaaaaggcggaaatcaaggtggaactgctgccgaaatattccgc

SEQ ID NO: 272440 - DNA, 75 bp, synthetic construct
  source 1..75: mol_type = other DNA
ggccgcccgcgagggcggcagtgttcgccacgcatcgggctatgatctgatgctgctgcaactggcggaagaccg

SEQ ID NO: 272441 - DNA, 75 bp, synthetic construct
  source 1..75: mol_type = other DNA
atgagtctgagtcccgcacggcagcatcgcctgcgcgttcaggctgaacaggccgctcgcgagggtggcagtgtt

SEQ ID NO: 272442 - DNA, 75 bp, synthetic construct
  source 1..75: mol_type = other DNA
tgggttttgataaagatattaaatcaaaaattaatccatcgtactacggtcgctatgtggatgatattcttttag

SEQ ID NO: 272443 - DNA, 75 bp, synthetic construct
  source 1..75: mol_type = other DNA
atgagcctgagtcccgcacggcagcatcgcctgcgcgttcaggctgaacaggccgcccgcgagggtggcagtgtt

SEQ ID NO: 272444 - DNA, 75 bp, synthetic construct
  source 1..75: mol_type = other DNA
tcgccgcctcaggggcatccagtccacggtgaaaaaggcggcgattaaggtggagctgctgccgaaatatgccgc

SEQ ID NO: 272445 - DNA, 75 bp, synthetic construct
  source 1..75: mol_type = other DNA
aacgcaatattcaggatggcgtgcgtctgctcgaagaattaggcgcgatcaccactgatgaacaggccagcgcct

SEQ ID NO: 272446 - DNA, 75 bp, synthetic construct
  source 1..75: mol_type = other DNA
atgagtggattttcatttcaataccagggtattgcctttaaagcatctcagttgggtaaaaaatatggctggtct

SEQ ID NO: 272447 - DNA, 75 bp, synthetic construct
  source 1..75: mol_type = other DNA
aatgggattcagtgatacccatctccgttgctatgtcttacatgacgacgacggtcagcacatacacattatcgc

SEQ ID NO: 272448 - DNA, 75 bp, synthetic construct
  source 1..75: mol_type = other DNA
gaatagccgcgatccacaggcactgaaagcactggcggggcagtttgatctcattatcaacaccgtcaacgtcag

SEQ ID NO: 272449 - DNA, 75 bp, synthetic construct
  source 1..75: mol_type = other DNA
ttctttaaacacaaaaacaaaccagcactgatcttttctgcttcaccactttctatagacctaccatctgttccc

SEQ ID NO: 272450 - DNA, 75 bp, synthetic construct
  source 1..75: mol_type = other DNA
tatacgagcgaccaagaaggctatccctgctcctgctcctgctcctgctcctgctcctgctcctgctcctgctcc

SEQ ID NO: 272451 - DNA, 75 bp, synthetic construct
  source 1..75: mol_type = other DNA
ggaagtatcatggacagcgaatgtcgcttctaccgggaaaatgaacgggttctctttttcctaccgcgatatagc

SEQ ID NO: 272452 - DNA, 75 bp, synthetic construct
  source 1..75: mol_type = other DNA
tcgacgactgtatctcctgcggtgtggataaattgatcgatgccaacggtggccctgtctggacggaagaaggct

SEQ ID NO: 272453 - DNA, 75 bp, synthetic construct
  source 1..75: mol_type = other DNA
ggaagcgcaaaaacatggctgcgtgcgtgaggcgatgattatcacgtccgcgctctccattcaggatccgcgcga

SEQ ID NO: 272454 - DNA, 75 bp, synthetic construct
  source 1..75: mol_type = other DNA
cgattgagccgatttcacaggcttcagccaatcagcgtaaaggccgctgtggtcgtgtgtccgaagggatctgta

SEQ ID NO: 272455 - DNA, 75 bp, synthetic construct
  source 1..75: mol_type = other DNA
tggcgatgggtgccgataaagtggtgaatagccgcgatccgcaggcactgaaaacacttgcggggcagttcgatc

SEQ ID NO: 272456 - DNA, 75 bp, synthetic construct
  source 1..75: mol_type = other DNA
gagaagttgcgtgcggactggcaatgggtgattccactgccagaaaatatcgacattgaatctgccggaccgctg

SEQ ID NO: 272457 - DNA, 75 bp, synthetic construct
  source 1..75: mol_type = other DNA
gcgctgacctatggcggtaatttccatacggtcggtgcggtcctcacgccgctgtctgttccggcctttacgtta

SEQ ID NO: 272458 - DNA, 75 bp, synthetic construct
  source 1..75: mol_type = other DNA
atgagaaccgttaaggtatttgaggaggcctggcccttacataccccgtttgtgattgctcggggaagtcgcagt

SEQ ID NO: 272459 - DNA, 75 bp, synthetic construct
  source 1..75: mol_type = other DNA
tctgctcgaagagctgggcgcgatcaccactgatgaacaggccagcgcctataaactgacgccgctcggtcgcca

SEQ ID NO: 272460 - DNA, 75 bp, synthetic construct
  source 1..75: mol_type = other DNA
atgacagaacaacaaaaattgacctttacggccttgcagcagcggctggattcgctgatgctgcgcgacagacag

SEQ ID NO: 272461 - DNA, 75 bp, synthetic construct
  source 1..75: mol_type = other DNA
gggagcgattcatgtcattagtgcgttctcaacaatgcacagcctggtcatcggacagatcaagacggatgagaa

SEQ ID NO: 272462 - DNA, 75 bp, synthetic construct
  source 1..75: mol_type = other DNA
aaacgcacctacagcgaaccacactgggaacgggcgcagggcgcggtgatggcaacggaaaaagtcactgtttat

SEQ ID NO: 272463 - DNA, 75 bp, synthetic construct
  source 1..75: mol_type = other DNA
tagacgactgtatctcctgcggtgtggatcaactgatcgacgccaatggtggcccggtctggacggaagaaggct

SEQ ID NO: 272464 - DNA, 75 bp, synthetic construct
  source 1..75: mol_type = other DNA
ggtatatcgcggttttgtcactggtaacggcttcaaacggttgggcgacacgctgcgttatttgcaggcgattga

SEQ ID NO: 272465 - DNA, 75 bp, synthetic construct
  source 1..75: mol_type = other DNA
agcaatatggtgattttgaaaatggtattcctgttcacgataccattgccagagttgtatcctgtatcaatcctg

SEQ ID NO: 272466 - DNA, 75 bp, synthetic construct
  source 1..75: mol_type = other DNA
atgatcagcgccaaaaacctggtttatagccttcatgggcgacgtctgactgacaatgtctcgctgacttttccc

SEQ ID NO: 272467 - DNA, 75 bp, synthetic construct
  source 1..75: mol_type = other DNA
ttggcagcaaagaaaagctcgtcgaattcctgccggaagaggcattcgatattgttgaaggttgtgatgtgatgg

SEQ ID NO: 272468 - DNA, 75 bp, synthetic construct
  source 1..75: mol_type = other DNA
ggggcggctaaataaagcctttgaggaaaaatttccgctgaaagaattaaataatccagagcatgacagttacgc

SEQ ID NO: 272469 - DNA, 75 bp, synthetic construct
  source 1..75: mol_type = other DNA
ggggaaacacatctcgattttttgaagcaatatggtgattttgaaaatggtattcctgttcacgatatcattgcc

SEQ ID NO: 272470 - DNA, 75 bp, synthetic construct
  source 1..75: mol_type = other DNA
agtcctgcaaaatttcacgaatgctttattaaccggatgcgtgaatgtcattcttcagatgataaagacgtcatt

SEQ ID NO: 272471 - DNA, 75 bp, synthetic construct
  source 1..75: mol_type = other DNA
cgttgccgaaaccggtacgccgtaattttgtgcccgcgccaaactacgccgaagcgtttttaggccgcgtcacac

SEQ ID NO: 272472 - DNA, 75 bp, synthetic construct
  source 1..75: mol_type = other DNA
aatttccgctgaaagaattaaataatccagagcatgacagttacgaaataagtgaaaagagtcacggcagagaag

SEQ ID NO: 272473 - DNA, 75 bp, synthetic construct
  source 1..75: mol_type = other DNA
catgttgatttacgctttgctgcatcttacaggctacgacctgtcgatggatgatattcgcgactttcgtcagct

SEQ ID NO: 272474 - DNA, 75 bp, synthetic construct
  source 1..75: mol_type = other DNA
ggagccagttgctcagcatttgattaaacgcacctacagcgaaccgcactgggaacgggcgcagggcgcggtgat

SEQ ID NO: 272475 - DNA, 75 bp, synthetic construct
  source 1..75: mol_type = other DNA
tcgacaagggacagcccgaatggcggtgcgtatgcagcaagaagcagaacgcagtcgcttacgcggaagcgtagt

SEQ ID NO: 272476 - DNA, 75 bp, synthetic construct
  source 1..75: mol_type = other DNA
aagttgggaagatatagaggatttcggggaaacacatctcgatttcttgaagcaatatggtgattttgaaaatgg

SEQ ID NO: 272477 - DNA, 75 bp, synthetic construct
  source 1..75: mol_type = other DNA
gcatcccgccatgccggaaacttttctctatattcccgcaatgccaccatcgacagctccgcatcaatgcgcgtt

SEQ ID NO: 272478 - DNA, 75 bp, synthetic construct
  source 1..75: mol_type = other DNA
ggattaaatacgttatcgaccccggtacggcgcgtatcagccgctacagctatcgcaccaaagtgcagcgtttgc

SEQ ID NO: 272479 - DNA, 75 bp, synthetic construct
  source 1..75: mol_type = other DNA
ccgacttcctggcgtttgtaaatctgtggaattatctcggcgagcagcaaaaggcgctctcttcaaacgccttcc

SEQ ID NO: 272480 - DNA, 75 bp, synthetic construct
  source 1..75: mol_type = other DNA
agctggaacacaaatcacgtcgccgcgatattctggttgatgacgaaacgttgtttgagttctacgaccagcgca

SEQ ID NO: 272481 - DNA, 75 bp, synthetic construct
  source 1..75: mol_type = other DNA
aactgagccaggaaagccctggcgacattctgatctttatgagcggcgagcgagaaattcgcgataccgccgatg

SEQ ID NO: 272482 - DNA, 75 bp, synthetic construct
  source 1..75: mol_type = other DNA
ggctgggaagatatagaggattttggggaaacacatctcgattttttgaagcaatatggtgattttgaaaatggt

SEQ ID NO: 272483 - DNA, 75 bp, synthetic construct
  source 1..75: mol_type = other DNA
caccgggccgtgatgcgtcaaaatagccacatggcgtttccattcagcgtacaagaagttatccagatggggcgg

SEQ ID NO: 272484 - DNA, 75 bp, synthetic construct
  source 1..75: mol_type = other DNA
taattggaaacacaatactcttggcagatagtagcctaaagaccgatatatcaaattttaagaaaagctatagct

SEQ ID NO: 272485 - DNA, 75 bp, synthetic construct
  source 1..75: mol_type = other DNA
ggatggcgcactggcagcgttgctgcatgacattaccgccaacagctaccaccgtagcaacgtaccaaactccag

SEQ ID NO: 272486 - DNA, 75 bp, synthetic construct
  source 1..75: mol_type = other DNA
cagcaattcctcaaagaccacgtttctatccttgcgatgaacgaagatgaagccgaagcgttgaccggagaaagc

SEQ ID NO: 272487 - DNA, 75 bp, synthetic construct
  source 1..75: mol_type = other DNA
gccgagactctataattactttgaatcaattcagacggccattatttctatgtatactgcaattgagtcttttgc

SEQ ID NO: 272488 - DNA, 75 bp, synthetic construct
  source 1..75: mol_type = other DNA
atttagccgcccgcgtgattcaccggggtgaggaagaggtgcatctcacaccaattgagttccgcctgctggcgg

SEQ ID NO: 272489 - DNA, 75 bp, synthetic construct
  source 1..75: mol_type = other DNA
cgcccgagtgcgcaaacttacggacagatgttgccaacgctggacaggacggcgatgacgccggagaaataccat

SEQ ID NO: 272490 - DNA, 75 bp, synthetic construct
  source 1..75: mol_type = other DNA
agttgatggcgatgatccggcagtattcagaccaatacaaaagttaattaacggaacatggtataacgtatcgca

SEQ ID NO: 272491 - DNA, 75 bp, synthetic construct
  source 1..75: mol_type = other DNA
aatagcggtgtttatgatgcagatatcagtggtgcatcgacattaatcctccacttcaatatgaatgcggggagt

SEQ ID NO: 272492 - DNA, 75 bp, synthetic construct
  source 1..75: mol_type = other DNA
aatcgaaaaagccgttgccggtgcgccgggtaaatcaggttacaacgttccggcaatcctcgaagccttaggcgg

SEQ ID NO: 272493 - DNA, 75 bp, synthetic construct
  source 1..75: mol_type = other DNA
aactactcggtgctcgcggacgaccgttcggtgctgctgggcgtcatgtgcagcaatattgaaattggcagttat

SEQ ID NO: 272494 - DNA, 75 bp, synthetic construct
  source 1..75: mol_type = other DNA
agaaacttgtcgctggcatggacgtcaacattgatgatgagattggcgacgacgaataatggattttccacaaag

SEQ ID NO: 272495 - DNA, 75 bp, synthetic construct
  source 1..75: mol_type = other DNA
tataatgcgactattagtggagcgtcaacattgattcttcactttaatatgaatgcggggagttgcccggcggtt

SEQ ID NO: 272496 - DNA, 75 bp, synthetic construct
  source 1..75: mol_type = other DNA
caaaaacgcagacgcacaggaagcccgcgccctgtttgatgatgcggattactgcgcccgcaaactgcttgaagg

SEQ ID NO: 272497 - DNA, 75 bp, synthetic construct
  source 1..75: mol_type = other DNA
ctgcgcggatcgacccggaatgggtggagccagttgctcagcatttgattaaacgcacctacagcgaaccgcact

SEQ ID NO: 272498 - DNA, 75 bp, synthetic construct
  source 1..75: mol_type = other DNA
ctgggtgacatcgcggcattcccgtttgttgaagccccggataaacgcaacattcaggatggcgtgcggttgctg

SEQ ID NO: 272499 - DNA, 75 bp, synthetic construct
  source 1..75: mol_type = other DNA
tcggcaacactgtatatgacgaatgagcagtatattatggctggtattagatataatcgtggtgttgaacgagat

SEQ ID NO: 272500 - DNA, 75 bp, synthetic construct
  source 1..75: mol_type = other DNA
tgttgctggttctgggcgcgctgttactggcgattatctggacgcgtctggaagagtatcgttggcctatctgca

SEQ ID NO: 272501 - DNA, 75 bp, synthetic construct
  source 1..75: mol_type = other DNA
gcactgttgcaaagttagcgatgaggcagccttttgtcttattcaaaggccttacatttcaaaaactctgcttac

SEQ ID NO: 272502 - DNA, 75 bp, synthetic construct
  source 1..75: mol_type = other DNA
gtagaagagctggaacacaaaactcgtcgccgcgatattctggtggatgacgaaacgttgtttgagttctacgac

SEQ ID NO: 272503 - DNA, 75 bp, synthetic construct
  source 1..75: mol_type = other DNA
tgccactgtctgccgccggatggcgttattcgctggctgaatgttcaactgacggcggcagcggcaatcttcgcg

SEQ ID NO: 272504 - DNA, 75 bp, synthetic construct
  source 1..75: mol_type = other DNA
accttccggctgtctgaaaacgccgtcacagttgatgcactaccggaaaccgctgtcctgcaggaacgactgacc

SEQ ID NO: 272505 - DNA, 75 bp, synthetic construct
  source 1..75: mol_type = other DNA
accggcatgtccgcgactttgcccgggcacagaaagctgaccttttcctggcctgtcagtatctcagtaatgacg

SEQ ID NO: 272506 - DNA, 75 bp, synthetic construct
  source 1..75: mol_type = other DNA
gactaccgccccgtactgtggggcctgacgtcgctaggagacggtgaaacgcgtttcatcgcctcatcacaggtt

SEQ ID NO: 272507 - DNA, 75 bp, synthetic construct
  source 1..75: mol_type = other DNA
cgattgagccaatttcgcaggcttcagctaatcagcgtaaaggccgctgcggtcgtgtgtcagaagggatctgta

SEQ ID NO: 272508 - DNA, 75 bp, synthetic construct
  source 1..75: mol_type = other DNA
tgcatttttgcgttttctggatgcagatatccagaacaacccgcaaaaaactcgtccattcaacattcaacaagg

SEQ ID NO: 272509 - DNA, 75 bp, synthetic construct
  source 1..75: mol_type = other DNA
tcttatgacaagagtcgccgcaagggagcgattcatgtcattagtgcgttctcaacaatgcacagtctggtcatc

SEQ ID NO: 272510 - DNA, 75 bp, synthetic construct
  source 1..75: mol_type = other DNA
atggaaaaacgctccggcattcttatgacaagagtcgccgcaagggagcgattcatgtcattagtgcgttctcaa

SEQ ID NO: 272511 - DNA, 75 bp, synthetic construct
  source 1..75: mol_type = other DNA
aatcatcacaaccgatgcgatgggttgccagaaagatattgcagagaagatacaaaaacagggaggtgattattt

SEQ ID NO: 272512 - DNA, 75 bp, synthetic construct
  source 1..75: mol_type = other DNA
aggcagggttaagacgtaagatgcgaaaagcagccatggacagaaactatctcgcgtcagtccttgcggggagcg

SEQ ID NO: 272513 - DNA, 75 bp, synthetic construct
  source 1..75: mol_type = other DNA
atggctaaagttctggtgctttattattctatgtacggacatattgaaacgatggcgcgcgcagtcgctgaaggt

SEQ ID NO: 272514 - DNA, 75 bp, synthetic construct
  source 1..75: mol_type = other DNA
ttggcagcattacctgcagagaagatacaaaaacagggcggtgattatttattcgctgtaaaaggaaaccagggg

SEQ ID NO: 272515 - DNA, 75 bp, synthetic construct
  source 1..75: mol_type = other DNA
cacgcttaccgcagcgattgccagcggcatgggcgttgcagtattacccgaatcggccgcgcgttcgttatgtgg

SEQ ID NO: 272516 - DNA, 75 bp, synthetic construct
  source 1..75: mol_type = other DNA
tccccacttcactggcgtttctttttacgtcccggtatccaatttcatcatggccgtgagctggaaatggacgat

SEQ ID NO: 272517 - DNA, 75 bp, synthetic construct
  source 1..75: mol_type = other DNA
gctggggcaagttccggcgatgatcctgccacgagaatgggaaaccctcagtaactttgccagccatcccatcgg

SEQ ID NO: 272518 - DNA, 75 bp, synthetic construct
  source 1..75: mol_type = other DNA
taactgcagagaagttcgccacagcgatccgaaatcactggcacgtggaaaataagctgcactggcgcctggacg

SEQ ID NO: 272519 - DNA, 75 bp, synthetic construct
  source 1..75: mol_type = other DNA
gttgtatcctgtatcagtcctgcaaaatttcatgagtgctttattaactggatgcgtgactgccattcttcagat

SEQ ID NO: 272520 - DNA, 75 bp, synthetic construct
  source 1..75: mol_type = other DNA
ggtcagatattatatcagttctgctgatttaaccgcagagaagttcgccacagcaatccgaaaccactggcacgt

SEQ ID NO: 272521 - DNA, 75 bp, synthetic construct
  source 1..75: mol_type = other DNA
caatgcacagtctggtcatcggacagatcaggacggatgagaaatctaatgagattacagctatcccagaacttc

SEQ ID NO: 272522 - DNA, 75 bp, synthetic construct
  source 1..75: mol_type = other DNA
gatcaggacggatgagaaatccaatgagattacagctatccctgaacttcttaacatgctggatattaaaggaaa

SEQ ID NO: 272523 - DNA, 75 bp, synthetic construct
  source 1..75: mol_type = other DNA
tcacaaccgatgcgatgggttgccagaaagatattgcagagaagatacaaaaacagggatgtgattatttattcg

SEQ ID NO: 272524 - DNA, 75 bp, synthetic construct
  source 1..75: mol_type = other DNA
aaatcagcgatgggtacatcagcgccctgctacgtcggggcgaactggaaggaaaaccggggcagacattgttgc

SEQ ID NO: 272525 - DNA, 75 bp, synthetic construct
  source 1..75: mol_type = other DNA
ttgactatttgtgccgttatttcgggtgcggaaggttgggaagatatagaggattttggggaaacacatctcgat

SEQ ID NO: 272526 - DNA, 75 bp, synthetic construct
  source 1..75: mol_type = other DNA
gttattggtgactggcgaaggaaagcaggatgcgacagaatgttttctcacggctaaagtggtaatgactccaac

SEQ ID NO: 272527 - DNA, 75 bp, synthetic construct
  source 1..75: mol_type = other DNA
accgctatcccggcttcatttttatggctgcataaccatttcacatgcgtgattgatgaaatgtgtcgtcgttaa

SEQ ID NO: 272528 - DNA, 75 bp, synthetic construct
  source 1..75: mol_type = other DNA
cggctaaagtctccaccactatcccggcttcgtttttatggctgcataactatttcacatgcgtaattgatgaga

SEQ ID NO: 272529 - DNA, 75 bp, synthetic construct
  source 1..75: mol_type = other DNA
atgcgtactgacgccacgctccagatcgatagcgtctacgccgagaaacagcatatcgtgcagccgctggggtta

SEQ ID NO: 272530 - DNA, 75 bp, synthetic construct
  source 1..75: mol_type = other DNA
tcgtgggatcaccttaggcctgaaggatattctcaatgcccgcgaagttttgttactggtgactggcgaaggaaa

SEQ ID NO: 272531 - DNA, 75 bp, synthetic construct
  source 1..75: mol_type = other DNA
agagataaatgagacagagtgcgaacgggtaacgaacctgattgcgcgcaaaggcggtctggatttatgcgttct

SEQ ID NO: 272532 - DNA, 75 bp, synthetic construct
  source 1..75: mol_type = other DNA
ttgcctccagcgcaccggtacacattgaagctatattgcagggaatggtgaaacagttaggctgccgccattgtg

SEQ ID NO: 272533 - DNA, 75 bp, synthetic construct
  source 1..75: mol_type = other DNA
tcttccgctctgccggtgtctcactgcactggcacaatattaatgccgataccaatgaagcccagcgtctggatt

SEQ ID NO: 272534 - DNA, 75 bp, synthetic construct
  source 1..75: mol_type = other DNA
ggcgatgagttctccttgcaggatgaagtacctgttgaacatgacgctacagaagaaaaagtcgaaaaagagaac

SEQ ID NO: 272535 - DNA, 75 bp, synthetic construct
  source 1..75: mol_type = other DNA
gatgataaagacgtcatcgcaattgatggaaaaacactccggcattcttatgacaagagtcgccgcaggggagcg

SEQ ID NO: 272536 - DNA, 75 bp, synthetic construct
  source 1..75: mol_type = other DNA
cagagctatcggctaaaagacaacgtcgaggtcgatcttgttatacctgcgggagtggatgacccggatctgttg

SEQ ID NO: 272537 - DNA, 75 bp, synthetic construct
  source 1..75: mol_type = other DNA
gttttccagcaaagtctgggggaaggtggacacggttatgcattgtgtctgagctgtggccgtgcggagtcgatg

SEQ ID NO: 272538 - DNA, 75 bp, synthetic construct
  source 1..75: mol_type = other DNA
gaagaaacggcactgtggcgagtatctgctgcgcgatctggctgccagaaccttcctgccgggatacggtttccc

SEQ ID NO: 272539 - DNA, 75 bp, synthetic construct
  source 1..75: mol_type = other DNA
aacttcacacagctggatgatgagctgaaaaactggattggtagccgtttttcatcaaaattcgtccgtaacccg

SEQ ID NO: 272540 - DNA, 75 bp, synthetic construct
  source 1..75: mol_type = other DNA
aggttggttaccaggggctggagaaaatacataagagccccttgcactggcaggaaaaaggattaacgctggatg

SEQ ID NO: 272541 - DNA, 75 bp, synthetic construct
  source 1..75: mol_type = other DNA
taaacatactgacaaaacagcatcacagccagcatgaagtactgcgttggatcgacgtctgttcagggacccaac

SEQ ID NO: 272542 - DNA, 75 bp, synthetic construct
  source 1..75: mol_type = other DNA
gttggtcaaacatcccaatccaatgaagctggatgagatgacagagcggttaaacatactgacaaaacagcatca

SEQ ID NO: 272543 - DNA, 75 bp, synthetic construct
  source 1..75: mol_type = other DNA
tttgtcaccgatgcacacgctccggtaacgaacaatattgaaaccatgaaattcgtcccggttgtccccgcgtgg

SEQ ID NO: 272544 - DNA, 75 bp, synthetic construct
  source 1..75: mol_type = other DNA
aataatccagagcatgacagttacgcaatgagtgaaaagagtcacggcagagaagaaatccgtcttcacattgtt

SEQ ID NO: 272545 - DNA, 75 bp, synthetic construct
  source 1..75: mol_type = other DNA
gacattcctctataccgggctggcgcttcagcaacagcgagcagaggacctgctggagcaggatcgtatcgatca

SEQ ID NO: 272546 - DNA, 75 bp, synthetic construct
  source 1..75: mol_type = other DNA
aaaagggccgcagggcgaggaaaaagagattgaaagtcggctggaagaaggttgctactatttactgttcgacag

SEQ ID NO: 272547 - DNA, 75 bp, synthetic construct
  source 1..75: mol_type = other DNA
gatatctggcttaacagcgccaactttacgctaccgctggatttttcgctgttcgcgcacttgtgcgaggtgccg

SEQ ID NO: 272548 - DNA, 75 bp, synthetic construct
  source 1..75: mol_type = other DNA
atgaccccgcgggaggcctgatgctgaaaggaccgcaagacgaggaaaaagagattgaaagccgccttgaagaag

SEQ ID NO: 272549 - DNA, 75 bp, synthetic construct
  source 1..75: mol_type = other DNA
tggtcgcgaactggaaatggacgacgtgatcgcctctttaaaacggatcaatacgctgccgctctattcccacat

SEQ ID NO: 272550 - DNA, 75 bp, synthetic construct
  source 1..75: mol_type = other DNA
tgctaaaaggtccacagggcgaggaaaaagagattgaaagccgcctggaggaaggttgctactatttactgttcg

SEQ ID NO: 272551 - DNA, 75 bp, synthetic construct
  source 1..75: mol_type = other DNA
aaattatcggatattctactgttgactatttgcgccgttatttctggtgcagaaagttgggaagatatagaggat

SEQ ID NO: 272552 - DNA, 75 bp, synthetic construct
  source 1..75: mol_type = other DNA
caccacaggcacaggcagtgaaagagttgttaatgtcagtgatgagttctccagtgatggaaaaaaggcagtggc

SEQ ID NO: 272553 - DNA, 75 bp, synthetic construct
  source 1..75: mol_type = other DNA
atgatcagcgcccagaatctggtttatagccttcaggggcggcgtctgactgacaatgtctcgctgacttttccc

SEQ ID NO: 272554 - DNA, 75 bp, synthetic construct
  source 1..75: mol_type = other DNA
cttcagcaacagcgagcagaggacctgctggagcaggatcgtattgatcaactggtgcaactggttggcgacaaa

SEQ ID NO: 272555 - DNA, 75 bp, synthetic construct
  source 1..75: mol_type = other DNA
ctggaacatctcaccctgaccttttaccaggatcatattgaacatcgggtaattgccaggatcatgcagcaaatt

SEQ ID NO: 272556 - DNA, 75 bp, synthetic construct
  source 1..75: mol_type = other DNA
cgcagtatgcgcggcctgcgcatgaacaccctcggctggttcgattttaaatcagcgtggtttgcaccaccggat

SEQ ID NO: 272557 - DNA, 75 bp, synthetic construct
  source 1..75: mol_type = other DNA
aaacgaatggcatcttgaagcgattagccgtgatttgctcatcagcgcctgtcagcttcatgaaatcggtctgag

SEQ ID NO: 272558 - DNA, 75 bp, synthetic construct
  source 1..75: mol_type = other DNA
gtatgcaaaagggctgacctgcaaagccgataccctcagcagttgtgattacgtttatctggctgtttacccgac

SEQ ID NO: 272559 - DNA, 75 bp, synthetic construct
  source 1..75: mol_type = other DNA
gcagaatctttgaagttggatgaagtattcccacgttttatcagccagatggaatcgatgttgaccactagtgaa

SEQ ID NO: 272560 - DNA, 75 bp, synthetic construct
  source 1..75: mol_type = other DNA
tgcttcccgacgacaatcacgaccgcccctggtgggggctgccctgcaccgtgacgccctgtttcggcgcccgtc

SEQ ID NO: 272561 - DNA, 75 bp, synthetic construct
  source 1..75: mol_type = other DNA
cgtgccggtatcagaggccggttcagagatgcggatgcgtaccctctggaccaggcctttccgctgctgatgaaa

SEQ ID NO: 272562 - DNA, 75 bp, synthetic construct
  source 1..75: mol_type = other DNA
agaggccggttcagcgacgcggattcgtaccacctggaccaggcctttccgctgctgatgaaacaactggaactc

SEQ ID NO: 272563 - DNA, 75 bp, synthetic construct
  source 1..75: mol_type = other DNA
atgttcaccagcagtgaactgaatccccaccgtcagaataccgtcacgctgtatgctaaagggctgacctgccat

SEQ ID NO: 272564 - DNA, 75 bp, synthetic construct
  source 1..75: mol_type = other DNA
ttgcattaccttgcagaccgcgccggtatcagaggccggttcagcaatgcggatgcataccatctggaccaggct

SEQ ID NO: 272565 - DNA, 75 bp, synthetic construct
  source 1..75: mol_type = other DNA
taaagacaacgagaagctactgacgggcggtatctggtgcatgattaccgtcaactatttctttgaagaagggca

SEQ ID NO: 272566 - DNA, 75 bp, synthetic construct
  source 1..75: mol_type = other DNA
tttcaggcgtatccacaggggaaattgcctccgagggttacgatctggatgccctgctgaaccagcattttgctg

SEQ ID NO: 272567 - DNA, 75 bp, synthetic construct
  source 1..75: mol_type = other DNA
cagcgacgcggatgcgtaccatctggaccaggcctttccgctgctgatgaaacaactggagctcatgctcaccag

SEQ ID NO: 272568 - DNA, 75 bp, synthetic construct
  source 1..75: mol_type = other DNA
gcggacactctcggcagttgtggttacgtttatatggctgtttatccgacaccggcaactcccgcaacaacagca

SEQ ID NO: 272569 - DNA, 75 bp, synthetic construct
  source 1..75: mol_type = other DNA
ctcatcccgacaacaataacaaccgcccctggtggggactcccttgcaccgtgacaccctatttcggggcccgtc

SEQ ID NO: 272570 - DNA, 75 bp, synthetic construct
  source 1..75: mol_type = other DNA
ctcgccacattcgctacgtgctgttggtggtcattctgctgggatcggccttaaccggcacgctcatctgggaat

SEQ ID NO: 272571 - DNA, 75 bp, synthetic construct
  source 1..75: mol_type = other DNA
actcatgctcaccagcggtgaactgaatccccgccatcagcataccgtcaccctgtatgcgaaaggactgacctg

SEQ ID NO: 272572 - DNA, 75 bp, synthetic construct
  source 1..75: mol_type = other DNA
actcatgctcaccagcggtgaactgaatccccgccatcagcataccgtcacactgtatgcgaacggactgacctg

SEQ ID NO: 272573 - DNA, 75 bp, synthetic construct
  source 1..75: mol_type = other DNA
actcatgctcaccagcggtgaactgaatccccgccatcagcataccgttacgctgtatgcgaatggactgacctg

SEQ ID NO: 272574 - DNA, 75 bp, synthetic construct
  source 1..75: mol_type = other DNA
aaagggctgacctgcgaagccgacaccctcggctcctgtggttacgtttatctggctgtttatccgacaccggca

SEQ ID NO: 272575 - DNA, 75 bp, synthetic construct
  source 1..75: mol_type = other DNA
ccggcgcgcccagacgaatgttattggctatcgtgtcggcaaaaaggaagttgtcctgaaacacaaacgagagtt

SEQ ID NO: 272576 - DNA, 75 bp, synthetic construct
  source 1..75: mol_type = other DNA
gcagaatgtcttaggctggatgtggcattcccacattttatcagccagatggagtcgatgttgactactggtgaa

SEQ ID NO: 272577 - DNA, 75 bp, synthetic construct
  source 1..75: mol_type = other DNA
gaccgcgccggtatcagagggcagttcagcgacgcggatgcgtaccatctggaccaggcctttccgctgctgatg

SEQ ID NO: 272578 - DNA, 75 bp, synthetic construct
  source 1..75: mol_type = other DNA
cccctggtgggggctgccctgcaccgtgacgtcctgtttcggggcccgactggtacaggagggtaaccgcctgca

SEQ ID NO: 272579 - DNA, 75 bp, synthetic construct
  source 1..75: mol_type = other DNA
cccgacatcagcataccgtcacgctgtatgcgaaagggctgacctgcgaagccgacaccctcggctcctgtggtt

SEQ ID NO: 272580 - DNA, 75 bp, synthetic construct
  source 1..75: mol_type = other DNA
actcatgctcaccagcggtgaactgaatccccgccatcagcataccgttactctgtatgcgaagggactgacctg

SEQ ID NO: 272581 - DNA, 75 bp, synthetic construct
  source 1..75: mol_type = other DNA
actcatgctcaccagcggtgaactgaatccccgccatcagcataccgtaaccctgtatgcgaacggactgacctg

SEQ ID NO: 272582 - DNA, 75 bp, synthetic construct
  source 1..75: mol_type = other DNA
agaggcctgttcagcgatgcagatgcgtaccacctggaccaggcctttccgttgctgatgaaacaactggagctc

SEQ ID NO: 272583 - DNA, 75 bp, synthetic construct
  source 1..75: mol_type = other DNA
ttagtgctcgatgaacctgacgactttgatattgccgatcttcatgcagtatgtcgtctgatgaattgggccgga

SEQ ID NO: 272584 - DNA, 75 bp, synthetic construct
  source 1..75: mol_type = other DNA
gcatcgcttccggcaattgcccgacataaaggctttagccaacgggccacagacgcgaaatatcgttggcaggat

SEQ ID NO: 272585 - DNA, 75 bp, synthetic construct
  source 1..75: mol_type = other DNA
caacgggtagatgagcatctggtcggcgtcgcgcatcatgcgtatctacttgggcggcaactgatgcacacacgt

SEQ ID NO: 272586 - DNA, 75 bp, synthetic construct
  source 1..75: mol_type = other DNA
catcgaatgccggaagctggatgaaacattcccgcactttatcctccagatggaatcgatgctgaccaccggtga

SEQ ID NO: 272587 - DNA, 75 bp, synthetic construct
  source 1..75: mol_type = other DNA
actttcccgcactttatcagccagatggaattaatgctgactaccggtgaactgaatccccgccatacccactgc

SEQ ID NO: 272588 - DNA, 75 bp, synthetic construct
  source 1..75: mol_type = other DNA
agcgggatatcacgccgcgtctgggagtccgtctggtgcaggagggcaaccggctgcattatctggctgaccggg

SEQ ID NO: 272589 - DNA, 75 bp, synthetic construct
  source 1..75: mol_type = other DNA
atgctgggaacgcgggtattactttcctcggcgacgctaccgccagggctgattcaggcgttgttcgcggcttat

SEQ ID NO: 272590 - DNA, 75 bp, synthetic construct
  source 1..75: mol_type = other DNA
gtttccggcaggcactccgcttcaaagcgcgagctggcgagaaaaagcgcgtcagattgcccgtcgggcgcgtaa

SEQ ID NO: 272591 - DNA, 75 bp, synthetic construct
  source 1..75: mol_type = other DNA
cgaaggcagcctgcataccggggcgctggaaaaatggttgaaggatgacagcaaacttaaggagttagtaagcgc

SEQ ID NO: 272592 - DNA, 75 bp, synthetic construct
  source 1..75: mol_type = other DNA
acttcgctgcaaccgctagccaaaacggtaggttggctgatcctttcccatcatcgaattccggagaatctttcg

SEQ ID NO: 272593 - DNA, 75 bp, synthetic construct
  source 1..75: mol_type = other DNA
gcacaaaaaatgctcgagtggagagctgccgtattattgatcaatttgccgaacgcactggtgacgccgcatggc

SEQ ID NO: 272594 - DNA, 75 bp, synthetic construct
  source 1..75: mol_type = other DNA
agttcgctgcaaccattagccaaaacggtaggctggctgatcctttcccatcatcgaatgccggagaatctttct

SEQ ID NO: 272595 - DNA, 75 bp, synthetic construct
  source 1..75: mol_type = other DNA
gcatggcgacggcgagcacgcactggcgttcgcccgccgactacgctctacatttgccgaaaaggagattgttgt

SEQ ID NO: 272596 - DNA, 75 bp, synthetic construct
  source 1..75: mol_type = other DNA
gggccaggatgtggggctggcacgctgcagcagcgaggaaaaggcgctggccaaagcgaaaaaagacaagctgac

SEQ ID NO: 272597 - DNA, 75 bp, synthetic construct
  source 1..75: mol_type = other DNA
gccgtttattcaggccgcaaaggatacagaatcccgcgccgacagcattgtcggcgataccggacagtcctgtac

SEQ ID NO: 272598 - DNA, 75 bp, synthetic construct
  source 1..75: mol_type = other DNA
atgaagaatcaaaaaattccggataacgatgcgctcaccaataaaaccaaagagcgtataaaagaaattatgagt

SEQ ID NO: 272599 - DNA, 75 bp, synthetic construct
  source 1..75: mol_type = other DNA
ctggagttcttcgatgtgaactttagctacatcgataacgaaacgctggaagagttttttgtgagcgtaccggaa

SEQ ID NO: 272600 - DNA, 75 bp, synthetic construct
  source 1..75: mol_type = other DNA
gccgataccctgggctcctgtggttacgtttatctggctgtttatcctgcgaccgaaacggaaaatgtagtggtc

SEQ ID NO: 272601 - DNA, 75 bp, synthetic construct
  source 1..75: mol_type = other DNA
gcagacgctacaggatattcagcagcatatcgagactttaggtgtgtcacttagcatggccgttgaccagttcgt

SEQ ID NO: 272602 - DNA, 75 bp, synthetic construct
  source 1..75: mol_type = other DNA
attatttaccaagtttcaggtaagcttttatgcagacccggtggatgctgtttataaagctttaggcgtcaacta

SEQ ID NO: 272603 - DNA, 75 bp, synthetic construct
  source 1..75: mol_type = other DNA
cgaccgcgccggtatcagagggcagttcagcgatgcggatgcataccatctggaccaggcttttccactgctgat

SEQ ID NO: 272604 - DNA, 75 bp, synthetic construct
  source 1..75: mol_type = other DNA
atcaccccgacggcaataacagcagcccctggtgggggctgccctgtaccgtgacaccctgttttggcgcccgtc

SEQ ID NO: 272605 - DNA, 75 bp, synthetic construct
  source 1..75: mol_type = other DNA
aaagacggcgtccaaataatgaaagattatatggcgtcagggtcttttgcccgtggtcgtgattcaattgaagcg

SEQ ID NO: 272606 - DNA, 75 bp, synthetic construct
  source 1..75: mol_type = other DNA
tactaaatggcatctgattgcacgcatgatcccgtttgtggagaacaactataacgtctgcgaactcggaccgcg

SEQ ID NO: 272607 - DNA, 75 bp, synthetic construct
  source 1..75: mol_type = other DNA
cctattcagatgccgagcatggatatggaagaagtctttgaggcgcgcaaacaatttgatcgggaccagtggatt

SEQ ID NO: 272608 - DNA, 75 bp, synthetic construct
  source 1..75: mol_type = other DNA
aacgttcagtaattttgaaagcttatggggctgtgggtgacagactggtacgtgaaaaggaacgaaaagagacca

SEQ ID NO: 272609 - DNA, 75 bp, synthetic construct
  source 1..75: mol_type = other DNA
agctgctgccggaaaaacgccgtaaagatgctgtcctggtagttgaatacgttatgactgcaagccctgagtggt

SEQ ID NO: 272610 - DNA, 75 bp, synthetic construct
  source 1..75: mol_type = other DNA
aagatcaggcagccgtagccaaacgtttaagccaggcagtgaacgatggctttgcaggaaccgtcgctatggcct

SEQ ID NO: 272611 - DNA, 75 bp, synthetic construct
  source 1..75: mol_type = other DNA
atgtggcttccattaacagatgaacagcgtctggtcattttgaaagcttatgggattgaatgcgacagactggta

SEQ ID NO: 272612 - DNA, 75 bp, synthetic construct
  source 1..75: mol_type = other DNA
agcgcggcatcgagggaagccgtgccacgcatcagacagttcagcactactacgaatcgataaaccgtggcaccc

SEQ ID NO: 272613 - DNA, 75 bp, synthetic construct
  source 1..75: mol_type = other DNA
tgaggcgatgggaaagctgcgggagctgttgcctgaaaaacgccgtaaagatgcggtgttgtgcgtcgagtacgt

SEQ ID NO: 272614 - DNA, 75 bp, synthetic construct
  source 1..75: mol_type = other DNA
caggtaaaacgactatggccgcacctataagcaacgaagaacaggtatttattgccgaacttggcagacggataa

SEQ ID NO: 272615 - DNA, 75 bp, synthetic construct
  source 1..75: mol_type = other DNA
ttgaagagatcgacagcctgccgaaggcaaagcagaagatgatttcggagatgttaagtgcgctgattgtgcagg

SEQ ID NO: 272616 - DNA, 75 bp, synthetic construct
  source 1..75: mol_type = other DNA
gacacagacgcaggttgcacaggcgctgaacgtctcccagcaggctgtacaggcatgggaagccggacggcggcg

SEQ ID NO: 272617 - DNA, 75 bp, synthetic construct
  source 1..75: mol_type = other DNA
aaaaagctgacgggaatgggcagtgtggccagcgctttgcagcactgctacagggagcgtgagacgccgaatgct

SEQ ID NO: 272618 - DNA, 75 bp, synthetic construct
  source 1..75: mol_type = other DNA
gcgtttatccaagctatggcggtaacgttgatggcaccgtcgccaatgccgccacccggttggcatccggcgcta

SEQ ID NO: 272619 - DNA, 75 bp, synthetic construct
  source 1..75: mol_type = other DNA
attgccgaacttggcagacggataaccgcactgaggaaggacgccgggatgacgcagacgcaggtcgcacaggcg

SEQ ID NO: 272620 - DNA, 75 bp, synthetic construct
  source 1..75: mol_type = other DNA
gtttgagtggtacacgcagctcaatacggaaggtgtggaggatgttatcgcccggcgtctcgctgtactggcgga

SEQ ID NO: 272621 - DNA, 75 bp, synthetic construct
  source 1..75: mol_type = other DNA
gcgcttcattctgaaaagccgacaggtcggcatgacctattatttcgcctgggaggcattcgaagatgctgtcat

SEQ ID NO: 272622 - DNA, 75 bp, synthetic construct
  source 1..75: mol_type = other DNA
tggaagcctgcggcgttgaaatcgacacctggcaggatcacaaccctgatgcagcgcggccattcggtgacaggc

SEQ ID NO: 272623 - DNA, 75 bp, synthetic construct
  source 1..75: mol_type = other DNA
tcgtcaacattgcagaacagtattttggcatcacgctgaccggcaacccgatccgcctcagcaacggcgctgaac

SEQ ID NO: 272624 - DNA, 75 bp, synthetic construct
  source 1..75: mol_type = other DNA
ggcgattcctggcggggcaacaataaaaaacgacgggccgcagtgtttccgacgttcgacgaaatgcgcgatggc

SEQ ID NO: 272625 - DNA, 75 bp, synthetic construct
  source 1..75: mol_type = other DNA
gtccacgaacgccagcaccgcgcagggctttaacggccacctgtatggcgatgaggttttctggatcccgaaatt

SEQ ID NO: 272626 - DNA, 75 bp, synthetic construct
  source 1..75: mol_type = other DNA
gggaggcattcgaagatgctgtcattaccggtgataaccaggtctttttctctgcaagccgctcccagtctgaaa

SEQ ID NO: 272627 - DNA, 75 bp, synthetic construct
  source 1..75: mol_type = other DNA
gccattcattacagcgttgaatccaaaaaccgcctggtgatgaagatgctggatctgatttacgccaaccgtatt

SEQ ID NO: 272628 - DNA, 75 bp, synthetic construct
  source 1..75: mol_type = other DNA
agcgttcaatatgctgtttatgtgtgtgtttgtggatgacaaagagagcgtctttaaattcgatgacctcgtgcg

SEQ ID NO: 272629 - DNA, 75 bp, synthetic construct
  source 1..75: mol_type = other DNA
gaattgtttattactgggcgacaaagtttgagtggtacacacagcttaatactgaaggcgtggaggatgttatcg

SEQ ID NO: 272630 - DNA, 75 bp, synthetic construct
  source 1..75: mol_type = other DNA
gaacaaacatgctgaacggatggaagagatccgggcgatggtcaataccggcgtggtggtcaatgatggccgaca

SEQ ID NO: 272631 - DNA, 75 bp, synthetic construct
  source 1..75: mol_type = other DNA
gggttcaggcggaaatcttccgcgaatatattattaatttcgccctgcagttcgggatcacgctcacgggtaagc

SEQ ID NO: 272632 - DNA, 75 bp, synthetic construct
  source 1..75: mol_type = other DNA
cacgatgaactcgatcgcctgattggccaccacgtcaaactgatgtcggtcaggaacaagcacacagaacgcatg

SEQ ID NO: 272633 - DNA, 75 bp, synthetic construct
  source 1..75: mol_type = other DNA
gcgaaactctcctctaaattacacagaacctcatcacattgtcccgatgtcaaagcaagactattttgagaattc

SEQ ID NO: 272634 - DNA, 75 bp, synthetic construct
  source 1..75: mol_type = other DNA
ctgaacgactatggcattaagcgattccatcatcttcgccactttgctgtatctcgcctggcaaacaaaggcgtc

SEQ ID NO: 272635 - DNA, 75 bp, synthetic construct
  source 1..75: mol_type = other DNA
atgaaacaactgaaattaatgctcaccagtggtgaactgaatccccgccatcagcataccgtgacactgtatgcg

SEQ ID NO: 272636 - DNA, 75 bp, synthetic construct
  source 1..75: mol_type = other DNA
acaacgttgccagcgccgactacatcagggcaatggctggagaagttgaggcccgccaggagccatcgttactaa

SEQ ID NO: 272637 - DNA, 75 bp, synthetic construct
  source 1..75: mol_type = other DNA
gtccactgattaacataattctgggcacccagatactggaacaaaaaaaagtgccgaaaggggtattaacaggca

SEQ ID NO: 272638 - DNA, 75 bp, synthetic construct
  source 1..75: mol_type = other DNA
aaattcaccttggtcagggatatgaagatatgctggagaaaatatataatgagagaaaagaattattaaaaaaag

SEQ ID NO: 272639 - DNA, 75 bp, synthetic construct
  source 1..75: mol_type = other DNA
cgcttcccgacgacaacaacgaccgcccctggtgggggctaccctgcaccgtgacgccctgtttcggggcacgtc

SEQ ID NO: 272640 - DNA, 75 bp, synthetic construct
  source 1..75: mol_type = other DNA
cgaccatccctggtggggactaccctgcacagtgacgccctgtttcggcgcccgtctggtgcaggagggtaaccg

SEQ ID NO: 272641 - DNA, 75 bp, synthetic construct
  source 1..75: mol_type = other DNA
cctctggtggggactgccctgcaccgtgacgccctgtttcggggcacgtctggtgcagaagggtaaccggttgca

SEQ ID NO: 272642 - DNA, 75 bp, synthetic construct
  source 1..75: mol_type = other DNA
cgcttcccgacgacaacaaagaccgcccctggtggggactgccctgcaccgtgacgccctgtttcggcgcgcgtc

SEQ ID NO: 272643 - DNA, 75 bp, synthetic construct
  source 1..75: mol_type = other DNA
aaagggctgacctgcgatgccgacaccctcggctcctgtggttacgtttatctggctgtttatcctgcgaccgaa

SEQ ID NO: 272644 - DNA, 75 bp, synthetic construct
  source 1..75: mol_type = other DNA
ccagcggtgaactgaatccccggcatcagcataccgtcacgctgtatgcgaaagggctgacctgcgatgccgaca

SEQ ID NO: 272645 - DNA, 75 bp, synthetic construct
  source 1..75: mol_type = other DNA
atgagccatttgtaaatatgataaaagcattttatcggatggagctcgctaaagttcctcaaggtaaattaacag

SEQ ID NO: 272646 - DNA, 75 bp, synthetic construct
  source 1..75: mol_type = other DNA
cgccgcgctcctggcttcggtgttgacggtgaatcattgctcgttgataaagatggcaatgtgattatgcgctgg

SEQ ID NO: 272647 - DNA, 75 bp, synthetic construct
  source 1..75: mol_type = other DNA
atggtgagtcattgctcgtcgataaggatggcaatgtgattatgcgctggattaaaacagcccgtgatcgcgatg

SEQ ID NO: 272648 - DNA, 75 bp, synthetic construct
  source 1..75: mol_type = other DNA
atttaaccgggttttcgtgccaatgcgcgatgcattactggcgctgcgtggtgaattacgaaacacaatgcggat

SEQ ID NO: 272649 - DNA, 75 bp, synthetic construct
  source 1..75: mol_type = other DNA
tataagcaacgaagaacaggtatttattgccgaacttggcagacggatcaccgcgctgaggaaggatgccgggat

SEQ ID NO: 272650 - DNA, 75 bp, synthetic construct
  source 1..75: mol_type = other DNA
ggcgggcggtcgggaagatgttactaaatcataaggacgtcgagatccaggtgcttagcggaaatcatgatcaat

SEQ ID NO: 272651 - DNA, 75 bp, synthetic construct
  source 1..75: mol_type = other DNA
catatcggtgcacttgcgcacaaggcggaatgcggcgagagctacgacaccgggatcgctgaacgcgtactaaat

SEQ ID NO: 272652 - DNA, 75 bp, synthetic construct
  source 1..75: mol_type = other DNA
gtccactgattaacataattctgggtacccagacactggaacaaaaaaaagtgccgaaaggggtattaacaggca

SEQ ID NO: 272653 - DNA, 75 bp, synthetic construct
  source 1..75: mol_type = other DNA
aatcattcatcaatattattaatgctactcaacgaatgggagaaactcgtgtgccgcaaggtatactcacaggta

SEQ ID NO: 272654 - DNA, 75 bp, synthetic construct
  source 1..75: mol_type = other DNA
acaacgtggtaagcgcagactacatcaggacaatgacagacaccgttactaaacaagacaacgaatattcaccat

SEQ ID NO: 272655 - DNA, 75 bp, synthetic construct
  source 1..75: mol_type = other DNA
atgagacgagtaatcttttattcagttgaaacgtttgttgatgatacgcgtgtttattatccgtgggaagtatgc

SEQ ID NO: 272656 - DNA, 75 bp, synthetic construct
  source 1..75: mol_type = other DNA
tggtaccacatgcgtggggagttgatattccagcaatgctgatggctgcatcaggaagaaaagttgctgctatgt

SEQ ID NO: 272657 - DNA, 75 bp, synthetic construct
  source 1..75: mol_type = other DNA
tccaataaggaaccatcgttactaagtcctctgattaacataattcgcggtacccaatgtctagcagacaagcga

SEQ ID NO: 272658 - DNA, 75 bp, synthetic construct
  source 1..75: mol_type = other DNA
gatgcggatgcgtaccatccggaccaggcctttccgctgctgatgaaacaaccggaactcatgctcaccagcggt

SEQ ID NO: 272659 - DNA, 75 bp, synthetic construct
  source 1..75: mol_type = other DNA
gtattgatgccgcggccgctgcgggcgtgacctgcgtaatccagccgggtgggtccatccgtgatgaagaagtga

SEQ ID NO: 272660 - DNA, 75 bp, synthetic construct
  source 1..75: mol_type = other DNA
cagtattaatgttatccctgccagcgatttcagcagaacattcagaaatgaaaatgactgatatgtctacctcgg

SEQ ID NO: 272661 - DNA, 75 bp, synthetic construct
  source 1..75: mol_type = other DNA
tttggcgaacccaatcgcaggtctttgtgaatggagatgccatcaatgccgatccggatacctttcatcttgtgc

SEQ ID NO: 272662 - DNA, 75 bp, synthetic construct
  source 1..75: mol_type = other DNA
aaatggggggagcagtatcgccggagagaatggtcaggtttatctgagcggaatgcctctgtcaggacaggttag

SEQ ID NO: 272663 - DNA, 75 bp, synthetic construct
  source 1..75: mol_type = other DNA
ctacttcggcagcatggttccggcttaccacggtgaaagcaaagaagctgccggtcgcttcccgcgcacgttgaa

SEQ ID NO: 272664 - DNA, 75 bp, synthetic construct
  source 1..75: mol_type = other DNA
cttgatgcttacgatcgcgcgtataaaaccgaccccacctcggcgttcggcggcattatcgcctttaaccgcgag

SEQ ID NO: 272665 - DNA, 75 bp, synthetic construct
  source 1..75: mol_type = other DNA
gcttatgacgagcaaatggaggccgctaaaaaggcactagaaagaatgaaaaatcgtgagcaagaaaagcccggt

SEQ ID NO: 272666 - DNA, 75 bp, synthetic construct
  source 1..75: mol_type = other DNA
tttgtttattctgccgttgctcacctgggattgtcagaatcagaagcatggaatatgacaatgaccggatacagg

SEQ ID NO: 272667 - DNA, 75 bp, synthetic construct
  source 1..75: mol_type = other DNA
acgttcttgctcttccttctttctctcaatctataaattcaacactcaccatgcatgaagagctagcgtatcatg

SEQ ID NO: 272668 - DNA, 75 bp, synthetic construct
  source 1..75: mol_type = other DNA
gaacgcacggatgataatcacggcgaaaagcaggtcgatatggattcgctgcaacaggtggggggaaggatgaat

SEQ ID NO: 272669 - DNA, 75 bp, synthetic construct
  source 1..75: mol_type = other DNA
ctctggctatcggtcaaatggcggctggcgtttcgactggttaaccgatggccgccatattttatgggcagggaa

SEQ ID NO: 272670 - DNA, 75 bp, synthetic construct
  source 1..75: mol_type = other DNA
cacatcctgaaatgttgctcagacgacgaaacaggcccgttgttaggcgaatgctggttcactccttcgggtaaa

SEQ ID NO: 272671 - DNA, 75 bp, synthetic construct
  source 1..75: mol_type = other DNA
ggttacggcaatgccaatatcggttacagccatagcgatgatattaagcagctctattacggagtcagcggtggg

SEQ ID NO: 272672 - DNA, 75 bp, synthetic construct
  source 1..75: mol_type = other DNA
atgttacagcccgccgacgcagccactggtggtggacggtgccgggatgcctggcaatggtgttactgaacgcag

SEQ ID NO: 272673 - DNA, 75 bp, synthetic construct
  source 1..75: mol_type = other DNA
gttgatagttaaagagacgggattgagctttcgtcagtggcgtcatcagttgcagctcattctggcacttcagag

SEQ ID NO: 272674 - DNA, 75 bp, synthetic construct
  source 1..75: mol_type = other DNA
gtttaagaaaggcctggggcaaacgccaggccgatatattgcgggattaactactgtttccccacaatcagcgaa

SEQ ID NO: 272675 - DNA, 75 bp, synthetic construct
  source 1..75: mol_type = other DNA
ctggtggtggacggtgccaggatgtctggcaatggtgttactgaacgcagctgtcagttacggcattgtcagact

SEQ ID NO: 272676 - DNA, 75 bp, synthetic construct
  source 1..75: mol_type = other DNA
ttcgcatttggcgaagctttcaaagttctggcgatgttggtgttactggtggtggcgttggcggttttaaaggcg

SEQ ID NO: 272677 - DNA, 75 bp, synthetic construct
  source 1..75: mol_type = other DNA
atgaccacaacgcaaaaaacgactgatgttacagcccgtcgacgcagccactggtggtggacggtgccgggatgt

SEQ ID NO: 272678 - DNA, 75 bp, synthetic construct
  source 1..75: mol_type = other DNA
agccggcatgacggtcagtcatatcgttttctgtataacaagtcactgacggaaacagggacaaatatccagtta

SEQ ID NO: 272679 - DNA, 75 bp, synthetic construct
  source 1..75: mol_type = other DNA
ggcccggaaaaagcgttctgggcatcggacagcgaattgtcaccatcatggtcgaaatggtggagacccgtctac

SEQ ID NO: 272680 - DNA, 75 bp, synthetic construct
  source 1..75: mol_type = other DNA
ggtggtgcttgttaaagcgcctggcgcaaaagatgcaaaagtcgaaaaccagacaggagtgcgtaccgactggcg

SEQ ID NO: 272681 - DNA, 75 bp, synthetic construct
  source 1..75: mol_type = other DNA
tccgcacgatggtggagatgatggcgaaagggcccgtcgagtgggggtcattggggcaatgggctggcttttttg

SEQ ID NO: 272682 - DNA, 75 bp, synthetic construct
  source 1..75: mol_type = other DNA
tacggcaatgccagtgcaggatacagtcacagtgggggttaccggcaactgtattatgggctgagtggcggtatt

SEQ ID NO: 272683 - DNA, 75 bp, synthetic construct
  source 1..75: mol_type = other DNA
ccaggcgtgtaccgggtggatatttatctgaatgatacgtatatctcaacccgtgacgtgcagtttcagatgagt

SEQ ID NO: 272684 - DNA, 75 bp, synthetic construct
  source 1..75: mol_type = other DNA
gtgtctggccacaatatggtcgtgtggaaatccgggggattcggaaaacatggattggtaactctgaacctttca

SEQ ID NO: 272685 - DNA, 75 bp, synthetic construct
  source 1..75: mol_type = other DNA
aagcggtcaaaaaagaagttcaccaattcattgaaagcataaggccgcctgaacatatccgcaatgaactggata

SEQ ID NO: 272686 - DNA, 75 bp, synthetic construct
  source 1..75: mol_type = other DNA
ttaaccgtgcggcccccgttgcgctgttggctatcggaatgacgctggtgatcgcaacaggtgggattgatctct

SEQ ID NO: 272687 - DNA, 75 bp, synthetic construct
  source 1..75: mol_type = other DNA
actaacgaagaaaaaatgattgctttggatgccattcatttaggcaaagtgaacgcgcccgcagaatttgcataa

SEQ ID NO: 272688 - DNA, 75 bp, synthetic construct
  source 1..75: mol_type = other DNA
tcatgagcagctgctgtcctatgtcaaacccgcagcgcagaacgagctgaaaatccggcttgctgaggatgcgaa

SEQ ID NO: 272689 - DNA, 75 bp, synthetic construct
  source 1..75: mol_type = other DNA
tatcattgatttacatggtgatgtttatgcaactgattaatgttaaccgatattacccggaacaaaaaccctttg

SEQ ID NO: 272690 - DNA, 75 bp, synthetic construct
  source 1..75: mol_type = other DNA
agttattggtaatcaggttggtgtcaaagcgaaaggaattgtcgaaatgattgacggcatcctgaaagcacaagg

SEQ ID NO: 272691 - DNA, 75 bp, synthetic construct
  source 1..75: mol_type = other DNA
agcgaaccacaattgttgccgacagcggggatattgacagcattatggcttaccagcctgaagatgcgaccacca

SEQ ID NO: 272692 - DNA, 75 bp, synthetic construct
  source 1..75: mol_type = other DNA
attggtgcagttctgcctggtttccttgaagtaaaatttaatgggtggttaagagcatctggcgcagtggcgatc

SEQ ID NO: 272693 - DNA, 75 bp, synthetic construct
  source 1..75: mol_type = other DNA
gggagaaacttcccggagtatttaagaaaagtgggccgacgcatgaacgtgcaatcgaggcattggcaagtgtag

SEQ ID NO: 272694 - DNA, 75 bp, synthetic construct
  source 1..75: mol_type = other DNA
cttccgtttttcggctattttcagtgttggttcagtcagtcttgcaccgaaaagctcaaccagaaagtacctgaa

SEQ ID NO: 272695 - DNA, 75 bp, synthetic construct
  source 1..75: mol_type = other DNA
attttgaaattaacagaatggtaggagacataatttttaaaggcctttgggcatgtaaaccggaaacatcaggga

SEQ ID NO: 272696 - DNA, 75 bp, synthetic construct
  source 1..75: mol_type = other DNA
tatttgtgctccattattatctgaattcttcaaagaatcaaaattatgcaatgtgttgttattactttcagtaac

SEQ ID NO: 272697 - DNA, 75 bp, synthetic construct
  source 1..75: mol_type = other DNA
ttgtggtagcggttattaaatgtgtattgaaacattataattataatgacatcaccttacttatttcaggtgttt

SEQ ID NO: 272698 - DNA, 75 bp, synthetic construct
  source 1..75: mol_type = other DNA
gaattatcccatagagaaaaactcattgcggagtggatgattcacgagcatttgccgtcaaacatccaaggaagg

SEQ ID NO: 272699 - DNA, 75 bp, synthetic construct
  source 1..75: mol_type = other DNA
atgatctggataatgctcgccacgctggcagtggtgtttgtggttggttttcgggtgctgacatccggggccaga

SEQ ID NO: 272700 - DNA, 75 bp, synthetic construct
  source 1..75: mol_type = other DNA
gcgtaactattctgaatgtcaccaccgcccgctctccgtcagggcatccggtggagacggtgacggagggagcta

SEQ ID NO: 272701 - DNA, 75 bp, synthetic construct
  source 1..75: mol_type = other DNA
ggtgcagaaacagcgcaggctacggtgagagtctggatgcgtttccggcgtgatgtgacggccgcttcgcgtctg

SEQ ID NO: 272702 - DNA, 75 bp, synthetic construct
  source 1..75: mol_type = other DNA
gcgctgggcctatccaggcggcaggtgtatgtcctgatccggcgtgcccggcaaggtgctgggtttgtgacggac

SEQ ID NO: 272703 - DNA, 75 bp, synthetic construct
  source 1..75: mol_type = other DNA
gatttgatttttaaacttgatcctgaccttcttacagatccttataatcttggtttaacgcatgccgttgttttt

SEQ ID NO: 272704 - DNA, 75 bp, synthetic construct
  source 1..75: mol_type = other DNA
acgctcaggtcaggctggcgctgggttttctgcgcgaaacagaacctgaaatgcaggagattaacgctttccaga

SEQ ID NO: 272705 - DNA, 75 bp, synthetic construct
  source 1..75: mol_type = other DNA
ttggtccggcagccggatcgttttatgcgctggccttcgttacgctgtgcggatttaatcttgccaaagccaccg

SEQ ID NO: 272706 - DNA, 75 bp, synthetic construct
  source 1..75: mol_type = other DNA
tattttatgacgattacagttggactgctttgccaggagatgatcccacgaaaaccgctgctgaccgccatcggt

SEQ ID NO: 272707 - DNA, 75 bp, synthetic construct
  source 1..75: mol_type = other DNA
cagaacaattgccctactatgcagctcatgttatttaatttattttccccagcacttaagcttaatactggcctg

SEQ ID NO: 272708 - DNA, 75 bp, synthetic construct
  source 1..75: mol_type = other DNA
gtataagaacaaccaatgaccatcccttcctggcggttcggtggaaagcccaaaacacccggaaaaatggcacat

SEQ ID NO: 272709 - DNA, 75 bp, synthetic construct
  source 1..75: mol_type = other DNA
cataccacctggaccaggcctttccgctgctgatgaaacaactggaattaatgctcaccagcggtgaactgaatc

SEQ ID NO: 272710 - DNA, 75 bp, synthetic construct
  source 1..75: mol_type = other DNA
gtccgatgtcgggcagcaccagatgttcgccgcactttattatcctttcgacaaaccgcgtcgctggattaactc

SEQ ID NO: 272711 - DNA, 75 bp, synthetic construct
  source 1..75: mol_type = other DNA
agctttatcatgacagtggcttcagagtggaacctctttttgccagacgttctgtgtcttgtaagggggacactc

SEQ ID NO: 272712 - DNA, 75 bp, synthetic construct
  source 1..75: mol_type = other DNA
agaactttatcaggacagtggcttcagagtggaacctctttttgccagacgttctgtgtcttgtaagggagacac

SEQ ID NO: 272713 - DNA, 75 bp, synthetic construct
  source 1..75: mol_type = other DNA
gaagaacaggctatgtatcttgcgggcgcttatgttggcgatggatatattaggagatggaaaggtaaatctaag

SEQ ID NO: 272714 - DNA, 75 bp, synthetic construct
  source 1..75: mol_type = other DNA
tgggtaagggcggtgattatgagcctcgatgcactggtgatggatgcgaccaacaacctgattgacctggtatca

SEQ ID NO: 272715 - DNA, 75 bp, synthetic construct
  source 1..75: mol_type = other DNA
aagagcttcgcgagataaggagcaaacttgttgagatgcgttatggtgttgctgctcctcactttttggttgcac

SEQ ID NO: 272716 - DNA, 75 bp, synthetic construct
  source 1..75: mol_type = other DNA
gtagaagagcttcgcgagataaggggcaaacttattgagatgcgtcatggtgttgctgctcctcactttttggtt

SEQ ID NO: 272717 - DNA, 75 bp, synthetic construct
  source 1..75: mol_type = other DNA
ttacatattgatatcgatcctacctcgatctcaaaaaccgtgaccgccgacatcccgatcgttggcgatgcgcgg

SEQ ID NO: 272718 - DNA, 75 bp, synthetic construct
  source 1..75: mol_type = other DNA
gaatgcacggcacttacgaagccaatatgacaatgcataatgccgatgtcatttttgcggttggtgtacgctttg

SEQ ID NO: 272719 - DNA, 75 bp, synthetic construct
  source 1..75: mol_type = other DNA
catcgtcaggcactgggcatgctgggaatgcacggtacctacgaagccaatatgacgatgcataacgcggatgtg

SEQ ID NO: 272720 - DNA, 75 bp, synthetic construct
  source 1..75: mol_type = other DNA
agagcgaaaagttaaaccagcggcagaattcgaacggtccatattcaaatgggctggtggaaaatttggtgttct

SEQ ID NO: 272721 - DNA, 75 bp, synthetic construct
  source 1..75: mol_type = other DNA
agatgtcgcaatcgtggtgaaaagcagcgattacgacgccattattaatgagatggatgccaacgaaggttcgct

SEQ ID NO: 272722 - DNA, 75 bp, synthetic construct
  source 1..75: mol_type = other DNA
agaggcctgttcagcgatgcagatgcgtaccctctggaccaggcgtttcccctgctgatgaaacaactgcaactc

SEQ ID NO: 272723 - DNA, 75 bp, synthetic construct
  source 1..75: mol_type = other DNA
agaggcctgttcagcgatgcagatgcgtaccctctggaccaggcctttccactgctgatgaaacaactgaaactc

SEQ ID NO: 272724 - DNA, 75 bp, synthetic construct
  source 1..75: mol_type = other DNA
ggccggttcagcgatgcggatgcgtaccatctggaccaggcctttccgctgctgatgaaacaactggaactcatg

SEQ ID NO: 272725 - DNA, 75 bp, synthetic construct
  source 1..75: mol_type = other DNA
aaatccgccatcaggcacggacgcagaacctgtattttaaacagtacaaaaacggcagcgtcagcacccgctttg

SEQ ID NO: 272726 - DNA, 75 bp, synthetic construct
  source 1..75: mol_type = other DNA
agagggcggttcagagatgcggatgtgtaccatctggaccaggcctttccgctgctgatgaaacaactggaactc

SEQ ID NO: 272727 - DNA, 75 bp, synthetic construct
  source 1..75: mol_type = other DNA
ctgcgcgtcgtcaccaaacgtcagccgaccgaacaggaactgcgtgatgcgctgttctgctggaaagtggcgaag

SEQ ID NO: 272728 - DNA, 75 bp, synthetic construct
  source 1..75: mol_type = other DNA
cgatgcttgcagctgacggaccgcgttacaaagcgatcggcaatagtatggcaataccagtaatgcgctggattg

SEQ ID NO: 272729 - DNA, 75 bp, synthetic construct
  source 1..75: mol_type = other DNA
gaattcgaacggtccatattcaaatgggctggtggaaaatttggtgttctggaacaaatctttcgctatttgcca

SEQ ID NO: 272730 - DNA, 75 bp, synthetic construct
  source 1..75: mol_type = other DNA
agaggcctgttcagcgatgcagatgcgtaccctctggaccaggcttttcctctgctgatgaaacaactggaactc

SEQ ID NO: 272731 - DNA, 75 bp, synthetic construct
  source 1..75: mol_type = other DNA
agaggcctgttcagcgatgcagatgcgtaccctctggaccaggcatttcctctgctgatgaaacaactgtaactc

SEQ ID NO: 272732 - DNA, 75 bp, synthetic construct
  source 1..75: mol_type = other DNA
gaagccctgaaaatcaccgccgccaaacagaacgtacgcgtcctgacctgcggtcagtggggcgagcgtgttccg

SEQ ID NO: 272733 - DNA, 75 bp, synthetic construct
  source 1..75: mol_type = other DNA
caatcatgccatctggcacggctttgtgctcggcggcagcgtgtgccactttctggcgatctatttgtatattgg

SEQ ID NO: 272734 - DNA, 75 bp, synthetic construct
  source 1..75: mol_type = other DNA
ttcgacgctctatcacgccattcctcatcaacgggcaaaaatgtggctgaagaaatttgaccattgcgccattta

SEQ ID NO: 272735 - DNA, 75 bp, synthetic construct
  source 1..75: mol_type = other DNA
acgccgtggtgatggatgccgtcaatgagcttattgacgttgtctaccaggacgatgacgatctggtggtgattt

SEQ ID NO: 272736 - DNA, 75 bp, synthetic construct
  source 1..75: mol_type = other DNA
ctgatgatgagcgtaagaccgctgattttaccgcgctcgaatccaacaaatacgaatgcgcgcaaatcaacttcg

SEQ ID NO: 272737 - DNA, 75 bp, synthetic construct
  source 1..75: mol_type = other DNA
tgcagaagccggcgtgttcctgatctctccatttgttggacgtattcttgactggtacaaagcaaataccgataa

SEQ ID NO: 272738 - DNA, 75 bp, synthetic construct
  source 1..75: mol_type = other DNA
aaatcctgaaactggttccgggtcgtatctcaactgaagttgatgcgcgtctttcctatgacaccgaagcgtcaa

SEQ ID NO: 272739 - DNA, 75 bp, synthetic construct
  source 1..75: mol_type = other DNA
aagagtatgacctggagatgcaaacagatattccaccttttgcgttatttgaaaacttcagtaatcgctctgttc

SEQ ID NO: 272740 - DNA, 75 bp, synthetic construct
  source 1..75: mol_type = other DNA
accacgctcgcacagtcagttcaactgcagattgactggcaggaagtcaataacagcttcactgatgaaaacgga

SEQ ID NO: 272741 - DNA, 75 bp, synthetic construct
  source 1..75: mol_type = other DNA
ggcagaaaaagcagcacttgctgaagcggcacaaaaagccgcagaggaacggatcacaccaccgtggctgagtat

SEQ ID NO: 272742 - DNA, 75 bp, synthetic construct
  source 1..75: mol_type = other DNA
tcggtggcaatgtcatagaaagcttcgcagaagcactaagtgcagagttcaacgctacgaagctccttgatctta

SEQ ID NO: 272743 - DNA, 75 bp, synthetic construct
  source 1..75: mol_type = other DNA
tgtacttcttgggagcagcgatgcgaagagaaaaggtggtgatggtgactcattccttgcgcatgaaatagatct

SEQ ID NO: 272744 - DNA, 75 bp, synthetic construct
  source 1..75: mol_type = other DNA
gaaaccataaagcgaaacctccgcgaaaggatgaaaaatgctaaacaagtagtactgttgggaagtgctaatact

SEQ ID NO: 272745 - DNA, 75 bp, synthetic construct
  source 1..75: mol_type = other DNA
agaccagatccagcagtccgccgctttcctgactctgattaacgtcacgccagtgactgagcagtccggtcagct

SEQ ID NO: 272746 - DNA, 75 bp, synthetic construct
  source 1..75: mol_type = other DNA
gtgatctcctttcatgaaaatacgcaccagtcccttgatttaatcatggccggttttaacggcgtgaagcgtgcc

SEQ ID NO: 272747 - DNA, 75 bp, synthetic construct
  source 1..75: mol_type = other DNA
acgccgtggtgatggatgccgtcaatgagcttatcgacgttgtctatcaggacgatgacgatctggtggtgattt

SEQ ID NO: 272748 - DNA, 75 bp, synthetic construct
  source 1..75: mol_type = other DNA
agccgtctgtacagcagacgctggaagaccagatccagcagtccgccgctttcctgacgctgattaacgtcacgc

SEQ ID NO: 272749 - DNA, 75 bp, synthetic construct
  source 1..75: mol_type = other DNA
cttgcgatgatacaaacatagttgccatggcacatgggcaaggaggggctgagataaaaaccgataattcggcac

SEQ ID NO: 272750 - DNA, 75 bp, synthetic construct
  source 1..75: mol_type = other DNA
cgtttttagcagcacaggagcaggtttttggtcagaggggcatggtacattgcgggcgcgtgagcaagaaagcca

SEQ ID NO: 272751 - DNA, 75 bp, synthetic construct
  source 1..75: mol_type = other DNA
atcgtctgggaaaatgtcccaggagtcttgtcatcggcagataacgccttcggatgtttccttgccggattggct

SEQ ID NO: 272752 - DNA, 75 bp, synthetic construct
  source 1..75: mol_type = other DNA
gtggtcgaggactaccgctgcgcggcattggtggaaaacatcgaaatcggtgatttcagcgcgcctgccgcaccg

SEQ ID NO: 272753 - DNA, 75 bp, synthetic construct
  source 1..75: mol_type = other DNA
gaccaccaacctgattgatgagatttatcaggatgacccggagctcgtcgttatcacaggccgtaagcttatggc

SEQ ID NO: 272754 - DNA, 75 bp, synthetic construct
  source 1..75: mol_type = other DNA
aaacctctctatctatttcatggatgagagccaccgccgcagcattgatgaaaacccgaaaaaagaccgcgtgga

SEQ ID NO: 272755 - DNA, 75 bp, synthetic construct
  source 1..75: mol_type = other DNA
tttctgcagacgattaatattctgccggtcacagaaatgaagggggagaaaatcggcgtcggtgtgaccggtact

SEQ ID NO: 272756 - DNA, 75 bp, synthetic construct
  source 1..75: mol_type = other DNA
tcaatgcctacctgtcccgcgttgccgagctgaacggcatcgacacggacgacgtgagtaaaaaattcaacgtcg

SEQ ID NO: 272757 - DNA, 75 bp, synthetic construct
  source 1..75: mol_type = other DNA
gttgaggactaccgttgcgctgcactggtggaaaacatccagattggcgatttcagcgccgccgcagcagaagcc

SEQ ID NO: 272758 - DNA, 75 bp, synthetic construct
  source 1..75: mol_type = other DNA
tgcatcgttacatgaaacacaaccactaaggcaaatggaggaaaatcgtccccgtttgcaggggacgacggatgt

SEQ ID NO: 272759 - DNA, 75 bp, synthetic construct
  source 1..75: mol_type = other DNA
agcgtgattatggatggcgcggtcattggcgaagagagcattgttgccgccatgagctttgtcaaagcaggcttt

SEQ ID NO: 272760 - DNA, 75 bp, synthetic construct
  source 1..75: mol_type = other DNA
cctaaccggcgattacgtctggcggcagagccgcagactggaagacgggaagtttcggcccttacggatgcccgg

SEQ ID NO: 272761 - DNA, 75 bp, synthetic construct
  source 1..75: mol_type = other DNA
cagcggcctcaacctggtgacggcggccatcgtgctgtggaacacggtctacctggagcgtgcggcgcatgcgtt

SEQ ID NO: 272762 - DNA, 75 bp, synthetic construct
  source 1..75: mol_type = other DNA
attgtacaagcaggagccaatattcaggatggctgcatcatgcacggctactgcgacactgacaccattgtgggg

SEQ ID NO: 272763 - DNA, 75 bp, synthetic construct
  source 1..75: mol_type = other DNA
acgcagccactgaggcaaatggaggaaaatcgcccccgtttgcaggggacgacggatgtgatgccgaaacggtga

SEQ ID NO: 272764 - DNA, 75 bp, synthetic construct
  source 1..75: mol_type = other DNA
ctactttaccctgcgtcgtctggatttcggcggctgccgactttcactggcaacgccggttgatgaagcctggga

SEQ ID NO: 272765 - DNA, 75 bp, synthetic construct
  source 1..75: mol_type = other DNA
tccaagtacatcatgatgcatgcaccaaccgaacgtctggacgaagtgatcgccctgctgccaggtgctgagcgc

SEQ ID NO: 272766 - DNA, 75 bp, synthetic construct
  source 1..75: mol_type = other DNA
tcgaaatacatcatgatgcacgcaccgaccgaacgtctggatgatgtcatcgccctgctacctggcgcagaacgc

SEQ ID NO: 272767 - DNA, 75 bp, synthetic construct
  source 1..75: mol_type = other DNA
actccaggatcggccaggcgctgctggaagcgaaggaaagcggcagcgacccctatgccgccatcgaggcggtga

SEQ ID NO: 272768 - DNA, 75 bp, synthetic construct
  source 1..75: mol_type = other DNA
actgccgcgcatcaagatcaccgaactgctgatggacgtggacgactggacgggcttcagccgccacttcaccca

SEQ ID NO: 272769 - DNA, 75 bp, synthetic construct
  source 1..75: mol_type = other DNA
cgcgaaaaagtggctggtcaggtcgcttatcggctgtatcagcgtgaaacacaaggagaaagtgatgctgattaa

SEQ ID NO: 272770 - DNA, 75 bp, synthetic construct
  source 1..75: mol_type = other DNA
tcaagggctcgcggcagttccgcgacttcgacgactacctgctgccggccgagaagttcgccgcactcaagcgcg

SEQ ID NO: 272771 - DNA, 75 bp, synthetic construct
  source 1..75: mol_type = other DNA
aactggtaaagctgtcggttcagccaatatcaccttcacaactaatgacggtgccaagaaggcgaccaaagccgt

SEQ ID NO: 272772 - DNA, 75 bp, synthetic construct
  source 1..75: mol_type = other DNA
cggaaaggtaaaggttgaagaagtaatcaagccgtactccccttttatgccgttattattggtgtattactactg

SEQ ID NO: 272773 - DNA, 75 bp, synthetic construct
  source 1..75: mol_type = other DNA
cagccaaagaagatcaggctacggatcgggcgtatcgcattgggcaaactaaagatgtgtatgtctattacccaa

SEQ ID NO: 272774 - DNA, 75 bp, synthetic construct
  source 1..75: mol_type = other DNA
gtctcagaagtagttatggggcgtaacattaccattaccgcacctctggccgaatctgtgctccgaaacatggtt

SEQ ID NO: 272775 - DNA, 75 bp, synthetic construct
  source 1..75: mol_type = other DNA
acgtggtgtggcgcagggtactgcaaacatctccttcaccagcaatagcggcgctaagaagacaactaagtcagt

SEQ ID NO: 272776 - DNA, 75 bp, synthetic construct
  source 1..75: mol_type = other DNA
ggtttggaaaaagaactttatattttgactcataacctgaataatgggccaagattgatgggagctgagaatgat

SEQ ID NO: 272777 - DNA, 75 bp, synthetic construct
  source 1..75: mol_type = other DNA
gtgccattttaacccatgaaaatcagcaatacctgttatcgcgggaaaactgggcgctcttacaggcaacagaac

SEQ ID NO: 272778 - DNA, 75 bp, synthetic construct
  source 1..75: mol_type = other DNA
ggcagggttacgatctggagctttccagattcagccaggaagaactgcaaggttatcaggcgttgcttgaaaact

SEQ ID NO: 272779 - DNA, 75 bp, synthetic construct
  source 1..75: mol_type = other DNA
tgaatccctcagagctaagctggaggctgaccgtacccgtaaggtgcgtgaggataaacgcatttaccgttgccc

SEQ ID NO: 272780 - DNA, 75 bp, synthetic construct
  source 1..75: mol_type = other DNA
tacctttcgtctgttgcaaattggcaacaacagcaagcactgagcgaagggatgcagcaggccggaaccggtatg

SEQ ID NO: 272781 - DNA, 75 bp, synthetic construct
  source 1..75: mol_type = other DNA
ataaaacggcccgagccgtactcaaaattgagcagaatattgaagaaacggcctacatcaaacagcgccgcaatt

SEQ ID NO: 272782 - DNA, 75 bp, synthetic construct
  source 1..75: mol_type = other DNA
tgattatttagaaaaaacgcacgtcatcaaaccaacttcattgtcattacgtctgcgtaaagcaacggttgccga

SEQ ID NO: 272783 - DNA, 75 bp, synthetic construct
  source 1..75: mol_type = other DNA
cgccggatgttgaagcacccagcctgaaaccgctctggcctgcgcgtgggctgggccgcgccaggacgttatcac

SEQ ID NO: 272784 - DNA, 75 bp, synthetic construct
  source 1..75: mol_type = other DNA
cgtgcagcaggcgtatcagatactggagacgatgaacctcatcactccgttgccgcgttcgggttattttgtcgc

SEQ ID NO: 272785 - DNA, 75 bp, synthetic construct
  source 1..75: mol_type = other DNA
attaccaataacgtcctgcaatcaatgcaaatcgtcaatacagttttggaggctaaccagcatgcaaaacagcag

SEQ ID NO: 272786 - DNA, 75 bp, synthetic construct
  source 1..75: mol_type = other DNA
aaaagacgctaatggcggtagcgtgcttaagtattgtacaaactgtacaggcggcaatttctctagaccggactc

SEQ ID NO: 272787 - DNA, 75 bp, synthetic construct
  source 1..75: mol_type = other DNA
gaaaatgaaaccggcgctgaaaaaaacgctgatggcggtagcgtgtctgagcgcagtacccgcagcccaggctgc

SEQ ID NO: 272788 - DNA, 75 bp, synthetic construct
  source 1..75: mol_type = other DNA
gtgacgatgaagctcatcactccgcaaccacgttcgggctattttgttgcgcaacataaaacccagccaccagtg

SEQ ID NO: 272789 - DNA, 75 bp, synthetic construct
  source 1..75: mol_type = other DNA
cggttctttcatctggtctgccaaccactactacagcaaatatcagcacgaaaagaaacgtgctgatgaggctgt

SEQ ID NO: 272790 - DNA, 75 bp, synthetic construct
  source 1..75: mol_type = other DNA
gttcctgctcgtgcaactgagcggctgcgccggtacgcggacaatttacgtgccagttccggcggtaccactacc

SEQ ID NO: 272791 - DNA, 75 bp, synthetic construct
  source 1..75: mol_type = other DNA
cattactacagcaaatatcaacacgaaaaagagcgcgctgatgaggctgtacgaaatgctgaatcagcaacagcc

SEQ ID NO: 272792 - DNA, 75 bp, synthetic construct
  source 1..75: mol_type = other DNA
attaccaataacgtcctgcaatcactgcaaatcgtcaatacagtactggaggctaaccagcatgcaaaacagcag

SEQ ID NO: 272793 - DNA, 75 bp, synthetic construct
  source 1..75: mol_type = other DNA
tcacgcactgttgcacacgctttatcagcagaacctgaaaaaccacaccaccattttctccgagtggtatgcgct

SEQ ID NO: 272794 - DNA, 75 bp, synthetic construct
  source 1..75: mol_type = other DNA
atcaccgccaacgtcattcggtctgtgaacatcatcaacgccattgcagaggccaaccaggatgcaaagaaccag

SEQ ID NO: 272795 - DNA, 75 bp, synthetic construct
  source 1..75: mol_type = other DNA
caaaactggatctgcaaaacgggcgtatcgacggcgtcttcggtgacaccgcagtggtcactgagtggctgaaag

SEQ ID NO: 272796 - DNA, 75 bp, synthetic construct
  source 1..75: mol_type = other DNA
tcgaaatacatcatgatgcacgcgccaaccgaacgcctggaagaagtgattgccctgctgccgggtgccgagcgc

SEQ ID NO: 272797 - DNA, 75 bp, synthetic construct
  source 1..75: mol_type = other DNA
ttcggcggctgccgcctttcgctggcaacgccggttgatgaagcctgggacggcccgctctccttaaacggtaaa

SEQ ID NO: 272798 - DNA, 75 bp, synthetic construct
  source 1..75: mol_type = other DNA
ggcagaaaacatgccgattgatattctgcgcgtgcgtgacgacgacattcccggtctggtaatggatggcgtggt

SEQ ID NO: 272799 - DNA, 75 bp, synthetic construct
  source 1..75: mol_type = other DNA
ccaaccattctgccgctggcgggtgaccaacaacgcgtagcgatgcacatggtcagtagcgaaaccctgttctgg

SEQ ID NO: 272800 - DNA, 75 bp, synthetic construct
  source 1..75: mol_type = other DNA
gaaaccatggaaaaactgaagtccctgggtgccagctcgattctggtactgccgattgagaagatgatggagtaa

SEQ ID NO: 272801 - DNA, 75 bp, synthetic construct
  source 1..75: mol_type = other DNA
gtgctggaagaagagctgcttaaccgccgcgcccagggtgaagatccgcgctactttaccctgcgtcgtctggat

SEQ ID NO: 272802 - DNA, 75 bp, synthetic construct
  source 1..75: mol_type = other DNA
ttttacttacagacccaaaaagaaaactcacactgattcaaagaaagagaagattaaaccgaagatgtactatgc

SEQ ID NO: 272803 - DNA, 75 bp, synthetic construct
  source 1..75: mol_type = other DNA
accaaaaattggttacctacccaaccagaatttggttacctacccaaccagaatttggttacatgtaatactgaa

SEQ ID NO: 272804 - DNA, 75 bp, synthetic construct
  source 1..75: mol_type = other DNA
gcacaggcgctgtgtaaagagattgatgcaacctgtactttctccaaccaggcatttgacagcctgatcccgagt

SEQ ID NO: 272805 - DNA, 75 bp, synthetic construct
  source 1..75: mol_type = other DNA
aaatttggtctggctttcctgtggaccaaagagtgggatgcgccgaacgatatctacggggcgctggtgccgatc

SEQ ID NO: 272806 - DNA, 75 bp, synthetic construct
  source 1..75: mol_type = other DNA
gagtcaggcttgaagatcacgccgctcgacgcggcggtacccgacaccgcccaagcgctgatcgaccagacggca

SEQ ID NO: 272807 - DNA, 75 bp, synthetic construct
  source 1..75: mol_type = other DNA
tcacgcattgaaatggcgaagctaaagaacaaggttgatgacctcgatgactttgatgatggtgacgatgatgac

SEQ ID NO: 272808 - DNA, 75 bp, synthetic construct
  source 1..75: mol_type = other DNA
cgctgggcgttaaccgggtgaagatattcgaacgctggaaagctatcgacaccagagataagcgtgacaaattca

SEQ ID NO: 272809 - DNA, 75 bp, synthetic construct
  source 1..75: mol_type = other DNA
cactgggcgttaaccgggtgaagatattcgaacgctggaaggctatcgacaccagggataagcgtgaaaaattca

SEQ ID NO: 272810 - DNA, 75 bp, synthetic construct
  source 1..75: mol_type = other DNA
atgaaaatcacccctgaacaggtttgtgaagctctggatgcctgggtatgccgaccaggaatgacacaagagcag

SEQ ID NO: 272811 - DNA, 75 bp, synthetic construct
  source 1..75: mol_type = other DNA
tcgggtgatggcacagaaagccccggacggcacaccctacgcgccacgccagcagcagagcgccagaaaaaagac

SEQ ID NO: 272812 - DNA, 75 bp, synthetic construct
  source 1..75: mol_type = other DNA
aaaattgattatccggcgcgccctctgctcggcttcaccggtgaggatgtgcagatgattgaagagattatcctg

SEQ ID NO: 272813 - DNA, 75 bp, synthetic construct
  source 1..75: mol_type = other DNA
aggttgtatcgtgaaattactgacggaaaaagcattacgtacatgatcgccgggttaaacaaagaatatggcgat

SEQ ID NO: 272814 - DNA, 75 bp, synthetic construct
  source 1..75: mol_type = other DNA
cagcgctagtgcctgcaattatggaggctatccggattagtgatttcaggttgtatcgtgaaattagtgacggaa

SEQ ID NO: 272815 - DNA, 75 bp, synthetic construct
  source 1..75: mol_type = other DNA
atcccgtctggacgaaattgaccgcgtatctggccagacccagttcaacggcgtgaacgtactggcgaaagacgg

SEQ ID NO: 272816 - DNA, 75 bp, synthetic construct
  source 1..75: mol_type = other DNA
ctgccacggtttatacatacaatgcatcagctggtaacttctcattcagtaatgtatcgaataatacttcagcaa

SEQ ID NO: 272817 - DNA, 75 bp, synthetic construct
  source 1..75: mol_type = other DNA
cggcgctagtgcctgcgattatggaggctatccggattagtgatttcaggttgtatcgtgaaattagtgacggaa

SEQ ID NO: 272818 - DNA, 75 bp, synthetic construct
  source 1..75: mol_type = other DNA
cggcgctagtgcctgcgattatggaggctatccggattagtgatttcaggttgtatcgtgagatcagtgatggaa

SEQ ID NO: 272819 - DNA, 75 bp, synthetic construct
  source 1..75: mol_type = other DNA
ctgaccatccctggcttacgcgccgaacgcaaagtcatcagcaagttaagcccccgaagttacctaaaaagaagc

SEQ ID NO: 272820 - DNA, 75 bp, synthetic construct
  source 1..75: mol_type = other DNA
accggctgaccggactgattgagtcgctgtcaccgtcagggcgtcggcgactggcggtagatattgcgaagaagc

SEQ ID NO: 272821 - DNA, 75 bp, synthetic construct
  source 1..75: mol_type = other DNA
catgggggggtatagctattattgcaatctttgcaattattcctgcgtcacaaagagattttttccttggaaaac

SEQ ID NO: 272822 - DNA, 75 bp, synthetic construct
  source 1..75: mol_type = other DNA
cgttgggcgggcagattgagcaaaaaagctcgtcgcagggcgacgattaatttatcgctttgtttcccggaaaag

SEQ ID NO: 272823 - DNA, 75 bp, synthetic construct
  source 1..75: mol_type = other DNA
tctttgcgccgctgttcgccgtttacttccaggagccggtcggcaatatcatgtcgaatattccgattgttggcg

SEQ ID NO: 272824 - DNA, 75 bp, synthetic construct
  source 1..75: mol_type = other DNA
acagacgtgatgaatacggtcaatctgttagtaaatggctggcaaatattgcaagtaaagcagcccatggtattt

SEQ ID NO: 272825 - DNA, 75 bp, synthetic construct
  source 1..75: mol_type = other DNA
cttctgggggccccggttccgtcgttgttgattgcaggaggttatcacgcgtcaaaaagcatgggcataccgtta

SEQ ID NO: 272826 - DNA, 75 bp, synthetic construct
  source 1..75: mol_type = other DNA
gttaatttatctctttgttttcctgaatacagtgagtctgaacgagaacatattgttgactctatgttttcaact

SEQ ID NO: 272827 - DNA, 75 bp, synthetic construct
  source 1..75: mol_type = other DNA
ctgaaagagcgcggagccgattacgtcatcaactccgccacgcaatggtttgaaaacttgacccctgaggcgctg

SEQ ID NO: 272828 - DNA, 75 bp, synthetic construct
  source 1..75: mol_type = other DNA
ctgggcgtcgatcccctgtatgtcgctttgccaagctatgttgtcatcatgggcggcggcgcaatcatcaacctc

SEQ ID NO: 272829 - DNA, 75 bp, synthetic construct
  source 1..75: mol_type = other DNA
gctataactcagaaaatagaatcgtaaacaccctttttcatctttcacaatgtgtatctctatccaaggggttaa

SEQ ID NO: 272830 - DNA, 75 bp, synthetic construct
  source 1..75: mol_type = other DNA
ggctcaataactaaatggtcttcaggcgaacaaggaccatcattgaggtgtggggatttgggcggatgtacaata

SEQ ID NO: 272831 - DNA, 75 bp, synthetic construct
  source 1..75: mol_type = other DNA
ggtgatgagaattgttcgtggtgacaatggagaggacttctccgcaaattgtgaacctgaccattcgggtagggt

SEQ ID NO: 272832 - DNA, 75 bp, synthetic construct
  source 1..75: mol_type = other DNA
tgcgcaacgaaaagaagaacgcacgataggtaatataggtttaggtgtaagacataattttgataaatggcttct

SEQ ID NO: 272833 - DNA, 75 bp, synthetic construct
  source 1..75: mol_type = other DNA
atggctcaatcgcagcgatattgacatatgctggcggtatcttagctctgttgttgacatctatagtttatcttg

SEQ ID NO: 272834 - DNA, 75 bp, synthetic construct
  source 1..75: mol_type = other DNA
acagcttaattttagctcgttactggtttttctatttgcagcattagcactaagagctgggacatggcaattaaa

SEQ ID NO: 272835 - DNA, 75 bp, synthetic construct
  source 1..75: mol_type = other DNA
caggcgaaaagttatgcttcacagattgcaggtgtgggtgttgaaggtgccatgcagggcgcagccgctatgggg

SEQ ID NO: 272836 - DNA, 75 bp, synthetic construct
  source 1..75: mol_type = other DNA
agaaattacgttaaaaatcctttctattacagcaccgttatttattatgtgtctgatgttcggttttcttcgtca

SEQ ID NO: 272837 - DNA, 75 bp, synthetic construct
  source 1..75: mol_type = other DNA
ttcatggcctggattatctggcaggcgaaaagttatgcttcgcagcttgcaggtgtgggtgttgaaggtgccatg

SEQ ID NO: 272838 - DNA, 75 bp, synthetic construct
  source 1..75: mol_type = other DNA
accacaatagttgggaagcaaaaaaccgcagtgcaggattttttatggaatctatgtcgattctggttaattctt

SEQ ID NO: 272839 - DNA, 75 bp, synthetic construct
  source 1..75: mol_type = other DNA
ccctaagcctgggtcgctttatgccggaaaagtacaaacccagctactacgcggcggcctcttatagctgccact

SEQ ID NO: 272840 - DNA, 75 bp, synthetic construct
  source 1..75: mol_type = other DNA
gctgctacaaaatgtgctggtatttggcgtaaaaatacaaaaaaatcacatgcattaatacttaatctcatcatg

SEQ ID NO: 272841 - DNA, 75 bp, synthetic construct
  source 1..75: mol_type = other DNA
gcaaacatataaaagtgttatctgatacaggaattaagtctggagttcactattctaacgaagaacttacgttaa

SEQ ID NO: 272842 - DNA, 75 bp, synthetic construct
  source 1..75: mol_type = other DNA
caatatagttttatctctggcaatagatacggtagacaatcgtaatctaattaagattggcgctactgcggctgt

SEQ ID NO: 272843 - DNA, 75 bp, synthetic construct
  source 1..75: mol_type = other DNA
atcatgtcttgattggcggaaatgccgtggtacgtggtggaccgattctgctcgacgagcacgttgtaatacaag

SEQ ID NO: 272844 - DNA, 75 bp, synthetic construct
  source 1..75: mol_type = other DNA
ggcagatttatatgatctcgccgataagctcgaaaatacgctgaattgtccggttgagttttcccgcgacgttaa

SEQ ID NO: 272845 - DNA, 75 bp, synthetic construct
  source 1..75: mol_type = other DNA
atttatgtgttgtggtatgccttcacaacaataattggaaaacaaaagtcggcagttcaggattttatatggaca

SEQ ID NO: 272846 - DNA, 75 bp, synthetic construct
  source 1..75: mol_type = other DNA
aggaccagggctacgaagtgtggctggagctggggctacaaaccgcccacgacaaaacactgcatcgcatcaatc

SEQ ID NO: 272847 - DNA, 75 bp, synthetic construct
  source 1..75: mol_type = other DNA
accgtatttccgccagcgcccgtcgcccaactttactggcgccgctgtggtgtgaaaaccgttggacgggcatgg

SEQ ID NO: 272848 - DNA, 75 bp, synthetic construct
  source 1..75: mol_type = other DNA
tattgtgaaaggcagcattatggcaaaagcctgggaagcggggcgtttaaacggcattgaactggaggattacac

SEQ ID NO: 272849 - DNA, 75 bp, synthetic construct
  source 1..75: mol_type = other DNA
cgtgggcttaaggtgtgttctcacttaattgtcggcctgcctggcgaagggcaagcggaatgtttgcaaacactg

SEQ ID NO: 272850 - DNA, 75 bp, synthetic construct
  source 1..75: mol_type = other DNA
gcggtcatgatttcgcctgttatcagcgcacgacgcaactggcacgccagcgcgggctgaaagtgtgctcgcatt

SEQ ID NO: 272851 - DNA, 75 bp, synthetic construct
  source 1..75: mol_type = other DNA
cgtgggctgaaggtgtgttctcacttaattgtcggcctgcctggcgaagggcaggctgaatgtttgcaaacgctg

SEQ ID NO: 272852 - DNA, 75 bp, synthetic construct
  source 1..75: mol_type = other DNA
aaaattaagtggcgacaaggaaacggccatgaaagagcgtgctgattattttctgaaagtgacaggtgttaactc

SEQ ID NO: 272853 - DNA, 75 bp, synthetic construct
  source 1..75: mol_type = other DNA
actgtgcggtttctggaacgacctgtaaaagattttcagtatgcccccggaagggggccggaagaagatttcagt

SEQ ID NO: 272854 - DNA, 75 bp, synthetic construct
  source 1..75: mol_type = other DNA
taataaggagtctcaaatgaaggaaaggagtgattattttcttagtgtcactggttctggaaatgaaggaaaact

SEQ ID NO: 272855 - DNA, 75 bp, synthetic construct
  source 1..75: mol_type = other DNA
aagaccagggttatgaagtatggctggagctggggttgcaaactgcgcacgataaaacgctgcatcgcattaatc

SEQ ID NO: 272856 - DNA, 75 bp, synthetic construct
  source 1..75: mol_type = other DNA
gaggaatattttccgggactggtattgtctgtctggcaggttgtctgcctttgttattcagtctgtctgccgggg

SEQ ID NO: 272857 - DNA, 75 bp, synthetic construct
  source 1..75: mol_type = other DNA
ttgtgcaggcaacacctgatgccattgcacagaaaagcgtacagcccggagagtatgagtcagtagcgaattttg

SEQ ID NO: 272858 - DNA, 75 bp, synthetic construct
  source 1..75: mol_type = other DNA
gaaggcgaggcactgactgacgcgcttttacttgctgaagatgaccgcgttttggggtacaggatagaacctgtc

SEQ ID NO: 272859 - DNA, 75 bp, synthetic construct
  source 1..75: mol_type = other DNA
taatcagtattgactggctggatgaaatggtttctcatttattacgccccggcgtgggtgtggtaggagcaaagc

SEQ ID NO: 272860 - DNA, 75 bp, synthetic construct
  source 1..75: mol_type = other DNA
atcctgattgtttatggatatacggtgatcacgatctgcttgacgagagaggcgaacgtcactctcccaacttta

SEQ ID NO: 272861 - DNA, 75 bp, synthetic construct
  source 1..75: mol_type = other DNA
tacagcaggcttacgcgctggtgggcaagatccgcgacgacaggccgctacacgcctatgaacactggctggcta

SEQ ID NO: 272862 - DNA, 75 bp, synthetic construct
  source 1..75: mol_type = other DNA
attaaatatccttggcaaacagtccgccaatattgctgacggcattcgcggccactcgatggaagaactgggggc

SEQ ID NO: 272863 - DNA, 75 bp, synthetic construct
  source 1..75: mol_type = other DNA
accaagtgggagcaaatattaattttaaagcaaaatacaagcgacttggtttggtaagaaacaagtggtatcgaa

SEQ ID NO: 272864 - DNA, 75 bp, synthetic construct
  source 1..75: mol_type = other DNA
ttatgtgtagctattgcgattggcagcctctgacattgccagactcgttttctcttcattctggttggcttctga

SEQ ID NO: 272865 - DNA, 75 bp, synthetic construct
  source 1..75: mol_type = other DNA
cgcggtcggaccgggtggctgtgccgatcactttcacagcgggctggccgccgatgagcctggctaccagcgccg

SEQ ID NO: 272866 - DNA, 75 bp, synthetic construct
  source 1..75: mol_type = other DNA
gtaccctgcaggagctggtctggttgccggtgggcgccactcaggtggggctgctcgccagcagcgaaggggcgg

SEQ ID NO: 272867 - DNA, 75 bp, synthetic construct
  source 1..75: mol_type = other DNA
atgcaaagcgattaccattggcaccctctggcgctgccagattcttctttatcccgtgcgggctggtttttgatc

SEQ ID NO: 272868 - DNA, 75 bp, synthetic construct
  source 1..75: mol_type = other DNA
ctcgcgcccaaagatatcgcgcatatccccgccctgctgatgcacgtcccggacgcgctggtgcagcacgatggc

SEQ ID NO: 272869 - DNA, 75 bp, synthetic construct
  source 1..75: mol_type = other DNA
tgcagcacacccgttacccgaatatcgaaatcatggtgatggataaccagagcgatgacccggaaaccctggctt

SEQ ID NO: 272870 - DNA, 75 bp, synthetic construct
  source 1..75: mol_type = other DNA
tctgcctgcatctggtaaacggcggcgatgaggcatcacgccagcgcacgctcgaaagcatcgcggcgctctgtt

SEQ ID NO: 272871 - DNA, 75 bp, synthetic construct
  source 1..75: mol_type = other DNA
atgaatcacagaagaaaattgctatgcaagccgatattgagcagttagtgaagatttcaacgaagtacgcaaagg

SEQ ID NO: 272872 - DNA, 75 bp, synthetic construct
  source 1..75: mol_type = other DNA
ttgcagaatgcccgtggttatgtgaccaggtgctacatgttactggccgtttttatttatctgattcggcggaac

SEQ ID NO: 272873 - DNA, 75 bp, synthetic construct
  source 1..75: mol_type = other DNA
tgcttaagagacatggaaaggtaagttatagcgataatagtgttatatataatgatattgtttctttttgtaatg

SEQ ID NO: 272874 - DNA, 75 bp, synthetic construct
  source 1..75: mol_type = other DNA
atgctgggcgaagagatgaaagtcattgccagcgaactgggcgaagaacgtttctcccagggccgttttgacgat

SEQ ID NO: 272875 - DNA, 75 bp, synthetic construct
  source 1..75: mol_type = other DNA
acagattggtatcacgaccgatcccagcgatggaaaactggaactggatgccgacaaactcaccgctgcactgaa

SEQ ID NO: 272876 - DNA, 75 bp, synthetic construct
  source 1..75: mol_type = other DNA
attaattacagagaacaaaatattatccagtcgtgaaagtaaagaaaacctgataggattatttacgggcagaca

SEQ ID NO: 272877 - DNA, 75 bp, synthetic construct
  source 1..75: mol_type = other DNA
ggtacggtaaaaggaagagccttatgaaacaatatataaaggcctgtaagaatgaatacaaaaaggattacagag

SEQ ID NO: 272878 - DNA, 75 bp, synthetic construct
  source 1..75: mol_type = other DNA
gtcacctgtcagaagcaatggacggcgaaggcggctggctgctaccggggctgattgagctgcataccgataatc

SEQ ID NO: 272879 - DNA, 75 bp, synthetic construct
  source 1..75: mol_type = other DNA
agaatatcccagatgtgattaataatccgatggatggatatcgaattgtgaagatggttaaagcatcaaggggtg

SEQ ID NO: 272880 - DNA, 75 bp, synthetic construct
  source 1..75: mol_type = other DNA
cagcaaagttaccctgatgcaatcagctattgagccgtcagaatttgagattcaggatgaattgtcacagaagcc

SEQ ID NO: 272881 - DNA, 75 bp, synthetic construct
  source 1..75: mol_type = other DNA
ggcaatatagatttgggagaagatcccggtgtaaaagagcctgagcttgaagaaacgccaacggcaagagatatt

SEQ ID NO: 272882 - DNA, 75 bp, synthetic construct
  source 1..75: mol_type = other DNA
ttcacgcaggaacaggagcatctgcatccgctgccgggtacggacttcgataccagctatttcgatatccgtcat

SEQ ID NO: 272883 - DNA, 75 bp, synthetic construct
  source 1..75: mol_type = other DNA
tcttcgtccggtaccgcaggttcgacagcttcactcatgtcaatcaacaactggagcaatggatagccgatgtgg

SEQ ID NO: 272884 - DNA, 75 bp, synthetic construct
  source 1..75: mol_type = other DNA
tgtggaagtggccgacaaagcgggcgtgctggcgcgtgccgaagcggctgaaatcaacctgcgtagcgatattct

SEQ ID NO: 272885 - DNA, 75 bp, synthetic construct
  source 1..75: mol_type = other DNA
cagcaagaaatgctgaatgccgttggtgcacaatcgttaaacgcgctgaccggccagattgtaccgaaagatatt

SEQ ID NO: 272886 - DNA, 75 bp, synthetic construct
  source 1..75: mol_type = other DNA
ccggcaggtgtggcagacaaatactggccgaccgtgaaacgtctggatgatgtttacggcgaccgtaacctgttc

SEQ ID NO: 272887 - DNA, 75 bp, synthetic construct
  source 1..75: mol_type = other DNA
cagagcgtacactgaacatatttcaccacttatttgctcagttgaataaaaccggcatcgtggtcaatgattctc

SEQ ID NO: 272888 - DNA, 75 bp, synthetic construct
  source 1..75: mol_type = other DNA
ccttcgaccagttaatgaagtgcggcaccgaaccagcgttatggcaggactttaaacaggatgaggcaaggccat

SEQ ID NO: 272889 - DNA, 75 bp, synthetic construct
  source 1..75: mol_type = other DNA
agtcgcaataaacgcttcacgtcttacatcggcatgggttacaccgccgtgcaactaccgccggttatcctgcgt

SEQ ID NO: 272890 - DNA, 75 bp, synthetic construct
  source 1..75: mol_type = other DNA
gcgaactgaaatcacgcaaaattgtggtcagcgttgccgccgatattatggcgctggtgctgttaactgcgccgg

SEQ ID NO: 272891 - DNA, 75 bp, synthetic construct
  source 1..75: mol_type = other DNA
ctataacatgacctttatcgggatagatgtcaccgggctcgggtatggcgtttatgaacttgttcagggatttgc

SEQ ID NO: 272892 - DNA, 75 bp, synthetic construct
  source 1..75: mol_type = other DNA
accgaaggtgtggaggaggtgatcgcccgtcgtgtgatgacgctgacagagcgtgaacataaaagtcaggaagag

SEQ ID NO: 272893 - DNA, 75 bp, synthetic construct
  source 1..75: mol_type = other DNA
acatgaacgcccaggttggcatcacctcgccgggctttattggtgcggacgtttcccaccttaacctgcataaaa

SEQ ID NO: 272894 - DNA, 75 bp, synthetic construct
  source 1..75: mol_type = other DNA
gaagggctgaaaaaagcaagccaggtggcaatcctcaacgccaactatattgccagccgcctgcaggatgccttc

SEQ ID NO: 272895 - DNA, 75 bp, synthetic construct
  source 1..75: mol_type = other DNA
accggcatcagcgaactggatattgccaagcgtctgatcgactacggtttccacgcgccgaccatgtcgttcccg

SEQ ID NO: 272896 - DNA, 75 bp, synthetic construct
  source 1..75: mol_type = other DNA
gaaggtaagcttattgacaccggattctgtatttttgccctcagtaagctggcaatggcgttatccagtacgctt

SEQ ID NO: 272897 - DNA, 75 bp, synthetic construct
  source 1..75: mol_type = other DNA
cgcgctttcaaagctggcgagtcagatttcatcaatcatggacagcctcccgcttactatgcaaaggagcttccc

SEQ ID NO: 272898 - DNA, 75 bp, synthetic construct
  source 1..75: mol_type = other DNA
atgaggatgctgaataaaaaatcctttatgctgttaagtgccttaacagtgaatagcatactggtttcaccgcca

SEQ ID NO: 272899 - DNA, 75 bp, synthetic construct
  source 1..75: mol_type = other DNA
ttctcggcgtagctattttctctataatccatgggatgatttcaacaatacctgttggagcacagaatatattca

SEQ ID NO: 272900 - DNA, 75 bp, synthetic construct
  source 1..75: mol_type = other DNA
cacatcaaatggagagaatgcagcggtttatcaatttcattttctatcaagtgtggtgtagagcgaggaaattag

SEQ ID NO: 272901 - DNA, 75 bp, synthetic construct
  source 1..75: mol_type = other DNA
tggcttactcaggtgctagatgagtggaaggaggaggggttgagtcctaccgaattcatgagaacattagcacgt

SEQ ID NO: 272902 - DNA, 75 bp, synthetic construct
  source 1..75: mol_type = other DNA
aatgcaattagccagcttataaacgacaaaggcgagattgacgatgatgaacttttacgagtcaggatcagatta

SEQ ID NO: 272903 - DNA, 75 bp, synthetic construct
  source 1..75: mol_type = other DNA
agcttaagtgcgcagctcaatatgaagtgtcatgagtttgatcagaaaaaagatatggcgagcttctgtggacaa

SEQ ID NO: 272904 - DNA, 75 bp, synthetic construct
  source 1..75: mol_type = other DNA
aagcgccactgcgttcgataagtggggagtgattcccgtcgagcgtaagggccgtgaggcgttttatgatgtcgc

SEQ ID NO: 272905 - DNA, 75 bp, synthetic construct
  source 1..75: mol_type = other DNA
taagagctgaagctccagcctgttctatattagctggccccaatgcccacagtcgttatcttggtgaaaatgagt

SEQ ID NO: 272906 - DNA, 75 bp, synthetic construct
  source 1..75: mol_type = other DNA
gttgacgacaacctcccgcagatactggctgattacctgatggaaactaccggaaatgtgccggataagttgcag

SEQ ID NO: 272907 - DNA, 75 bp, synthetic construct
  source 1..75: mol_type = other DNA
atgaaatcgcacctgatgaacaaaaaaaacatggcgcaaagctgccgtgtaagtgcgacagcgttcgacaagtgg

SEQ ID NO: 272908 - DNA, 75 bp, synthetic construct
  source 1..75: mol_type = other DNA
gccgtgaggcgttttatgatgttgctagcgtgatagacaatagggttaacaatgcaattaaccagcttacaaacg

SEQ ID NO: 272909 - DNA, 75 bp, synthetic construct
  source 1..75: mol_type = other DNA
tttccgatgaccgatggctggcatccgtcgccggattttcgacgacgggctgcgctgtggggcgtggctcttcct

SEQ ID NO: 272910 - DNA, 75 bp, synthetic construct
  source 1..75: mol_type = other DNA
aagggggtgaaccatgcagcagcaccaggtggtactgcatcacgggcagtccgggaaattcgggcagcacgtgaa

SEQ ID NO: 272911 - DNA, 75 bp, synthetic construct
  source 1..75: mol_type = other DNA
ctgctgaccagtccatttaccgggattattcctgggttgtttaaagccgggcgggcagcaatggctgaagagttg

SEQ ID NO: 272912 - DNA, 75 bp, synthetic construct
  source 1..75: mol_type = other DNA
gttgcatggaaaataaccaaagacacccaaattttccatcaaagacacccaaaaacggatcacggaacccaaagg

SEQ ID NO: 272913 - DNA, 75 bp, synthetic construct
  source 1..75: mol_type = other DNA
gagccggaatttacacctgctgaacttgccgcattccgggattactggatggcggagggcaaagtgttcacgcag

SEQ ID NO: 272914 - DNA, 75 bp, synthetic construct
  source 1..75: mol_type = other DNA
acgagtcacgacagataaagatacagataaagaattaaaccccacacataacgcgcgcgtgcgcgagagtgctcc

SEQ ID NO: 272915 - DNA, 75 bp, synthetic construct
  source 1..75: mol_type = other DNA
gaattagacctattgctgaccgataaaggcgcatatgaaaaaatgtcaactgcttctaatccatacggtgatggt

SEQ ID NO: 272916 - DNA, 75 bp, synthetic construct
  source 1..75: mol_type = other DNA
gaagatagcaaaggcaacaagctgtctccgaccggggggctaattgccaataactgggagaactacacctatcag

SEQ ID NO: 272917 - DNA, 75 bp, synthetic construct
  source 1..75: mol_type = other DNA
cggcatcaacatggtcaactctttgggagaaatgaccaaggttggtgaagatggcaactacgtttacctcgtcac

SEQ ID NO: 272918 - DNA, 75 bp, synthetic construct
  source 1..75: mol_type = other DNA
gcaccgcatcacgggcagttcaggaaattcgggcagcacgtgagcagtgggaacgtgaaaacggatttatcagcg

SEQ ID NO: 272919 - DNA, 75 bp, synthetic construct
  source 1..75: mol_type = other DNA
caggttcagtgggagcagaaattcgcccgtcacgtacatcacgtcagggcgcaggttaaaccagtcagcaagggg

SEQ ID NO: 272920 - DNA, 75 bp, synthetic construct
  source 1..75: mol_type = other DNA
ttggaacgagacctgaagcaattaaaatggctcctctcgtcaaagaaataagcaataataaagctttagagcttc

SEQ ID NO: 272921 - DNA, 75 bp, synthetic construct
  source 1..75: mol_type = other DNA
agagaaaatctgccgttaccgtgctgctgatgctgcagattatgtcagggagactgaccggtcactgatgcaact

SEQ ID NO: 272922 - DNA, 75 bp, synthetic construct
  source 1..75: mol_type = other DNA
ttccctgccggaaaaaatcaggaaatgccctgtttattttcctgatgacagaacaaacagaagcaacggagataa

SEQ ID NO: 272923 - DNA, 75 bp, synthetic construct
  source 1..75: mol_type = other DNA
gacaaacagcccctgccgggcagtttcctgtaagagaatgtttgccttctctgcatgatcttccaggagcagaag

SEQ ID NO: 272924 - DNA, 75 bp, synthetic construct
  source 1..75: mol_type = other DNA
gacaaacagcacctgccggacagttcccggtcagtgaatgctggttttcttcctctgattcttcaggcagatcag

SEQ ID NO: 272925 - DNA, 75 bp, synthetic construct
  source 1..75: mol_type = other DNA
atgccagcgcctctatatggtgcggacgacccgcgccgctgttccggcaattccatatcggaggtgctggaaaat

SEQ ID NO: 272926 - DNA, 75 bp, synthetic construct
  source 1..75: mol_type = other DNA
tctgtttgttttatggaaggacaacaccacgccggggaaattactggttaaggagattaacttcgtaagacaaac

SEQ ID NO: 272927 - DNA, 75 bp, synthetic construct
  source 1..75: mol_type = other DNA
gtgtctgaagtacaccgtcattctgccactggccacaatggcctgatggctctgtttgttttatggaaggacaac

SEQ ID NO: 272928 - DNA, 75 bp, synthetic construct
  source 1..75: mol_type = other DNA
aactggtcaccgcattctgggcaacgctggcacttatgtatatgtcgtttgcggcaggcaccgggaaatatccga

SEQ ID NO: 272929 - DNA, 75 bp, synthetic construct
  source 1..75: mol_type = other DNA
tcctcagaccttcccggagcagaagtaaaagaaatctgccattaccgcaatgttgggggcgcagagtatgcccgg

SEQ ID NO: 272930 - DNA, 75 bp, synthetic construct
  source 1..75: mol_type = other DNA
cgcggctgatgctgcagattatgtcagagagactgaccgatcactgatgcaactggtcaccgcattctgggcaac

SEQ ID NO: 272931 - DNA, 75 bp, synthetic construct
  source 1..75: mol_type = other DNA
tggtcaaatttcgaacgatatcatccgaattgactatactgatttcgtcagacttacggttaagcacaccagtca

SEQ ID NO: 272932 - DNA, 75 bp, synthetic construct
  source 1..75: mol_type = other DNA
gcacttatgtatatgtcgtttgcggcaggcaccgggaaatatccgatgtggcccggaaaaatgaaatgtgtccgg

SEQ ID NO: 272933 - DNA, 75 bp, synthetic construct
  source 1..75: mol_type = other DNA
agactgaccagtcactgatgcaactggtcaccgcattatgggcaacactggcactgatgtttatgtcgtttgcgg

SEQ ID NO: 272934 - DNA, 75 bp, synthetic construct
  source 1..75: mol_type = other DNA
actcgtgattatgcattgagtcaattgcaggaggcattcgaagcagttgatcctcgcttttttggcctgtttgaa

SEQ ID NO: 272935 - DNA, 75 bp, synthetic construct
  source 1..75: mol_type = other DNA
tacaggaggctttcgaagctgttgaccctcgtttctttggcctgtttgaagatgaagcaggcgtgcgcgatctgg

SEQ ID NO: 272936 - DNA, 75 bp, synthetic construct
  source 1..75: mol_type = other DNA
tcagacgaaatcagagacagctacggctaacccgcaggataccggtagtatagagcgccaggcaaacaatactga

SEQ ID NO: 272937 - DNA, 75 bp, synthetic construct
  source 1..75: mol_type = other DNA
aatgcgcatactgttgcggttggcgttaaagaattgatcgaactatctcccacgcaaatgctcgatcgttttggc

SEQ ID NO: 272938 - DNA, 75 bp, synthetic construct
  source 1..75: mol_type = other DNA
tcatcgtcggtgcagggcttgccggttcggttgccgcactggtgctcgcccgcgaaggggcgcaagtgttagtta

SEQ ID NO: 272939 - DNA, 75 bp, synthetic construct
  source 1..75: mol_type = other DNA
ggtggtcatgccatgctggcagtaaaagatacagattcccgtctggtgatggccctgacactcttgattgaaaat

SEQ ID NO: 272940 - DNA, 75 bp, synthetic construct
  source 1..75: mol_type = other DNA
tggcagtcagtatgcgccatcaggtttacagcatggtggaagaggggaaaagtgaagtcgaaatcattggctgga

SEQ ID NO: 272941 - DNA, 75 bp, synthetic construct
  source 1..75: mol_type = other DNA
atgaataaaggacttctcacgctactgctgttatttacctgttttgcgcgcgctcaggtcgtagacacctggcaa

SEQ ID NO: 272942 - DNA, 75 bp, synthetic construct
  source 1..75: mol_type = other DNA
agtaaactcaccattcaacaaggcggcgacaaagatccgattaccattgatatcagcgcggctaactcatcgtta

SEQ ID NO: 272943 - DNA, 75 bp, synthetic construct
  source 1..75: mol_type = other DNA
aacttactggaatccaatgcgccggtggcggtcagtatgcgtcatcaggtttacagcatggtggcggaggggaag

SEQ ID NO: 272944 - DNA, 75 bp, synthetic construct
  source 1..75: mol_type = other DNA
cagactctggtgttgtgggcgctgccagtggtgttgttactgctgatgatactgatcctctggcgggtaagggcg

SEQ ID NO: 272945 - DNA, 75 bp, synthetic construct
  source 1..75: mol_type = other DNA
gtgttgtgggcgctgccagtggtgttgttactgctgatggcactgatcctctggcgagtgagggcgaagcgatga

SEQ ID NO: 272946 - DNA, 75 bp, synthetic construct
  source 1..75: mol_type = other DNA
tattcttattactatttcgttcttcatgatgcgcctcgcgccgggaagcccttttaccggcgaacgtactttacc

SEQ ID NO: 272947 - DNA, 75 bp, synthetic construct
  source 1..75: mol_type = other DNA
acgttgtttgtcggaagtgaaggcaagtacacagcgaacctgacgttgaacgatgagccaatctccggtggcaat

SEQ ID NO: 272948 - DNA, 75 bp, synthetic construct
  source 1..75: mol_type = other DNA
aaggtgaacgcggcctacaacaaggtgcctgatgtgaagactgaggttgtctaccgggctatctctgcaccttct

SEQ ID NO: 272949 - DNA, 75 bp, synthetic construct
  source 1..75: mol_type = other DNA
ctatgactattttcgaaacgcaaaatactaaagctcaagatgaaattgcagccttggttaaagagattattttat

SEQ ID NO: 272950 - DNA, 75 bp, synthetic construct
  source 1..75: mol_type = other DNA
cctacaaggtgaacgcggcctacaacaaggtgcctgatgtgaagactgaggttgtctaccgggctatctctgcac

SEQ ID NO: 272951 - DNA, 75 bp, synthetic construct
  source 1..75: mol_type = other DNA
acccaattcgtgacccggtgtgtttgctccagtgggacagaactccagatgaggctgaacaaactacgcaggaca

SEQ ID NO: 272952 - DNA, 75 bp, synthetic construct
  source 1..75: mol_type = other DNA
catgaagtcctacgaatggaccattgccggtgagttgcagagcatcagctctgatcgagtgactatcagcaaggg

SEQ ID NO: 272953 - DNA, 75 bp, synthetic construct
  source 1..75: mol_type = other DNA
cagcgtgctcttgctcagttcggcacacctgaactgaaagaatatctggaaggcaccggcctgggtaatcaccct

SEQ ID NO: 272954 - DNA, 75 bp, synthetic construct
  source 1..75: mol_type = other DNA
ggagcgtagcaaacaggtatcgtttaccacgccctactacgaaaactcagccgtcgtgattgccaaaaaagatac

SEQ ID NO: 272955 - DNA, 75 bp, synthetic construct
  source 1..75: mol_type = other DNA
attacagcattactcctgcagaagttaatgctaaaggtgaagttgtaactccacagacctataatggctataatt

SEQ ID NO: 272956 - DNA, 75 bp, synthetic construct
  source 1..75: mol_type = other DNA
gccagcattgatgacaccgtggcgcgttacacggcacagtttacgcaattagataccatgatgagcaaactgaat

SEQ ID NO: 272957 - DNA, 75 bp, synthetic construct
  source 1..75: mol_type = other DNA
caggcctgcggcgtcagctcgacaagcgatttcctgacgcttccagggcttgtcagcgcgtttgacgacctcggc

SEQ ID NO: 272958 - DNA, 75 bp, synthetic construct
  source 1..75: mol_type = other DNA
gaaccggccttcagccagcgcatgctggcgaaccatttgtcacaggatcacgactgggccagccgcaggcgggag

SEQ ID NO: 272959 - DNA, 75 bp, synthetic construct
  source 1..75: mol_type = other DNA
tctctgcgctgcgtcaggcctttgtgccagcgctgatcccggagaatttcgcgccctcgttgcgctttattgaac

SEQ ID NO: 272960 - DNA, 75 bp, synthetic construct
  source 1..75: mol_type = other DNA
cgttggtttgacaaccttgccgccaacggaaaaatcgaaatggactggcaggaaaccttctgggcgcatggcttc

SEQ ID NO: 272961 - DNA, 75 bp, synthetic construct
  source 1..75: mol_type = other DNA
agataggcttcacgattttcatcccttttttgattatcgacctagtgatagccagcgtgttgatggcattgggga

SEQ ID NO: 272962 - DNA, 75 bp, synthetic construct
  source 1..75: mol_type = other DNA
aacgcgctgggaacgccctccgcgccacctaaccaggtattgctggggctggcactgtttttgaccttttttatt

SEQ ID NO: 272963 - DNA, 75 bp, synthetic construct
  source 1..75: mol_type = other DNA
cttcagggaaaaatatcatcagatggctgcttaaaaaaagaacaaatggtagtgtccgctattgccagtacacct

SEQ ID NO: 272964 - DNA, 75 bp, synthetic construct
  source 1..75: mol_type = other DNA
ttgcactgattgtgattcataactgtgcggtgcttggattatttgctctggaaaacattaccatggcagaaatgt

SEQ ID NO: 272965 - DNA, 75 bp, synthetic construct
  source 1..75: mol_type = other DNA
ctcacatcagatcgaggaaggaaaacgttggtttgataaccttgccgcccacggaaaaatcgaaatgacctggca

SEQ ID NO: 272966 - DNA, 75 bp, synthetic construct
  source 1..75: mol_type = other DNA
ttcagcggcaataatctggtgaaggcgattcgctctggaacgcctaaagatgcacaaacgctacggctggtggtc

SEQ ID NO: 272967 - DNA, 75 bp, synthetic construct
  source 1..75: mol_type = other DNA
cgcagtgcgactggcgcttccgtatgggtgctctctaaccgtcgtgccaacagtgaaatggccagctggctggag

SEQ ID NO: 272968 - DNA, 75 bp, synthetic construct
  source 1..75: mol_type = other DNA
ttaagggcgttttaacccgtgacggggattactttatctcggtgatggggcgcagtgatgtggcacgtaagcaaa

SEQ ID NO: 272969 - DNA, 75 bp, synthetic construct
  source 1..75: mol_type = other DNA
ctgttcttctctggctggttacccctctcgccttcgcacaactgccgggtatcaccagtcagccgctgcctggcg

SEQ ID NO: 272970 - DNA, 75 bp, synthetic construct
  source 1..75: mol_type = other DNA
cgcgctgccgtttaaactgatgctgtttgtgctggtggatggctggcaattgctggtcggttcactggcgcaaag

SEQ ID NO: 272971 - DNA, 75 bp, synthetic construct
  source 1..75: mol_type = other DNA
atccgtttaaaacggaaagtaaccgcactacgggtgttatcagcagtaatacggtaacgcgtccggcagcgcgcg

SEQ ID NO: 272972 - DNA, 75 bp, synthetic construct
  source 1..75: mol_type = other DNA
atggttgcactgattgtgattcataactgtgcggtgctgggattatttgctctggaaaacattaccatggcagaa

SEQ ID NO: 272973 - DNA, 75 bp, synthetic construct
  source 1..75: mol_type = other DNA
cagggcgcggcattacctggtacaactttgtctctgaccaatattcgggttttcatggcatagtgatccctggaa

SEQ ID NO: 272974 - DNA, 75 bp, synthetic construct
  source 1..75: mol_type = other DNA
gccaggttcagaattatggacgttatgccgccgagccaaatgaagtccagttggcgagatatttccatcttgatg

SEQ ID NO: 272975 - DNA, 75 bp, synthetic construct
  source 1..75: mol_type = other DNA
tgagacctggaaagccgtggcatcacgatttgaaaagaatgcggaagttcatatctgtaatgaaggtaaatatcc

SEQ ID NO: 272976 - DNA, 75 bp, synthetic construct
  source 1..75: mol_type = other DNA
ctcggcttgccgatgccggtgaagcagtattctggcgggtggataaatcggcaaattacggtgcactagacgaac

SEQ ID NO: 272977 - DNA, 75 bp, synthetic construct
  source 1..75: mol_type = other DNA
tgccatgacggtaaacatccttccctgactatcagcagcctggagaaactggaggagccaccatcgttgcatcgt

SEQ ID NO: 272978 - DNA, 75 bp, synthetic construct
  source 1..75: mol_type = other DNA
tttcgcctctgatgcatggtcatatcaacatgctgggacattatacgttcacactaccggaggatattatgaagg

SEQ ID NO: 272979 - DNA, 75 bp, synthetic construct
  source 1..75: mol_type = other DNA
ggcagtaaccggtggggagatcctcgtgcaagattactacagggtgctgactggcaggcaaatcggattaaggtt

SEQ ID NO: 272980 - DNA, 75 bp, synthetic construct
  source 1..75: mol_type = other DNA
gccatgatttgggtagtcgttgagagcgcgctgatgtgcagtgggacgtcacgtaaccgtgggcgtttgcttgcc

SEQ ID NO: 272981 - DNA, 75 bp, synthetic construct
  source 1..75: mol_type = other DNA
ccgactgaatccgctttatcgcattttccctatcaatgactgcatagagcgccagtttacgatcgaaaagcgtga

SEQ ID NO: 272982 - DNA, 75 bp, synthetic construct
  source 1..75: mol_type = other DNA
gcttcaaaataaggtattactgcccggagcaaccacactagtacgtctcatcagtgaaattcgtgaaagggcaaa

SEQ ID NO: 272983 - DNA, 75 bp, synthetic construct
  source 1..75: mol_type = other DNA
ctcaggttctgcctggtgttcaacattttgtcgcggtacagcttaatatccaccgtccagaagttctctcccgct

SEQ ID NO: 272984 - DNA, 75 bp, synthetic construct
  source 1..75: mol_type = other DNA
tgctggtatgacttcggtgttcaatattgccaggatgtcaccgcagaaaaggatggcggttctggttgcctttgt

SEQ ID NO: 272985 - DNA, 75 bp, synthetic construct
  source 1..75: mol_type = other DNA
atgggctatggacgataccaggacaacgtgaagagatcgcaggggttaaattctcagatcggggtgcaaagatgg

SEQ ID NO: 272986 - DNA, 75 bp, synthetic construct
  source 1..75: mol_type = other DNA
tgatgatgaacgtcgggtattgattaacagcgttggcgcacactgggaaggcaaccaggtctggttgattcttgc

SEQ ID NO: 272987 - DNA, 75 bp, synthetic construct
  source 1..75: mol_type = other DNA
gtttatcgataaaccgccagcaggtaagtatcgaggagtggataatgcaggaatgccctgctggcttgaaattcc

SEQ ID NO: 272988 - DNA, 75 bp, synthetic construct
  source 1..75: mol_type = other DNA
tgacgctgagtattatgttggtaatcgtgctgatatttttgcccattgtgttgctctacactctctggagctact

SEQ ID NO: 272989 - DNA, 75 bp, synthetic construct
  source 1..75: mol_type = other DNA
tggttggctcacggcgaatctcccaggacatcagtacccgtgatgaaggcggtgacgggaaggtggtggttatcg

SEQ ID NO: 272990 - DNA, 75 bp, synthetic construct
  source 1..75: mol_type = other DNA
gttttccggtacgctattcagcgtggaattgttgaatacaatcctacccatgatctaagaggagcaatttccagc

SEQ ID NO: 272991 - DNA, 75 bp, synthetic construct
  source 1..75: mol_type = other DNA
gaagcgcaggccaacaccacccaggtttcagcggagcgcgaccgtctgtttaaaaattatcaacgttacctgaaa

SEQ ID NO: 272992 - DNA, 75 bp, synthetic construct
  source 1..75: mol_type = other DNA
cagtggacgctggcgacggcggcgctgggtggcgtgtttctggtgagtggtttgattttgttgatgaactacaac

SEQ ID NO: 272993 - DNA, 75 bp, synthetic construct
  source 1..75: mol_type = other DNA
gcgtggcatccagctggtcgaaagacagcgcaggtgcggcggcactggcgggtgcggtaggttactttgtgttaa

SEQ ID NO: 272994 - DNA, 75 bp, synthetic construct
  source 1..75: mol_type = other DNA
ttattcaaaagggcgaggtgctttttaagctcgacccggtgcgttatcaggcgcgggtagaccgacttcaggccg

SEQ ID NO: 272995 - DNA, 75 bp, synthetic construct
  source 1..75: mol_type = other DNA
atgtggcagaccatattccagcgtaccgagcagtggcttgatcagacggtcgccagcactcagcctatcacgcca

SEQ ID NO: 272996 - DNA, 75 bp, synthetic construct
  source 1..75: mol_type = other DNA
catctacgcccaggtggcggtttactccgaccatttcagccatgtttcggtgatgcggaaagtgctgctaagaat

SEQ ID NO: 272997 - DNA, 75 bp, synthetic construct
  source 1..75: mol_type = other DNA
agcaccataatatatgtaatttgtttattactgatttgcctgtggtttgcaggaatggtgctggttggtgggtat

SEQ ID NO: 272998 - DNA, 75 bp, synthetic construct
  source 1..75: mol_type = other DNA
agtgcacgggaaggagtaaacccaggaatactggctacatacggtgacgggggaatagttaaaacggacgaaccc

SEQ ID NO: 272999 - DNA, 75 bp, synthetic construct
  source 1..75: mol_type = other DNA
cttggtttgggagaaggctctgcattacccgttggcgtgcctgttccgtggccctcagccactccgccaacaggc

SEQ ID NO: 273000 - DNA, 75 bp, synthetic construct
  source 1..75: mol_type = other DNA
ctgagtttgttcaggccgctattaccgctctgattaacggtgcgccagccacgctggacacactgaaagaaattg

SEQ ID NO: 273001 - DNA, 75 bp, synthetic construct
  source 1..75: mol_type = other DNA
ccgtggttgcgaaacgcgttgaaacgcctgcggttgtcgcaccgcgcgtcagcgaaccggcgcgcaatccgttta

SEQ ID NO: 273002 - DNA, 75 bp, synthetic construct
  source 1..75: mol_type = other DNA
gctgttgtatgtgaccaaaaattcttagctgattatttcggtgttagtttaaggacgatccaatattggattgga

SEQ ID NO: 273003 - DNA, 75 bp, synthetic construct
  source 1..75: mol_type = other DNA
ttggtgtgcccgttccgtggccctcagcaacaccgccaacgggctggctgaaatgtaacggcgcagcattttctt

SEQ ID NO: 273004 - DNA, 75 bp, synthetic construct
  source 1..75: mol_type = other DNA
tgttggtgtgattcatctgcgttcacagctggcgactaaacgcgctgcactactggtgatgctgtgctttttgct

SEQ ID NO: 273005 - DNA, 75 bp, synthetic construct
  source 1..75: mol_type = other DNA
aggaatggtgctggttggtgggtatgccaggcagctatgggcgctttggatagtaaaagcagaagtcactgtaga

SEQ ID NO: 273006 - DNA, 75 bp, synthetic construct
  source 1..75: mol_type = other DNA
gcccggcagctatgggcactttggatagtaaaagcagaagtcactgtagatgctgaaacgcccgcttttaaacaa

SEQ ID NO: 273007 - DNA, 75 bp, synthetic construct
  source 1..75: mol_type = other DNA
acaggctggctgaaatgcaacggtgccgctttttctgctgaagaatacccggaactggcaaaggcttatccgaca

SEQ ID NO: 273008 - DNA, 75 bp, synthetic construct
  source 1..75: mol_type = other DNA
aaatgcaatggtgcggctttttctcctgaagaatacccggaactggcaaaggcttacccgacaaataaattgcct

SEQ ID NO: 273009 - DNA, 75 bp, synthetic construct
  source 1..75: mol_type = other DNA
ttgctgacggtgatggcgatttatcgtggtcgcccgggttggggatttttgatggcgtcattgatgcaatttggc

SEQ ID NO: 273010 - DNA, 75 bp, synthetic construct
  source 1..75: mol_type = other DNA
gtcacgatgaacgccctgcgcagcgggatccagagttatgcagcccgcagcggcgataccgccagtctggtcaat

SEQ ID NO: 273011 - DNA, 75 bp, synthetic construct
  source 1..75: mol_type = other DNA
aaaatatttctactgttctgggctgcaggattgggaggcacgctgtacagcctgtacagcgtgctggcgtactga

SEQ ID NO: 273012 - DNA, 75 bp, synthetic construct
  source 1..75: mol_type = other DNA
gtaaatggagtttttctcacagcagcgcaagtgacgcaagcgtagcttgcatagaaattaattcatctgagtcac

SEQ ID NO: 273013 - DNA, 75 bp, synthetic construct
  source 1..75: mol_type = other DNA
atggaacatctaattaaagaaataccaaagacagttgctcgtgatgataaaagattcctcaaggctgctgaagat

SEQ ID NO: 273014 - DNA, 75 bp, synthetic construct
  source 1..75: mol_type = other DNA
agatgaacgaaaacctaactcaacagtttgctaattttgtccagagacaggcgccgcagaatgcagaggctattc

SEQ ID NO: 273015 - DNA, 75 bp, synthetic construct
  source 1..75: mol_type = other DNA
gatgtgatgctacccggaatggatggttatcaggtgctggaaggcgtccggaccaggaaacagacccccgtgctg

SEQ ID NO: 273016 - DNA, 75 bp, synthetic construct
  source 1..75: mol_type = other DNA
cggtggcggatcaatatgccgacttcctgcgtgaaggtttccacgtggtgacgccgaataaaaaggccaacacct

SEQ ID NO: 273017 - DNA, 75 bp, synthetic construct
  source 1..75: mol_type = other DNA
cggtcgacgagctgaaaggcgaaaaagtcggggtgggcgtcaacggtacgattgccagcaccaccgatactgccg

SEQ ID NO: 273018 - DNA, 75 bp, synthetic construct
  source 1..75: mol_type = other DNA
gtgcgtgtgccgtacttcccggcgaatgccgtgttagtgacaacgctggaaaacctctctatctatttcatggat

SEQ ID NO: 273019 - DNA, 75 bp, synthetic construct
  source 1..75: mol_type = other DNA
aaaactggaatgaccattatcctgatgaagtatcgaaagcacagtcagcgatcagcaaagctcttggaggtgagt

SEQ ID NO: 273020 - DNA, 75 bp, synthetic construct
  source 1..75: mol_type = other DNA
ttgcggtgcgcgcaggttgtactcgggggggccatatactggtatttcaacgaaaaaaaagatcttctgcgacaa

SEQ ID NO: 273021 - DNA, 75 bp, synthetic construct
  source 1..75: mol_type = other DNA
atttctcaaaacttgttttcccacatcttttcgaagaggtaacagaggctatacaagcaataacgcatgcaccga

SEQ ID NO: 273022 - DNA, 75 bp, synthetic construct
  source 1..75: mol_type = other DNA
gagcatcatttgactgcgttattctccgcaacagttattcgctgacagggcagccagttccgtggcagtggtgga

SEQ ID NO: 273023 - DNA, 75 bp, synthetic construct
  source 1..75: mol_type = other DNA
gtgaaaatcgcccgcgccgccactaaacgtagcggtactatcgcctttagcggtgcgtatcacgggcgcacgcat

SEQ ID NO: 273024 - DNA, 75 bp, synthetic construct
  source 1..75: mol_type = other DNA
aggcatatttttgagctatcgaaaaaaactgcacttcaacaacaagagcaactattcaaaggagaatttgatgaa

SEQ ID NO: 273025 - DNA, 75 bp, synthetic construct
  source 1..75: mol_type = other DNA
caacctatttcattttcttcatatcacaaagtggtgagtgttgttcgtcaatcctcctcacttctagggggattg

SEQ ID NO: 273026 - DNA, 75 bp, synthetic construct
  source 1..75: mol_type = other DNA
ttcgctgaccgcgcggaaaactgccgggtgtgggacgttgaaggccgtgagtatcttgatttcgcgggcgggatt

SEQ ID NO: 273027 - DNA, 75 bp, synthetic construct
  source 1..75: mol_type = other DNA
ccctgagatcagcgatgtgcgcgggctgggggcgatgattgcgatcgagttgtttgaaaatggcgatcacgacaa

SEQ ID NO: 273028 - DNA, 75 bp, synthetic construct
  source 1..75: mol_type = other DNA
tcgccaagaaaacgctgctggttacgaccggttccgaagcggtggaaaacgcggtgaaaatcgcccgcgccgcca

SEQ ID NO: 273029 - DNA, 75 bp, synthetic construct
  source 1..75: mol_type = other DNA
cagcggctggggacaggatatcgggctggccaaatgcagcagtgatgaaaaagccctggctaaagcaaaatcaaa

SEQ ID NO: 273030 - DNA, 75 bp, synthetic construct
  source 1..75: mol_type = other DNA
caacgtgattcgcttcctgtatccgctgaccatcccggatgtgcaattcgatgcggcaatgaaaattttgcagga

SEQ ID NO: 273031 - DNA, 75 bp, synthetic construct
  source 1..75: mol_type = other DNA
tgctgctggataaaccgcaccaccaaacgccgcgcggtcttaagtttgaactggcggcggaatcgccgctgatga

SEQ ID NO: 273032 - DNA, 75 bp, synthetic construct
  source 1..75: mol_type = other DNA
cgggggtacgggcctccgtcattactaggtcgaattggttttgtaggcttatgcggtagggtattttgtgggaaa

SEQ ID NO: 273033 - DNA, 75 bp, synthetic construct
  source 1..75: mol_type = other DNA
gaatccgcaagaaaaggtttttcaaacagcagcaaggcgaaactgggcttactcaataacgattgatgatcctgc

SEQ ID NO: 273034 - DNA, 75 bp, synthetic construct
  source 1..75: mol_type = other DNA
tgttcgaagaaagtgctgggtgtctgtctgcagaaaaagcgcagctactgccagtttgattcgaagctggcgcag

SEQ ID NO: 273035 - DNA, 75 bp, synthetic construct
  source 1..75: mol_type = other DNA
ttccatgacgaaatggtggaacagtacgggcgggtaaagcgttttcttccggcggtattgcgcgacctgcatttc

SEQ ID NO: 273036 - DNA, 75 bp, synthetic construct
  source 1..75: mol_type = other DNA
gagaagtggcatcagctgacggcatgcgctttgtcacaccagtgaagaccatcaactcaggatctaacagaaaat

SEQ ID NO: 273037 - DNA, 75 bp, synthetic construct
  source 1..75: mol_type = other DNA
gcggataagtttggtcgactgctggtgttgcgtgttcaggtctttgtcgtcattctcggcagtattgcgatgctt

SEQ ID NO: 273038 - DNA, 75 bp, synthetic construct
  source 1..75: mol_type = other DNA
tcagtccacgctggagcttgccggccactggggcggtggcgaggtggcttcagctgacggcatgcgctttgtcac

SEQ ID NO: 273039 - DNA, 75 bp, synthetic construct
  source 1..75: mol_type = other DNA
gggttacttgaaatccccgaaggacagcgactctcagtgatggagcacctaaaaagaggccctgtcactatcagc

SEQ ID NO: 273040 - DNA, 75 bp, synthetic construct
  source 1..75: mol_type = other DNA
tgctggagcgccttcaggatgcactacgccgacgggacatctggctcgaaaacagcgatcgctggggaaatcccc

SEQ ID NO: 273041 - DNA, 75 bp, synthetic construct
  source 1..75: mol_type = other DNA
cggctgaattcgatgccgagcgccttttactccgtaaacctggtggcgcgcaaaccggagaagcgtactccacag

SEQ ID NO: 273042 - DNA, 75 bp, synthetic construct
  source 1..75: mol_type = other DNA
acgaccgctttatgatcaagctgattatgaagatgtcaggcggtgaaacggatacgcgcaaagaagttgtctata

SEQ ID NO: 273043 - DNA, 75 bp, synthetic construct
  source 1..75: mol_type = other DNA
aaagggatggtcggcatggcggcgcgcgtctttgcagcaatgtcacgcgcccgcatttcagtggtgctgattacg

SEQ ID NO: 273044 - DNA, 75 bp, synthetic construct
  source 1..75: mol_type = other DNA
aaatacactcgtgccgctttggctcgcccaggaacacatgtctacatggcaggtaggcgttgtcagctcatccta

SEQ ID NO: 273045 - DNA, 75 bp, synthetic construct
  source 1..75: mol_type = other DNA
caagccggagaagcggactgtgcagaccaacagctacgcccgaaagtttctgatgaactcacaatggcgccccga

SEQ ID NO: 273046 - DNA, 75 bp, synthetic construct
  source 1..75: mol_type = other DNA
cattgccggggcgctgcgttacccacgttatcgctggtacgaccgttttatgatcaagctgattatgaagatgtc

SEQ ID NO: 273047 - DNA, 75 bp, synthetic construct
  source 1..75: mol_type = other DNA
ggcgtggcatcacctggtacaacttcatttcagatcagtacaccgggttccacggtattgtcattcccggcacat

SEQ ID NO: 273048 - DNA, 75 bp, synthetic construct
  source 1..75: mol_type = other DNA
tacaaataccggcactggcgctatagatgccagaggtaatggtaaattaaccgccaatgttgatggtaaggctgt

SEQ ID NO: 273049 - DNA, 75 bp, synthetic construct
  source 1..75: mol_type = other DNA
attccattactcaaattaccggtgccgccggggcaaaacctgttggtgttgatttcactgctgttgcgaaagatc

SEQ ID NO: 273050 - DNA, 75 bp, synthetic construct
  source 1..75: mol_type = other DNA
atttgcagaagattgattcttctactttagggttaaatggtttttctgtttccaaaaatgcagtatctgttggtg

SEQ ID NO: 273051 - DNA, 75 bp, synthetic construct
  source 1..75: mol_type = other DNA
cggtaatgaaaaaggcgagctggtggttctgggacgcaacggttccgactactccgctgcggtgctggcggcctg

SEQ ID NO: 273052 - DNA, 75 bp, synthetic construct
  source 1..75: mol_type = other DNA
agtgctgcggatggttcacttacgaccagcagtgatactcaattcaagattgatgcaactaagcttgcagtggct

SEQ ID NO: 273053 - DNA, 75 bp, synthetic construct
  source 1..75: mol_type = other DNA
gttgttaacggtgcaacttacgatgttagtgcagatggtaaaacgataacggagactgcttctggtaacaataaa

SEQ ID NO: 273054 - DNA, 75 bp, synthetic construct
  source 1..75: mol_type = other DNA
aaagcgaatacttccatttacactggaacctcttctgcagatccactggcactattggacaaagctatcgcatct

SEQ ID NO: 273055 - DNA, 75 bp, synthetic construct
  source 1..75: mol_type = other DNA
tctaacaatgcactgaaactgagcgattctatcactcaggttggtgcgagtggtgcactgaaaaatgttgacctg

SEQ ID NO: 273056 - DNA, 75 bp, synthetic construct
  source 1..75: mol_type = other DNA
ttgcgcctgtggaacaaactggcactgataccgtcagccgaacagcgttcacagctggagatgctgctggggcca

SEQ ID NO: 273057 - DNA, 75 bp, synthetic construct
  source 1..75: mol_type = other DNA
gcgctgctggcgctgaagcaactagagttacaattgatggtgatggtactaaccaggctaaaattgaacttagcc

SEQ ID NO: 273058 - DNA, 75 bp, synthetic construct
  source 1..75: mol_type = other DNA
ttcacaggtgcttcaaccaacgatccactgactctgctggacaaagctatcgcatctgttgataaattccgttct

SEQ ID NO: 273059 - DNA, 75 bp, synthetic construct
  source 1..75: mol_type = other DNA
acaatgatgcagttggttttgttaccgtgcaggggaaaaactatgttgctaatgactcattagtcaatgctaatg

SEQ ID NO: 273060 - DNA, 75 bp, synthetic construct
  source 1..75: mol_type = other DNA
tgttcccgtcatatcagctcatttacggcgtgctggcggtgatccccattctctttgtctgggtctactggacat

SEQ ID NO: 273061 - DNA, 75 bp, synthetic construct
  source 1..75: mol_type = other DNA
ttcgccagtgacagacgggctgacggggaaatgagtggcgttcgcctggctctgcccggagagacaggcacgctg

SEQ ID NO: 273062 - DNA, 75 bp, synthetic construct
  source 1..75: mol_type = other DNA
gccatgccgggcgcatgtggccgggaattgcgctgagctgttcgttggaaatatcgccgcatccatcctgctttt

SEQ ID NO: 273063 - DNA, 75 bp, synthetic construct
  source 1..75: mol_type = other DNA
ttgcgacggaggccatccactggcctgagagagtggatacacacaaaaaggcgaatgcctttgccggcagtgccc

SEQ ID NO: 273064 - DNA, 75 bp, synthetic construct
  source 1..75: mol_type = other DNA
atggaaaaacagtttggctggccgatgggtccggcatatctgctggatgtcgtgggcattgacaccgcgcatcat

SEQ ID NO: 273065 - DNA, 75 bp, synthetic construct
  source 1..75: mol_type = other DNA
gatgcagaaagattatcgcgataccatcgacgcgctgtttgatgccaaccgctttggtcagaagaacggcctcgg

SEQ ID NO: 273066 - DNA, 75 bp, synthetic construct
  source 1..75: mol_type = other DNA
tctgcccggagagacaggcacactgataacaacggccacctggcaggtcaacgtgccggagcggcctccttttga

SEQ ID NO: 273067 - DNA, 75 bp, synthetic construct
  source 1..75: mol_type = other DNA
agctctgggcggcggcgtgggttattacatggatgtgcaggaagcgaagctgcgtgacaaaatgcgcggcactgg

SEQ ID NO: 273068 - DNA, 75 bp, synthetic construct
  source 1..75: mol_type = other DNA
ccgccgtagtgagtggcgctctggcggtatctggctgcacaactaacccttacaccggcgaacgcgaagcaggca

SEQ ID NO: 273069 - DNA, 75 bp, synthetic construct
  source 1..75: mol_type = other DNA
gcgcggacaggcgcatttttgccggaagcgatccggtgtataccgcaacaggtaccagtggtatcagtgttgcca

SEQ ID NO: 273070 - DNA, 75 bp, synthetic construct
  source 1..75: mol_type = other DNA
gatcgccgttatgcgattgatgctgagaagattagtcgcgaattgggttggaaaccacaggaaacgtttgagagc

SEQ ID NO: 273071 - DNA, 75 bp, synthetic construct
  source 1..75: mol_type = other DNA
caggatttattggttctgctgtagttcgtcacattataaataatacgcaagatagtgttgttaatgtcgataaat

SEQ ID NO: 273072 - DNA, 75 bp, synthetic construct
  source 1..75: mol_type = other DNA
gccatgttgaccgttcaattacaggtcctgcggcatttattgaaaccaatattgttggtacttatgtccttttag

SEQ ID NO: 273073 - DNA, 75 bp, synthetic construct
  source 1..75: mol_type = other DNA
tctgtctgcataaactggttaaccgccatcgtcttaatattggcacaggagacctgtggcttattgcaggtatta

SEQ ID NO: 273074 - DNA, 75 bp, synthetic construct
  source 1..75: mol_type = other DNA
cgctcaagtggtgttttagaacaatgccagagcgtatttcagttgaagaaattaatgaggttaaaatttatccat

SEQ ID NO: 273075 - DNA, 75 bp, synthetic construct
  source 1..75: mol_type = other DNA
actctactaccggatggttttgtattaatggactccagatccgggaagttgatttatcgacggctgatatagtcg

SEQ ID NO: 273076 - DNA, 75 bp, synthetic construct
  source 1..75: mol_type = other DNA
cacgtggaattgctgccggtgagattgcgccgcaaggtgaagcctctgacctggctttgatgatcattaaccttt

SEQ ID NO: 273077 - DNA, 75 bp, synthetic construct
  source 1..75: mol_type = other DNA
gtgtttatctttgcggttttaataaaggcatccaaagaacagagaataataaaatcactttctgtcgcagcaatt

SEQ ID NO: 273078 - DNA, 75 bp, synthetic construct
  source 1..75: mol_type = other DNA
ccaatgacggggcagtggtgtcacgagattgatcacgaataccgacgaatcggtagcccttctaactgtgttata

SEQ ID NO: 273079 - DNA, 75 bp, synthetic construct
  source 1..75: mol_type = other DNA
tgcttttcactgttgcatcattctccgcctccgccggtaaccaggctgtcaaaaacggctggtgtcagaccatga

SEQ ID NO: 273080 - DNA, 75 bp, synthetic construct
  source 1..75: mol_type = other DNA
gctggaaaaattgaaaattccgctatgtgctttgaagagttgaaacaacttgtgcgcttgtatgaatatattaaa

SEQ ID NO: 273081 - DNA, 75 bp, synthetic construct
  source 1..75: mol_type = other DNA
gtgccaggcggttcgtatcaggcgcaaggggtattgcaatcattaacggtcgtgcccggcacggacggtgtgctg

SEQ ID NO: 273082 - DNA, 75 bp, synthetic construct
  source 1..75: mol_type = other DNA
tagtggttgttatggcctggaactcttcgtggcaacctaaattatataagcttattgattcgaaggataatggta

SEQ ID NO: 273083 - DNA, 75 bp, synthetic construct
  source 1..75: mol_type = other DNA
cccgtcataaataaagactccgtactgcaggctgcccggcaggcatactcccgggaatacgacaaggaatcagct

SEQ ID NO: 273084 - DNA, 75 bp, synthetic construct
  source 1..75: mol_type = other DNA
gtggcagtgttggtaaaacattaatttcatcttacctgttagccccgcgcctgacaggtgcaaagttctatgcgg

SEQ ID NO: 273085 - DNA, 75 bp, synthetic construct
  source 1..75: mol_type = other DNA
gctctgcccgcagatagttaaatcaagccgcgcatcaggaaaatatgatgatgtgactatgtttctcctcacata

SEQ ID NO: 273086 - DNA, 75 bp, synthetic construct
  source 1..75: mol_type = other DNA
ttacattctatttaagtttaatgctgacaattttagtgttactgtttggtaatgaaccaaataaatcacaatata

SEQ ID NO: 273087 - DNA, 75 bp, synthetic construct
  source 1..75: mol_type = other DNA
aaacggctggaaatcacgtatggaacccgtatgactaaggaagaaatagctctggcagagaatctttctcctgca

SEQ ID NO: 273088 - DNA, 75 bp, synthetic construct
  source 1..75: mol_type = other DNA
cctgcatttataacaatgttaaattcgaaatactgattacaaaggattatattgaactgtcagatgcacggcaac

SEQ ID NO: 273089 - DNA, 75 bp, synthetic construct
  source 1..75: mol_type = other DNA
agcagccatgtataatgatcttgtctcctacgtagtacgaagagccgtatgtggcctgacgccaaagaattacaa

SEQ ID NO: 273090 - DNA, 75 bp, synthetic construct
  source 1..75: mol_type = other DNA
agcagccatgtataatgatcttgtctcctacgtagtactgagagatcccctcataatttccccaaagcgtaacca

SEQ ID NO: 273091 - DNA, 75 bp, synthetic construct
  source 1..75: mol_type = other DNA
aaaataacttctccggccagccttctcgttatatcatcttttgtgtttttaggttgtcgacctttattatctttg

SEQ ID NO: 273092 - DNA, 75 bp, synthetic construct
  source 1..75: mol_type = other DNA
atgctacagctattacacaagtttttggtgacggagttcgacttattgcgatcgctgtagaatttgaaaaaccta

SEQ ID NO: 273093 - DNA, 75 bp, synthetic construct
  source 1..75: mol_type = other DNA
ccctgagcaatatcgatttgctgccgacatgttgtttgaagaacaaagcaatatccgttataccgcctttatcaa

SEQ ID NO: 273094 - DNA, 75 bp, synthetic construct
  source 1..75: mol_type = other DNA
ttcaggggcttttcctagcttcaacgcgattactgaacgtcttgagcaatttggcggaaaggtttctcgcgcggc

SEQ ID NO: 273095 - DNA, 75 bp, synthetic construct
  source 1..75: mol_type = other DNA
cagcggtgccggatgagatgattgctgtcttccctgttgccagcgatctcgccctgccagattaccagttactgc

SEQ ID NO: 273096 - DNA, 75 bp, synthetic construct
  source 1..75: mol_type = other DNA
ccgagctgagaacatctcaaaggctaaagtgacgcgagctttccaggctgccgcggtgccggatgagatgattgc

SEQ ID NO: 273097 - DNA, 75 bp, synthetic construct
  source 1..75: mol_type = other DNA
gtgtaaaagcgaatttaactgggagcaaaagcacgccaactgacgggtggatgtcgtctgtttctatacctggtt

SEQ ID NO: 273098 - DNA, 75 bp, synthetic construct
  source 1..75: mol_type = other DNA
tggtgggattattcagcgtctctacgctcgcgattgctgcggagtcttctcctgaagcgttacggataggttatc

SEQ ID NO: 273099 - DNA, 75 bp, synthetic construct
  source 1..75: mol_type = other DNA
gtgcagatgcgcgcatttttgccggaagcgatccggcgcataccgcaacagccaccagtggtatcagtgctgcca

SEQ ID NO: 273100 - DNA, 75 bp, synthetic construct
  source 1..75: mol_type = other DNA
atggtaacgaaaaccatcactgaacagcgtgcggaagtacgtatttttgccggtaatgatccggctcacaccgcc

SEQ ID NO: 273101 - DNA, 75 bp, synthetic construct
  source 1..75: mol_type = other DNA
gccgcttgaaggcacagagacggcgctgacgtattacaagtcgggaacctttgcgacggaggcaatccactggcc

SEQ ID NO: 273102 - DNA, 75 bp, synthetic construct
  source 1..75: mol_type = other DNA
atggtaacgaaaaccatcactgaacaacgtgcagaagtacgtatttttgccggtaatgatccggctcacaccgcc

SEQ ID NO: 273103 - DNA, 75 bp, synthetic construct
  source 1..75: mol_type = other DNA
gtctgggatggtcagaaagccggaacggctgtgggtgtgctggctctggcgcttgccgggtccgagtccacactg

SEQ ID NO: 273104 - DNA, 75 bp, synthetic construct
  source 1..75: mol_type = other DNA
ccggttaacgccgatgtattgattcacttgaagtacgaaaaaaaccgggaggacattggattattcgggatttgg

SEQ ID NO: 273105 - DNA, 75 bp, synthetic construct
  source 1..75: mol_type = other DNA
gatcgttttatctggcagctcgtccctatgcagaaaaaacggcgcttttattcagggcgtactcgcaacctttag

SEQ ID NO: 273106 - DNA, 75 bp, synthetic construct
  source 1..75: mol_type = other DNA
aaacgctatccgcaaacaaaaatctcgtgggtggagttccccgctggcccgcaaatgcttgaggcgttaaacgtt

SEQ ID NO: 273107 - DNA, 75 bp, synthetic construct
  source 1..75: mol_type = other DNA
tcaaactatggccaacttttcgggatcaaactcattttattcaaagttttaatgttgaaaatattgatgatctcc

SEQ ID NO: 273108 - DNA, 75 bp, synthetic construct
  source 1..75: mol_type = other DNA
ccagcgcgaacaaagcatcgccctgttggcaaaaacaatgggtttaccggcgccggtcattgcctcatatcttga

SEQ ID NO: 273109 - DNA, 75 bp, synthetic construct
  source 1..75: mol_type = other DNA
tggcgggattgcttagcgtctctacgattgcggttgctgcagaatcctcgcctgaagcgttacgtataggctatc

SEQ ID NO: 273110 - DNA, 75 bp, synthetic construct
  source 1..75: mol_type = other DNA
aagtgatttcacggaagaggcagaaaatgttgatactgacgtttcttattccgcgggaaagccttcgacggcgag

SEQ ID NO: 273111 - DNA, 75 bp, synthetic construct
  source 1..75: mol_type = other DNA
gcggaacagtacgtgttctgcggtgaaaacgatttttctctggctgaaagaatgctggctgcagatgaccgttac

SEQ ID NO: 273112 - DNA, 75 bp, synthetic construct
  source 1..75: mol_type = other DNA
ccgcggttatggcgcgggcaatgacgttacggctgccggcgtctttgccgatctgctacgcactctttcatggaa

SEQ ID NO: 273113 - DNA, 75 bp, synthetic construct
  source 1..75: mol_type = other DNA
cggatctcgacgtttcgctgcgtggcgcggtgtctatcgcccgccgtttgcaggatccgctggcggagctggtga

SEQ ID NO: 273114 - DNA, 75 bp, synthetic construct
  source 1..75: mol_type = other DNA
acgcagctgcgtaatctggaaacgcgtctgggatacctgcgcgagctggaagagagacgtcaggcgatcctcaag

SEQ ID NO: 273115 - DNA, 75 bp, synthetic construct
  source 1..75: mol_type = other DNA
atgatgaatgattcgttctgccgcattattgcgggtgaaattcaggcgcgcccggaacaggttgacgctgccgtt

SEQ ID NO: 273116 - DNA, 75 bp, synthetic construct
  source 1..75: mol_type = other DNA
taatcgtaaactacagaatatattcaaccaactaatagaatattactttattaaagggggaagcggttttccccc

SEQ ID NO: 273117 - DNA, 75 bp, synthetic construct
  source 1..75: mol_type = other DNA
cgaggtgaatcacctgaaactgtaatagcaatttttaatcgcgaactacaaaatatattcaaccaacaaatagaa

SEQ ID NO: 273118 - DNA, 75 bp, synthetic construct
  source 1..75: mol_type = other DNA
cgaggtgaatcacatgaaactgtaatagcaatttttaattgtgaactacagaatatattcaaccaagaaatagaa

SEQ ID NO: 273119 - DNA, 75 bp, synthetic construct
  source 1..75: mol_type = other DNA
ctgtttacgactatcaggttattgatcccgaagaacccttttccttccgtcttgcaatccataagtacgcccaat

SEQ ID NO: 273120 - DNA, 75 bp, synthetic construct
  source 1..75: mol_type = other DNA
atttgttcgttgcctggatgcactctatggggcaaaacctggtggagtcggtggcgattacggtgataggcgcga

SEQ ID NO: 273121 - DNA, 75 bp, synthetic construct
  source 1..75: mol_type = other DNA
tatcgccatcaatatgatcggcgggcaactggccagcatggtcaaattgcctatttttctcgactccatcggcac

SEQ ID NO: 273122 - DNA, 75 bp, synthetic construct
  source 1..75: mol_type = other DNA
aaaggcgtggtgagctggacatggcgcatcaaggtactgatgcacctggaaaccgaactgatgggcaccgtgcgc

SEQ ID NO: 273123 - DNA, 75 bp, synthetic construct
  source 1..75: mol_type = other DNA
cattgcccgggcggaagacgtggtgttgtgcctgtccgggatgatcgaagctgttcgtccggatactgatattac

SEQ ID NO: 273124 - DNA, 75 bp, synthetic construct
  source 1..75: mol_type = other DNA
cagcgtattgagcatcttgccctcctgaaacggcgggcagaagaggctgaagccagcggcaacctgcaggtgagt

SEQ ID NO: 273125 - DNA, 75 bp, synthetic construct
  source 1..75: mol_type = other DNA
taattgtgaactacagaatatattcaaccaactaatagaatattactttattaaagtgggaaactgggtaatgct

SEQ ID NO: 273126 - DNA, 75 bp, synthetic construct
  source 1..75: mol_type = other DNA
cctaccatccgcgtacctaaccgcgacgcgattgtcggcgcgtttgtcgctgcactcctgttcgaagcaggaaag

SEQ ID NO: 273127 - DNA, 75 bp, synthetic construct
  source 1..75: mol_type = other DNA
tgacggtcagcagggatacttcctgcaacgtatgactccaacctacgcttcctcgaacggtcgcctggatatctg

SEQ ID NO: 273128 - DNA, 75 bp, synthetic construct
  source 1..75: mol_type = other DNA
tacggatatcaccgaagtggagaaaaataatgcgcttactgatgatgatttttctgcgggaaagtcttcgacggc

SEQ ID NO: 273129 - DNA, 75 bp, synthetic construct
  source 1..75: mol_type = other DNA
gtctgagctacctgcgcgaactggaagagagacgtcaggcgatcctcaaatccatttccgaacaaggtaaactca

SEQ ID NO: 273130 - DNA, 75 bp, synthetic construct
  source 1..75: mol_type = other DNA
agcaggcgctgaaagatctgatgggtaacagcagcgaactgcgtaacctgaaagcctctgactttaccgatgaga

SEQ ID NO: 273131 - DNA, 75 bp, synthetic construct
  source 1..75: mol_type = other DNA
acgcagtggtggaagactgcgttaacgccgttggcgttgatctcaacaccgcttccgttccgctgttaacccgcg

SEQ ID NO: 273132 - DNA, 75 bp, synthetic construct
  source 1..75: mol_type = other DNA
tactgatatcaccgaagtggcgaaaaataacgtgcttactgatgatgatttttctgcgggaaagttttcgacggc

SEQ ID NO: 273133 - DNA, 75 bp, synthetic construct
  source 1..75: mol_type = other DNA
tcaccacctggcctgcggatgccattgcccgggcggaagatgtggtgttgcgtctgtccgggatgagcggggctg

SEQ ID NO: 273134 - DNA, 75 bp, synthetic construct
  source 1..75: mol_type = other DNA
gcctgctgatgcactgaatcaggcaacgaaccgggtgctttatctttcaggtatgctggataaccggcacgatgc

SEQ ID NO: 273135 - DNA, 75 bp, synthetic construct
  source 1..75: mol_type = other DNA
gccgcgacggcgtgttgtgggaacatatcgcccgctatggtggtatggcaatgcataccgccggagagtttccag

SEQ ID NO: 273136 - DNA, 75 bp, synthetic construct
  source 1..75: mol_type = other DNA
cccgatggtcgggtcgatatagacaaagaattgatccctccagtggcgaactaccaggccagtacgctgatatgt

SEQ ID NO: 273137 - DNA, 75 bp, synthetic construct
  source 1..75: mol_type = other DNA
ctgtttttaaaatgacagcattgcctgtcattttttttgttaatatatccgcttgctctgcgacatatccagaaa

SEQ ID NO: 273138 - DNA, 75 bp, synthetic construct
  source 1..75: mol_type = other DNA
agcaaacttttcatttgcggagatgaatcttcctccgttaccccttatgcactaagttcggcttttgccaaacga

SEQ ID NO: 273139 - DNA, 75 bp, synthetic construct
  source 1..75: mol_type = other DNA
tgccgggccttgctttacaggtgctgccggtgccgccgcgtcagattccgttccagtccggttatatctattacg

SEQ ID NO: 273140 - DNA, 75 bp, synthetic construct
  source 1..75: mol_type = other DNA
ccttactacaacatttttcggctcagaccaaaatagggccgtcagaacgcctgccggaactgattcgctcgcacc

SEQ ID NO: 273141 - DNA, 75 bp, synthetic construct
  source 1..75: mol_type = other DNA
aaactggtgcaaaaggcagtgccttaaaacatgctgattacatttccagaaccggcgaatacgagaactataaat

SEQ ID NO: 273142 - DNA, 75 bp, synthetic construct
  source 1..75: mol_type = other DNA
aaatcaccggagcggggaggcgcaaaaaaggcgagtattccccagaccgccggagagcgaaaagccgcccttgtt

SEQ ID NO: 273143 - DNA, 75 bp, synthetic construct
  source 1..75: mol_type = other DNA
tgcaggggcgttaagacagaaatcaggccgtttgagtcgtgcgatgatgctatcgagtgggggttggttgagtgt

SEQ ID NO: 273144 - DNA, 75 bp, synthetic construct
  source 1..75: mol_type = other DNA
aacatatgagaaagcatggctttgaaaggggcttcattgactgccggacgctgaaagaacagggcattgaacgac

SEQ ID NO: 273145 - DNA, 75 bp, synthetic construct
  source 1..75: mol_type = other DNA
agcactgcgtatacagcgatcttgggccagggatgcatcccgtagtaacgaacgtgatcaagatatggaacgttg

SEQ ID NO: 273146 - DNA, 75 bp, synthetic construct
  source 1..75: mol_type = other DNA
aagaagaatacgcacggcgtatacagcaatctttggctagaggaatgttaaatagtaaggagcgtgatcagggta

SEQ ID NO: 273147 - DNA, 75 bp, synthetic construct
  source 1..75: mol_type = other DNA
cctacaagatagaagtacagggcggtgaaccacttctcaggttcgatcttgttcagtcaatctatcacgagtgtg

SEQ ID NO: 273148 - DNA, 75 bp, synthetic construct
  source 1..75: mol_type = other DNA
tatgggctacaagttccagttcatcaccctggcaggtatccacagcatgtggtttaacatgttcgacctggcaaa

SEQ ID NO: 273149 - DNA, 75 bp, synthetic construct
  source 1..75: mol_type = other DNA
attgaagccggtgcagcggcagttcacttcgaagatcagctggcatcagtgaagaaatgcggtcacatgggcggc

SEQ ID NO: 273150 - DNA, 75 bp, synthetic construct
  source 1..75: mol_type = other DNA
aataccttccgccgtgcggatcagatccaatggtccgcgggcattgagccgggcgatccgcgctatgtcgattac

SEQ ID NO: 273151 - DNA, 75 bp, synthetic construct
  source 1..75: mol_type = other DNA
gatgagcgaaaattacggggcgaatcaccagaaacggtaatagccatttttaatcgtgaactacagaatatattc

SEQ ID NO: 273152 - DNA, 75 bp, synthetic construct
  source 1..75: mol_type = other DNA
ctatttacgattatgaggttcctgctcctgaagatccgttttccttcagacttgagatccataaattctctgaat

SEQ ID NO: 273153 - DNA, 75 bp, synthetic construct
  source 1..75: mol_type = other DNA
gtattgaagcggtctatctgtcgggatggcaggtagcggcggacgctaacctggcggcaagcatgtacccggacc

SEQ ID NO: 273154 - DNA, 75 bp, synthetic construct
  source 1..75: mol_type = other DNA
tccaaggtattgggaaggttgatattggtttgaacaagatcggacgtagggccgtcacagacttcatcgagggcc

SEQ ID NO: 273155 - DNA, 75 bp, synthetic construct
  source 1..75: mol_type = other DNA
cttacaagatagagatacagggtggagagccactcttacggttcgatttaattcagtctatctatgagcaatgta

SEQ ID NO: 273156 - DNA, 75 bp, synthetic construct
  source 1..75: mol_type = other DNA
atcacaaggggatgttcaggtatctgatgaactgcatctcagagggtggttcgaaggctgagatgctaaaaggat

SEQ ID NO: 273157 - DNA, 75 bp, synthetic construct
  source 1..75: mol_type = other DNA
cttgcgcgggatgttcatcacctgccttgaccgtgccggagtgcaggaaacacggatcggcagtatcaccggaca

SEQ ID NO: 273158 - DNA, 75 bp, synthetic construct
  source 1..75: mol_type = other DNA
gtgtcgatcaagagccaagcatacttatttaaaagaaaagatgggatctggatgtttcagatttttgttcctaaa

SEQ ID NO: 273159 - DNA, 75 bp, synthetic construct
  source 1..75: mol_type = other DNA
ggttacccttatcagagaagcggatgacgttctacgcgatgtcatattgattgggctgtattcaggaatgcgact

SEQ ID NO: 273160 - DNA, 75 bp, synthetic construct
  source 1..75: mol_type = other DNA
aaggttaataccactaacaccaacgttagcaacttaactaaaactgttactgcaaataaaaccgatgcagataac

SEQ ID NO: 273161 - DNA, 75 bp, synthetic construct
  source 1..75: mol_type = other DNA
cggggaccgtatctgcgaataagaccgcaattgaaagaaccgttgccgcaaacaaatctgatgcagatagcaaac

SEQ ID NO: 273162 - DNA, 75 bp, synthetic construct
  source 1..75: mol_type = other DNA
gccttgattattaaagctattcaggaaatggacgccaaatatcaagctaagattgaagcattgactaaagagatt

SEQ ID NO: 273163 - DNA, 75 bp, synthetic construct
  source 1..75: mol_type = other DNA
tattcgcttccgtggtcagaaacaagcccagacgtggaaacttgcggataagatgattcatcttgaatctggtag

SEQ ID NO: 273164 - DNA, 75 bp, synthetic construct
  source 1..75: mol_type = other DNA
tttttccgtattcatggtggtaatggttacaacgttacggcatatgatcaggttgacgtagtagaaattcttctg

SEQ ID NO: 273165 - DNA, 75 bp, synthetic construct
  source 1..75: mol_type = other DNA
caattgcagccgctaacaaacgaattgatggtattgaaggtagcaatgatgctctttacatcaagaagaatacca

SEQ ID NO: 273166 - DNA, 75 bp, synthetic construct
  source 1..75: mol_type = other DNA
atgataggggtactggacgaaaatatattcgtaaattccgtagcaactataacgaaatgatctggcatgagacgg

SEQ ID NO: 273167 - DNA, 75 bp, synthetic construct
  source 1..75: mol_type = other DNA
ccaatggtaacgttacactaggtggtagcgatgctggtaatcatttaatgcgtctcaacaacgaacgtaaacgag

SEQ ID NO: 273168 - DNA, 75 bp, synthetic construct
  source 1..75: mol_type = other DNA
tcaagaccagcgacactgggccactgttcaaagttgactatgaaaacttctgcgaactgctcagacaggttaagc

SEQ ID NO: 273169 - DNA, 75 bp, synthetic construct
  source 1..75: mol_type = other DNA
ttgatgccggacgattaaattctcgtgattacttccgttttaaccattggggtgatagcaataacgcccgtgata

SEQ ID NO: 273170 - DNA, 75 bp, synthetic construct
  source 1..75: mol_type = other DNA
caggaaatgaccgctaagtttgatgctatggctaaagaacttgccgaaactaaagctgaattagccgaactgaaa

SEQ ID NO: 273171 - DNA, 75 bp, synthetic construct
  source 1..75: mol_type = other DNA
actaccgaaggaaaattaacgtggggtaagggtacagctacttctagtttcaatattcgtgcttggggtaatagt

SEQ ID NO: 273172 - DNA, 75 bp, synthetic construct
  source 1..75: mol_type = other DNA
cctgctgtacatgaaaggttcaccgaaactgccgagctgcggtttctctgcccaggcagtccaggcgcttgccgc

SEQ ID NO: 273173 - DNA, 75 bp, synthetic construct
  source 1..75: mol_type = other DNA
ctggcgggcgtcaccgggcgcgcggaagtgatggacgctgttgcaccgggcggtctgggcggcacctatgccggt

SEQ ID NO: 273174 - DNA, 75 bp, synthetic construct
  source 1..75: mol_type = other DNA
gattgctggcgatcgccgaaaaacacaccgagatcggcgacgttcgcgggctgggggcgatgatcgctatcgagc

SEQ ID NO: 273175 - DNA, 75 bp, synthetic construct
  source 1..75: mol_type = other DNA
gattgttggcgatcgccgaaaaacacaccgagatcggcgacgttcgcgggctgggggcgatgattgctatcgagc

SEQ ID NO: 273176 - DNA, 75 bp, synthetic construct
  source 1..75: mol_type = other DNA
tggcagaggtgaaacgtgtaagagaaaatgagcgcaataagattcgcgaaaaacaaattcaggcattaaatgatg

SEQ ID NO: 273177 - DNA, 75 bp, synthetic construct
  source 1..75: mol_type = other DNA
atgaagtcgatatatttaaaatattttctgtcttttgtgtttgttggtgttatggctatgttgatatgtggtctt

SEQ ID NO: 273178 - DNA, 75 bp, synthetic construct
  source 1..75: mol_type = other DNA
atgaagtcgatagatttaaaatctgttctggcttttatatttgttggcgttatggctatgttgatatgtggtctt

SEQ ID NO: 273179 - DNA, 75 bp, synthetic construct
  source 1..75: mol_type = other DNA
gaatcagaaggtgccgggcgatttcgccaagaaaacgctgctggttacgaccggttccgaagcggtggaaaacgc

SEQ ID NO: 273180 - DNA, 75 bp, synthetic construct
  source 1..75: mol_type = other DNA
tggcgttgggcaaattcaccccattttcgctgaccgcgcggaaaactgccgggtgtgggacgttgaaggccgtga

SEQ ID NO: 273181 - DNA, 75 bp, synthetic construct
  source 1..75: mol_type = other DNA
caaacccagcctgcaacgtgtggctaaatacagtaaaaacttcccccatgcgacgctcgccgcactggcagaact

SEQ ID NO: 273182 - DNA, 75 bp, synthetic construct
  source 1..75: mol_type = other DNA
tggcacccgatctcaccacctttgcgaaatcgatcgcgggcggcttcccgctggcgggcgtcaccgggcgcgcgg

SEQ ID NO: 273183 - DNA, 75 bp, synthetic construct
  source 1..75: mol_type = other DNA
cgcggtgaaaatcgcccgcgccgccaccaaacgcagcgggaccatcgcctttagcggcgcgtatcacgggcgcac

SEQ ID NO: 273184 - DNA, 75 bp, synthetic construct
  source 1..75: mol_type = other DNA
ctgtttgcgatggagcaaatgggcgtggcaccggatctcaccacctttgcgaaatcgatcgcaggcggcttcccg

SEQ ID NO: 273185 - DNA, 75 bp, synthetic construct
  source 1..75: mol_type = other DNA
ggaattactgccaaatcttacactgcaatatgcgctggtgctggaaggagaaaatactttcccggcgttaacttc

SEQ ID NO: 273186 - DNA, 75 bp, synthetic construct
  source 1..75: mol_type = other DNA
acgttgccatcagaactgaaaaacggcggcattaaaatttcacgccaggcgttgaaagagtgggttcaacgccag

SEQ ID NO: 273187 - DNA, 75 bp, synthetic construct
  source 1..75: mol_type = other DNA
gtcactggcggcaggtgcggggaaaagccactgccttacgactcaataacgagcaactcaactggcatgagcttt

SEQ ID NO: 273188 - DNA, 75 bp, synthetic construct
  source 1..75: mol_type = other DNA
aatgcgcaaattgcctcagtaaaagtgcagtatcttgatgagcagaaaaagctggctgtgatgaacatcgaatat

SEQ ID NO: 273189 - DNA, 75 bp, synthetic construct
  source 1..75: mol_type = other DNA
gttctattccgggcaaaacctactccagcaaagcgttaatgagcggcaatgtcaaaaaacgcgcaaatagcctca

SEQ ID NO: 273190 - DNA, 75 bp, synthetic construct
  source 1..75: mol_type = other DNA
cagcaaagcgttaatgagcggcaatgtcaaaaacgcgcaaatagcctcagtaaaagtgcagtataaaaagctggc

SEQ ID NO: 273191 - DNA, 75 bp, synthetic construct
  source 1..75: mol_type = other DNA
cgcctttctcggcctgcaggcgctaccgttcaaactggcgatgaatgagggtttatcgctctacgcctgcgtgat

SEQ ID NO: 273192 - DNA, 75 bp, synthetic construct
  source 1..75: mol_type = other DNA
ctggcggctggctgttcttgccgaaaaaaatcctcccggatttcagcaaaatcagtccgttaaaaggcattggac

SEQ ID NO: 273193 - DNA, 75 bp, synthetic construct
  source 1..75: mol_type = other DNA
tgtggctggcagcagacagcatggacgaagccgaatggcgtgatttacggcgaattttgttacagcaagagatac

SEQ ID NO: 273194 - DNA, 75 bp, synthetic construct
  source 1..75: mol_type = other DNA
atcttgccagcgctgaaggggtgttatcgctaattccgtttagcgatcacgatgactggttgctctctttgccgc

SEQ ID NO: 273195 - DNA, 75 bp, synthetic construct
  source 1..75: mol_type = other DNA
cgcgcgatcgcggcgagatgcataacggtaaactgactattgtcgggcgcttagataatctgttctttagcggtg

SEQ ID NO: 273196 - DNA, 75 bp, synthetic construct
  source 1..75: mol_type = other DNA
ggctggcggcgagcctgtttgcggcatttgtggtgatctccagcagcttcccgtggtatgccgattttgtgcgcg

SEQ ID NO: 273197 - DNA, 75 bp, synthetic construct
  source 1..75: mol_type = other DNA
acaggccacgccatgcaaacagcccaccagcaacgcaaaggcacgggcgaacattcagaaaatgaaaaacatgat

SEQ ID NO: 273198 - DNA, 75 bp, synthetic construct
  source 1..75: mol_type = other DNA
cacgagcatggaacaaaagagtttaatcatctgctcaaaaccatcagcggcataggtgatataccagtgagccgg

SEQ ID NO: 273199 - DNA, 75 bp, synthetic construct
  source 1..75: mol_type = other DNA
atgctgatggcggggattcagttcaccgctggtgagcatgagttccagttgtttcatcagcagtggaaaggcctg

SEQ ID NO: 273200 - DNA, 75 bp, synthetic construct
  source 1..75: mol_type = other DNA
aatggccgccagagagcgccaatttaagcggcagaataaactgaatgcctggctggatagtccggaaatacgcca

SEQ ID NO: 273201 - DNA, 75 bp, synthetic construct
  source 1..75: mol_type = other DNA
atacagaaaacggcatcatgccgttacctgacgatgattcaggtatccctgcatgggcaaatgatggcgtcgctt

SEQ ID NO: 273202 - DNA, 75 bp, synthetic construct
  source 1..75: mol_type = other DNA
tgggcgggccagagaacagatcgcagatctctatctgaattactggatgcctggtggaagtatcacggtcaaaac

SEQ ID NO: 273203 - DNA, 75 bp, synthetic construct
  source 1..75: mol_type = other DNA
gtgtctaatttaaaagctgaacacatcattaaccagatggttacgtttatgaaaactaaaaacggaaagcgcagg

SEQ ID NO: 273204 - DNA, 75 bp, synthetic construct
  source 1..75: mol_type = other DNA
atgaaacttaaatattctggcttaactgccagcggcaaaactcgcactaaattcatgtgcggggatatttaccgc

SEQ ID NO: 273205 - DNA, 75 bp, synthetic construct
  source 1..75: mol_type = other DNA
ctgccagtggcaacactcaccctaaatttacgcgcggtgatatttaccgcgaccagtacggcggtacggtaatga

SEQ ID NO: 273206 - DNA, 75 bp, synthetic construct
  source 1..75: mol_type = other DNA
ttaagggcgtggaggaacggcgcgtaacttaccgccgtgaaggttacgaatatgattgcgtgatgcctgtttatc

SEQ ID NO: 273207 - DNA, 75 bp, synthetic construct
  source 1..75: mol_type = other DNA
atggaacagtgctatcaggggcatgctgatggaagatacagcaaacttttgaccaggctgaataatagcgagctg

SEQ ID NO: 273208 - DNA, 75 bp, synthetic construct
  source 1..75: mol_type = other DNA
tctcctgaagataaactttgcgtggttctttatgctctcgggcattctgagtctctaccccgggtagctgcccgg

SEQ ID NO: 273209 - DNA, 75 bp, synthetic construct
  source 1..75: mol_type = other DNA
ttgccgctgtaaatcattatctggccggtcatgcaggcatcatttctacggcaaaactctttcaactttctcaca

SEQ ID NO: 273210 - DNA, 75 bp, synthetic construct
  source 1..75: mol_type = other DNA
atgatggccgaactgggagacaagccaaccggtgaaaccacagcgctgattctggagatgtcccgcgccctgatg

SEQ ID NO: 273211 - DNA, 75 bp, synthetic construct
  source 1..75: mol_type = other DNA
tcggcggtgatgagtgccaaattactttacgatagccatggacaggagatcctccactggttggggatgaactaa

SEQ ID NO: 273212 - DNA, 75 bp, synthetic construct
  source 1..75: mol_type = other DNA
gacaaaagctgatccgcccgatgattgttattgtctcagcggtgatgagtgccaaattactttacgatagccacg

SEQ ID NO: 273213 - DNA, 75 bp, synthetic construct
  source 1..75: mol_type = other DNA
atgggatacaaactggacatggatttcaccccactaaacaccgagtcaccactgacaatggttgtaaaaaaggcg

SEQ ID NO: 273214 - DNA, 75 bp, synthetic construct
  source 1..75: mol_type = other DNA
ccgtctgatccgtgaggcgggcctgccggaagagcagcagctttcaccggcggccatcagccgggaagcctcccg

SEQ ID NO: 273215 - DNA, 75 bp, synthetic construct
  source 1..75: mol_type = other DNA
cttcaaaagtggatttgctgccggaaaacgtgcgcaaaacactgcatgaaatgctgcgtgacaaggcaatcccac

SEQ ID NO: 273216 - DNA, 75 bp, synthetic construct
  source 1..75: mol_type = other DNA
ctctttcaccattaacggcaaacccgtggaagataatcaaacatatcgtattgccacgcactccttttgtgccag

SEQ ID NO: 273217 - DNA, 75 bp, synthetic construct
  source 1..75: mol_type = other DNA
atcgcgatgttgcattgatacttgcggcgtttagccctttggtttttggtaatataatttatccaatttggtttt

SEQ ID NO: 273218 - DNA, 75 bp, synthetic construct
  source 1..75: mol_type = other DNA
atgcaatatcttgtgatggtgactgattatgggtttaattggtcagcaacacaagatgtttcgaaaagtaagaat

SEQ ID NO: 273219 - DNA, 75 bp, synthetic construct
  source 1..75: mol_type = other DNA
tgagcagcaagggcagttatttgtacacagagctcatcagggatatgtcagtgagagaacagcattgattaatcg

SEQ ID NO: 273220 - DNA, 75 bp, synthetic construct
  source 1..75: mol_type = other DNA
gtatgggtggccgtcatgggaaaaatgatgctgcagatgccgctgccatttgtgaagctgttacccgtcctaata

SEQ ID NO: 273221 - DNA, 75 bp, synthetic construct
  source 1..75: mol_type = other DNA
tatcatcgattatttcaaaaatcacaagcctatcaccccagacttaactaaacgagtcatggacgtcgccaaata

SEQ ID NO: 273222 - DNA, 75 bp, synthetic construct
  source 1..75: mol_type = other DNA
cctggagtctgcatagcgccatcgaagaagtgatggcggaagtggatattctgtatatgacccgcgtgcaaaaag

SEQ ID NO: 273223 - DNA, 75 bp, synthetic construct
  source 1..75: mol_type = other DNA
ccacctgcctggcaaatgaaagcggcttcgctaatgcacatcatgctttatataaccttccttgcacttcctctg

SEQ ID NO: 273224 - DNA, 75 bp, synthetic construct
  source 1..75: mol_type = other DNA
ttgatgataaatacgcaaaagctattaatattttaaaggaaaatctcaaagaaaactatcatgtgttttatggga

SEQ ID NO: 273225 - DNA, 75 bp, synthetic construct
  source 1..75: mol_type = other DNA
atgcgagaaacacattacaatgcgggtatattcgtttgggtgttaatgttttcacgcctgattataaaacaccgt

SEQ ID NO: 273226 - DNA, 75 bp, synthetic construct
  source 1..75: mol_type = other DNA
accaccgactatttgcaacagtgccctttcgactacctcccctcaaagccatatcacgtacgttaatcctgactt

SEQ ID NO: 273227 - DNA, 75 bp, synthetic construct
  source 1..75: mol_type = other DNA
ccactcaggttattcatgagcttgaaggtcaaagtaacgagatatcaaaagttcttgacgttatacgagggatcg

SEQ ID NO: 273228 - DNA, 75 bp, synthetic construct
  source 1..75: mol_type = other DNA
ggccgctcatggatggggctagtaaaaaatcgctgtaaaaatggcgaccactattgggtaagtgcttatgtaacg

SEQ ID NO: 273229 - DNA, 75 bp, synthetic construct
  source 1..75: mol_type = other DNA
tatttggcctcatcgcccgcgaagtggatgtacaccggaaagcagcggaagccaaaggcgataaagaatattcat

SEQ ID NO: 273230 - DNA, 75 bp, synthetic construct
  source 1..75: mol_type = other DNA
cggcgcgatcccggcgctggccatcgccatcgccgcccctaacaaaaaagttgccgagaacatcatcatcggcaa

SEQ ID NO: 273231 - DNA, 75 bp, synthetic construct
  source 1..75: mol_type = other DNA
cggaatgccttgagtattttttcagttctctttatcgcagggagtttgttaagactctacgtctgaatgaatgca

SEQ ID NO: 273232 - DNA, 75 bp, synthetic construct
  source 1..75: mol_type = other DNA
atgtgtatccaccttaacttaatgatttttaccaaaatcattaggggattcatcagagcattgcatgattatatt

SEQ ID NO: 273233 - DNA, 75 bp, synthetic construct
  source 1..75: mol_type = other DNA
agccacgacgccaacgaagtcgacagtgaattgcttgcgcagacgcgtgaatacctggagatgctcgacaacagt

SEQ ID NO: 273234 - DNA, 75 bp, synthetic construct
  source 1..75: mol_type = other DNA
gaggattttaaacgctggtcaatggccttgcgcacaacggatcagatcctttcctatgaccgggcatccgtattc

SEQ ID NO: 273235 - DNA, 75 bp, synthetic construct
  source 1..75: mol_type = other DNA
gaaaatacgctgcaacaggccgtggggttgcccgatcagaaaacgcttaaggaaggtgcgaacaagtccctgata

SEQ ID NO: 273236 - DNA, 75 bp, synthetic construct
  source 1..75: mol_type = other DNA
tgcctccaaagatcccgcaaaaacctggcaacaatatgaagcctctggtggcaagcttaagctaaacgtgcctgc

SEQ ID NO: 273237 - DNA, 75 bp, synthetic construct
  source 1..75: mol_type = other DNA
gaaaatacgctgcaacaggccgtggggttgcccgatcagaaaacgcttaatactgatgaatcccctaatgatttt

SEQ ID NO: 273238 - DNA, 75 bp, synthetic construct
  source 1..75: mol_type = other DNA
tcttgaccacattgagaagcagctgcaggcggtagccagacagaatgaaacctgtcagcggttactgaacatccc

SEQ ID NO: 273239 - DNA, 75 bp, synthetic construct
  source 1..75: mol_type = other DNA
ggcctctaaagatcccgcaaaaacctggcaagaatatgaagcctctggcggcaaacttaagctaaatgtgcctac

SEQ ID NO: 273240 - DNA, 75 bp, synthetic construct
  source 1..75: mol_type = other DNA
ctctgcttcctacaatcgcctttgcagaggaacttcctgctccggtaaaagcgattgaaaaacagggcattaaga

SEQ ID NO: 273241 - DNA, 75 bp, synthetic construct
  source 1..75: mol_type = other DNA
atggctgccgtaaatgagtccgatcccgacaaggcttttgcgaaaggcatggttgaaccgccccgggtttcctgg

SEQ ID NO: 273242 - DNA, 75 bp, synthetic construct
  source 1..75: mol_type = other DNA
tcacttcatcaatgagcacacgggtgaagtggttgataaacagttgcgtagacaggattttctgacgttcttcgg

SEQ ID NO: 273243 - DNA, 75 bp, synthetic construct
  source 1..75: mol_type = other DNA
gaaaacgaactcaataagatacgcgaaaaacaacttcaggcattaagtgatgctgattcagcaaaggaacgttaa

SEQ ID NO: 273244 - DNA, 75 bp, synthetic construct
  source 1..75: mol_type = other DNA
ttggttggggttatcaagccggccttgttgatcaaatccaaagttggatggtcgctccccaacccgccgggcggg

SEQ ID NO: 273245 - DNA, 75 bp, synthetic construct
  source 1..75: mol_type = other DNA
aaaggtcgggcagcaatggagcgggagttccctgaagcactggagcgaatgaaagagagattgccaccgtatctc

SEQ ID NO: 273246 - DNA, 75 bp, synthetic construct
  source 1..75: mol_type = other DNA
tcgccatggcaaacaagctggcacgaacagtatgggcgataaccgcccatgaccataagtatgacaggaaccacg

SEQ ID NO: 273247 - DNA, 75 bp, synthetic construct
  source 1..75: mol_type = other DNA
atccgtttaaaaccgagagcaaccgggctacgggtgtcatcagtagcaatacggtgacgcgtccggcagcgcgcg

SEQ ID NO: 273248 - DNA, 75 bp, synthetic construct
  source 1..75: mol_type = other DNA
ttggggattaaacttgccgaaacgcacaacaaaggttatcgctggcagcatgaagccgttattgcccttgcctcc

SEQ ID NO: 273249 - DNA, 75 bp, synthetic construct
  source 1..75: mol_type = other DNA
tgcacaaacgttgcggctggtggtcgacctcaccgaaaatggtaaaaccgaagcggtgaagcgccagaatggtag

SEQ ID NO: 273250 - DNA, 75 bp, synthetic construct
  source 1..75: mol_type = other DNA
gatatcccgtcagtactggtcgaaaccggttttatcagcaacaacagcgaagaacgtttgctggcgagcgacgat

SEQ ID NO: 273251 - DNA, 75 bp, synthetic construct
  source 1..75: mol_type = other DNA
ctcagggattgttgaatccagttacacaagctatttatcccagagtaagtgcattgtatgagattgattacgtaa

SEQ ID NO: 273252 - DNA, 75 bp, synthetic construct
  source 1..75: mol_type = other DNA
tatccattaataataatgtattctgctaatggtgctgcaatttctttattagtcacggagttgtttgttacagct

SEQ ID NO: 273253 - DNA, 75 bp, synthetic construct
  source 1..75: mol_type = other DNA
aaaagaatatcagcaaccgatcagcgggcaactgttactgaaaaaagatagccatttgcccatttccggctccat

SEQ ID NO: 273254 - DNA, 75 bp, synthetic construct
  source 1..75: mol_type = other DNA
cacaacaggtgtcatcagcagcaatacggtaacgcgtccggcagcgcgcgcgacggctaacactggcgataaaat

SEQ ID NO: 273255 - DNA, 75 bp, synthetic construct
  source 1..75: mol_type = other DNA
cgttgaaacacctacggttgtcgcaccgcgcgtaagtgaacctgcgcgcaatccgtttaaaactgaaagcaaccg

SEQ ID NO: 273256 - DNA, 75 bp, synthetic construct
  source 1..75: mol_type = other DNA
caggatcctggcgctatcggccccggtggtacgcgggagaaaaatgtcaccatcgccatcgcgcgtaaattgcgt

SEQ ID NO: 273257 - DNA, 75 bp, synthetic construct
  source 1..75: mol_type = other DNA
tggttgcgaaacgcgttgaaacgcctgcggttgtcgcaccgcgcgtcagcgaaccggcgcgcaatccgtttaaaa

SEQ ID NO: 273258 - DNA, 75 bp, synthetic construct
  source 1..75: mol_type = other DNA
cgtagtgccaccggtgcctctgtatgggtgctctcaaaccgtcgcgccaacagcgaaatggcaagctggctggaa

SEQ ID NO: 273259 - DNA, 75 bp, synthetic construct
  source 1..75: mol_type = other DNA
tgacggggattactttatctcggtgatggggcgcagtgatgtggcacgtaagcaaaacgccaatttcctcgtgtc

SEQ ID NO: 273260 - DNA, 75 bp, synthetic construct
  source 1..75: mol_type = other DNA
aagcggcatgatgttacgtttacgttctgatagcggaaaacgtcagcatttgtggctggcagcagacagcatgga

SEQ ID NO: 273261 - DNA, 75 bp, synthetic construct
  source 1..75: mol_type = other DNA
ccaggtcattaaaccgctgacccttgatgtggcggatggtgaatttatcgtgatggtcgggccgtctggctgcgg

SEQ ID NO: 273262 - DNA, 75 bp, synthetic construct
  source 1..75: mol_type = other DNA
gtattgagctgccgctaaacggtggctaccgtcagtatgccgggcgtaaaatgactctcgcattcgcccggaaca

SEQ ID NO: 273263 - DNA, 75 bp, synthetic construct
  source 1..75: mol_type = other DNA
cacaccagttgaagtgtacgaaaagcccgccagcctgtttgtggcgagttttatcggcagtccggcgatgaatct

SEQ ID NO: 273264 - DNA, 75 bp, synthetic construct
  source 1..75: mol_type = other DNA
ggccggggcaggcaaccaaccccaatacgctcaagacgcgacgccaagcggctcgcagggcgcttcctgagcttg

SEQ ID NO: 273265 - DNA, 75 bp, synthetic construct
  source 1..75: mol_type = other DNA
gttgggtagtgaacgaatacgccaagggaaaatgggagatcaagaggcctggccccacggcaactgcacccgttt

SEQ ID NO: 273266 - DNA, 75 bp, synthetic construct
  source 1..75: mol_type = other DNA
agaggctctggaaagtctctatcattgcgcaaaatggaaggaagcggcagggcttccgattgctgtccgagtacg

SEQ ID NO: 273267 - DNA, 75 bp, synthetic construct
  source 1..75: mol_type = other DNA
tcggggcggactgctggctggatgagtcagtgaacgataaagactctctgaaagccgggaagctcaccatcgact

SEQ ID NO: 273268 - DNA, 75 bp, synthetic construct
  source 1..75: mol_type = other DNA
atcactgatgtgctgaccgccagcggtaaagcgggtgagtccggcacgctggcccgttcgctggatgctatcgct

SEQ ID NO: 273269 - DNA, 75 bp, synthetic construct
  source 1..75: mol_type = other DNA
atcactgacgtgctgaccgccagcggtaaagcgggtgagtccggtacgctggcccgttcgctggacgccatcgct

SEQ ID NO: 273270 - DNA, 75 bp, synthetic construct
  source 1..75: mol_type = other DNA
agctttccggcgggcagcgccagcgcgtggcaatggggcgcgcgattgtgcgcgatccggcggtatttttgtttg

SEQ ID NO: 273271 - DNA, 75 bp, synthetic construct
  source 1..75: mol_type = other DNA
cccgccagcctgtttgtggcgagttttatcggcagtccggcgatgaacctgctgacaggccgcgtgaataacgaa

SEQ ID NO: 273272 - DNA, 75 bp, synthetic construct
  source 1..75: mol_type = other DNA
acgactacacgcctgtgccgccgcttgaaaatctgatgctgcgccagcgcatcaccgatcgctacctggtcgatt

SEQ ID NO: 273273 - DNA, 75 bp, synthetic construct
  source 1..75: mol_type = other DNA
gtcgatagtggtgggggggcccagcacatacaggactgcctccagcggctttggaaggtatccatcatcgcccag

SEQ ID NO: 273274 - DNA, 75 bp, synthetic construct
  source 1..75: mol_type = other DNA
gcgacgatctgctgggcgatgcctatgaatatctgatgcgtcacttcgcaaccgaatccggtaagagtaaagggc

SEQ ID NO: 273275 - DNA, 75 bp, synthetic construct
  source 1..75: mol_type = other DNA
cgaactgcgtggcgggatggacgccagccagtacaaagactatgtactgaccctgctgtttatgaagtacgtttc

SEQ ID NO: 273276 - DNA, 75 bp, synthetic construct
  source 1..75: mol_type = other DNA
gccgccatagttatatttatcgtggcttcaccattcataaatgcccgcgcaatgccattacgatgaaaacggcat

SEQ ID NO: 273277 - DNA, 75 bp, synthetic construct
  source 1..75: mol_type = other DNA
ccctgctcccgaaactcatctccggtgagctatccctggaagatcttccggatctcaccaccgatacagaagctg

SEQ ID NO: 273278 - DNA, 75 bp, synthetic construct
  source 1..75: mol_type = other DNA
catggtgaaatgtgggtgcccatgccgggcgatgcggcctgcgtttggttgagcgacactcacgagcaagtcaat

SEQ ID NO: 273279 - DNA, 75 bp, synthetic construct
  source 1..75: mol_type = other DNA
aagctgaaggccgcggaatataaattccagctgtctgcggaaacgctattctcccggcgcaagattgttctgata

SEQ ID NO: 273280 - DNA, 75 bp, synthetic construct
  source 1..75: mol_type = other DNA
taaggaattatacgaggaagctgacgcatgccattatgatatttatgaaggcgcgttttttgaacgtgtggcggc

SEQ ID NO: 273281 - DNA, 75 bp, synthetic construct
  source 1..75: mol_type = other DNA
ttcctgttgttcccctaagtgttgaaaatcccattgaattaacgctgaccgactgggtacgtgatggtagtgctc

SEQ ID NO: 273282 - DNA, 75 bp, synthetic construct
  source 1..75: mol_type = other DNA
cgaggcggacgggcgcctgtacgtggccctgaaccccttgatcgcgcaggccgtcatgggtggcggccagcatgt

SEQ ID NO: 273283 - DNA, 75 bp, synthetic construct
  source 1..75: mol_type = other DNA
cgtcgtcgggtgatattcaatttttcggaagttgtacaggagaacgaacgcgatccaatgctggcggaaaaaata

SEQ ID NO: 273284 - DNA, 75 bp, synthetic construct
  source 1..75: mol_type = other DNA
ggacggctccggtatcactgacgaacggcaatttaggggcagcctgtgtcaccgctgtcacttacggcttccttc

SEQ ID NO: 273285 - DNA, 75 bp, synthetic construct
  source 1..75: mol_type = other DNA
ccttttactgagttccctgaacaagagtggaatgatgtgatcgcagtaaaccagaccgccgtgttcctggtgtcg

SEQ ID NO: 273286 - DNA, 75 bp, synthetic construct
  source 1..75: mol_type = other DNA
ctggtttggctcattgccggtagtgccggaaggatgtaaagccagtccgttattaggcgaaaaaggctgtgagac

SEQ ID NO: 273287 - DNA, 75 bp, synthetic construct
  source 1..75: mol_type = other DNA
ctaccaatttagataaaccggaagggcgactggatattatcgcctggccgggatacatcgaacgcggacaaactg

SEQ ID NO: 273288 - DNA, 75 bp, synthetic construct
  source 1..75: mol_type = other DNA
atcgccttctggaaaacgcccatcgcagaagggggaaaatttgtcccatatagccgctggacgcaggattacatt

SEQ ID NO: 273289 - DNA, 75 bp, synthetic construct
  source 1..75: mol_type = other DNA
gtcacgacacgaaggcggtagctactgagttgctgagtgtggcgcaaagcctgcgtggatttgcttacctgtcag

SEQ ID NO: 273290 - DNA, 75 bp, synthetic construct
  source 1..75: mol_type = other DNA
cggtccggtttgggcgagggcaggttacattcagccaactggtcaaacgctgttagcgccgcactggagctttat

SEQ ID NO: 273291 - DNA, 75 bp, synthetic construct
  source 1..75: mol_type = other DNA
atgagcaagacatttgcccgcagcagcctgtgtgcgctcagcatgacaataatgaccgctcacgccgccgaaccg

SEQ ID NO: 273292 - DNA, 75 bp, synthetic construct
  source 1..75: mol_type = other DNA
gaatgttttctgtgggcaatacattaatggctgagttatttaattatattatgcaggataggcgtcatgtgaata

SEQ ID NO: 273293 - DNA, 75 bp, synthetic construct
  source 1..75: mol_type = other DNA
ggtgtggttaatccgttgatgcgcctgccgcgcagtaatctgctcaccgtcggttaccgcattcatgacggttat

SEQ ID NO: 273294 - DNA, 75 bp, synthetic construct
  source 1..75: mol_type = other DNA
cgcaccaaaaaattcgctaacaccactaaagggcacgatgagctggtgagctggctgaaaggtcacaagattgac

SEQ ID NO: 273295 - DNA, 75 bp, synthetic construct
  source 1..75: mol_type = other DNA
ccatgctaatgcagaatttttctgataatctgctgtttatcatgatcgccagtgtgtcgtttatctacttactga

SEQ ID NO: 273296 - DNA, 75 bp, synthetic construct
  source 1..75: mol_type = other DNA
gacgttggcagggatcttaccgctgttgtttacgcgtgtgctgaatcagcaggctgaaaaccatgattcgacgtc

SEQ ID NO: 273297 - DNA, 75 bp, synthetic construct
  source 1..75: mol_type = other DNA
cgtaaccgtgggcggttacttgccgcctatatgatggtttattatgtggggacgtttttaggccagttactgctc

SEQ ID NO: 273298 - DNA, 75 bp, synthetic construct
  source 1..75: mol_type = other DNA
gctggcaaagttaagagcgtggtttgacgacccgctctttgtgaactcaccgctgggtctgtcgcccacaccgct

SEQ ID NO: 273299 - DNA, 75 bp, synthetic construct
  source 1..75: mol_type = other DNA
aaaaaacaggcatgaaagccctgttatctgcccagacacagctcggtgttaaaccgcgcattctcggcgtgccag

SEQ ID NO: 273300 - DNA, 75 bp, synthetic construct
  source 1..75: mol_type = other DNA
gttaaccgaaggcaagaaagacaccaccatcttcttccgagcggataaaaccgtcgattacgagacgttgatgaa

SEQ ID NO: 273301 - DNA, 75 bp, synthetic construct
  source 1..75: mol_type = other DNA
tgcggttccaccgcgttcctgctcggacgggaaatgtgtggcaagccggtgcaaatcatcactaattacctacct

SEQ ID NO: 273302 - DNA, 75 bp, synthetic construct
  source 1..75: mol_type = other DNA
gtaaagcgggtgagtccggtacgctggcccgttcgctggatgccatcgctgaccaggcaaaacccgtgaccattg

SEQ ID NO: 273303 - DNA, 75 bp, synthetic construct
  source 1..75: mol_type = other DNA
gaccaggcaaaacccgtgaccgttgttgtgcgcgtgccgcagggtgaaacggaagaagaaaccacgaccaatatc

SEQ ID NO: 273304 - DNA, 75 bp, synthetic construct
  source 1..75: mol_type = other DNA
tgagttgctgagtgtggcgcaaagcctgcgtgggtttgcctacctgtcagcgtatggctgcaagacggtacagga

SEQ ID NO: 273305 - DNA, 75 bp, synthetic construct
  source 1..75: mol_type = other DNA
ttgtgcgtgtgccgcaaggtgaaacggaagacgaaaccacgaccaatatcatcggcgctgtgactgctgaaggta

SEQ ID NO: 273306 - DNA, 75 bp, synthetic construct
  source 1..75: mol_type = other DNA
cgaagggattcgcgccaaactgcgcagcctgaaaacgcagggctatatcattggtgcggactgctggctggatga

SEQ ID NO: 273307 - DNA, 75 bp, synthetic construct
  source 1..75: mol_type = other DNA
cgtactgaacgccgagacaacggcgtatgtcactgcccgggcgcttggtctgcgcgccaaaattgacgagcagac

SEQ ID NO: 273308 - DNA, 75 bp, synthetic construct
  source 1..75: mol_type = other DNA
tgcggttccaccgcattcctgcttgggcgggaaatgtgtggcaagccagtgcaaattatcactaattatctgccg

SEQ ID NO: 273309 - DNA, 75 bp, synthetic construct
  source 1..75: mol_type = other DNA
gccacgacaccaaggcggtagctactgagttgctgagcgtggcgcaaagcctgcgtgggtttgcttacctgtcag

SEQ ID NO: 273310 - DNA, 75 bp, synthetic construct
  source 1..75: mol_type = other DNA
gcaggacccggcaaccgatgcaggtctgctgaaccagaacgatgtcaccacgcttgtgcgcaaggacggtttccg

SEQ ID NO: 273311 - DNA, 75 bp, synthetic construct
  source 1..75: mol_type = other DNA
tgttgctggcgtggcagtggtacggcgattacagtcgtgcggcagaactgcaacgcctgaacccgcagttacgtg

SEQ ID NO: 273312 - DNA, 75 bp, synthetic construct
  source 1..75: mol_type = other DNA
tactgaatgaccaggacgggctgaaaacccgcgtcagccttgcaccacgcgaaggctttctggtgccggttgaaa

SEQ ID NO: 273313 - DNA, 75 bp, synthetic construct
  source 1..75: mol_type = other DNA
ggacacgcaaggacgggcaactctggatgccgaacctgctggtcactattgatgcctcgaaatatgccatcaaaa

SEQ ID NO: 273314 - DNA, 75 bp, synthetic construct
  source 1..75: mol_type = other DNA
gatatggatgaatttgttgcgttgcctgttaccctggtcagtggcgataaagtagcggaggtggcacttcctgcg

SEQ ID NO: 273315 - DNA, 75 bp, synthetic construct
  source 1..75: mol_type = other DNA
agcgaacccggaaagtttatcggcgggctggcagaggtgctggaaatccacacgtcagatgtcgggcacgcggtg

SEQ ID NO: 273316 - DNA, 75 bp, synthetic construct
  source 1..75: mol_type = other DNA
caacgtctgaacccgcagctgcgtgacccgaacaacataaccgccgggatggtgattaatgcctacgcaaaataa

SEQ ID NO: 273317 - DNA, 75 bp, synthetic construct
  source 1..75: mol_type = other DNA
gtaactaatcctgctgcggctaccgtgggcactccggcagaaactgacgcggagttacgtatccgccagtcgcaa

SEQ ID NO: 273318 - DNA, 75 bp, synthetic construct
  source 1..75: mol_type = other DNA
cggcaacagccgccgctggcagtattttgtccgcagaaacaatatccccgatccggtttttgttccgggtggccg

SEQ ID NO: 273319 - DNA, 75 bp, synthetic construct
  source 1..75: mol_type = other DNA
tacggtcatatcacactgaaagcctttacgggctacacgtcgcaaattggcgtacagattcagcaggccgtcgcg

SEQ ID NO: 273320 - DNA, 75 bp, synthetic construct
  source 1..75: mol_type = other DNA
gttaaaaatgcacaaattgcctcggtgaaaatgcaatacattgatgagcaaaaaaagctggcggtgatgagcatc

SEQ ID NO: 273321 - DNA, 75 bp, synthetic construct
  source 1..75: mol_type = other DNA
gtaaccaatcctgctgcagctactgtgggcactccggcagaaactgacgcggagttacgtatccgccagtcgcaa

SEQ ID NO: 273322 - DNA, 75 bp, synthetic construct
  source 1..75: mol_type = other DNA
ctacggttgatttgctctacaggaactgccggaacaaccatcattaatggcagcgtgaaagacagtaatagtgtg

SEQ ID NO: 273323 - DNA, 75 bp, synthetic construct
  source 1..75: mol_type = other DNA
gcattaccgccgcgcacccatcgtttgctgttggtggaactggaaggggaaaatggattgctgatgtcggtttcg

SEQ ID NO: 273324 - DNA, 75 bp, synthetic construct
  source 1..75: mol_type = other DNA
gcaaatcattactaattatctaccgctggcgaattacctgatcgatcaggagcatgacagcgtgattatcatggg

SEQ ID NO: 273325 - DNA, 75 bp, synthetic construct
  source 1..75: mol_type = other DNA
atgaatctgcatcaggcgcagaatcacgatgaaaaagtacgtattgctaaagcggcctcgcagctggttaatccg

SEQ ID NO: 273326 - DNA, 75 bp, synthetic construct
  source 1..75: mol_type = other DNA
ttcctggtcctgttaaccttccgtgccgccgcagcggacacgttattgattctgggtgatagcctgagcgccggg

SEQ ID NO: 273327 - DNA, 75 bp, synthetic construct
  source 1..75: mol_type = other DNA
tcgcttgttgatggacgggcgtttgcgttggcaagggcaggagtggagcatcgtcaaagcgccgtggatgattaa

SEQ ID NO: 273328 - DNA, 75 bp, synthetic construct
  source 1..75: mol_type = other DNA
aatccgccccggcgatattttccgggataactacggcggcacggtaacgattaaaagtattgccggacggtgcgt

SEQ ID NO: 273329 - DNA, 75 bp, synthetic construct
  source 1..75: mol_type = other DNA
ataaaacatgtcctgcatggcattagtttgttggggcagtgcccggatagcatcaacgctgcgctgatttgccgt

SEQ ID NO: 273330 - DNA, 75 bp, synthetic construct
  source 1..75: mol_type = other DNA
cggaatctgtaagcaagctcattacaaataaaacgaaagcaataattgttgtacactatgccggtgtagcatgcg

SEQ ID NO: 273331 - DNA, 75 bp, synthetic construct
  source 1..75: mol_type = other DNA
ttatattatatgcagtgaccttaaaaaacgctcagaacttatttcttatttaaaggagagtggaatacattccgt

SEQ ID NO: 273332 - DNA, 75 bp, synthetic construct
  source 1..75: mol_type = other DNA
aaaaaataagtttgcaaaatagtgataaattcgctgattgtctgttaaggctgccaatgtattatgaactggagt

SEQ ID NO: 273333 - DNA, 75 bp, synthetic construct
  source 1..75: mol_type = other DNA
atgaaacagaaaaattctggctttactgccagtggcctcgctcggcctgaaatccgccccggcgatattttccgg

SEQ ID NO: 273334 - DNA, 75 bp, synthetic construct
  source 1..75: mol_type = other DNA
atgaacatgaaaaaaactggcttaactgccagcggcaagcctcgccctgaatttaagcgcggtgatatttaccgc

SEQ ID NO: 273335 - DNA, 75 bp, synthetic construct
  source 1..75: mol_type = other DNA
gaagagttctacctggaactgaaagaaggcttactggagccgctggcggtgacggaacggctggccattatctcg

SEQ ID NO: 273336 - DNA, 75 bp, synthetic construct
  source 1..75: mol_type = other DNA
ggtcagcttgacaccaattttaaaattggtcgtcgtgcagcgttgcgtgaaattgaagatgtgaaacacgatacg

SEQ ID NO: 273337 - DNA, 75 bp, synthetic construct
  source 1..75: mol_type = other DNA
taatgccatcagtgccacgatcacaggtcagcttgacaccaattttaaaattggtcgtcgtgcagcgttgcgtga

SEQ ID NO: 273338 - DNA, 75 bp, synthetic construct
  source 1..75: mol_type = other DNA
cggcgaaatagagccggaagagcgcaaggcgctggaagagattgcctgtgttctgggccttcgtctggagaatca

SEQ ID NO: 273339 - DNA, 75 bp, synthetic construct
  source 1..75: mol_type = other DNA
tccggtaagacgcaaaacctgtccgttaatgtgggtggtcgggctgaagtgcatgctggtacgctggaaaacgcg

SEQ ID NO: 273340 - DNA, 75 bp, synthetic construct
  source 1..75: mol_type = other DNA
cgaaattgagccggaagagcgcaaggtgctggaagagattgccggtgttctgggtcttcgtctggagaattacct

SEQ ID NO: 273341 - DNA, 75 bp, synthetic construct
  source 1..75: mol_type = other DNA
cccgcagagcggcaacggaaattaaaaagtttgagaaacgcgatctggcacaggcggtgattaacgctgcatacc

SEQ ID NO: 273342 - DNA, 75 bp, synthetic construct
  source 1..75: mol_type = other DNA
gcaccgccgaatgaaaacaacactgacgcctacattaatgaggtgtctaaagccgttggtgtaaccgcagacatg

SEQ ID NO: 273343 - DNA, 75 bp, synthetic construct
  source 1..75: mol_type = other DNA
ttgcccgaaaaggtgggatgcgcagcgatggaacatatcctgatgccagtaataatgcggaagctttttatatta

SEQ ID NO: 273344 - DNA, 75 bp, synthetic construct
  source 1..75: mol_type = other DNA
ttagcaatatcaagaaataatgaaaataatagaatattattaaaactccgcgacaccctgctcccgaaactcatc

SEQ ID NO: 273345 - DNA, 75 bp, synthetic construct
  source 1..75: mol_type = other DNA
gtcgtcgagcggcgttacgtgagatcgaggatgtgaaacacgatacgcgtgaagcggaagacgtgctggatgtgg

SEQ ID NO: 273346 - DNA, 75 bp, synthetic construct
  source 1..75: mol_type = other DNA
tggtgatggtggatttcaccagcagaatcatgtcggtgctggcggatggggtgctggtctgcggcattgtggtat

SEQ ID NO: 273347 - DNA, 75 bp, synthetic construct
  source 1..75: mol_type = other DNA
atgtttggaatcttcaaaaagaaaacccgcagagcggcagcggaaattaaaaagtttgaaaaacgcgatctggcc

SEQ ID NO: 273348 - DNA, 75 bp, synthetic construct
  source 1..75: mol_type = other DNA
aaataccgtggtcacgggggccggttggttgaaagtggcaaccggtgggatcgccaaatgcacacagtacggcaa

SEQ ID NO: 273349 - DNA, 75 bp, synthetic construct
  source 1..75: mol_type = other DNA
gacgatctctttgccgcacgcgtggcgaaggctcgtgatgagggcaaagttttgcgctatgttggcaatattgat

SEQ ID NO: 273350 - DNA, 75 bp, synthetic construct
  source 1..75: mol_type = other DNA
gcttatcggcaacggtaaccgctgaggggataagtgcgcccgactatcagaccgttctggacaccatcactggtt

SEQ ID NO: 273351 - DNA, 75 bp, synthetic construct
  source 1..75: mol_type = other DNA
ataccactgatgcaaatggcctgccgccgcactcaatcgcggccattgtagaaggtggtgatgcgacagtcattg

SEQ ID NO: 273352 - DNA, 75 bp, synthetic construct
  source 1..75: mol_type = other DNA
gaactggtgcttaatgcgctggtggcgattcgttacctcaaaccgcaaatgccgaaaagctggcattttgtttct

SEQ ID NO: 273353 - DNA, 75 bp, synthetic construct
  source 1..75: mol_type = other DNA
cgggcgatgcggcctgcgtttggttgagcgacactaacgagcaagtgaatttactggtcgttgaatctggcgaga

SEQ ID NO: 273354 - DNA, 75 bp, synthetic construct
  source 1..75: mol_type = other DNA
cttttgaagaaaagtgccgcgattttaatttatctaaagaacaaaaagccgaactggtgctgaatgcactggtag

SEQ ID NO: 273355 - DNA, 75 bp, synthetic construct
  source 1..75: mol_type = other DNA
cggatacatatgccgatgcggatggtggcgttccctggaatgccgaatcaggcgcttataatgtcacccgctctg

SEQ ID NO: 273356 - DNA, 75 bp, synthetic construct
  source 1..75: mol_type = other DNA
tgtggctgcttttgccagaagggcaacggatacatatgccgatgcggatggtggcgttccctggaatgccgaatc

SEQ ID NO: 273357 - DNA, 75 bp, synthetic construct
  source 1..75: mol_type = other DNA
ggaggcatttctgcagtctgctggtaataatgcaaaagcgatcctgcctgcggttgattctgctacgcaagaaat

SEQ ID NO: 273358 - DNA, 75 bp, synthetic construct
  source 1..75: mol_type = other DNA
ttcgtagccattaccctgaaagtttttaccgggtatacctctcaaatcggcgagcagatcaaacaggctgttgcc

SEQ ID NO: 273359 - DNA, 75 bp, synthetic construct
  source 1..75: mol_type = other DNA
gcccggccaccgcggcggcaatcctcgcgtctaaagatccggcaaaaacgtggcaagagtatgaggcatctggcg

SEQ ID NO: 273360 - DNA, 75 bp, synthetic construct
  source 1..75: mol_type = other DNA
acagcgacgaaattgaagttgagagcgaagaaaaagagcgcggcaaaaaaatagaaatagatgaagaccgactcc

SEQ ID NO: 273361 - DNA, 75 bp, synthetic construct
  source 1..75: mol_type = other DNA
aagacaaaaattatttagtttctcttttttggcgattcaggagtttatgcgttttgctaccgtaagctgctcaat

SEQ ID NO: 273362 - DNA, 75 bp, synthetic construct
  source 1..75: mol_type = other DNA
cgtaaagagtctcgcggcgcgcaccagcgtctggacgaaggttgcaccgagcgtgacgacgtcaacttcctcaaa

SEQ ID NO: 273363 - DNA, 75 bp, synthetic construct
  source 1..75: mol_type = other DNA
ttacgacatcggtatatcgacgatttatcgttatcaccctgtaggcgatatacaggctgaagaaacaaccaggca

SEQ ID NO: 273364 - DNA, 75 bp, synthetic construct
  source 1..75: mol_type = other DNA
tatttacggggtagggttatcgacgctttaccgatactttcctgtggatggtcagtggaaggataacgcagtagg

SEQ ID NO: 273365 - DNA, 75 bp, synthetic construct
  source 1..75: mol_type = other DNA
atggctaccgctatctgcaagactacggcatggggccagaaactccgctgggcgaaccgaaaaacaaatatatgg

SEQ ID NO: 273366 - DNA, 75 bp, synthetic construct
  source 1..75: mol_type = other DNA
ttggtctgcacggtgcaaaccgtctgggttccaactcgctggcagaactggtggtcttcggtcgtctggcgggtg

SEQ ID NO: 273367 - DNA, 75 bp, synthetic construct
  source 1..75: mol_type = other DNA
tgccggtaatggcaacgaagcggcaattgaagcgcaggcagctggcgttgaacaacgtctgaaagatctggttaa

SEQ ID NO: 273368 - DNA, 75 bp, synthetic construct
  source 1..75: mol_type = other DNA
gtggatgtaaaagaaaatgcttctctgaccctgacggggatgccttctgcgcagaaacaggggtattactcaccc

SEQ ID NO: 273369 - DNA, 75 bp, synthetic construct
  source 1..75: mol_type = other DNA
cagtattgataccagcaccccaatggccgtttcttttttcatgtcatgggtgccctggctgaaatggagcgtgaa

SEQ ID NO: 273370 - DNA, 75 bp, synthetic construct
  source 1..75: mol_type = other DNA
acttacaccagaacaatgggcacaagccggacgattaattgcatcaggagttcctcgccagaaggtggcgatcat

SEQ ID NO: 273371 - DNA, 75 bp, synthetic construct
  source 1..75: mol_type = other DNA
tgccattgataccagcacgccgatggggcgttttttctttcatgtgatgggggccctggctgaaatggaacgaga

SEQ ID NO: 273372 - DNA, 75 bp, synthetic construct
  source 1..75: mol_type = other DNA
atgaactggacggagtggacctgtttaccggtgtcacgatgacctataccgacagcagtgcagacagccatgcgt

SEQ ID NO: 273373 - DNA, 75 bp, synthetic construct
  source 1..75: mol_type = other DNA
gtctggaagctggacaggttggggcgcagtatgcggcatcttgttacgctgatagaggagttgcgccagcgtggt

SEQ ID NO: 273374 - DNA, 75 bp, synthetic construct
  source 1..75: mol_type = other DNA
gtggcgatgtggtatacctcgacctgcgtcacctgggtgagaaaaaactgcacgaacgtctgccgtttatctgcg

SEQ ID NO: 273375 - DNA, 75 bp, synthetic construct
  source 1..75: mol_type = other DNA
aagtgcgttaatagcggagacaccctggtcgtgtggaaactggacaggctgggacggagcgttaaaaacctgatc

SEQ ID NO: 273376 - DNA, 75 bp, synthetic construct
  source 1..75: mol_type = other DNA
atgctcatgcttattggctatgtacgcgtgtcaacaaatgaccagaatacggaattgcagcgtaacgcgctggag

SEQ ID NO: 273377 - DNA, 75 bp, synthetic construct
  source 1..75: mol_type = other DNA
accggggcttaaaaaactgttcaggacactatcggcaggagacactctggttgtctggaagctggacaggttggg

SEQ ID NO: 273378 - DNA, 75 bp, synthetic construct
  source 1..75: mol_type = other DNA
ggatgtgagctgatttttgaggataaaatcagcggcacgaagtccgacaggccggggctgaaaaaactgctcagg

SEQ ID NO: 273379 - DNA, 75 bp, synthetic construct
  source 1..75: mol_type = other DNA
gcaacgtaatgcactgaactgcgcgggatgtgagcggatttttgaggataaaatcagcggcacgaagtccgacag

SEQ ID NO: 273380 - DNA, 75 bp, synthetic construct
  source 1..75: mol_type = other DNA
tgacagtattgataccagtaccccaatgggccgtttcttttttcatgtcacgggtgccctggctgaaatggaacg

SEQ ID NO: 273381 - DNA, 75 bp, synthetic construct
  source 1..75: mol_type = other DNA
agtgtggcggccaaaaaatactgaaacggctatcagcatggggcaatccgctggtgcgatggtggtgaataaacc

SEQ ID NO: 273382 - DNA, 75 bp, synthetic construct
  source 1..75: mol_type = other DNA
acggcaatcagcatgggacaatccgcaggtgcgatggtggtgaataaaccatcttctggcggtcccgtgccttca

SEQ ID NO: 273383 - DNA, 75 bp, synthetic construct
  source 1..75: mol_type = other DNA
gttgaacaacgtctgaaagatctggttaaccaggatggcggcgaaaactgggcgaagatccgcgacgaaatgggc

SEQ ID NO: 273384 - DNA, 75 bp, synthetic construct
  source 1..75: mol_type = other DNA
agaaagcattgacaccaccacaccgggcgggcggctcatcttccacgtgttcggcgcgctgggccagttcgagcg

SEQ ID NO: 273385 - DNA, 75 bp, synthetic construct
  source 1..75: mol_type = other DNA
ggtcaccgtttttaatcttaacggtgctggtcaccatctggaccatgaagccgtttaaagcgttatttgctccgg

SEQ ID NO: 273386 - DNA, 75 bp, synthetic construct
  source 1..75: mol_type = other DNA
tgcaatggcgggacgtcagttgccgttcctgtcagttcttgtgccgttctggctggtggcgatgatggacggctg

SEQ ID NO: 273387 - DNA, 75 bp, synthetic construct
  source 1..75: mol_type = other DNA
tagaagaatgaaacacctcattgctctcacagaagagctacgcgcaaaaggtgtcaattttcgcagtctgacgga

SEQ ID NO: 273388 - DNA, 75 bp, synthetic construct
  source 1..75: mol_type = other DNA
ggcgagttggtggtcgcaggcctaagttcacgaatgagcaatggcgggaaatgggggagcggatggcaaccggtg

SEQ ID NO: 273389 - DNA, 75 bp, synthetic construct
  source 1..75: mol_type = other DNA
aatcagtggcacaaagtccgacagaccagggctgaaaaaactgctcaggacactaacggcaggagacactctggt

SEQ ID NO: 273390 - DNA, 75 bp, synthetic construct
  source 1..75: mol_type = other DNA
ttcatgagcgttttaccaccatcatgaaagaaaatggcctgaaggcgaacagcctctgtgttgagatcactgaaa

SEQ ID NO: 273391 - DNA, 75 bp, synthetic construct
  source 1..75: mol_type = other DNA
gacttttactggatcttaaggctcaggatacaaatgtcagtgaaccgacgattggaaatatacccccctttggtg

SEQ ID NO: 273392 - DNA, 75 bp, synthetic construct
  source 1..75: mol_type = other DNA
gttccgatattgcctatcagatttaccgggatttttctgaaaataaggggatttttgtacccggtaccaaagata

SEQ ID NO: 273393 - DNA, 75 bp, synthetic construct
  source 1..75: mol_type = other DNA
gggcgctttttctttcacgtaatgggggcgctggcagaaatggaacgtgagcttatcgttgaacgtacacgcgct

SEQ ID NO: 273394 - DNA, 75 bp, synthetic construct
  source 1..75: mol_type = other DNA
atgcttattggctatgtacgtgtgtcaacaaatgaccagaacaccgatctgcaacgtaatgcactgaactgcgcg

SEQ ID NO: 273395 - DNA, 75 bp, synthetic construct
  source 1..75: mol_type = other DNA
gagtaatcgaacatcttggctggtatgtctaccgcctgattgacccgagagatggcagtacgttctacgtaggga

SEQ ID NO: 273396 - DNA, 75 bp, synthetic construct
  source 1..75: mol_type = other DNA
ctctccggcgggggagaaaaggcggaaggccaccggcgatagatgcagaaaaggttgatcaaatcctcgcagctc

SEQ ID NO: 273397 - DNA, 75 bp, synthetic construct
  source 1..75: mol_type = other DNA
ggagttcctcgccagaaggtggcgatcatctatgatgttggtgtatcgacactatataagaagtttccggccgga

SEQ ID NO: 273398 - DNA, 75 bp, synthetic construct
  source 1..75: mol_type = other DNA
aagacaccgaacgctacaccgatttttatcgggtaggaagtggtacgcagtatattcagactccagagggaaaaa

SEQ ID NO: 273399 - DNA, 75 bp, synthetic construct
  source 1..75: mol_type = other DNA
tgaactgaaagccaaaaatatctgtattgagatcacggaaacggtgatcgaacgaattaatgagcatttctactt

SEQ ID NO: 273400 - DNA, 75 bp, synthetic construct
  source 1..75: mol_type = other DNA
gttgaccaccgaacagtgggcacagattggacgcttactcgaggccagagaatcaagacagcgtattgcactgat

SEQ ID NO: 273401 - DNA, 75 bp, synthetic construct
  source 1..75: mol_type = other DNA
caacaaatgaccagaacacagcattacagcgtaatgcgctggaatgtgcaggatgtgagctgatttttgaagaca

SEQ ID NO: 273402 - DNA, 75 bp, synthetic construct
  source 1..75: mol_type = other DNA
tagttaaggttgccggcggatatgcttttaaaacaggaggaaccacaggagttcctctgatatctgatgcaacaa

SEQ ID NO: 273403 - DNA, 75 bp, synthetic construct
  source 1..75: mol_type = other DNA
aaatcagtggcactaagtccgacagaccggggctgaaaaaactactcaggacactatcggcaggtgacactctgg

SEQ ID NO: 273404 - DNA, 75 bp, synthetic construct
  source 1..75: mol_type = other DNA
gcagagtaggtggacgccgtcctaagttgaccaccgaacagtgggcacagattggacgcttactcgaggccggag

SEQ ID NO: 273405 - DNA, 75 bp, synthetic construct
  source 1..75: mol_type = other DNA
actgatagttgaacgtaccagggcggggattgctgcagctcgcgacaaaggcagagtaggtggacgccgccctaa

SEQ ID NO: 273406 - DNA, 75 bp, synthetic construct
  source 1..75: mol_type = other DNA
tgctgatagccgctttgaacttattcaaaaaaacgttggctatttctttaaagatattgaacgttccgctctgac

SEQ ID NO: 273407 - DNA, 75 bp, synthetic construct
  source 1..75: mol_type = other DNA
gatgactctaacaacagctggaatccggcatacaattgctttgatcgtccgggtaaaaaatgtatctcttttacg

SEQ ID NO: 273408 - DNA, 75 bp, synthetic construct
  source 1..75: mol_type = other DNA
ctggcccgctataaccggattccagtaattgcagaaggcgttgagagcgaagaggttgcacgagaactaatcaaa

SEQ ID NO: 273409 - DNA, 75 bp, synthetic construct
  source 1..75: mol_type = other DNA
gtgttgatgaacgcaataaaatcgtcaggaaattgtgtcagcgaattgccgagaaatatgcgcaatgctgcgata

SEQ ID NO: 273410 - DNA, 75 bp, synthetic construct
  source 1..75: mol_type = other DNA
tcgtgaaggcgatgcgaaagagattatcagcatcaaaaattcgatcgcggaaatgaaagatgccgaaattgaacg

SEQ ID NO: 273411 - DNA, 75 bp, synthetic construct
  source 1..75: mol_type = other DNA
tgcgaaagagattatcagcatcaaaaattcgatcgcggaaatgaaagatgctgaagttgagcgttcaaataaatt

SEQ ID NO: 273412 - DNA, 75 bp, synthetic construct
  source 1..75: mol_type = other DNA
tctgggggaatacaccctgacggtcagggcgataaacagctacggccagcagggcgaacctgccaccaccacgtt

SEQ ID NO: 273413 - DNA, 75 bp, synthetic construct
  source 1..75: mol_type = other DNA
gacacgccgcgggtggtgaagggcgtgcgcttcagtctgcgcctgaccagtggcagtggtgaaaacagccgcctg

SEQ ID NO: 273414 - DNA, 75 bp, synthetic construct
  source 1..75: mol_type = other DNA
gattccgctacagtttcagcgccctgaaggaccgtcatactgcggtggaggtcagttacgtcgacccgcataacg

SEQ ID NO: 273415 - DNA, 75 bp, synthetic construct
  source 1..75: mol_type = other DNA
tgatgcggaagggtatctggactttttcagaggagaaatcgggaagacacatctggcacaggggatgtgggagct

SEQ ID NO: 273416 - DNA, 75 bp, synthetic construct
  source 1..75: mol_type = other DNA
gcagggacatcgacggtgaacctgattaacggcagcggtaagccggtgcgcgtggtcatcactgcacaccccgct

SEQ ID NO: 273417 - DNA, 75 bp, synthetic construct
  source 1..75: mol_type = other DNA
accggcagtgcagcacctgacggtggaggtgagcgcagctgacggtcagtatctggcgcaggcgaaatgggacac

SEQ ID NO: 273418 - DNA, 75 bp, synthetic construct
  source 1..75: mol_type = other DNA
atagctatgattcttggtcgccttgaaatttatcctgttattatattgttttcaggtttttttttggcgctccta

SEQ ID NO: 273419 - DNA, 75 bp, synthetic construct
  source 1..75: mol_type = other DNA
tagtgcattcccattgtggattgattctgaactaaatttaacgtttgttgatgccttgtttgaaggtgtttccgg

SEQ ID NO: 273420 - DNA, 75 bp, synthetic construct
  source 1..75: mol_type = other DNA
tattgccatgattttaggacgtcttgaaatttaccctgtcattatattgttttctggctttttctggcgctcttg

SEQ ID NO: 273421 - DNA, 75 bp, synthetic construct
  source 1..75: mol_type = other DNA
acctggctgcgctgtacatgctgaaggtgcagaaaacaaaaaacggcattccgtatgttgccggtataggtgcgg

SEQ ID NO: 273422 - DNA, 75 bp, synthetic construct
  source 1..75: mol_type = other DNA
gtgtttttgctgttgtcaagtttctttgggggatgtataggttcaacttgtggtggaattaagtcacttcgattt

SEQ ID NO: 273423 - DNA, 75 bp, synthetic construct
  source 1..75: mol_type = other DNA
accagacggtgccggatggtttcggggggaccgagccgcggatgacctttaatgcgtacctgtcacaacagcgta

SEQ ID NO: 273424 - DNA, 75 bp, synthetic construct
  source 1..75: mol_type = other DNA
ggcattccttatgtggccgggattggtgcagggattgaggatactgatggccagccactgagcaacatactgctg

SEQ ID NO: 273425 - DNA, 75 bp, synthetic construct
  source 1..75: mol_type = other DNA
gctggagtttgagaaatccgcctttggtaaatacaacgtggataacgcgataaacgcgaatttccggtatatgtt

SEQ ID NO: 273426 - DNA, 75 bp, synthetic construct
  source 1..75: mol_type = other DNA
atgccggtatggaacggccagacgctgacgttcgttcaggaccgcccgtcggatgtggtgtggccgtacaccaac

SEQ ID NO: 273427 - DNA, 75 bp, synthetic construct
  source 1..75: mol_type = other DNA
ttttaaaacggggggaacaataggaaccccacttatttctgatgcgaccattgtcactaatccaggacaaacgtt

SEQ ID NO: 273428 - DNA, 75 bp, synthetic construct
  source 1..75: mol_type = other DNA
acggtgctgaaatttataaccgtaccgcgctggataatacgctgatttacagtggcgttattgatatgcctgccg

SEQ ID NO: 273429 - DNA, 75 bp, synthetic construct
  source 1..75: mol_type = other DNA
ggtaagaatcagtgatgatcagaagtttgaccggcaggtcatgataccgccagtgttattccgcggtggtaagca

SEQ ID NO: 273430 - DNA, 75 bp, synthetic construct
  source 1..75: mol_type = other DNA
aatgtgaccattaaccagaactgccggatacttggaaaactgtctgccaaccagattgaaggcgatattgttaaa

SEQ ID NO: 273431 - DNA, 75 bp, synthetic construct
  source 1..75: mol_type = other DNA
gacgccggggtattttcagataacagcagtaccggtgctggcggtgtatgacccgacggtacagtatgaattctg

SEQ ID NO: 273432 - DNA, 75 bp, synthetic construct
  source 1..75: mol_type = other DNA
gcggcggatgtggacaaatgggcgctgtatgccatcgggcagtactgcgaccagacggtcccggatggtttcggg

SEQ ID NO: 273433 - DNA, 75 bp, synthetic construct
  source 1..75: mol_type = other DNA
tctggcatataggtatgtatgacttaactggaagtgttgttcattcgttttttcttgctagctccatgctcactg

SEQ ID NO: 273434 - DNA, 75 bp, synthetic construct
  source 1..75: mol_type = other DNA
gtggccatcagggaccattaccgtcagggtttatgacgatcagccgtttgaccggcagattgttattcccgcggt

SEQ ID NO: 273435 - DNA, 75 bp, synthetic construct
  source 1..75: mol_type = other DNA
gtgattgatgccatcggtgagggaccggtggaaggcccggtgaagggactgcagagtattctggtgaacaaaacc

SEQ ID NO: 273436 - DNA, 75 bp, synthetic construct
  source 1..75: mol_type = other DNA
gtgccctggctgaaatggaacgtgaattaattgttgaacgtacactggccggactggcggcagcgcgcgcacggg

SEQ ID NO: 273437 - DNA, 75 bp, synthetic construct
  source 1..75: mol_type = other DNA
agggataaaaattagcacatcaattggccgctttgcttacacgatgctgagtgcggctgcagagctggagcggga

SEQ ID NO: 273438 - DNA, 75 bp, synthetic construct
  source 1..75: mol_type = other DNA
gcagcgtaatgcgctggagtgtgcaggatgtgagctgatttttgaggataaaatcagcggcactaagtccgatcg

SEQ ID NO: 273439 - DNA, 75 bp, synthetic construct
  source 1..75: mol_type = other DNA
ttgatggtagcgtgaacctgccggaaggtaccctgagtgaggacagtggcaccctgatattccaggggcatccgg

SEQ ID NO: 273440 - DNA, 75 bp, synthetic construct
  source 1..75: mol_type = other DNA
atgttaatcgtcctgatcgtcatctgtttaaccgtcatagtgacgacactggtaacgaggaaagacctctgcgag

SEQ ID NO: 273441 - DNA, 75 bp, synthetic construct
  source 1..75: mol_type = other DNA
gacctctgcgaggtacgaatccgaaccggccagacggaggtcgctgtcttcacagcttacgaacttggggagtaa

SEQ ID NO: 273442 - DNA, 75 bp, synthetic construct
  source 1..75: mol_type = other DNA
gggcgctttttctttcatgtgatgggtgccctggctgaaatggagcgtgaactgattgttgaaagaacaaaagct

SEQ ID NO: 273443 - DNA, 75 bp, synthetic construct
  source 1..75: mol_type = other DNA
gccgggactgaaaaaactgctcaggacattatcagcaggtgacactctggtagtctggaagctggacaggctggg

SEQ ID NO: 273444 - DNA, 75 bp, synthetic construct
  source 1..75: mol_type = other DNA
cagcaaatgaccaaaacacagatttgcaacgcaatgcattaatgtgcgcaggatgtgaacagatttttgaggaca

SEQ ID NO: 273445 - DNA, 75 bp, synthetic construct
  source 1..75: mol_type = other DNA
aaatcagcggcacgaagtccgaccgaccggggttgaaaaaactgctcagaacattatcggaaggtgacactctgg

SEQ ID NO: 273446 - DNA, 75 bp, synthetic construct
  source 1..75: mol_type = other DNA
gtcaacacggtgaaggagctgtcagaccgcaagatcggcctgcgggttctgactggaaagggcgctcagatcgac

SEQ ID NO: 273447 - DNA, 75 bp, synthetic construct
  source 1..75: mol_type = other DNA
atgcgcgctgattttgaagataaaatcagtggtacaaagtccgaaaggcctgggctgaaaaaactactcagaata

SEQ ID NO: 273448 - DNA, 75 bp, synthetic construct
  source 1..75: mol_type = other DNA
atgacttgcacatgtaggttagcctcttacgcgccgaaaggcaaggagaagcaggctatgaagcagcaaaaggcg

SEQ ID NO: 273449 - DNA, 75 bp, synthetic construct
  source 1..75: mol_type = other DNA
attgcgtaaacaggaacacgaactgatcgaaaacgtgtttgaactggaatcccgtaccgtgccgtcttccatgac

SEQ ID NO: 273450 - DNA, 75 bp, synthetic construct
  source 1..75: mol_type = other DNA
agttttaaagctgcgggtgaagactttgcggtaatcatgaacgagtacgcactggtggtggggatcatcaccctc

SEQ ID NO: 273451 - DNA, 75 bp, synthetic construct
  source 1..75: mol_type = other DNA
tcgctctgatcgtcatctgtttaaccgtcatagtgacggcactggtaacgagaaaagacctctgcgaggtacgaa

SEQ ID NO: 273452 - DNA, 75 bp, synthetic construct
  source 1..75: mol_type = other DNA
gatgctatttgtcatggactttctacagtttctcttggcggtttttcaactcatagtgagagtatcggctatttc

SEQ ID NO: 273453 - DNA, 75 bp, synthetic construct
  source 1..75: mol_type = other DNA
agtacttctgcttttatctagtttttttggcggatgtattgggtcaacgtgtggtgggattaagtcactgagatt

SEQ ID NO: 273454 - DNA, 75 bp, synthetic construct
  source 1..75: mol_type = other DNA
ccgctgacggacacggacggtaatcccgtgatacacggtgtgacggcggtctggcgtgccggggagcaggagcag

SEQ ID NO: 273455 - DNA, 75 bp, synthetic construct
  source 1..75: mol_type = other DNA
gcaggctatgaagcagcaaaaggcgatgctcatcgccctgattgtcatctgtctaacactcatattgccggcact

SEQ ID NO: 273456 - DNA, 75 bp, synthetic construct
  source 1..75: mol_type = other DNA
atgttaatcgtcctgatcgtcatctgtttaaccgtcatagcgacggtactggtaacgaggaaagacctctgcgag

SEQ ID NO: 273457 - DNA, 75 bp, synthetic construct
  source 1..75: mol_type = other DNA
tacgtgccgaaaggcaaggagaagcaggctatgaagcagcaaaaggcgatgttaatcgccctgatcgtcatctgt

SEQ ID NO: 273458 - DNA, 75 bp, synthetic construct
  source 1..75: mol_type = other DNA
atgctagacacatggatgttagcctcttacgtgccgaaaggcaaggagaagcaggctatgaagcagcaaaaggcg

SEQ ID NO: 273459 - DNA, 75 bp, synthetic construct
  source 1..75: mol_type = other DNA
cttacgtgccgaaaggcaaggagaagcaggagaagcaggctatgaagcagcaaaaggcgatgttaatcgccctga

SEQ ID NO: 273460 - DNA, 75 bp, synthetic construct
  source 1..75: mol_type = other DNA
gcgatctggtcggtcagggactggaagagcagattgtcgcccgtgatgagaactcatggctgattgacggcggca

SEQ ID NO: 273461 - DNA, 75 bp, synthetic construct
  source 1..75: mol_type = other DNA
ggactggaagcagagccaaaggtcgtattggtggcagacgaccgaaactcaccgcgagtgagtgggagcaggtcg

SEQ ID NO: 273462 - DNA, 75 bp, synthetic construct
  source 1..75: mol_type = other DNA
gtggccagatgtacagtggcgcgcctcatggcggttatgggacttgccggtgttctccggggtaaaaaggtccgt

SEQ ID NO: 273463 - DNA, 75 bp, synthetic construct
  source 1..75: mol_type = other DNA
ttttttgacgatacccaaatttttatctatccgggtttccagtacaaagtggtcgatgctctggtgactaacttc

SEQ ID NO: 273464 - DNA, 75 bp, synthetic construct
  source 1..75: mol_type = other DNA
ccgtacatcgaccgtccggacgaagatgccgaccgcgaactttatcaaacggtttatagcgaaaaaccgggcgcg

SEQ ID NO: 273465 - DNA, 75 bp, synthetic construct
  source 1..75: mol_type = other DNA
gttatggctctcagtatgtgtcactggcctatatggagcgattaaaagaagcaaaactgctggcatcaacaggga

SEQ ID NO: 273466 - DNA, 75 bp, synthetic construct
  source 1..75: mol_type = other DNA
tggaaaaaccgtgcagaagtggaactggccacactaacgtgggtggactggtataacaatcgacgattgctggga

SEQ ID NO: 273467 - DNA, 75 bp, synthetic construct
  source 1..75: mol_type = other DNA
ttgctggaaaggctgggccacatccctccggcagaagcagaaaaagcttattatgcttccatcggaaacgatgat

SEQ ID NO: 273468 - DNA, 75 bp, synthetic construct
  source 1..75: mol_type = other DNA
atgccactgctggataagctgcgtgagcagtgcggggtcggaccggtatgcagtgaactgcatattgccccgtca

SEQ ID NO: 273469 - DNA, 75 bp, synthetic construct
  source 1..75: mol_type = other DNA
tatgggacttgccggtgttctccggggtaaaaaggtccgcactacgtcagccggaaaaccgttgctgcaggtgac

SEQ ID NO: 273470 - DNA, 75 bp, synthetic construct
  source 1..75: mol_type = other DNA
tatggaaacgacattcgtgctggatacgctggagcaggcgttgtgggtccgtcgtccgtctggcaccatccatca

SEQ ID NO: 273471 - DNA, 75 bp, synthetic construct
  source 1..75: mol_type = other DNA
gggtggactggtataacaatcgacgattgctgggaaggctgggtcatatcccaccggcagaagcagaaaaagctt

SEQ ID NO: 273472 - DNA, 75 bp, synthetic construct
  source 1..75: mol_type = other DNA
gcagggcttcgtttatgtggcgttcatcattgatgtgttcgccggatacatcgtgggatggcgggtctcctcgtc

SEQ ID NO: 273473 - DNA, 75 bp, synthetic construct
  source 1..75: mol_type = other DNA
gacatcatcctgataaacgcagtgcacatgcacagcgcgatgactggatgaagagagagatacagcgcgtatacg

SEQ ID NO: 273474 - DNA, 75 bp, synthetic construct
  source 1..75: mol_type = other DNA
ctgattttacttgggtcagcacatggcagggcttcgtttatgtggcgttcatcattgatgtgttcgccggataca

SEQ ID NO: 273475 - DNA, 75 bp, synthetic construct
  source 1..75: mol_type = other DNA
ggcatcaacagggagtacaggcgactcgtatgacaacgcgatggcggagagcatcaatggtctttacaaagcgga

SEQ ID NO: 273476 - DNA, 75 bp, synthetic construct
  source 1..75: mol_type = other DNA
ctggcagcctgagttcacagataaaacactctccaggaaacccggggcggttcaaactaaggtgggaagagtttc

SEQ ID NO: 273477 - DNA, 75 bp, synthetic construct
  source 1..75: mol_type = other DNA
actgctggcatcaacagggagtactggcgactcgtatgacaacgcgatggcggagagcatcaatggcctttacaa

SEQ ID NO: 273478 - DNA, 75 bp, synthetic construct
  source 1..75: mol_type = other DNA
aatacaccgtaagagctggaaaaaccgtgcagaagtggaactggccacactcacgtgggtggactggtataacaa

SEQ ID NO: 273479 - DNA, 75 bp, synthetic construct
  source 1..75: mol_type = other DNA
agccggattactggcatcaacagggagcacaggcgactcgtatgacaacgcgatggcggagagcatcaatggtct

SEQ ID NO: 273480 - DNA, 75 bp, synthetic construct
  source 1..75: mol_type = other DNA
ctgggccatattcctccggcagaagcagaaaaagcttattatgcttccatcggaaataatgatctggcagcctga

SEQ ID NO: 273481 - DNA, 75 bp, synthetic construct
  source 1..75: mol_type = other DNA
ctcatcgtctatggaaacgacattcgtgctggatgccctggagcaggcgttttgggcccgtcgtccgtccggcac

SEQ ID NO: 273482 - DNA, 75 bp, synthetic construct
  source 1..75: mol_type = other DNA
ctcatcgtctatggaaacgacattcgtgctggatgctctggagcaggcgttttgggcccgccgtccgtccggcac

SEQ ID NO: 273483 - DNA, 75 bp, synthetic construct
  source 1..75: mol_type = other DNA
ctcatcgtctatggaaacgacattcgtgctggatgcactggagcaggcgttttgggcccgacgaccgtccggcac

SEQ ID NO: 273484 - DNA, 75 bp, synthetic construct
  source 1..75: mol_type = other DNA
actcctggcatcaacaggcagtactggcgactcgtatgacaacgcgatggcggagagcatcaatggcctttacaa

SEQ ID NO: 273485 - DNA, 75 bp, synthetic construct
  source 1..75: mol_type = other DNA
acttctggcatcaacaggtagtactggcgactcgtatgacaacgcgatggcggagagcatcaatggcctttacaa

SEQ ID NO: 273486 - DNA, 75 bp, synthetic construct
  source 1..75: mol_type = other DNA
actactggcatcaacaggaagtactggcgactcgtatgacaacgcgatggcggagagcatcaatggcctttacaa

SEQ ID NO: 273487 - DNA, 75 bp, synthetic construct
  source 1..75: mol_type = other DNA
ccgtaagagctggaaaaaccggacagaagtggagctggccacactcacgtgggtggacaggtataacaatcgacg

SEQ ID NO: 273488 - DNA, 75 bp, synthetic construct
  source 1..75: mol_type = other DNA
tattaccactgtcagcaacagcgacatcatcctgataaacgcagtgcccgtgcgcagcgcgatgactggctgaag

SEQ ID NO: 273489 - DNA, 75 bp, synthetic construct
  source 1..75: mol_type = other DNA
tggaactggccacacttacgtggatggactggtataacaatcgacgtttactggaaaggctgtggcacatccctc

SEQ ID NO: 273490 - DNA, 75 bp, synthetic construct
  source 1..75: mol_type = other DNA
cgtatgacaacgcgatggcggagagcatcaatggcctttacaaagcggaggtaatacaccgtaagagctggaaaa

SEQ ID NO: 273491 - DNA, 75 bp, synthetic construct
  source 1..75: mol_type = other DNA
tcatcgtctatggaaacgacattcgtgttggatgctctggagcaggcgttatgggcccgtcgaccgtccggcaca

SEQ ID NO: 273492 - DNA, 75 bp, synthetic construct
  source 1..75: mol_type = other DNA
cgggaaggtatcagagtggccagatgcactgtggaacgtctcatggcagttatgggacttgccggtgttctccgg

SEQ ID NO: 273493 - DNA, 75 bp, synthetic construct
  source 1..75: mol_type = other DNA
cagaagtggaactggccacactcacgtgggtggactggtataacaatcgaagattgctggcaaggctgggccata

SEQ ID NO: 273494 - DNA, 75 bp, synthetic construct
  source 1..75: mol_type = other DNA
atcaagatcatttataaagaaacagtggactgaatatgaactaaatggactaacagcaagagaaatgaatgggga

SEQ ID NO: 273495 - DNA, 75 bp, synthetic construct
  source 1..75: mol_type = other DNA
gggtggactggtataactatcgacgattgctgggaaggctgggtcatatccctccggcagaagcagaaaaagctt

SEQ ID NO: 273496 - DNA, 75 bp, synthetic construct
  source 1..75: mol_type = other DNA
taaattacagctcgataaagagcaaggaaatgagcagaaaaaaaggattacagctcaaaagaaaattgaaaaaga

SEQ ID NO: 273497 - DNA, 75 bp, synthetic construct
  source 1..75: mol_type = other DNA
cagaagtggaactggccacactcacgtgggtggactggtataacaatcgaggattgctggtaaggcggggccata

SEQ ID NO: 273498 - DNA, 75 bp, synthetic construct
  source 1..75: mol_type = other DNA
cagaagtggaactggccacactcacgtgggtggactggtataacaatcgatgattgctggcaaggcagggccata

SEQ ID NO: 273499 - DNA, 75 bp, synthetic construct
  source 1..75: mol_type = other DNA
agtacaggcgactcgtatgacaacgcgatggcggagagcatcaatggtctttacaaagcggaggtaatacaccgt

SEQ ID NO: 273500 - DNA, 75 bp, synthetic construct
  source 1..75: mol_type = other DNA
agcagtacggggtcggaccggtatgtagcgaactgcatattgccccgtcaacgtattaccattgtcagcaacagc

SEQ ID NO: 273501 - DNA, 75 bp, synthetic construct
  source 1..75: mol_type = other DNA
tatggaaacgacattcgtgctggatgcactggagcaggcgttgtgggcccgtcggccgtccggcacaatccacca

SEQ ID NO: 273502 - DNA, 75 bp, synthetic construct
  source 1..75: mol_type = other DNA
tggtataacaatcgacgattgctgggaaggctgggtcatatccctccggcagaagcagaaaaagcttattatgct

SEQ ID NO: 273503 - DNA, 75 bp, synthetic construct
  source 1..75: mol_type = other DNA
gcactggtgaggcgttatgggcccgtcgaccgtccggcacggtccatcacagtgataaaggttctcagtatgtat

SEQ ID NO: 273504 - DNA, 75 bp, synthetic construct
  source 1..75: mol_type = other DNA
aataatcgacgattgctggaaaggctgggccacatccctccggcagaagcagaaaaagcttattatgcttccatc

SEQ ID NO: 273505 - DNA, 75 bp, synthetic construct
  source 1..75: mol_type = other DNA
cgtggcagaacgacctgaccagctgtgggtggctgattttacttacgtcagcacatggcggggcttcgtctatgt

SEQ ID NO: 273506 - DNA, 75 bp, synthetic construct
  source 1..75: mol_type = other DNA
agttcacagataaaacactctccaggaaaaccggggcggttcagacatttcagagatggttatttttttctgtga

SEQ ID NO: 273507 - DNA, 75 bp, synthetic construct
  source 1..75: mol_type = other DNA
agctatgggacttgccggtgttctccggggtaaaaaggtccgcactaccgttgccgcaggcgaccgcgtaaaccg

SEQ ID NO: 273508 - DNA, 75 bp, synthetic construct
  source 1..75: mol_type = other DNA
cagttgatgatgttcaactttctcacaagcccaggccatcgcaagccggattactggcatcaacagggagtacag

SEQ ID NO: 273509 - DNA, 75 bp, synthetic construct
  source 1..75: mol_type = other DNA
cctgaccagttgtgggtggctgattttacttacgtcagcacatggcagggggtcgtctatgtggcgttcatcatt

SEQ ID NO: 273510 - DNA, 75 bp, synthetic construct
  source 1..75: mol_type = other DNA
agacggttcgctggtgccgcgaagccagccaggcgcgttgattgaaaacgaagaacaggcgctggcgcaaacgtt

SEQ ID NO: 273511 - DNA, 75 bp, synthetic construct
  source 1..75: mol_type = other DNA
gatgaaaatcaccaggtatacggtgtgcgtaaagtctggcgtcagttgttacgggaaggttgcgtattaccgtga

SEQ ID NO: 273512 - DNA, 75 bp, synthetic construct
  source 1..75: mol_type = other DNA
agcctgtctccaggggacacgcttgttgtttggaagctggatcggcttggacgaagtatgcggcacctggttgta

SEQ ID NO: 273513 - DNA, 75 bp, synthetic construct
  source 1..75: mol_type = other DNA
cagcatagacaccagtacaccaatggggcggtttttctttcacgttatgggggcactggcggagatggaacgcga

SEQ ID NO: 273514 - DNA, 75 bp, synthetic construct
  source 1..75: mol_type = other DNA
gcaacagcgtgaacactgatgcgggagctggctttgagcaaacattgacgggcctgacgctcggtatcgatagtc

SEQ ID NO: 273515 - DNA, 75 bp, synthetic construct
  source 1..75: mol_type = other DNA
gggctggaagcggccagagctaaaggtcgtattggtggcagacgtcctaaactcaccacgagtgagtgggagcag

SEQ ID NO: 273516 - DNA, 75 bp, synthetic construct
  source 1..75: mol_type = other DNA
gccgaatcggagggcgtcggccaaagctggcgccagacgaatgggctcaggccgggcgactgattgcggccggag

SEQ ID NO: 273517 - DNA, 75 bp, synthetic construct
  source 1..75: mol_type = other DNA
acgttatcagagggagacacgctggttgtatggaaactcgacaggctggggcgaagcatgcgacaccttgtgacc

SEQ ID NO: 273518 - DNA, 75 bp, synthetic construct
  source 1..75: mol_type = other DNA
gcacagtggcacgtcttatggcggttatggggcttgccggtgttctccggggtaaaaaagtccgtacgaccgtca

SEQ ID NO: 273519 - DNA, 75 bp, synthetic construct
  source 1..75: mol_type = other DNA
tctatggaaacgacattcgtgctggatgcgctggagcaggcgttgtgggcccgccgtccgtccggcaccatccat

SEQ ID NO: 273520 - DNA, 75 bp, synthetic construct
  source 1..75: mol_type = other DNA
tgcactggagcaggcgttgtgggcccgtcggccgtccggcacaatccaccacagtgataaaggttctcagtatgt

SEQ ID NO: 273521 - DNA, 75 bp, synthetic construct
  source 1..75: mol_type = other DNA
tatgcggaagataacgtggtggtatttgtccgcgtgctgaatcagcaacgtgtactggtggcaatcaaccgtggc

SEQ ID NO: 273522 - DNA, 75 bp, synthetic construct
  source 1..75: mol_type = other DNA
tatccttcgccaggcttccgcttattttgcgaaggcggagttcgaccgcctctggaaaaaatgatgccactgctg

SEQ ID NO: 273523 - DNA, 75 bp, synthetic construct
  source 1..75: mol_type = other DNA
tcgacgattgctggaaaggctgggtcatatccctccggcagaagcagaaaaagctttttatgcttccatcggaaa

SEQ ID NO: 273524 - DNA, 75 bp, synthetic construct
  source 1..75: mol_type = other DNA
ggccgtttcttttttcatgtcatgggtgccccggctgaaatggagcgtgaactgattgttgaacgaacaaaagct

SEQ ID NO: 273525 - DNA, 75 bp, synthetic construct
  source 1..75: mol_type = other DNA
accccaatgggccgtttcttttttcatgtcatgggtgccctggctgaaatggaacgcgaactgatagttgaacgt

SEQ ID NO: 273526 - DNA, 75 bp, synthetic construct
  source 1..75: mol_type = other DNA
catgtcatccatcgacatggaatgactgatgaaaagacggcgtacgaagttgaagcagcacttattgatgcctac

SEQ ID NO: 273527 - DNA, 75 bp, synthetic construct
  source 1..75: mol_type = other DNA
ggatgtgagcggatttttgaggataaaatcagtggcaccaagtccgacagaccagggctgaaaaagctgctcagg

SEQ ID NO: 273528 - DNA, 75 bp, synthetic construct
  source 1..75: mol_type = other DNA
tctcagaaaaaaaggtgctatgtctcctgtgagatattctcccggatttgatttcggaatggaactggattttag

SEQ ID NO: 273529 - DNA, 75 bp, synthetic construct
  source 1..75: mol_type = other DNA
ttcaattgatactagtaccccaatggggcgctttttctttcatgtgatgggtgccctggctgaaatggagcgtga

SEQ ID NO: 273530 - DNA, 75 bp, synthetic construct
  source 1..75: mol_type = other DNA
ctggttgaggagttgcgcgaatgtggcgttaattttcgcagcctgacggatgctattgataccagcacaccaatg

SEQ ID NO: 273531 - DNA, 75 bp, synthetic construct
  source 1..75: mol_type = other DNA
tttttaatgctgattggctacatacgtgtgtcaacaaatgaccaaaacacagatttgcaacgcaatgcattaatg

SEQ ID NO: 273532 - DNA, 75 bp, synthetic construct
  source 1..75: mol_type = other DNA
catgagagggaacagattgcacggctattggttaagggacatacccgccagcaactggccattatctacggtgta

SEQ ID NO: 273533 - DNA, 75 bp, synthetic construct
  source 1..75: mol_type = other DNA
gcgaaagataaagaaaaccggagtaaacaatcttgggagttcactggtgggttgattcatgtacaagtaaaaagt

SEQ ID NO: 273534 - DNA, 75 bp, synthetic construct
  source 1..75: mol_type = other DNA
ccatctgaaatagcaaatctttatcttggaaaaaaaataccagatgaattaagaaaaaaaggagctatgtccccg

SEQ ID NO: 273535 - DNA, 75 bp, synthetic construct
  source 1..75: mol_type = other DNA
gacgaattggtggacgtcgccccaaacttacaccagaacaatgggagcaggccggacgattaattgcatcaggcg

SEQ ID NO: 273536 - DNA, 75 bp, synthetic construct
  source 1..75: mol_type = other DNA
tcccccgtaagcaggttgcaatcatctatgatgttgctatttccacgctttataaaaagtttcctgcgtcatcat

SEQ ID NO: 273537 - DNA, 75 bp, synthetic construct
  source 1..75: mol_type = other DNA
acctgaccagctgtgggtggctgattttacttacggtgtgcccggagttcagggcgggcatggatgcttaaatga

SEQ ID NO: 273538 - DNA, 75 bp, synthetic construct
  source 1..75: mol_type = other DNA
ggcacgtctcatggcggttatgggacttgccggtgttctccggggtaaaaaggtccgtacgaccatcagccggaa

SEQ ID NO: 273539 - DNA, 75 bp, synthetic construct
  source 1..75: mol_type = other DNA
ccgtccggcacggtccatcacagtgataaaggttctcagtatgtatcgctggcctacacacagcggcttaaggaa

SEQ ID NO: 273540 - DNA, 75 bp, synthetic construct
  source 1..75: mol_type = other DNA
tgtaaatatgattacgatggatacaaaatactcacctataaatcaggcaagaaaggcgttcgttacttatttgaa

SEQ ID NO: 273541 - DNA, 75 bp, synthetic construct
  source 1..75: mol_type = other DNA
cagataaaagcaaaacggttgctgaaataaaagattactatcataaaggctatgcgacagacatcgagatgattg

SEQ ID NO: 273542 - DNA, 75 bp, synthetic construct
  source 1..75: mol_type = other DNA
gttcgccagcatgagcgggataccgggggcggtgatggtgggctcacccgcgctgaacgtcagcgtctgaaagag

SEQ ID NO: 273543 - DNA, 75 bp, synthetic construct
  source 1..75: mol_type = other DNA
gcactggagcaggcgttatgggcccgtcgaccgtccggcacagtccatcacagtgataaaggttctcagtatgta

SEQ ID NO: 273544 - DNA, 75 bp, synthetic construct
  source 1..75: mol_type = other DNA
ccgtgcgcagcgcgatgactggctgaagaaagagatactgcgcgtatacgatgaaaatcacaaggtatacggtgt

SEQ ID NO: 273545 - DNA, 75 bp, synthetic construct
  source 1..75: mol_type = other DNA
tgacgttaactgatgccggtgaaagtttttatcagcacgccagtcttattcttgaagaactgcgcgcagcccaag

SEQ ID NO: 273546 - DNA, 75 bp, synthetic construct
  source 1..75: mol_type = other DNA
gtcgcaacgtctcgcaaccggcattcagccgccgcatccgcgcgctggaacaggcgattggcgttgaattgttta

SEQ ID NO: 273547 - DNA, 75 bp, synthetic construct
  source 1..75: mol_type = other DNA
ttgatgttgatgaagcggtcgataaactgcgtgaagggcaaagtgactgtattttttcctttcacgacgaagatt

SEQ ID NO: 273548 - DNA, 75 bp, synthetic construct
  source 1..75: mol_type = other DNA
ggtaaaaaggtccgcactaccgtcagccggaaagccgttgccgcaggcgaccgcgtaaaccgtcagtttgtggca

SEQ ID NO: 273549 - DNA, 75 bp, synthetic construct
  source 1..75: mol_type = other DNA
cactcacgtgggtggactggtataataatcgacgattgctggaaaggctgggccacatccctccggcagaagcag

SEQ ID NO: 273550 - DNA, 75 bp, synthetic construct
  source 1..75: mol_type = other DNA
catggaaacgacattggtgctggatgcacttgagcaggcgttgtgggcccgccgtccgtctggcaccatccatca

SEQ ID NO: 273551 - DNA, 75 bp, synthetic construct
  source 1..75: mol_type = other DNA
agcagtacggggtcggaccggtatgcagtgaactgcatattgccccgtcaacggattaccactgtcagcaacagc

SEQ ID NO: 273552 - DNA, 75 bp, synthetic construct
  source 1..75: mol_type = other DNA
caactacagcagcaccaaccaactgacttttgaacgcgcccaggaagtgttgttggatagatcctggcaagcggg

SEQ ID NO: 273553 - DNA, 75 bp, synthetic construct
  source 1..75: mol_type = other DNA
aatcaccaggtatacggtgtgcgtaaagtctggcgtcagttgttacgggaaggtatcagagtggccagatgcact

SEQ ID NO: 273554 - DNA, 75 bp, synthetic construct
  source 1..75: mol_type = other DNA
accgtaagagctggaaaaaccgtacagaagtggaactggccacactaacgtgggtggactggtataacaatcgac

SEQ ID NO: 273555 - DNA, 75 bp, synthetic construct
  source 1..75: mol_type = other DNA
ccgcgtaaaccgtcagttcgtggcagaacgtccagaccagttgtgggtagctgattttacctgggtaagcacatg

SEQ ID NO: 273556 - DNA, 75 bp, synthetic construct
  source 1..75: mol_type = other DNA
tgtgggtggctgattttacttacgtcagcacatggcagggcttcgtctatgtggcgttcatcattgatgtgtttg

SEQ ID NO: 273557 - DNA, 75 bp, synthetic construct
  source 1..75: mol_type = other DNA
cgtccggcacggtccatcacagtgataaaggttctcagtatgtatcgctggcctacacacagcggcttaaggaag

SEQ ID NO: 273558 - DNA, 75 bp, synthetic construct
  source 1..75: mol_type = other DNA
ggacttgccggtgttctccggggtaaaaaggtccgtacgaccatcagccggaaagccgttgccgcaggcgaccgc

SEQ ID NO: 273559 - DNA, 75 bp, synthetic construct
  source 1..75: mol_type = other DNA
ctttttaacggtggcggtcggcatggttctggcgtgtctggtgcagtgggaagcgttgcgcggcaaagcggtcta

SEQ ID NO: 273560 - DNA, 75 bp, synthetic construct
  source 1..75: mol_type = other DNA
cgccattaccacgctgatattgagttcagcggggctgtatattttcgccaatcgtaaagcctacgcctggcgcta

SEQ ID NO: 273561 - DNA, 75 bp, synthetic construct
  source 1..75: mol_type = other DNA
aatacctggctgggctatccgtacatgatgatcctctgcatgggcttgctgaaagcgattccggacgatttgtat

SEQ ID NO: 273562 - DNA, 75 bp, synthetic construct
  source 1..75: mol_type = other DNA
tgacggcgaaaaatgccgatatcagcggtaacgtgaatgcgaactccgggacgctcaacaacgtcacgattaacg

SEQ ID NO: 273563 - DNA, 75 bp, synthetic construct
  source 1..75: mol_type = other DNA
caacacacgaccaatgtttgttggtcagggcgatcagatattcatgaacgacgtgttcctgaagcgtctgacggc

SEQ ID NO: 273564 - DNA, 75 bp, synthetic construct
  source 1..75: mol_type = other DNA
tggctggtaaatgactggtatcccacagcaagtatcagcgatttgctggttgtggtgatgaagaaagccaccgca

SEQ ID NO: 273565 - DNA, 75 bp, synthetic construct
  source 1..75: mol_type = other DNA
ggtaaatggctggtatcccacagcaagtatcagcgatttgctggttgtggtgatgaagaaagccactacaggcat

SEQ ID NO: 273566 - DNA, 75 bp, synthetic construct
  source 1..75: mol_type = other DNA
atttacgatgatcataactttgaccgccaaatcattattccgcccattatttttaacggtgtggcgtatgacgat

SEQ ID NO: 273567 - DNA, 75 bp, synthetic construct
  source 1..75: mol_type = other DNA
ggtcaaaggtgacttcgttaaagctgtatctaagccattcccgaaaaaaactggctcgtggggcgatacggaaac

SEQ ID NO: 273568 - DNA, 75 bp, synthetic construct
  source 1..75: mol_type = other DNA
acagtttgagttctggttctcggaaacgcggattaccgatatcaggcaggttgaaaccacagcccgctaccttgg

SEQ ID NO: 273569 - DNA, 75 bp, synthetic construct
  source 1..75: mol_type = other DNA
tgcagcacgtaccggaaaaagaagccatcgtggataacggggccagctttgagccgctgtccggctccctgagca

SEQ ID NO: 273570 - DNA, 75 bp, synthetic construct
  source 1..75: mol_type = other DNA
atgacgatcagccgtttgaccggcagattgttattccggcggtggcattcagcggcgctaaacatgagagagagc

SEQ ID NO: 273571 - DNA, 75 bp, synthetic construct
  source 1..75: mol_type = other DNA
aagttcaggttgatacaaataataacctgaacagcatgtgggctgtgaagctgcagcagatgcaggacggacgcc

SEQ ID NO: 273572 - DNA, 75 bp, synthetic construct
  source 1..75: mol_type = other DNA
gctgtatgccggtatggaacggccagacgctgacgttcgttcaggaccgcccgtcggatgtggtgtggccgtaca

SEQ ID NO: 273573 - DNA, 75 bp, synthetic construct
  source 1..75: mol_type = other DNA
tgtcacggtttatgatgaccagggcttcgaccggcagattatcattcccccggtggtgtttcgtgggacgaaaca

SEQ ID NO: 273574 - DNA, 75 bp, synthetic construct
  source 1..75: mol_type = other DNA
acggacgcctttatatcgctggtatcggtgccggtattgagaacacccccgacggcatgcagagtcaggtgctgc

SEQ ID NO: 273575 - DNA, 75 bp, synthetic construct
  source 1..75: mol_type = other DNA
ttactgtttcgggaattatctatgggtaaaggtggcagtaaggggcataccccgcgcgaagcgaaggacaacctg

SEQ ID NO: 273576 - DNA, 75 bp, synthetic construct
  source 1..75: mol_type = other DNA
tttccctgacaccggacgggcggctgacggcgaaaaacgctgatatcagcggtaacgtgaatgcgaactccggga

SEQ ID NO: 273577 - DNA, 75 bp, synthetic construct
  source 1..75: mol_type = other DNA
ctgcaggtgctgaagaacggacaggaaatctttcagcaacccgcgacggatgtcagcagggtattttcatcagtc

SEQ ID NO: 273578 - DNA, 75 bp, synthetic construct
  source 1..75: mol_type = other DNA
cacgattaatcagaactgtcggattctgggaaaactgtcagccaaccagattgaaggtgatattgtcaaaacggt

SEQ ID NO: 273579 - DNA, 75 bp, synthetic construct
  source 1..75: mol_type = other DNA
cagtgtgaacaccgttggcaaatcggcattcgtggaggctgttggtcagccgagtgatgacgcatccggctatct

SEQ ID NO: 273580 - DNA, 75 bp, synthetic construct
  source 1..75: mol_type = other DNA
tggcgccttttttattgcagaaaagcgagaggtaattatgcgtaaagtttgtgcagccattttgtccgcagccat

SEQ ID NO: 273581 - DNA, 75 bp, synthetic construct
  source 1..75: mol_type = other DNA
cccacgttcaggtcggttttgacaaaaaacatgtgctggatggcgtggacctgtttaccggggtcacaatgacct

SEQ ID NO: 273582 - DNA, 75 bp, synthetic construct
  source 1..75: mol_type = other DNA
gtgatatccaatgccagtattgtccgtgcggatatctcgtatcatatgtttcgcgattttgctgaaaacaaaggt

SEQ ID NO: 273583 - DNA, 75 bp, synthetic construct
  source 1..75: mol_type = other DNA
taaggtgaaagtgaaccgggttcctgacggcgttgcagaatacagtgtgtgggggctgaagttgccgacgctgcg

SEQ ID NO: 273584 - DNA, 75 bp, synthetic construct
  source 1..75: mol_type = other DNA
cagcagactggatgagttttcgaaagagtggaaggatgctaacgataagtggaatgccatgtggggcgtcaaaat

SEQ ID NO: 273585 - DNA, 75 bp, synthetic construct
  source 1..75: mol_type = other DNA
tctgaatgcctggacgcatttttgcaccagccagtctgtaaccgacgcagaccgccgcattgtgcgcgaatcagt

SEQ ID NO: 273586 - DNA, 75 bp, synthetic construct
  source 1..75: mol_type = other DNA
ctggtatcccacggcaagcatcagcgatttgctggttgtggtgatgaagaaatccacagccggtatcagtatcag

SEQ ID NO: 273587 - DNA, 75 bp, synthetic construct
  source 1..75: mol_type = other DNA
gtgaagctgcagcagatgcaggacggacgcctttatatcgcgggtattggtgccggtattgagaacacccctgac

SEQ ID NO: 273588 - DNA, 75 bp, synthetic construct
  source 1..75: mol_type = other DNA
ggaagtgaaatacgacacgccgatcacccggaccatcacgtcggcaaacattgaccgactgcgttttaccttcgg

SEQ ID NO: 273589 - DNA, 75 bp, synthetic construct
  source 1..75: mol_type = other DNA
gtgaggttaccctgccggagacaggtacatcggcggtgaacctgattaacggcagcggtaagccggtgagtgtgg

SEQ ID NO: 273590 - DNA, 75 bp, synthetic construct
  source 1..75: mol_type = other DNA
aagcggattgctgatatcaggcaggttgaaaccacagcccgctatcttggcacggcgctgtactggatagctgcc

SEQ ID NO: 273591 - DNA, 75 bp, synthetic construct
  source 1..75: mol_type = other DNA
tcaggagcgaataactggacaccaacaaccagtatcagcgatctgctggttgtggtgatgaagaaatccacagca

SEQ ID NO: 273592 - DNA, 75 bp, synthetic construct
  source 1..75: mol_type = other DNA
gacgctgacactgacattcaccgtatcttcatcaggagcgaataactggacaccaacaaccagtatcagcgatcg

SEQ ID NO: 273593 - DNA, 75 bp, synthetic construct
  source 1..75: mol_type = other DNA
cgccaggaaattacagtctgacggtccgggcggtaaatgcccggggacagcagggggatccggcgtcggtatcgt

SEQ ID NO: 273594 - DNA, 75 bp, synthetic construct
  source 1..75: mol_type = other DNA
cacaaagccgatgtttgttggtcagggcgatcagatatttatgaatgaagtgttcctgaaatatctgacggctcc

SEQ ID NO: 273595 - DNA, 75 bp, synthetic construct
  source 1..75: mol_type = other DNA
cctgccggttaagagtgacccgcaatggtcaggagatttttaatcagtccacgacggatgctcagggcgtatttt

SEQ ID NO: 273596 - DNA, 75 bp, synthetic construct
  source 1..75: mol_type = other DNA
catcacggtaagaatcagtgatgatcagaagtttgaccggcaggtcatgataccgccagtgttattccgcggtgg

SEQ ID NO: 273597 - DNA, 75 bp, synthetic construct
  source 1..75: mol_type = other DNA
tggagtgtatccggcccgcacattaagcccgggaaggatttctggttttacgtgcgcagcgtcaacctggtgggg

SEQ ID NO: 273598 - DNA, 75 bp, synthetic construct
  source 1..75: mol_type = other DNA
gacggtgttgctgaatacagcgtgtgggggctgaagctgccgacgctgcgccagcgcctgttccgctgcgtgagt

SEQ ID NO: 273599 - DNA, 75 bp, synthetic construct
  source 1..75: mol_type = other DNA
tgataacggtcagcttgcgcctgacctggctgaaatcaggacatccattacgggtgtcagcaatgaaatcacgca

SEQ ID NO: 273600 - DNA, 75 bp, synthetic construct
  source 1..75: mol_type = other DNA
tggaggaaacgcaggccattgcccgttacggtcgtaacgtcacgaagatggatgcttttggctgtaccagccggg

SEQ ID NO: 273601 - DNA, 75 bp, synthetic construct
  source 1..75: mol_type = other DNA
ttccagaaaggcaatcagggggcaggcaatatcaccgactgtacggtgattgtgaccaaaaaggctgcttccggc

SEQ ID NO: 273602 - DNA, 75 bp, synthetic construct
  source 1..75: mol_type = other DNA
tcatgtcaccctgactttcaatgtttcttcatatggtgctaataactggacgccaacgaccagtatcagcgacct

SEQ ID NO: 273603 - DNA, 75 bp, synthetic construct
  source 1..75: mol_type = other DNA
agaactgtacgattaagggcatgctggaggcgacccaggtcagaggggatttcgttaaagctgtatcaaaagcct

SEQ ID NO: 273604 - DNA, 75 bp, synthetic construct
  source 1..75: mol_type = other DNA
ggtggtgaagggcgtgagcttcctgcttcgcctgaccgtggcagcggacgatggcagtgagcggctggtcagcac

SEQ ID NO: 273605 - DNA, 75 bp, synthetic construct
  source 1..75: mol_type = other DNA
ttccgggaaaaaataggaaaactgcatctggctcaggggctatgggagctgatagacaacagccagcttgcggat

SEQ ID NO: 273606 - DNA, 75 bp, synthetic construct
  source 1..75: mol_type = other DNA
tggaccgtgaggtgaccctgccggagacaggtacatcggcggtgaacctgattaacggcagcggtaagccggtga

SEQ ID NO: 273607 - DNA, 75 bp, synthetic construct
  source 1..75: mol_type = other DNA
agctttgagccgcagtcaggcaccctgaacagcgtcatccctccggcagtgcagcacctgacggtggaggtgacc

SEQ ID NO: 273608 - DNA, 75 bp, synthetic construct
  source 1..75: mol_type = other DNA
atgcgaacgccgggacgctcaacaacgttacgataaatgagaactgtcagattaaagggaaactgtcagccaacc

SEQ ID NO: 273609 - DNA, 75 bp, synthetic construct
  source 1..75: mol_type = other DNA
taaggtgaaagtgaaccgggttcctgatggcgttgcagaatacagtgtgtgggggctgaagttgccgacgttgcg

SEQ ID NO: 273610 - DNA, 75 bp, synthetic construct
  source 1..75: mol_type = other DNA
acggtatgcagagtcaggtgctgctggcggcggacaggattgcgatgattaatcctgcgaatggcaacacaaggc

SEQ ID NO: 273611 - DNA, 75 bp, synthetic construct
  source 1..75: mol_type = other DNA
cgccgaagtcaccgcagacagcggggaataccaggtgctggcgcgctgggacacgccgaaggtggtgaagggcgt

SEQ ID NO: 273612 - DNA, 75 bp, synthetic construct
  source 1..75: mol_type = other DNA
agacagcggacaacacctcggaccagctgcagaataagacgctctggtcgtcatacaccgaaatcatcgatgtga

SEQ ID NO: 273613 - DNA, 75 bp, synthetic construct
  source 1..75: mol_type = other DNA
agccgcggtcaggcccaccgtgccggactgtgggtgataaagaccggactgctggaaacgcagacggtggatttc

SEQ ID NO: 273614 - DNA, 75 bp, synthetic construct
  source 1..75: mol_type = other DNA
taatcctgcgaatggcaacacaaaaccgatgtttgttggtcagggcgatcagatattcatgaacgacgtgttcct

SEQ ID NO: 273615 - DNA, 75 bp, synthetic construct
  source 1..75: mol_type = other DNA
gctgtgaagctgcagcagatgcaggacggacgcctttatatcgcgggtattggtgccggtattgagaacacctct

SEQ ID NO: 273616 - DNA, 75 bp, synthetic construct
  source 1..75: mol_type = other DNA
caaagccgatgtttgttggtcagggcgatcagatatttatgaatgaagtgttcctgaaatatctgacggctccca

SEQ ID NO: 273617 - DNA, 75 bp, synthetic construct
  source 1..75: mol_type = other DNA
ccttttaacatccggatggtccgggagacggcggacagcaccacggaccagatgcagaataagacgctctggtcg

SEQ ID NO: 273618 - DNA, 75 bp, synthetic construct
  source 1..75: mol_type = other DNA
aggacggacgcctttatattgcgggtatcggtgccggtattgagaacacccctgacggcatgcagagtcaggtgc

SEQ ID NO: 273619 - DNA, 75 bp, synthetic construct
  source 1..75: mol_type = other DNA
gcgtaacggtagctgggtgacggaaaaggatgtcaccattaacggtaagaccacctcgcagtacctgacgtcggt

SEQ ID NO: 273620 - DNA, 75 bp, synthetic construct
  source 1..75: mol_type = other DNA
tgaaatttataaccgtaccgcgctggataatacgctgatttacagtggtgttattgatatgcctgctggtcgcgg

SEQ ID NO: 273621 - DNA, 75 bp, synthetic construct
  source 1..75: mol_type = other DNA
ggatttctggttttacgtgcgcagcgtcaacctggtggggaaatctgcttttgtggaagccagtggccgggccag

SEQ ID NO: 273622 - DNA, 75 bp, synthetic construct
  source 1..75: mol_type = other DNA
gttcgctgaacagcgtcatcccgccggctgtgcagcacctgacggtggaggtgagcgcggctgacggtcagtatc

SEQ ID NO: 273623 - DNA, 75 bp, synthetic construct
  source 1..75: mol_type = other DNA
gagtgcggcaatccagcagatacagaaagttcaggttgatacaaataataacctgaacagcatgtgggccgtgaa

SEQ ID NO: 273624 - DNA, 75 bp, synthetic construct
  source 1..75: mol_type = other DNA
gaacctgccaccaccacgttccggattaacgccccggcagcaccggacagcattgagctgacgccggggtattat

SEQ ID NO: 273625 - DNA, 75 bp, synthetic construct
  source 1..75: mol_type = other DNA
ggttccgctacagcttcagcgccctgaaggaccgccacacggcggtggaggtgaattacaccgacccgcagaacg

SEQ ID NO: 273626 - DNA, 75 bp, synthetic construct
  source 1..75: mol_type = other DNA
aggtccagtccgtcaccgacggcgtgaaggtgaaagtgagccgggttcctgacggcgttgccgagtacagcgtgt

SEQ ID NO: 273627 - DNA, 75 bp, synthetic construct
  source 1..75: mol_type = other DNA
tgtcatcagagggaaactgtctgcaaaccagattgaaggcgatctcgttaaaacagtgggtaaggctttccctcg

SEQ ID NO: 273628 - DNA, 75 bp, synthetic construct
  source 1..75: mol_type = other DNA
tccggcaatcctccgacgttttccctgacgccggatggcaggctgacagcccgcaatgcggatatcagtggagcc

SEQ ID NO: 273629 - DNA, 75 bp, synthetic construct
  source 1..75: mol_type = other DNA
tacttcgacggtgaacctgattaacggcagcggtaagccggtgagcgtggacatcactgcacaccccgcgccgga

SEQ ID NO: 273630 - DNA, 75 bp, synthetic construct
  source 1..75: mol_type = other DNA
caccgtttcagtggtctgcctcccggggaatacaccctgacggtcagggcgattaacagctatggccagcagggc

SEQ ID NO: 273631 - DNA, 75 bp, synthetic construct
  source 1..75: mol_type = other DNA
catccaggtgccgtcaaactatgagccggaaaaacgcacgtacagtggtatctgggacggcagtctgaaaccggc

SEQ ID NO: 273632 - DNA, 75 bp, synthetic construct
  source 1..75: mol_type = other DNA
gcaatgcggacatcagcggacatatcagtgcgaactcgggcacgctgaataatgtcgtgatagcggagaactgta

SEQ ID NO: 273633 - DNA, 75 bp, synthetic construct
  source 1..75: mol_type = other DNA
tgagctttggcaatgggaaaaatacatattctctggttgaccgtaataaccatccttcagctgattttcatgtgc

SEQ ID NO: 273634 - DNA, 75 bp, synthetic construct
  source 1..75: mol_type = other DNA
cggtgctgaaatttataaccgaacggctctggataatacgctgatatatacgggtgttattgatatgcctgcagg

SEQ ID NO: 273635 - DNA, 75 bp, synthetic construct
  source 1..75: mol_type = other DNA
gcgcattgatgcttcagcgctgcgtatggaggtcacgcaactggaagaagatatccgtcagcggatggacacgga

SEQ ID NO: 273636 - DNA, 75 bp, synthetic construct
  source 1..75: mol_type = other DNA
gtggaggccgttggtcgggcgagcgatgatgcggaaggttatctgaatttttataaagggttgatcaataaaacg

SEQ ID NO: 273637 - DNA, 75 bp, synthetic construct
  source 1..75: mol_type = other DNA
agttttatgcttcgcctgaccgtggccgcggatgacggcagtgagcggctggtcagtacggccaggacgacggaa

SEQ ID NO: 273638 - DNA, 75 bp, synthetic construct
  source 1..75: mol_type = other DNA
caggtaaagagggcatattgtctgagaaggcatcccggggactggctgtcggattactgagtggttttaatacgg

SEQ ID NO: 273639 - DNA, 75 bp, synthetic construct
  source 1..75: mol_type = other DNA
aaaaacgcatcacgaacacagcacaggtggaaaaatctgcccgttatctggggaccggcagtcagtggactgtcc

SEQ ID NO: 273640 - DNA, 75 bp, synthetic construct
  source 1..75: mol_type = other DNA
ccgatcgcattgcgatgattaccccggagaacggcaacaccacgccgctgtttgtggcgcaggggaatcagctgt

SEQ ID NO: 273641 - DNA, 75 bp, synthetic construct
  source 1..75: mol_type = other DNA
atagcacaggtccgccagtacgtggataaaaaagggagtgaaattacctcgaccacggataaaaagctgggtgac

SEQ ID NO: 273642 - DNA, 75 bp, synthetic construct
  source 1..75: mol_type = other DNA
gaccaggcttttgaccgtcagatagtagtcccccccgttctgtttcgtggggtgattagacttgagataaatgac

SEQ ID NO: 273643 - DNA, 75 bp, synthetic construct
  source 1..75: mol_type = other DNA
cagcaacagcgcctatgcgatgcgtacggacctgaacaattcggataagctggtagtaaaccaaaagctgtcagg

SEQ ID NO: 273644 - DNA, 75 bp, synthetic construct
  source 1..75: mol_type = other DNA
cggcgaaaaatgcggatatcagcggtaacgtgaacgcgaactccgggacgctcaacaatgtcacgattaatcaga

SEQ ID NO: 273645 - DNA, 75 bp, synthetic construct
  source 1..75: mol_type = other DNA
aggagagatagggaaaacccatctggctcaggagttgtggacgcagattgataacggtcagcttgcgcctgatct

SEQ ID NO: 273646 - DNA, 75 bp, synthetic construct
  source 1..75: mol_type = other DNA
aggtgagatccagtctgatggttttaaatccggatcacccggctggcgtttttcacgtaacggaaaactggaaat

SEQ ID NO: 273647 - DNA, 75 bp, synthetic construct
  source 1..75: mol_type = other DNA
gttgacgggcaggggagtccggtcagcgtggaggtccagtccgtcaccgacggcgtgaaggtgaaagtgagccgt

SEQ ID NO: 273648 - DNA, 75 bp, synthetic construct
  source 1..75: mol_type = other DNA
attgccctgtcgctcagggacttattgctgtctctgaacttgcctgcagggtaactaaaaaggcctgtcgaaaat

SEQ ID NO: 273649 - DNA, 75 bp, synthetic construct
  source 1..75: mol_type = other DNA
ataacagttatgccagcggtacggtaaccgtcacagtttacgatgaccagggcttcgaccggcagattatcattc

SEQ ID NO: 273650 - DNA, 75 bp, synthetic construct
  source 1..75: mol_type = other DNA
gacgcatccggctatctggattttttcaaaggcgagatagggaaaacccatctggctcaggagctgtggacgcag

SEQ ID NO: 273651 - DNA, 75 bp, synthetic construct
  source 1..75: mol_type = other DNA
acttgtcggtcgcctggataaagcccctatggcggattttagtagtgtaagcactaacggagtggctacacttgt

SEQ ID NO: 273652 - DNA, 75 bp, synthetic construct
  source 1..75: mol_type = other DNA
gaaggcactaaacgtaatgcttataaaaatactgaacgttatacagagttctatcgtgtagggagtggctcacaa

SEQ ID NO: 273653 - DNA, 75 bp, synthetic construct
  source 1..75: mol_type = other DNA
atcaggcaggttgaaaccacagcccgctatcttggcacggcgctgtactggatagctgccagtatcaatatcagg

SEQ ID NO: 273654 - DNA, 75 bp, synthetic construct
  source 1..75: mol_type = other DNA
agagcatactgatatttactcctcatgccgcctgatagtgaagaaaaatggtgctgaaatttataaccgtaccgc

SEQ ID NO: 273655 - DNA, 75 bp, synthetic construct
  source 1..75: mol_type = other DNA
gcattcgtggaggctgtcggtcagccgagtgatgatgcatcaggctatctggattttttcaaaggcgagataggg

SEQ ID NO: 273656 - DNA, 75 bp, synthetic construct
  source 1..75: mol_type = other DNA
attattatttttacgttcgcagtgtgaacaccgttggcaaatcgccattcgtggaggctgttggtcagccgagtg

SEQ ID NO: 273657 - DNA, 75 bp, synthetic construct
  source 1..75: mol_type = other DNA
cagcggacgcccgacagtggttctcggggatgcccgtcaggttaatcctgataatatttcatggggataccgggg

SEQ ID NO: 273658 - DNA, 75 bp, synthetic construct
  source 1..75: mol_type = other DNA
ctgtgggacatgctgactcacccgcgctacggcatgggaaaacgtctggtggcggcggatgttgacaagtgggcg

SEQ ID NO: 273659 - DNA, 75 bp, synthetic construct
  source 1..75: mol_type = other DNA
ccgtatgttgccggtattggtgcggggattgaggatgctgatggccagcccctgagcaatatactgctgcaggcg

SEQ ID NO: 273660 - DNA, 75 bp, synthetic construct
  source 1..75: mol_type = other DNA
gctcacctttgtttgcttatgatgccttacaaaaaaaatgggttatcgttgctgtattaggcgcaaaccgggggc

SEQ ID NO: 273661 - DNA, 75 bp, synthetic construct
  source 1..75: mol_type = other DNA
acacgccggttgaggcgaaagataacctgaaatccacgcagatgatgagcgtgattgacgcgattggcgaggggc

SEQ ID NO: 273662 - DNA, 75 bp, synthetic construct
  source 1..75: mol_type = other DNA
aggtcggctttgacaaaaaacatgcgctggacggtgtggacctgttcaccggcatcacgatgacctataccgaca

SEQ ID NO: 273663 - DNA, 75 bp, synthetic construct
  source 1..75: mol_type = other DNA
agattttccagaaaggcaatcagggggcaggcaatatcaccgactgtacggtgattgtgaccaaaaaagctgctt

SEQ ID NO: 273664 - DNA, 75 bp, synthetic construct
  source 1..75: mol_type = other DNA
cgttaccgggaggaagaaaagccatatttgatggcagcataaacatgccggaaggtaccctgagtcaggacggtg

SEQ ID NO: 273665 - DNA, 75 bp, synthetic construct
  source 1..75: mol_type = other DNA
gccagcagatatgagccggtatattctgatgttggcggaagtgcgtcaggctcatggagtattcctgccggacag

SEQ ID NO: 273666 - DNA, 75 bp, synthetic construct
  source 1..75: mol_type = other DNA
aacagtggtgttttcgtgaattccactctttctgtccgtgacggcggtcatctgacggcacaaaaagggctctac

SEQ ID NO: 273667 - DNA, 75 bp, synthetic construct
  source 1..75: mol_type = other DNA
gtgggaaaagcctttccgagaaatggcagttatgccagcggtacaataacggtcactgtgtacgatgaccaggct

SEQ ID NO: 273668 - DNA, 75 bp, synthetic construct
  source 1..75: mol_type = other DNA
agggtttatgacgatcagccgtttgaccggcagattgttattccggcggtggctttcagcggtgccagacatgag

SEQ ID NO: 273669 - DNA, 75 bp, synthetic construct
  source 1..75: mol_type = other DNA
agaccagagtgcggcaattcagcagatacagaaggttcaggttgatacaaataataacctgaacagcatgtgggc

SEQ ID NO: 273670 - DNA, 75 bp, synthetic construct
  source 1..75: mol_type = other DNA
ataataacctgaacagcatgtgggccgtgaaactgcagcagatgaaggacggacgcctttatattgcgggtatcg

SEQ ID NO: 273671 - DNA, 75 bp, synthetic construct
  source 1..75: mol_type = other DNA
agaacggtaacaccactccagcactggtcacgcaggggggacagacgtttatcaatgaagcgctgattaagaccc

SEQ ID NO: 273672 - DNA, 75 bp, synthetic construct
  source 1..75: mol_type = other DNA
gctggaattttctgtgtcagcatggctggtaaatggctggtatcccacagcaagtatcagcgatttactggttgt

SEQ ID NO: 273673 - DNA, 75 bp, synthetic construct
  source 1..75: mol_type = other DNA
attaacaagaactgccgggttctgggaaaactgtccgcgaaccagattgaaggcgatctcgttaaaacagtgggt

SEQ ID NO: 273674 - DNA, 75 bp, synthetic construct
  source 1..75: mol_type = other DNA
cgccgggacgctcaacaatgtcacggtaaatgaaaactgtacgattaagggcatgctggaggcgacccaagtcag

SEQ ID NO: 273675 - DNA, 75 bp, synthetic construct
  source 1..75: mol_type = other DNA
tcacctttacacgacttcaggcagcagactatggtgctgttatcaccaataacagtgataaaagatcaatgctaa

SEQ ID NO: 273676 - DNA, 75 bp, synthetic construct
  source 1..75: mol_type = other DNA
atcaggaaccattaccgtcagggtttatgacgatcagccgtttgaccggcagattgttattccggcggtggcttt

SEQ ID NO: 273677 - DNA, 75 bp, synthetic construct
  source 1..75: mol_type = other DNA
gtcatcagagggaaactgtctgcgaaccagattgaaggcgatctggtgaagacggtggggaaagcctttccccgg

SEQ ID NO: 273678 - DNA, 75 bp, synthetic construct
  source 1..75: mol_type = other DNA
agctggcagtttgacctgctgaataatggcgagacggttcttcgtgatgcatccggggagaaacggattaaaggg

SEQ ID NO: 273679 - DNA, 75 bp, synthetic construct
  source 1..75: mol_type = other DNA
ctgaccagtggtaagggaacggatgccagactggtgaccaccgccatcaccgcagacacggagcaccgtttcagc

SEQ ID NO: 273680 - DNA, 75 bp, synthetic construct
  source 1..75: mol_type = other DNA
tgtttgcggcgagtatcacgtcatccggcaaccccccgacgttttccctgacgccggaagggaagctgacagcca

SEQ ID NO: 273681 - DNA, 75 bp, synthetic construct
  source 1..75: mol_type = other DNA
accattaacaagaactgtgtcatcagagggaaactgtctgcaaaccagattgaaggcgatctcgttaaaacagtg

SEQ ID NO: 273682 - DNA, 75 bp, synthetic construct
  source 1..75: mol_type = other DNA
gaggtgagtgcagctgacggtcagtatctggcacaggcgaaatgggacacgccgcgggtggtgaagggtgtgcgc

SEQ ID NO: 273683 - DNA, 75 bp, synthetic construct
  source 1..75: mol_type = other DNA
cacggagtaccgtttcagtggcctgccgctcggggaatacaccctgacggtcagggcgataaacagctacggcca

SEQ ID NO: 273684 - DNA, 75 bp, synthetic construct
  source 1..75: mol_type = other DNA
gccagtatcagggcaatatcacgctgcaaaaaggctccacgctggacatcaacaaccggttcactggcgggattg

SEQ ID NO: 273685 - DNA, 75 bp, synthetic construct
  source 1..75: mol_type = other DNA
caaggacagacacacggcagttgaggtgaattacaccgatccgcagaatggctggcagacatcgactgaactggt

SEQ ID NO: 273686 - DNA, 75 bp, synthetic construct
  source 1..75: mol_type = other DNA
atacagcaataacccggcctggtgcctgtgggacatgctgactcacccgcgctacgggatgggaaaacgcctggg

SEQ ID NO: 273687 - DNA, 75 bp, synthetic construct
  source 1..75: mol_type = other DNA
aggtgctgctggcggcggacaggattgcgatggttaatcctgcgaatggcaacacaaaaccgatgtttgttggtc

SEQ ID NO: 273688 - DNA, 75 bp, synthetic construct
  source 1..75: mol_type = other DNA
aattacaccgacccgcagaacggctggcagacctccacggaactggtggaagaccctgaagccatactgcgctac

SEQ ID NO: 273689 - DNA, 75 bp, synthetic construct
  source 1..75: mol_type = other DNA
ggtgcagaaaacgaaaaacggtattccgtatgttgccggtattggtgcggggattgaggatgttgatggccagac

SEQ ID NO: 273690 - DNA, 75 bp, synthetic construct
  source 1..75: mol_type = other DNA
atgagctggacggactggatttgtttaccggtttcactgtcacacacactgacagcagtgcctccgccgatgttt

SEQ ID NO: 273691 - DNA, 75 bp, synthetic construct
  source 1..75: mol_type = other DNA
cgcagaccgtggacttcagcgtgggtgccgaagggcttcgccatgtaccaggtgatgtcattgaaatctgtgatg

SEQ ID NO: 273692 - DNA, 75 bp, synthetic construct
  source 1..75: mol_type = other DNA
ctgatggcgttgcagaatacagtgtgtgggggctgaagttgccgacgttgcgtcagcgcctgttccgctgtgtga

SEQ ID NO: 273693 - DNA, 75 bp, synthetic construct
  source 1..75: mol_type = other DNA
gtgggcaaaggtggcggcaaggcgcacacgccggttgaggcaaaagacaacctcaaatccacgcagatgatgagc

SEQ ID NO: 273694 - DNA, 75 bp, synthetic construct
  source 1..75: mol_type = other DNA
tccggattaacgcacctgcaaaacccgccaccattgagctgacgccggggtattttcagataacggcggtcccgc

SEQ ID NO: 273695 - DNA, 75 bp, synthetic construct
  source 1..75: mol_type = other DNA
gctgcaggtgctgaagaacggacaggaaatctttcagcaacccgcgacggatgtcagcagggtattttcatcagt

SEQ ID NO: 273696 - DNA, 75 bp, synthetic construct
  source 1..75: mol_type = other DNA
tcacgattaaccagaactgtcggattctgggaaaactgtcagctaaccagattgaaggtgatattgtcaaaacgg

SEQ ID NO: 273697 - DNA, 75 bp, synthetic construct
  source 1..75: mol_type = other DNA
aatttcaacagtcataaccaacagtcatactggtattccacctgcaagctgcaggtgtttaaaaacggggctgag

SEQ ID NO: 273698 - DNA, 75 bp, synthetic construct
  source 1..75: mol_type = other DNA
agcggatggacacggatatcgcagaagtgacccggaaaatcgggaaggcggaaaacactctcacgcagctggttg

SEQ ID NO: 273699 - DNA, 75 bp, synthetic construct
  source 1..75: mol_type = other DNA
agataacggcggtcccgcgtcttgcggtgtatgacccgacggtacagtttgaattctggttctcagaaaaacgca

SEQ ID NO: 273700 - DNA, 75 bp, synthetic construct
  source 1..75: mol_type = other DNA
tttgtggcgcaggggaatcagctgttcatgaacgacgtgttcctgaagcgactgtttgcggtgagcatcacgtca

SEQ ID NO: 273701 - DNA, 75 bp, synthetic construct
  source 1..75: mol_type = other DNA
taccctgacggttaatacacttgatgccacgggcagtgattttgtcctgcgcactgacctgaaggacgctgataa

SEQ ID NO: 273702 - DNA, 75 bp, synthetic construct
  source 1..75: mol_type = other DNA
ataatgtcaccattaacgagaactgtgtcatcagagggaaactgtctgcaaaccagattgaaggcgatctcgtta

SEQ ID NO: 273703 - DNA, 75 bp, synthetic construct
  source 1..75: mol_type = other DNA
ccatcacagcgataaaggctctcagtatgtgtcactggcctatatggagcgattaaaagaagcaaaactgctggc

SEQ ID NO: 273704 - DNA, 75 bp, synthetic construct
  source 1..75: mol_type = other DNA
gcgcaagcgatatagttacagttccaattaagaataatctttatagtcttccttttacagttctggttgaggttc

SEQ ID NO: 273705 - DNA, 75 bp, synthetic construct
  source 1..75: mol_type = other DNA
accgcaattatccgtattggaggccagactacagccgggttacgtcatttatttggtcatgtcaggaatttcaga

SEQ ID NO: 273706 - DNA, 75 bp, synthetic construct
  source 1..75: mol_type = other DNA
cagacgggtaaacgaaaacgcatcgcttgaaaaaatggttatggggatgcgtgtaaagtcagatcagtctacgtg

SEQ ID NO: 273707 - DNA, 75 bp, synthetic construct
  source 1..75: mol_type = other DNA
atggatttttgcagaggcaacaatcctggcaattgatgatgagttaaaaataggatctcagatacagtattctcc

SEQ ID NO: 273708 - DNA, 75 bp, synthetic construct
  source 1..75: mol_type = other DNA
taaatgaaaatgccgggctggaaaaaatgcttattggtatgcgggtaaagtccgaacggtccacatgtgtagtca

SEQ ID NO: 273709 - DNA, 75 bp, synthetic construct
  source 1..75: mol_type = other DNA
ggagcggctattattcttggcttcggatcttcggcagatgggccagacggatttccttattgcgatattggtgga

SEQ ID NO: 273710 - DNA, 75 bp, synthetic construct
  source 1..75: mol_type = other DNA
atggcagcagtaaaaatctctggtgtgctgaaagatggtgcgggaaaaccaatacaaaactgcactattcagctc

SEQ ID NO: 273711 - DNA, 75 bp, synthetic construct
  source 1..75: mol_type = other DNA
acgtcatctattcggccatttgagaaatcttcgtctctggcataaagaattaactgatgcgcaaatgggggagag

SEQ ID NO: 273712 - DNA, 75 bp, synthetic construct
  source 1..75: mol_type = other DNA
ctcaccagcgaactggaacagaaatacaaaccgtctatctgttagtgaaaactctattgatgaatttggttttac

SEQ ID NO: 273713 - DNA, 75 bp, synthetic construct
  source 1..75: mol_type = other DNA
gcgaaaaatagcgagacagccgcaaagacgagcgaaaccaacgcaaagtccagccagacggcagcgaagaccagc

SEQ ID NO: 273714 - DNA, 75 bp, synthetic construct
  source 1..75: mol_type = other DNA
tcagtatgcgccgaaaaaaggtggtataactgaagcgggagattatatttaccttgcaacaccacaatttgaaaa

SEQ ID NO: 273715 - DNA, 75 bp, synthetic construct
  source 1..75: mol_type = other DNA
acatgccgggaccattaccgtctatgaaggttccagaccaggtacgctgaatgattttctcggtgccatgacgga

SEQ ID NO: 273716 - DNA, 75 bp, synthetic construct
  source 1..75: mol_type = other DNA
aaaaaagactacgtggtcctatattcagaactctgcaaccatccgtattggaggccagactacagcagggtctag

SEQ ID NO: 273717 - DNA, 75 bp, synthetic construct
  source 1..75: mol_type = other DNA
atctattcggccatttgagaaatcttcgtctctggcataaagaattaactgatgcgcaaatgggggagagtatta

SEQ ID NO: 273718 - DNA, 75 bp, synthetic construct
  source 1..75: mol_type = other DNA
gatttttgcagaggcaacaatcctggcaattgatgatgagttaaaaataggatctcagatacagtattctcctaa

SEQ ID NO: 273719 - DNA, 75 bp, synthetic construct
  source 1..75: mol_type = other DNA
atggcagcagtaaaaatctcaggtgtgctgaaagatggcacaggaaaaccagtacagaactgcaccattgtgctg

SEQ ID NO: 273720 - DNA, 75 bp, synthetic construct
  source 1..75: mol_type = other DNA
ttgcgatataggcggggctaaccgacgtgtatatgagtcatgcggagtaagagatctcgttatgggattcagggt

SEQ ID NO: 273721 - DNA, 75 bp, synthetic construct
  source 1..75: mol_type = other DNA
gctgcaaaagccagtgaaactaacgcaaagacgagtgaaacaaaagcagcagctagcgagacagaagcaacgtca

SEQ ID NO: 273722 - DNA, 75 bp, synthetic construct
  source 1..75: mol_type = other DNA
agtgcacaggcggcagcgacctcacagactgcatcggcaaactccgcgacagcagccaaaaaatcagaaaccaac

SEQ ID NO: 273723 - DNA, 75 bp, synthetic construct
  source 1..75: mol_type = other DNA
atataaaaagattgttattggcgacgacgaaataacgatgcctggtgacaaggttgttaagtttaaacgcgcatc

SEQ ID NO: 273724 - DNA, 75 bp, synthetic construct
  source 1..75: mol_type = other DNA
cgtcatttatttggtcatgtcaggaatttcagaatatggcacaaggcattgactgatgctcaggtgggggagtca

SEQ ID NO: 273725 - DNA, 75 bp, synthetic construct
  source 1..75: mol_type = other DNA
agcagctgagagcgagagcgcagcagccggttctgcgacttcagcagctggagcagcaactgctgcggctaacag

SEQ ID NO: 273726 - DNA, 75 bp, synthetic construct
  source 1..75: mol_type = other DNA
atatacgtggttcagaccgacgaataaatgaaaatgccgggctggaaaaaatgcttattggtatgcgggtaaagt

SEQ ID NO: 273727 - DNA, 75 bp, synthetic construct
  source 1..75: mol_type = other DNA
ttccttttacggttctttgtgaggtacataagaactggtataaaacgccaaatgcagcaccgcgtgtttttcaga

SEQ ID NO: 273728 - DNA, 75 bp, synthetic construct
  source 1..75: mol_type = other DNA
acgagccgcgatttgaacgtgatggcctgcttattgaggggcaaagaactaatcttctgcttaattcaacaaatc

SEQ ID NO: 273729 - DNA, 75 bp, synthetic construct
  source 1..75: mol_type = other DNA
atcggcagtgatgaaataacaatgcctgttaatggcatatgccaatttagccgggcttcatctgcaacgtatatt

SEQ ID NO: 273730 - DNA, 75 bp, synthetic construct
  source 1..75: mol_type = other DNA
attaccgtctatgaaggttccagaccaggtacgctgaatgattttctcggtgccatgacggaagaggatgtcatg

SEQ ID NO: 273731 - DNA, 75 bp, synthetic construct
  source 1..75: mol_type = other DNA
gaggctacattaaaagcagatacaacagaaaatacggttggtggttttgtccagtattctccggatacagggcag

SEQ ID NO: 273732 - DNA, 75 bp, synthetic construct
  source 1..75: mol_type = other DNA
acagcgtcatcctgctggttgaaggttttccgccttcacatgccgggaccattaccgtctatgaaggttccagac

SEQ ID NO: 273733 - DNA, 75 bp, synthetic construct
  source 1..75: mol_type = other DNA
gaaactaacgcaaagtccagccagacggcagcgaagaccagcgaaacgaatgccaaagccagtgaaactgtggcg

SEQ ID NO: 273734 - DNA, 75 bp, synthetic construct
  source 1..75: mol_type = other DNA
accgtctatgaagattcccgacccggtacgctgaatgattttctcggtgccatgacggaggatgatgcccgtccg

SEQ ID NO: 273735 - DNA, 75 bp, synthetic construct
  source 1..75: mol_type = other DNA
ccggcacgctgaatgattttctcggggccatgacggaagaagatgtcatgccggaggcattgcgtcgttttgagg

SEQ ID NO: 273736 - DNA, 75 bp, synthetic construct
  source 1..75: mol_type = other DNA
cctgatgtgtggataccgtttaacgattcactggatatgattacgggcttttcgccatcatataaaaaaattgtt

SEQ ID NO: 273737 - DNA, 75 bp, synthetic construct
  source 1..75: mol_type = other DNA
ccgctattagttcattagcagaagttaataccaattgggatgaatcgccaaacaaagaaggtagcgcacgtattc

SEQ ID NO: 273738 - DNA, 75 bp, synthetic construct
  source 1..75: mol_type = other DNA
caacatatatcaacaaatctggcgaactgaaaacggcggaaattaatgagccgcgatttgagtgtgatggcctgc

SEQ ID NO: 273739 - DNA, 75 bp, synthetic construct
  source 1..75: mol_type = other DNA
ataaaaaaattgttattggcgacgatgaaataacaatgcctggcgacaagattgtaaagtttaaacgcgcatcga

SEQ ID NO: 273740 - DNA, 75 bp, synthetic construct
  source 1..75: mol_type = other DNA
cgggcacgctgaatgattttctcggcgccatgacggaagaagatgtcatgccggaggcattgcgtcgttttgagg

SEQ ID NO: 273741 - DNA, 75 bp, synthetic construct
  source 1..75: mol_type = other DNA
gtttactggcgaaagagtatggggttgataattacggttttaattatgcaaccgtcaccgtgacagacagccttg

SEQ ID NO: 273742 - DNA, 75 bp, synthetic construct
  source 1..75: mol_type = other DNA
tgttaatacgcggtctttatcggttgaaatcaccggtgtagctgccgacaggctcactgctcgagttaacaagga

SEQ ID NO: 273743 - DNA, 75 bp, synthetic construct
  source 1..75: mol_type = other DNA
atcgggggacaaacgacgacaggattacgacaccttaatggtcatataaaaaacctccgtttctggaacagagca

SEQ ID NO: 273744 - DNA, 75 bp, synthetic construct
  source 1..75: mol_type = other DNA
gggcatgcgcttcatcgtttattataacaggcgcatcccctgtaacacgcgccagcgatattgtaacggtcccca

SEQ ID NO: 273745 - DNA, 75 bp, synthetic construct
  source 1..75: mol_type = other DNA
gcatcgaaagcaacctacattaacaaatctggtgtactgacggaggctgcaattgacgaaccacgcttcgaaaaa

SEQ ID NO: 273746 - DNA, 75 bp, synthetic construct
  source 1..75: mol_type = other DNA
tgatcttaagtgcatcaggtgtagatgatttcggattccagtacgcaaaatttacattaaaaccagaaatggtag

SEQ ID NO: 273747 - DNA, 75 bp, synthetic construct
  source 1..75: mol_type = other DNA
accggcggtcatcaaaccggagcggctattattcttggcttcggtcgttcaacagattacgacggatttccttat

SEQ ID NO: 273748 - DNA, 75 bp, synthetic construct
  source 1..75: mol_type = other DNA
gaacaaactacatgctcaattcggaaagccctgccagttgggggcgatcgtcaaatatggatgtgcccgaaacag

SEQ ID NO: 273749 - DNA, 75 bp, synthetic construct
  source 1..75: mol_type = other DNA
attacgccatttatttgggcatgtgaggaattttcgtctctggcataaagagctaacagatgcgcagcttgggga

SEQ ID NO: 273750 - DNA, 75 bp, synthetic construct
  source 1..75: mol_type = other DNA
aagtccagccagctgggggaagtcatcaaacatggatgtgcccgaaaccgggacggatagttttggttttactta

SEQ ID NO: 273751 - DNA, 75 bp, synthetic construct
  source 1..75: mol_type = other DNA
gagagtgccgcagccagttctgcaagcgcggcggctgcttctgccactgcatcagctaacagtcaaaaagcagca

SEQ ID NO: 273752 - DNA, 75 bp, synthetic construct
  source 1..75: mol_type = other DNA
aacgaatgccaaagccagtgaaactgcagcaaaaaacagccaggtttcagcagcccaaagcgagagcgcggcagc

SEQ ID NO: 273753 - DNA, 75 bp, synthetic construct
  source 1..75: mol_type = other DNA
accaacgcaaagtccagccagacggcagcgaagaccagcgaaacgaatgccaaagccagtgaaactgcggcaaaa

SEQ ID NO: 273754 - DNA, 75 bp, synthetic construct
  source 1..75: mol_type = other DNA
gtctacgatcaactgcgtttctggcaagccggttcgctggatattcgtaatctgcacaccttaaaagtggtgctg

SEQ ID NO: 273755 - DNA, 75 bp, synthetic construct
  source 1..75: mol_type = other DNA
ttgttgcctttaccggcagccagggcggtgggcagttaagtccggtgcgtttaaccctggcgggcgtggcgctgg

SEQ ID NO: 273756 - DNA, 75 bp, synthetic construct
  source 1..75: mol_type = other DNA
cggcatcgccctgcttaatcctgacgtctacgatcagttgcgtttctggcaagccggttcgctggatattcgtaa

SEQ ID NO: 273757 - DNA, 75 bp, synthetic construct
  source 1..75: mol_type = other DNA
tttaatatatatatgaggcgtatgtttaatggcgaaacatatataaaaacagatgtattaaaaaataaaaaagaa

SEQ ID NO: 273758 - DNA, 75 bp, synthetic construct
  source 1..75: mol_type = other DNA
cctataataaatcacagggaccattagccagttatgggcagatgggtgacagcgggtcgccattatttgcttatg

SEQ ID NO: 273759 - DNA, 75 bp, synthetic construct
  source 1..75: mol_type = other DNA
accggtactaactctgattctgacctgtcttcaatccaggacgaaatcaaatcccgtctcgatgaaattgaccgc

SEQ ID NO: 273760 - DNA, 75 bp, synthetic construct
  source 1..75: mol_type = other DNA
gatgatgaaataacgatgcctggcgacaaggttgttaagtttaaacgcgcatcaactgccacatatatcaataaa

SEQ ID NO: 273761 - DNA, 75 bp, synthetic construct
  source 1..75: mol_type = other DNA
tagtgaacacgctggcctcagaaaatccggatgaagccgggcgttacagtatggatgttgagtatggccagtaca

SEQ ID NO: 273762 - DNA, 75 bp, synthetic construct
  source 1..75: mol_type = other DNA
cgaaataacgatgcctggcgacaagattgttaagtttaaacgtgcatcgaaagcaacctatattaacaaatctgg

SEQ ID NO: 273763 - DNA, 75 bp, synthetic construct
  source 1..75: mol_type = other DNA
cggcggtgctggaagggctgaccagcggcatcgccctgcttaatcctgacgtctacgatcagttgcgtttctggc

SEQ ID NO: 273764 - DNA, 75 bp, synthetic construct
  source 1..75: mol_type = other DNA
cgtgtgattgtgcccggcgagctgcgcgtttccgtagtcagtgcctttattggcgcgccggtattgatcttcctc

SEQ ID NO: 273765 - DNA, 75 bp, synthetic construct
  source 1..75: mol_type = other DNA
ttggaaattgggaattaggtcttgcgatggataaacacagcatccgcagcattcccattggttacgatgagtggg

SEQ ID NO: 273766 - DNA, 75 bp, synthetic construct
  source 1..75: mol_type = other DNA
gtgaacaccgcaatttttaacggcaaagcatccatgaccagcgttgagatcgcagagctggtgggtagccaacac

SEQ ID NO: 273767 - DNA, 75 bp, synthetic construct
  source 1..75: mol_type = other DNA
agtgagattctccgcgctatagaagtcaccattgtcgtgcacgaagacattatgccgtggcgttatccagccaag

SEQ ID NO: 273768 - DNA, 75 bp, synthetic construct
  source 1..75: mol_type = other DNA
ctgcccgtccaacatcagcccgtgctgcttgaagcccagcaggcttaccttggacaagggatggattgcttggcc

SEQ ID NO: 273769 - DNA, 75 bp, synthetic construct
  source 1..75: mol_type = other DNA
gatctggctatcttgctgacaaaagcaagagaacatagcgttgccttggtaggtccagcggcggaggaactcttt

SEQ ID NO: 273770 - DNA, 75 bp, synthetic construct
  source 1..75: mol_type = other DNA
atgcggcgtaacaacgagaaagtgatctttctggtgccgcacggctgggcagtggatatccccgccatgctgatg

SEQ ID NO: 273771 - DNA, 75 bp, synthetic construct
  source 1..75: mol_type = other DNA
gctgagttggcaatacgcgggccggagaaaattcagccgcgcgttgactggcaagggctggagatcatcgaagag

SEQ ID NO: 273772 - DNA, 75 bp, synthetic construct
  source 1..75: mol_type = other DNA
accgttcatccagtcggttcgtcaggggtactggggctattatttgcccgatcaggatcatggcccggagcacag

SEQ ID NO: 273773 - DNA, 75 bp, synthetic construct
  source 1..75: mol_type = other DNA
gccattcaacgatgatttggcctggaaggtccagcgcgaactggttaacaactacttccggaccagtaagcaact

SEQ ID NO: 273774 - DNA, 75 bp, synthetic construct
  source 1..75: mol_type = other DNA
actgatgctaagtgccgcaatctggtcaatgcctacagcatcccaaccgatacgcacgaatttatgacaccagat

SEQ ID NO: 273775 - DNA, 75 bp, synthetic construct
  source 1..75: mol_type = other DNA
cgaaaacgggtatgtcagatgcgaaatgccgcaatctggtgaacgcatatcagatccctaccgacacccatgagt

SEQ ID NO: 273776 - DNA, 75 bp, synthetic construct
  source 1..75: mol_type = other DNA
acaaaagcaagagaacatagcgttgccttggtaggtccagcggcggaggaactctttgatccggttcctgggtga

SEQ ID NO: 273777 - DNA, 75 bp, synthetic construct
  source 1..75: mol_type = other DNA
gcgtcaggcgtatctgggccaggaagaagatcgtctggccagccgtgcggatcagctggaagaatttgtgcatta

SEQ ID NO: 273778 - DNA, 75 bp, synthetic construct
  source 1..75: mol_type = other DNA
gtgaactgcatagactcatttctgaatatttgcagtgtaagcgacgtaaagataaatctgttgagcccccccccc

SEQ ID NO: 273779 - DNA, 75 bp, synthetic construct
  source 1..75: mol_type = other DNA
aggccttacgcggcgaaaaaatcggtcagcaattgatgagcaaggcgctggaatcatgtacgcgccactggccgg

SEQ ID NO: 273780 - DNA, 75 bp, synthetic construct
  source 1..75: mol_type = other DNA
tttcaggcttacgttgtggcgctgatggagatgttcaggccgtatgtaatggtgaattatctgttgcggcaaaaa

SEQ ID NO: 273781 - DNA, 75 bp, synthetic construct
  source 1..75: mol_type = other DNA
tttcaaccagaaataacataagttctgtccctttaagctgtcttgttgaaatacataaaaattgggactctacgc

SEQ ID NO: 273782 - DNA, 75 bp, synthetic construct
  source 1..75: mol_type = other DNA
accgtatcaggtgactatatttatctggctaccccacaagtagagaatggggcttgtgtatcatcttttattata

SEQ ID NO: 273783 - DNA, 75 bp, synthetic construct
  source 1..75: mol_type = other DNA
tctgcgacttcagcagctggatcagcaactgctgcggctaacagccagaaagctgcgaagacgagtgaaactaac

SEQ ID NO: 273784 - DNA, 75 bp, synthetic construct
  source 1..75: mol_type = other DNA
agacagcagctaaagcaagtgaggatgcagccagagagtatgcaagccaggctgcggagccgtataaacaagtat

SEQ ID NO: 273785 - DNA, 75 bp, synthetic construct
  source 1..75: mol_type = other DNA
caaaaaccagtgaaaccaacacaaaggcgagcgagactgcggcgactaactcggcgaaagcatccgctgcaagcc

SEQ ID NO: 273786 - DNA, 75 bp, synthetic construct
  source 1..75: mol_type = other DNA
caaccagtagttatcagattcatagtgtaactggagagaacaggttttctctgtccatcggtgaaacctgcactt

SEQ ID NO: 273787 - DNA, 75 bp, synthetic construct
  source 1..75: mol_type = other DNA
aaacaaaaacagtatggaaatatattcgtgaagctgctgtgattcgtatcgggggacaaacgacgacaggattac

SEQ ID NO: 273788 - DNA, 75 bp, synthetic construct
  source 1..75: mol_type = other DNA
tgctaattttgataagactagttttatggatgtaaccacccctcaaatagagctaggttcttgcttatcatcatt

SEQ ID NO: 273789 - DNA, 75 bp, synthetic construct
  source 1..75: mol_type = other DNA
accccagaaaaatatttagatagttctggctcatatggaattatatcaggggcagcagcaaataagatagcggta

SEQ ID NO: 273790 - DNA, 75 bp, synthetic construct
  source 1..75: mol_type = other DNA
ggtcactataccatccgacaaaattgtcccgttttcccgcgcgagttccgcgacctatatcaataagtccggcgc

SEQ ID NO: 273791 - DNA, 75 bp, synthetic construct
  source 1..75: mol_type = other DNA
tggttttgctactcgtggtaataaagcgataatcacaaacggcgactcaaatgccattaaagagtataatagtac

SEQ ID NO: 273792 - DNA, 75 bp, synthetic construct
  source 1..75: mol_type = other DNA
cttctgctggaggagaacgtcacttgtttggtcacgttcgtaacctgagaatatggcataaagaattaactgatg

SEQ ID NO: 273793 - DNA, 75 bp, synthetic construct
  source 1..75: mol_type = other DNA
ttattttttcaaccagaaataacataagttctgtccctttaagctgtcttgttgaaatacataaaaattgggact

SEQ ID NO: 273794 - DNA, 75 bp, synthetic construct
  source 1..75: mol_type = other DNA
gaattgtggtactaccacagtttactggcgaaagagtatggggttgataattacggttttaattatgcaaccgtc

SEQ ID NO: 273795 - DNA, 75 bp, synthetic construct
  source 1..75: mol_type = other DNA
ccgcgacagcagccaaaaaatcagaaaccaacgcgaaaaatagcgagacagccgcaaagacgagcgaaaccaacg

SEQ ID NO: 273796 - DNA, 75 bp, synthetic construct
  source 1..75: mol_type = other DNA
ggatgcagcagcccaaagcgagagtgcggcagctggttctgcaagcgcggcggctgcttctgccactgcatcagc

SEQ ID NO: 273797 - DNA, 75 bp, synthetic construct
  source 1..75: mol_type = other DNA
tactggtgaacacggtggcttctgaaaatccggatgaagccggacgttacagcatggatgttgagtatggccagt

SEQ ID NO: 273798 - DNA, 75 bp, synthetic construct
  source 1..75: mol_type = other DNA
agattaaaaaatctggtgtgctgacagaggctgccattgacgagccacgatttgaacgtgatggcctgcttattg

SEQ ID NO: 273799 - DNA, 75 bp, synthetic construct
  source 1..75: mol_type = other DNA
tgtatcatcttttattatatcaggagcgacggcggcgacccgcgcaagcgatatagttacagttccaattaagaa

SEQ ID NO: 273800 - DNA, 75 bp, synthetic construct
  source 1..75: mol_type = other DNA
gtggttcaaaccgacgaataaatgaaaatgccgggctggaaaaaatgcttattggtatgcgggtaaagtccgaac

SEQ ID NO: 273801 - DNA, 75 bp, synthetic construct
  source 1..75: mol_type = other DNA
tcttgttacattagattgaaaaggaataaaaaattaaaagacgtcgctgactcattattaattttcacaactaga

SEQ ID NO: 273802 - DNA, 75 bp, synthetic construct
  source 1..75: mol_type = other DNA
gataatttcgatcttcattatatttcaaaagaggctaccaaattacttggtgctatgctgcagttggttatgcct

SEQ ID NO: 273803 - DNA, 75 bp, synthetic construct
  source 1..75: mol_type = other DNA
agtgaaaccaacgcaaaggcgagcgagactgcggcggcgaactcggcgaaagcatcggcagcaagccagacagca

SEQ ID NO: 273804 - DNA, 75 bp, synthetic construct
  source 1..75: mol_type = other DNA
gcaaatttcagcgattaacatagtaaccgtttccggcagtaaaggttttgatgtaacaggcggagaaaagtatgt

SEQ ID NO: 273805 - DNA, 75 bp, synthetic construct
  source 1..75: mol_type = other DNA
gtgggcaagccgttatatcaggatctgatttcccgcacaaaagcggcattgcagaaaaatcccaaaaacgttctg

SEQ ID NO: 273806 - DNA, 75 bp, synthetic construct
  source 1..75: mol_type = other DNA
attcggcacgctggggtgtgggtaaaccgttatatcaggacctgattgcgcgcaccaaagctgcattacagaaga

SEQ ID NO: 273807 - DNA, 75 bp, synthetic construct
  source 1..75: mol_type = other DNA
cccggctgaccactgcctgcatgatgtgcaggatatgagtacgctgaatcatccgagggcagatctgagcaaagg

SEQ ID NO: 273808 - DNA, 75 bp, synthetic construct
  source 1..75: mol_type = other DNA
gcattccaggttataaaagacagtctgacactgggactgaatgcgctgacgctgacggatgttacaaaaaatgca

SEQ ID NO: 273809 - DNA, 75 bp, synthetic construct
  source 1..75: mol_type = other DNA
ggtgatgtggtggtcagtggtgcaactgagccggattggtactacgtcatcgtactggcccggcattccaggcca

SEQ ID NO: 273810 - DNA, 75 bp, synthetic construct
  source 1..75: mol_type = other DNA
aataaagcctggtccctgacgcgcccggtggatgacgcagtctccctgctgacacggggtggcagactgagctgt

SEQ ID NO: 273811 - DNA, 75 bp, synthetic construct
  source 1..75: mol_type = other DNA
ggggccagccaggattcggcacgctggggtgtgggtaaaccgttatatcaggacctgattgcgcgcacgaaagct

SEQ ID NO: 273812 - DNA, 75 bp, synthetic construct
  source 1..75: mol_type = other DNA
taaagcatgcgcatttaacgacatcattccggcagatcactgcctgcatgatgttcaggatatgagcgcactgaa

SEQ ID NO: 273813 - DNA, 75 bp, synthetic construct
  source 1..75: mol_type = other DNA
gctgaatgtgctgacgttaactgatatcaccaaaaatgccgcgtacggcgtcgatattggtagtctggtgctgga

SEQ ID NO: 273814 - DNA, 75 bp, synthetic construct
  source 1..75: mol_type = other DNA
gcccggcggcaacacgccatcgggtccgtctgcagatacgtccgttcgcacaatctccctgctgccggcagccgg

SEQ ID NO: 273815 - DNA, 75 bp, synthetic construct
  source 1..75: mol_type = other DNA
ccggttgttaactacctgaaagataaactgtctaatccggttcgtctggtcaaagattacctcgacggcgttgat

SEQ ID NO: 273816 - DNA, 75 bp, synthetic construct
  source 1..75: mol_type = other DNA
tagcaaccgagttctctgaaactgcaccggctaccctgaaatctgttaacgatgtgaaagctgacgagcagatcc

SEQ ID NO: 273817 - DNA, 75 bp, synthetic construct
  source 1..75: mol_type = other DNA
gcgtgaactgtccgttcaggcaaccaacggcaccaactcccagtctgacctggactccatccagaatgaaatcac

SEQ ID NO: 273818 - DNA, 75 bp, synthetic construct
  source 1..75: mol_type = other DNA
cctcagctttcatcagtggtaaggcaccggaaatcaaaccctcgcccggcggcgacacgccatcggggccgtctg

SEQ ID NO: 273819 - DNA, 75 bp, synthetic construct
  source 1..75: mol_type = other DNA
ggcttccgctgccggattcatacgatgctccggatccgcgcattaaacagctggcgcgccgcagtacagtgacgc

SEQ ID NO: 273820 - DNA, 75 bp, synthetic construct
  source 1..75: mol_type = other DNA
gagggctggcagccgtttggtagtccggtggccataaccccttataccctgatgcaggcgattacagcagaaggt

SEQ ID NO: 273821 - DNA, 75 bp, synthetic construct
  source 1..75: mol_type = other DNA
atcatgggacatgcgaagaaaatcgggctgatcaacttgctcaaagatggcattaagggagcaaccgcgctatga

SEQ ID NO: 273822 - DNA, 75 bp, synthetic construct
  source 1..75: mol_type = other DNA
ctgatggcgttaactcgatgcttggccgctcgctgggaatggttcccgcttccgatccgcatcattacgctgttg

SEQ ID NO: 273823 - DNA, 75 bp, synthetic construct
  source 1..75: mol_type = other DNA
tgccggcagccggagaggctgctgcgcagggctggagcattaaggatggcggaattcagttgtcagatggtgtat

SEQ ID NO: 273824 - DNA, 75 bp, synthetic construct
  source 1..75: mol_type = other DNA
tgcaaacgccgcatgtacactaacccgctgcgcgtgctggattcaaaaaatccggaagtgcaggcgcttctcaac

SEQ ID NO: 273825 - DNA, 75 bp, synthetic construct
  source 1..75: mol_type = other DNA
gatttgcgctctggtgagcaaacggcagttgcgcaggatagcgtagccgcgcatttgcgcacgttactgggttaa

SEQ ID NO: 273826 - DNA, 75 bp, synthetic construct
  source 1..75: mol_type = other DNA
aacccgttcctgatgtcgttcttcacccagaccacaggcggcaaactgaatctgatgcatcacaagaaagccgga

SEQ ID NO: 273827 - DNA, 75 bp, synthetic construct
  source 1..75: mol_type = other DNA
ctgacactgggactgaatgcgctgacgctgacggatgttacaaaaaatgcagcgtatggcgttgagatagaaagt

SEQ ID NO: 273828 - DNA, 75 bp, synthetic construct
  source 1..75: mol_type = other DNA
gtggcaaaaaacattcaagccattcgcctgaacgattacctgcctggcgaaacggccatctggcagcgcattgaa

SEQ ID NO: 273829 - DNA, 75 bp, synthetic construct
  source 1..75: mol_type = other DNA
actccaagaatccggaagtgcaggcgctacttaacgatgctccggcgttgggcgattatctggacgaagagtctc

SEQ ID NO: 273830 - DNA, 75 bp, synthetic construct
  source 1..75: mol_type = other DNA
ggtacagccgctgtgggaactaaagcagcgaccgatccgcgcagtgtcggcacccaggtggacgatggcaccctg

SEQ ID NO: 273831 - DNA, 75 bp, synthetic construct
  source 1..75: mol_type = other DNA
tggaagaaagaagacttcctgcaacagtctcgcttcgcgctgtgcaactgccgcgtctgcaatcgtcctttcgcc

SEQ ID NO: 273832 - DNA, 75 bp, synthetic construct
  source 1..75: mol_type = other DNA
gtcgcaagagtacgaactggcggtgtggaagaaagaagatttcctgcaacagtcccgttttgtgctgtgcagctg

SEQ ID NO: 273833 - DNA, 75 bp, synthetic construct
  source 1..75: mol_type = other DNA
gtctcgcctgaaaaccggagatacagttactactactggctcgagtgctgcgacctatacttatgatgcggctaa

SEQ ID NO: 273834 - DNA, 75 bp, synthetic construct
  source 1..75: mol_type = other DNA
caaaaaactgcttccgtatatcccgaataacgcggggatcctgctggtaccatgctgtcgtggtggttcggcatt

SEQ ID NO: 273835 - DNA, 75 bp, synthetic construct
  source 1..75: mol_type = other DNA
tgaaagagggctggcagccgtttggtagtccggtggccataaccccttataccctgatgcaggcgattgcagcag

SEQ ID NO: 273836 - DNA, 75 bp, synthetic construct
  source 1..75: mol_type = other DNA
gcaatgaatgacaaaccagaaacaaaaagaaaacaagggacatccactaacactgaacttcccctgtattcattt

SEQ ID NO: 273837 - DNA, 75 bp, synthetic construct
  source 1..75: mol_type = other DNA
cacgtcttcattattccataactcaatttttggagacaatactgtcataaacttcggaaatgaaaactcattttc

SEQ ID NO: 273838 - DNA, 75 bp, synthetic construct
  source 1..75: mol_type = other DNA
agtcccgttttgtgctgtgcagctgtcgcgtctgcaatcgtcctttcgccgtccagaaagagatcgactacgcca

SEQ ID NO: 273839 - DNA, 75 bp, synthetic construct
  source 1..75: mol_type = other DNA
tggattctgcggtaaccaacctgaacaacaccaccaccaacctgtctgaagcgcagtcccgtattcaggacgccg

SEQ ID NO: 273840 - DNA, 75 bp, synthetic construct
  source 1..75: mol_type = other DNA
tttatattaaaaacaatatgttaaaggactggaagatcactgacgtgataacatttaacgataaagccacggata

SEQ ID NO: 273841 - DNA, 75 bp, synthetic construct
  source 1..75: mol_type = other DNA
atctctgagtatctgaaacaaggtggcatgaatcctgccaacaaaatactggttgaaattgacttggaagaagcc

SEQ ID NO: 273842 - DNA, 75 bp, synthetic construct
  source 1..75: mol_type = other DNA
atttcagctcatgggcgcgtcgtggcattattcccgatcgtatggcaaccgctattctgaacgcagccgggcgca

SEQ ID NO: 273843 - DNA, 75 bp, synthetic construct
  source 1..75: mol_type = other DNA
agcattaaggatggcggaattcagttgtcagatggtgtatttaagatcaccaagcagagcaataaaacctggtcc

SEQ ID NO: 273844 - DNA, 75 bp, synthetic construct
  source 1..75: mol_type = other DNA
cggggtggcagactgagctgtaagtttcgactgtcaggcgcactgaccaacaaccagttcggtctgggaatttat

SEQ ID NO: 273845 - DNA, 75 bp, synthetic construct
  source 1..75: mol_type = other DNA
tccggcatggcggatttcagcgcggcgaaactgacggttgctgatggtacagcaattgctgctgcggatgtcaag

SEQ ID NO: 273846 - DNA, 75 bp, synthetic construct
  source 1..75: mol_type = other DNA
accggaaatcaaaccctcgcccggcggcaacacgccatcggggccgtctgaagatgcatccatacgcacaatctc

SEQ ID NO: 273847 - DNA, 75 bp, synthetic construct
  source 1..75: mol_type = other DNA
tgccacggttactccgaaactgaatggagtggctggcccggcattccaggttataaaagacagtctgacactggg

SEQ ID NO: 273848 - DNA, 75 bp, synthetic construct
  source 1..75: mol_type = other DNA
tctcaccgggttaaatgcgcagtgccataacggcagtgcagcggctgtgccatggatttgtggcgacacgacgta

SEQ ID NO: 273849 - DNA, 75 bp, synthetic construct
  source 1..75: mol_type = other DNA
cattattccggatcgtctggcaaccgctattctgaacgcagccgggcgcacctcagctttcatcagtggtaaggc

SEQ ID NO: 273850 - DNA, 75 bp, synthetic construct
  source 1..75: mol_type = other DNA
aggtgagctggccgcagatgtgcgatttacgggggcgattgatgtcgttgcagcgcaggccacgcttaacgatgc

SEQ ID NO: 273851 - DNA, 75 bp, synthetic construct
  source 1..75: mol_type = other DNA
atcacaggaaagccggaaacacgaagctgggggagttcggcgattacggtaacgactggcagacgctggagctgg

SEQ ID NO: 273852 - DNA, 75 bp, synthetic construct
  source 1..75: mol_type = other DNA
aatgatggtcagactatctctatcgacctgaagaaaattgactctgatactctgggtttgaatggtttcaacgtt

SEQ ID NO: 273853 - DNA, 75 bp, synthetic construct
  source 1..75: mol_type = other DNA
ttgtaccgtggatttgtggcgacacgacgtattactggaaaaacacatacggcacacagtatgactccgtctacg

SEQ ID NO: 273854 - DNA, 75 bp, synthetic construct
  source 1..75: mol_type = other DNA
caggaaccgcagctgaacccggaacacactgtgcgtgagtccattgaagaggcggtttctgaagtggttaacgcc

SEQ ID NO: 273855 - DNA, 75 bp, synthetic construct
  source 1..75: mol_type = other DNA
ccaccaacttaccggcagaagacccggatattgctgatgcaggttattacggcgcgcaatcccgtagtaatggta

SEQ ID NO: 273856 - DNA, 75 bp, synthetic construct
  source 1..75: mol_type = other DNA
gatgttacaaaaaatgcagcgtatggcgttgagatagaaagtctggtgctggagataaatgcaccggcagcataa

SEQ ID NO: 273857 - DNA, 75 bp, synthetic construct
  source 1..75: mol_type = other DNA
gggctggggatttatctgtatacggatgctcccgttcctgatggtgtggcgatgacgggtaccggtaatccgttc

SEQ ID NO: 273858 - DNA, 75 bp, synthetic construct
  source 1..75: mol_type = other DNA
ggttataaaagacagtctgacactgggactgaatgcgctgacgctgacggatgttacaaaaaatgcagcgtatgg

SEQ ID NO: 273859 - DNA, 75 bp, synthetic construct
  source 1..75: mol_type = other DNA
acacgaagctgggggagttcggcgattacggtaacgactggcagacgctggagctggtgttcaccgctggcagtg

SEQ ID NO: 273860 - DNA, 75 bp, synthetic construct
  source 1..75: mol_type = other DNA
accgccggcagtgccacggttactccgaaactgaatggagtggctggcccggcattccaggttataaaagacggt

SEQ ID NO: 273861 - DNA, 75 bp, synthetic construct
  source 1..75: mol_type = other DNA
gctgctgcgcagggctggagcattaagaatggcggaattcagttgtcagatggtgtatttaagatcaccaagcag

SEQ ID NO: 273862 - DNA, 75 bp, synthetic construct
  source 1..75: mol_type = other DNA
ccgctattctgaacgcagttggtcgaaccagcgccttcatcagcggtaccgcaccggagattaaaccctcgcccg

SEQ ID NO: 273863 - DNA, 75 bp, synthetic construct
  source 1..75: mol_type = other DNA
cccgtatatcccgaataacgcggggatcctgctggtaccatgctgtcgtggtggttcggcattcactcagggcgc

SEQ ID NO: 273864 - DNA, 75 bp, synthetic construct
  source 1..75: mol_type = other DNA
ccggcattccaggttataaaagacagtctgacactgggactgaatgcgctgacgctgacggatgttacaaaaaat

SEQ ID NO: 273865 - DNA, 75 bp, synthetic construct
  source 1..75: mol_type = other DNA
ggactggtaacccgttcctgatgtcgttcttcacccagaccacagacggcaaactgaatctgatgcatcacaaga

SEQ ID NO: 273866 - DNA, 75 bp, synthetic construct
  source 1..75: mol_type = other DNA
cgcagcacggtaactccgggtggagagagttgtacgtataacgacatcattccggctgaccactgcctgcatgat

SEQ ID NO: 273867 - DNA, 75 bp, synthetic construct
  source 1..75: mol_type = other DNA
tgcggaaaagctgacacaaaaactgaaggaggggtggcagccatttggcagcccggtggccatcacgccttatcc

SEQ ID NO: 273868 - DNA, 75 bp, synthetic construct
  source 1..75: mol_type = other DNA
ttccgattaagaataatctttataatcttccttttacggttctttgtgaggtacataagaactggtataaaacgc

SEQ ID NO: 273869 - DNA, 75 bp, synthetic construct
  source 1..75: mol_type = other DNA
taatcttccttttacggttctttgtgaggtacataagaactggtataaaacgccaaatgtagcgccgcgtgtttt

SEQ ID NO: 273870 - DNA, 75 bp, synthetic construct
  source 1..75: mol_type = other DNA
tatccagcgaaacaaaaaccacatggtcctgtattcagaacaccgcaattatccgtattggaggccagactactg

SEQ ID NO: 273871 - DNA, 75 bp, synthetic construct
  source 1..75: mol_type = other DNA
atacagaactgcactattcaactgaaggcaaagcgtaacagcaccacggtactggtgaacacggtggcttctgaa

SEQ ID NO: 273872 - DNA, 75 bp, synthetic construct
  source 1..75: mol_type = other DNA
acatcagggacacgtcatctattcggccatttgagaaatcttcgtctctggcataaagaattaactgatgcgcaa

SEQ ID NO: 273873 - DNA, 75 bp, synthetic construct
  source 1..75: mol_type = other DNA
acttcactggacgttacagaaacaggcacagatagtttcgggtttaattatggccggtttgtcgtacaggattcg

SEQ ID NO: 273874 - DNA, 75 bp, synthetic construct
  source 1..75: mol_type = other DNA
acaccctgatcgataatctgaacaccctgatttgtgaagatgatctgctcacccgccaggagcgtgaaaccctgg

SEQ ID NO: 273875 - DNA, 75 bp, synthetic construct
  source 1..75: mol_type = other DNA
attcttggctggcacaatggagaactggtggcatatgcgaggatcctgaaaagcgatgatgagcttgaacctgtc

SEQ ID NO: 273876 - DNA, 75 bp, synthetic construct
  source 1..75: mol_type = other DNA
catccagcaaagaacccggctggcgtaccatttctgtcaaagaggggggcattattactgatattcgcaaacagg

SEQ ID NO: 273877 - DNA, 75 bp, synthetic construct
  source 1..75: mol_type = other DNA
ggcggaaattaatgagccacgatttgaaaaagaaggtttattgattgaaggtcagcgaaccaactacatgttaaa

SEQ ID NO: 273878 - DNA, 75 bp, synthetic construct
  source 1..75: mol_type = other DNA
ttataatcttccttttacggttctttgtgaggtacataagaactggtataaaacgccaaatgcagcgccgcgtgt

SEQ ID NO: 273879 - DNA, 75 bp, synthetic construct
  source 1..75: mol_type = other DNA
ttttctttatttaaaattaggtcctcaaagatgtttggaagaggttttttaactccgtcggaattgggatgtttc

SEQ ID NO: 273880 - DNA, 75 bp, synthetic construct
  source 1..75: mol_type = other DNA
tgctgatgcacttgcgcaaaaaattcgtgaaggatggcaaccatacggtgggccgttttcttcgtatacggatga

SEQ ID NO: 273881 - DNA, 75 bp, synthetic construct
  source 1..75: mol_type = other DNA
cggcagaagatccggatattccggcatcaggatattacggtgcggcatcgagaacgaatggaaaccaggtatcat

SEQ ID NO: 273882 - DNA, 75 bp, synthetic construct
  source 1..75: mol_type = other DNA
tgggcacgcagggggattatttctgaccgtcttgcctcagcgattcttctccatgcaggacggctgaactggtgg

SEQ ID NO: 273883 - DNA, 75 bp, synthetic construct
  source 1..75: mol_type = other DNA
gcagtacggctgtgtcggccagggcttacatattgccaaaaaactgctcccgtatatcccgaataacgcggggat

SEQ ID NO: 273884 - DNA, 75 bp, synthetic construct
  source 1..75: mol_type = other DNA
atttcagttcatgggcgcgcaggcagcattattccggatcgtttggcaaccgctattctgaacgcagccgggcgc

SEQ ID NO: 273885 - DNA, 75 bp, synthetic construct
  source 1..75: mol_type = other DNA
tgcggcatcgagaacgaatggaaaccaggtatcatcaaaccgcccgacacatttcagttcatgggcgcgcaggga

SEQ ID NO: 273886 - DNA, 75 bp, synthetic construct
  source 1..75: mol_type = other DNA
tcgccgacatcatgaacgagatgttcaccattgacggcaaaccaaaccagccggtacgcaaaatgatcatgggac

SEQ ID NO: 273887 - DNA, 75 bp, synthetic construct
  source 1..75: mol_type = other DNA
ccttggggctggtttgtggattgggtgatatcgcccatgcgcaaaaaagcgtgccgcaaatgctggaagatttta

SEQ ID NO: 273888 - DNA, 75 bp, synthetic construct
  source 1..75: mol_type = other DNA
ccggtacgaaaaatgattctcggacatgcgaagaaaatcgggctgattaatctgctgaaagatggcattaaggga

SEQ ID NO: 273889 - DNA, 75 bp, synthetic construct
  source 1..75: mol_type = other DNA
ggatttatctgtatacggatgctcccgttcctgatggtgtggcgatgacgggtaccggtaatccgttcctgatgt

SEQ ID NO: 273890 - DNA, 75 bp, synthetic construct
  source 1..75: mol_type = other DNA
tagccgacatcatgaacgagatgttcactatcgacggtaagcctaaccaaccggtacgcaaaatgatcatgggac

SEQ ID NO: 273891 - DNA, 75 bp, synthetic construct
  source 1..75: mol_type = other DNA
gagctggaacaaagttgtgttatgcgcgatatgcagcatttccgcaagatcccggcgctgatggaaaatccgcgc

SEQ ID NO: 273892 - DNA, 75 bp, synthetic construct
  source 1..75: mol_type = other DNA
cccgcgatttcagtaacgtcggcccgatggtgcgcgccagtggtcacgcccgcgatacccgcgccgatcacccat

SEQ ID NO: 273893 - DNA, 75 bp, synthetic construct
  source 1..75: mol_type = other DNA
cctgatggtgtggcgatgacgggtaccggtaatccgttcctgatgtcgtacttcactcagaccactgacggcaga

SEQ ID NO: 273894 - DNA, 75 bp, synthetic construct
  source 1..75: mol_type = other DNA
tccggcggaccattgtctgcatgatgtgcaggacatgagccgcttaaccatccgaaagcggacctgtgcaaaggg

SEQ ID NO: 273895 - DNA, 75 bp, synthetic construct
  source 1..75: mol_type = other DNA
gcagtacggctgtgtcggccagggcttacatattgccaaaaaactgctcccgtatatcccgaataacgcgggatc

SEQ ID NO: 273896 - DNA, 75 bp, synthetic construct
  source 1..75: mol_type = other DNA
acagacggtaacggcgtcaataccgccactaacgcgccggcagaagatccggatattccggcatcaggatattac

SEQ ID NO: 273897 - DNA, 75 bp, synthetic construct
  source 1..75: mol_type = other DNA
gcattacagaagaacccgaaaaatgtgttgctggcggtgtgctggatgcagggcgaatttgacatgagcgctgcc

SEQ ID NO: 273898 - DNA, 75 bp, synthetic construct
  source 1..75: mol_type = other DNA
actggcgaagaatcctgaaaatgttctgctggcggtatgctggatgcagggtgaattcgatatgacaaacgctgg

SEQ ID NO: 273899 - DNA, 75 bp, synthetic construct
  source 1..75: mol_type = other DNA
ttgtcggctatggcctgctgccaatggaagtccacagcgagcagggctgcgacgttatttcccgtctgaaagtgc

SEQ ID NO: 273900 - DNA, 75 bp, synthetic construct
  source 1..75: mol_type = other DNA
cgatgggtattcaggtgccagaacgtgcgcagatgatccgcgccattctgttggaggtggaacgcctgcactcgc

SEQ ID NO: 273901 - DNA, 75 bp, synthetic construct
  source 1..75: mol_type = other DNA
ctacgagttcatcaacgaactgggtgataagaaaaataacgttgtaccgattggtccgctacatgtcacttctga

SEQ ID NO: 273902 - DNA, 75 bp, synthetic construct
  source 1..75: mol_type = other DNA
tataaaaacagggagagtgagggcgtttattttgtgcccttcatgacagacggtaacggcgtcaataccgccact

SEQ ID NO: 273903 - DNA, 75 bp, synthetic construct
  source 1..75: mol_type = other DNA
gtattcaggtaccagaacgtgcgcagatgatccgcgccattctgctggaggtagaacgcctgcactcgcatctgc

SEQ ID NO: 273904 - DNA, 75 bp, synthetic construct
  source 1..75: mol_type = other DNA
atctgctcaaccttggccttgcctgccacttcactggctttgactccggttttatgcagttcttccgcgtgcgtg

SEQ ID NO: 273905 - DNA, 75 bp, synthetic construct
  source 1..75: mol_type = other DNA
tcgcctccatgcggctgtttgcccgtttatccctggatagcgccgtgccggatcgcaccaccatcatgaatttcc

SEQ ID NO: 273906 - DNA, 75 bp, synthetic construct
  source 1..75: mol_type = other DNA
tcgcctccatgcggctgtttgcccgtttatccctggatagcgccttgccggagcgcaccaccatcatgaatttcc

SEQ ID NO: 273907 - DNA, 75 bp, synthetic construct
  source 1..75: mol_type = other DNA
ctcattgattatctgcgtgctgcgagctatgcgccgacccttatcagtcacggtgatcaggtactgccgtatgtg

SEQ ID NO: 273908 - DNA, 75 bp, synthetic construct
  source 1..75: mol_type = other DNA
atgaccgagttacctatcgacgaaaacacgccgcgtattttgatcgtggaagatgaacccaaactggggcagttg

SEQ ID NO: 273909 - DNA, 75 bp, synthetic construct
  source 1..75: mol_type = other DNA
gacgccgaacagtcatttatccgcgccgtttacggcgtcggttaccgctgggaagccgacgcctgccgcatcgtt

SEQ ID NO: 273910 - DNA, 75 bp, synthetic construct
  source 1..75: mol_type = other DNA
ggcagaatatgaccactgtcatcgagccgttttatcccaaggcgggcaatggccgacggccctatccgctggaga

SEQ ID NO: 273911 - DNA, 75 bp, synthetic construct
  source 1..75: mol_type = other DNA
tcgcctccatgcggctgtttgcccgattatccctggatagcgccgtgccggaacgcaccaccatcatgaatttcc

SEQ ID NO: 273912 - DNA, 75 bp, synthetic construct
  source 1..75: mol_type = other DNA
tcgcctccatgcggctgtttgcccgattatccctggatagcgccttgccggatcgcaccaccatcatgaatttcc

SEQ ID NO: 273913 - DNA, 75 bp, synthetic construct
  source 1..75: mol_type = other DNA
tcgcctccatgcggctgtttgcccgattatccctggatagcgccatgccggagcgcaccaccatcatgaatttcc

SEQ ID NO: 273914 - DNA, 75 bp, synthetic construct
  source 1..75: mol_type = other DNA
agagatcgaccgcctgctagggctggagattggcgcagatgactacatctgcaagccgtacagcccacgggaagt

SEQ ID NO: 273915 - DNA, 75 bp, synthetic construct
  source 1..75: mol_type = other DNA
acggtaaaattaccgcgaaagatggttcagaactatttattgacgtagatggtaacctcactcaaaacaatgctg

SEQ ID NO: 273916 - DNA, 75 bp, synthetic construct
  source 1..75: mol_type = other DNA
atgaacgagcctcgttgtattgctcagttattgcgtaacgaaagccccagggcgattgacttcaccatcacgcac

SEQ ID NO: 273917 - DNA, 75 bp, synthetic construct
  source 1..75: mol_type = other DNA
cctgcgtatcaacagcaaaacggctgctgacgtagagcgggcgctaagtgcagcggcactcacccgcgacgacat

SEQ ID NO: 273918 - DNA, 75 bp, synthetic construct
  source 1..75: mol_type = other DNA
actttcccgctggctgaacggacagccgcagggctggctggcttctcaccggctgatgaagacggtgcggtggga

SEQ ID NO: 273919 - DNA, 75 bp, synthetic construct
  source 1..75: mol_type = other DNA
tacccccgaaaaccggatatcgcgctcagcttaagcgactctggcttcagaaaaactgggttgagctgattgaac

SEQ ID NO: 273920 - DNA, 75 bp, synthetic construct
  source 1..75: mol_type = other DNA
tcattggcagcatagagaccagcacgaaaacagtgatgaatctaccacctaaaagcgtggaagggctgcgggtgc

SEQ ID NO: 273921 - DNA, 75 bp, synthetic construct
  source 1..75: mol_type = other DNA
gaaagccagcatccgtgccagggtggagcacctgtttcgcatcatcaagcggcagttcggcttcgtgaaagccag

SEQ ID NO: 273922 - DNA, 75 bp, synthetic construct
  source 1..75: mol_type = other DNA
tcccgcattgagcagattctgccatggcagaatatgaccgctgtcatcgagccgttttatcccaaggcgggcaat

SEQ ID NO: 273923 - DNA, 75 bp, synthetic construct
  source 1..75: mol_type = other DNA
ccaacaaaaagtcggtacaatcagtgctaacgcggggacaaatctgggatcgctggaagagcagctggcgcaaaa

SEQ ID NO: 273924 - DNA, 75 bp, synthetic construct
  source 1..75: mol_type = other DNA
ggttcattaacctgcctgcgctgggaggataaacagtattttgtccagccgtcgaacagacataaggatatgggc

SEQ ID NO: 273925 - DNA, 75 bp, synthetic construct
  source 1..75: mol_type = other DNA
cgagcgtcccggcaaggtaaaaaccttgaagcagcatccgcgcaagaacaaaacggccacgggaccactccgacc

SEQ ID NO: 273926 - DNA, 75 bp, synthetic construct
  source 1..75: mol_type = other DNA
tcgcctccatgcgtctgtttgcccgcttatccctggatagcgccctgccggatcgcaccaccatcatgaatttcc

SEQ ID NO: 273927 - DNA, 75 bp, synthetic construct
  source 1..75: mol_type = other DNA
tcgcctccatgcgactgtttgcccgcttatccctggatagcgccctgccggaacgcaccaccatcatgaatttcc

SEQ ID NO: 273928 - DNA, 75 bp, synthetic construct
  source 1..75: mol_type = other DNA
tgtcaggcacgcaaaagttgcaggactggatgatgccgataccgtaacgcttaaggaagtgacagaagcattgtt

SEQ ID NO: 273929 - DNA, 75 bp, synthetic construct
  source 1..75: mol_type = other DNA
gagcaggatgaaatatctgatgcgtatatctgcgcaacagacggaggtatgccgccaaccccggctacagatgct

SEQ ID NO: 273930 - DNA, 75 bp, synthetic construct
  source 1..75: mol_type = other DNA
ttgctgaagatttcgggttcaatcatgcaatagaacggatgaggagacggattcctgaaactccggccaccgacg

SEQ ID NO: 273931 - DNA, 75 bp, synthetic construct
  source 1..75: mol_type = other DNA
ttcgatccgacacagttgacggcggcccatccaacgcttccgatccccagctacgccagaatcactaacctggct

SEQ ID NO: 273932 - DNA, 75 bp, synthetic construct
  source 1..75: mol_type = other DNA
ctatgcgcgaatcactaacctggctaacggtcggatgattgtggtgcgcattaacgatcgtggtccttatggcaa

SEQ ID NO: 273933 - DNA, 75 bp, synthetic construct
  source 1..75: mol_type = other DNA
gcatcgcggcaggaatgctcgcggcatgtacaagcgatgatggtcagcaacagacggtaagtgtaccgcagcctg

SEQ ID NO: 273934 - DNA, 75 bp, synthetic construct
  source 1..75: mol_type = other DNA
tttccgatgaccgatagctggtattcgtcacgggattttcgacgacgggctgcgttgtgggggatggctttgccg

SEQ ID NO: 273935 - DNA, 75 bp, synthetic construct
  source 1..75: mol_type = other DNA
gttcagtgggagcagaaatttgcccgccacgtgcagcacgtcagggcacaggtaaaaccagtcagcaagggggga

SEQ ID NO: 273936 - DNA, 75 bp, synthetic construct
  source 1..75: mol_type = other DNA
ttgatgtcacgacggaagatttagcaagtgcgcttgatgtgacggaagacgtgattgattcaattttgcatgcaa

SEQ ID NO: 273937 - DNA, 75 bp, synthetic construct
  source 1..75: mol_type = other DNA
tctgcactctgatacagaatgcttcacagcgctctgttaccggagagatttactctcttaggttattctggcaaa

SEQ ID NO: 273938 - DNA, 75 bp, synthetic construct
  source 1..75: mol_type = other DNA
cagctggctgatatgccgcgcgttaacatcggcttactgcatctgttgctgcaacatacctccgcctctctgaca

SEQ ID NO: 273939 - DNA, 75 bp, synthetic construct
  source 1..75: mol_type = other DNA
acagaaaggaagcggatgttcaaacaaatcgcgaactaaatttaacaggtgttcaaacagatgttggtgttgtgc

SEQ ID NO: 273940 - DNA, 75 bp, synthetic construct
  source 1..75: mol_type = other DNA
cacggcgtgtatttgttgctgatgttcaattactggcaaacagggaagccaatacccaaaaacagactggcaaaa

SEQ ID NO: 273941 - DNA, 75 bp, synthetic construct
  source 1..75: mol_type = other DNA
gtcacgacagataaagatacagataaagaattaaaccccacacataacgcgcgcgtgcgcgagagtgctccggcc

SEQ ID NO: 273942 - DNA, 75 bp, synthetic construct
  source 1..75: mol_type = other DNA
aatccgggcagcacgcgaacagtgggaacgtgaaaacggatttatcagcaacggaaacggcctggaagctgtggg

SEQ ID NO: 273943 - DNA, 75 bp, synthetic construct
  source 1..75: mol_type = other DNA
aatgtttcgcaaaccgcaaaatccccggcagagcgcaagagagcgcagcgggagcgggaaagactgcggaagcag

SEQ ID NO: 273944 - DNA, 75 bp, synthetic construct
  source 1..75: mol_type = other DNA
gagtccgcccaggcactttacacctttatagagagcctgccccgggatccggcaccgatatcgctggcgcggctg

SEQ ID NO: 273945 - DNA, 75 bp, synthetic construct
  source 1..75: mol_type = other DNA
atatcttgattacacggagatccagcgggggcggacaaaactcttctgtattcactaccggcgtccccggttaaa

SEQ ID NO: 273946 - DNA, 75 bp, synthetic construct
  source 1..75: mol_type = other DNA
tggcccgtgcagagggattcgataaggttgagatcaccggcccccgcctggatatggataacgatttcaagacct

SEQ ID NO: 273947 - DNA, 75 bp, synthetic construct
  source 1..75: mol_type = other DNA
ttaagtcactgaagaacagtaaaaaaaatacactgtcacgcaccgatgccacggaagaactgacgcgtctttccc

SEQ ID NO: 273948 - DNA, 75 bp, synthetic construct
  source 1..75: mol_type = other DNA
atggcaatccgaaaacgttttattgcgggcgcaaaatgcccggcctgtcaggcacaggattcaatggcgatgtgg

SEQ ID NO: 273949 - DNA, 75 bp, synthetic construct
  source 1..75: mol_type = other DNA
ggcgattaatgccctgaagcgccgggagtccgcccaggcactttacacatttatagagagcctgccccgggatcc

SEQ ID NO: 273950 - DNA, 75 bp, synthetic construct
  source 1..75: mol_type = other DNA
gcgtttgtgacgttgcacgttggtgcgggtactttccagccggtgcgcgtcgacaccattgaagatcacatcatg

SEQ ID NO: 273951 - DNA, 75 bp, synthetic construct
  source 1..75: mol_type = other DNA
gagacccagttcaacggcgtgaacgtactggcaaaagacggttcgatgaaaattcaggttggtgcgaatgacggt

SEQ ID NO: 273952 - DNA, 75 bp, synthetic construct
  source 1..75: mol_type = other DNA
gcatgtcgcgcaagggcaactgccttgataatgcggtaatggagaacttctttggtcacctgaaagaagaaatgt

SEQ ID NO: 273953 - DNA, 75 bp, synthetic construct
  source 1..75: mol_type = other DNA
gatccgccatctgttgcaacagttagagagcaatctggcagagctgcgtggcggcagcgattacgcgcaacgtaa

SEQ ID NO: 273954 - DNA, 75 bp, synthetic construct
  source 1..75: mol_type = other DNA
aactggggcaacttggcggtcaggaagacgatgtgcaagtcaatgacgccgatgctttatataccagtccatcac

SEQ ID NO: 273955 - DNA, 75 bp, synthetic construct
  source 1..75: mol_type = other DNA
gttgagctgccctttgtcgagttcgccaaactctgtgggatcccctccagtcagtcatcacgcaagctccgggag

SEQ ID NO: 273956 - DNA, 75 bp, synthetic construct
  source 1..75: mol_type = other DNA
acctatttcagcgtgcattatcgcaaccccaaactcatcagtggtcctgtgaaggttccgcgcaaagaggaagaa

SEQ ID NO: 273957 - DNA, 75 bp, synthetic construct
  source 1..75: mol_type = other DNA
acgtattaccactgtcagcaacagcgacatcatcctgataaacgcggtacacatgcccagcgcgatgactggctg

SEQ ID NO: 273958 - DNA, 75 bp, synthetic construct
  source 1..75: mol_type = other DNA
acgtattaccactgtcagcaacagcgacatcatcctgataaacgcagtgcacatgcgcagcgcgatgactggctg

SEQ ID NO: 273959 - DNA, 75 bp, synthetic construct
  source 1..75: mol_type = other DNA
tacgcatcattacattgacgaacgcggcaaggctcaccctgtcgattgcgtgtttactcgcggcttcgtgcagca

SEQ ID NO: 273960 - DNA, 75 bp, synthetic construct
  source 1..75: mol_type = other DNA
atcattgatgtgtttgccggatacatcgtggggtggtgggtctcatcgtctatggaaacgacattcgtgctggat

SEQ ID NO: 273961 - DNA, 75 bp, synthetic construct
  source 1..75: mol_type = other DNA
agtattaactgcctgcaacaccacgcgtggcgttggtgaagatatctctgatggcggtaacgcgatttctggtgc

SEQ ID NO: 273962 - DNA, 75 bp, synthetic construct
  source 1..75: mol_type = other DNA
acgtattaccactgtcagcaacagcgacatcatcctgataaacgcggtccacatgcacagcgcgatgactggctg

SEQ ID NO: 273963 - DNA, 75 bp, synthetic construct
  source 1..75: mol_type = other DNA
gggtggactggtataacaacgattgctggaaaagctgggccatatcccaccggcagaagcagaaaaagcttatta

SEQ ID NO: 273964 - DNA, 75 bp, synthetic construct
  source 1..75: mol_type = other DNA
ggcatcaacaggaagtacaggcgactcgtatgacaacgcgatggcggagaacatcaatggtctttacaaagcgga

SEQ ID NO: 273965 - DNA, 75 bp, synthetic construct
  source 1..75: mol_type = other DNA
taagtaaggatgttgttcttgctgatactaaagctactggtaacacgacaacagttgatttcaactccggtatca

SEQ ID NO: 273966 - DNA, 75 bp, synthetic construct
  source 1..75: mol_type = other DNA
agcatttgtgggcgacgtcaaattaagccggggattcgttttggcaacagacggcaaggcatacccggctggccc

SEQ ID NO: 273967 - DNA, 75 bp, synthetic construct
  source 1..75: mol_type = other DNA
tcgtctatgtggcgttcatcattgatgtgtttgccggatacatcgtggggtggcgggtctcatcgtccatggaaa

SEQ ID NO: 273968 - DNA, 75 bp, synthetic construct
  source 1..75: mol_type = other DNA
agcctgagttcacagataaaacactctccaggaaacccggggcggttcacctacagagtaccgctaccacttgtg

SEQ ID NO: 273969 - DNA, 75 bp, synthetic construct
  source 1..75: mol_type = other DNA
ctgacggtttccttcgccgcatggcccgaggagcaacagtctccctccctgatgccgctgattaacgcactggaa

SEQ ID NO: 273970 - DNA, 75 bp, synthetic construct
  source 1..75: mol_type = other DNA
accgcatagtacgatggtgtttatcgggattcagttaccggaagatgagattcgggcagcgtttgcggggttgag

SEQ ID NO: 273971 - DNA, 75 bp, synthetic construct
  source 1..75: mol_type = other DNA
aaaccgacgtcgcaggcgaagcagagaaactgcgtgaacgtctggcacgcatcaacgcccgcgcgccggtctaca

SEQ ID NO: 273972 - DNA, 75 bp, synthetic construct
  source 1..75: mol_type = other DNA
atgggtgacagatatcaccgaattcagggctggcggaacaaaactgtacctgtcccgatacttgatttgtttaac

SEQ ID NO: 273973 - DNA, 75 bp, synthetic construct
  source 1..75: mol_type = other DNA
tgatttgtttaacggggaaatcgtggcgtgggaaactgcctgcaggcctacagaggagctggtgaagcgcatgtt

SEQ ID NO: 273974 - DNA, 75 bp, synthetic construct
  source 1..75: mol_type = other DNA
aaacccggctggccccgccgcgcaccgagtcacgcaaccagcttaagcggctgtatgcgcagcagaactggacgg

SEQ ID NO: 273975 - DNA, 75 bp, synthetic construct
  source 1..75: mol_type = other DNA
acgttcccgatccgcagtcagtggtcagagcctgtgcgcaactggtgaaaccaggcggcgatgtctttttctcga

SEQ ID NO: 273976 - DNA, 75 bp, synthetic construct
  source 1..75: mol_type = other DNA
gacatataaccgggctacattacaacccgctcactaatacttttaaactcggccccggcgtggatgtgaactata

SEQ ID NO: 273977 - DNA, 75 bp, synthetic construct
  source 1..75: mol_type = other DNA
gctgcgtctgggctatattgccgagcgtgctggcggtttatttggcaaaaaggtgctcgatgtcggttgtggcgg

SEQ ID NO: 273978 - DNA, 75 bp, synthetic construct
  source 1..75: mol_type = other DNA
ataatgcggtaatggagaacttctttggtcacctgaaagaagaaatgtactatcgccgggactacagaagtgtag

SEQ ID NO: 273979 - DNA, 75 bp, synthetic construct
  source 1..75: mol_type = other DNA
ggtcaagcgataccgctcttacagaggagaggtagggcaaaccgcccctaatgttctccaaagagatttcaaggc

SEQ ID NO: 273980 - DNA, 75 bp, synthetic construct
  source 1..75: mol_type = other DNA
ctactgagactaccagtgctggttctgcaacgaccaacccgcttgctgccctggacgacgcaatcagctccatcg

SEQ ID NO: 273981 - DNA, 75 bp, synthetic construct
  source 1..75: mol_type = other DNA
gctatgcggataaagccctgctgaaccgaaaaatggaaatcctgctgggaacgctggtggcaatcgatccggtac

SEQ ID NO: 273982 - DNA, 75 bp, synthetic construct
  source 1..75: mol_type = other DNA
gccgcgtcatcatggtcatggcccggcgggtgttaagttagtggaacaactatgccagcgtctgcgcgtgccaaa

SEQ ID NO: 273983 - DNA, 75 bp, synthetic construct
  source 1..75: mol_type = other DNA
cgtattgccgatgaaaccctggtgctgatgcgcgagatgactcacgcaggcgaactggaacacctgacaccagaa

SEQ ID NO: 273984 - DNA, 75 bp, synthetic construct
  source 1..75: mol_type = other DNA
cctggcgtaaaccgcagcgtgtcgagcaactggcgctgaccagcgaggctgacgtgcgcggcagaaccggttttg

SEQ ID NO: 273985 - DNA, 75 bp, synthetic construct
  source 1..75: mol_type = other DNA
cttgataatgcggtaatggagaatttctttggtcacctgaaagaagaaatgtactatcgccgggactacagaagt

SEQ ID NO: 273986 - DNA, 75 bp, synthetic construct
  source 1..75: mol_type = other DNA
aaactgtacctgtccccgatacttgatttgtttaacggggaaatcgtggcgtgggaaacggcctgcaggcctaca

SEQ ID NO: 273987 - DNA, 75 bp, synthetic construct
  source 1..75: mol_type = other DNA
gtccgccctggcggacagagggttagtgcagagcatgtcgcgcaagggcaactgccttgataatgcggtaatgga

SEQ ID NO: 273988 - DNA, 75 bp, synthetic construct
  source 1..75: mol_type = other DNA
ggtcttaagttcagtggcaaaacggtgcgaaaactgatgcaacagctcggcctgaagtctcctgtgcgcctgaag

SEQ ID NO: 273989 - DNA, 75 bp, synthetic construct
  source 1..75: mol_type = other DNA
gcggctgctgatggcacgggtggcggaacagtacggtaaaaacgagatggcgctcctgctgctggaagaactgga

SEQ ID NO: 273990 - DNA, 75 bp, synthetic construct
  source 1..75: mol_type = other DNA
caggcactgactaaggcgggcgtaccgtgggacaggtggacagccgttatccgtcaggacctggcgttactgctg

SEQ ID NO: 273991 - DNA, 75 bp, synthetic construct
  source 1..75: mol_type = other DNA
aaggtgtggagattcgcgaggagctgacccgacggcggattgcggcgatagccagttggaaggaacaacgttgcc

SEQ ID NO: 273992 - DNA, 75 bp, synthetic construct
  source 1..75: mol_type = other DNA
tgatgcgcgagatgacccatgcgggtgaactggaacacctgacgcctgaacgggtatggaaagagacggaaagcg

SEQ ID NO: 273993 - DNA, 75 bp, synthetic construct
  source 1..75: mol_type = other DNA
gggctggaaagccttgcagaaggagaaaaaccgctgctccacagtgatcaagggtggcattaccggataaaaagt

SEQ ID NO: 273994 - DNA, 75 bp, synthetic construct
  source 1..75: mol_type = other DNA
aagcaaacgcattgcagagctggagactaatcttgcggcactggcggtggagaatgcgggaataaagtctgcaat

SEQ ID NO: 273995 - DNA, 75 bp, synthetic construct
  source 1..75: mol_type = other DNA
gaataaagatatggcacaaaagttgctcaaattgacaaaggattatggcacctatcgagctgatagctggaagtt

SEQ ID NO: 273996 - DNA, 75 bp, synthetic construct
  source 1..75: mol_type = other DNA
aaaggattacatgattatccggtattggggcaaagcctttttagtaaagttaaggtaagtacttgtatttttcgt

SEQ ID NO: 273997 - DNA, 75 bp, synthetic construct
  source 1..75: mol_type = other DNA
aatgggcagtcattctagaggacgatgttatcgtcaatgagaaatttaaaaatttccttcaatactttaatcctt

SEQ ID NO: 273998 - DNA, 75 bp, synthetic construct
  source 1..75: mol_type = other DNA
atgcagccattaccgttaaaacaaatacatcctctgtggttacgctgttgccactggattaatgctgttactgtc

SEQ ID NO: 273999 - DNA, 75 bp, synthetic construct
  source 1..75: mol_type = other DNA
tccctgatattgaactaagtgttaactatcttgcggataatacagtacaccaacaattagagactctcgcagacg

SEQ ID NO: 274000 - DNA, 75 bp, synthetic construct
  source 1..75: mol_type = other DNA
ctaatattactgtagaggtaggttctgcgggttctaccgttgctactgattttgcagaagtaccagaggtgaata

SEQ ID NO: 274001 - DNA, 75 bp, synthetic construct
  source 1..75: mol_type = other DNA
aactggattacattcgtgatggcggcggtctggtggatggtgatgcgccggtgaaaaaagaggcgcgtcagccgt

SEQ ID NO: 274002 - DNA, 75 bp, synthetic construct
  source 1..75: mol_type = other DNA
tccgatgatgattatgtgcctgatggcgctggcattcttcggcaacggttttgcttcgattacctggtcgctggt

SEQ ID NO: 274003 - DNA, 75 bp, synthetic construct
  source 1..75: mol_type = other DNA
gagaagaacaaaacagacaggaaccagagcagcagtaatcagaatcagaacaggagtaaaaagagaataatcaca

SEQ ID NO: 274004 - DNA, 75 bp, synthetic construct
  source 1..75: mol_type = other DNA
atgagggatattcatcacatccggtcagcagatcgcccggatatcgaggccggcacgcttaatctgacgcaggaa

SEQ ID NO: 274005 - DNA, 75 bp, synthetic construct
  source 1..75: mol_type = other DNA
caacaagaagcgtgtacaacgcggtgttaacgtggatatttctggtactcatcctgctttctcctctctcttgtt

SEQ ID NO: 274006 - DNA, 75 bp, synthetic construct
  source 1..75: mol_type = other DNA
agaacgacgcggcccggggtgatgagctggccgcacagctggatgccgaacgtcagaaagtcagcgaactgacgg

SEQ ID NO: 274007 - DNA, 75 bp, synthetic construct
  source 1..75: mol_type = other DNA
tggcgagctacgaggtgctttctggagtgagtttgatcttgaaaaagcagtgtgggaaatacctgcagagcgtat

SEQ ID NO: 274008 - DNA, 75 bp, synthetic construct
  source 1..75: mol_type = other DNA
tgggcaatatcctctggtgtttcctgggaggaatgatccccgcaaaacgatgagcgaagcgagtattaatcaggt

SEQ ID NO: 274009 - DNA, 75 bp, synthetic construct
  source 1..75: mol_type = other DNA
agcccttgctggctactctggcagtgaattgatggtgctggcggcaagattgctgatcattaccggcttgagaac

SEQ ID NO: 274010 - DNA, 75 bp, synthetic construct
  source 1..75: mol_type = other DNA
tgtctcttgcacaagcgagggcactgcgtgatgaagccaagaaaaagctggccgagggtatcgatccatcctttg

SEQ ID NO: 274011 - DNA, 75 bp, synthetic construct
  source 1..75: mol_type = other DNA
cagtctgtggcgcttgagtggcacggtactaaggtgagccggtggtcagaaggctatgcctccgatattatcgaa

SEQ ID NO: 274012 - DNA, 75 bp, synthetic construct
  source 1..75: mol_type = other DNA
tcgaagcattatcccttccttactgttgaggagttaccagacttttttaaagctctcgcaggctacacaggaagc

SEQ ID NO: 274013 - DNA, 75 bp, synthetic construct
  source 1..75: mol_type = other DNA
ggtcgtaatgatccaagaaaaacaatgagtgaggccagcataaaccaagtatttaagcgcattggttataacgga

SEQ ID NO: 274014 - DNA, 75 bp, synthetic construct
  source 1..75: mol_type = other DNA
tgctgatccttacgggagttcgcaccggtgagcttcgaggtgctttctggagtgagtttgatcttgaaaaagcgg

SEQ ID NO: 274015 - DNA, 75 bp, synthetic construct
  source 1..75: mol_type = other DNA
agctggaagaagaacgccggaaggtccaggacctgactgcggagcttaaagcggcgaagaaagcggacaagaagg

SEQ ID NO: 274016 - DNA, 75 bp, synthetic construct
  source 1..75: mol_type = other DNA
tcattggtcaacgccctgttgcagacatcaagccgttggaactgctaaacgtgcttaaaaagatggaggacagag

SEQ ID NO: 274017 - DNA, 75 bp, synthetic construct
  source 1..75: mol_type = other DNA
agactgccaagcccaaagataaaccctacaagttagcagatggtgggggcatgtatctggaggtgttccccaacg

SEQ ID NO: 274018 - DNA, 75 bp, synthetic construct
  source 1..75: mol_type = other DNA
catcgaattacgtgcggcattatggtcagcatttgatttagataacgctatttgggaaattcctgctgaaaggat

SEQ ID NO: 274019 - DNA, 75 bp, synthetic construct
  source 1..75: mol_type = other DNA
attggcgtggcgatgatgctggtgccaaaagaagacgcgaccacggctaaaaccgaagcggaggcacaatcgtga

SEQ ID NO: 274020 - DNA, 75 bp, synthetic construct
  source 1..75: mol_type = other DNA
acatcatgatgttctttatgctgatagctgccgtagacagggttctgtcgcagttcggcggttcagcgcgtttcc

SEQ ID NO: 274021 - DNA, 75 bp, synthetic construct
  source 1..75: mol_type = other DNA
gttatcggttctatctcctgcgttctgttaggggcgtatccgatggtgctgctgctgactcgctggtttgaaaaa

SEQ ID NO: 274022 - DNA, 75 bp, synthetic construct
  source 1..75: mol_type = other DNA
cccatcgacattgatgaaccggatgacaatacgctgatggcgaaggctgcaggtatttcaggaggcgtgcgctat

SEQ ID NO: 274023 - DNA, 75 bp, synthetic construct
  source 1..75: mol_type = other DNA
tgcttgccgggatgtcatcaactgaatatgccgactggtgtcatttttaccgcacgcattattttcacgatgcac

SEQ ID NO: 274024 - DNA, 75 bp, synthetic construct
  source 1..75: mol_type = other DNA
gacagcctgacgccatccgggcatgaagaggacgccatgctgatgacggtatcagaaggtatcgcaggaggtgtc

SEQ ID NO: 274025 - DNA, 75 bp, synthetic construct
  source 1..75: mol_type = other DNA
ttgagcgacctcgccgcccaacgacaagcatttaataatttgctggtgaagaacgtaccgcgtctgttccaggtg

SEQ ID NO: 274026 - DNA, 75 bp, synthetic construct
  source 1..75: mol_type = other DNA
tcgtgccgccttgcgccgtcgtgatgtgccgcagactcgcctctatctgcaggaactacgtgaagctggtggcat

SEQ ID NO: 274027 - DNA, 75 bp, synthetic construct
  source 1..75: mol_type = other DNA
gcatgcgagaaatgatggtattaaaccattcatccagtcggtacgtcagggctactggggatattatttacccga

SEQ ID NO: 274028 - DNA, 75 bp, synthetic construct
  source 1..75: mol_type = other DNA
aggatcaggcggtcagttcgaagaaggctttatggcgatgggcgcactgggtctggcgatggtcggtatgaccgc

SEQ ID NO: 274029 - DNA, 75 bp, synthetic construct
  source 1..75: mol_type = other DNA
cttcaaggcaaaaactattctgctggtgatgcggcagtcattcttaagaatggagcaacaggtcttgcgttaact

SEQ ID NO: 274030 - DNA, 75 bp, synthetic construct
  source 1..75: mol_type = other DNA
ccgttgctgtggcctcgctaccggtggcgagcaccgatgaattgcttgccagagccgatgaatatcctgaaagcg

SEQ ID NO: 274031 - DNA, 75 bp, synthetic construct
  source 1..75: mol_type = other DNA
tatacgtctggtcagtttgtcggtctggcgtttctgactccgctgctgatctggattcaggagatgttgagctgg

SEQ ID NO: 274032 - DNA, 75 bp, synthetic construct
  source 1..75: mol_type = other DNA
ctgaaagcaggctttatgaccacggtgccattcctcgcggcgtttgtcggcgtcctgctctctggctgggtagcg

SEQ ID NO: 274033 - DNA, 75 bp, synthetic construct
  source 1..75: mol_type = other DNA
gcgaatgcttttgcaaatggtggcggttcaacaacctgttgtggtgatgttagtggggatacggcagaggttatc

SEQ ID NO: 274034 - DNA, 75 bp, synthetic construct
  source 1..75: mol_type = other DNA
tttcgattgaactttttgacaccaccttacaaaaatggtgtggcagcgaaaactcgcaaccgcgccgtgactgcc

SEQ ID NO: 274035 - DNA, 75 bp, synthetic construct
  source 1..75: mol_type = other DNA
aatgccttgaataatgcacccgtgccgtataccgcgttcaccatcactaaagatatggggaaaaatcgtcagggg

SEQ ID NO: 274036 - DNA, 75 bp, synthetic construct
  source 1..75: mol_type = other DNA
aggtggattttgatgtttccacccagagtctggcgctgtccattccccagaaggggctggtgaagatgccggaga

SEQ ID NO: 274037 - DNA, 75 bp, synthetic construct
  source 1..75: mol_type = other DNA
aaaagagaatggggagaagattttctgcatgtgcattttatgcctggcgataaagtgctgctggggtggagtaaa

SEQ ID NO: 274038 - DNA, 75 bp, synthetic construct
  source 1..75: mol_type = other DNA
atcttcacaacggggggtacaagacccgcgttcggcaggatgtgaaggataaaatttatggcacagggaaaatga

SEQ ID NO: 274039 - DNA, 75 bp, synthetic construct
  source 1..75: mol_type = other DNA
ggaggagtcatattggtgatccatagtgaactggataggccaatattaggattcagcgtgaacggcatggctggg

SEQ ID NO: 274040 - DNA, 75 bp, synthetic construct
  source 1..75: mol_type = other DNA
ttttatgcctggcgataaagtgttgctggggtggagtaaagattctttttctccgtatgaagatcttcacaacgg

SEQ ID NO: 274041 - DNA, 75 bp, synthetic construct
  source 1..75: mol_type = other DNA
tggacattaagtactactcgtacacagtataatgctggaatgcgtctggagaaacggaatatgacgttacctctc

SEQ ID NO: 274042 - DNA, 75 bp, synthetic construct
  source 1..75: mol_type = other DNA
gtggccagatgtacagtggcgcgcctcatggcggttatgggacttgtcggtgttctccggggtaaaaaggtccgc

SEQ ID NO: 274043 - DNA, 75 bp, synthetic construct
  source 1..75: mol_type = other DNA
tgggtgcgggcagatatcagtcgtatttcgattgagctttttgacgccaccctacaaaaatggtgtggcagcgaa

SEQ ID NO: 274044 - DNA, 75 bp, synthetic construct
  source 1..75: mol_type = other DNA
ccgcatatgcgggtgatgcgtgatctgataaagcagcatcgttctcccatggagctgatgacgatgctgcggtga

SEQ ID NO: 274045 - DNA, 75 bp, synthetic construct
  source 1..75: mol_type = other DNA
ttgatgccctgaaagttaagcgttacctgctgcaggtgaagcagcgtgacggtgagtttgtgccagggggaacct

SEQ ID NO: 274046 - DNA, 75 bp, synthetic construct
  source 1..75: mol_type = other DNA
atgtttgattacatcctgtctctcggcggtaccgtttttgtccccatcatcatgatcgtgattggccttatcttc

SEQ ID NO: 274047 - DNA, 75 bp, synthetic construct
  source 1..75: mol_type = other DNA
acacgagttcagcgtggcagtcggtttgtctgacgatgacagtgacctgaaaggcggcgtgtttgcggcgtcata

SEQ ID NO: 274048 - DNA, 75 bp, synthetic construct
  source 1..75: mol_type = other DNA
gtgtgtgcaggaaagaaggcagtcgcagagtcggagccggtttcgtccgtgtttttccgtcgggccgcacttgcg

SEQ ID NO: 274049 - DNA, 75 bp, synthetic construct
  source 1..75: mol_type = other DNA
ctaatgaaccgcacccgattgatggtctgtccggtgaatatgcggagaaatcccttgaagaatgggtggaacaga

SEQ ID NO: 274050 - DNA, 75 bp, synthetic construct
  source 1..75: mol_type = other DNA
gccaataagcgattcatagcagcagccaatccggctaccgtgctggcactgctggatgaacgggaagtccaaagc

SEQ ID NO: 274051 - DNA, 75 bp, synthetic construct
  source 1..75: mol_type = other DNA
atgaacccgattgcagtgaccctactcaccggttttttaggcgcgggcaaaactaccctgctgcgccatattctt

SEQ ID NO: 274052 - DNA, 75 bp, synthetic construct
  source 1..75: mol_type = other DNA
ggagtcaatccggaggtctgggcggcactgaacggtaattatgcgccggggcgctacctggttgacctgtccctg

SEQ ID NO: 274053 - DNA, 75 bp, synthetic construct
  source 1..75: mol_type = other DNA
ggtcagcggttcggtactggccgttccggcggcgaaagacattatgttcagccgcacgaccggggataccgtggc

SEQ ID NO: 274054 - DNA, 75 bp, synthetic construct
  source 1..75: mol_type = other DNA
ccggcggcgaaagacatcatgttcagccgcacgaccggggataccgtggccgtggtgaacgtgaaggataccccc

SEQ ID NO: 274055 - DNA, 75 bp, synthetic construct
  source 1..75: mol_type = other DNA
ccggtattaccggcagtctgagtacccagataaagggtgtcagtctgaacctgggctggtccggctcccggaact

SEQ ID NO: 274056 - DNA, 75 bp, synthetic construct
  source 1..75: mol_type = other DNA
acgggcgcgagcaggtacagaacttcccgttgtcggtgatggctgggcagttaagtccggggcagcacgagttca

SEQ ID NO: 274057 - DNA, 75 bp, synthetic construct
  source 1..75: mol_type = other DNA
taccgttcacactgtttgaccgtcgctacagcagcagtacgtcggtgagcaccagcaaaggcggtggcacaggct

SEQ ID NO: 274058 - DNA, 75 bp, synthetic construct
  source 1..75: mol_type = other DNA
tcaccggtcgatctgtgcgtgattggcatcgtcgatgaggtggtgtctggcggtcaggtaattttccacaaataa

SEQ ID NO: 274059 - DNA, 75 bp, synthetic construct
  source 1..75: mol_type = other DNA
gcaaacagagtcagagaacgccttcgaaaagatagccagagagtggcatcaacagaagtctaccaaatggtcggc

SEQ ID NO: 274060 - DNA, 75 bp, synthetic construct
  source 1..75: mol_type = other DNA
ttccctggacgcaacgatcctagcaaatttatgagtgaagcaagcattaatcaggtgtttaaacgtattggatat

SEQ ID NO: 274061 - DNA, 75 bp, synthetic construct
  source 1..75: mol_type = other DNA
aattctcggccatgtgccgcgacttaacgaacctgtcctctcttatcaaacgactaccgccacggtacgcaaaag

SEQ ID NO: 274062 - DNA, 75 bp, synthetic construct
  source 1..75: mol_type = other DNA
ggttgcggcctcatgctgtatcaaggtgataaattcgtttgtcctcgctgcggcggcggtggtgagatagaaatt

SEQ ID NO: 274063 - DNA, 75 bp, synthetic construct
  source 1..75: mol_type = other DNA
aaaaataaaaattcatcctgatttattacagcaaattatcgatcacgtatcggcagccgcaatctatagcgataa

SEQ ID NO: 274064 - DNA, 75 bp, synthetic construct
  source 1..75: mol_type = other DNA
ccgagtataaccccgcaccagatctcaccagtgctatgcaggggcatgagtctaaacattatccattcctgacca

SEQ ID NO: 274065 - DNA, 75 bp, synthetic construct
  source 1..75: mol_type = other DNA
gaaaatgcggcgtcctcatattgttccgttatccgtgcaggcattggaaattattgaaaaaatcagggcaatgac

SEQ ID NO: 274066 - DNA, 75 bp, synthetic construct
  source 1..75: mol_type = other DNA
tgtccctagcacaagcgagagcactgcgtgatgaagccaagaaaaaactggccgagggtatcgatccatcgtttg

SEQ ID NO: 274067 - DNA, 75 bp, synthetic construct
  source 1..75: mol_type = other DNA
cccttatcgacgcaggcgctaggctttcttaatgaactcaaatctatgacaggaaattatcgttatgtttttcct

SEQ ID NO: 274068 - DNA, 75 bp, synthetic construct
  source 1..75: mol_type = other DNA
gaaaatgcgtcgccctcatgtagtgcctttgtctgagcaggctctttcgcttattgggcagattaaagaactaac

SEQ ID NO: 274069 - DNA, 75 bp, synthetic construct
  source 1..75: mol_type = other DNA
acgaactggagaactacgagcaggtgagtggcgagaggtggattttgataatgcggtgtgggagatcccaaaaga

SEQ ID NO: 274070 - DNA, 75 bp, synthetic construct
  source 1..75: mol_type = other DNA
gaagaatacgaagacatgtcttcctttaatccgtcggaagtgtacagccaggtgaaccaggggcgccgggtgaag

SEQ ID NO: 274071 - DNA, 75 bp, synthetic construct
  source 1..75: mol_type = other DNA
gatgcgtgggctgcattaaacagtaactatgcaccagggcgttatctggttgagttatccctgaacgggaaaaac

SEQ ID NO: 274072 - DNA, 75 bp, synthetic construct
  source 1..75: mol_type = other DNA
gcctctgtttcggtaccgttcacattgtttgaccgccgctacagcagcagtacatcggtgagtaccagtaagagt

SEQ ID NO: 274073 - DNA, 75 bp, synthetic construct
  source 1..75: mol_type = other DNA
acagtgacggtaaagacacggggctgacggggacgctgagtacgcagattaaaggtgtcagtctgaacttcggtg

SEQ ID NO: 274074 - DNA, 75 bp, synthetic construct
  source 1..75: mol_type = other DNA
aatgggaaaaccgataaaaaaggaaacctggtagttccacttaacagttatgactggaataccgtgacaatagat

SEQ ID NO: 274075 - DNA, 75 bp, synthetic construct
  source 1..75: mol_type = other DNA
tggaacaaacaatttgaggcaactaaaacaggtctacgtttaagctggtccagacagggcgaaaattatgaagat

SEQ ID NO: 274076 - DNA, 75 bp, synthetic construct
  source 1..75: mol_type = other DNA
tgagttatccctgaacgggaaaaaccagggtaagcatattcttgatgtgacaccagaagacagcaatgacctctg

SEQ ID NO: 274077 - DNA, 75 bp, synthetic construct
  source 1..75: mol_type = other DNA
cacaaacagttaatgcctctgaaaagcttgatatgtcctttattcaaggtgggcataatgtagataaagctgcat

SEQ ID NO: 274078 - DNA, 75 bp, synthetic construct
  source 1..75: mol_type = other DNA
ccagaaatatgcctccggtattttttcgccgtgctgcactggcgcttgccatatcggcggtgtttgccagtgttg

SEQ ID NO: 274079 - DNA, 75 bp, synthetic construct
  source 1..75: mol_type = other DNA
gacgaacaccagtcagaaggtggtgccgacggacaaggcggtggtgtggatgccgtttgatgccctgaaagttaa

SEQ ID NO: 274080 - DNA, 75 bp, synthetic construct
  source 1..75: mol_type = other DNA
acacatgatagtacgtttaccgaattaaatgggttcaatccaacagatatttggttaaaagataaaaaaggtcgc

SEQ ID NO: 274081 - DNA, 75 bp, synthetic construct
  source 1..75: mol_type = other DNA
ctgtcgtgggtattaaagatacaccaggtgtaaaaaccacttccggcacagggggaacagatgcaaatggaaatc

SEQ ID NO: 274082 - DNA, 75 bp, synthetic construct
  source 1..75: mol_type = other DNA
agagggatatgatacatctcggcaatgctataatctatcaaaaggcgtgtcaacaaaagttgaactggatgtacc

SEQ ID NO: 274083 - DNA, 75 bp, synthetic construct
  source 1..75: mol_type = other DNA
gcacctatctgccgaccctgtttgccctgacggcagcggcctcggccgggaatgcgatgtcacagagccagtata

SEQ ID NO: 274084 - DNA, 75 bp, synthetic construct
  source 1..75: mol_type = other DNA
gcttcaccatcccatgctggaaggcatattgctgagtgaatgtgcccgactgaagcagttcccggtacaacgggc

SEQ ID NO: 274085 - DNA, 75 bp, synthetic construct
  source 1..75: mol_type = other DNA
ctgtgcatattacccgccagatcccgattgattacgaagagaagggccgcaaggtcaaatacgattttgatgtca

SEQ ID NO: 274086 - DNA, 75 bp, synthetic construct
  source 1..75: mol_type = other DNA
tcaaatttgtggtgcccgctgtggttgtgggtggggtattcatcgggcttaaaagctgtggtgattcagcgccgt

SEQ ID NO: 274087 - DNA, 75 bp, synthetic construct
  source 1..75: mol_type = other DNA
gtggtccccgtttccccacctcctttctggatgataacccgctgacccgtcagaaggcggcgtatgaacagcagg

SEQ ID NO: 274088 - DNA, 75 bp, synthetic construct
  source 1..75: mol_type = other DNA
tcaaatttgtagtgcccgttgtggttgtgggcggggtattcatcgggcttaaaagctgtggtgatcccgcgtcgt

SEQ ID NO: 274089 - DNA, 75 bp, synthetic construct
  source 1..75: mol_type = other DNA
tggcggcaattgctgaaccggataacgcaaaacgtcttgatttgtataaaaagatgcaacaggaactgcaacgta

SEQ ID NO: 274090 - DNA, 75 bp, synthetic construct
  source 1..75: mol_type = other DNA
gcaaaagagatcctcgctaaagccggaatcaaagacccgcacttcacgcttgatgtcgaaaataaaccgccattt

SEQ ID NO: 274091 - DNA, 75 bp, synthetic construct
  source 1..75: mol_type = other DNA
gatgctgatatggctcgtgatctgggagccgatcaaatcgatgcattacagggtaaacctggcgtaaaagtgatg

SEQ ID NO: 274092 - DNA, 75 bp, synthetic construct
  source 1..75: mol_type = other DNA
ggcctctgatgtgatgtccgaaagccagaccacgaccaccactgacggaacgtccatcaccagtacgttgaccgg

SEQ ID NO: 274093 - DNA, 75 bp, synthetic construct
  source 1..75: mol_type = other DNA
actgaggatgctgattggcactatgaaaacggtacgtgaccgtcaggcggaattgatcgcccagaatgagaaatt

SEQ ID NO: 274094 - DNA, 75 bp, synthetic construct
  source 1..75: mol_type = other DNA
cggaaaatatcgccagccagttgaagaaaatcgacgaccatactgtccaggtacagtggagtgctgacgtcagtc

SEQ ID NO: 274095 - DNA, 75 bp, synthetic construct
  source 1..75: mol_type = other DNA
atggccattaaaggtgcgctgatgcccgccattgaaatgtatgacgcgctgaatgatgcggctgcaaaagggatc

SEQ ID NO: 274096 - DNA, 75 bp, synthetic construct
  source 1..75: mol_type = other DNA
aaagcccgcaatatcacgccggatttcagtaagaaagcaggtattgataacgccacggtggtgatgctgccaact

SEQ ID NO: 274097 - DNA, 75 bp, synthetic construct
  source 1..75: mol_type = other DNA
ataacagtaaaaaaattgaaaacgttaatatttatccaaaagaaatgttaacgcctggccagttaatggagtatc

SEQ ID NO: 274098 - DNA, 75 bp, synthetic construct
  source 1..75: mol_type = other DNA
gctgacgctgatcccggtactgtatccggtgctgaatcgcctggcggatatggggcagacgtttgcacgctggat

SEQ ID NO: 274099 - DNA, 75 bp, synthetic construct
  source 1..75: mol_type = other DNA
aggtaaaagcaaccaagctctagctgcaccacgtcctttgcatggcaatacctataagtttcgtaacgcgaagca

SEQ ID NO: 274100 - DNA, 75 bp, synthetic construct
  source 1..75: mol_type = other DNA
agtttcgaatcccgaaagtttcttatctcgattttaaacatattgagatggatcgcgtactcaccatgttgtttc

SEQ ID NO: 274101 - DNA, 75 bp, synthetic construct
  source 1..75: mol_type = other DNA
gcgcagtttatccggctggaagaaatccagtctggtgaaggagctgcacgccgactttatccgcaggagtctgag

SEQ ID NO: 274102 - DNA, 75 bp, synthetic construct
  source 1..75: mol_type = other DNA
atgtcgctgtttgataatgtctggaagtcaatcaaagggggatttcttaagtcgtggaactggattgttcagaaa

SEQ ID NO: 274103 - DNA, 75 bp, synthetic construct
  source 1..75: mol_type = other DNA
gcctgattgataaattgtcgcgcccgttaaaacaggcgcagggcagcgtcacaggctttgcggaaaaatcaaaag

SEQ ID NO: 274104 - DNA, 75 bp, synthetic construct
  source 1..75: mol_type = other DNA
tgctgcggtgacacaaaataattacgccccagaccggcttttaaccggaggcgaattaaaaggcattgaaaaggg

SEQ ID NO: 274105 - DNA, 75 bp, synthetic construct
  source 1..75: mol_type = other DNA
atggccattaaaagcgctttgtctccggccattgagatgtatgacgcgctgaacgatgcggccgcaaaaggcatc

SEQ ID NO: 274106 - DNA, 75 bp, synthetic construct
  source 1..75: mol_type = other DNA
acctgatggtatttatccgtccgacgattatccgtgacgatgatgtttatcgctcactgtcaaaagagaaataca

SEQ ID NO: 274107 - DNA, 75 bp, synthetic construct
  source 1..75: mol_type = other DNA
tacccgggtctattacctgaaatatgctaaagccacgaatctggtggaagtgctaactggtgtttccgaaaagct

SEQ ID NO: 274108 - DNA, 75 bp, synthetic construct
  source 1..75: mol_type = other DNA
ttgttcacgccgtttcgctgcggtcgccacaaatttaagtacggggagagaactgtggtttaccgaaggcgatct

SEQ ID NO: 274109 - DNA, 75 bp, synthetic construct
  source 1..75: mol_type = other DNA
aaccgcaacagagattatgaccacgtctatccaggtgctggaaaaccgtcttaaacgaaaccgtatggctgggga

SEQ ID NO: 274110 - DNA, 75 bp, synthetic construct
  source 1..75: mol_type = other DNA
gtggctacgattgcattccaggggaatcttgcgggaataatgagaaagataaaaatagggctggcgttgggatct

SEQ ID NO: 274111 - DNA, 75 bp, synthetic construct
  source 1..75: mol_type = other DNA
taatcatgataatagcatgcaacatacctgcattatcgtgttacagccagaaatagctgagttagcagttgggaa

SEQ ID NO: 274112 - DNA, 75 bp, synthetic construct
  source 1..75: mol_type = other DNA
actggcaccgggtgccactactctggttccaaccgggctggcgattcatattgccgatccttcactggcagccat

SEQ ID NO: 274113 - DNA, 75 bp, synthetic construct
  source 1..75: mol_type = other DNA
ggcatgcgcgtctgaaagaaaggttaggcagcataacgacacgtcgggcggtgacagcgccaacggcaacagaga

SEQ ID NO: 274114 - DNA, 75 bp, synthetic construct
  source 1..75: mol_type = other DNA
agccccgttcccgtctcatcaggtaaaacaaatcgccacagactgaaccggagtggcgatcgtgcagcgaatagc

SEQ ID NO: 274115 - DNA, 75 bp, synthetic construct
  source 1..75: mol_type = other DNA
aatgcagaaatgttgatgggcgttatcgacgcagccgaagaaacgaaatcaccggttattatttcttttggcaca

SEQ ID NO: 274116 - DNA, 75 bp, synthetic construct
  source 1..75: mol_type = other DNA
gataatgctggcgcaggaagcgtagtgcattatgaaccctctaacgttctgctgatgactggtcgtgctgccgtg

SEQ ID NO: 274117 - DNA, 75 bp, synthetic construct
  source 1..75: mol_type = other DNA
gcactggagctgatcgatacttccggtgcgccagatattgaatggcctacgcctccggcagttcaggccagatga

SEQ ID NO: 274118 - DNA, 75 bp, synthetic construct
  source 1..75: mol_type = other DNA
cccgttgtattggctgtcagagttgcgtcagtgcgtgcccgtttggaatgatcaccattcagtcgttgccggggg

SEQ ID NO: 274119 - DNA, 75 bp, synthetic construct
  source 1..75: mol_type = other DNA
gcgccggtgatgtgccatcagtgtgaaaacgccccttgtgttggcgcttgccccgtgggggcgctgacgatgggc

SEQ ID NO: 274120 - DNA, 75 bp, synthetic construct
  source 1..75: mol_type = other DNA
tcagtttggataaacaggattacagaattacagaattacatctcaatgctgtaaataatcatatcgaggatgctg

SEQ ID NO: 274121 - DNA, 75 bp, synthetic construct
  source 1..75: mol_type = other DNA
tattcagggaaatcctgactatccagttattgtgggctcactatataatggtcggaataaaccgcctttttctct

SEQ ID NO: 274122 - DNA, 75 bp, synthetic construct
  source 1..75: mol_type = other DNA
ttgtaaaaacaattttaaaagacagttcatttgagtctccagaagctgcattatataaacaagaggcgttactcg

SEQ ID NO: 274123 - DNA, 75 bp, synthetic construct
  source 1..75: mol_type = other DNA
ttaagtaaagctgaccataactctttggataagttacacggtatgcgtctgagttgtgagattggagaacaaggt

SEQ ID NO: 274124 - DNA, 75 bp, synthetic construct
  source 1..75: mol_type = other DNA
caaggacagcaaatggaattagaaactgcgagacgcaagcagcatcagttacaagttattgaaggtgcattattg
